United States Patent Application Publication US 2007/0277267 A1 - sequence listing, part 4

SEQ ID NO: 20399 - DNA, 444 bp, Glycine max
tccccatcttcccagcaccaaccaccaacactccagaatctgcaaatgaggaatccggtagcttcatcagtgcaagctccacagcagccgagcttacagaaactgatccagatgaaatgttagtctcggttctaacccgcttcccaaccgatatcgcctgcttgaacaaaccactgattttcttatcaaaaccaggcactccctgtccagctttcacaacctgcttcacctgagcaagaatttgaccttccccaagaacaagtgagtcaagccctgacgccacttcaaatagatgctgcgcggcgtacgcgttatacagcaaaacttggtgctcccgaagctcaggtattgaaatccactcacctaaacaaaaaacacaaccatgagttttcctttccaaacaaaaacaagaacttagcatgggtaaatcacctatttcgtcca

SEQ ID NO: 20400 - DNA, 389 bp, Glycine max
agctttatagcctttgccttttctatttgagatgcgaggtggaataccatcaacgagcttccaatatatgacttaatgtggttggattctatacataacagaagatctcattcgagttgaccctgctcatagctgagatccatgtctcatcaagattgagctttctgcgatagatgattccactctttactgcatattaagaaccttcatctctttgagacacacttcaaaacagaatgatattctctaggaactcttgctaggcacattagataaagatcatctggaaggccacagataactagggaattagtggcttctatctcattgacactatctgatgatacttttgcatgatctaaatgctccattgtataattcagatgacc

SEQ ID NO: 20401 - DNA, 416 bp, Glycine max
tgtcaaatggaaggataggataccctatgctttctggaatttcaacccaacagtgtctattattaggagagaactctgcaagtgcaacaccacagaaaaacatgattggaatgcaagaatatatgacatagtaaatatataatctaaaaatttacttttgttataggttaatgcattaattatctcaagattaaattaacacattttttctctctctcttttcaacaatggttgcgagagagagcaagtaattttgagaactcaaaacttgaaaatgaatgtacctttaggtaaagttttgaagcatattatatgattgtgatttttttaaataattattatagaaggggttagtttacttttttgaatctgtcacatataaacttttttagattgtacttactaaattttgaaac

SEQ ID NO: 20402 - DNA, 392 bp, Glycine max
agcttgacaggttcatgtgcaggtgcaggtgctgctgctagtggaggcacttcaatttgcttgccagacctcatggtgatggcactcacatttttcgaatttttcacagtctgtgaaggcaatttgtcagaattttaggactgagcttggttcaactgagtagccatctgccccatttgatttatcagactctgaatggaggctcttgtctcttgctaaaattgcatattctggatggttatttgcctcactagctcttctaaggaaggttgcgaaggggccttagttgcttgttgtctttgttgttgttgttgttgttgctgcattggaggaggaacatatggcttgcttggaccaacaccattctggaaagcatggcatgctgttgttgt

SEQ ID NO: 20403 - DNA, 434 bp, Glycine max
  unsure at all n locations
tctnccccaattntctataaatagggggagaagtgaagtgaaaaatgattcagccccttaggcacttctctctctttcgaatttgcttggaaaaattgtttccgtgaagaaaatccaagccgaggtgcttccgaaacgtttccgtaacgtttccgtgaggaatttcgtgaaggtttcgaccgttcttcgacgttcttcattcgttcttcatcgttcttcgatcttcaacgggtaagtacctcgaaccaagcttttcgattcattctatgtacctgtggtggtctacattgtgtttcgtgtatttttattctcgtttcatttactttctatacccccttttgacgtgcttaagccattttatttaagtcatttctcgcttaaactaaaaataaaataaatttccaccgatcgtttgaattgtattatccgttaac

SEQ ID NO: 20404 - DNA, 394 bp, Glycine max
agcttcttcttatttagcttcaaccatgtattttggacatagtcaacaaatattttataacatgtccaccaatttgtaaatcttttcaataattcattatacgattccttatccagagattgcaacaacagttcccaagcatccatgacatcttgccactcttcaaccttattcatatggattttgcattttgtgttgacattctttgtaatatggaatagacataacaagttggttgaagaagtaaaaatagtctccaatgcattcatgaaagtaagatccctaacattgacaataacctgagacaacacatcatctttcacagacaatcctttcaccttacttaaagcccattaaaaaattatccgttgtctcataacttaaataagcaaag

SEQ ID NO: 20405 - DNA, 443 bp, Glycine max
tgcttgtggagcttctatggaggctggatctttgagcttcaatggggtcctttaatggtgattctccaccatggagatgcagcggaagacaaaggaaaagaggtgagaggaggcgccatccattaaggaataagccatggaagaaggagcttcaccaccaagatgagccttggataagaagcttggaaggatgcttcaatggaggaaaataaagagggagagaaagagagaggggggagcacgaaattgaaggaataaaagagggagagaagtggaactttgaattatgtctcacaagactctcattcatcaaagttacaacaagtgttacacatgcttctatttatagactaggtagcttccttgagaagctttcttgagaaaacttccttgagaagcttctttgagaaaacttccttgagaagctagagcttagctacaca

SEQ ID NO: 20406 - DNA, 385 bp, Glycine max
ttgcttttataggtgaaatcaggtgcagccatttcccttatagtcctctcacgaggtggaggttgtgccatgttctcagaatgcgcaaaatcagaatgctcagaattataatgctcaagatcaggatgttcaaaatcaccaataacagaatgcacagattcaccagttatggaatgctcagaatgatcaaaaaggtataaaatgatgcctaaataatctatgtaatgtcctatctatctcaggatcaaagggttgtaagtcagatggattgcctctagtcatacactacattcagcatgcacacaactagttgccttgtcatgtaaataaaggtgtaggtttgaactacagctaccctcaaatgatatctaaatgacttgaaatt

SEQ ID NO: 20407 - DNA, 432 bp, Glycine max
  unsure at all n locations
ngaaggacatgcacaaagtgtgactatatgatgtggtaatatggtgtagcaagcaaatgctcacctccccctctaaaatttaattggattgagcttctcccaattcaattaaatttattttccaacacacacatcaaatattaacttaatgcatatgaaattacaaaactacccctaatctaaaaactagtctaggtgccccaaaatacaagggctgaaaaatcatacatttgtagggtaccctacctacgttatggagccctaaataaaaggcccaaaaataatgaaaccttaatctaatatgtactaaaataagtgggctcacacttagcccatgggcctaaaatctatcctaaggttcatgagaaccctanggtcttctcttgcatctctagcccaatctacttggagtcttctatccaatgcccttgc

SEQ ID NO: 20408 - DNA, 381 bp, Glycine max
agctttttgtacaagcaatcaactcaaagtactgaaatttaaataattgaaatttaaagaactgaaacataaaaactaaaatttaaatgactgaacataaatcataaaataacttaaataaactaaaatgttcaaaatgcacaaatttaaatgtcctgctcctgtgattgctcttgtgcatgctcattgagatccaacaattgagcagctggtgaattctgagggatatgttgctctagctcagatgctggtgaagatggcatggattcatcaggtatgggtactggggatggctttcgaatttggtctgtggaagtctcatccttctgagccatctgtacacctgaatcaaaataaaagggctcaagaggagtgagctca

SEQ ID NO: 20409 - DNA, 438 bp, Glycine max
  unsure at all n locations
ntgagggaacccgccattnttcataatagaacactggtaatgtgtctactatcattgttatcatttctttctccgtctttgagggaaccacttgggctgccagatctctccacctttgggtgtattctttgaaagattcatgccccctttttgcacatgttctatagttgcatcctatccggagccatatcagaattgtactaatactgcctaacgaaggcaaccattaggtcctttcaagaatggactcgggaaggttccaagttagtgtaccaggtaacaactacgctagtaagacttttttggaagaaatgtatcagtagttcctcatcttttgcgtatgcccccatcttctgacaatacatctttagatggttcttgcggcaagtagtccccttttactctctggtaatcgattaccatattgttgtcatcgat

SEQ ID NO: 20410 - DNA, 386 bp, Glycine max
agcttcttgcgtagccgctcttggcgctcagaaaatcccaaaaacaaatccctcttattactagctattttgaattctttagttcctgaatgtacaaccttcaaattgttgcgcgttcccctctatgagaatgaggaggatcttcataggacttcatccagctgatgtttgtcgtcagtttcatcatccaccacccttttcttccgtgccttctcacgttcattgttgataaacccatatttatgccttcttcccttcatgtcttgttatatcacaactttagctgaatctcccatcttcaacatagttgaatctcctgtcttattctccaatgacacactttgatggcctgtatctcttttcttcgtatgttctactgcttcagc

SEQ ID NO: 20411 - DNA, 438 bp, Glycine max
tcggaagatagtgatgaggtacaagccctaaatgcagagcttgaaagagcccgagtagtcgaagagaagttcaagtccatagccatcaaagtctgaaaagagtatgatgaactaagggacgtcaatatggccaccgctgatgccttggaacgagaaaccaagaaggcccaaaaggaagaacacgaccaaagcaaagttttgaggggctttatagggcagcaatagtgagctcaagctccgaagaggtgaaaggaatcatcacgggtcaaaggcatgatcttgaaggacgagctaaaggtttgccttaagtcgaaaagaaatttgtcccaacagttaagcgagactgaagggaatatgtgggccatcatcgataagtgcaaagagaagctaaatctagcggcgactcacgagcataggctagaggatgagtacgccaag

SEQ ID NO: 20412 - DNA, 364 bp, Glycine max
cgctttcaaaacatacatctggttcagctactgttgcaattgcttgtatatttgtcatactacgtaaccatatggatgcacggacatttggagcggttgaacccaatagaggcactgcagcactgcttgaggacacaatggatttgattgtacgcattgatttgcttatttatatcaaaccaacggcacatgggacatgtctcatgaaattaagtggctcaaaggctaaggaagcttcacaaaaaagggtggagacctagaagatcaatatgattatgtaatggggatgctgaagaatatggccttgtaagatgctctacttcattcgtatcttcttgttactcacaaacgtgtgtgctacatg

SEQ ID NO: 20413 - DNA, 318 bp, Glycine max
  unsure at all n locations
catcaatggtgtggaactcacctacgcccatggtgccgacaccagtaggactggaagccgggacggagaaacatctcaaacttacacctgtgatgactcagcactcttgggcaggtgaacgatagtcctgtcatgcacgcagaaaatgagaagttangcccatcattactatgcaaaagcgtggatcgttggtggttgaactctaacttgagcaagtcatcagcagggagatccgctttgctattcaatgccacactacatgtgagagtatcatcatagagctagttatgagccgctgcgacaccctctatatcttgc

SEQ ID NO: 20414 - DNA, 470 bp, Glycine max
  unsure at all n locations
tggagccnctgannctgagcttgatgcatcgatatctgggcgaatcagctcggacccgggatcctctaagtcgacctgctgcatgttgctttttaaaagaacgcaaagcaaaaactgaatcaacacgcacaggaagttcagaatcctgcattctggatacaacacactgcaaagccctccggaagttgttctggtctgagaagttaatatgggcatattgtcctgcaacccatgctgcctgnttttcacaggaaaattaaagtgtagtctaaataataattccatcgcatggttatattgtattttagaaggagactggaataataataaaaaaattgcagcatgcagttctttgatctctctgtttttctccctctctatcctccctgttatgctcttccctctttatctttctgtctttcagtatctctctcttccccacctaaatcctatatcacatggggattaat

SEQ ID NO: 20415 - DNA, 433 bp, Glycine max
  unsure at all n locations
tagcaaagaaaaagcaattganaaagtgaaactctgtcttgtttatcgcttggaagtttatttttcaaataattgatataaaagtcaatgatagtatcattaaggcatttctcacgctgtaaaagctcaatatcgctctttttgatacaaacagcatcagggtccccctttggatacgcctttttaaatgcagcagaatcatgctccactatctggtctcccaagttaatttcatcttctgagggattgaagttgaagtagaaatcaaagaaaatgttagacttgatttttttttttttttatgagggaagaaagaaataaaatataagtaactactgtctaacataagtaacactgcacctaaagaatcttgaatctagacatcttgttataaaattacttttaaataagataatatgaatgctattttttt

SEQ ID NO: 20416 - DNA, 369 bp, Glycine max
tatgcttgtacgaatgttaaaaacatcttcttcaaccatgatgatcctcgactacatctcattgaatcacatgtacacttgtagctacaacgtatcaaacctttcaccaacaaaggtctgaagaccatagaacatgtccaaaatcttttgaagaagagaggaatcttctccaccatgtagatgctcatcttcatcaatgggttgagcaccctatttgatggaagcttgcttgtggagcttctatggaggctggatctttgagctacaatgagatcctttaatggcgattttccaccatggagatgcagcggaagacaaatgacaagaggtaaaaggcggtgccatccactaaggaatataccatggaag

SEQ ID NO: 20417 - DNA, 432 bp, Glycine max
  unsure at all n locations
tatgctgcanatatttacaatagacctcctcaacctcagctgcaaaatcaaccacagtagaacaattatgacctctccagcaacagatacaaccctggatggaggaatcaccctatcctcagatggtccagcccttagcaacaacaacagcagcctgctccttccttccaaaatgctgctggcccaagcagaccatacattcctccactaatccaacaacagcaacaaccccagaaacagccaacagttgaggcccctccacaaccttcccttgaagaacttgtgaggcaaatgactatgcagaacatgcagtttcagcaagagaccagagcctccattcagagcttaaccaatcagataggaccattggctacccaattgaatcaacaacaatacctgaattctgacaagctgccttctcaagctgtccaa

SEQ ID NO: 20418 - DNA, 380 bp, Glycine max
agcttatgttcttggagagcattcatccatagaataaccttcatttgttttactcattcattccttccccatacttgccctttttcttaggcacttagctttcatacttgaaattatagcatacacacttattaactgtatttatacttacaacttttttttttaacacagagaaccgaaacagtgtgtatatactattttctttgaccatttcaatccttacccagtgcctcccccaaatgtggaacaaatttaccttgataataactcctccaaatttgccttgaaccatcttctgtggatgatgctctcctacaacctataataaggtagcagaagatgcaattgaatacgctcgaggttcaatcaatcaatcagtt

SEQ ID NO: 20419 - DNA, 431 bp, Glycine max
  unsure at all n locations
taaagtatgcccgagtcattcatccctatgatatgttgttgaagtattggcgatcggaattgccattccttggattatagggttgaaccaagctcatgcttttacaaaaaggttcatcaagtcaagttgaaatatggaagtaaccgtcttgcaaaattggggcaaaagatgaatcgagtcacatcaatgcttcgtctacttccaaacatatttaggattattgatgtccttgttacttccagtttcaccttgacaaagatgtcatggaccatgttgaaaatctaaattgattcaaccccatatcctgcgtaaatattcgcaatacttcgactgtacatcattcgcatgcatccatgcttttcattggttgcattgctcattgcattctttccttgaaaaataaaatanaataaaatacaatgaacttatca

SEQ ID NO: 20420 - DNA, 391 bp, Glycine max
agcttgccacccagctcgcccaggcgagctcagctcgcccaggcgagcagggttgcttcctccagaagcaacagccttctggaggaatcttctggagggcccaagtgggcttggttgctatttgcatccccatttttactaagtacacccccctgccttttttggtgattcttttttcgtaaagttacggaaacttacgaatttcgtaatgatacttgttttctttccgtaatgttacggaaccttgcggattacataatcatccccttttttgacttacggaatgttacgggacctcactaattgtgcaacgatgcttccatttgatttccggtgtgtcacggaaccttacggattgtgcatcaatattttcttttgttttccggcatgt

SEQ ID NO: 20421 - DNA, 440 bp, Glycine max
  unsure at all n locations
tctcanaatatttatttattatctttgcgaattcttgttgcttagttatcagcaacaataaattttaaaaaaaaaaactctagattctcaagtcataggcatttacaacaacgatcacattagagaggttgaataatatattaataaaaaataataactttttgcaaataaaagttttatcacaggtttagaaatatatatgttttggagtcatctactcatcagtaaaataagtttaataaaacatagtttgatcatccaatatatctatgaagtaatatttccaaaaaaggtttttaagaaaacacttggtcagaaaaaaaggtaacaaagaaaactaagataatacttaataaaatggtttaatagagatatattagcatttgatttgtactagttcacttaaataaaactaccttcaattcttctttacacaacta

SEQ ID NO: 20422 - DNA, 390 bp, Glycine max
agcttctagattagtgtactaaacaaccgcggctccggccaagctatcttggaaaaagtgtattaatagtttctcatccctagagtgcgcgcccatcttgcgacaatacatcttgagatggttcttgggacaagtcgtccctttatacttgtcgaagtccggcaccttgaattttggggggataacaacatctgataccaagcaaagatccgcgaatggatattcaccaaagccttcaacagccctcaatctctcctcgaggagatcgagtttccatctttcttcgatcgtcgggggtggtccttctgtggacaagattattggttgtgctgtgaagttgggatgatgcaaagtgttgcgtgccggcccctcgacgaggatcggtgggta

SEQ ID NO: 20423 - DNA, 444 bp, Glycine max
tgtgatggttatgttctttggccatgtgattgtgatacatataacatttcaaaggctttttcattttttgggtcgttttatctcatcagtgccctttctaggaaaaggaaaaatcgtcaaaatgaaaatgagttggtgaaggagatcaataccatcacaattacacaatacctaacatgacccaacaagtatttctaaaatctaagtgatacactgatacttcttgttagcgtgtaagtgtgtaactacgaagacatttagaaaacgtgtcatcaagctgtgaaaatatgaggtgcgacccagtactggctagcagcaaaagacgtttcattatccctgcgagcaaagagaggctcttggcagctttttccagcgcaattgatgcttaataaaatctgttttatcttttttttttcttctagaatatagataattatgtttaaa

SEQ ID NO: 20424 - DNA, 396 bp, Glycine max
  unsure at all n locations
agcttgcatgatttacatctccccctttctcaagcaaattcttcttgatatcatcaaaatcttcatgatttacaggtgtcttgcgggcacgatccttgcaaacaataaatgacatcaaaaatcagttgagagaagggcatacttacctatgtcataatggcgtgaccttgctggggggaacgggcaccatgtaggactaacagaggcccgtaaccagagctgggaaccctagggccctgttggacttctctgggtccactaggtgtcttgtgggcgtgatccctacaaatagtggatggcatcagaaatcagttaagccacgtgcatacttacctatgtcacgatgacatgaccttgctggggggacgggcatcctgtangactgacagaggcccg

SEQ ID NO: 20425 - DNA, 446 bp, Glycine max
  unsure at all n locations
tgaagganaactggatgcgttggtcaacttggtaacctagctggccttgaatcagaaatctgtacctgtcgcaagggtttgtggtctgtgctcctctgctgaccaccatatagacctttgcccttccatgcagcaacctggagcaattgagcagcctgaagcttatgctgcaaatatttacaatagacctcctcaacctcagcagcaaaatcaaccacagcagagcaattatgacctttccagcaacagatacaaccctggatggaggaatcaccctaacctcagatggtccagccctcagcaacaacaacagcagcctgctccttccttccaaaatgctgctggcccaagcagaccatacattcctccaccaatccaacaacaacaacaaccccagaaacaaccaacagttgaggcccctccacaaccttccctcgaagaacttg

SEQ ID NO: 20426 - DNA, 377 bp, Glycine max
agcttattccacttttgtaccaagactgcagggagctgacaccgtcgcaatgcatgataagaaggaactttgactaaggttaacacgctaaaacttaaaaaactaaaaaatgaaagacaaaatgataaatttactcttccattttatctccaatatctaattaggtcatcattaatataattcacaaaattggtctttcaataatttaattcacaaatttgatcccttatcttataaaatcgagcaatgatggtctttcacatcacaacgatgactcggaacatgtgaccgttgacatcacctgttaacggtcaacgtgtaattgtgatctataaaatatctaatagcgtacgattgtatagaataaggggaccaaa

SEQ ID NO: 20427 - DNA, 382 bp, Glycine max
  unsure at all n locations
tgtcggcangnactgtgatgacgaaggacangatattgtaaccattatgctcgaagaagtaccacaatgcggtggcataaacgagcaccgggaccgctccacgccaattcattcacaacaccacatcaacaactaagcctttgccgagaacacgatgaaaggatgagaaactaaggcgatgccaagattgtcagaagaatgaagaatgaaggggtgataatgatcaatgacagccatgtgcatgagagaaaaaaaaagagagccaaccagacatccgaaaagtccccatataaaacgatgcataaggggatgacttatccagttatataagaacttaatcatcgatgatatccatggccgtgagagacaaaaaagaatcaac

SEQ ID NO: 20428 - DNA, 384 bp, Glycine max
ttagcttgagtttaatgcatatttatataaagatataattaaagtttattagatttaaagacttgtttgaaaaaaaataacttcgataattttttgaataagttcttattatataaaagctcattataaaagtaattaaaattcaactagtaacctatttgtgtttggatatacatatatgttgataagaattggatatatacgtgttgataagagcttacataattttgaagtgtttgcatgcaatgtcaagtgaacttataaaaggttatctcattttaaaaattaaaaaaaaagtgaaccatgcataaaagtaaataagaaattaaaaactaactaaacatttaatatactaacatcatatgtattacaaaaaatattcag

SEQ ID NO: 20429 - DNA, 429 bp, Glycine max
tataagaacaaaattgcctcaatcatttccaaatatacatgtgaattaggaagcatcgacaagaatcaagccaagactattgtgcaagcaatcaatggggcaaaacacaccaaatgattatgatgatggatggctcaaattctcacaaaggtaaactcatcactttcaaattgagctttcaaaactatcatgacatgtagaggagaatcaaggatttcaagtcacaagatatcaagaaattttattttcaaaacaattacccatttcttgaacatatcctataattcaaagaaaaacatgcaaagtcgtacatgcacacaaaattgacccaaaatattaaactaaaaatccgacgaaactaacaaattaacaaattaacacaactaacaaattaacaaaaccaacaaaactagcaaaaccaaagaacac

SEQ ID NO: 20430 - DNA, 382 bp, Glycine max
tagcttcttccccagttttctataaatagggggagaagtgaagtagaaaaggggttcagccccttacgcacttctctctctttcgaatttgcttacaaaaattgtttccatgaagaaaatccaagccgaggcgcttccataacgtttccgtatgtgatttcgcgaatgttttcgaccgttcttcgacgttcttcattcgttcttcatcgttcttcagtcttcaacgggtaagtacctcacaccaagctttttaattcattctatgtacccgtggttgtccacatttgggttcatgtatttttattctcgatttcatttactttttatacccccttttgacgtgcttaagccatttatttaagtcatttctcgcttaatctaa

SEQ ID NO: 20431 - DNA, 435 bp, Glycine max
  unsure at all n locations
tcagcccaagcctcttgaaatgcctgcattgcatttcaatgtatatacagatgcttctattacagtaccaacttggcaacttccacaaaaaataataagtataataaaaaaatacaataccaagtaccaacttaagataacaatttaattagaattatttactgtcattcaattacaagttgctatgtgtagtaaatttatcatttttttattcaaatttatcaatttttatcataattactataaaagttatatttatgatgatttctaattgattgatattataaattttttaacacttaaatgtgtgtgcatataatgtattgaatttaaaaacataatttatttgcatatttaatagcttcacaattaaaatacgttntctatacgttaaaaagatactatattaaatactaggtggtgctgagatcactg

SEQ ID NO: 20432 - DNA, 385 bp, Glycine max
agcttgtggaaatacttacacgactgagaaaaagtgtttctatgacggttattttaagcattctacgacgatttttgaccgtcatcgtatcgaacgttgtgaattgtcccttcatttttaagacggttccaaaaagaatcatcttagaaaagctatcattctatgacgatttttaggctaattatcatcttacaatggtatctttctaagatggttttcaacaatgtgtttaaaaaaaaacaaataaaaagatgagaattctaagacggtttttccacaatcgtcttaaaaaatagactttctaagacaattttctaaaaaatcatcttagaatgtacactttttaatatgatttttcaaataaccatcttagaatattttttaa

SEQ ID NO: 20433 - DNA, 430 bp, Glycine max
tgtaacgtggtcaggttaacaagaaaatcatggtttttcatagattcaaacacttaggttctaggagagcattcacccattccatgtctacttaaagaaccactttttctttgacctcccaacctttattgacatgccacaaataacagaacatagaggttttttttttttggtatgcatttgctttcagctcatatttccttttttttttacgatgataggtattacaaaagaatgtagttctgattctctatgtatctgttactcatattcctggacataatttaaccaaaacactcccccaaatttggaacaaatttgtcttgatccataataatgctctcctatagcctaagatagggtgcacaaagatagcatttacatttagcttagggttcaatgacacattcgttcacgtttaggctcaaaa

SEQ ID NO: 20434 - DNA, 389 bp, Glycine max
tagcttgtcacccagctcgcccaggcgagcaaggttgcttcctccagaagcaacagccttctggaggaatcttctggagggcccaagtgggcctggttgctatttgcacccccatttttactaaatataccccctgcctttttttggtgattcttttttcataaagttacggaaacttacgaacttcgtaacgatacttgttttctttccgtaatgttacggaaccttgcggattacataatcatgccttttttgacttacggaatgttacggaacctcactaattgtgcaacgatgcttacttttgatttccggtgtgtcacggaaccttacgaattgtgcatcaatattttcttttgatttctggcacgtcacggaatatcacaaat

SEQ ID NO: 20435 - DNA, 436 bp, Glycine max
  unsure at all n locations
ntcanaatggaagggatccttgctctctatcatgggaatgttcaattagttaaatttgtaattcattgcattcttctctattcatttgatgtctattcttggtctgtgtcattgttgaagcaatttgatttatggataaaaactttatttaggctggggacattcatcaaagaaaattagccatggtggccaggcagagaagtatgttcacgtgtcatagcctgnggattgggcattagttctcttcaaagtattaataatgcagctacgttgaagctaagttgaaatttttttattctctaaggatcaattgttagaaattaggagaagataaactggtggattatgataaacatcaaacatgaacttttaggttaaattgtcaagaatataaaaaagtatgactgtagcataatcatatcggtatccatggatg

SEQ ID NO: 20436 - DNA, 388 bp, Glycine max
agcttattctccttcaactgcacaaggctcttaatatttgaagagtatccttgtggaaccttcacccgacgaagacactgacaaaaacttatcttctccttcttggacaaagtatggcaggctgggggcaagtaaattttcttcccatcagaccttggatgcaactgtgatcgtatacccatatcagctagatcttgacgagtattcaagccatccttcatcttgccttgaatgttaaggagcgtcccaatcacactgtcacaaacatttctccacatgcatgacatcaatacaatgtctaacgtcaagatcacaccagtacggaagatcaaagataattgacctcttcttccatatgcaactctgactattatccttcttttgggtc

SEQ ID NO: 20437 - DNA, 439 bp, Glycine max
  unsure at all n locations
nttgttgagaaacaaagtggcaaacttataaaagtcttgataagtgacaagggaaaagaagtgagttttgagaggcagttgactgttggctatacacctcaacaaaatggtgtatctgaaaggaacaatcaaaccgtgatggagaaaggaataccaaaagaattatggcctgaggctattaatacaaccgtgtacttgttgaataggtgcccaacaaaagcagtatgaaatatgacaccatttgaagcatgaaatggaagaaagcctttagtgaaccacataaaattttttggatgtgttttgctacgctcaagttcctaaagaaaagattacaaagcttgaagaagcaagtgagagatgcatctttattggctatagttccgtgtcaaagggctatagactctacaacttgaagaccaagaaagtgatcattagccga

SEQ ID NO: 20438 - DNA, 302 bp, Glycine max
agcttgttcttcatgatatggaatggtgctactcatatgctatcttcttccactactgtgattttgtttgactaacctctcagcgaccttgctatcttggagaagctcttgatgaacctctcttccgaccgagcttaccctatgactctactgaggcgatgcacattgcatggtggaggcgactttactatgatgctatctctgtctcgactatcttaatatcctgccgctaagagatatggcccgtgactatgccttattgttccatgtattgacactgctctcaatgctacaccttgatg

SEQ ID NO: 20439 - DNA, 363 bp, Glycine max
tgccgcactcgcatacaggacctggtgtgctattagaagggagatgggtgccggctcgtactagatgtcacatggactacggtcctactgccaccaccgaccttttcaagagatctctaattagacctcaggataaacgagcgggcgacatgtgctgcgatcgatcccactacactgccgtcagactatgcatgaatatcttccgatccatgttgtacttaactcccatgtgtcacgactaaccactatacacttgactatatgcattaaccaaagtagcctgactaacgaccctgatagacatgtgcggtatagtgtagcgccacaatggaacctcttatataatattgatataccactcag

SEQ ID NO: 20440 - DNA, 376 bp, Glycine max
  unsure at all n locations
tagctttacaactagtttctgtcttcactattttattcttgtctggttgctcaaattaaatgtattgttctaattttttaacattgctatttttctttgtatgggaaaacacacccaactcaattttttttgcttttgatgtccaccccaacccaattatgtgtgtttaagttgtattaacagtgtcatttgttatattttgtgataactgggaatttcattctgtgattgtctgtttgtgtactgggctggctntattgcagatgcaaaggagacactctcttgttttgtaatttccttctctctcactctggtgtcttaaagatgaacacgtatgtatctaccagttttgattgctttcaaaattaatacacta

SEQ ID NO: 20441 - DNA, 430 bp, Glycine max
  unsure at all n locations
tcaataactacattcacgactactctcaaaatangggagttaagtagtcatgcgtttacacatcaagaaagacacactcatccaagatatatatatggtccacaaggttcttgcaacactaatccacgcatcaaaggagaaatacgctaactaacaacatacacacaggatgatagaggttcgttagcacattatcaatcaatatcaagactacttgcatcacccaatggcttgccataatgtccaaccgcacttcgcaaattatagagatggccagtctcataactcatgactcaacaatgaatttatggtatagcaaacattaaggatgcgcggcacatacaagcattattattaagtcttatttaatcatgtaggagaaaatacgaataaaaattcaagcatgctcaacaaaagtactcataggtaa

SEQ ID NO: 20442 - DNA, 382 bp, Glycine max
agctttgatccctcttcaagagtcgaatttgcaatccaaagtgattgattttgttcttccttctagaggttggaattttcaaaatttttgcaaggcccttcgtttggatatttgtgatactgtccatgctttgttccctcccatcattactcatcctaaggatgtggtagcctgtaagcataaagttgatggatccttttcgttggcttctagctgtgatgctctttggaaacgttgttggtccaaatcctctttttgaagcaatctggaagtggaggggtcataaaagaaccaaagtccacctttggaaaatggctcatcaagccctgcttacgaatcagagtagacttagaagtcacatgactaacaatgctacttgtct

SEQ ID NO: 20443 - DNA, 427 bp, Glycine max
tatcagagcaatcagaggaaaatcttgaggaatgttagggaaccattagagatgtcgctatcgctgccggaacacacgtgagcccgcttagaggtaagggatgagttattcacaattgaggaatagtgagaacatgtgtagggatccttagaatatcaattggaatgggtttttgggggtgtttttgcaaattttgattctatttttacaattataactgtgaattatacatgtttgacaaatcaattgatatcccaatgagaaatttccgtgaaattgatgtatttttgtgttgagtatgaaccctaaaaattgagtttttttttaattaacataaattgtactctaactaatattctctttgattgtttattttatacaaattattgtaattttttctatatgattatgtgaaccatttgaggga

SEQ ID NO: 20444 - DNA, 384 bp, Glycine max
agcttattttctaagagatcattcatccatagatcagaccttacttgttattaattcccaacccaacacttgcctttttttaagcacttagctttcatttcattgatttgcagcacacacacttttatttatacttacagttttttttaacacacaaaactatgtgtgtatgctgctctgctttgaccatttcattcttttacccatgtctcctccaaatttgggacaaatttactttgacatataactccgcaaaatttgagacaaattttccttgaaccaaactgttctgtggatgatgctctcctacaacctaagacaaggtagcaggagataaaactgttaagctcaaagtccatcaatcaacattattcacttaaaagt

SEQ ID NO: 20445 - DNA, 443 bp, Glycine max
  unsure at all n locations
ntagaccaaagcaactcanaatctaggtatctaaaacctctcaatntagtggattttcaaggtttgagaagtgaaaatgagaatggggtaaatctggagcaaactctcacctcacacaagtctataaccttaatctaaacttggtcaaactggttttacgcctaaaattccaccaaatcaaaatttgactcctcaacacccaaattttaccctagaaatggctcttgccttcactttggtcttttgtttttctctcttgcacaacccaagctntctcataagtcctaaatgacatttcaaactangactaactcactntaacctccaatttctactgaatctagatttagcctttcaaaccctcaaagcatcacacttttccactcataacactacattctcactttctaaccctagattaactctacctttcatccctagca

SEQ ID NO: 20446 - DNA, 436 bp, Glycine max
tgtaatatttgagagaaaaagagaataccagtccatttcctgtgccaaatacaagtctcccaagcaccaatacaggaaaattaggagctaatgctgttacaagggctccaacaagatatactactgcagatccaatcaactcctttcttctacctaaaaaatcaaatttgtcacaccagtttcacccgggaaggaaatagcaaaaatgatagctgacaaaaggggaaattacctaagaagtcagcaacattgaaggccaacacagagccaattaaggcaccatacaatgatccactagtctgcaaaagacagtaaatgccataggcccaggttatattcaagatcaatatatatatggagtaatttcaattgtgaacaatgtgtctaatcataaaaatgacaataagacaatgtaccatgaccaaagaaaaacaac

SEQ ID NO: 20447 - DNA, 361 bp, Glycine max
  unsure at all n locations
agcttgttaaagaatggatgagtttgttagtnattcatgaaaggctaattttaaagattcaagttcattgagatccacctctttttttttattctgattcttcaaaatttgtattaaccatcagatatacgctggcttcctcttctccttcttcatcagaggggggtgtcgtcacatcctcccaagtgcttatgagacttatctcttccttggacttttaatgcttggtatagtcctttgatttctcaagttcttagcactttgacttgaagtgtccaagcttctttcattcattgcatataatgagactcttttatgtgtcctttttctccttgaacaccttcttggaggatttattcca

SEQ ID NO: 20448 - DNA, 433 bp, Glycine max
  unsure at all n locations
tgcacttcttcactctcttcaggaatttcaaccttnttcccactaagatctnttagctatgggagccaagttatcgcttgcgttctagacttcaaccatttgtaatagctgcctatgacaccattgctacttcccctaagctccttatttttcctttccactctattccatgctttacgaattctctgaagtatcttcgcattagcttcattgaaacctcacgcgatgaaaggctcaatgatttcctctgatggcgcacctctcatagggtagcctaactgtcttatggccaacacgagattataattaatacaacccctcgtccttatcaaagggacatttgggaatccttcacatgatcataacactcctgcccnccccccgccttcttttcatcgtgggaaccaactaatggatgctcccgtcatgccta

SEQ ID NO: 20449 - DNA, 370 bp, Glycine max
agcttgtatagttcccctatttatgggtatttcttattaaaatgtgtaaataaatcttggtatatgggtaacgtttgctctaaaacattttcattagaattaaagatgaaatctgtgcattttcacgtgaaaaccaatgctaagttttgaattgcaaaaagtagtagttgggctaagctcaatagtttggctaagcacataatcatcactaagcgcagcttcaacacacttagcgcaaaggagaatcttgcaaagcatcaacatccaagccgcgcgctaagcacagcatgtgccttcagccaggctaagctcgggacatgccttaagcccgaaatcacttactcgcgcttagcgcagcatcgcgatttca

SEQ ID NO: 20450 - DNA, 459 bp, Glycine max
  unsure at all n locations
tatccttatggctagcctccggacttcactccccgtgccacccataagatttaagccaagcccctactttcgaggggcagctcccaccttatgacgactatcccgggcaagacgatgaggaaggagatacccatctcggtcccctgctccacctcaaagatccgtccccccatgaactaccccaaccaaacatagtccgccatatcccggcttcacccacacccgtaaaagaatctgttcccttcgtggaagataagggaaagattgaggcgcttgaagagaggttgagagcagtcgagggcctcggcaattacccatcctcggatctagcagacttatgtctagtacccaatatcgtcattcctcccaaattcaaagtaccggacntttgatagtacaaagggacgacatgtncgaaagggcatcttcggatgtattgccgaaaaatgggggagtatt

SEQ ID NO: 20451 - DNA, 415 bp, Glycine max
  unsure at all n locations
agctattaattctagtctttaaactcctcaagcatattctaatactcatgcatcttttacattcaaaactggaaacttagattcctaggcatgagtcatccttttggcgctttagtctagcttctacaaactacccacacactcacaatgcgcantaattgattcgcaagctaagttccacaaaatcatgcgcaaatggcattgaggcatttcaccgaacacttggtgggctcatgtttaagcctgaaaatcaagggaatgggggacatgtggcatgcccctttatctcagaatgcaccctatgcctaatgccataccctacaaccccataattcaacanaaacaagacatatttcaaggataaaatcctcacattctgagcaaatacatgcaacttagaccaccaacatatatc

SEQ ID NO: 20452 - DNA, 415 bp, Glycine max
gatctggttgaaatatcttgctagaaggtgtttctattatgcttgtattccaagcattcctgacatacttcacttggcacttgaatgtgtggcaaccagtgcaccatattatccctatgtacgaagtgtggatcctgaaattgagatgcccaaacttataatgccaaagccacttacttttgctcactgttgtggctagacattcatgtcccataccattaattcctaccttaaaggatgtgttctttgacataagatcctttaaaactagtcttttcttgttgtcatacaccattagcacattatcctccattttcatcacaaatcctttctccaggaattgaccaaggcttaagagattattcttcatttcgggcacaaaaagcacaccagatatgaaagattgtttaccatc

SEQ ID NO: 20453 - DNA, 491 bp, Glycine max
agagatgtgatgctgatgacgtccgtataatacaaactctgcgtgggcgtgacaacatctgaggggtgctacatctttcgcttatagccgaagtcacacggtcatagcgaggcgattatgtcatgtgagattatatcggagcaatctctgaccttaacgaagctgtcaactttatgtatacttggggcacttgggaacacgcctaatgagactcgaatatttttcaataatatggaaacaatttgtgatacccgaacatcataaatagaggtttttggcttgtgaggtgaataatatttgaacaccacatttctatatacaccatagacaaaacggattataatgatctaataacagtagtgctgatttacaattattgcagtttcaatatgatattgattgccaggcgaccgatcgatcgaacactagccggatacgccacatttatccgaggatgtggcacttaatcaacgatgaaacttgcttaatcg

SEQ ID NO: 20454 - DNA, 385 bp, Glycine max
  unsure at all n locations
agcttgtttgcagaaacttaaccttagacagcataaacaacgtgaagctcctagtacaatattacatggaaacgcccagcaattcatgaaatcaaactgaattttgatgcatcggttaataaggagaaaggaattggcatggaaatggtagcccgaaatgactatggagaggtgcttggctcagctatttgtgtaatgaaaatgaatgtggaaccaaagattgcttaagccctatgttatagacgggctatcaaagtggcgggtgacttttgtttcacatgagtnggttttgaaacggactgcctcaactagtccaacgtaggaaacgcaacttgatcacatgcagagattatttctcgagcattcattgtgattgcatctcaac

SEQ ID NO: 20455 - DNA, 442 bp, Glycine max
  unsure at all n locations
tggagaggatgcttcaatggagganaagatagagggagatatagagagaggggggagcacgatattgaaggaataaaagaggtagagaagtggaactttgaagtatgtctcacaagaccctcattcatcaaagttacaacaagtgttacacatgcttctatttatagactaggtagcttccttgagaagctntcttgagaaaaattccttgagaagcttctttgagaaaacttccttgagaagctagagcttagctacacacacccctctcataactaagctcacctccttgagaagcttccttaagaagattcctaaaaaagctagagcttagctacacatacctctctaatagctaagctcacctccttgagatgagaagctagagcttagctacacacccnctataatagctaagctcacccccatgacanaaaacatg

SEQ ID NO: 20456 - DNA, 393 bp, Glycine max
tgtttgcaacttgtatgcatgtatcccaccatcgtctcatagtagaacacaggtaatgcgtctactattattgctatcattatcctttccatcattgtgggcactacttgagataccagatcccttcacctttgggcatatactttgaaagattcatgctctctcttacacatgttctataacttcattctattcaaaaccatatcagaatcgtactaatattgcctattgaacgcaaccataaagtccttccaagaatggacccgcgaagatttccgattagtataccatgtgatggctgcccaataagactttcctagatgaaatgcatcaccattttttcatcttttgtgtatgctcacattttctaccatacatcttaagtgattcttg

SEQ ID NO: 20457 - DNA, 427 bp, Glycine max
  unsure at all n locations
tcagtgtcacaagtttccgaccacgaccatggtgtatttttcacaattgtagtgtggtttctggctgatatctttaggaagctataaataggggttgttttctgtatctatgaaatcttttacctaattacgaatttaagagtnttgaagcgtggataccaccatgaggatgaattatggtcatcattcctaccttgccggtatgtctatgctaatttcatatatgtctttgagttgtgctttgatcatgagcgaccagtcaccatagtccaagggttatgatgtaactatccaatggtatccctttctctgatcttaatgaaattcctcactcttttatgttaactaatactcttcttattcttattgtcaattgggaattagtcaatctaagcttaatgaatgtattgtgggatgattttgttgt

SEQ ID NO: 20458 - DNA, 375 bp, Glycine max
tgttgcaagcttgttcaacctatcaagagtcacattctaacaacaattgttccagcttggagaattcatcaatggatggatacatggagctataagaacaattgataactgtttaatatgagttattttgataataagaatatattgaaaatatttttaaaaatatttatttaacagttattcttggcttaaatattaagatttgatatctttcttatttatgacgttgccatatgaaaaggagagattaaaagagataaagatcgaaaaaatatccaagatatcaggaaatcattactagctaaacaaatcctaaagatatcacaaatatcaataatgaagatttttaacatcacgcccaagtcactacaacaa

SEQ ID NO: 20459 - DNA, 452 bp, Glycine max
  unsure at all n locations
tgcactactagtagcttgccaacgtggctccaaaattgttatgatgagagaagtgacataatggaagatcaggtttgtatcataatagtcacattttgactcattaaaaaaaattattaataggatttattnttttaaagcatttctgatttttttccccttcttaaacaggataatgcaaggcttaaggatctgtgcaagacatggaactcattatgcaactcaatacacagacacccttccattaatgagaaacaagttttctttgtttcatcatctccttcatctcccacttctgtntcctcacatgaaagaaagtccaactttcaccacagccacctaaataggccaatcatttctgaatcagaagagtcaccaaatgaatgtgagtatacactgaaactggtgatgatggctatgatagcaactttataatgttcatgccagatagt

SEQ ID NO: 20460 - DNA, 401 bp, Glycine max
  unsure at all n locations
agcttgttacaagattctccttgcctggcacttcaaaaccttctggttgggtcatatagatgtcttcctctaaatccccatgcaagaatgcagttntaacatctaactgctccaagtgaagattctctgcagctactatgctcagaataactctgatggtagtcatctttacaactggagagaagatctctgtgaaatcaattccttgtttctgctgaaaccctntcaccacaagtctcgccttgtatcttcttctaccgtcagattcttcctttagcctatagacccacctattctgtaatgccttctttccttctggcaatntagttaaagaccacgtcttattcttttgaagggatgtcatctcatctttcatcgctagctcccactcaatagtgtca

SEQ ID NO: 20461 - DNA, 412 bp, Glycine max
  unsure at all n locations
tctccgtcttttccctataaatagggagcaaagggaagtttttagacgttcaaccttcctggtatctgaggatcacttgaaattagtgaaaaaaaatcgtttccgtgaagaaaatccaagccgaggcgcttccgtaacgcgtctgaaacgtttccgtgggtgattccgtgaagattttccgccatctatcgttcgttcttcatcgttcttcgtcgtcctgcggtcttcaaccgataagttcccgaaatcgaacttttcaattcattctatgtacccttggtggttcccacttgtttcgcgtacttttattttcatttcatttactttctgtatccccttttgacgtgctttagtcatttatttaagtcattntctcgcctaatcaaaaaataaaataaatntccaccgatca

SEQ ID NO: 20462 - DNA, 381 bp, Glycine max
  unsure at all n locations
tagcttcttttggactttgaacaagccatcaactcctctttcagaaccatgctatgtgctcgcgactggtccctttcttcccttcgcaacttgagttcattattgctaccccatagagctccgcgaaatttgttccggccgtactcttncttgcgagccctcttggtctcttgttcaaaggcttttgcggtaattgcattctcttcccgtacccgcgcactccttccgaatgtgtgtagcagccaacttgaacttctccttggcgagtattgcctttcctaactcgcttttgagagcttggacttcctcgtcctcttccggcgcttcaaaatctcttcgctgacgactnttaacttggcgagccaatctaaacctcgtatg

SEQ ID NO: 20463 - DNA, 373 bp, Glycine max
  unsure at all n locations
tgaaggacatgcacaaagtatgactatatgatgtgtcaatggngtgtagcaagcaaatgctcacctccccctctaaaatttaattggattgggattctcccaattcaattaaatctattttccaacacacacatganatattcactcaattcatgtgaaattacaaaactacccctaatacaaaaactagtctaggtgccctaaaatacaagggctaaaaaaatcctacatttctagggtaccttctctatattatggagccctaaatacaaggccgaanaataatgaaaccttaatctaatatgtacaaagataagtgggctcatacttagcccatgggcccgaaatctaccctaaggctcgtgagaaccct

SEQ ID NO: 20464 - DNA, 339 bp, Glycine max
tagcctttacattcaatttcgagcgtctcgatatattacgggactcaatcagacatccgagtaaaaatttattgtcgcttgaattggctcagaggctcaacattcaattttgagcgtctcgatatattacgggactcaatcagacatccgaataaaaagttattgtcctctgaattggctcataagttgaacattcaatttcgagcgtctcgatatattacgggactcaatcagacatccgagtaaatattattggccgttgattggctcacaggctaacattcaatttgagcgttcgatatataacggactcaatcagacatccagtaaaagtattgc

SEQ ID NO: 20465 - DNA, 342 bp, Glycine max
  unsure at all n locations
gtgagcaaattcaaacgacaataaccttnttctggatgtctgatngagncccgtaatatatcgagacgctcaaaattgaatgttgaacctctgatgcaattcaaaggacaataactttttactcggatgtctgattgagtcccgtaatatatcgagacgctcgaaaatgaatgttgaacctatgagccaattcaaacgaccataactttttactccgatgtctgattgagtcccataatatatcgagaggctcgaaattgaatggtcaacctcttagccaattcaaacgacaataacttgttactcggatgtatgattgagtcccgtaacatatcgagacgc

SEQ ID NO: 20466 - DNA, 410 bp, Glycine max
  unsure at all n locations
agctttgacttgagtcatcaagagattataaatatgtgaccatggcatgagtttcaagatcatcaatcatctttgaatcatctatctttcaatcttctttcaacattcttcaatcaatcttttcaactctttctacagcaatttcggattcatcttctcttcatctttcttcaaagttttggtcaatactttctctttcaagaaaagttttttgataaaaaaccttgtgctattcatctntntcattctcttctcctccatgtcggccttcatctgcctttgcacctcctgaattcttttgtgtctctcttctcccttacacaagattctaaggactaaccgcctgagaatcttttggatcttcctttcccttaagcaaagagttcaagggactaccgcctgagatattt

SEQ ID NO: 20467 - DNA, 443 bp, Glycine max
tcacagatgaccagtccatttatcatcccaccactcacgccaacttatgagttggagggtagacccatgcatatgtttagctcttggcttctattccctatgtcaataatcgcgaaaaagaagtttactacaggaaaaactacattaaaagctctctattccgtctagtctgatattacgtaaccagtccatttcgtatgtctttcgaagcgaggggccgggtttccttgtttcctttcggaggacatggtacatgccctgcaagaaaatagtctttataataataattataataataagaagtcctgttctctctcggcagctaccatcggatcatcggagttgggcagttacatctttcattcaataaccagtggttgaaggttgattcccaacaagagcaacatgttcaataagatgggagctaaaggaagactcacata

SEQ ID NO: 20468 - DNA, 253 bp, Glycine max
atacccttgtgtacatcgctccatgctattgagaggacgaacacgaataataacttacacatacaaaaaaattcccataaataatttacaatttataaattaaaagaaaagaatggtagaacaaacctgagagggtaaatgggttgtcaacctcaagtccgtgactgcaaatcattgaatccaaaccttagcttcaaatgacctgcaaatgtaggctggcccacaaatacattatctatcacacactataact

SEQ ID NO: 20469 - DNA, 454 bp, Glycine max
  unsure at all n locations
tagcccatcatcaatattgatttcaagaaacaaanaagcaagtatatatatcagtgaactgagccagaccaaggaaaaatacatcaaagaaaataaataatctagtatagctaattttataatcagataaagcatctaagacctgctgccatgtggtatcaacaagaggcagccgccgagcattgccagcatcaaaatccagtacaccataatccctcaaccgaatctacacagcaataactaaaataagaagtcttttgagaattaaatgcatggcattatctataagacacattgttcaaaatgagacaaacccaaaggaaggcacggattctttgcaaattcccaacaccaacaccaagagcagcctaccattagataaaaaagcaagcagaaattaagtgttgataacaaaaacaaattcatgcttgctctcttatatngaatatgaaac

SEQ ID NO: 20470 - DNA, 408 bp, Glycine max
  unsure at all n locations
agcttctaagaagatgtactactcacctaatgtcacctaacccacatgttgcatctctaaactcctataaaacttcatcttcaagatacactctctttgtctttgagcttcaatactccctttttggccacataactaactacttgagttttcagttaagtatttctaagtgatcaattgtcactcgctaaacaactatgaaactctaccatcaccaaacaactaaaagactcactcaatcaatgcctacaaagctactctaaccatccatgtaagtttgagcaaaacaacctctaaattaatttcaaattctcatctaataattntttttggatattaaatcttaaaaatctatctgactttaaaggatgcatgaatgtgcactcaatagtaattttcttattaata

SEQ ID NO: 20471 - DNA, 439 bp, Glycine max
  unsure at all n locations
tccatcaaatgaaaaccttgatctttgttccctctatcattatcattagtaacctagagtatcgatgtcaatattattctcccaaccatccttattttctactntcaccactcattctcactatcatccaagtatatccacaacacatgcaccacatctagtgaagggctttatgaagaacttggcaggttctcagataacattgcaaacaacatgacaattttaactgattcctttntctgtttgaatgagttgcangaatagaggttgcaaggaatttgagtttaatttggctactatgatatacagttttttattttcaactagatgtgcatgaaataatgcactcactctntatgattgcatccttaaaataaaaccacacagaccaccataacaaanaataaagttcttcaatgttcatccatacttaatcctt

SEQ ID NO: 20472 - DNA, 350 bp, Glycine max
  unsure at all n locations
agcttctactgtgaagctatcttcgtatcgagcatggccaaatatgcatgacagtcggtttgcgctttacaagttgccattgcgggttcccaaagatgaccaagaatatgctggtttatggggaagaacttttggttggcctcctggaaagccttctgaagacaagcctggaaaggctttattctttcttctgctctcttatgaggagttccagggacaacagcttctcattgcaaccaaaattttggaaggcacacactatgtgttacatcctaacggttcancaattgttacagcaaatatcaatgatccttcatcccaacccttttcctgggacactgatgcagact

SEQ ID NO: 20473 - DNA, 450 bp, Glycine max
  unsure at all n locations
tatcagcaacgaactgaggagtcccaaactcttcaagagtcttaagacgaactgngtttaccacaaccccaatattgttacttcccatatctgcctcttgaaacaacacagttgcccctgctttatcaacctgttaaaccacattagcaaagactgttcctttaagagaaaaaaaaaatacaattattcatgatatgcttattntgtcttcgccataaacacaatggtaaaaaatcaagggatgtcagtttcatgtcatttctgtttcctgctcatttcctaacagtttttcctttatttttctcactttctagttgaaattgtagttatattattggtactattgaaatattattttatattattaataaatactattatataacaatcaattcccacttgcaacaagtatctatcaattntgctaactctctaattgtgtgaatcact

SEQ ID NO: 20474 - DNA, 406 bp, Glycine max
  unsure at all n locations
agcttatgctccttcaattgcacaatgctcttaatatttgaagagtatccttatggaaacttcacccgatgaagacactaacaaaaatttatcttctcctttntggacaaagtatgacaagttgggggcaagtaaattttcttcccatcagaccttggatgcaactgtgatcatatccccatctcagctagatcttgatgggtattcaagccatccttcgtcttgccttgaatgttaaagagagtcccaatcacattgtcacatacattgttctccacatgcataacattaatacaatgtctaacgtctagatcaaaccagtacggaagatacaagagaatggacctcttcttccatatgcaagtcttaactttatcctttctttgggtctttccaaatacagtat

SEQ ID NO: 20475 - DNA, 447 bp, Glycine max
  unsure at all n locations
atacttagcttctgttccgttcttctaagaacatcatatatagggctagtgattttatattataancaaccttatcccaccattgatcatccaacaaagtatctttcacaaatttaacctttgcaacatcatcttccttataagaagaccattggtcactaatgatcatctcttggaggcctttcttcaatagtntgaatctcttgagcattacaatagtggaggcaaatttttgtggagcaatggaaagcaatttcaatgaatcgaatgaattgaaaattgatagtctcatagagtgactcatgacanagttttcacaaatattgcatcatccgcatattgngtgatccaagaacattcttcataagcaacattatctttttctgtattcttggctgcacatatgttcttcanagcangaattaatgtatggacaacacatggagt

SEQ ID NO: 20476 - DNA, 357 bp, Glycine max
ggtttgcaagcttgttcttcattctctacgccgacgccactggtattcaaatgcatatctgcaatatctgcctgcttccacactttaactaatgtgtactttgataattggatttttgcattgcttgttttttccctttcattgcaggtatatccagagcacatgtgccacctctggggaaggactatatgaagggctggactggctctccaacaatatagctaacaaggtatgccttgaaaatctgcatcttttgtgttcgttgcttgacctgtgatactctgatttctggttacttttctggatcacgcctaagggacattttgtggaatgccgctatcttcttgcttgctttac

SEQ ID NO: 20477 - DNA, 455 bp, Glycine max
  unsure at all n locations
tccttcactcttccagcacgaccaaacaaatccaccacgctgccatatatctctatatctggtgttatattataataactggtcattaatctaaaatatctcagcccttcgtccactagaccagcatggctacaagcacttagaactgccataaacaccatcttatctggtttaatatgatgagaatcatgaaacaggccaaatacagtctaaaggcccaagtggagaaggacgaaggcccaagtggagaaggacaaagcccccgagtggagaatgatgaaggcccaagtggagaaggatgaaggcccagaggcagagacactatcaagactattaattgttgctgaaggcccaaactaatttgaaggcccaagttaaataagtttctagttataatttatttttattggaattttggcccanactgtctagaaagcccatgtctatttttatct

SEQ ID NO: 20478 - DNA, 387 bp, Glycine max
  unsure at all n locations
agcntttacaacatccaagcaaaacaacattcacacagcacaagctatcacagcccagcaaaacagagcaaaggcagaaaactctgccaaaacaccaaccaaaaatcacagctgttcccactcaaagaccccagtaacaatgtccttcgatccaattcgttaaccgttggatcgactccaaagatttactggaagtctatagtgcataagcctacattatgaccggtgggatctactagcaaacatncagaactcattctacattactctttccacaaccagcaaatacatggatgtttctgcacttgtgcagaattctgctggcacaatttacagcagaatctgcacaaagagcatattgcgaaaccacacttccctcatcaatct

SEQ ID NO: 20479 - DNA, 402 bp, Glycine max
  unsure at all n locations
tgtgcctttacganaaggttcatcgagtcaagttgaagtatggaagtaaccatcttgcaaaaaattaaggcaaaagatggatcgtgttacatcgctgcttcgtctactgccaaacacatttagggctgttgatgtccctgttacttccagtttcaccttgacgaagatgtcatggaccatgttgaanatctaaattgattcaaccccatatctagtgtacaaattcgcaatacttcaactgtgcatcattcgcatacatccatgttgttcattggttgcattgctcattgcattctttccttgaaaaaaaaagaacttaatcattgttatatataaaaaaaagaacccgctntacggcgcccttaccaaacctgtgctagagctagagtaatgggtaaagca

SEQ ID NO: 20480 - DNA, 337 bp, Glycine max
tgaatatatttatgggctcaatactgcattcaaataaaagactatcgacgttcaacgttcataggatgatacgcttcaaatcttgagcgaggtaatctcttacgggacacacccggcatccgagtaaaagctatagcacttgatcttctcaaagttccatgattatttcgaggactggaaacgaacggagactaggtacgtccagtcaaatttatgtggatgactttataagagcttctggaaaaattcccggtctaaagacacggcatcttgagactctaggaacagcacgtagtgaaatacttgagattgtagaatatcacaatcgggttttcgc

SEQ ID NO: 20481 - DNA, 306 bp, Glycine max
  unsure at all n locations
tctatataagctgaccgatcccatcgataaacacattgngttttgtatacagaaaaccacagtgcatctattttatattaccgagagtgactctcctaaactcttgagtgatacaagatcaccctggctgcatcaaaggactttcacaacctttgagtgttgccctcgcttgatacagtgactctttgcttacttacatcttcaccgctcgttctttgcaaccaccattccagaaaatccacctctggccagaattatctcgtggccataactcccattntacgcactcatattaagagattcttg

SEQ ID NO: 20482 - DNA, 403 bp, Glycine max
  unsure at all n locations
agctttttatatcgngtnccttactatgtgaagctggcatcctcacatggcacgtgaagtttatgatgcatataaattcataaaaggatgtattttagtttgtcccacttgttcttcgtgaagttaagtgaaactcaaacggtcaggatgtgaatagggagatataacgttggtacggagggaggaataagttgtgggattgaatctttttactaacaagaattaacaactaatatttgttgataaaaaatcaataaccaatgtgaatagttaaaatcaaagagagaaaaagttatattttatcatattattctaacggttaatactaacctgcattgatttttttaaaaaaagtaacctggatcgacattagttggaaaattaagtgtttttctatgaagtg

SEQ ID NO: 20483 - DNA, 429 bp, Glycine max
  unsure at all n locations
ntactcatgaccaccaatggtctatatatatgtgacttattcacgaaattactcagagattntcagaacaacaaagtgtttatcctctcaaagagcaaattcattttatcctcttaagaattccttggccaattcaattgcaattcattaaggaattatttgagtgctcaatctgtaaaatccatctctttctagagagatttgttcttcttcttcttctcattttctaagggattaagagactgtgagtctcttgttgtaaaggatctctaaacacaaaggaaggattgtccttgtgtgtttagaacttgtaaaaggaatttacaagatagtggaactctcaagcgggttgcttgnggactggacgtatgcacaagggtgtggtcgaaccagtataaaactgagtttgcattctctcttcccttaatc

SEQ ID NO: 20484 - DNA, 299 bp, Glycine max
  unsure at all n locations
agaaaggaaccatctnctcgacaattctttaatctcaacaccaaaaacagctggtgcgagcgccctcactaagactgggcggctggcaagtctctcggagagataatcagacaggtcattacaaagatgaacatcttccgaaagaactaattcaagacctcctttaagaacggaaatagcaagattttttcatgaccctggatgcattaattctcagagtcatatgagaggctatcaagtcggtcaaccaacggtataagagaacttaagaacactatgctatctatatcgacagcgac

SEQ ID NO: 20485 - DNA, 399 bp, Glycine max
  unsure at all n locations
agcttatagtacttcacttgaaacattgtctttcttcccgactaactagatgcatgcaaaagggaaagtaatcaactcatttcttctgcataccaacatcataggatcaagaacaccgtgacaaaagtgtgatttgaggtatgtttgttttatatctgccgataactaccttgcaagccctaaaatcatacaccatttgtaattcccatcatgtcatgaatatgacacataaaatgttaatcaatctcattctgacaccaatttcaataattacagtataccaacacatattatcactcaagtgattcaaccatgatacatangattgcactatagtcataaagagaacacatttaagaagaatgacatcctaatttatatcaatactataaagctcta

SEQ ID NO: 20486 - DNA, 435 bp, Glycine max
  unsure at all n locations
tctagaattgcatgtaaaaaatatatggcataatttgctgtaaaggaagctttccactcaagagtgtaagtacatccattccatgttcttaggatcaacaaaatgctttaatgtgctagagctgatagtgtttagtctggaatcagaggtgcatctagaaagtcacagggaacatgtgctagagtcaccattggtcaggttctttntcttatgtgttgtaaggagaacaacaatcatcatgcacaaaaggctctttgtggtgctaagtttaagttccctagtcgtcagaagatcatagttagctggtgtcagaccctaatttcatatgggggcaatcatttgcaaacatttggattctttctagccgaattgagctgcttaacacttgattttgcaatcatttcaccttngaagtcatgattttgcacactttga

SEQ ID NO: 20487 - DNA, 395 bp, Glycine max
  unsure at all n locations
agctntactaatagaatcatcttgatatgactgttttggaagtcctcttacgaggctatgcttttgaagctttgagattaacctccagctagcatggtcaaacttcttattccatacncagtaatgctctttgactaaaagtaagcatgacaccttttgattggatagatcaccaagtttaatcttatagtgatttccttgtctcttagtagacaagagtaaagagttgtcctttgtttggatgatacacatatccttgttaaagttaaaggtgacattgtatccactatcatacaattgacttatgctcaacaaattatgcttcaatcctttaacaagtaaaacattattgatagaaggataataaggaatacaaaccttacctacacctatta

SEQ ID NO: 20488 - DNA, 462 bp, Glycine max
tatgctgcaaacatctacaatagacctcctcaacctcagcagcaaaatcagccacaacagaataactatgacctctccagcaacaggtacaatcccggatggaggaatcatcccaaccttatttggtcgaatccttcacaacaacagcaacaacaacaaccttactttcaaaatgctgttggcccaagcagaccatacgttcctccaccaatctagcaacaacagcaacaacagaaacaacaaacagttaaggcccctccgcaaccttcgcttgaagaacttgtgaggcaaatgactatgcaaaacatgcagtttcagcaagatatcaaagcctccattcagagcttaactaatcagatgggacagttggctacacagttaaatcaacaacagtcccagaattctgatagattaccttctcaatctgtccagaatcacaaaaatgtgagtgccattacattg

SEQ ID NO: 20489 - DNA, 404 bp, Glycine max
agcttttagtttcaagattcaagaatcaagattcaagaatccagattcaagaataatccaaagattccagactcaagaattcagaatcacgagaagactcaatcaagataagtattaaaaaatttttcccaaacattgagtagcccaagaagttttcacaaaatcattaccaaagagtgttactctttggtaatcgattaccagaagatagttattgattaccagtggtttaaaatgttaagatttcaaattcaagagttacaacttgtgtttaaaccattttaacttgtggtatcgattacacaatccttataatcaattaccagtggttctaaatggtttaatcttcaaaattcaaaatgaagagtcacatatgttgatgtgtaatcgattacaccttaatg

SEQ ID NO: 20490 - DNA, 453 bp, Glycine max
  unsure at all n locations
ggcttctacaattntgagattgnggactcaaatgaccagattgttaaaaaacgagggactcaattggtgaactaaatgggaggggggctgatttagtgagttggaataaataaggggactatttttgtaattaaacctttaattttcatatgtttatttattctcaatttagttatattgttaattttcagtgttatgatgttatttgccaaaaaattaacttaataaaatataataaataaattaatagtgattacaaataaaataaaatattttttatttttatacttgataattatttttcatttaattgtcatcatcataaatcattgttatcactataaacaatgtcatttattatcattacgctaataatgtatatttagtataacatctaattaaaaattcaaaagtgctttcagtgattaaaatgacaatattgtgtaagtccat

SEQ ID NO: 20491 - DNA, 260 bp, Glycine max
agcttgttttattaactttctttcgatgatatattcctgtataagtttaagtctggggtgcttttgcttctctggttcattaattctcatcaatatattagaaagttacctaagaaatggacaaattcacatgtaatctgttgatttacacactttccgcccgctaaaaagtaataactcggttggatttgatatacaagaaaaacattgaacatcgatgaatatattaattctttatcttcaataaaacatcttcaaat

SEQ ID NO: 20492 - DNA, 451 bp, Glycine max
  unsure at all n locations
cttgagggtgcgtagcccaccatcttttcatagtagagtatcgattatgtgtctaccatcacgattatcgtctgcctttccatcattgggggtaccacttgggccgccagatccctccaccttttgggcgtgttctttgaaagatccgtccccctttttgcaaatgttctgtagttgcatcctatccagaaccatatcaaaattgtactaatactgcctaacaaaggcaaccattaagtccttccaagaatggactcgggaaggttccaagttagtgtaccaggtaacagctaccccagtaagactttcatggaaggaatgtatcaacaattcctcatcttttgcgtattccctcatcttctgacaatacatctttagatggttcttgggacaagtagtccncttgtacttgtcanagtccagcaccttgaacttgggacgggtgatgata

SEQ ID NO: 20493 - DNA, 417 bp, Glycine max
  unsure at all n locations
agcttcttatccaaggctcatcttggtggtgaagctccttcttccatggcttattccctaatggatggcgcctcctctcacctcttctcctttgtcttccgctgcatctccatggtggaaaatcactattaaaggacctcattgaagctcanagatccaacctccatagaaaccccacaagcaagcttccatcataaccactctatttcccctaccagggatatccaacttggtcactgcactccccatgtacatacacaacatacatcatcacaatgacattatcaacatcaacaacatctcatctcaatgtcattatcatcatcaacatgatcccatctcaatgtcattctcaacatcaacatcatctcatctcaatgacattatcaacatcaacatcatctgatttcaatgacg

SEQ ID NO: 20494 - DNA, 453 bp, Glycine max
  unsure at all n locations
gattcacattctccccctttgtcaagcaaattctttttgatatctatcaaacctgcatgatttacacaattcccagtaatttatacaagtttgtatgttcaagctgtcagcaccagcgatttcaacctagaaatcaagaatagtgtttatgttgcttaaggcttggatagttacaatttgtgtttgcttatgctcaatgatcttgaataacaaaattcaagagaacttaagacttattttgattcacaaatccagccacaactcagcaccacaactcaacttcatcataggaatcatgtaggaaacttagaaaacaaaaaaaagagttcaacaacaagactacttctaggaattgatttagaacatgttatgaactaaataacatgcatgaattagactcanaattctaaagataggctaagaatgacangaatacatgaacaaatgtatcta

SEQ ID NO: 20495 - DNA, 363 bp, Glycine max
  unsure at all n locations
agcttatagaggaagcttcaatggaggaagagaatganggaaaaagagaggggggcacgaaattgaaggagaaaaagagggagagaagttaaactttgaagtgtgtctcacaagtttcacattcatcaatgttgtgacaagtgttacacatgtttctatttatagcctaggtcattaaataaatgtaaatttcatttacatttcatgtgaatctaagaggaatattccaagaatatgccaaagacgtcttagcatattccaagaatatgccanaggcatcttagcatattccttttagatgccacaagaatggaaggaatgtgtgattctagcacatganaaaggaatatgccacaagaatat

SEQ ID NO: 20496 - DNA, 447 bp, Glycine max
  unsure at all n locations
tctagattagtgtaccagatgaccgctgccccagccaagctatcttgaaagaaatgcatcaacaacttcttgtccctagagtacacacccatcttgcgacaatacattttgagatgattcttaggacaagttgtccctttgtacctatcaaaatcaggtatcttgaacttcggagggatgacgacgtccggcactaagcaaaggtcggtcatgtccgcgaacggataatcgccgaagccttcaacaactctcaatctctcttcaataagatcaagtttcccctttccttctactgccaggggtggccctattggctgtgttgggtggtttcgaggttctcctgtgatgttgggctgaggtagtgcgttgggtgttggtccctcggcggggaacggngagtaggaatcaatgtctccctgagcatgcactcgacgatcctcgtggacc

SEQ ID NO: 20497 - DNA, 338 bp, Glycine max
agcttctacttatgtggcaaggcgggcttccttcaccttcttgtctccaacgcgaactttgaccatttgtcttccttcccgcgatgcttcttttcatgtctgcctgagtgggcttatagcctaaaccatacttcccacgattaccttgagtatttatcagtctagttatgccgccggtgttttttcctaaacccatcccgggctcataaccgttccccaacataactcgggccatcattaccgctgcatcggacagactaagctgcccaaaaagggagtccacggaggaaatgctgaccacctcaaaagactggagaagcagttctaacgattcttct

SEQ ID NO: 20498 - DNA, 429 bp, Glycine max
  unsure at all n locations
tggatcattgagctagtntatgccattggctctcgtcaattggttgatggatatacaaagtattctttccatgcttgtcattgagagatcgtgaggggatccaatgatgtaacattgtgattttcttaatgtgtagttaggtgattntaattagattgcaagagaaaataaatttaattttcatgtttaaaaaaatataataccttgtgttgtttaagtgttgtgggttaaattgttttgggcttgaaacatggttttagagggctttaatattgtaatgtttgataaaaaaaatggtaaacaatggagacatgagcaatgtaattcttgtactttacccaaaaaaaggatcacagtttagtgattttgtgtgatgagaatctctccctttttcattantaccttcttntcttcttccttgcttttcta

SEQ ID NO: 20499 - DNA, 392 bp, Glycine max
ggcgaatcagctcgacccggatccttaagtcacctgctgttgcaaactttctgtcctatatttgatattccataaggttccagatattccattcatacatctcttaaaggacgggtgtgattaacttattatacgtttaaaatttacttattaaatgataagtctttaataattaagagggatttttgttcaaaataatttggcagaaagccgtttataaagtgaaggatatgatctatctacctgttcactgggatgtgatttgaattaacatagttcaattaataaaaaattaaccggggattggttgattaaattattataatccgactaattaactaatttttctgggttgttgatccgttttgcgattttaaatttgagagaatatt

SEQ ID NO: 20500 - DNA, 443 bp, Glycine max
  unsure at all n locations
tataagcctcattatctggggtggtagatttcccacattttccagcactctccacccctgcaatagtactcacaagcaccacanacccaacaaggcatagcaacttcacacaataagtacaaccctccattatttctcaatattatgcttatgtctctctattagtgaaatgtttctctgttgatttcacaatgcaataacccctttggctctcatggggttttatagcctaacatgctccaaaaaagtgcttggccttgtcaccctctgattaatggagcttgcactaggacaaagggtgagttttattattgcaccacttatgaacatanagcaggtgtatacacanatttgctccacttatttgtccaatcaatgtaggtgtgtctttgccaacacaattctttttgttttcttacttccaaatgtagcattattcacag

SEQ ID NO: 20501 - DNA, 389 bp, Glycine max
  unsure at all n locations
tagctttcgtncctgagttntccgactatgctcttgtgtggtggaacaagctacaaaatgagagagcaagatatgaagagccaatggttgatacatggacggagatgaaaaagatcatgaggaagcggtatgtgccggctagttactcaagggacttgaaattcaagctccaaaaactaacccatagcaacaagggggttgaagagtatttcaaggaaatggatgtgctcatgattcacgctaatattgaagaagatgatgaggtaactatggctcgcattcttaatggcttgactaatgatatccatgatattgttgagctgcangagtttgttgaaatggatgatttgcttcacaagatgtccgatccactagcataatataacgag

SEQ ID NO: 20502 - DNA, 419 bp, Glycine max
  unsure at all n locations
ntcatagttcaattccgagcgtctcaatatattatgcgcttgaatcggacctccgagttacaagttatgaccatttgaatntctcgagagcttccgtatttcaatnttgagcgtctctatatgtgatgtgcctaaatcggacatccgagttaaaagttatgtccatttgaatttctcgagagcttccgttgttcaatttcgagcgtctctatatgtgatgcgcctaaatcggacatccaagttaaaagttatgaccatttgaatttctcgagagcttccgttgttcaatttcgagcgtctcgatatattatgcgcctgaatcggacctccgattgaaaagttatgagcatttgagttgctcaagagccttcatatggtcaattctagcgtctcgatatattatgcgcctgaatcggacc

SEQ ID NO: 20503 - DNA, 396 bp, Glycine max
  unsure at all n locations
agcttctcccccaattntctataaatagggggagaagtgaagtgaaaaagggttcagccccttaggcacttctctctctttcgaatntgcttggaaaaattgtttccgtgaagaaaatccaagccgaggcgcttccgaaacgtttccgtaacgtttctgtgaggaatttcgcgaaggtttcgaccgttcttcgacgttcttcattcgttcttcatcgttcttcgatcttcaacgggtaagtacctcgaaccaagcttttcgattcattctatgtacccgtggtggtccacattgtgtttcgtgtatttttattctcgtttcatttactttttatacccccctttgacgtgcttaagcccatttatttaagtcatttctcgttaaccctaaaataaa

SEQ ID NO: 20504 - DNA, 452 bp, Glycine max
  unsure at all n locations
tgtaggattatggngtacccgtcatatgtggtactatgtggcgatcgggcgatggtgcaagtcgactctccacatccacaaatcacacataaatccaccatccccagttgcccaccttcaactgagctcacgtactcccacgtagcccttatcctcgttcttctcaacaccgggtccccatcaatccctccaagcttccacaacatccaagcaattcaacatccaaacatcatgcactatcaaaaacaagaaaacagggcagaggcagaaaactctgcccaaaacacaaaccaataccacagctttccttactcaaataccccagtaacattctcttcgttctaattcgttcaccgttggatcgactctaaaattttactggaggtccctagtacataagtctacattntgaccgttgggatctgctataaaacgtncagaaccaaatatgt

SEQ ID NO: 20505 - DNA, 350 bp, Glycine max
ctttagcttttattacccttgcatgaaatgcgtttttataatcttatacatgaacataagtaatggtaaatatatcaacagtgtacaacattgatatattgtcttctaaaaaattaatacaaatagtgccaatccaaattgttatgacttttttctttgattattaaattcctattaatagtagtggtagttcaattcccactgccttttttttaatggtactcttttaaaacccgtttcttgtcattttcataagtttttaaacaaagaattgcatggttctttcaataatgtaaattagttttactcatttcgcactcaattaattattttttacctattttttattc

SEQ ID NO: 20506 - DNA, 431 bp, Glycine max
  unsure at all n locations
tatgcacagacagaatgatatgtagaaggaggtactaggtatcaaacacacgggttccatgctcaactagcagaaaatgtggagcaaacagcaagcttgctttaaggttggtgcacgtatgaagaatagtggcgtgaaagggagcaaacctggattgtgaaaatggaatacaaattgcagaattgttaatgatttctagaatattccctttacacaaaatgacaaattccgttattagggaactggtataaataaaagcatttgtaaaccattgaggggcatgaatgaatgaaatagcagatttcttcccttagctttcttcttctcttcttcttcttggaggtgttgaccctcgaagttcagctagcttttccctgcacgtnacacataattacagtanaaatgaagagtaatgcatcattaaggattga

SEQ ID NO: 20507 - DNA, 318 bp, Glycine max
  unsure at all n locations
agcttangctattggagggagaataaaacaatccaaaatcaatcgtacctttcaagtnacgcaaaattctttttgcggcttttagatgacgagaggtcagagcctccataaagcgacacacaatctcccaccgtattatagaatatcgggccttgtattggttagataccttaaactccccacaagactcttgaagatcatggagtctaccttctctccttcatcagactttgataacttcaagccaccttccataggtgtgttcacgggattgcactcaagcatattaaatgtcttcaacacttcttgtgtgtacct

SEQ ID NO: 20508 - DNA, 437 bp, Glycine max
  unsure at all n locations
ntagcacaagcganacatcagttcttnttggagaatatattaatgcacgagctngaattaagaggaggtgttgcaatataattcaacgctctaaatgtccacgtattaagctaggaataaatcatcatttggttgcttgaactgtaagaagatttggtcaagtctgttgctagattttagctatattgtacgtgaacatgtgcgtcagtttgagtcagttttatgccacttccttaggtgatgttagtcgtggaaagtggagtcagttatcaagttacttgagtctatttaagcattgttatgtactgaagtctattagagagaagaacgttgatttcctcattgatgtggctctcaagattgatatcttatccctctaattgtacatataacagacaggctaaaacatacgttttatgcattgaaatgtaattaaa

SEQ ID NO: 20509 - DNA, 357 bp, Glycine max
  unsure at all n locations
agcttttgtccacaagaaaaccacttgaatccgttcaaaggttcaacgccttaaacggtctttttacttttaaacgattaaaatgaacctttagaagtctaaaatcaaacttatgtgtaattttctttcatcaaagaactatgtaggtctgagtttctcatcgcaattgaggatacataggagcaagagccccgctattgtcgacccccaaaagataaaaaacataaaaaatggaaaataaaagaaacttggtgtcatgattttgcacacttgattaaacgctgntgtcccttgtgacggacgcgtggggtgctaataccttccccatgtataaaaaactcttgaacctttatttct

SEQ ID NO: 20510 - DNA, 440 bp, Glycine max
  unsure at all n locations
tgtccttggtttagacatgattggtacatgatttgggacttgtaggattcaatttgggcaaaattggatgagggaaagagtggttttcgaaatctgcactttatgcagaattttgctgttgaaatgtgcagcaaaattttgtataagtgcagaaaaaagcttgtgtatggctggttgtaaaaagggtattacatatggggttctggaaattttctaagagatcccaacggtcaaaatgtagacttatgtactagagacttccagtaagattttcgagtcgatccaacggttaacgaattcgaacgaaggaaatgttactggggtatttgtatgtgaaaagctgtgattntgggttgtgttttgggcagagttttctgcctttgccctgtnttgcttggttttgttagtccatgatgattggatgtggaattaatnggatg

SEQ ID NO: 20511 - DNA, 455 bp, Glycine max
  unsure at all n locations
tgcagagctcaataattgattggatagagaatcaaacttttatttatctgttagatgacattctgtttactcatgatcaaattaatttaattgttgaaatattttataatttacaacaataagtatcttaacattttcagacaccaaatttgatattatatattaaggttagttcaaaattgtagaaacttcagcaaaattttgaattaatattctcccatttcatgtttatccacatagtttctaactaataataagcttaataacatatgcataaatgttgaacaattaaaatgctaaaaataacatgatttatgtttttaatatcaatggctnggagttcttgatttctaacaacgaatagagaatagcactacagcaagcacactgaaggaagagtattcataaggtgcaacatcagtataaaatgggatagaagtgataaaccaccatca

SEQ ID NO: 20512 - DNA, 396 bp, Glycine max
agcttattcctctcttgatgtgtggattagtgttgagaaaacctttcgaatcgtatatatgccttggatgagtgtgtctctcttgatgtgtaggcacatgactacttaactcccttcttttgtatgtagtcatgaatgtagttggttaagtttgtgattccttaatacatccttattgattggttaattcttacttcttatatgtacgttatatacttggtataagaaccttataattctatgtatgctagtagtatagtgttctgccttaattgcatagatattatggttgttgtgatttccttgtttgagcgatgttaattcttatagttcatgacatgtataagatagattcataagaatactccgtgaccgaccttcagtctagtacaccca

SEQ ID NO: 20513 - DNA, 448 bp, Glycine max
  unsure at all n locations
tgtgngcccttttgttttagaatatgttatgctgaagtttgtaatagttggttgattataagattcctgatatttttattttattttattttggcgttccattttacaagacttttctttttcaattggcgtttataattatacgacgagacaatagagatgttgtgatctgttggatatatttggaaaacaaggagtgtttattcataaacaacttacctaaatcaatcaagaaaaattgagtcggattcgaattaaggtttgatgagatcaaaactgaaccatagactcgatatattaaccgatgaacacgatcttccttttatgttgataatgtgttggaacatccatgaggtatacaatgcctctngaatttgtaccgtttgacaccctataagtaatataanatctatatgggttattacttggtatttgattaatataaaat

SEQ ID NO: 20514 - DNA, 391 bp, Glycine max
  unsure at all n locations
agcttcacatgataatctcctttgtctttctttgtttgccttctaaggcaagagaaaaaggtcaataaagcattcaatgcatcatttaatctccttcgccaactggtcatttggacaagattaagcatctttcttttctctctttcttgtacaccaaatcttgtggcagatcgaggacatgtttcctttgtgttagaaaagatattgatattctttcttgttcacatgcatgtcttttgagaggtagtangtgatacttttcattgtcctttctgtctgctctttctcatgaagatcccaagaatataacatattgtatactntataaataatcctgcatttagcatagaatatgttntaaacttaagtntggtaaataatgatatataat

SEQ ID NO: 20515 - DNA, 455 bp, Glycine max
  unsure at all n locations
tatcgtaatttattacaccaattattttgaggcaatgattgattctttcaggagtctctactattatcaattacgaggtgatatgatcgattacttctcttttaaaagtgtttcagaagtgattaagaacactttaattgattacatcaagaatctaatcgatttcattgttcttgatagctttgcagtttttgggaagaatactttattcaattgaaatgataatataattgatcacattgtatatttaattgattaaagatggttataactgttttctctataaatagccaccttgtgttctcacttctaataagttctaacaacttttgaatgagctagaattacgagctgataataatgatacaaaaaaaaagaagaanaagtgcttagaaatattgtgaatcataacttctaatattggattatgaagatcagattatngaaaataagtt

SEQ ID NO: 20516 - DNA, 408 bp, Glycine max
  unsure at all n locations
agcttatatgccattcggaataagggctcgtgtctgtgttggacaacacttagccatgacagaactgaaggtgattttgtctctcattctgttgaagtttcacttctctctctcattaagttactgccattcacctgccttccgtttggttatagaacctggccagggagttgttcttaagatgacaagaatttaagcaacaatgtaacagatgaatgatgaaaacatgcaggtaatgggatggttgatatagtcataagacatcatttctctagctgatgaaatgctaataagttttttttttatccaaattagataataatattttttttttatgaaaggaagatattctcatacttcgaagttatgagacgaagatgatcaannattatcatttgatgaaatttt

SEQ ID NO: 20517 - DNA, 450 bp, Glycine max
  unsure at all n locations
cttctccaccacgttgaagaccgngacatctctctttttcttttccatcgccaccttacctaggtacgttttggcaaagctttggtgttctattgaatacttangtcaacttggggaactcatggttaacccaaggaccttttttggtttctactgcaaggaatggggaacttgtaatgacctgaggtacgtttgttgtcgtggtcactggtgctgaaaggctctcattntgattgaggcaagtcgtgctcactttgtagttctttgaatgcttaatgtctgttgtanaactanggtagcatagtgtagtgtagtgtagtgttcttcattntgtttgaggtagcgtagttaacttgtatgttcattctgtntcatgtacattgttacaaacctgcatttacggannaatagttaacttgtatgaactntcttctttntctatacatgtct

SEQ ID NO: 20518 - DNA, 378 bp, Glycine max
  unsure at all n locations
agcttgtatgatngatggctgaggggaagcgggcgcaagatntcgtgtgtgggttggcgccgaggattaagagggttgcagagcgcgctgatgagcgagcgcgtaagatgaagaagcatcatggcgttaagttcagttggattttcaataaagaattgcttttgtgaaatttcagttaagacttaagagataagagatagaggtcaacgtgagtcaacaggtttttggctttgtgactattttgagtcttgtttgtacgtggcattntgagtacgaataatgaacaatntaacatggattgcgtgtaatggacattgttggatccatggttgttgttctggtggatacaaaaccagtaggaactttttgttgaacgtt

SEQ ID NO: 20519 - DNA, 443 bp, Glycine max
  unsure at all n locations
taagctccttcaactgcacaaggctcttaatatcttaagagtatccttgctgaaccttcacccgacgaagacactgacanaaacttatcttctccttcttggacaaagtatggcatgctgggggcaagtaaattttcttcccatcagaccttggatgcaactgtgatcgtatacccatatcagctagatcttgacgggtattcaagccatccttcgtcttgccttgaatgttaaggagcgtcccaatcacactgtcacaaacatttttctccacatgcataacatcaatacaatgtctaacgtcaatatcacaccagtacggaagatcaaagaaaatggatcttttcttcatatgcaactctgacttttatccttcttttgggtcttcccaaatatagtattcatgtgttgaacccgctcatataccttctcaccagtcaatg

SEQ ID NO: 20520 - DNA, 376 bp, Glycine max
  unsure at all n locations
agcttctcaacctgtccaataagcaaatcttcatatccagagatgtaaaattctttgagaatatattccctttcaaaaaaccagcaatccaacaacagtgacagagagttatttcacccctatgccacccctaatctcatcacctccaataactcagatgacacatatatcacatccatcacagacacaccacaacatactccttaacctgctcagttagatcctactacaaccatagaacctgatattcctattgaagaacccttacaaaggtctacaagagttcanacactccaagatatctcactgattatcactgctacaatgtgaccaacacanataaagtcacctaccctatacaacatcatttagacta

SEQ ID NO: 20521 - DNA, 451 bp, Glycine max
tcttccggaagacaatggaattcttccggaagaatattcttccggaaacattccggatgacgttcttccggaagttgtctgtgagtacttccggaagacacaaattattcttccggaagaagattcttccggaaactttccgaaaaaattatttccggaacttttctgggagaaccttcttccggaagaataattgctgaagggcagtttcgccacttcactgtttgctgggtgccccagcaataatgctgggtgcacgtagcaactccctactttgttctgtcaattggtaatacattctctattcttttctgttctcacaacgggtcgtggacttcctctgctggctgttgtgtgtcctaagtccgtattctgttttacagcctacccttttggttcatcctattccttgggttttgttctaataaggttttctttgggttaatacaat

SEQ ID NO: 20522 - DNA, 345 bp, Glycine max
  unsure at all n locations
agcttttacacctttaatcaagcttagttcaactgcaaccatcagaacgaaaccctattctattacccggattatcatacacaatctcaaaggttttttgttggacgttcccaaatatggttatttgactatcatctttattgtgaataaatgccaaacaagactgtttatcatcgaactcatagagtacccctggcgggtgtaagtccactgtgacgccaggaaagacgaatgacatttcaggaatnggataatgatatccagtaagatcataacacgtgtcaaatacattgtgcgaggnggcagtgggatagttggacaaacgctgctgaaatactgaacgga

SEQ ID NO: 20523 - DNA, 342 bp, Glycine max
  unsure at all n locations
agcttgttgatgctcttaactaaataattgcttattatgcatgcagtcagctcttcctccgcagcagattgcttggtgtggaatggatgctgtgctgctgtactgggatgatatgcttttaatgatgagtcctgagggagagccagttcactacctttttgatgaaccaataattcttatacctgagtgtgatggagtaaggatattgtccaatactacaatggaatttctacagcgggtgcctgattccaccgtttcaatcttcacaattggaagtacatcacctgctgctttactatatgatgccttggatcattntgatagacgaagtgccaaggtaga

SEQ ID NO: 20524 - DNA, 452 bp, Glycine max
  unsure at all n locations
tgttcatccacctactactatcgtacaaggcacaaccactctttgttgtggtagtcattacactcaacgcttggcccctctaccactatagattgtctttatttttcataagtgtgactcttgatctagtttcaatttctccatgattaaaggcatttctttatgttattgttgtttctttcattttctttgttgataggcttcaaaaaggaacacaatgacctagtgtcttgaccaggttgatcactggtcagatttttaaaactatggttttaggttttggtttgggataaaaggagaaaatttctcctattggatcatactcaagggtcactaaagagttcacaggaaagtctttccatcacaaaacaaggctataacatgcatatnttaacctatttaatttattaagacccaatgtaaaactcatacccacatgtgctataatacta

SEQ ID NO: 20525 - DNA, 396 bp, Glycine max
  unsure at all n locations
agcttgtggactataccttcgaccgaacacggccgtgtttctgtctaggcccagattcaaggcgggctgcagcaccggctccgcttccctaactgtactggaggcggttgcggtggctntatcctctatggttctctggagttttaacatgacctccgagatggaagccatttgatctttcaaggccgatagatcggccttcatctgttcctgcacgccctcttcattatccatttttctggatcgagtgttataggggtgccttggtgttttcttagttatgatgaaactcctaaagaaataaacaacggtgagtatgccaccaaaacatgagtatgcaaatggatgatcggagcacttggatccaccccaagattnttagataacgtaatgagt

SEQ ID NO: 20526 - DNA, 434 bp, Glycine max
  unsure at all n locations
taactcatccaaacatggcaagttcaacatgctttcaacttatttcttcacaaataactatcatgaagcagaaacctagcaaaactacccatcatatctcccaaaacccaatacccacgaaaatcaagtgagaaagaagtctacccaaacctgaaatttcgaggtcccacacatagagatgcgcttcatgactccgaaaatgcctttctttcgcgatttggagcagaaatgggcaccaaaggttggagctttaatggagtttcaatggaggatgaagaagaagacaatggcaacgtgagagagagagaaaagagctttctgaaattttctttggctgagtgaggagagagaaaacagctctctggttaaaaagaanagctttttctcttttctattattntaatttaacgtatgccacatgtctccatttgagt

SEQ ID NO: 20527 - DNA, 300 bp, Glycine max
agctttgttcgaggtacttacccgttgaagatcgaagaacgatgaagaacgaatgatcaacgtcgaagaacgggtgaaatctttgcgacatttctcacggaaaacgttacggatacgtttcggaagcgcctcggcttagagtttcttcacggaaacaatttttccaagcacattcgatagagaaagaagtgcctaatgtgctgactccttccttcttgccttcctcccctatttatagcacaataggggaggtggttgcctgccagctcgcccaggcgagctcagctcgcccaggcgagc

SEQ ID NO: 20528 - DNA, 296 bp, Glycine max
tcatgatgaatcaagattgattcaaagagttttgatgatttcaaagatgatgacaaagagctcaatagtcaagagcacttcatgataaaaaagatgatgatctcaagaatcaaaaaatgagttcacgattgaatcaagaacacttcaaggttcaaatggaaatttgatttccagaatcaagaattaagtttcaagattcaagttccaagaatcaatatcaagattcaagaatcaagagaagacttaatcaagatacgtattaaatagcttcttcaaaaactgagtagcacatgaat

SEQ ID NO: 20529 - DNA, 399 bp, Glycine max
  unsure at all n locations
agcttcttatccaaagctcatcttggtggtgaagctccttcttccatggcttattccctaatggatggcgcctcctctcacctcttctcctttgtcttccgctgcatctccatggtggaaaatcactattaaaggacctcattgaagctcanagatccaacctccatagaaaccccacaagcaagctttcatcataaccactctatttcccctaccagagatatccaacttggtcactgcacttcccatgtacatacacaacatacatcatcacaatgacattatcaacatcaacaacatctcatctcaatgtcattatcatcatcaacatgatcccatctcaatgtcattctcaacatcaacatcatctcatctcaatgacattatcaacatcaacat

SEQ ID NO: 20530 - DNA, 375 bp, Glycine max
  unsure at all n locations
tgcatgattcacattctccncctttgtcaagcanattctttctgatatcatcaaaacctgcatgatttacacaattcccagtaatttatacaagtttgtatgttcaagctgtcagcaccagcgaattcaacctagaaatcaagaatagtggttatgttgcttaaggcttggatagttacaatttgtgtttgcttatgctcaatgatcttgaataacaaaattcaagagaacttaagacttattntgattcacaaatccagccacaactcagcaccacaactcaacttcatcataggaatcatgtaggaaacttagaatacaaaaaaaagagttcaacaacaagactacttctaggaatcgatttagaacatgtta

SEQ ID NO: 20531 - DNA, 410 bp, Glycine max
  unsure at all n locations
agcttgtaagcatgtaacccaccatcttctcatagtagaacacaagtaatgtgtctactattattgctatcattntcctttccatcattgggggcactacttgagataccagaacccttcacctttgggcatatactttgaaagattcatgctctctcttacacatgttctatagctncattctatccaaaaccatatcagaattgtactaatattgcctatcgaaggcaaccataaggtccttccaggaatggaccccggaagattccagaataatataccatgtgatggctgcccaataagactttcctacaagatatgcatcaacaattttcatcttttgcgtatgcccccattttcctacaatacatctatacgtgattcttgaggccagaatccctttgtactta

SEQ ID NO: 20532 - DNA, 458 bp, Glycine max
tcagtgtcacaagtttccgaccacgaccatggtggagttcaacacaattgtagtgtgttttctggctgatatctttaggaagctataaataggggttgttttctgtatctttgaaatcttttacctaattacgaatttaagagttttgaagcgtggataccaccatgaggatgaattatggtcatcattcctaccttgccggtatgtctatgctaatttcatatatgtttttgagttgtgctttgatcatgagcgaccagtcaccatagtccaagggttatgatgtaactatccaatggtatccctttctctgttcttaatgaaattcctcaatcttttatgttaactaattctcttctttattcttattgtttaattgcgaattagtcaatcctaagcttaattgaatgtattgtggtgatgatcttgtatgtcgcgtagacctatgtagagaatgt

SEQ ID NO: 20533 - DNA, 279 bp, Glycine max
  unsure at all n locations
cgcgatatgcgaggatgatattccgagtactttggatttggtacgaccatgccctcttgattccactgggaaattggcgagtggaggaacgcccccgcatttacgcaacgagcataatgtaaacctttacgagtttaaaagctctatagttgggcctaggctttagaggtnttccttttgtaaggctttgtgtcttttgtctttgaatttataatacaaagatctntcttcatctgttcctggtctctacccattctcattcatttgcatggttacttc

SEQ ID NO: 20534 - DNA, 435 bp, Glycine max
  unsure at all n locations
tctanactntgtacaagaatgaagctctgataccacttgttagtctagtggcctcagatatcttaagaagggggggttgaattaagatattccaaacttttctcctaattaaaaatctatcttactttttacttaagttatgaattcccttaatgacaatcttcttaaatattaattcaaatgaagcaacttgaattatgaatataaagcaataataaataaaggagattaagggaagagaaaatgcaaactcagttttatactggttcggccacacccttgtgcctacgtccagtccccaagcaacccgcttgagagttccactaacttgtaaattccttttacaagttctaaacacacaangacaacccttcctttgtgtttagagattctntacaacaagagactcacagtctcttaatcccttagagaatg

SEQ ID NO: 20535 - DNA, 366 bp, Glycine max
  unsure at all n locations
caagcttatcctgatcgtatgcgatagctnatcagggctaagcggaccctatagtcgccaagcgtaattccttacgaccataactaaggtcgataaagctaagcgccaatcatggcagcttaacgaaattcattgcggaaatatcagcgctaaagagagaacctctcactaagcgcatgctcctctgtatttaagatgcatcaattaagctaagctggccaaaaccaggcttagcgagagttgcagcttttctaatctgcaaaccttgctaagcggacttactcgcatgctaagccgagtatctattcaaaaaaataaaaataaaatatatttgaattgaaacgtcagctaagcgcatgttcgcta

SEQ ID NO: 20536 - DNA, 456 bp, Glycine max
  unsure at all n locations
tccnncgaaaagataatgttttaggggaataacacagccatattcttgtctttatgaaacacctaaattagtgttacctatgagctgccatatttgatattatcccagtttccgaagctgnttgttccatacctcctctgtgattgttcagcatgatgagaatttgcaaggcttgtctaatcatgaccacacttgaatgtaatctccattatccttctaatggcttttgacaagtctaaccgctgctgagggttgctttcagtgcaagcagcaccaatgtggaggaagtgctccatctcagcaagccaattcctagagcctgcaattttaggatcaagcacttctgattcccttccctcagagattgcagttttcacccattgcaccacatcagccctaccttttccattgctgacatactgagaaaggaacctcgctgcaatatctcaatatgac

SEQ ID NO: 20537 - DNA, 384 bp, Glycine max
agctttatactaaatattttaactaaaatgctgaatcttacaaattctagcttcatctaatcatcattaaaagttaatcagtggtgcaactagctaccccctgttaaaataattgaccatgtgtatatgttctatgtgtcctagtataccaaacaacaggaatggtgaaaatggatataagagcattcctctattgcataagagcattgactgcagtctatgacaatgactttccctttgaagctataagaatttggagcttttcaagatcaaagttgggtagtgcattgagcgcagcctgtggcaatgaatttccctttcaagaattcatgtgcaaatattgataacacataacctatgcaccctaccatttagttacaatga

SEQ ID NO: 20538 - DNA, 390 bp, Glycine max
gttactcccatcctcgaaagtagcagagaggaggagccacaagaagacgttcatggacttcgccaaaacaacgatcacagcagagccctccatggagaaactgcaaagaaaagaaagggaacgatatccaacctgattctgaaacagaggaagagcgcgtgagagggagaagtagtaagcggagaaaaccacgcgtcagtgggaaacaggaagagttggacttctcatcgactaaatacatataagaaagacgaaacacagtctctacctaacaaaaatcaaggaagcagccaagaaacgacggcactccaaagatagaaatcagaaccataaagaaaagctggccatgtcacggaccgaactataggaatacctgcaaatggtccaacc

SEQ ID NO: 20539 - DNA, 427 bp, Glycine max
ttgcggatttggacttcgccggcagaaggatcaattcgttcttaaaagaggcaaatttaatgatggcacttgtacgaatgataaaactggtgcatatgaagagggtgaaaataaaggagaaacccatgctgcgactgtcattcctacatggccaaacttcccaccaacccaacaatgtcattactcagccaataacaaaccttctccttacccaccacccagttatccataaaggccatccctaaatcaaccacaaagcctgtctaccgcacttccaatgacgaacaccaccgttagcaaaaccaaaaacaccaaccaagaaatgaattttgcagcgagaaagcctgtataattcaccccaattacagtgacctatgctgacttgctcccatatctacttgataattcaatgggagccataacccta

SEQ ID NO: 20540 - DNA, 499 bp, Glycine max
  unsure at all n locations
cgagctgccattgatgcattgttgangccttggacaccnttgaggcgtctacgaccgaatgccgctcggatcctggagatcctatccagcagttctgcaagcttgttggcttttacaagctggactcaatctcgtatcgttgatgtcattgggagtgtcctgtgaactggattcctactaccacccgcataaccgtgatataaaatcacaaggaggagtcgattcctactcccgtgtcaaaccactggagaaatgcacttactatgtgatagttatcgcacggaccatcgggattgcatgctgggtgtttcttcctaccatttccttgatgggctatatgggtccctgcaactcactgttgcacttggggatagagccagtcttgccttacttgcaccgatgacacttattatatgcgatgacgcgatcttgccgagcattaccaatattactctaatctgtaaaagacattaagatccgcgaagtaataaatacattn

SEQ ID NO: 20541 - DNA, 410 bp, Glycine max
  unsure at all n locations
tcanatgtcaatagcaaatgactgattttgtcaaattagttatttatatctgccgcatgagaacaattaataatttccattntttttgtctctagtgatactgattacttactgtgtgtaatataaattatgtaaaattaagtctatgtaaaattacgatattattaatatttttaggacattaattacaaaattaaaaaaatatatttattatgaaaattataggaaagtataaaaaagttataaacagcataatttatgcattttaataaaaatatttatttttttaattctgtaaccaatgtccttgaaggaattgattagtatcggcttaaaatcaagttagtaaacactcatctaaacacattatcaacttttcttgatgataaaagtctattttggatgtgaat

SEQ ID NO: 20542 - DNA, 369 bp, Glycine max
tgttgcaagcttgttattggttactctaaattatcatttcattaccgtacataaagtaaacatatttaataaaaacgtgttaaataaaatcttcatatattgtaagcgtttgagacaaccagtagttgcaatatttaaaaggatattgaatcttatttgatattagtgaaataaataagctttacaatgagcttattaagttaacattcatcatacataaatgttattagaatacttaaaaattataaaaagtgtattaatcagatttataagattaatcaaacatgtgccattttcaacgcgagtgctaaaatatatgatggaaaatggatcctcttcaagtctccatgttctacctctgcaacagga

SEQ ID NO: 20543 - DNA, 422 bp, Glycine max
  unsure at all n locations
ntctctcttatataatggaatttgcaagacaatgactgctttttcaaggtntgaatagcattccgtggacaagtaaggataaaaatttaaatcatcanattcaacattgcttgatagaggtttgtcttgaagtttatttttaaccgcacggttctcatgcaaccccaaagtttcctccttcgatccaacatggaaagctttcggagttttggaaccatctagttcactcaaagactntttttcgcacgaaacactctgccttgattgtgtaaaatcatacaacacaaattctgtcaccatagagttgtcaaattctttgtcttctagttcagaacataaattacaggatactagcatctgtgctactattgagggatctttatcaaaatcatgggatcccaacccattgacattgctcttct

SEQ ID NO: 20544 - DNA, 338 bp, Glycine max
ggcaattcactcgtcccgggatctctaagcacctgcatgctgcacttttcaatatgatgaggagttagtattgcaacataaaaatgaacgattaaatagatatagtagaaaacctcaagtcacatgtatggtcataggagcataatattctagagagcaaactatttttggaaacaaaactaacctaaagttatttccacataaccgaaataaatggaggattgtgaaccagaaaaacatattggaaaattggttacttggtaaatccaccttatatacaagcctaattgatgctgataccactattgaccatactatttgccatgttcaatatattg

SEQ ID NO: 20545 - DNA, 399 bp, Glycine max
  unsure at all n locations
ccctcgaagaggatgctntaatggaggaaaagaaagagagaagtgggagcacgaaattgaaggaataaaagagggagagaagtggaactttgaagtgtgtctcataagactttcattcatcaaagttacaacaagtgttacacatgcttctatttatagactacgtagcttccttgagaagctntcttaagaaaacttccttgagaagcttctttgagaaaacttccttgagaagctagagcttagctacatacacccatctaaaaactaagctcacctccttgagaagcttccttgagaagctagagcttagctacacacacccatctaaaaactaagctcacctccttgacaaaatacatgaaaatacgaaaaaaagtccctactacatagactact

SEQ ID NO: 20546 - DNA, 403 bp, Glycine max
  unsure at all n locations
agcttctccttccttttcctataaataggggaaggagggaagaacaaaaatgttcaaccctcctagtatctgagattcacttaaaattagtgagaaaaattgtttccgtgaagaaaatccaagccgaggcacttccgtaacgcttctgtgacgtttccgtgggtgattttgcaaagattttcaaccgttcttcgtcgttcttcattcgttctttgtcgttcttcggtgttcaaccggtaagttcctgaaatcgaacttttcaattcattctatgtacccttagtggtcctcattggtttcgtgtgctttntatttcatttcatttactttccatacgcccttttgacgtgctttagtcatttatttaagtcattttctcgcctaataacaaataaagtaaatt

SEQ ID NO: 20547 - DNA, 383 bp, Glycine max
acatacacagccacacacccacacacacacagagagaaacacacacacacactgaaacacacacgcacacacagaaacacacacgcacacacagacacaggcacagacccacacacacacacacacagaaacacgtacagacagcgagacacgcgcacacagaaacacacacgcacacgcactgactgaacacacacacacacacacagagaaacacacacacacacacactgagcgaaacacacacacgcaggaacacacacacacgcaaactgactgaaacacacacacacacgcacacacacacaggaacacactgacggaaacacgcacacacacactgaccgaaacacaaacactcgcacacacacagaaacacacac

SEQ ID NO: 20548 - DNA, 368 bp, Glycine max
agcttttacaagctggaatcattcatcctatctctgacagccaatgggtgagtcctgttcaagtagtcccgaagaaaaccagcctaaccgtgataaaaaattacaatgaggagttgattcctactcgggtgcagaacagttggagagtctgcatcgactatatgaggctgaaccaaggtaccaactataacgcctggcaagtaaatctcactactatttccttgatggcttatctggttatatgcaaatcactattgctcatgaggataaagaaaataccacattcacctgccccttcggcactctttcctatatgatgatgcctttcagcctgtgcaatgcccttattaccttctaactgtgcatga

SEQ ID NO: 20549 - DNA, 411 bp, Glycine max
  unsure at all n locations
ntacttctacaattgtaagtcacttgcaattaatatctttaattatntatgtttattgggtggttgactgaacaaataaatgtgttctgtataggattcattggaagagcaagcgtcacagggttcctttgtcccccatggacgtcaggatatctggactgctgccattgggcgaccagaacaccctggtcgtgtgcgtactgttggacccagtgtgacaatcaagtaatactttggaatagctccacgaacctcctaaacttcttcctttatggctcccaaagaactagagcagttgactcaacagatcagggactagttggaggagttgatcacagannaagtgactcaacagctgatgttatccttcagtcagatgcagtcccagcttcagtcatagatgcaatcaca

SEQ ID NO: 20550 - DNA, 394 bp, Glycine max
  unsure at all n locations
agctttttacaacttgttgtaatcaattaccacaactctgtaatcgattaaaacaaagagttgttgcctctgaagaaattnttctaacttagaaactttttcttcacacaaaccatgatgatgcatgatgtctgatgcaatgcaaatatcaaatgtactaagatgtcacaaccaagttaacaaccaatacaaatgccactcaagggagttgggcatgtaaaagccaaaacttcttcaaaacttgttcaaacttttccttgagcttcagctntagcctttaagttgtcaccatgttgctccccttatctctaacaatagtttgtcataattaaaaccaacgatgtggatttcataatgttaacccacaaatttagagaactagagtagtagtctc

SEQ ID NO: 20551 - DNA, 389 bp, Glycine max
  unsure at all n locations
ttctaaagttntatggttttctaaaccttgaaaattgtgctattcatcttttcattcacttctccctttgccaaaaagaattcgccaaggactaaccacctgaattctttttgtgtctctcttctcccttttccaaaaaaacaaaggactaactgcctgaattcttttgtgtctcccttcttccttgtcaaagaattcaaaatgacacagtctgagaattcttttgattcttccctttcccatatacaaaagtgttcaaaggactaaccgcctgagaattcttntgtatccccattcacaaagtatcaaaggtttaaccgcctgagatctttgtcttaacacattgaagggtacatcctttgttgtacaaagagagggtacatctactt

SEQ ID NO: 20552 - DNA, 350 bp, Glycine max
agcttcttcatcagaccacttccagtgtgctggaactacttcacatggacttgatggggcctatgcaagttgaaagccttggaggaaagaggtatgcctatgttgctgtggatgatttctccagatttacctgggtcaactttatcagagaaaaatcagacacctttgaagtattcaaggagttgagtctaagacttctaagagaaaaagactgtgtcctcaagagaatcaggagtgaccatggcagatagtttgaaaacagcaggtttactgaattctgcacatctgaaggcatcactcatgagttctctgcagccattacaccacaacagaatggcatagttgagagg

SEQ ID NO: 20553 - DNA, 425 bp, Glycine max
  unsure at all n locations
tggactatatcccaccatatgataccttgtgcatgtaatctatgattcgctatctatccgtacaataatgtcgttcacacaaatatgggagctatggaaagatattcacttagtatatgacaaacaattaatccatttattttgaaacttccacggcaccaggagatgagatttgaaaatttgtgccaatgacaatgagtcacctttcaaccataattgatccggacctttgccttgtgctatttcaatagctaaaaatccaacttgcaactcagcatgaaaggcaattgaaatatccaaagagtgagagaaacaacccaaaatagcacccctagaattacgaataattcccccactagctgaaggccccagacaanctattgttgcaccatcaatgttgcacttaatccatcccatttgagtag

SEQ ID NO: 20554 - DNA, 409 bp, Glycine max
  unsure at all n locations
agcttgtatgattatggggtacccatcacatgtggtactaggtggcggtcgggcgatggtgcacaacaagttttccacatccgcaaatcgcgcataaacccaccattcccttgtgcccacctccaactgagctcacgtactcccacgtagcccatatcctcgtttctctcaacaccgggtccccatcaatccttccaagcttccccaacatccaggtaattcaacatccaaatcatcacaaactaacaaaccaaggcaaacagggcaaaggaagaaaactcttgccaaaactcaaaccaaaatcatagctttttctcacttaaagaccccagtaacatttctttcgttccaatttcgtaacccgtggatcgactcanaaagttactggaagctctatacataacctaca

SEQ ID NO: 20555 - DNA, 441 bp, Glycine max
tgagaacatagcttcaaaacagtaacatctccacgcttcataacatcagcacgataagcgtagaaacttggtgacaacttttcgcataaaagccaaatacttttactgtttttttttctttttgctgtttgaatctgttgaaattttttctatcaacagtattcaaaacttactcatgtctactgcaaaaaatgtttctcgcaagctgtttgctcgaaaaccccaaaagactggccgaaaatgtgttgcaagctcttaatgaaatggatcacataaccgtaccaacacaacaaattcctctatcaacgcatcattttccacagccactggacaatgtcaatattgtcatcggtcatagggaaggatgcggacttcattgacgaagaaggcaacacgacgcttgggagttccaccgcctccggctcaaccctgtggtgaaac

SEQ ID NO: 20556 - DNA, 338 bp, Glycine max
  unsure at all n locations
agcttatggatggaatacttacttgttggtgatgaacaaaagcgcaaaacggaatcaaaaatgcgaaaaaggatgaccctagggctgcaaattcgtcaatcccgtgggtatggcttttgaaagcggngaaaagaggtttttgaatgtaaaaacgccccccctttcgtcattnttataatttggtgcaggggtggcttcgcccagcgagcccagctcgcccaggcgagctaacctgcacttgnntgttnttgcttactcgtgttgttgatttgggaggaaattaaccatttcccctcccttctcatgaaataacatttcgcctaacttggacttactta

SEQ ID NO: 20557 - DNA, 434 bp, Glycine max
  unsure at all n locations
aatactaagcttctatccaggctcatcttggtggtgaagctccttcttccattgtttattccctagtggatggcacctcctctcacctcttctcctttgtcttccgctgcatctccatggtggaaaatcaccattaaaggacctcattgaagctcaaagatccagcctccatagaagccccacaagcaagcttccattaagtgataatcagagcacaagagcttcaagtaggtgctccttaaacctccattaatttttggctttaccttctcttccattgttgtttcttcattnttcctccatgtatctcctcacatgtcttgtgctaaatgttgttaacatgattctntagagtttccaccgattaaacttgctatagaagctagaattgattntctatggttcaaatttcttgttcttgttcttgaaccatg

SEQ ID NO: 20558 - DNA, 358 bp, Glycine max
agctttatgttgctcattgactccagattgctacaaagaaggacatagatctgtatggtgatctgcagaagaacatagaccacagactcttgccacaggtgcatatttctgattcatggcaagctgagttactaggttaaccaaggcatcaagtttttcctcaagctttatattctcagcagatgaagatgaatccatggccacctcatggactcctctaaagacaatagcatcatttcttgcactgaattgtgcgagttggaaccatcttctcatcaaattcttacctcagcggagtcgtatcaccaaagctccccattgaagcatcatcatactctctccatgtactaagccctat

SEQ ID NO: 20559 - DNA, 452 bp, Glycine max
  unsure at all n locations
ccacagcaacacanaatctaggtgtccaaatctcttcaattcaatggcttttctaggtgtgagaggtgaaatntagaatgaggtaaatttgaagcanactctcacctcacacaagtccataacatcaatctaaacttgctcaaactgaatttacaccaaaaattccaccaaatcaaaatttgactcttcaacacccaattttgccctagaaatggctcttggttcactttggtcatttgtttttctctctagctcagcctaacctttctcacatgtcctagatgacatttcaagctagtattaactcactttaacctccatttaccacaaaattcagacttagccttccaactctcagagtctcaccctgtctccactcataacatcacattctcactgtctaaccctaggttagttctacccttcatctctaacgagtttccatcagcaat

SEQ ID NO: 20560 - DNA, 390 bp, Glycine max
taggaccacgacacggcagatcgcggggtaccttactttatttctgcaaatattgggtttgtaagatgttacattggattatgatgcacacatgttcttatgtcatgttaacccagaccatgatgactatatgcagccagacattctagaggttctagtggcatttgatccccctcgacatgcagtggtaagattatttgtgtatctaatgttcgatgaattgctatctattctaaatattgtaataaatgtttcttatgactgtcacatgatgattacaaaggctatgaggcgatcgcagataggttggagtgtgtgctcaatcttatgatggtcactgcaaggacatgattacatgatatcttgcatgattgcctgatgatcgctagg

SEQ ID NO: 20561 - DNA, 403 bp, Glycine max
  unsure at all n locations
agctttagatcaaggtaaatcaaaatctaggtatccaaaacccatcaatntagtggatnttcaaggtttaagaagtgaaaatgagaattggataattctggggtaaactctcatttcaatcaagtctataacattgatttagacttgctcaaactggttntaaggtgaaaaccccagcccttcaaaattggcccctcaacacccaatttaccctagaaatggctcttttctttcacacttgtcattcctttttctcatttgctctacccaagctttcctacaagtcctaattgacattctaaactangatcaactcactntagactccaatntccactaaccccaaatttggcttttcanaccctcaaaatctcacactgttccactcatatcactaccattc

SEQ ID NO: 20562 - DNA, 448 bp, Glycine max
  unsure at all n locations
agctttgaaacactctntgctactggtaatcgattacaataaactggtaattgattaccagagagtaaaaactctttggtaaaaggttntgtgaaaaattcatgtgctactcaatgttttgaaaaacttttcagtacttatcttgattgagtcttttcttgattcttgaatcttgagtcttaaatcttgttcttgattattcttgattcttgattcttgaaaacttgaaacttgaaatttctcttgttcttgactcaatcttgaaatcattctcatgggctttgtgtttacaatgtttaattaactatatttagttttaattntgaatatgtgtgattaattggattntgtttgaattgattaatgcttgaattgcttatgttttattgatattagattctgttaaaaaaatatatctatataaaaaatgttttgacatgttaatata

SEQ ID NO: 20563 - DNA, 400 bp, Glycine max
  unsure at all n locations
agctttatagcagattttagtaatgacccactaacctagaattaaaataacttaatgccattaacctanggaattaaaaaaacttaatggctgagtgtaactgaaattgtggcaaccaaaagtcacccccaacagccaacaagtcagccactcattggtctcccaaaaggctgatgcctaagttgccaattgggcccttattacaacttgaactaaacctaactaaagcccttttagttgattaacccaaaacatatttttggtcagccaactttacaaggattgggccattatttagacaaactaaacactctaaaattgaaacaaagtggtgtcatttagtccttctccatttgggccatgatacaactcacaaccttggactttttctcttgaactt

SEQ ID NO: 20564 - DNA, 286 bp, Glycine max
tctatataagctgaaccattttatcaataaacacatgttgagttttattcagaaaattagaagttatcgcttttatcttaatgagagtgattctcctaaattcttgagtgattcaagaacaccctggctgtatcaaaaggactttcacaacctttggggggtggccttgctggaaaaagtgattcttttcttcctatcatctccacccttggtctttcaaccacaatttcagaaaatccacctctgccaaaattatctcgtgacctaactccatttcaacactcaa

SEQ ID NO: 20565 - DNA, 303 bp, Glycine max
agcttgtacaataatcggtgagagtgtgatcttaaactatgagtgaacgactagctttgagtaatagtctttgcatcaatctctgaattttagaatgaaatgtatgaatgaggacatgatgaaggccatgattgtgtatatacaagtcaattgaccaaaaagcttaccttgaattataattgtatcctttgcaccctttgtgagctaaattacattttcaaaattgaaccctgaacttgaatgaatatctccagataccttgtttagattctacgagagcagatagttcaaggaaaaataccc

SEQ ID NO: 20566 - DNA, 402 bp, Glycine max
  unsure at all n locations
ntgtgtaattgattacactgatttggtaattgatttccattgattgtttctgaataaatcaaaagatgtaactcttcaaatggtttttggctttttcaaattggttttaagtttttctaaaagtcataactcttctaaatggttctcttgaccaaacatgaagagtctataaaagcaaggctttgttttgcatttttcaatcaatcaatcaatctatctatctatccaatctttgaatctctttgaacttcttcttcttcttcattgtgccaaaaactttttccaaagttttctggttttctaaaccttgaaaacttgtcctattcattgttttcatctattcttcctttgccaaanagaattcgccaaggactaaccgcctgaatttttttgtgtctctct

SEQ ID NO: 20567 - DNA, 288 bp, Glycine max
tgacaattcctgtctcttctttaaacctccaaattccaaatacgaatctattttatcatctcataccaagcacgaagaatcactctccacttatcttgctagactatccacacgtgtggtaacatgtatcctcaccatagatccacgttctacacaagccatgtgttgcgatgtatgtccaaacacagcatgacgcatctttcccttagtccctaatttacagacactcacttttcttgattaacaaaatactctactttagtccggctttattcaacatttttctta

SEQ ID NO: 20568 - DNA, 387 bp, Glycine max
tgttgcacatagttatcaaagtgcgtgatgagtgtttcatattgagcttgagttctgttgtagcctgcattgccaatgtgatctgatttcttcccgtattgattgtgaacaacgagtaatgcagatgcatggccggcgagttcggtcaaatggagcacgtaaatgcatattggagagttctttgttgggttagaggcgtcaaggaggttaatcattggtggcacatttctagggctgtggatgcacaccatgactctgaactctgtgtctgtttgagacatttgaatatctcttcttttgtaagggatgatcccctttgatgtttagtatatagctgatatcccatgtacagttataccatcattagaatgttataatcaccattga

SEQ ID NO: 20569 - DNA, 363 bp, Glycine max
  unsure at all n locations
taagctttataagtatttaagatctgctggaattcgtgattcctgcgaattntattgtctctcaaattgagcaaatccttgttggactgtntctgggaatatctctgggattggtccaaagaagtcccaccattgcaaaaaccaattgcgaaaattgtaaattgtattggtcttgaaatatatcagccatgaatgcttgaagcgggtattttggtgccaaaacaccttagtccaagcatcaacataatcccaataggtataacctaccggatcaaatggaactganaatctctttcctttngtcaagtccgaaccacagtgtcttggttgaagaacttttagtatttggattgtggagtgggt

SEQ ID NO: 20570 - DNA, 434 bp, Glycine max
  unsure at all n locations
ntctattctaattntgaaatccatgaaggtaccctaatgtctgaagtttatgggattaagatggtcattgaccaatccctattttttgacttaacaaaattgcctagtgaaggtgtaccttttgagggtgcactgattgatgaatggaaatttgatttctctatgcatgatgtatgccaattggtttgcaccaaccaagcggatatgaccggaaggcttcttgccggttcattggcttttgaaagtcgcatcctccattatcttatagttcgcattttgcttcctagatcttcaaaccttgcctaggtttctgaagaagacctcattgtcatgtgggcctttcataaaggtctacaaattgattgggcacatcttgttagatatcgcatgcataaggcatcgcgattgaatgccccattaccttatcctcatct

SEQ ID NO: 20571 - DNA, 403 bp, Glycine max
  unsure at all n locations
agcttcttcctttgcacactcattttgctccaaatcgcgaaaggaagccattttcggagtcgtgaagcgcacctctacgttgtgggacttcaaatttcaagtttgggtagacttctttctcacataatttcgtgggtattgggtgtttgggagatatgatgtgtagttttactaggtttatgccttatggtagttatttgtgaaggaatttgttgaaagcatgctaaacttgtcatgtttggtatgagtcaagcttacccattctgttttaaggttttatgatgatgctttgtgatgtttgtgtgctaaaattgctgatggaaaattgatagagatgaanggtagagttaacctanggttaaaaaagtgagaatgtagtgatatgagtgggaaaatgtgatgc

SEQ ID NO: 20572 - DNA, 456 bp, Glycine max
  unsure at all n locations
tcaagaaaaagatggcctcagcaaattccttatttccagattggtattctatcaatagacctccaatctttaatggagagggttaccactactggaaaacccgaatgcaaatttttatcgaggcaatagatctaaatatctgggaagccattgaaatagggccttatatacccaccacagtagaaagagtttcaatagatggtagttcatcaagtgaaagcataaccatagaaaaacctagagatagatggtctgaagaggatagaaaacgagtacaatacaacctanaagccaaaaacataataacatctgccctaggaatggatgaatatttcagagtttcaaattgcaagagtgctaaggaaatgtgggacactcttcgattaacacatgaaggaactacagatgttaaaagatctaggataaatgcactaactcatgagtatgaattattta

SEQ ID NO: 20573 - DNA, 402 bp, Glycine max
  unsure at all n locations
agcttcctcgtggcttctttgagaagctttctcaagaggcttctttgagaagctagatccttatctatccacacccctctattaactaaattaacttccttaaaaataattacggatgaaaataacgcaacaaatattcaaacatcaaacataattactaatagtatatagatatatatatatcagggtgttacaactctcccacccttttagaaatttcgtcctcgaaatttaccttactcaaacaaggatgggtgagcttctcacatctgactntctaattcccatgtggcatcttctcctgatgcacctccccagatcaccttgaccaacagaatctctttccctcttaagtgttttggttgcctatcctcgatcctcanatgcaatgtttcatatgtc

SEQ ID NO: 20574 - DNA, 422 bp, Glycine max
  unsure at all n locations
caaagtaaatcaacattcaaacagcacatattactacagccaagaaaacagggcaaaggcagaatactctgcccaaaacaccaaccaaaatcacagcttttctcacttaaagaccccagtaacaattccttcgatccaattcgttaaccgttggatcgactccaaaattttactggaagtctatagtacataagcctacattntgaccgttgggatctactagcaaacatccagaactcattctgcactactctttccacagccaaccacacacaagcatttttctgcacaaagccaaaatcctgctgcacctattntgacagcaaaattctgcataagtgcagatttcgaaaatcacccttcctctcatccaatcttgcccaaatcaaatcctacaagtcccaaatcatgtatcaatcatg

SEQ ID NO: 20575 - DNA, 390 bp, Glycine max
  unsure at all n locations
cttgcaagctttttccaacattcattagtccaatacacactcaacaaatagtcatcatccatccataattccgatcattcatgctcaatatgatgcatgcacctgacctcaactctcatatgcaatgtggtaccatcctcaaagaaatagcctaaacgtgtccacacgacactcacacttatgaaaactaggcagtaagtgtcgaggtcacccctgtcgtgcataggcaacgtccctcccctacggggatcagcctgagtctcaagggagttccaaactgagtgacatgtcccctaatacaagtattcctcctcatgagaactacaagtacttactgacaccatttatactatttccatgtcatataaaggatgaaacatgngcaccatc

SEQ ID NO: 20576 - DNA, 454 bp, Glycine max
  unsure at all n locations
tcgaattaaaagaggcattaatcttgccattcgcgatgcttctgccagcgatccttatgtcgttgtcaacatgggcgatcaggtttgaatcttgcaatttctgagatcatttttttttcttctttgaaggtaaatctgatgaactggggttgttaatttgtgttgagagatggtcgcaaataaaacaaatggtttttctaatcccactatttattgaacaatttctacgagattttttgtggtataattggttttgttaatatatttcttttggaaaaatatatttacacagacccttgtcactcaagttttttgttcgcaggaaaaanaggatgtctggataaatatctttattcgatatatataaactgacataattataatcattagacaagtgaataatgtaccagtgacagtatgtatgatataaattacttgctcccatggtcattgc

SEQ ID NO: 20577 - DNA, 345 bp, Glycine max
  unsure at all n locations
agctttactaatggatagtaagaaccataaatacctagccccaccagtaggttacaaaatatttataaagtataaaccgtacctatttaaagcctatgaagagagagagtcacacagttttcccatcacaaggtcatgttaaaactcaacatgaaaagatacattccctaagttgatttgtgctctcttttaaactgactactaaattgagagggacttttaaattactgaactattcttcaattaacattaataaaggatccttggttnctttgtagcagggtcctcttgctgctccggttcttcaacacctgacanaagcagatttaagcaagatgtactttg

SEQ ID NO: 20578 - DNA, 452 bp, Glycine max
  unsure at all n locations
tcaatcggcatactccacacaaagattntgatgggattattatacagcatactccacacaaacagattgtgaagacaaaaattgngcaagtttctgcagatcgaatgttatgagctgataggaccattttatctggcttagtgagagaggtcttatacattataccacaattntaaaacaataatcacaggaaatagtaagttataatataaaaagaataattttttcagtaacatctggaaattntgttttggctagttggaattctgatggcagattgaaaacaaggctctcttccaaggtcttctgaaccttcattccaaatnttttaacctttatcattnntatttttgttgttgcaatntgnggatttctctgtcaatccaagctatccatagtctccaaacttattgattagcagtggttaacacattggttctgtttctcaagtg

SEQ ID NO: 20579 - DNA, 402 bp, Glycine max
  unsure at all n locations
agcttctaagcataatattgtttgacgacatcagagttcacgggtgaaggtagctcttcgccatccatgttggtaagcaccagggctcctccggagaaagccctcttcacaacaaaaggcccttcgtagttcggggcccatttccctcggtggtccttgacagcatgggacattttctttagcacaaggtctccctcatggaacttgcgcaagcgtactttcttgtcgaacgcgctcttcattctttgctggtacaagcgcccatgactcatggccgttaagcgcttaccctcaatgagggtgagctgatcgtagcgtgtttgagcccactctgattcctttaatccggattctgccaagatccttaatgacgggacttctacctcanatggtaacaccgcc

SEQ ID NO: 20580 - DNA, 390 bp, Glycine max
  unsure at all n locations
tataatatatcgatacgctcgaaattaaacatcgattactctcagganattcaaatagtcataacttttcacacggatgtccggttcgggcgcataatatgtcgagaagctcgaaattgaacaacggaagatcttgagaaattcaaatagtcataacttttcacacggatgtccgattcaagcttataatatatcgatacgctcgaaattaaacatcggaaactctcgcgaaattcaaatggtcataacttttcacacggatatccgattcgggctcataatatgtccagaagctcgaaattgaactacggaagttcttgagaaattcaagtggtcttaacttttcacacggatgtccgattcaggcacatcacatatcgagacgctcaa

SEQ ID NO: 20581 - DNA, 366 bp, Glycine max
agcttgtgagttacaaagtcttgaataagcaattatgtgagtatttagtattcttgaataagcaaattatgtgagtggtcactctattctaatataaataggggatcatactcttgtatttggtgtgccaaatgaaataaaatctttttcttcttccaacacagtggtatcagagcttgagttctagagtgttgagaaagaaacactttgtgagttgagagagacatactctgtgagttgagagatggcaagcaatggcttaagtatgtttcaattccctcgtcttaccaaagagaattatgataattggtgtcgtcgcatgacagccttgttaggttctcaagatgcatgggagattgtagagaa

SEQ ID NO: 20582 - DNA, 444 bp, Glycine max
  unsure at all n locations
cttgataccaattgagaagaacatcttcaaaatcacattactagttagttntgtaattggccttattataaacactagaccagaatcccatgctttcaatgtaggacccaagtctcatacctagcaattggatcctacaagagttgcttgattcattattgccgctattgtcactgtagaagcactttctcaccagtcatgccattacagtgtttctaaaggtagccatataatgcttcattttgctattgatacttgtttttattatattgactcatgatgtttacatttaaatgggtgttttgttcctaatttagcattattgttatgataataactatacttcccttggttgtgtctttatttccttccgtttttgcaaaaggaaatcagataagcttagttcaacatcttagatgataaatatacaagccaactactttc

SEQ ID NO: 20583 - DNA, 381 bp, Glycine max
  unsure at all n locations
agcttataacgcactgaaataaactgagaacaaatttttcatataaataaacaaaggcaaagttcgaataactagttacctggctcactgagcaaacgctgcgtttcctgttgaggtaggagaaaaaatagtgttcaaaacattcagaaagatcaaaattaaaaaaaaaacaattgaaaaacccagaatcgcagttcatttccaacgaagatcaaaagcaaaagggtagctgaatccccaaattgtaacaccaaaagacgcttcaatttttattttatttttataagttttccttcatgtggcaactgaatttaaacatagggcaatttgngaattcgcacgggaagaagcagaaatccataagcgggtttcgagtttctt

SEQ ID NO: 20584 - DNA, 411 bp, Glycine max
  unsure at all n locations
taatctaatgtattcaaataatataaaatttgtgaatattttctttggtatggtatccatgcgacaattagatgtcaactttcacggttcanagtatacgtgtcgattatatagaagtccctatgacacttatcatgatgtgatgtttagtagagatttgattaagttacaaatcctatatattatatattaatacattaattacattaagtaacataaataaattgcattaattacattaatttatggaaattaattatcattttaatgtaattacattaattaataatataaaatttgtgaataccttttgcaatgctactcttcaagggcattggatagaagactccaagtatattgagtcagagatgcaagagaaagtcctanggttctcatgaatcttggttatta

SEQ ID NO: 20585 - DNA, 368 bp, Glycine max
taagcttttgagggtatttgtgggcaaagttcgcattacgtcataatcagatcggactaacaatgtctgtgcttaatttggactcacaatttcaaacccatatcctgtgttttattgagaaaattcgagttgggccagctagtccaacccattgtgtcacctttactctagagtatgctagttttacttatgaaatgataaatatatttatgtttgatccttcatattcaaattcgttccttgggaggttcaaatatgagtgtaaacaaaacttgttgattataatacttggattagcgaagactcagtcggcatcatagtcctatatgtcaattcaccagcatgtaattatgacactctctatccta

SEQ ID NO: 20586 - DNA, 343 bp, Glycine max
  unsure at all n locations
tgtcatctctattaagtccctaattnttgtttgatctgtttngagtgtgagatacaattgatttctgatttctgaacggcaatntataagagaaggtatatcgcgatctttcaaaggattgcaggcacatatattgaaaactgttctcagctctgcattacttctgatggtgaaggagaagattgcaaagtccacatggattctaatcctcgtgattggaagatacctgtctgtgaattcccccaaattgaaggcagtttgaatgtgtgattattatatattctttaaaaataaaattcatcaaagaatgtgctataattgtctgtctgctatggaggataat

SEQ ID NO: 20587 - DNA, 387 bp, Glycine max
  unsure at all n locations
agcttgaagatagagacttctcaagctatntatcttctctctcagagaggcttactcaagcttgaggatagaaacttctcaagctatttatcttctctctcagagaggctctctacttggattgactcactctacggtgactcactcaagcttgaggataaagacttcccaagctatttatcttctctcttagagaggctttttctcactctaagaaatggattcactcttgcttggatggataggaatgaaggctcctacccttattatactactccacctccacaatgaatggtggagatacttgtatcctanggtggagactaattctctagaatgctcccacattctangagtctctacactcttctactctcttccatactt

SEQ ID NO: 20588 - DNA, 407 bp, Glycine max
  unsure at all n locations
taattaaaaaaattcatctaaggacttaaacttacttatatgcaaatggttcttcttttttttttacattgttttcctaaattctggttttaattaaggcatccaaatcaaatcaaatcaaattctattttttggtataattacttatctatgtggatgatataatcattgcaacaagtgtaaataatcctgtaatcaacaaagttttccggctcaaattacagcaactattgaaaacataatatactttcttggtaccttgcctattccaccaaggcatagaagaaatatactctaatctttacttgaagaaataggctntatggaacctaatatttaaattgaatgtaattaacgatggtaactagctttgtaccagacatttctcaatatatatagaagacaca

SEQ ID NO: 20589 - DNA, 413 bp, Glycine max
  unsure at all n locations
agcttgttcttgattnttcctaagttctgtaacaagcttagaacaataaacttggccttctcttaattgtctttgggcttggcgaccacgatcaacaaagtactttcggcacctactatatgttgacttgaccaacgctgttattggaatgctgcgacaatctttcaacaccttattgacacattctgataggttgggtgtcatgtgaccatatcgtcgtccagatgtatcgtaagccatgctccatttttcctttgaaatgcgatcaatccatcttgctatggctggactcagttgacgaaatttttctaagttttgatcaaacacatgcttgcaaggagtgtacgctgcatcnaaatttgtatcatncaaaagtgtacgtagacattcaaactcaaataaattaatgtata

SEQ ID NO: 20590 - DNA, 455 bp, Glycine max
  unsure at all n locations
tgtatatgtcatagagattntgttttcattgtattatttgtacttgtcggagtatgtgctagggccaccctatgccagtatggacttcgagcatacagtgactgtaacatcccaacaaaatttctagtaaaaatagttgacatttgaaaggtagttaatgttaaagcattttaagtagtggaataattattttgtgcatgtgtgatatccttcaatggataagtgctctagaattttaattctaggcttaagaagatgtgttttaggcctaaaaagccttggacaaaaatttgtcaaccatagtgaaccagtcaaagtaagagaatctcctcatcaagggaatttttttaattatatgattntttaagctaaaaataattntttacgttgataaaattattttaattatagttaagattagttcaaggaaatatcttattanttcatcaataatt

SEQ ID NO: 20591 - DNA, 370 bp, Glycine max
  unsure at all n locations
acgccatagcagcaaatctggcatttcactaaaaccagctccgggagtcttgagcccaaaatttgcagaaagatgcccaacaaatttcccccacccaaggtaccattagcttgaactcatctaagggatgcaggccccattaactcctctacatgcttgtccgatatgtggtntccatgacttaataagaaacttctcagccattgccttacatatttgctggagaggggggattctatgctactctttctcacagtataaaagctatcagtaccgaatctaaggagcattctgtaattcaagacagatagttaaatacatgaatgttatactggtttatcaacacaagaggagtctctattcataagtt

SEQ ID NO: 20592 - DNA, 453 bp, Glycine max
  unsure at all n locations
tgagttcaattatcaagctcttgctaatggtgttgcccatcttgctgagcagagaagggcagaaattgaaaaagaaaaattagagaagtcgacggctgccacagcttcttaagcttctgaatgtacattattactgctgcattttttaattctcaagttccctgttacccattctttangagaatcagagggttgcctatatttgaggcatttgtcggctttgtggtcgccagttgttggtctttgatcatgaagagtttgcagttttgaagtgctcggagctctgtgcaccgaagttgccattgtccagagagaggattgcattcgaggaactgtggagtcagcagtttctccaggtcttagttcacagcttattgtttggtgctttggggctattcctttggaggaaagtgcccattcttgccaagactgtgttgtccccttcctcccctt

SEQ ID NO: 20593 - DNA, 291 bp, Glycine max
agcttcttttttagacctcgatcggtcgtccttcctggccgacgccgactggcatttttttcgatcaatatcggtgaataatattttttttgccgaggtgggctaatgttttcctggccgaataaatcggaacatgccagtttcgggcaaaacgaaacatcggttgagctcacacgaaaaaacctaaccgacctacattgtaagttttttatgcaacaccgaaacaagaaaacttcccctgccgtaagaaaaaacattatcggccagcgagcgttttttttttaaaaaaaa

SEQ ID NO: 20594 - DNA, 456 bp, Glycine max
  unsure at all n locations
atactaagcttcactcgatgtccgattcaggcgcatcatatatcgagattctcgatattgaacaacggaagctctcgagaaattgaaatgatcataacttttcactcagatttacgattcagacgcataatatatcgagacgctcgaaattgaactacggaagctctcgagaaatttaaatgatgataaattctcactcggatgtccaattgaggaacatcagatatcgtgacgctcgaaattaaacaacggaacctctcacgaaattcaaatggtcataacttttcacacggagatccgattcatgcacatcacatatggagacgtccgaaattgaaccacggaagatctcgagaaattcaaatgggcataactnttcactcggatgtncgattcacgcgcatgatatatcgagacgctcaaaattgaacaacggaagctctcgataaattaaat

SEQ ID NO: 20595 - DNA, 338 bp, Glycine max
agcttcttcattcaattttgaccgtcttgatatgtgaagggactcaatcagacatccgagaaaaaaactattgtcgtttgagttggcttaaaaccttcacattcaatttcgagcgtctcgatatgttaagggactcaatcagacatccgagtaaaagttatgggcctttgaattggctcagagcttcaacattcaatatcgagcgtctcgatatggtacgggactcaatcacacatccgagaacaaagttatcgtccgttgagttggctcagagcttcaacattcaatttcgagcgtctccgtatgttaccggacctcatcagacatcccgagaaaaa

SEQ ID NO: 20596 - DNA, 432 bp, Glycine max
  unsure at all n locations
ntgagccaactcanacgataataactntntactcggatgtctgattgagtcccgtaacatatcgagacgctcgaaattgaatgttgaacctctgagccaattcaaacgacaataacttttttcacggatgtctgattgagtcccgtaacatattgagacgctcgaaattgaatgttgaacctctgagcaaattcaaatgacaataactttttactcggatgtctgattgagtcccgtaacatatcgagacgctcgaaattgaatgttgaagctctgagccaatacaaacgaccataactttttactcggatgtctgattgagtcccgtaacatatcgagacgctcgaaattgaatgttgaagctctgagccaatacaaacgaccataactntttactcggatgtctgattgagtcccgtaacatatcgagac

SEQ ID NO: 20597 - DNA, 351 bp, Glycine max
agcttttttgttcggtgttgccaaaaaatttacaatgtatgtcggctagggtttttcgtgcgagctcaaccgaagctgtgtttcggccgacactggcgtgttcccatgcactcggccaaggaaacattagcccacatcgaaaagaaaaaaaaaacattaatcaccgatattgatcggaaaaaatgctggttgacgtcggccaggaaagatgaccgatcgaggtctaaaaataaaagaatcaccggatgacgccgatcgagcatttcctaattgacatcatccaaatattgttcagggattggatagaaaaaaacatagctgataccagtcgttatgtagtcccgactgaca

SEQ ID NO: 20598 - DNA, 425 bp, Glycine max
tctatataagctgaaccattttatcaataaacacaagttgagttttattcagaaaattagagtttatctcttttatcttagtgagagtgattctcctaaattcttgagtgattcaagaacaccctggctgtatcaaaggactttcacaacctttgtgtgttgccctcgctggaaagagtgattctttccttcctttcatcttcacccttgttctttcaaaccacaattccagaaaatccacctctgcccagaattatctcgtggccataactcccattttacgcactcaaattaagtgattcttgagcctaaattgactttcaaaacgagacctttcacctcgttttggaatcacctcatttggagccctgtagcttcagttattgccatttctatatttctgtccagccaccacttaacctaca

SEQ ID NO: 20599 - DNA, 224 bp, Glycine max
tgctttcaagcttgtttgtggggcttctatggaggctggatctttgagcttcaatgacgtcctttaatggtgattttccaccattgagatgcagcggaagactaacgagatactgtgagaggaggcgccatccaccagggaatatgccttggaagaaggagcttcaccaccaagatgagccttggataagaagcttggagaggatgcttcaatggaggaaaata

SEQ ID NO: 20600 - DNA, 451 bp, Glycine max
  unsure at all n locations
cttctacaaataaagggcgagtctggggtaagattgaatgaacaaggcgaagattattctatggatgaatactctcctagaacctaagattttgaatcctagagaaaccatgaattatttgcagcctaacccctttacaagcctagatagtccttcggattcattntgtgttcatggctgtatgatatgagaagaaatgcaaaggttggaacttgtgttggctgtttatgatggaataagcctaaacacttgagcttgagtgaaacaatggctgtgaggttttggttgatgatccttccttgatttttgtcatgcttactagcttatttcagctgtgattctaatgcttatgctcctatctttgaaaagttgcatgctcgtgagaagtcattgatttaagcattccatggtattcagttcatatggttgacttcctttatgaatcagacac

SEQ ID NO: 20601 - DNA, 241 bp, Glycine max
tggacgaaaagaaagagggagagaaagagagagacgggagcacgaaattgaaggaagaaaaagggagaaaagttgaactttgaattgtgtctcacaaaactctcattcatcaaagttacaacaagtggtacacatgtttctatttatagattacgtagctttcttgagaagctttcttgagaaaacttccttgagaagctagagcttagctacacacacccctctcataactaagctcacc

SEQ ID NO: 20602 - DNA, 446 bp, Glycine max
  unsure at all n locations
tcaagctntagtcttcatgttgcttcccttatctctaactgttctcggntagttntaccccaatataagggagttcattagaaacactctgagatagatagatagatatatatagagagagagagagtttccttgtattatgtttttcgttagtaataacatacacaacgtgtgctactctcttcttcttctttgacaatcttcttccttattctgaacttattttctcagtcttaatcacaacaaatatcatgaatgacaaatttgaacctatttaaaaatataaaggaccaatatgaacttaattaaattcataaaagatcaatgtgaattaattnttaaaacataaacttcattntataccacattatcacttttcattccaccctctagcagacataatgactatatgatggaaagaactaanatggatcatttttaaaatt

SEQ ID NO: 20603 - DNA, 403 bp, Glycine max
agcttttctcatagatagcgatggatgtatagtttttgcaaacatgcataagaaaaatgaaacaagaaggaaagagaaagaaagacctcgaacgtcggcatgtatggtcataagaagcataaatcattcgtagagagccaacatatcttttggaaacaagagactgacgctaagagtttattttccagaataaccgagataataatggatggattcattcaaccgatgaaagaacataatttggaaatattgggtctacttgcgtaaatcccaagccttttagtatcacaatgccatatactggatgcttgagtacccacctagctgtagccatgactaattgtgcacgttgtatacaaatcgtcactgttacgcgtgcgttgagaaataatatgaattcacc

SEQ ID NO: 20604 - DNA, 439 bp, Glycine max
  unsure at all n locations
taattatntgctatagntttttattntgtcaaaatgtttttcatagtttgtgtttgctcaagtgcagagtgctcaagatttctctttccatcattcttgatgagtatgctttaaccaagtagttaagctcgaattagctttaaccaagtagtcgatttcctccgacgaccagctgattctccgtcgccgacaatcgcacatctcgcgaccccggctaacttcctccacaatcgacacgttatacgtgtctccccctacattgatgcacacagtgtggtgaatcgccgggcaccttggcgtgcagatgagtatcctaactcggtctaaccttcgggactcttctgtgtcatcatctacatcaatcatgtctcctattgcggccacaaattgccggaaatatttcttatcccacactacaaggggaataccccagcattga

SEQ ID NO: 20605 - DNA, 398 bp, Glycine max
  unsure at all n locations
agctttttctattangtgaagacatatgaatgatttatgattntatattatatctctaacatgccccctcatggaagaaaccctttgctcctttgggcttgaagtgtggataatgcagagatctacctactttgttctaaaaattcaattntttattagaagaatgactatatgtgtgcctttgggttaattgtggaacctttatatctatattttagtagttttttttgtccatactactacatttaagtatttttcacatgcaaacctttntgtcccagtgattgtaaattatgaatggtcaaaattaaatctgaaactatgcaatctagtcttctggttacagtttgaattttccgttgccttcatttcagcactacagatcacttggaatcttc

SEQ ID NO: 20606 - DNA, 435 bp, Glycine max
tgtttcagtctcaaataaaccaatgaagtaatattatggttcaatatcatggaagtaagcacattcggtccaccatgaaactttaattgatttagagcaaataactcatgataatatcacccccacacaaatgaatcacgtacgttttctacaagctccaatgccaggtcctttgctgattcaccatcaagataatacactgacccaattaaattgctaaacttatcgacaccttccaggacaagccgaacctacataccattaggattagaaaattttcagaattgcaaaatcaatataacttatagaaacacattactcacttctcgattcaatacacgcatctcagtgaaaaatttagcatcatgtgcaaaaggatcggctgcagtttcagcaacagatgttgaaactgcaagcctttgtgcagatgtaagt

SEQ ID NO: 20607 - DNA, 393 bp, Glycine max
  unsure at all n locations
agcttgtagctcatgagtaactccaacagcgagaccctggccggagttttgttgagctgttcgataaccttgaattcgctctactaaattatatggaggaactcactggcttcctctagcgacacctcctttttaccatcctttntctccggaagacctttcgccggaatatctttatttgaagcgtggggtgcttcaccatcttgttcctccaccacttttcctttccccttgacgttcgcgggttggactggtaggtccggaggtgcaaacacacgaccgctacgggtcacaccactcagtcccgtgatatttgttaccttagccgacaacgagctgacatcggtggcttcttcttccttctccctcggaggtgtatatctccatgggact

SEQ ID NO: 20608 - DNA, 400 bp, Glycine max
  unsure at all n locations
tatcgagaccgtgacacctcaccaccttaccttgtacatgttttgcgactctntcttgtctttaacatgttgtattgaataccatgggtgagtttggggaactcgtgttcactgcaaggatctttgtttgtttgtcttgcaaggatttggtttgtggaacttgtgttcgctgcaaggatttggtttgtggaagtcgtggtcactgctaggtctgtttggggtgctcacattgcagtctgtttggggtgctcagtcgtgctcgcagggtctcattntgagtaaggtgattcagattgctagttgtcctttgaatgcttaatggataggtagctaggtgtctattgtaatacgtatagcaccatggcaaatgtaacaatggtctggttnttcttttattggt

SEQ ID NO: 20609 - DNA, 387 bp, Glycine max
  unsure at all n locations
agctntttatccaaagctcatcttggtggaaaagctctttcttccatggcttattccctagtggatggcgcctcctctcacctcttctcctttgtcttccgctgcatctccatggtggaaaatcaccattaaaggacctcattaaagctcaaagatccagcctccatagaagccccataagcaagcttccatcaatggaatggcagatgcaagtgttaagcctttgctcttcctttccttggctngctctccaaccatcatagtcatgcctatctcattattctttaatantccaaagagntcagtgtctattatggaggtgagatcnttagactctaaaattgatgtgacctttacttgtcatgtctattgagggattcaatactt

SEQ ID NO: 20610 - DNA, 379 bp, Glycine max
tttgcataattggagagttctagagagagaaaggttcttgttccaaagagtttgagagaatttgttgtgtgaagatctgcagagaccagagctggaagaagaagccgtccagagagcttgagatgagtttgtgagtgattgtgaggtcctagaggtggaggagacatccccactacttgtatttctgcaatctttcatctttctcttctcttcattgtaaggaagcttcccagttatggaaagctaaatcctctgttggatcttccttgtaggtacttgatgtaaatatctttttatctatttaatgatgttttgtgtgttcactgtgctatcagaacttgattctaccatgcttttgccttgatcacatagatgcatg

SEQ ID NO: 20611 - DNA, 319 bp, Glycine max
  unsure at all n locations
tagcttattgaggagaggcgcatgaccactcaagaaaaagatttactgctgcggcaggaggaactagacaatttgttgttcaggtacttcactttctatctctctctgctgagtgttttttctctctgcagaatttctcaaatttctcaaatttctccattgcgtgttcattcatggcttttggaagatgcaataagcaataaatatttacttatctgattgagtttttttacatggttgtataacccaacccaatggcatagtgtgcaaacagatntttctttnntttttttgaaagtaaaaaaatgttacaatgtga

SEQ ID NO: 20612 - DNA, 448 bp, Glycine max
  unsure at all n locations
ntagttgattgcctgctatggtaggaataacaagtattctatcatcctgtgggacaattaaaaccaggagataatagggtggtattgaagcatacagtggacttgccaaaataaattattttagccactttcattataagaatcagtgtacattgttacaccagactaattgcttatctattttccagtcttccaataatctaatctaatttctaacaacgttcattgacttaaaataacctatatatgaaacaagagtaagaacagactaatacctttaatagactatgcaaaaaaagataaattcaaaacaagtatattgctcattatgtaggggagtctattttaagcaaaggacacacgttattacaatataaatgtaacaccaccttatggcacctgaacaatttctttctcattagtggatgacgaaatctaaggatattta

SEQ ID NO: 20613 - DNA, 426 bp, Glycine max
  unsure at all n locations
gcaatcactcgtcccggatcttagagtcacctgcagctgcagcttatacttttattnttcagactcaatggaaggacttaagaactgatctaatgcttgtgccaaccgggtaacattcatttccaacctagttgtgacttgtttattggtttaaattggttaacttttagccataaaaggtgttgtnttcaggtcattggatttgtatttaactagtatctcactgctttgatatataagtttaatcttgtgaaaaactgngcctggattatattacataaatgtgattatattaaaatgctgctcngatttttattgatatatttgatcaccttaaataaattggtaaatattgaaagagataaattaaaaatgattcgaaagttatataaagtatttggaaaaccctatccacattagttagag

SEQ ID NO: 20614 - DNA, 534 bp, Glycine max
  unsure at all n locations
gggatgcatgggttgaaancattggaaatgcanctcnatttggtaaaaataaccgtgggtgatnnnaanatatatattattaaaataataaaaatttttaaatttataagacagattaaggggggtttttgatattataaagtattaatacaattataactggagtactattaatcatattataggtatatatttgggtaataaataactgtgggataggtatgtatggtgagaatatgtgagataaaatagtaggttgtaaaatatatatatgtataaatttgtggttatatatttgtgggaggggtgatgagagttgtagaaataacgctnattgcgccatgacgacgatatgagtatatatgtttagtattattaaatcttttataaaatcattatgtatgaattagtggggattaatgcatattataaggatgtaatatattattaaagagtgaaaatattaggtgtagaagttggaggtatgatattattgctaagtatatttgtatatgtgatttgagatgttagagg

SEQ ID NO: 20615 - DNA, 411 bp, Glycine max
agcttattacttttatttcgagcgtctagatatattacaggactcaatcaaacatccgagtaaaatgttactggcgtttaaatttgcttaactctccagctttaaatttcgagcgtctcgatatatgacgggactatatcagacatccgagtaaaaagttattgtcatttgaatttgcttagagattcaacattcatcttcgagtgtctcgttatattacgggactcaattatacattcgagtacaaagttattggccgttgaattttctcagagcttcaacaatcaatttcgagcgtctcgatatattacgggactcaatcaggcatccgagtaaaaagttattgtcgtttgaattggctcagagcttcaacattcaatttcgagcgtctcgctatattacgggactata

SEQ ID NO: 20616 - DNA, 371 bp, Glycine max
  unsure at all n locations
ctaagctttgagcaaattcaaacaacaataactttntactcagatgtctgattgcttttccgaatatatcgagacgctcgaaattgaatgttgaagctctgagccaattcacacgacaataactttttactcggatgattgattgagtcccgtaatataacaagacgctcaaaattgaatgttgaagctatgagccaattcaaatgacaataactttttactcggatgtctgaatgagtcccgaaatatatcgagacgctcgaacgtgaatgtgaacctctgagccatttaaacgacaataactttttactcggatgtctgattgagtcccgtaatatatcgagacgctcgaaattgaatgttcgaagctt

SEQ ID NO: 20617 - DNA, 425 bp, Glycine max
  unsure at all n locations
agcttctttnctcgagatcatctcttatttaagcatttcagcctttgctttcttgtagcttaagaaaaatgccatttcttcttctttctttcttccaaatccatttctaaagttacaagtactttctccatcacccacatccaccattagccaccacaaaccatcattgttctccattgaaaacccacaccgagaggaacccttcaaccgaagcagaatttccaacttggcttgcggtttcggtagagaacgaaaaccctaatctgatctttcattttctttcgagggaactatggttctatgcttggttcttgtagtttcatcttgtctttgcatcttttctaactttgcaaccgccattgcatgtcttatgcttcctttgaaaaaccttagagaanaagactttgtaaacatgatcctttcat

SEQ ID NO: 20618 - DNA, 331 bp, Glycine max
  unsure at all n locations
accggtgagagtgngaccttactctgggagttgtcgacttactgttatttatgatatttgcatgaatctctgaattctagattgatatgtatagcttaaaacatgatgaaggccatgatttgtatatacaccagctcttttgaccaaatagctcaccttgaatgataactggatcttttgctccttctataagttgaatgatttttgtcatgaatcgaacccttaacatcaatgattatctcttgcaccttgctacattctaggagagcatatggttcaaggcaaatttactctaaatttgggggaggaaagtcaattagaatgaaaagaa

SEQ ID NO: 20619 - DNA, 325 bp, Glycine max
  unsure at all n locations
agctttactttgtggcagggcgggcttccttcacttccttgtctccaacgcgagctctgaccactgttcttccttcccgcgatgcttcttttcatgtccgcctgagtgggcttatagcctanaccatacttcccacgatttccttgggtttttatcaggctagttatgccgccattgtctttgcctaaacccatcccgggttcataaccgttccccaacataactcgggccatcattaccgccgcatcggacagacaaggttgcccaaagagggagtccacggaggaaatgctgaccacctcaaaagactggaaagcggtttcta

SEQ ID NO: 20620 - DNA, 433 bp, Glycine max
  unsure at all n locations
tgtgtctcaacatggtcttttcaccgaacgtgcccgatttttgtattttgttgcaaaacaaattcatgtgctagagtgtcagttttgggttgaactcccatattatttccacgaggcgcacgtaacaatgatgatttggaaacaacgcgcaaaattaatcatgcctacaactaggggggtactcaagcctccaacttatggcattatgatactaaagcttgagatttatgcaagtagacccaacgtttccaaatttgttctttattggttcaacgaatccatccattcttatcttggttattttggaaaataaactcttaacgtcagttttctggttccacaagatatgnttgctctctacgaatgatttattctttctatgaccataacacgctgaccttgagggctttctttctcttttctttttggttca

SEQ ID NO: 20621 - DNA, 421 bp, Glycine max
  unsure at all n locations
agcttaatgtcttttattttattttgagaaaatggagactaatgtaataggttggatttgtctacgaggcctagactaacatggaccatctttataagtaattcaaaatgaatcattaatatagattaatctaaatccacattattatggtacacctttcataatatattttttctccctcactgccatagtcttgtcaatcaacctacagcctcctacctcctatgtccgaccccatcctctaatttttattttttttataaatgcaaaacaaaaatatctgacttagaaaaacataattttttttagttgattcaagtcttcccttgttgcaatcatccaatctaagctntaaattgatttctttgttttacattgcatcacttgaataatntaattcttcgtatttgactatagaaaa

SEQ ID NO: 20622 - DNA, 448 bp, Glycine max
  unsure at all n locations
tcacaccaggtataaatgttatatgggcagagaacaaagatgaanatttttattatgtttgcttaaaatatgaagaggacattccttaagatagaagctgcaaaaataattatttataatcctacaactgatctgcaattcaatttacaatttagcgaccaaatcattttgactgacatatcaatatgtgcctccgcaccataatggcataatccatcgcctatcattggcttttggctgcctaagtgtgctaatgtcgaaaagaaattgtgccacggcaaagccaccaccgaagcaataggatggcagagcctatgagatatcactatgcagcttatgcaatgagttggaagaactattcctgctctacanagtatcataacaatcnnctctcataaatctagacanataatttctcacatccatatagtgtcatgcataaatgaaa

SEQ ID NO: 20623 - DNA, 428 bp, Glycine max
  unsure at all n locations
ttcntgtttttacagcgtaaatggctgaatacattgaagtctttgaaatgtaaataaagatattgtagtcttttgaaagcataaatgactaaagacattgaagtctttgaaatgtaaatggagacattgttgtcttttgaaagcgtaaatgactaaagacattgaagtctttggaatgtaaatgacaaaggacttgagtcctatgaaagcataacgacagtgggctttgagtcctatgaaagataaggacagaggacattgagtcccatgaaatcataanacanatgatgttgagtcctatgaaacaacccaatagttactagtaccaaagggctcaaccttatgagaaagcaagagaatgactctnttgaaaggtctctcattctaaacttaagagataggacattagatttangaactgatatatg

SEQ ID NO: 20624 - DNA, 266 bp, Glycine max
  unsure at all n locations
ggcttacatctggtcatgggtctggggctggtggttgccatgggcttaagctttgatttccacatcagcatctttgtcgtgccttgatttccttaagagaagaaggaaacaagaattctctcacttaactcttctttctaattactctgatgtgtgatggaggccacaaatatatagaagacgtccttacccgaatgcgaaccttctgatccaaantaaacgacaataactttttactctgatgtctgattgattccgtaatatat

SEQ ID NO: 20625 - DNA, 415 bp, Glycine max
  unsure at all n locations
tctttattttcaattacgagcgtctccatatattacgggactcaatcggacatccgaattaaaagttattgtcgttagatttttctcagagcttccgatttcaattacgagcgtttcgctatcctacgggacataatcggacatccgagtcaaaagttattggtcgttgaatttgctcagagcttcagttttcaattacgagcgtctcggtaaattacgagactcattcagacatccgaattaaaagttattgtcatttgactnttcatagagcttccgttttcaatttcgagcatctcgatatattacagggctccatcggacatccaagttaaaagttattcgtcgttgatttttctcagagcttccgttntcaattacgagcgtctcgaatcctactggaccaatcggacat

SEQ ID NO: 20626 - DNA, 421 bp, Glycine max
  unsure at all n locations
ttggagtttccaagtgccaattcgncttcttctttaanccattcttcttctggcttcaattcttcagtgggctttccttctgtgtccagcatcttgggatgttcccagcctttgatgacagctttccaagttctgctatccagtgatttgaggaaggccaccattcttgctttccaatattcatagttgcttccatcgagaattggtggtctgttcactggtccgccttctttctccatgttcatcaaacgtatctcctagatctcactctgtgatttcgagtgttggctctgataccaattgaaattctgataccaggggacagatgtcgtacaggatgtcacgacatcacgcttcagaacatgcagattatatgtgtccgtatgaacagattaaaccaagtaataacacaagagaattg

SEQ ID NO: 20627 - DNA, 400 bp, Glycine max
  unsure at all n locations
ttcttagtcttagaggggatggaccttttcaagttttggagaggatcaataacaatgcctataggttggacctcccagaagagaatggagtcagcaccacttttaacatttctgatttaattccttttgcaagtggagcttatattgaggaggaggaactaacaaatntgaggtcaaatcctcttcaaggggaaggggatgatgcaatcctccctaggaatggaccagtcactagaatcatgagcaagaggctccaagaagattgngctagaattgctgaagaaggccctanggttctcatgaacctcanggtagatttctgagcccatgggccaaagttgggtccaattatctttgtacatattagactangatgtcattatatttggccttggattta

SEQ ID NO: 20628 - DNA, 481 bp, Glycine max
  unsure at all n locations
gcaccgatggtttgaacctttgataccnctgcatnnacgngacaccatagaatacttcagcttcttatatcaggcttatcttggtggggaaagctcttcctttcttgcttaatccctaatggatggcgcctcctcttcattcttttcctttgtcttccactggattttcctgggggaaaatcaccattaaaggacccaattggagctcgaagatcccaccctcatagaaaccccaccagcacgcttacatcagaattagagggtccctcttttagaatccctaccgaagtaggattggaagaatcaaagtcgcctcacacactttgattaattaaatcttatcgaaggtagagaatggcttgcatgaaccattggccactatttcaagttgagtaaaaatgtttatacaaatgggacaccgtgtagttcacgaggggacttgtctaagacaggtccacgtttaaagatcacaaggaatgac

SEQ ID NO: 20629 - DNA, 337 bp, Glycine max
  unsure at all n locations
tatcttttatctagatagcacacaaaacacggtgaatttgtcacattcttttttcttactttgcaacaatctggtgtcttatgcactccctcagcatcgcaccatagtgtaaagccatatcttggttttcatagctgaaaggcaacaatngtaagtcatttgcatactcgaattagagtctataagggtaaacgtaatttaatgagaaccacaatatgaaacataagaaataacatgggcatcacgagatgtaaacaagacatacattcgacaaaactaaatntaaaaatcacaaatccagtgatcanggacatgagattgtcatgtctaattgatg

SEQ ID NO: 20630 - DNA, 451 bp, Glycine max
  unsure at all n locations
tgacccatgatacgctgcatcacgngacacatagaaactaagcttttggcanaagtacaattagccnaaaattataatttctgctcatccaancaatatggcaaacctggtggaatttggacctcaggttaaaagctgcagaacccaaacggcatgtggacacccacccttgatttaataatcggtaccatttattctgaaagctcttaaggatttttctatagggtaattcaacttaaacctttgagacagaagggggatagtaaattactacaacgtgctatggtccctaaatcccagatttaacacttaacccactagttacgagctaagtgatttacaatgaatataatgagtgaaccatttgcacctcaatagctgaggtcatggtcagatggaaagtaacacgaagttgacagttgtacaatttatatagctctgaacttttacn

SEQ ID NO: 20631 - DNA, 342 bp, Glycine max
  unsure at all n locations
tgctttatccaaatggacttaccttgaattaattcctttgatagcccttttgagccttgtttccctttccttgttttgaagctcactacaagccttaagtgaaaaaccatgatattaccatatccttaaggaattntggagctttggaattgttttgggaataagtgtggggggtttttgtttcattggacaacttgttttgttggctatgcttcatgatgtattttgggccatacttgatgtacattgtatattggttaaatgttggacatgctgaatgaaatgttgtttctcaaaggctaaagagtaaaaaaaaaaaaaatctanaaaaaaaaaaaatct

SEQ ID NO: 20632 - DNA, 428 bp, Glycine max
  unsure at all n locations
tgctctaaatntacattgatgtttgtatttattggaggattttgtatgccattnttgttttaagagtagcatcccttggtaaaactaactttccaaatgtttgccttcacaggaaatggccccgaggaagcttgcctcaaagaggtccaggaaagataaagcggccgaagggactagttccgctcctgagtatgacagtcaccgctttaggagcgctgtacaccagcagcgcttcgaggccatcaagggactgcgttctccgggagcgacgcgtncagctcaaggacgacgagtatactgatttccaggaggaaatagggcgtcgacggtggacatcactggttactcccatggccaagttcgatccagaaatagtccttgagttttatgccaatgcttggccaacagaggagggcgtgcgtgacatg

SEQ ID NO: 20633 - DNA, 332 bp, Glycine max
  unsure at all n locations
tgtttgcttgctttatctcaatggacttaccttgaattaattccttagatagcccttttgagccttggttccctttccttgttgtgaagctcactacaagccttaagtgaaaaaccatgatatcaccatatccttaaggaattttggagctctggaattgttttgggaataagtgtggcgggtttttgtttcattggacaacttgttttgttggctatgcttcatgatgtatnttgggccatacttgatgtacattgtatattggttaaatgttggacatgctgaatgaaatgttgtttctcaaaggctatagaantaataaaaaaaaaatt

SEQ ID NO: 20634 - DNA, 350 bp, Glycine max
ggtaaaccagtgtcttctattctgcttttattattgttatggttggtggaaaatttgcttgcaacccctgattggttggaaaatagcactataagatcattcacaatattgacaattttaatattttctttaacccgaatgcacgtgttgattgattcatataataaataacatgtatatacttactctcattctaattgtcaatatgcatacacatgtgtttattaatccaaaattattcacaccatcagtgattcctacaattttcttctcatttccattgccaacttgatctgaaagaaagagcatgattagtcaactactattaacaacagctttactgattgagc

SEQ ID NO: 20635 - DNA, 303 bp, Glycine max
  unsure at all n locations
tatcttttggagtagaaacatgggaccaactcattntatttcaaaaaagaaatcatatctagtcaaggtctgagagaccatacaagtttcctaacgatttctaattatgtgggccattaagtctatcatatgctgacaatagccgagaagcccatgaatctcttcgggggcggagtaggtgtctgccatcgccttggccttggctaacaatcggagaagttcttgactcccattcaaggtaagagcanaccgatccatccacatggttgcctcttggtgtaaagagtcgctcaccctttctct

SEQ ID NO: 20636 - DNA, 422 bp, Glycine max
  unsure at all n locations
agagcctttcatgtctatgctgcagagcctttttcagtgtccactcctgattatgccgagcttgcaagatgtggtcttgcaaccaccaattatgaacatggaggaatttctgcagaagggtgcctaaccaggaatccagccttcttctttgggaaggggggaagcctctggcacccangaaccttagccggaccaagggattgatgaaaatccctgaaatggcccaatacaagcttaagcgcccagtgagaagggcgaaggccctgtggagaatgataaagcccccgagtggagaaggatgaaagcccaagtggagaaggatgaatgccccaggcagagacactatcaagactattattgttgctgaagcccagattaattgagggccacagtaataagtnntaagtataattattttattg

SEQ ID NO: 20637 - DNA, 290 bp, Glycine max
  unsure at all n locations
caatttggggaaaattggatgagggaaaaagtggttttcgaaatctgcactttatgccgaattttgtataagtgcagaaaaatgcttgtgtatggctggttgtgaaaagggtagtacatatggggttctggacattntctagcagatcccaacggtcaaaatgtagacttatgtactagagacttccagtaaaattttcgagtcgatccaacggttaacaaattggaacgaagaanatgttactggggtatttgtatgtgaaaagttgtgattttgagttgtgttttggg

SEQ ID NO: 20638 - DNA, 359 bp, Glycine max
tccatcaatattaaagactgcttttaggacacgttatggtttctatgagtatctagtcatgccctttggtgtgactaatgctccaggtgtgtttatagaatacatgaatagagtctttcacccttaccttgatagttttgtggtagtattcataaatgatattttggtatactccaagactagagaagaacatgaagaacacttgaggattgtgttgcataccctttgggactgacaactatatgctaagctatcccgtgtgattttggttagagaaagttagtttcctagggcatgtgatatctcaagggggcataactgtagatccctctaagatagaagtcgctcttgagtgggag

SEQ ID NO: 20639 - DNA, 396 bp, Glycine max
  unsure at all n locations
agctttttaattgttagttagaaccatanatacctagcctcaccagtaggttacaaaatatttataaagtataaaccgtacctatttaaagcctatgaagagagagagtcacacagttttcccatcacaaggtcatgttaaaactcaacatgaaaagatacattccctaagttgatttgtgctctcttttaaactgactactaaattgagagggacttttaaattactgaactattcttcaattaacattaataaaggatccttggttcctttgtagcagggtcctcttgctgctccggttcttcaacacctgacaaaagcagatttaagcaagatgtactnttggggtttccaagtgttggacatcaatggtgtgcagtgctttctcacacggac

SEQ ID NO: 20640 - DNA, 457 bp, Glycine max
  unsure at all n locations
tactcagcttcaatcggcatactccacacaaagaatttgatgggattattttacagcttactccacacaaacagattttgaagacaaaaattgggcaagtttctgcagatcgaatgttatgagctgataggaccattttatctggcttagtgagagaggtcttatacattataccacaattttaaaacaataatcacaggaaatagtaagttataatataaaaagaataattttttcagtaacatctggaaattttgttttggctactggaatctgatggcagattgaaaacaaggctctcttccaaggtcttctgaaccttcattccaaaatttttaacctttatcattntattttttgttcgtgcaatttgnggatttctctgtcaatccaagctatccatagtctccaaacttattgattagcagtggttaacacattggttctggttctcaag

SEQ ID NO: 20641 - DNA, 380 bp, Glycine max
  unsure at all n locations
agcttctcggctcatgctgggaacgcctctagttcaacacccgtgcagcctaaggcacccacccagagggaagctccccaagttccaactccgaacgcgactcgaccggccggtaattccaacacaacaaggaacttccctccgaggccgttgccggaattcaccccgctcccaatgacgtacgaagatcttctaccatccctcatcgccaatcatttggccgtggtaactcccggaagggtcctcgaaccccctttcccgaagtggtatgaccctaatgcaacttgcaagtaccatgggggtgccccggngcattccatcgaanaatgcttggcccttaaatacaaggtccaacatctaatggatgccggatggctgac

SEQ ID NO: 20642 - DNA, 442 bp, Glycine max
tgttgacacgcggagatttacgtcaacttttgtgctcacattatttgttatactgacatttgagtcacgttgacgggcggagataccctagtggttatccgtataaacattcttttttgctgtctgtaaaacgaaaagcctgatagcatgcaaaagactaacgtcgtcttttgcgcccttcgtcaatcgcggccgacaagcccgttgacacgcagagatttacgtcattttccgcgctcacaagatctgtcatactcgcatttgatcatgctgacggacggaaatacccaagtggatatccgtataaacattcttttttcctgtctgtaagacgaaatgcctgatagcacgcagagactaacatcgtcttctgggcccttcgtgaatcgtggccgacaagccccgtgacacgcggagatttacgtcatcttccacgctcaca

SEQ ID NO: 20643 - DNA, 384 bp, Glycine max
  unsure at all n locations
agctttgtgttttcgattaccagngtcngnttctgaaaaatctaaagatgtaactcttcaaaaaggttntgactctttcaaatgggttttaagcttttctaaaagatataactcttctgaatggctttcttgaccagacatgaagagtctataaaagcaaggctttgttttgcattttaaaatcaattattccaagtctttctaacaaatctcttacaatcctttacaagccttgaatctctttgaacttcttcttcttctttgtaccaaaagttntctgaagttttctggttttctaaactttggaaacttatgctattcatccttttcatgctcttctccctttgccaaaaaaattcaccaacgactaatcgcctgaattct

SEQ ID NO: 20644 - DNA, 426 bp, Glycine max
  unsure at all n locations
tgtacaatgcacaggctcacctatcatgtgctngaaattgttattntatttaaagaatgggagcaacaaggatcaaactctagagtctagatgactcagtcaaagactcatgaaccaacttaataagcttaagctattaagtaaagatgcctgattggccttctattacatccctaacagtggtgtatttttagctgcaaaaacaaattgaaaaatgtttgtctggcatcacttttttttacacttattttgtattcctagtaaatgtctactcatatggacacacagataagggagagaagtaaagaagccttttttcaaagggtgtaaatgtgagactcataaaatggtgatggtgatggctaaggtacgcaagacatttcaggtaagttctaactttntttactagtcgaaaaaactcattac

SEQ ID NO: 20645 - DNA, 439 bp, Glycine max
  unsure at all n locations
agctttttaatttanattcaaatgtctaaaaagttgttacaaacagttntaacttctggtaatcgattacatactttgtgtaatcgattacaggctttgaaaatcaaattcgaaatttttaaaattgtttcagaaatcaattcagccactggtaatcgattacatcctctgctaatcgattaccagagagaaaatatcatatttttgaaatcttaaaaaacttttgtaaaatatcctttagtcaaacctgtgcaacattaattaaggaattctttctaagatcctangaactaagtacatcattcttcttgaatntttggattctggacttggatcgtgctcatcttangcatcatcaaaacttcatatcatatatgcttctacacaaggtangtgaggattatctcattagttaggccattatanattattttcctat

SEQ ID NO: 20646 - DNA, 423 bp, Glycine max
  unsure at all n locations
gcttcgatctgttcccatattagctggtgggcttagacaacaatctcatctatcgacgtatctctatacttgatttctagaatgaattatgagcatcaatggggcacttttaaagtctctaaataaggtcttgatcccttctcttggttcctttgaaatgcctatccaatatttatgtatcacttaaatgtatctatccttaaactgaaaaaaagaaaggcaaaaaggacaaaaagaaagaaaatgagctctttangaacccctccactcttgatactcgtcggactaaaatggttgggagaataggtccaagtggttgcaaagatgatttgtctacccatgatgatcagtcgattttatccctattctcaagaaacctccattccagacgaagtcttgtctcagtatttctagtctcctatg

SEQ ID NO: 20647 - DNA, 190 bp, Glycine max
atcactcttttactcgggtgatcactcttctttttatattcctttgtggagcctcactattctctttctcttgttctctcgtttctctcattctgatttggacatcacatgcttctctacgggatagaggtttaagaccaaacgaggaagatttgactattcgtctgtagggctcttctttgtacggttc

SEQ ID NO: 20648 - DNA, 522 bp, Glycine max
  unsure at all n locations
ccacaccactccccaaaaataaacaaaagacacagggnacccccnnnncgaaaggagagcctgacctcgaaacngaacanananaccaacnngaagaacaaaggagagggaacgaaactatgagatgatgcgcaccacgagcacggggggcaaacggagaatcgagaacaaaacgaacaaaaaaggaggagaaaagggaaagacggcggtcctagacgaaaccgaagtgatgggaacaaacgcaacagacctccacacaaaggaaagaaggaaccggacgcccaccaggaacgagagaggaaaacagagcaaggcctcccaagccacaactatgatgcgaccacacgcgaagcttgccaacacgggagtttccgaccatgcacccgaggggcgaacaagccaccaaaggagagagcaagacatgaacagccaacggccgaacacggaccggaacgaaaagatcacgaggaagcggatgcgccggccaacacacacaggacacgaaaccaagcacananaccn

SEQ ID NO: 20649 - DNA, 432 bp, Glycine max
  unsure at all n locations
atcttttttattttaattaaaacgttcaataaactgctggtaatcaattaccatccatgtgtaatcaattacacgttataaattttgaattcaaatttctagtgactgttataaacatcttcagctgctggtaatcgattaccagagaaaaaatctcaattggaaataatagaactctttggtcaaaccttntgttntttcaatttggaaacttcttcctaaagattctagagatcaacttgatcatatatcttgattntcttggattcttgtcttgaataaaacttagaagcacttgatcctttagcatcatcaagacatcaaaacatcttgcttctacatangagtcanttgacttaatccatcaactganaaatccttcaactatttctcgtccttggaaaattcatttgcangaatcaactgcatctt

SEQ ID NO: 20650 - DNA, 429 bp, Glycine max
  unsure at all n locations
tcactggtggatttctccaatgagcaagtccttctaatgctctggcgttcaaacaaaaacaacttttccagccacagattttggcattggttcccataattactaaggtagcagagcaaactgcccagtaaaatcctttatttgttgaagacaagcaagaatcctcaatgagcaaagagaattgaagaacagagagtgagcatttttacatttcaaaacagatttgggtacagaagatcggaatttgtgacaccatggtgcaacatgaagtaaacagaccacattttataaacaaccaaatctaaaaaactataagattaacaagaagcccatttgaaaactaacacctaacacaataagctgaagttccaacatgaagttacaccanatgcctgcttatagctacataggcaaatacatatccctcac

SEQ ID NO: 20651 - DNA, 421 bp, Glycine max
  unsure at all n locations
atcttttagaattcaccccaattctggtgtcctatgctaaccttctctcatatctactcgataattcaatggtagccataaccccagccatggntcctcaacctccattttttcaaagatatgactcgaacactacatgtgcttatcttggaggagttccggggcattccattgagcattgtangaccctgatacataaggtgcaaagtctaattaatgcgggctagttgaaatttgaggagaatcgcttgtgaattatgacattggcaagcgacactatacatggngcaatttgaaggttgttgttagatgtctctaatgactttangattttcaagtttatgccattattctaacagttacaatgctaataatatgataaatttgacatccttgtctctcatcctctcacagntacatc

SEQ ID NO: 20652 - DNA, 436 bp, Glycine max
  unsure at all n locations
gtttgtctttgacagtgaagaacaggattatttggttatcaanccattnctaagaaaacccaaagaaaataagtgttggaaaggcctgccatccgaaatgccttggctattgaaatccttgaagaaaagggttatgaagttgaaaaaatttgatggccaattaaccatctatacctgcttaagaactggagttatgtanggaagggtggtatggtttggttggctattggtctttcataaccaacccatctcctatgcaatgaatatttggatagtggttgaaacaaccagttttaaaccagatttggtgatgggtgacactgatgtactctggatagggtggcatggaaactcaacaagaatgacaatatcaaccattgaaatcttcccagtccttttagccacacccttaattntgtaataccacaaagttatn

SEQ ID NO: 20653 - DNA, 426 bp, Glycine max
  unsure at all n locations
tttcttctctcgtatgaaatgaanatcaatctctatgtgcttagtcctttcatgacaaactgggtttgaggcaatatgaagagcatcctgattatcacaatacaacttcattggcaactcttcacaaaacctcaattcctgcagaaactatttaatccacatgagctcacaagtaaccatagccatagatcgatattcagcttctgcactggaccgagcgacaactgtctgtttcttgtttttccaagaaataagatttcctccaatgaagacacaatagcctaatgtagaccttctatccatgggacaaccatcccaatcagcatcacaatatcccgatagttgtgtattacccttgtcttcatacaataaccctagaccaggagctttttaagatatctcagatacgcatgacagcattccaat

SEQ ID NO: 20654 - DNA, 434 bp, Glycine max
  unsure at all n locations
agctcgcctgggcaagcaccccctgcacaatataattaaaataaatgggggagngcaggtntttcacccaaaacttatccccctcactcaagaacgcagcacccgtgggaatgagggtctttttctgaccctatggcaccattttgggctttttgctttcattttaagggccctgatcactccatacaagtaaatacattattctttggtccctaacttttcgttgatgtatttttatgctctaaacgtacatattggtcaatttcgtgaggaatttgggaccaattcatgccttgattcattgaatnggnggggtgtangggatggccctangcctatggtgtgttctgaaatgattgggcangccacattgcccccaatcccttccttgttatacaccaaagtgcgcccaccaagtgctcagtgaaatgcct

SEQ ID NO: 20655 - DNA, 412 bp, Glycine max
  unsure at all n locations
aagctttcatgaaaggatgcgctaagcgccaacatcattctattttgaagtcattggaagtgtgcttagcacaggtagtggcgctaagcctgaatcactcactgtaagttgaagcttgatgtacgctaagcctcgcatctcaggctaagcgcatattgcagaaagatttttggtgttgcaaattcacttcccaagaggcttgggaaagatacatagatgttattgtgcctaggaagcttttggcagagaggaatgtggtggtctactatacagagtttgatgagttcaaggaggaactcgagacacaccactangatgaggagttgactgactttggtgacagcaacattgatgttgccattgtgaaaggaatctacgccaacctctatgaccncgaggacanatcacctaa

SEQ ID NO: 20656 - DNA, 440 bp, Glycine max
  unsure at all n locations
ntanaatttgaattanaacgttcagaaactgttggtaatttattaccatatatgtgtaatcgattacacagggcaaattttgaattcaaattttaatagctgttgtaaatcagttttggccactggtaatcgattacatcctctggtaatcaattactagagagtaaattcttggccaaactttttgctacttcaattggaattcccttcctatttaatataccctttctaagactctatagactgtcttctcatcctcttgaatatctttaattgctttgtcttgaataaagctttgagacgcatgtgatattntggcatcatcaaaacatcggcttgatcctttgtctacacctttatcatttangaacaacgacctgagtgggtaaacgcacagagacagattctgcaccctttatcattcangaaccacaacctga

SEQ ID NO: 20657 - DNA, 409 bp, Glycine max
  unsure at all n locations
tgcntttgcatcnngngagaacccacatgggatcaaatgacaaagcatatcagtctgtttatcaggaacctgatgaagatgagattgtgggtgtttccctctcacggtcacttctaagtgtagctgcttcagctttgatgaccaatataacagacttangccctcttgtcttgccctattccgagcagctgcgctatggatggtcagtgatttccaggaaaatgtgggcaaggcggaacaaggaaatgtatgttccanatttcatgaaggctttngagcatttctgcatacatgctggtggtaagtcagtcgtagatgccatagaggagagtctgaagctgcacaagaaagacggtgaagcctcaaggatggcattatacagaattggcaatacttcatcttcttctgt

SEQ ID NO: 20658 - DNA, 378 bp, Glycine max
  unsure at all n locations
tgtacattcatttgaatatcattttctatcctctccatcatttatctaaatatcatagatatagtaattaattgctaactttgatagccaatttggataggctgggtgaaatttgatataatgtcaatagtaaagtggaaactgcaattgggccaataatcttggggtggccaaggaaagtattcgtagacattaatttcatgcatatgacatgacagaaataaagagaatgatgaatagaatcgcttgttaaaatcgatttacatatgatcacacttatatatgctgntgctatcaatgcaaggggctgattaataaaagatcgaaatgtattatatggcttataataacaagtcccagtagatgttgcatataaac

SEQ ID NO: 20659 - DNA, 334 bp, Glycine max
agctttctctaaatcagtcaaatgttgatctataccagctaacttgactaccacatcatcaacatatactttgatgttttgcccaatggcatcatgaaaaatgagattcatagccctctaataagtggcaccaaccattttttagtctaaacgacatccataaccattcatatatcccaagagctctgagacaacagaatatcattttttgcatatctacaacagccataaaaatcttattctaaccaaaatgaccattaataaaggtaagaacaccatatttggttgttgcgtcaactaacatgctagctatgggtataacatactcatcttt

SEQ ID NO: 20660 - DNA, 472 bp, Glycine max
  unsure at all n locations
ggtgcccttgaccttgggccttgantncgngacctatgaaactaagcttaaccataggtagatgcacacaaaatggttttatgcatcttaaatacgccctcatgtagcagcttttaaacttgaagtgtggaccatgccaagagttgggaattcttaaaggagatggagggtttttattagtaccacataaaagatggagagttggccatggccttataccaatgtgggacaatggtctttgaacccaaccgccccttgcttcattgggaagatgttaaacacattggcctgggccattttaaatgatggaagaccattttatacttgaagaaaggacacataagtgactggtttactcaagaaggaataaatgggaggatagtgcaacagtgcaagagaaaaacagtagggggagggaggtgattcttctggatcatgagcacaaggacctgannattcattagaggagagc

SEQ ID NO: 20661 - DNA, 385 bp, Glycine max
acatagatctgtatggtgatctgcagaagaacataaaccacagactcttgcaacaagtgcatatttctgattcatggcaagctgagttactaggttaaccaaggcatcaagttttccctcaagctttttattctcagcagatgaagatgaatccatggccacctcatggactcctctaaggacaatagcatcatttcttgcactgaattgttgggagttggaaaccatcttctcaatcaaattcttagcctcagcaggggtcgtatcaccaagagctccaccattggaagcatcaatcatactcctctccatgtagctaagtccctcatagaaatactgcagaaggagttgctcagaaatctggtagtgaggacaacttgcacac

SEQ ID NO: 20662 - DNA, 439 bp, Glycine max
  unsure at all n locations
tcanaccacagcaacacanaatctaggtgtccaaaacccctcaattcaatggcttttctaggtttgaaaggtgaaatttagaatgaggtaaatttgaagcaaactctcacctcacacaagtccataacatcaatctaaacttgctcaaactgaatttacaccaaaaattccaccaaatcaaaatttgactcttcaacacccaattttgccctagaaatggctcttggttcactttggtcatttgtttttctctctagctagcctacctttctcacatgtcctaaatgacatttcaagctagtattaactcactttaacctccatttaccacaaaattcagacttagccttccaactctcaaagtctcaccctttntccactcataacatcacattctcactntctaaccctaggttagttctacccttcatctctaaca

SEQ ID NO: 20663 - DNA, 372 bp, Glycine max
  unsure at all n locations
agcttttcnttttaaattaattaagtataactaatttttaattaaatttaatcacatttaaaatccctcactcctttttaattatacatgatgtgaaaactaaactcatgttctccgagaagcttagcatctgttgtcaaagaaattgatctctcaacacaaatttttctttgtatgcttggagttggaaccctgaccacatagactctcccatgtgctgtatatgattgattagaacttacaacaactaagcctagtagtggctttcatattcaccctatcttccaaagctaaacaggcatttaattaattatatatttacgaataaatatatgaagatgaagttgtctctggttccatatataaaacacg

SEQ ID NO: 20664 - DNA, 424 bp, Glycine max
  unsure at all n locations
tgggaaaactaaacctcattacattatttgagagctanattccattttttccaagacttatccgagaacaccaagattttcccttgctgcaccgctcacataggacaggcctttaaactacctaacaagacgttgaagtaagttgtttcatttgcatattggaataatttcgggcaaaattaggacaaaccacaatggccaagttgtaagaagtggtaatgccttattatcaacggtggctttgatcagtcacaacgcacgaacgcactgctaattaattagatggcatatatatatctctttcgtcaatacaccaatgacccaaaaaagaagataattagcattcccaactaacctttccttatgcagctttgactactttccgatacaaacccatatgatcttgctttacaaataccactga

SEQ ID NO: 20665 - DNA, 382 bp, Glycine max
  unsure at all n locations
tatgactgcnattcctgctgtttccgtgagcaatggagttcttgagtgaaaggngcggcgnnnnncnnnnnnnnnnnnnnnnntnnnnncnanncnnananntacaataaanananacaaaccatctaaacaatctcctctatttatcttacaaactacctccttatcaatatttaaacataaatcccctcaaacacttaaatctataacataattccttcttacatcttaataatttttcactataacactttattaattacaattatccttatatacttaacaacttactcattttaacatcatctcttttcttctatttatccacctcatactaatcaaaaaatacccccatccaatacatcacatcttccctaactac

SEQ ID NO: 20666 - DNA, 408 bp, Glycine max
  unsure at all n locations
nttgaagaatcaagaatttgagggtcaacctcaagatgttgtcaaactttatgaggtatataaaaccttaaaaactacattagccaaatttgataatggaacaaataatattaacaaactattaagatattgtagaagttcctcaaaaaaatttgtaaatggaaatgatgaaaaggtatatgttcatgatgaagacaacattatctattacttttgtggaaaaactagacacatgacatccagatgcaaggatcgaccaagtaggtgcaatcaataccttcatggctaacacaaaagaacccaaaaatatttgggtacctaaggaaaatgttattcttattgcaatgtccttgaaacaggaagaaatgcctatcatggacctggaaatggntgttacaaacatgatag

SEQ ID NO: 20667 - DNA, 436 bp, Glycine max
  unsure at all n locations
agcttatttggtattgtatacgtaccaacatattacttgtattcatttatgtgagcacaagttttttagatgaggttcaaaacatattattatttaatttgattgaattttccttctctttattttttttaatatttaggttatttgaataatttaagtatcaatatctctccatttattatctgcatatttaaattctcttcagacagtaatctttttttttgttattcttcttttcttttcccactaataaaaaatctctcaagaccccttcgataactntgtaattgttctttaggaaattattaaaagcttttatattctataataattntagtaatgatgttatgcaagttttattacttaaactctttatagtaatattttggttgcaacaacttttaatgacctaccaagttgnttcattaatattact

SEQ ID NO: 20668 - DNA, 447 bp, Glycine max
  unsure at all n locations
tanagtaccatagtttcattaattctctttaggtcgctgctttggcttgtggataccataggctcccttgtgaatttaatcaaagagtcaataattttaataatgtattcttgcgtagttcaacatatacttgcagtaataaaaaatttggtaattattattatacttacttttggtaatataagttcatttcacaaacattaatatactaatataagtatttaaaaacttagcatcatcagttaaaaaactaattaattttagtgtccctttcgatctgataaaaatgaactaatttttagcatttgaaagtagtattttttattaaaaatatttattatactaaaaatataaagtgtgataaatattttttaataaaaaaatcatttttatatgattaactataaatactataaacttatattggatatataatagagaaactat

SEQ ID NO: 20669 - DNA, 432 bp, Glycine max
  unsure at all n locations
agcttgtctcatcgtttatgcgagacagagaccaacatgttagctatcatcgccaagtaccaagaagagttaggtctagccacggcccacgagcatagaatcgcggatgagtatgcccaagtatacgcggaanaagaggctagaggaagggtgatcgactcattgcaccaagaggcaaccatgtggatggatcggtttgctcttaccttgaacgggagtcaagaacttccccgattgttagccaaggccaaggcgatggcagacacctactccgcccccgaagagattcatgggcttctcggctattgtcagcatatgatagacttaatggcccacataattagaaatcgttaggaaacttgtatggtctctcagaccttgactagatatgacttcctttntgaaatanaatgagttggtcccatgtttcta

SEQ ID NO: 20670 - DNA, 214 bp, Glycine max
gaatgtttatacggataaccactcgggtttttccggccgtcagcgtgactcaaatgtcaatatgaccaatcttgtgagcgcggaagatgacgtaaatctccgcgtggtaaagggcttgtcggccgcgaatgaccaaggacgtaaaagacgtcgttagtctctgcgtgctatacgctgtactcttactgacaccaaaaaagaatgtttatacgga

SEQ ID NO: 20671 - DNA, 365 bp, Glycine max
  unsure at all n locations
ttgcttttctaaacaaagtttatacattccagtccactcaattcatacaactctcattcatttcaaacacaaccattcatttaaaaccaaaacacaccactgaatatcaaattcaaccagttcactgttcaaacaagctttttgtacaagcaatcaacactaaattaactggaatntaaatgactaaaatntaaatactgaaatttaaataactgaaacataaagcataaactaaataaactgatcaaaataaactgttcaaaatgcaagacaagaagataaagatcctgtcaatcctcctacaggtgatcctctgcatgcacattaagatccaacactggagcggttggtggatcctgtacagt

SEQ ID NO: 20672 - DNA, 389 bp, Glycine max
  unsure at all n locations
ctangaataaagcttccttggagtatttttaagttgttgaaatattgccaaaatctaagtaagagcctcgtgtaaaatgacattcaatttcttataatccatttcaaaccgaaattgtactttaatatttgaaatgtaataaaatgatgatagattttggtgcttttgttttaaacattattcactgaggagagaatttttttccctgcgtcatggcaaccacatttttaacttaagatgattgacccttgattggaaatgagggcatgccttgcattgctagaaaataagacatttgctattgatgagaaagtactcccttagaatgagtgtcaaccacttggtggcctaagagggaatatacctctagtgccaacatatggggaatc

SEQ ID NO: 20673 - DNA, 366 bp, Glycine max
  unsure at all n locations
ttctttttattttacatggattatcaatgatcttttaatatatatctgtattcccttatcaatacattatnttggagtaaaatgtcaagttttacatacttgacataacagattgtcattattctagtcagctatcaatgatctattatattaatgcagctcacaacagattcctttgtttctttaatacaagcatataattctaagacagatagtttggttaatttacgtcctgctcagtcagtggtctgggatgccatggtgccttccaaaaagaggacatgtgcaggtcgtccgaaaccctcatctgttgagaagctcaccagagacctgtgcactattcttcatgaacaacagtctttattt

SEQ ID NO: 20674 - DNA, 366 bp, Glycine max
tagcaatactaacctcacaaagaagggcaggttttttaacttcttaatttaactacaagactcttacactcatttatctttacattttagcttcttttacatttacatttatattttaactttgtttataacttttctaccatttttccttcacaacatttttaaagccttctatttagtttttttttttgcctttattttactttcaaaattcactgttagataaatttaatcaatgttcacactaaacccctctcaataactcgagattctattattgagtaaaataacttgatcaacaacgagtgataatgtttacaattacctgattttattcggctatctagttgattcatttagctaaca

SEQ ID NO: 20675 - DNA, 359 bp, Glycine max
  unsure at all n locations
tgcttcttatccaaagctcatcttagtggtgaagctccttcttccatggcttattccctagtggatggcgcctcctctcacctcttctcctttgtcttccgctgcatctccatggtgtaaaatcaccattaaaggacctcattgaagctcanagatccagcctccatagaagccccacaagcaagcttccatcaaaaccttttgctatttcaatttggaattcccttcctaaaatactagagatcttcttgatgttgtatcttgtattcttggattggtgtcttgaattaaacatgagaagcgcattntcataagacatcaaatcatcacgatcatatggcgtcatcaaaacatcaaat

SEQ ID NO: 20676 - DNA, 367 bp, Glycine max
  unsure at all n locations
gatgcagatgggtttgtatctaccttatcactcctctaatgactatggcatcatttctggcgctaaactgctgggaattggaggccatcttctcaattaaatttctggcttcaacaagaatcatgtctcccagggcttcaccactggcagcatctatcatacttctctccatattactgagtccttcataaaaatattggaaaagaagctgttctgaaatctgatggtgggggcactggccatagtttcttaaatctctcccagtactcatacaggctctctccactgagttttctaatacctgagatatccttcctgatggcttgggtcctggaagcanggaaaattttttctaagaatactctct

SEQ ID NO: 20677 - DNA, 410 bp, Glycine max
ggctatctcttatcttgagacaccatactcggggcaaagcgtgaaaggaagacgacatcggagtcagccagcgtacccctaagacgtgctgctacggacagcgaaccccggagcacacgagcgacgcgaaaagcgacgccagcagcctagcgcaaggccgcgcaacccgcgcgattaccaaccccagggaaccagggaccgcgcagagaatcgagggcgcggcggaaaccgcgaccgaaccagagcacacagcggtggacgcgagtggtcggccgacggcgcggcagcgaaacagaggcgagccgcggcgaaaaccccacgggggggatcggctctgcaggaccagacgcggaggcaaaaaacgggcagagcactcacacacaaagacagggaaagccggccagcgcgcc

SEQ ID NO: 20678 - DNA, 331 bp, Glycine max
  unsure at all n locations
tttctttcttaatcaatctgtctactgactagtctttctatttgccagttcacattcttggtctttctttgtctaacatacacacttgttcaaactcatgaaaaggaacacaaactccatcataatcatgccttcaattcaaaataaagtcatacacccattttcacaaaaagaataaagtgttttatatgcctgtcatcaaaatcaagtcaaacttgtccatatgcttcagaataagcaaaccaactatcctccatagactagcagtgaatataaatatgaaaaaaatactgtactanaaccataattaaaataataataaacccaaaag

SEQ ID NO: 20679 - DNA, 432 bp, Glycine max
  unsure at all n locations
atcttttaccttctgaaaaccgatagtaaatgaatggtttagtgcaaatatgcccaacgtggtactttgggaatcaaggctgctaataaaaaaacatatattttttatgcaagttgtaggttttttccttttccttgtcattattacaattttactttgggatatgtactattgtgttgctttcatgagatttcaacatttagcttttagattgttattctgaaatctgaaaataagttattcatgtatgctgctcttccttgatatcaagtggaaagttaactaggaaaagctcttagtcaatggctntttccagtgtttttcattgatatggatacaagtgcangtattgcattgaatttctaaaggaatgggcacgagaggatatttatatangaaaatntanaacatanagtactaacatcataatat

SEQ ID NO: 20680 - DNA, 391 bp, Glycine max
  unsure at all n locations
ttgagccaaaatcctgactcaccataaaccttgtcccagtgtgagaatgccaatccttaccctcggaagcaaaaaaaaaaaggagaagagaaggaaaatttccaatcaaagaggaagcataaaaaggagagaaggaaaatttccaatcaaagagaaagaaaagaagaggaaagaaaactcccaatcaaagaatgggagaagaaaaaaaaaaaaaaaaagaagttaaaaagaagaaagctcctggtcaaagaaaccagaagaatgtgcagaaaggtcttttgaccggacgatatctgaacaatacagaattgtcaccaaatgaacaaaaaaagaaggaaaggaaatcacgacctanaatggtcttctccctttaattaccaaccaaaatccc

SEQ ID NO: 20681 - DNA, 426 bp, Glycine max
  unsure at all n locations
agcttctacattcaatttcgagctnttcgatatattacgggactcaatcggacatccgagtaaaaagttattgtagtttgaatttgctcagggcttcggtattccatttcgagcgtctcgatatattacgggactcaatcggacatcagagtaaaaagttattgttgtttgaatttgctcagagcttcggtattccatttcgagcatctcgatatattacgggactcaatcagacatcggagtaaaaagttattgtagtttcaatttgctcagggcttcggtattccatttcgagcgtctcgatgtattacgggactcaatcagacatccgagtaaaaagttattgtcgtttgaatttgctcagagcttctacattcaatttcgagcttttcgatatatttacgggactcatcagacattcgagta

SEQ ID NO: 20682 - DNA, 427 bp, Glycine max
  unsure at all n locations
ttgagaaaattcaaacgacaatatctttntactcggatgtttgattgagtcccgtaatatatcgagacgctcgaaattgaataccgaagcgctgagcaaattcaaacaacaataactttttactcggatgtctgattgagtcccgtaatatatcgaaaagctcgaatgtgaatgtagaagctcagagcaaattcaaacgacaataactttttactcggatgtctgattgagtcccgtaatataccgagatgtcgaaatggaataccgaagctctgagcaaattcaaacaataataactttttactcggatgtccgattgagtcccgtaatatatcggaacgcttgaaatngaatgttgaagctctgagcaaattcaaacgacaataaacttttactcggatgtcttgatgagtcccgtaatatatcg

SEQ ID NO: 20683 - DNA, 410 bp, Glycine max
  unsure at all n locations
agctttttgtgagaaagcgtggaagagtcagtcttcctacttttgtttgttgaccacagagtggtacctggagatatgtcgcgagggtcangagaccttggggacgtcaggtggggtgctattgcccaaaaccaagcttgaccaatcccgacccaacccgggcatagtcagtcagtgggaacctgtgatgtacctaaacagacgagctcctggcagtcaaccaataaaagaacaaagaccacaaagcaaggaggcttgtgtggtggctggccagctatgaatcttgagtggtatctggaatttggcctctggtaatcgattaccaagggggtgtaatcgattacaaggcttnaaaatggagataggaagttaagatggcctcttgtaatcgattaccaagggtgtgtaat

SEQ ID NO: 20684 - DNA, 402 bp, Glycine max
  unsure at all n locations
tgaagaggatgctntaatggaggatttgaaagagagaatgtgggagcacgaaattgaaggaataaaagagggagagaagtggaactttgaagtgtatctcataagacattcattcatcaaagttacaacaagtgttacacatgcttctatttatagactaggtagcttccttgagaagctttcttgagaaaacttccttgagaagctagagcttagctgcgcacacccctctcataacttagccacctcctgagaagcttccttaagaagattcctaaagaagttagagcttagctacacatacctctctaatagctaagctcacctccttgagatgagaagctagaacttagctacacacccnctataatagctaagctcacccccatgacannaaacatg

SEQ ID NO: 20685 - DNA, 96 bp, Glycine max
aaaacggagagaagttgaactttaagttgtgtctcacaagactctcattcatcacagatacaacaagtgttacacatgcttctatttatagactag

SEQ ID NO: 20686 - DNA, 80 bp, Glycine max
tgcttgcacgcatgacgggcatgtatgatgcacgaatgcctatctcggtgtcgactatactgtggatgaatactcttcta

SEQ ID NO: 20687 - DNA, 371 bp, Glycine max
  unsure at all n locations
agctnnttaactatctacagttacaactctctctctctctctctatatatatatatagcaatgcaagttttaaaattggaagtcctcgttccaatcactcgcagtacacatgctaaaattgtaggatataaatgttgaatcaatataatatattttggtaaagtggcagaaaccgaaagttgaatctatcaaaatcaaaatagatgctgcagtgtcacgtcgtggttcatgaggaatatgggaaccataattagataggacaaacgtacgaagaagcaaggtgacgcaagtacccaacatagttagttggtcatctcacattcacactttacctttgtcagngccacataaagggtccgaatatgtgaata

SEQ ID NO: 20688 - DNA, 429 bp, Glycine max
actaagcttacaacattctcgtgcgttatctccctgagtaactgctgtatcaaatgatattcactcaaaaccaatccaaaccgccaaaccattaaataattttttttttataaaaaaaagcctcctctggctcaagcctcttcaaggtttccaaatactagaaactacagagaactaacaaaagaaaaggaaaatagataaatgaaaaaaaatggcaatttcttcagaaactcgaaattaaaaacaatctaagcgaattcgcttcgaatttcaaaattacaacttccctaggtgtaattaagcaagcagagaaaggaataccatgatttcacgtatggcggtgggagagacaccatcgccatccttggattggcttgaattttttatggcgaatggatttccgcgattggtggaagacttgatgcgagc

SEQ ID NO: 20689 - DNA, 393 bp, Glycine max
  unsure at all n locations
agcttataccattccattttcccanattttttaatccgagctgggaattctctcccgactcaagtaaaaggaccacctgcaacagaaagagcgccggcccaacgcacggctccagccgctccccggccagttaataatacagcccccgacgcgacctataaatatgcacagcacccgcccccgaaagataacttctcccctattcccatggcatactccgagttatggccttcattattggagaatcatttggtggtggccatacccgggaaggtcttccagccaccctaccccaagtggtacgacccgggtgccaagtgtgtgtaccatagtggagctcccggacacaatattgactcctgcatcccgttcaagtataaagtgcagcacctg

SEQ ID NO: 20690 - DNA, 397 bp, Glycine max
  unsure at all n locations
tcggtgggatcaaggagtataccacatattcaacaagattgttgaagactttaagcacacccaccctaataaccaagggctcagctgttgctaaacaaatttttttagcaaaactaacttgaaagctacgaagggtgctttagaacaaagtttgaaggaagctcctctagtggacctggacgctattaataaaaggaaatagaagaggctaggcaaacccattgctgatgaagaccaatatctaaacaactttggtcttacagaagattcagaagattatagctaagcaatagaaaagaaaaaagaccaaaaaataatcacaaaaagaagaagaagaaaatgaacttattgctanggagcacgggatgaagagaagacatgagaatgttgcgtctac

SEQ ID NO: 20691 - DNA, 455 bp, Glycine max
agttgctcatgcattgcaggcactgcagctagtaccagggatcctatcagccgacctgcctgctgcagcttttcattttcccagctcattgtgaacactgaacatgatatctggcatctgggcgtattactcggttctactagaactgctgatctggctaatgactgactgacgaatcaatggttactgtagcggtgagatggtgacaaagtctttgactctctcgagctatgagcttgcctctatgactgtctagtaacacagatctagcaagatagcaacgccaactcccgagttgctcatgctatggctctggtagtgacggcaaagcattcgcaaagcgctcattgctaatgactcccgtgagactgtgtcatatgcacaagagggatgtgtcttgatggaaaactgggatatctgttactagtgtaggaaatatcttatgagacacattg

SEQ ID NO: 20692 - DNA, 413 bp, Glycine max
  unsure at all n locations
tttggaatgaaaatggcgttatacttgcttggtntgacattttcatgataaggtggaaatggatatgtgtttcattttcgctcttggttaacaatcattttcctccaactcaactgctcgtggctttagtaaaactagaagtgttagttggagattgcatttgtcaaatgttgcaattttttgtttgcctttatgtttggaatttaagttcctagatactgtttgcgggaatgggacaggatcttgtggattgttcgatccctctttctccaaataaaatattgcctctttggaagtatcatttggtgtcttatttgccangcgttactaagttaagggaatttgtttctttactggcttttctaaatcaatacagctgccgagtaatgtgaataagatgtaagttgcttcat

SEQ ID NO: 20693 - DNA, 437 bp, Glycine max
  unsure at all n locations
agcttgtttcgaggtacttacccgttgaagatcgaagaacgatgaagaacgaatgaagaacgtcgaagaacggttganatctttgcgaaattcctcacggaaaacgttacggaaacgtttcggaagcgcctcggcttagattntcttcacggaaacatattttccaagcaaattcgaaagagagagaagtgcctaatgggctgaccccttccttcttgccttcctcccctatttatagcaaaataggggaggtggttgccgcccagctcgcccaggcgagctcagctcgcccaggcgagcagggttgcttcctccagaagcaaccgccttctggaggaatattccggagggcccaagtgggcctgggtgctatntgcacccccatttttactaagtacacccccctctagctgtttttggtgattcttttttcgtaa

SEQ ID NO: 20694 - DNA, 335 bp, Glycine max
  unsure at all n locations
gatgaatcaagattgattcaaagagtnttgatgatttttctagatgactgaccttttttctcaaaaggcaagagcacttcatgataaaaaagactgatgatctccagaatcaaaaaatgggttcaagaatgaattcagaacacttcaagggtccaatggaaatttgatttccagaatcaagaattaaggttccagaattcaggtcccagaatccatatctagaatccagaatccagagaagaccttatccagaatantatctgccagctcccctaactgagttgacatgaattttctcgaaccttttaccagacttttagtctctgggatcgata

SEQ ID NO: 20695 - DNA, 427 bp, Glycine max
  unsure at all n locations
ttctttttctgcaccaaatgcctttntctataaatagccatgcaaggggagaggttaagaggtcagaactaaagaaggagaggaggaaacacaaaaagagaaagagaagaagaaaaaaaagcaaagctgaggcgttgccaaatcgcaaccgtggatcattccctacatcatttctctcgctagccttgtaccccacgcaacagtcgattagtttttcttaagagttgaatgtaatctatgtacccttataggccctctgtgatattatgtgtgtatttatcttctcccctttatcgttggtaatttcgtctcattcgtaaggcttaattctagtcgatcactagtgtcatgaaatttgttttttagtgagactgganggaataaacaaaccaaaatgaaaaaaaatcattctaactattgatcgagt

SEQ ID NO: 20696 - DNA, 301 bp, Glycine max
cacagagtggtacctggagatatgtcgcgggggtcaagagaccttggggacgtcaggtggggtgctattgcccaaaaccaagcttgaccaatccccacccaacccgggcataatcggtcagtgagaacctgtgatgtacctaagcaggcgaactcctggcagtcaacagataaaaggaaaacaagaccacaaagcaaggaccttgtggggctggccagctgtgaattttgtgtaatatgtggattggggcctctggtaatcgattaccaaaggtgagtaatcgatacaaggcttaaaattg

SEQ ID NO: 20697 - DNA, 335 bp, Glycine max
  unsure at all n locations
ttcttgtatgattatggggtacccatcacatgtggtactaggtggcggtcgggcgatggtgcacaacaagttttccacatccacaatgcgcgcataaacccaccatcccctgttgcccacctccaactgagctcacgtactcccacgtagcccatatcctcgttcctctcaacaccgggtccccatcaatcctcccaagctttcccaacatccaagtaattcaacaatcaaacaacacaaactatcacagccaagaaaacagggcaaaggcagaanactctgcccaaaacaccaaccaaaatcacagcttttctcacttaaagaccccagtaaca

SEQ ID NO: 20698 - DNA, 438 bp, Glycine max
  unsure at all n locations
tagctagatagattgtccaagatggaagatacttttaactattttatgcatgtatccatctcaaaccaaaagaacattgatgcttctattaaaaatctagaggtttaagtgggacaattggcaaaacaaatgtctgagcatgaaagtggatccttctcagcaaccacaaaagtcaacccaagaaaacaatgtaaggcagctacaactaagaggggggcagtagttggtttgaagaacgaaagttantttcgcgagaaaagacaaatgaagagttgtaaaaatgagtgatgaaaaagaagtagtcgaaagagagaaacaaaatgaagtattagctaaagagatggagaacgaaatgagtgaagtggaggagcataaatngaagaaaacaacatctaacaaaggcaaagttgtactagatcatccaccaattcaacatct

SEQ ID NO: 20699 - DNA, 363 bp, Glycine max
  unsure at all n locations
ttgcttgttaactaaatgagctaagttatattntaatataattatattcatttagttcatgataaagaattaattntactcacaatatttgtgtgttacacgtacatattaaaggtggggcaggagaggagaggaaacttacaaaagaataaattaccatatgtttataaaatataattaacttatttcaagttttctataatttataacgacaatttaatcttattcggttttttaaatatagaaatgatttatataaaaacatgtatatatgataaacattaagtgtttaattaaactatntatctaagcacataaacatcaaatntaaaaaataattaacctttaaaatcaaccgattac

SEQ ID NO: 20700 - DNA, 349 bp, Glycine max
  unsure at all n locations
tccactccagttcccattcgagtacctaatggttttgantttcaaacgttaaaaaccagaatacacaatacccttaagctaactgacaaacaatttttggatgaaatttactaccggcagcctttcacatatgcaagtaatcaattttggtttcaatgtatgcaattgaaagatgatgctgatgttaacacaatgttaatgggtaatcatgaattttcgtttgttggtctgattgagttattatgtancctactacaccccacatggtattttaaacttacttcaagctactatgatccctacttatgatgccctgctatattacaatgggaagtggaacatgtcatgc

SEQ ID NO: 20701 - DNA, 388 bp, Glycine max
  unsure at all n locations
ttctttctcttgaggagggaaggatatttgcagctaatgaacaactctcttaactatttgnccttccccaaactggccaaacggacaanntaagactaaatacaatgactaatgcaaactgtccgcaagagtcattgcattcagtctcatacggaaatctaatgttcactcaccatgaacaacaattgtttatgtagcanataacagtgatcacatacaacaacatacagaaggtcatattctattacagacaaatatagacatcagcagttgtttatgtaactaatgtcatatgctgtgtctcaagggtgcttatgctcctatattgtagttgggtatatgtgtgtgagtatgtatcatgaggatgtgtgagtgttgatattaacta

SEQ ID NO: 20702 - DNA, 428 bp, Glycine max
  unsure at all n locations
aagaccagactatatgagggatccnacatgtgttatagttattatcttaagggctaccgcggctacgagctngcaagactaagaaaactcgtcatcaagacgacatcctgaagttgatgaataatgcctcatggaatagggaagaaaaaaaaagggagaagaacggtcctatacccgctcaactaccccaagaagaagatgaggaagaaaacccgggtgaaccaccttaacctgcatcacaacgacatgaatacgcgctaccgacccagagtctacgtcaagacgagtaagagcattggtggacaaaacgaaaccctgaccatggcctactggaacctgtaacctggaaaagcgacaagcggaacactggccaggcaatggataaatatccaaagacgacaaagcatactgggaagagacagcccccg

SEQ ID NO: 20703 - DNA, 386 bp, Glycine max
  unsure at all n locations
tgcttataacctccatgagagaaagcagagtgaagcttgtgagagtcgtgagtggagcgtcaagttagagttgtgagattagggaggcatgagtcgcaagagcctgagagcgagagtccgtgggggagaggaaattcaaattcttagtttttaaagagaatttgaaattctcctatttgaactaattaaaattccttatacaaataccagaattttaattgctccttaaactttntatccaaacagcttattttacgggtgagtattttaaattcttcaaaaaaatgaattaccccatttaattcccccatccaattgcagggtaaagganagttacattcttttatcaaacaaaagaaattttgaggaaggagtggagtatcata

SEQ ID NO: 20704 - DNA, 436 bp, Glycine max
tagcaaatggacctgggtattgctcagtttcattatatcttccgtaatactcatcacctctatcatatctaataatttttatatttatgtctaattgcccttttacttcattgtagtaaatttctaaggcatccattgcctaagaaatctcgggcagtaagtagacataactgtaacgtgaataatcatcaataatggtgataaagtatcattcctttccgaaagaactaacatcaaaaggtccacaaattcaatatcacaatttcaagaagctgagtgcttcttgtagctcttttctttgtatgttttgcttgttttcccttaatacaacccacataaatatttagatccgtaaaatctagataaggaagaatttcattctttattaatatttccatcctttctctagaaatgtgacctaaacgtttatgccaca

SEQ ID NO: 20705 - DNA, 302 bp, Glycine max
agcttttccaaagaagatggtgtcatccgcaaactggagaatattcactgcgaccttgttcttccccaccataaagctgtgaaataagtttcttgacactgcttccctcatcaatcctgttaacccttcagcaaccaagacaaataataaaggggccaagggatccccttgtctcaatcctctttgaggcttaaattcatcagttgggcttccatttacaaggatagatattgaggctgatgtgaggcatcctttaacccaaccaatccacctttcatgaaaccccattcttctcatcatat

SEQ ID NO: 20706 - DNA, 426 bp, Glycine max
  unsure at all n locations
tttgtcatcacctaanaaagccatttttaaggtctaacgtcttgaaatggtcttttccgcttttattcgttaaatgtagatttctaaaaggcctaaaatcaacatgtagctttattacctctttcaaaaataaagagatcatgaatggtccaatgccttaatgttctctctattttcaaaaagaatcgaaagattgtttaatggtccaatgccttaaatgacctttcattcaataaaaacatacttgcacaaaggataaaaaataacttaaccaacgcttagttctcaaagaactaagtaggtctgatttccttatcacaattgaggaatatgtangagcaagggaaacaccctcgtcgaccacaaaaagataaaaaatataaaagacattggaaataacataaaattgatgtcatatttgcacat

SEQ ID NO: 20707 - DNA, 378 bp, Glycine max
  unsure at all n locations
agggaacgcaaaagaacggcgggaagaaaaaggggaaccccccccggagtgtcatgagctgcaaccanagcggggcaaagcacggaaaaacacttcattcttacacccgagagggaagggaaacaaagagcagaagccgaaaaaagaggaaaaacagaaaacgaaaaggacggaagagggaggaaaaaggcacggaacgaaaacgaagggcggaagaagagagaaaaggaggcacacgagcaggagacggaggaagaacagaggaggcgcgggggagaggggaggcggaagcgaaaaagacgaaggaatacgagggggaagcaagaaacgcggcggggcaagagaaaggggggggaacaaggggaacaacgaagcaag

SEQ ID NO: 20708 - DNA, 354 bp, Glycine max
  unsure at all n locations
gatgacttgactgagacntgaaaacaccantaanaattctcacctacaatcccacttttaaattttatttttgacaggggatccgcgggggaatttccttcccctgcacaacggtccacacactagttgtgagctgccagagacggtacaaatctgattgtacagcatctctctcaggatttgtgtacacaacggggagactacgacggtttatcgaaataacccccccccccccggttttgaatttaactattctgggggaaagaatccctatggctctccccctggagtttacctgtactgatactatctatgctgatattgtaatagtggccctatgggtatatgcttgtg

SEQ ID NO: 20709 - DNA, 410 bp, Glycine max
  unsure at all n locations
agcttgtatgtaaactatatgccttggttaacctggtaacccaattggccatgaataaaaaatctgcacttgtcgccatactctatggtttatgctcctctgttgaccaccacacagacctttgcccttctgtgcagcaatctaaagcaattgaacagcctgaagcttatgctgcaaacatctacaatagacctcctcaacctcagcagcaaaatcagccacaacagaacaattatgacctttccagcaacagatagaatcctgngtggaggaatcatcccaaccttagatggtcgaatccttcacaacaacagcaacaacaacaacatccttattttcagaatgttgttggccctagcagaaccatacgttctccacctatccagtagcaataacaacaacagcaacag

SEQ ID NO: 20710 - DNA, 423 bp, Glycine max
  unsure at all n locations
ntataagcgcaggtcaagtggtcgcaatatgcgaagatgatgttccaagtacattgtatttggtacgaccatgccctcctgatttccagctgggaaattggcgagtggaggaacgcctcggcatttacgcaacgagcataatgtaaacctttacggttttaaaagctctatagttgggcctaggctttagagtttttccttttgttaaggctttgtgtcttttgtttttgaatttataatacaaggatctttcttctctgttctacgtctctacccattctcattcatttgcatgtttacttctttttctgaaacggcagatccgatgacgagtcccccgaaggtactaatacctgggacccgcctatcgacttcgagcaagaaatgagtcaaacggaagatgaaagaaacgaggatgtggga

SEQ ID NO: 20711 - DNA, 426 bp, Glycine max
  unsure at all n locations
agctttataattctctatagataacaatcacccttgagcaatccctaatcatgtgaagaaatgactccttaatcgctccacacctgcaacaagaaaggttagaagataaatgtcgtttaacacgaaaagaaattgtagggaggctgccatggaaggcaagtcaaaggaagaatttgacanttttaggtaaaggaggcttccaaacacaagaccagttcactagaaaagaagaatgaatggcaggctctcggattaaccactcgaaggcatatttagttgaaaagcaccctaaactagatgggttccatataattntgtcaagcatatgaataacaagtgtggtactcatcattttgagtctaatattanttggtagagttgataaacagtgtcccaattcactgccctcaatggaatgtattatgc

SEQ ID NO: 20712 - DNA, 442 bp, Glycine max
  unsure at all n locations
actaagctataagtataaattattttttattatagtaaaattttaatttaactaattatctgcgataataaacttataacctgttaatatattaggctctaccgatataagacttagttcacatattttcatcttcctctcatgcttttaataacaataattttgatttttataaattatattttgattcacatcaattgttttctcaattgtgtctaaacctattgcttcatgtaaagaaaagttagagttaccacaagtctgataggttatacaaatanacctgttgctttatgtaaagaaaagttagagttatatcaaagttttgataggttatacaaataacgcctattattttttcatgtatgagatatgagataagaacgagtctattaataggttatacaaactttnttcatgtataccaacgttctatgagata

SEQ ID NO: 20713 - DNA, 422 bp, Glycine max
agcttttaactcgcagagactaacgtcgtcttttgcggccttcgtcaatcgcggccgacaagcccgttgacacgcagagatttatgtcatcttccgcgcttacaagatctgtcatactgagttctgagtcacgctgacgggcggaaatacccgagtggttatccgtataaactttttgttggttgtaagacgaaaagcctggtagcacgcagagactaacgtcgtcttctgcgcccttcgtcaatcgcggccgacaagcccgtttactcgcggtgatctacgtcatcttccgtgctcacaagatctgtcatactgacttttgagtcacgctgacgggcggaaatacccgagtggttatccgtatacactttttgcattctgtaagacgaaaagcttgataacacgcagagactaacgtcgtc

SEQ ID NO: 20714 - DNA, 316 bp, Glycine max
atgcaaaagttatacggataacctctctggtattttcgcctctcagcgtgactgcaaagtcagtatgacagatcttttgagcacggaagatgacctatattaccgcgtgtaaacgggcttgtcagccgtgattgacgaatggcgcagaggaccacgttagtctctacgtgctatcaagcttttcgtcttacagaacacaaaaaggttattcgggtaaccactcgggtattttcggccatccgccgcaccccagctcacatgacagatcttgtgagcgcggaagattacgtacatcttcacgtgtccacgggcttgt

SEQ ID NO: 20715 - DNA, 280 bp, Glycine max
agcttttccctaatagagtgctttggataagaagcttagagaggaagcttcaatggaggaagagaatgagagagagagagagagagagagtccgggggggggggtgcgaattgatggaaattacggagagaagttgaactttgaagtgtgtctcacaagtttctcatccatcaaagttatgacaagtgttacacatgtttctatttatagcctagcacatgggaaacttccttgagaagcaaggaatgtagctctcttgggaagctagaggaagaaagct

SEQ ID NO: 20716 - DNA, 411 bp, Glycine max
  unsure at all n locations
tactcaagcttgcttgcggagcttctatggaagctggatctttgagctttttgatgttcttcaatggtgatttttcaccatagagatgcagcggaaggcaaaggagaagaggagaggggaggcaccatccactatggaataagccaaggaagaaagagcttcaccaccaaaaattgccttggataagaagcttgaagaggatgctttaatggaggaaaagaaagagagaaggggggagcacgaaattcaaggaataaaagagggagtaactggactttgaagtatgtctcacaagactctcattcatcaaaggtacaacaagtgttacacatgcttctatatatagactangtagcttccttgagaagctttcttaaaaaaacttccttgagaagcttctttgagaaaact

SEQ ID NO: 20717 - DNA, 436 bp, Glycine max
  unsure at all n locations
agctttgtttgttttgtgattctagagagagaaaggtccaagttccagagagttttgagagattttgctgtgtgaagatctacagagaccagagcttgaagcggaagccgttttgagagcttgagatgagtttgtgagtggttgtgagatcctagaggtgaaggagacatcctcacaacttgtaattttgcaatctttcatcttgttcttttctttgttgtaaaggaggcttcccggttatggaaagctaaaatcctctgttggatcttccttgtaagtacttgatgtaaatatcttactatctatctaatgatgttttatgtgttctttgtgctatcagcttttcattctagtatgcctttaccttgatcatatagatgcatgctntggtaggggcattcaacagtgganactgggctgattctgatgaccttga

SEQ ID NO: 20718 - DNA, 423 bp, Glycine max
  unsure at all n locations
gaaatttgcaaattgtttcagaaatttatttagtctctggtaatngancacatcctctggtaatcgattaccagagaggaaatagcatagttttgaaaagataattgttcttaaaatttttttgtaaaatatttcctttagccaaacctgtgcagcatcaattaaggaattctttctaagatcctatcaactaagtatatcgttcttcttgcatttctgaattcttgacttgaatcgcgctttctttggatcatcaaaacttcatatcatatatgcttctacaatctcccctttttgatgatgacaataatctaaaatcaagataaacgatacaccattgataatgcgtgctcacaacccttacacccccttaagattgaagattatgcctaagttctctcncccttttgtaacatcaaaaag

SEQ ID NO: 20719 - DNA, 425 bp, Glycine max
tttcttttttgttagagtcagaagtgctaatgacaaatacttataagtttgagaatttagtgaaacttgatacgttatcaagaaccggacgtagtctcagtgatagaaatgaactaatataaaacttcatatgtctaatatttatctttgtgtgcatcttatctgaccttgggattgaatttgattttgttttgaaaatctgctttgataacatctatttcaattgtctcgctatgtttggttgagaaaatccattatttgtctctcaaagttattttcagatggtaagttgtgtgtttgcaacaaagtttaataaaattttaaaatcacaattcaatctcttcttgcgatattgccttacatataacatgttcattatgcctttatattgtcagtatctcacatataatttactagcactatga

SEQ ID NO: 20720 - DNA, 567 bp, Glycine max
  unsure at all n locations
ccgccactcacacacccaccaccacatcanacctaagtactagagtaacttgtgaccaatanacnaaannnaagggcgaggtttgaaccttgagacantcgcananacgngacaccatanaanacccaagcccgctgcaccattgacagaattaaccaaaaattttacctcttttggacaccagaggcagagacaaccatctgtcaattgcacaaagtcatgactctcactccagcgctagctcttcccaatttccagctgcccttcattctggaaactaatgctaacgacactggtataggagcagtactacatcagaatggccatccaataacatttttgttcaagaaacttgcacctagagtggaaaagaaatctgacgcccccaacagatgctagcaattgttgaagctatagctaaaatcaaacactacctgctgggacacaaatttattaacaaaactgatcaaaaagcttgagaacaatgacggaacaacccctacagacaccctgacaacaacagtggtaacacaagttttgtgaaataattggcgactgacacaaggc

SEQ ID NO: 20721 - DNA, 417 bp, Glycine max
  unsure at all n locations
tcttaccactatttactgatgaatactgtagccaatgatgcgcatatcggatatggctgacatgcacaatattgcatttncgcgtggaaaattgtgaactaggacggtctgaggctacgagactgaatacaatactgtagttccccctttgttacacgatcttttgcgatgctggtgcgcccctaaatgtcatctgctcgaactgaacagtgccgtgaatgatgataaaccattttataacaggtatccctggctgatacaacaagtgctgaaaatcgtaatccgacacgcaatgatgggttccacacataggatacattcatttttgcggctagcgtcgcaatgactgctgtcggtaccttgctgttgttacaccaaataacgctaagcaaatatctgaccgacatcgggaaaccc

SEQ ID NO: 20722 - DNA, 554 bp, Glycine max
  unsure at all n locations
acgcacacacgacgcgcgcacaacgtacacgtgagacgatataaagaggtgagatactcattattantgnacaaaaanaaganaggaggaatgagncttgagacccctgaaacnccgtgacaccacannanactnaagcttgggagttgctcaaacaagttgagccttttagagctcttagctttggnacacaagtgcaacaagagatgtaactactttatgccccaaaaaattaccagtgttaaaactgattccttcatttgctcattgcaggaaggggggcctacaacattttccttgaaggactttcttaaaagtcaaagacaagaagtaaatatccacctagacgctggggaaagaacatgtgtacattgtgccgcccccgcacacaccggactggtgcatgcatgatttgatcactagtgaaaaggtgccatcgaaacttccgcacaattattgggaacagactacaagactttcgggacaactgcagtattacgaatagggtacataaaacggagaaaatcgaattctatcaaatacacaatatttcg

SEQ ID NO: 20723 - DNA, 381 bp, Glycine max
  unsure at all n locations
tatcttattttccgatcgcgaccctctgttcatcagtggattctggcaggagctntttaagctcagcggcactcaccttcgtatgagttcagcctaccatccacaaagtgatggtcagactgaggttatgaatagagtaattgagcagtatttgcgcgcttttgttcaccgtcggcccggaaattggcgtaaatacttaccctggattgagctctcacacaacacttcatggaattccggcacaggttccacgccctatgagattacatttggacgataaccttcttcattaccggaatacatctcgggaacttcanaatttgatgctgtggacgaatctttatacaccgagaggaagtgttcattgcattcgtagaaatt

SEQ ID NO: 20724 - DNA, 422 bp, Glycine max
tccgcttgctgaagatgtggacaaataatcactatctgtttctgatttataaacatcaagtcctggattatctatgatagtttcctctttctttgactcaccaccaccattcatctcacagatgaagaatggtgaagttccttgatcagagcttgaaaccgaagaagtaccagcttccattgtagtaaatggtgtccctagctcacggctgctagttggagtgacaactggtccttttatagaatttaaagaatccccctctcttcctctcgtttccaagcattctaatttgttcagaaagtaatggacataattcttcacaatccctcttttgtgttcaaccaaattcaagcggagtacctagtgttgggaatgcttataaccacgatgtgcactgcagtcttcctgcattgttttctcat

SEQ ID NO: 20725 - DNA, 338 bp, Glycine max
  unsure at all n locations
tatctttgcttttcaaagcttacagaataatgacttanaacgtagccaaatacacggcttaaaataaaagataataataatctaaatctaggaaggtggtggaaggtcgaagcaccgacgaagataactcacatcctcttcaagctgagtgatgcgggcatccattccttcaaagcgagcatcaatggcatctatgcgaccatccaacgaatcaaagcattcgccatcatgcatgacggctgaggaatcatctcgttgaggcggaggagagggagtatgttcgtcttgcggaggttgcgcgttcttcttcaaccattgcccatgcatgtccacggtag

SEQ ID NO: 20726 - DNA, 411 bp, Glycine max
  unsure at all n locations
tgacttgagtcatcaagagattatacaatatgttgacacatgtcnctgagtttcaacaattatcaatcatggttgaatcatctatctttcaatctatctttcaatatcttctttcatctctttaaactctttctataaaaatttctgattcatttctcctcatctttctaaaagtttttttgttcaaatactttctctttcaagaaaagttctttgatcaaaaacttgtgctattcatctttttcattctctccctctttccaacagaatgaaggactaaccgcctgaattcttttctatctgccttctccctttccaagagaattcaaaggactccgtctgagaattctattgattcttccctttcccttaaacaaaatatttcaaaggactaaccgccctcaatatctt

SEQ ID NO: 20727 - DNA, 429 bp, Glycine max
  unsure at all n locations
tgcttgtactttccagtgatggaatgaatccatatggcagtttaagcactcaacacagttcatggcctattttgctagtaatttaaaacttgtctccttggttgtgcatgaagcaaaaatgcatgatgttatctatgatgatatcaagcccaagacaactaggaaaggacattgatatttatctcagtcccttgattgaagacttgacaaagttgtgggacaagggggttactgtgtttgatggtatcaaaataagacatttaagttgcgtgcaatgctatttcgtaccattaatgactttccagcatacgagaatntgagtggatatagtgttaagggccatcatgcatgctctatatatgaagaagacacaagccatgtacaattgnacatggaagaaaatatatacactcggcattgcattttcta

SEQ ID NO: 20728 - DNA, 424 bp, Glycine max
  unsure at all n locations
tcattaagaggcttcctccagaagcttcattaagagacttctatcattctccatacatcttttcaaagatcccaacggtcagatcatggacaagtgtcttgtgaagttggagaccaaattttgaaaagatccaacgattaaagaaggctgggcagaatttttaccgaggcagcttcatgtagctttctctagaagcttcattaagaggctttctctagaagcttcctcgtggcttctttgagaagctagatcttatcttccacacccctctattaactaaattaacttccttaaaaataattacggatgagaataacgcaacaaataatctaacatcaaacataattactaataatatatagatatatatatcagggtgttacacagncaatatcggnccttctcattactcatcacccaatca

SEQ ID NO: 20729 - DNA, 380 bp, Glycine max
  unsure at all n locations
tgcttctaatttatatttttagaccaaaattcaattattaacatttaggccattaatgagtcaaccattatttgattagagatttttctcggaactattctaattctttctaaactntagctttaaaacttaagaggttaaccatggtaaggtatcctatggtaacatctcattntctaccatttcaatagcctaaaaacactacccaattacacaacaaaaaaataacattgtctaccacacacacatggaaaattggaatgttatagttgacataagtatctcatgatttcttcatcggtggtgtcttcaagtgcttcatcaacaatatgttgtcaaactatatcgaagttagaagttcaagtcattttatgagtgag

SEQ ID NO: 20730 - DNA, 403 bp, Glycine max
  unsure at all n locations
taggaaggaggattggctgtttgcttactagttgcacccatttggataggtaggaaaccgtagaatcccttgaacctaagtgagagttatgattcagtataccgaagaaggaagatcatgttgaagtcttgaaacgtatacctcttttctttaatcgtctcatgtttgagaaagagtcgaccatgtggtcaatcgtgtttccttatgcctgtttgttcatttagattgcattagtgtctcctatgatattacccaactccaaatagtatgtcattcacattntattatctttgagatgttactctcatgagaaaacttgacttatgaaatactaccattgagaaagcgaaaatcgtcaaacttagtcattaagtgcanaggagtcttaaggtcgaagtcactg

SEQ ID NO: 20731 - DNA, 381 bp, Glycine max
  unsure at all n locations
agctttacaacacccaagcaatacaaaatccaaacatcatgaactatcaaaaccaagaaaacagggcaaaggcagaaaactctgcccaaaaacacaaaccaataccacagctttccttactcaaataccccagtaacattctcttcgttccaattcgttaaccgttggatcgactcgaaaattttactggaggtccctagtacataaatctacattgtggccattgggatctgctagaaaacgtccagaacccaatctgtactactctntccacaaccagcaaatacacatcattntctgcacaaagccaaaattctgctgcacatttcaccagcanaattctgcataatagtgaagatttcgaaatcacacttgccctcg

SEQ ID NO: 20732 - DNA, 419 bp, Glycine max
gtatttgttggtataatttgcctgttccattaggttcttaatgtctttagaggttatttcctcattgacatcttttgtcttgaatggaattgccatgacaggtttattgttactgtctttgatgtttggtagttgatattgtgttgcgggaggtaattccgattggattaactcactatccttcacttgccaatttgttatgacatttgttgttggatcacctatgatgtcttgttccaacggtatctatatcctttctgatggcataagcatgaaaccaatcaaagaaaaggacattaattttgactctttcgacaaattcgtagaacttgtcttggatttgttttctgtttgtacccttgtaatgttggaaaaaccatctcctttggggttcattctccggagaataaaatctttcc

SEQ ID NO: 20733 - DNA, 416 bp, Glycine max
acctcggtggtaaaaggtatgagcatttgaatttctcgagagcttccattttttaatttcaaacgtctcgatatattatgcgcccgaatcggacatccgtgtgaaaaattatgaccaatagaatttctcgagagcttacgttggtcattctcgagagcctctatataggatgcgcctgaatcggacatccgagttaaaagttatgactatttgaatttctcaagagcttccgttgcccaattatgagcgtctcgatatgtgattcgcatgaatcggacatccgtgtgaaaaggtatgactatttgaatttcacaagagcttccgttgctcaattttgatcggctcgatatgtgattcgcccgaatcgaacattcgtgtgaaaaggtatgaacatttgaatttctcgagagcttccg

SEQ ID NO: 20734 - DNA, 202 bp, Glycine max
agctcgcgacgctattgacgagtgcctgtatatagatgcgcctgaagtagacatacgagtgacaagctctgaccgtttggatgattttacaagttcctatgattaagtacgagcgtgcccatctgatatacacctgagaaatacctcagtggaagaacgcctgagcatttgcacttcttgcgagctgtcgacgttcactgtt

SEQ ID NO: 20735 - DNA, 443 bp, Glycine max
  unsure at all n locations
agctttgttgcttatgtgcccaaaccataactttgatgatgctgcatagctgcatatcatttatagcggtttgaaacctcaaaacaagatgatccttgatgcctcaactagaggcattatgatgtccaagagttcagaggaagccatagtaatcattgactccaaagtagccagtgattatcanagtcatcatgatagagctccaactcaaagaaaaggtataacagaagtggacactcaaaatgcaattctagcacanaacanactcttgacgcaacaaatngaggccttaacaaagcagataggccaactccctcagcaatatcaccaaggtggaccacagaaaacacaacaagttcaccaagttcaacanattttgagaatgcaattttgcggaggtaaccatcagaatgaccactatntagtacctggtgacgaacaac

SEQ ID NO: 20736 - DNA, 433 bp, Glycine max
  unsure at all n locations
tcctcggggccatttcctgcgagaacaaacatttaaaagttatttntacaagataatgcttatcttaacgcaaaaaatgtcatgctaacctctctgattttagaacgaactgacccctcacccagaaacagctgaaacacgtatgtgtggaatatcctactatttatatcaacatagaggccatccaacacattctaattgtcatacatatatgcatttgaaaagaacatacattctcacgcccaaggcattgcgtcaaactccacttaatttatatcctaaacatttgctatttagaaactacctacatatgtttgaaatatatatcatacaaatttttattgtttcactcgcatttattcatattggcaagctatttacattatgcacacacttgcattcaaaagggaatttcgtgctatcatacattcat

SEQ ID NO: 20737 - DNA, 419 bp, Glycine max
  unsure at all n locations
agcttgtctacttccttcttcactacatcaagaatcactgggttgagtcttctctgtggctgtcttactggtttagccccatcctctanatttatctaatgcatacatgtggatgggctaataccaggaatgtccgccagggtccagcctatagccttcttatgcttcttgagaattgataaaaacttctcctcttgctcatcaacaagggaggcaaatataattactggaaaacgtttgctatcatccaagtaagcatattttanatttgatggcagaggcttcaattctggtgtgggcggttggataatggtagaaggagatggtntctcagcctgtacctcataaagacagtcagaggtatgtgtacttcctgaaacatggctagttctatcagactctacgacacctactctacg

SEQ ID NO: 20738 - DNA, 440 bp, Glycine max
  unsure at all n locations
taggctaaattaggctaaaattntgtaagctacttgagctgtttctagtcttacatgagggatctgcggacgaaactcagtttaagttagtctaaacctaagagggctatctaaatcgggtgtagccttaaatgaaggatctgcggacgaagcttggatattccgcctgacgaaggattgagggtttagtaatttaggctgcaacataaaacacaagagcatgattgattagagaaatatatttctatgcatcagcgatttgtagaaagacccaacatatctacctactgttgtcattntatttaccttgcattttatnagttttagcatacaagtttagtttagaatttgtttgaaattatcacttatacatgttctctcaacaatgcttcgattctgaacttaattcanggtaacattagttccctgtgtcaatactc

SEQ ID NO: 20739 - DNA, 442 bp, Glycine max
  unsure at all n locations
agctttatttattctntntttattaggntagatgaattcttaaaagaaattaattgaaacaaatgacgattaacttcaactgaaagtcaagaaaaatggtcaaaaaggaaaacttacgctatttatttgagaaaagcgttaacccgaaatttgtatggaccaaaactgctatgcccaaaatacaataaatgatagggaaaatgcattatttttatatatatataatgacattggtgcaaactaacttctttnttatgattaattnttattaaaaaatgatgtggattgaccactttattaatactcanattgaaaacattacttaaggacatgaaatgtagttcaacttcaaccaacaatatgttgcagcagggataatgcatttgtatcttaaataaccattntatatcatttcaaagctggtattcaggaagagttaatt

SEQ ID NO: 20740 - DNA, 415 bp, Glycine max
  unsure at all n locations
aactcaagcttgtccacaaaaataggttnttgaagtttgtaatttaaatttctcactatttataatggatcattttcaaggtccaacgccttataatgatcacctcttaaagtaaaaaagaatcacttgataagaaagaactacgtaggtctgatttcctcatcgcaattgaggaatacgtaggagcaaagggaaacacccttgtcaaccacaaaaagagaaaaatataaaaagggtataaaagatataaagacataaaaagggaacactcaatcaagtcatgtntgcacattcgatcaaaggctgccgtcccttgggacggacgtgtggggtgctaataccttccccgtgcgtaaatacaactcccgaacctttcacttaaaagttcgtagatcngcgtctttcggtttttccg

SEQ ID NO: 20741 - DNA, 402 bp, Glycine max
  unsure at all n locations
ttcttattgaggagaggcgcaagaccactcaagaaaaagatttactgctgcggcaggaggaactagacaatttgttgttcaggtacttcactntctatctctctctgctgagtgttttttctctctgcagaatttctcanatttctcaaatttctccattgggtgttcattcatggcttttggaagatgcaataagcaataaatatttacttatctgattgagtttttttacatggttgtataacccaacccaatggcatagtgtgcaaacagattttntctttttttttttganagtaaaaaaatgttacaatgtgaaaaatgttagctacactttttatgcacaaaaaattaanaaaatgtatcaaaatttttataataactcataagctccacttaatc

SEQ ID NO: 20742 - DNA, 520 bp, Glycine max
  unsure at all n locations
cacccacatanatacgccaacagcccaccgcggattaacaaacaacgacatactcacccnnnncagggggtgaatgagcatgatacnccgcaanacgngancnananaaacncaagccctagnnganggcccgcnanggnanggaaaactattaatccatcatcccgggggacaaagaagaccaggagaaaataggggggtattgaaacatacagcggacttggcaaaataaacaaattcagccactctcattataaaaaccaatggacaatggtacaccagaccaattgcctaactaatttccaaccctcccaaaaaccaatccaaactctaacaacgtcattgctttaaatacctatatagcccaagaaagaaccgacaaacctttaaagactatgcaaaaaagataattcaaacaagatattgccaatatgaggggagctattaagcaaggaccacgaatacanaaatggacaccaccatggcaccgacaattcttccataagggagacaaacaagn

SEQ ID NO: 20743 - DNA, 433 bp, Glycine max
  unsure at all n locations
tcatctagtagttaatttcggggacgaaattcctaanagggtgggagtattgtaacatcctggaaatttctacccggagtttacggaaacgatgtattttgaatgattatatatatatatatatatatatatatataagtatatatatatatatatatatatatatataagtattgttccgtgtatatgtatagatatgttcttgatagaaataggaatagtgggggcaagatacgcgggttagactaattaaggaagagaaatccataactgggaggttatgggttaattcttaattaattagttaaaaatcattgttgtgcgtgcgactntgaatttaactaaaccaacctctgaaccacgctcggngttntattctgagncgtttgatatatatatngcttgctttcgaanactggcccangcagacgct

SEQ ID NO: 20744 - DNA, 412 bp, Glycine max
  unsure at all n locations
tctcccccattttctataaatagggggagaattgaagtttataagggttcagcccccttaggcacttctctctctctctctcgaaatagatgaagaaaattagttccgtgaagaaaattcaagccgaggcgcttccgtaacatttccgtaacgtttccgtgagtaattactcgaagatcctcgaccgttcttcaagattcatcgtttgttcttcgttttcttcagtcttcaacgggtaagtacctcaaccaagctttcatttcattctatgtacccgtggtggtccacattttgtttcatgtatttttattctcgttttcatttactttttatacccccttttgacgtgcttaagccatttatttaagtcatttctcacttattctaanaataaaataaatttccaccgatc

SEQ ID NO: 20745 - DNA, 430 bp, Glycine max
  unsure at all n locations
ttctttataacacgcagagactaacgtcgtcttttgcggccttcgtcaatcgcggccgacaagcccgttgacacgcagagatttatgtcatcttccgcgcttacaagatctgtcatactgagttttgagtcacgctgacgggcggaaatacccgagtggttatccgtataaactttttgttgtttgtaagacgaatagcctggtagcacgcagagactaacgtcgtcttctgcgcccttcgtcaatcgcggccgacaagcccgtttacacgcggtgatttacgtcatcttccgtgctcacaagatctgtcatactgacttttgagtcacgctgacgggcggaaatacccgagtggttatccgtataaactttntgcatgtctgtagacgaaaagcttgataacacgcagagactaacgtcgtcttttgga

SEQ ID NO: 20746 - DNA, 402 bp, Glycine max
  unsure at all n locations
tttcgtcttacagaatgcaaaaagnttatacgtataaccatttcggtatttccgcccgtcagcgtgactcaaaagtcagtatgacagatcttttgagcacggaagatgacgtaaatcaccgcgtgtaaaccggcttgtcggccgcgaatgaccaatggcgcagaggacgacgttagtctctacgtgctatcaggcttttcgtcttacagacaacaaaaagtttatacggataaccactcgggtattttccgcgtcccgcgactcaaaagtcagtatgacagatcttgtgagcgcggaagatgacgtaaatctccacgtgtcaacgggctttgcgggcgcgattggcgaatggcgcagaaaacgacgttagtctctgcgtgctatcaggactttcgacttaca

SEQ ID NO: 20747 - DNA, 355 bp, Glycine max
tgctttcagttttatatattattgcatgaaccttttggtcgttgcaaattattttgatatagattacatgtattatatgtaggattaatttgttattttttttttcacatttaaatattaaatctaaaattctcatctgggatcaatacctcacactatagcgacaatattagttatttatcaaacaaaatattgtatttgcagatattacgcctttggcctctgtttctgaatgaaaggcaactcttacataaaaaataaaaaaaaaaaaacttgcaatatgaatattgtgcacactttatgctaattaattttggtgcctcatgagtttactattcttcaactgagctttctt

SEQ ID NO: 20748 - DNA, 363 bp, Glycine max
  unsure at all n locations
aagaacgcgactaacacaagataaggtgacaatatggcggtgcaatgaaaggcataagatacatgtaagtatgaaaactttcgtctattaaaatattacttcaacaaagtgccaaaaggaatataaagactttattaagagtgatcgatgcctataatgattctcatacaattggctctgaaacttattatttcgcctctcacaccatatattaggagcttcttacaacatgacaacatgataaactggtatttgattggattctcatctcaatntatctttattactttactttactctgttgggagaattcatgagtatggattaactatgaataggggaacaagaaaggcaataaagaga

SEQ ID NO: 20749 - DNA, 427 bp, Glycine max
  unsure at all n locations
agcttttctgaaacatcatctaacacatcctttatgggagaaataacattagactcatcaaaggaaacatgaatggatccttcaatagtcataantctcttattgtatattctatatgctttactatgcaaggaataaccaaggaagattccttcatccgacttggcatcaaactttcctaagtttcttttccattatttaatacaaaacatttgcaaccaaagacatgcatatgtgaaatgtttggttttctaccattgaataattcataaggagttttctttaagatgggtcttattaaagccctatttaagatgtagcatgcagtgttaacagcttcagcccanaagtattttgaaagtggagtatcatttaataaggttcttgctatttcttctaangatctattnttcctttcaacaacacc

SEQ ID NO: 20750 - DNA, 353 bp, Glycine max
taaccagagtgcttttcttgtcagctttcaaaaggttagatatctcactaaaactgattaaaccccatcaagaacctttacttggttttacaaaaggacaagttcatacctgcgattatgtggaacttgagaccacctttggagtagggaaattatctcaaatagtgctcgtccaatacatcattgttgatgcaaacacatcatgcaatattctcattaaacgaccttctctggatgcccttcgggcaatgtctttaccccacatctagccatgaaatttcccaactccaaacataatatcatcaccatcaaagcaaataaaaaagaagcccaggagtgttatgccaaaagcc

SEQ ID NO: 20751 - DNA, 394 bp, Glycine max
  unsure at all n locations
tagcttatagaatgtttgggtgacacaaggttgacaaattatggtaaagagaaaagtgaaaaaggaacaaggtttgccatcttattttgaaatggctttccaaattacttatccctattttggaataactatcctaaaatatgaaaaatatgaaaatcatattttggaataactattatagaataagtaatttagaaacctatttcagaatatatattctagaatataattttcatattctgaattagttattctggaatagggatacatttctagaatggtcattctgtgataaagagagggtaatatatgaatntttaagcatttggnggtgtagcgcaaaaaatatggtacaggaagccattgcccattatgaacataatgatgatggatc

SEQ ID NO: 20752 - DNA, 172 bp, Glycine max
tgctgctactgtcactacacttgcatttttgacttctcgaagtgcgataatcgtttgaacaaatattagatgcttactaaacgggaaaaattggaatgctgagatagaacagaattggaatgctagaaagatatatcctaaatgaatttttatcaaacaatattataactaa

SEQ ID NO: 20753 - DNA, 429 bp, Glycine max
  unsure at all n locations
agcttgttctctcgggttatgatttaaaatactttattttaaatgagtcaaattgagcctttnttttagagggtcaagttgggctacaacctgttttttttataattaaaaactgccttttttgctatggatgccttgctgcaatccatgcttctggcatctgccatggcactgccatacaatggcattttcgtcaaaaatntgcccagccataacaccatggccgcaatttactagcattggttgttagctgattcaattatttgaatcaattgacaattcaaaatcagcactatcttanggataatagtcctagacaaacctaattatggcatgctagactagatcacaagtcaagcaaatgttcaaacttcaagtagacanagtagacataactagtaatacatggatgtcannacagtattcctc

SEQ ID NO: 20754 - DNA, 428 bp, Glycine max
  unsure at all n locations
taacctanatggctcccattccttccctaaaccacattctttctgaattctttagtgtctacaccttcttggcgccaaatgaacgtcttgctcattctcgtcttccaattaaattaatgtaagaactaagaagggttcttggtatactctctctaactctaacacaacacacatgatgtattagtattagtttaaatttagtgaaaattataaaataaaataaaaattcaacaaatgttaagttgaatccacagaacttatatttttaactaataataaaagaacgtgtttaaaagagcttgttggtaatattttttcatgtgtaattaaatgtaggtaattattatacaagttcatttaagacattgtgctgtttggtttagatttaatttaatatactgtgaatatcaacttgacattttattttt

SEQ ID NO: 20755 - DNA, 440 bp, Glycine max
agcttgttagctcatgttaaaaaaatttgcattagagagtttctctttcttcgggtgtacattcctttgccataacaataactacattctctgttcaattcttgcgaactttggtgtcttttcactttaattctcgtgagtcattccgttcttattaggtatctcaatctctctatctgagtcatttcctatttggctcttgaatctctctattcatcgctgttcacttctccgtttataatttcctttatgaacatgataggagtgtatagggtccaaatttatttgtatggaaacagatagcttatgcagcacaaaaataatctatatatttgttatttaaacaaaatatcaaaattccaaccttagggaaacaaataaattaactaatcccactataatgtattaaaagcaagtaattaacttaaagggttgaagtc

SEQ ID NO: 20756 - DNA, 441 bp, Glycine max
  unsure at all n locations
tatcagtcaagcccatanataaatgtggcaaaatttgccatgttataaaaataaggtcgaaatgtggaattaagtctactattaatatactatttatctaaatatataaatacatagtgtttttttactttaaataggatatcaattttatatttattagattcaatcattaaaaactaatttttttaaacgggggaactttttggatataaaaatctattgttagataaaaattaattcctttaaaaaagataacgcaaatattattataaagtctatacatatatatacattagaatataccttaaaaaatttatttattntattattatctaaacaattagtatatataaatattctacaatagaagaattccaatatataaatatatagtacatagatnntaatatatgtgtgaggtaattctactttntaaatatt

SEQ ID NO: 20757 - DNA, 433 bp, Glycine max
  unsure at all n locations
agcttttaaagttagcattanatgtaaactaggcgaatcctaagagtgtttggatgaccacattcaaggttcccaacaaaacactcactatcctaaggaagaattgcctaaaattattacacacaaatggaattntggtaacctattggaggctcccaacacacttccattgaaaggcctttttgttacaaaacttgaaagcaatgaaggtaagtaaattgcaaattacaaaattacaaaatggtcctcaattntggtggttgttctctctttggtgattcactcaatttggagtgcttcttagtccaatagctcttaaggtggttggttcctttcttcttgactcanattcttcaaggcatggcaccaatcctccttccaattccctatatggcaacccacanacaaggaaacaaagagacaagcaataatc

SEQ ID NO: 20758 - DNA, 439 bp, Glycine max
  unsure at all n locations
cttgtgcattcaatatcctgatgagggtgttccatatgttcttatgactgttctaatacatttgctgcccaagtttcatggtcttgcaggtgaagatccttataagcatcttaaggagttccatattgtttgttccaccatgaaaccccctaatgtccaagaaggtcatatctttctaaaggcttttcctcattctttggagggagtggcaaaagattggctacactaccttgctcccaagtccattttcagcanggacaccttaaagggtgttcttggagaaattctttcttgcatctaggaccactaccatcagaaaagacatttcaggcattaggcaacttagtggagaaagcttatatgaatactgngtgagattcaagaaactatgtgccagttgtcctcactaccagatttctgagcagcttctccttcaata

SEQ ID NO: 20759 - DNA, 428 bp, Glycine max
  unsure at all n locations
agctttagntttatattttattgnatgaaccttttggtcgttgcatattattttgatatagattacatgtattatatgtaggattaatttgttattttttttttcacatttaaatattaaatttaaaattttcatctgggatcaatacctcacactatagcgacgaaattagttatttatcaaacaaaatattgtatttgcagatattaggcctttggcctctgtttctgaatgaaaggcaactcttacataaaaaatanaaaaaaaaaaacttgcaatatgaatattgtgcagactttatgcntaattaatttggtgcctcatgagtttactattcttcaactgagctttctttttgcatgtggccagatatgtgatgcanaagagacaattatgactatatgacttacggatgtcaaaaatattat

SEQ ID NO: 20760 - DNA, 447 bp, Glycine max
  unsure at all n locations
gcttgcaagtcatcatcttatccacaagaaaagggagagnntattatttttcttatcctaaagaacgtgactaacacaagataagttgacaatatggtgttgccatgaaagtcataggatacatgtaagtatgaaaactttcatctattaaaatattactcaaacaaagtgccaaaaggaatataaagactttattaagagtgatcgatgcctataatgattctcatacaattggctctgaaacttattatttatacttccgttcataattagtagcttcttacaacatgacaacatgataaaatggtatccgatgtattttcatctcattttatcttttattttttactttattttgttggtagaattcatgagtatgtattaactatgaatagttgaacaagaaagctaataaagagaccagatcccaaatgagataagaaaaaa

SEQ ID NO: 20761 - DNA, 424 bp, Glycine max
  unsure at all n locations
agctctataagttcgggtctgggagacaaatgtcaagtgttcgcgatatgcgaagatgatgttccgagtactttggatttggtacgaccatgccctcctgatttccaactgggaaattggcgagtggaagaacgccccggcatttacgcaacgagcataatgtaaacctttacggttntaaaagctctatagttgggcctaggctntagagtttttccttttgttaaggctttgtgtcttttgtttttgaatttataatacaaggatctttcttcatctgttcctatgtctctacccattctcattcatttgcatgtttacttctttntctgaaacggcagatccgatgacgagtcccccgaaggtactaatacctgggacccgcctgtcgacttcgagcaagaaatgaatcanacggaagatg

SEQ ID NO: 20762 - DNA, 428 bp, Glycine max
gtatgcccgagtcattcatccctatgagatgttgtttatgtattttcgatcagaattgccattccttggattatagggttgaaccaagctcatgcttttacaaaaaggttcatcaagtcaagttgaaatatggaagtaaccgtcttgcaaaattggggcaaaagatgaatcgagtcacatcactgcttcgtctactgccaaacatatttaggattattgatgtccttgttacttccagtttcaccttgacaaagagtcatggccatgttgaaaatctaaattgattcaaccccatatcttgcgtaaaaattcgcaatacttcaactgtacatcattcgcatgcatacatgcttttcattggttgcattgctacgtgcattctttccttgaaaaataaaataaaatgaacttaatcattggtataaaaa

SEQ ID NO: 20763 - DNA, 397 bp, Glycine max
  unsure at all n locations
ttcttcttatccaaggctcatcttggtggtgaagctccttcttccatggcttattccttagtggatggcgcctcctctcacctcttctcctttgtcttccgctgcatctccatggtgaaaaattaccattaaaggacctcattgaagctcaaagatctagcatccatagaagccccacaagcaagcttccatcaagtggtaatcagagcacaagggcttcaagtaggtgctccttaaacctccattaattttttgctttaccttctcttccattgttgtttcatcatttttctccatgtatctcctcacatgtcttgtgctaaatgttgttaacatgaatctttagagtttccaccgattaaacttgctataaagctagatttgatntctatggtca

SEQ ID NO: 20764 - DNA, 111 bp, Glycine max
  unsure at all n locations
catgaaaatgccgtaactaggaagtgatcctangtcgtttcccaacgagcagtgacaagccaaatgttcataatatacttgcagtaacagtaacagtaaccatgggggggg

SEQ ID NO: 20765 - DNA, 357 bp, Glycine max
  unsure at all n locations
ttcttttatatgtgaaatcaggtgcagccatttcccttagagtcctctcacggagtggaggttgggtcatgttctcaaaatgctcaaaatcaaaatgttcaaaattataatgctcaaaatcaggatgctcaaaattaccaaccacaaaatgctcagtctcaccaataatagaatgctcangatgctcaaaaggtacaaaatgatgcctaactaatctatgaaatgtgctatctatctcangatcaaagggttgtaagtcagatggattgcctccagtgtagtgtaggtttgaactacagctatcctcanatgatatccaaatgacttgaaattttgtgagcaacaccctaaaatcat

SEQ ID NO: 20766 - DNA, 438 bp, Glycine max
  unsure at all n locations
tcagactaaagcaacacanaatctaggtatccttaacccctcaatntaatggattttcaagggttgagaaatgaaattgagaatgaggtaaatttggagcaaactctcaactcacacaagtctataacatcaatttaaacttgctcaaactggatttacacctaaaattccaccgaatcaaaatttgactcctcaacatccaattttaccctagaaatgactctttggtcactttggtcatttgtttttcctcttgccagcccaagctttctcataagtcctaaatgacatttcaaactaggaataactcactttaacctccaaataccactaaatccagatttggccttccaactctcaaaaactcactctttttttntcactcataacaccatattctcactgtctaaccctagggtaactctacccttcattcct

SEQ ID NO: 20767 - DNA, 435 bp, Glycine max
  unsure at all n locations
ttcttgttagccaaatccacacactcgtcttcgttcagttgattaatagtcttctggtaaggtatgcagcctattggcccaacgtttcctatgacaaactttctagcatccatttggtaaagtctctgccattccaatcaaacatgccaagttacacatgacaaaaaataaaataaaataaaatacagtaaatntttgtttggattnttttttaataaacatttataaaagaaaaacccaaaagtaaactgaaataaacttcttgcctcatcaatcaaaatgaaataagttaatttataaaaatccttccacttaattttttcaaaaactgattntaacttataagagaagtttaactcgtgtatcttntttatcttagaataaggaaacaagaaggtaanataaaacaatnttttataaatngatataacttat

SEQ ID NO: 20768 - DNA, 429 bp, Glycine max
tcagtacatggtaaattggatggcctggcctttgtgccatatagtactagaactagaagacaacagcaggagctggaacatcaacagaggtgacagtagccaggaaatgtacagggacagaatgtacatcagccttattcttgcaaggggaaacagcagaatcagaagaatcgtgcagccttaaatgaagaaaggaatagagacaattggatccaacagcaccttgaagcaaaatttcatgagtctcctcaatttgccagacacaaatgaggatgaaactcaaagtatactgaattgtctttagcaaactgactcacactcgacaggtttttagtaatggcaggaacatggagtaaattattaagtttaaaggagacttgaaattaaagggagagatgatcgatgaagaaccagaacccttaatttgca

SEQ ID NO: 20769 - DNA, 433 bp, Glycine max
  unsure at all n locations
tatcttttgcaacagcattattaattntgtgagccccagtgtgattgagatcttccctcttcagataaatgtgaggtccttcaccattaggcctcttgtaatgctccgtcaacctttcagcaaaataaagaggactctcccggccaacataatcttttagaatcccagccagttctgtctgcaactcaaaatctaagaaaatttccattgtttttccttccaggaaactacatttcatggtttctgaatgtagttaacatacaaatatgagagatgtgctagtatgtangagagacaganagttattctgaatctaattgagtgaagattaacatggagttccaaattggttagttctgtatgaaactcgaaaaatanaagactaaagaaattctgaagaatgaaatgatacacattcaaacagtcacaaaat

SEQ ID NO: 20770 - DNA, 380 bp, Glycine max
tgtatgagtactgggaaagattcaagaaattatttgcaagttgtccttaccaccagatttttaagcaactccttttgcaatatttctatgagggacttaacaacatggagaggagtatgattgatgttgccagtggtggaatccttggtgatatgactcctactgaggctaagaatttgattgaaaagatggcttccaactcccaacaattcaatgcaagaaatgatgttattattcttagaggagtcccgacgtggcacggattcatcttcatctactaaaaataaaaatcttgaaggaaaacttgatgccttggtcaacctaataactcatcttgccatgaatcagaaatctacacctgttgcaagagtctgggctat

SEQ ID NO: 20771 - DNA, 360 bp, Glycine max
agctttatgagatctgaaactcaacttcctcttcctccatggaagtatgctgcgcttggaactttgtactaaataaggctgagaagaagaagcagtagaatcctccctctgtgaacacccaacatcagacttgcgatggctgtaataaacccagtcttcatcattacaatttactctcgcattggaatgaaaaaatcccccagcatttgcagaagccagtgttccataactgaatgacttcctaacactggaatcctccttccccccatctgtttcaccttcctcagaatcatcaagtgactcagaatccaaaggataattgtattcaccatcctcactcctagaagcaccttcttcact

SEQ ID NO: 20772 - DNA, 388 bp, Glycine max
tagccattgcgaattatatgcagtcgaacatatattattatgatctttatctttattctttagtataaacagaaaagatcgactttgatcagtatatgtcctatggcaatctattaaacaatttaattaattaattattcgacagaatacatatctgcaagtttcaatatatattttattcaacccaaaacttatctatatcaggaatatgagtaattatgtttcaacaccataaatatttaacaaaaaagaaattagttcgatatagctataactaaatcatagcagattatcaatcaagttacatgtagtagtgtatcctattgaaatgaaactatctttgagagtcttatgagctaagcacgttagaatttggaattagggtatc

SEQ ID NO: 20773 - DNA, 257 bp, Glycine max
  unsure at all n locations
agcttgtgcagagcaaatgagaanaaggagtaacaaatgtgaaagcaagagcccatttctagggtaaatgggtgttgagaggtcaaattttgaataggtggagttttcaccttaaaaccagtttgagcaagtctaaatcaatgttatagacttgatgaagatgagagtttaccccaaaattacccaatttgtgcattgctagtcacgggcagggtagtacatctcgtgttctaagcattatctagcagatcccaacg

SEQ ID NO: 20774 - DNA, 434 bp, Glycine max
  unsure at all n locations
tatgctgcaaacacttataatagtatctcctcaacagcaaatccaacaacaatagaataattatgacctttcaagcaatagatacaatccaggttggaggaatcatccaaatctgagatagacaagtcctccacaacaacatcagcctgtccctcctttccaaaatgctactggtccaagcaagccatatgttcctcctccaatgcaacaacaacagtagcagtcacaacaaagacaacaagcactgatgccctcctcaaccttccttagaggatttagtgaggcaaatgaccatccagaatatgcaatttcagcaagagacaagagcctccattcagagtctgacaaattagatggggcagatggctactcagttgaaccaagctcaatcccaaaattctgaccaattgccttcacanactatgcagaatccg

SEQ ID NO: 20775 - DNA, 407 bp, Glycine max
  unsure at all n locations
tagcttgccaaggttgagctaagctaacttaaattcgatatgaattcggctaagcttcagcctgatcgctaagagacagcttatccgtggctaagcatgacctattgtcgccaagctcaattccttaaggccataattgaggtccatgacactaagcaccagtcatggcagctaagcgagattaattgcggcaatatgagcgctaagcgagtccctctccactaagtgcatgctcctctgtacttaagatgcatcattntagctaagttggctagagccttgcttagcgagagttgcagcttttctaatctacaaacctctctaagaagacgtaccctcgtgctaagctgagtntctgttaaaaaaaaactgantttgaatntgaaacgtcagctaagctcacgggt

SEQ ID NO: 20776 - DNA, 353 bp, Glycine max
gacctataaaactcagcttagagctggagaaagcttgacgatgttgtttttcttgcccaactcccttgagtggcatttgtattggttgttatattgaatttttcatcttaatccatatcatatcttttctgcatcatgcatcatcatgagtaagtgagaagaaaaatttctaagtttgaaaagtttcttcagaaggcaaaactctttggtttaatcgattatagccttatcataatcgattacacaagttttctgagcttgcaagttatgtctcgtattggtttaatcgattacaaccttctcgtaatcgattacatagttggttttgagactgtcgcaacctacccttttgc

SEQ ID NO: 20777 - DNA, 409 bp, Glycine max
  unsure at all n locations
agcttttatcctatcatcaaacccaatgaatgcagggtatacctctgaaggcacttatcctgcatcctgtccaatgccacaaccaaagggtaactaattgcaaaccctagctccaatcgttgcaacattntaccagctcaaccaatcaatacacgaatagagggcaatttcacacattaacacagaanagtaaatatatatataatatatatatgtgtgtgtgtgtgtgtgtgtgtgtgtgtgtgtgtgtgtcaccaaaaaagatatggatgtgagtgattattgtgtcttggttgttaaggaaataatattatggtgatggccccacacaagcttcttttcaatttgtataagagcacttcaaagtcatagcccacttgcacttcatgcttttaggtaatcaatcata

SEQ ID NO: 20778 - DNA, 417 bp, Glycine max
  unsure at all n locations
gttctaaatcagaattaaatgtaaccattttatatttctttgactatgttatatattgggttagagttggatacccatctcctagaaaagaaccagggtagttgtgtgtggaaagttcattccacaagatgttgcaatcaagataagaaaaaaaaaaaaactaactgtagagttgagatattagacttacaatttggtttcttccctaatctttttttatttattttctgatttaaaaacaaactctaaactcagtataacagaacctacataataataataataataataataataataataataataataataataataataataataataataataataaaacaaaacccaaataattcccaagttttcttccctaatcccttttttttctgnatagaaaacanactaagaaac

SEQ ID NO: 20779 - DNA, 415 bp, Glycine max
  unsure at all n locations
agcttgtaggatgcttcaatggaggaaaagaaagagggagagaaagagagaggggggagcacgaaatttaaggaataaaatagggagagaagtggaactttgaagtatatctcacaagactctcattcatccaaagttacaacaagtgttacacatgtttctatttatagactaggtagcttccttgagaagctttcttgagaaaacttccttgagaagcttctttgagaaaacttccttgagaagttagagcttagctacacacacccctctaataactaagctcacctccttgagaagcttctttgaaaagattcctaaagaagctagagcttagctacacacacctctctaatagctaagctcacctncttgagatgagaagctagaacttagctacacaccccctataata

SEQ ID NO: 20780 - DNA, 422 bp, Glycine max
  unsure at all n locations
tggaggaagaaggagatgaataaagggagagggagagaagatcatgattttttgtgctctaagagagctctgaaatctgaagtttaattttcaaatgatcaaagttgaaaaaattgcacacacatgacctctatttatagcctaagtgtcacacaaaattggagggaaatttgaatttctattcaaatttcacttgaatttgtggagccaaattttggagccaaaatttcactaattatgattagtgaattttaacctggttctcccactaatccaagatgaagtccaagattctccactaagtgtgcttaggtgtcatgaggcattgtaagcatgaaggacatgcacaaagtgtgactatatgatgtggcaatggggtgtagcaagcaaattctcaccttcccctctnaaatttaattgga

SEQ ID NO: 20781 - DNA, 436 bp, Glycine max
  unsure at all n locations
agcttctccctcaattttctataaatagggggagaagtgaagtagaaatgggttcagcccctttggcacttctctctctttcgaatttgcttaagaaaattgtttccgtgaagaaaatccaagccgaggtgcttccgtaacccttccgagatgtttccgtaagcaaatccgtgaaggtttgcgtccgttctttaccgttcttcatccgctcttcgttcttcaacgggtaagttttcgaatccgagactttcaatttatttcttgtttttttaagctntcatctttatttcgntcattntntatttcttttcttacgtctntaacgcgcctttaccgtttatttaagccgttntctcacctaataaatgataaaatgaatttcaaccgatcatttgtgttgaatctcattaatcactnttaaacgaaatctatcgat

SEQ ID NO: 20782 - DNA, 444 bp, Glycine max
  unsure at all n locations
cttcgcgaggtacgtaggtcaactntgngntctttntgttttattgttcctgtgttcacgatggtagaagtatgctaagtttggaaggagtgatgtggttattgcacgatggttgaagtatgctatgtttgagtgggtgttcgtgttttatagttttttatgctaagttgctacttctggtgatttgtctctgctttttttctgtgtgcatcccatacccagcacaaggccacataaacccaatgctcaagctaccaaattgtgatttcagttatactcagatgctccacattgtcaataaactacctaagctactcttctcaccaatgatgttggtctagttctgtatggctattctgtgatgtatatttcacttttactattactttttctcactagaaagttgctgactatccacaagtttgttgactatacctgtatgct

SEQ ID NO: 20783 - DNA, 404 bp, Glycine max
  unsure at all n locations
ttgcttgggtttccaaccttaatcactgctttatgtaaagctagagaagtcacttctgattctaggacactggagagtctcaaccccgccattaatttggcatatgtgaagaagaactattggaatcttgatgatctaatagtgactttcagagggcctangaaggccaaggggaagaaattgaagactctcccatcttttgaggttccctctaccacatcagcaccaacttcttctaccctaggtacttctgctccatcaccaacttctttcagatttttcttttacactagagatgctacatgccatgatgcagagcctacactgagggcaggtcattattatgcagagcttccagagcttgngcctaccatctatcatgagcatggtagactntcacattc

SEQ ID NO: 20784 - DNA, 425 bp, Glycine max
  unsure at all n locations
nnttggagtagaaacatgggaccttcacattttatttcatattgtcgnatctagtcaagatctgagagaccatacaagtttcctagcggtttctaattatatgggccattaagtctatcatatgctgacaatagccgagaagcccatgaatttcttcggggccggagtaggtgtctgccattgccttggccttggctaataatcgaggaagttcttgactcccgttcaaggtaagagcaaacccgccatcccatggttgcctcttggtgtaaagagtcgatcacccttcctctagcctcttttttcgcgtatactanggcatactcgtccgcgaccctatgctcgtgggccgtggctagacttaactcttcttggtacttggcaatgatagctagcatgtnggtctccgtctcgcataaacgctg

SEQ ID NO: 20785 - DNA, 338 bp, Glycine max
  unsure at all n locations
tttctttttgtaatgagtattgttcccttcacttttgtgctttccattntataaatttgtcatattcttgataaattttgcagcttcatcatttatgcaaagcactgtcaaatctatggaatcttatggacacatcatacagtgagcgacaatctttttcccatgtaatcaatttgttgtcactctcatctgcagaagtaacagatccgggaagtcttactctagaaatagtccagcaggtaggtatctaacttaaatgatccatagaaaatatcggaaactcaaatatttaaaaagtctacaactttntacaagactgaagctgaagtaaagagact

SEQ ID NO: 20786 - DNA, 338 bp, Glycine max
  unsure at all n locations
gggtnttgtgctgcctatagatgcccgaatcctagttaaatgggttttaagctactgaagtgaactatgtggatatggcttcttgtgcattaaaaatagcccagtaaaattctgaagaactacttactaccttggtattgagaatgaggggttgttctgttcccagcttcctttttcctttccgtatccattatctattccctctatcccaccttgctaaaattcttaagcttaagctgctgaatttcttttgttcattatagaaagagaaggaaatatattgatttactcctgagaacaggggttgaccggatcaagaaaatgtttggaatcggatg

SEQ ID NO: 20787 - DNA, 402 bp, Glycine max
  unsure at all n locations
agctttatttnttaattacgagcgtctttatatattacaggactcaatcagacatccgaattgaatgttattgtcatttcacttttcatagagcttccgttttcaatttcgagcgtctcgatatattaaagggctcaatcggacattcgagtaaaaagttattgtcgtttgatttttgtaagagcttccgttttcaattccgagcgtctcgatatcctatgggacacaatcaaacatccgattcaaaagttattgtcgtttgaatgtgctcagagcttcagttttcaactacaagcgtctcgatatattacgggactcaatcagacatctgaagttaaattattgtcatttgacttttcatagagctctcgttttccatatcgagcgtcttgatatattaat

SEQ ID NO: 20788 - DNA, 430 bp, Glycine max
  unsure at all n locations
ntaagaanagtcaaccgacaattacttntgacttcggatgttgattgtttcctggaanacatcgagacgctccaaattgaaaatggaacctctaagaaaagtcagacgacaataacttttaactcggatgtctgatcgagccctgtattatatgaagacgctcgaaattgaaaacagaagctctaagaanagtcaaacgagaaaaacttttgactcggatgtccgattgtgtcccgtatgatatcgagacgctcgactgaaaacggaagctctgagaaaaatcaaacgacaataacttttaactcggatgtccgattgagccctgtattatatcgagaccctcgaattcgaaacggaacctctaaaaaagtcaaacgacaataacttttaactcggatgtccgattgagctctctaatatatcgagacgc

SEQ ID NO: 20789 - DNA, 332 bp, Glycine max
actcgacccggatcttaagtcacctgcggcatgcattcttataagtcaataagtatatcagccacctttacacaaaattaataataatcctaattgtcatgtcaatggcgtaataataataataatgataataacaataataataataataacaatcattactattattattattattattactattattatcaatattattattattcacagaggaatactgccgatatagttctttacaaaattaaatcattttgacaatttctcagcgaattaagtcaccaactaaaaaaaaagacctcatattcaggtaataatctactaatgctata

SEQ ID NO: 20790 - DNA, 531 bp, Glycine max
  unsure at all n locations
gcgcaccccgancaccaccacacatcgcgacgccatcctgcggaaaaatatcgacacacccataannncaaaagaggcgcaatgaacctgagacacgcannccgngaacnnaaaaacncaccccaannaannnaaangagnnaagggccgtataatatattaacacaggcaagngggcgcaacggggccgcacaaaaataaaggacgctccccaatacccggcaagtgaacgagccaggaaatgcgagaacaccggaacacaccctcttaattgcgggaataaagccgcagcaccacacacgaacagggcgaccacagacgtccatcagaggaagacatggccacgactcccataagaaattccacccaccccgcccgacgcaaacccaatgtggggacctttaccaaaaacaataacaacctcgaaacccacccgaaccgaaccccgccgcaacagaaacaaaaaaaacccaacgggaaaaccaacccaactgacaccaaaacaccggaccaacctaaccaaagaaaaag

SEQ ID NO: 20791 - DNA, 370 bp, Glycine max
  unsure at all n locations
ttcttttgtctttcgacgcatgtatgtagattaataacacgattntgttgctgttgttggtcgattgatttaatctctgttcctcaatttacaactttgatcgaatctttgttgcttcttcctaattcgagttgttgttggtactctgattcgagcagtggacattgttcgagattgtatccctagactttgttaatttagggctccaccatgtggtgttcttctatgcacttgctaattcactangaaaaaaacattataagcctaacccaccatctcactgcatacacacaacaataatgcanaccccacaacaaagttcatcaaatcaaccncaaaagaaatcaagganaaacatataacccacacg

SEQ ID NO: 20792 - DNA, 223 bp, Glycine max
tttcttggtttgtacaaataaccttctcactattcccttttcttaaagtgctttcgacctttttggaaacagcacaagttattttttttttttttttttttttgacatacaacttaattggtgtgggggctgatgcctaacccttttctttctttctaatgactttcctcccccaaaattaaaagaaaatttccttgaaccatatgctctcctagaatctaaa

SEQ ID NO: 20793 - DNA, 431 bp, Glycine max
  unsure at all n locations
agctttaattagaaattgaattttattacaataatataaacatggtttgcttataggcttctggttggggattacttatctattcttgaaagcttttgatttggcttgtacgtaatacatgaattaggttgtctttattttaatgttcaacctttttatcttggttcatttagttatctacaattaattagtatagttgggtaacaaactaaacaagttaccataatgtttcattctatgtactgaattggaaataattagctatttcttggttctattagtaagtttattttttatttgcaaaaatatttctaccaaccaatttttcctccgtccaaacaccatgatgaaagtttttattcacagtaattggaataatcttctataagatgacacctagtanaaagtnttataaatgataaattatgatt

SEQ ID NO: 20794 - DNA, 409 bp, Glycine max
tggctaatcccgacccaacccaggcatagtcagtcagtgataacctgtgacgtacctaagcaggcgagctcctgacagtcaaccaataaaagaacaaagtccacgaagcaaggaggcttgtgtggtggctgaccagctatttatcttaggtgttatctgaaaattaccctctggtaatcgattaccattcgtgggtaatcgattacagggtttaaaaaaatggagacaggatgttaagtagcttctggaatcattaccaattgtgtgtaatcgattacacagtatgatagggcactggtaatcgattaccagttgtgtgtaatcgattacatagtgttacctgctactagtaatcgattaccatttatgtgtaatcgattacacagtgtaactttagattccactgtgc

SEQ ID NO: 20795 - DNA, 422 bp, Glycine max
tatcttgtattgaaactaaaaataagaacaaacctacctaattggtccctatgtacacacaccatgaagatgttaagtgtacgagtgattttacaaaagaaggttgcaccactcaaagcattcatcataccaactattttagggacttggtgcctaataatacctattttgggcaccaacaaggcacaaggatttaagctcttgcgaaccaaaccctcatccaacaacttctttacttgaggaataaactcaagcccaagaggtgtggcaatactagcaaatgtctttttacaaaagagaaaatgtggaggttgtctaaaagggaaagtttctttaatggttgtctttatttgtaaatgagtttccttcttagctaacctcttggaggagacacttaccttcttacacttctcttttaccac

SEQ ID NO: 20796 - DNA, 405 bp, Glycine max
  unsure at all n locations
tgtaggattatggggtacccatcacatgtggtactaggtgtcggncgggcgatggtgcacaacaagttttccacatccacaatgcgcgcataaacccaccatcccctgttgcccacctccaactgagctcacgtacttccacgtagcccttatcctcgtttctctcaacaccgggtccccatcaatcctcccaagcttccacaacatccaagcaaaacaacattcaaacagcacaagctatccagccaacaaaacagggcaaaggcagaaaactctgcccaaaacaccaaccaaatcacagcatttctcacttaaagaccccagtaacaattccttcgatccaattcgttaaccggtggatcgactccaaaattttactgaaagtctatagtacataagcctaca

SEQ ID NO: 20797 - DNA, 383 bp, Glycine max
  unsure at all n locations
agctttctcttgagttgatctacagaacatcatgctatcatctgcaaaaaaaaaaagatgggtaatcataagtgccctanggcaaatcttcagaccattaatagagttcatctccactgctctactaatggaggccgaaagagtttcagcacacaaaatgaagtatccttaaaagttcctcattgcataccanatttttcttggatagttggatgaatatttctctttatgcattcactgttgcaaataaataaaagggaatgtaaataccaaacaaatacatatacgtgccaataatctccatgcataatgtctagaatcttttcgtccaacattnttttataagaaaagttgatgaatgacactatgcataactcattttc

SEQ ID NO: 20798 - DNA, 433 bp, Glycine max
  unsure at all n locations
ntagtgtgaccacactttccccgtaccattgttacactgtcatggcaagatgtattaagccatatgcaacggttaattttagaggtttcttaccctattatttggtctaattattggaggcaaatcttgttaagcacctggtgcttaaaatatctccattgcaatatctcttcctaagtggtcctatttgtacacatttttatttttatttttatttaatttaatcatctcataagaatctaactctccaccaagctcctctacaaaaataattaaataggtcccaatgttacattaataattctgcatccttacatttcatccttaaataggtcccaatatatatatatatatatatatatatatcatgggtacatgaaattgttaatgaaaattatctctcctaaagagtacttttaattntaaaaaaata

SEQ ID NO: 20799 - DNA, 413 bp, Glycine max
agcttattgtaacaaaaaggaagatatttttcttatctttccaaggactactcacacgttcaatttgaagttatttagtgtcctctaagcactgcacaaggcaaataggtcaagtaagcacaaaatatgaaatttagctataattctcaattaatctcaatcatatttgcctaagaccaaaactgaattaaggtgagtaaataagagtcaaggagatagcaatgagctaagaagaatataaaaatattcaacaacaaatgctcaatcaaagtctatctcctatcatcagggcacccaccaagatcggaaactgtgtaccctacaacctccaagttgtcaactctcatatacacaagcatagactccttagtcttctacaagtacctcatcaccttcttagcaactatccatcg

SEQ ID NO: 20800 - DNA, 391 bp, Glycine max
  unsure at all n locations
agcttttgttttcaacgacataattgactcaactcaatatttcctctcaatcatcttcaacaattgatggagctgaaataaaatcaatccataagaaaagttaacaaaatgaatgaatttcaataagattaagataattaataaccaaccaacatcataacaataagaaaatggaataaccccaccagcaatcaagctttttggtgtcaaggtgaacaacaaaaaagcaacaaaaaaaaaaggtgtggctaggggaaggaaatcattaattaagcattgatatatagagagaaaattaccatgcaaaanagacaaaaaggcgcaagaaaagaattctccttcttgtaggtgcatangaaggaaatgcaatgttggttgagaagggagtgat

SEQ ID NO: 20801 - DNA, 408 bp, Glycine max
agcttattttttgccacctgttattatttctattcaaacactatgattgaacactgattaagacactgacatatgttagatatgattgatatgacatgactgtacgacattaaaattaaacacaatacttaatgacatgcgatattactataaaaacatgtatgttaaattataattcctgtgggtgggataaatatatgcgtacgcttaaatgtcacgagtggcaaccagccctaccactattaatagatagacatataaagtgatgtgactagttgtgtataggaacatgaagttatctccatatcaagtatcacttacttagcacctgacagatatatatattgtttgcatacgctcgaatgacgtacgtgaaagagtaacattcacttatatctgaacactact

SEQ ID NO: 20802 - DNA, 413 bp, Glycine max
agcttcttgtttctcaattgctccaggttgctgcatggaagggcaaaggtctgtatggtggtcagcagaggagcacaaaccacaaacccttgcgacaggtacagatttctgattcaaggccagctgggttaccaagttgaccaacgcatccagtttgccttcaagcttcttagtttcagatgatgcagatgggtttgtagctacctcatgcactcctctaatgactatggcatcatttctggcactaaactgctgggagttggaggccatcttctcaattaaatttttggcttcagcaggagtcatgtctccaagggctccaccactggcagcatctatcatacttctctccatattactgagtccttcataaaaatattggagaagaagctgttctgaaatctgatggtggg

SEQ ID NO: 20803 - DNA, 414 bp, Glycine max
agcttcaaattacagtgagtgattcaagcttagcgtcactatctgcgctaagcgtacttccaatgatttcaaaacaaaacgatgttggcgcttagcgcatcctttcccgctaagctcagcttgaaagctcaacttacaaaatgaatttgggacttagcgtagaatgacgcgcttagtgcaactataataaattttcatagagaggaagtggcgcttagtgcatcatccacgctaagcccactgcttaaggtgcaacttacagtgaagatgttgggcttagcgcaatgatgtgcgcttagctgaaccattcacccaatcaatcaggggtctttgcgcttagcatgagcaagctcagcttatcgcgtgaagagatggtgcttagcataaggcttgcgcttagcggataagcaatct

SEQ ID NO: 20804 - DNA, 405 bp, Glycine max
  unsure at all n locations
agtcttcttccccattttcctataaatagggggagaggtgaagggaaaaaatgttcagccctcctggtaattcaagatcacttgaaattagtgaaaaaaattggttccgtgaagataatccaagccaaggcgcttccgtaacgtttctgcgggtgatttcgcgaagattttcaaccgttcttcgacgttcttcgttcgttcttcgtcgttcttcggtcttcaaccggtaagttcctgaaatcgaacttttcaattcattntatgcacccttggtggtcctcatttgtttcgtgtacttttattctcgtttcatttacttttcgtacccncttttgacgtgttttagtcatttgcttaagtcattntctcgcctaatcaanaaataaaatacattttcaccgatca

SEQ ID NO: 20805 - DNA, 407 bp, Glycine max
  unsure at all n locations
agcttgttattaaagtggactcgttcaagcaaggcaatggaatttgagagttgttattggcctcaactaatttattattggttcctatcattctataaatgcataaattataacatgttttcggtacattttattgaagttaatttaaatgaagagtaagttttttaaatttaatatctagagtaaactacacatatcatttctgaagtttgactttattatatctaatatctctccatttttgaactttacaaaaaaaatcctttaattttttagatttggttactcctcttagacgtaaaaaaagaatgttacaccaactcttctttaattangagtgtgtaaagcaacgtaaaataatgaagaaatatcgggtaatacaagataaatgagcagaaaatgagata

SEQ ID NO: 20806 - DNA, 407 bp, Glycine max
agtctttttcatactcgtgagtcgataggtgcgcactctacaacacgatgcgaccttatcccacctccttgcatataagtacattattcaacattggactgactatctaaagatggatgttaatgctctctctgacctgcatgaatactcccttgctcgagcctattggattctcactatacctaatattcatttgttgagagacctacatcgcaccgtaccactcatctcgatcatatgactgtgtcgcgagcagtcgaaaataaccatctatctcatccacactacaaagcctctactggagagatattttgcaaaagccatatctggattgtgaagactagttccttagtacaattatcgataaaatctattcgttcatcacccttgggatgacacataagtat

SEQ ID NO: 20807 - DNA, 406 bp, Glycine max
agcttttattatgcatgtcatattcttaatagggctccttataaaattttgaaaaaaacctttatgagttatggagaaaaagagaaccaaatatgaaatatcttaaagtgtgggagtgtcttgcaaaggttaacatccctattaataagaaaagaaaaattggaccaaccgttgattgtgtttttgttggatattttttgcatagtactacttatagattcttggttgttaattctaaagtgttcaaaatttctaataatactattatggaatctagagatgacactttctttgaaaatgtttttcctttggaaaaaaaaaattgtctaaacccgtttgtgatacttcttattctgatttgtcatcttgtagtaattctaataaggatgttgtttttgaacctata

SEQ ID NO: 20808 - DNA, 408 bp, Glycine max
agcttgagctcactgttgcagccccacaaagctccacagaatttgtctcggccatgttcttccttgcgagccctcttggtttcttgttcaagggctcttgcagtagccgcactttcttctcgtaactcggcacactctttccggacgactatagcgaccaacttgaatttttctttggcaagtcttgcttttcctagtttggtttttagagctcggacttcttcaccctcttccggagcttcgaagttctcctcattgataattttcaacttggagagccaatctaaccctcatgtacgaactttcagccattcatgataaccaccgatgatgccattacggatgcccctaagttctttatctatacttaacgggcctttccacgccttatggactctttgtataatc

SEQ ID NO: 20809 - DNA, 399 bp, Glycine max
  unsure at all n locations
agcttttctccaagtgcaggatttatgggatctcatggcaaaaaatgatatgaaaatgccaccagatacaccggacacgatggaggcccgacgaaaatggaaggtaaaatatgggaagatgttgtttgttctgagaatgacggtcaacaaggaattaattgatcacattagagatcttgacacaccaaaggatgtatgggagacactagaaaaactcttctccaagaaaaatgttgctcgattgcagttgttggaaaatgaacttgcatccacagtgcaaggaaatcttacaattgctgaatacttcttaaagattaataatctttgtgcagatctgagtgagaaaatcagtgaggcaatgtgaaggagatacatcattangggtttgaaaaaggagta

SEQ ID NO: 20810 - DNA, 411 bp, Glycine max
ttcttgcaagcttaaacattcaatttcgaggctctcgatatattacgggacttaatcaagcatccaagaaaaaatttattgtcgtttgaatttgctcagagattcaacattcaatttcgagcgtctcgatatattacgggactcaatcagacatccgagtaaaaagttattgtcgtttgaattggctccgagcttcaacattcaatttcgagcgtctcgatatgttacgagactcaatcagacatccgagtaaaaagctattgtcgtttgaatttgctcagagattcaacattgaattgcgagggtctcgatatcttacgggactcaatcagacatccgagtgaatagttattgtcgtttgaattggctcagagcttcaacattcaatttcgagggtctcgatatattacg

SEQ ID NO: 20811 - DNA, 412 bp, Glycine max
  unsure at all n locations
agcttggtctgatgtacttacccgttgaagactgaagaaaacgaagaacgaacgatgaatcttgaagaatggtcgataatcttcgcgtaattactcacggaaacgttacggaagcgcctcggcttggattttcttcacggaactaattttcctcagccatttcgagagagagagaagtgcctaaggggccgaacccctttcttcttcacttctccccctatttatagcaaaataggggagaagcttgccgcccagctcgcccaggcgagcaaggttgcttcctccagaagcaacagccttctggaggaatcttctggagggcccaagtgggcctggttgctatttgcacccncctatttactaagtgcaccccctttctattnttttgtaattctttntctgtaacgttacg

SEQ ID NO: 20812 - DNA, 409 bp, Glycine max
  unsure at all n locations
agcttatgcttatcctatatgattggagcattctcgcaaaatagagtgaccctgactggtctttctatgattttatctagtgagagtgacttgacttaccagtgtgtggtttgtcttatcatgtacttctgggcgcccgacgaggtttttcattgacatggtacctcattacatataggattgagtcttagtatatttgttgcataacacctgtgtattgatcgatattgattggttgattgatattgtgttttgatccttaagtacgtaaatggtgtgaaaatgtgtgagacgtgtagtgttgagatgtgatgttacgtgataagtggtggaatgacgtgagctatgttgaagtaagttgtatttcatgatatgtatattatgttgntttgtttctctctattagtta

SEQ ID NO: 20813 - DNA, 410 bp, Glycine max
agcttgtatttttgagctcgatcggtcatctatcctggccgacgccgactgtcatttatttcgatcaatatcggtgaataatatttttttgccgaggtgggctaatgttttcctggccgaataaatgggaacacgccagtttcggccgaaacaaaacatcggttgagctcgcacgaaaaaacctagccgacctacattgtaagttttttatgcaacaccgacaaaaacaaaacttcccctgccataagaaaaaacattatcggccagcgagcgtttttttaaaaaaaaaattgggcaatgtcggctgaaaaatatcagtcggggccatttcacgaccgatgtcggctattgagttttctattcaatccctgaatgaaatttgcatgatgtcgattaggaaatgtttgatc

SEQ ID NO: 20814 - DNA, 412 bp, Glycine max
agcttttgcttgtgcaagctctacgtaaaggaggggaagttgttgcggtcacaggagacggcaccaatgatgctcctgccctacatgaggtctgtcctattctttggatgcatccttttgactgttgagaaataaattagctacaaaactttttatctcctgaaatcttgcttatgaatgaacagaatatatatttcactacgaacacatttgaacagtatatcatgaagcttccatatttgattcgaatgactttcataaacttttctcattaaaattgttctggcagacatgaagttccgtgtaatttgctctttagctcgtaggaagttgttccaatgtgttcagtagacatggttctagttgaagttgaatgctaaagcctgcatattcgaatgtcaagtttcatgtc

SEQ ID NO: 20815 - DNA, 395 bp, Glycine max
  unsure at all n locations
agcttgttgctattaggattattagctctcacagggcagattttctacatttcagccatacatccagttctgctggatataaaacctgctccttcaaccaacgacaatcaattacatgtgaaaagttaattcttcttaattcttatatacatggcctttatggtgttgaagaattagtatttactatctacttttctttgctatatatgttagtcctgttaacagaatatcgttaagctcgtacaaggacttttgaacgaaccagaggatgcngatgcatataaagaagggactctctatacaggtactctagatggatggattaatagattgcgcaggaatcatggaaaccggcagaattggatgcacatngatagtcatactttgctaggaat

SEQ ID NO: 20816 - DNA, 410 bp, Glycine max
agtttattactcttggcaattcctttaaaactaatcacttataaagatatgacttttgaaagaatcttcagaaacaagtcacttgaagaaatgtgacttttggaaatgaatttttcgaaaacagtcactggtaatcgattaccagaaaggtgtaatcgattacacatcaacagatgtgactcttcattttgaattttgaaaatcttaatgttttaaaaccactggtaatcgattactataatctggtaatcgattaccagagagtaaaactctgtggtaatgattttgtgaaaacttcttgtgctactcaatgttttgaaaaactttttaatacttatcttgattgaggcttctcttgattcttgaatcttgagtcttgaatcttgatctttgaaacttgattcttgaat

SEQ ID NO: 20817 - DNA, 410 bp, Glycine max
  unsure at all n locations
tgtttattggacttgtactctaacttctttaatttccacatcttgtggaactgtactcccattgatttcaccattttcaatgaatcttgcatttccagctttgaaaattctcatactatgattaggacaataaaacatataccccttttgacttttctggataaccaatgaaatatccactgattgttcatgcatccaattttctttcttgtggattataaatccttatttctgcttggcaaccctaaacatgcaagtgccttatactaggtgtctttggaactgccttactaggaaccctattcaacaaatacatggtattnttcaaggcatacatccacaaagatacaggtaaatttgaattacttaacatactcctaaccatatccattaaaattctattacgcctt

SEQ ID NO: 20818 - DNA, 394 bp, Glycine max
agtttcttacaaagcatacggctttctggatgtagatgatgatatctatacagatggatcttatatatctatatatctatagatagatatatacatatagatatatagatatagatcatacaatgaagtaccgcacgagtgggtatatacgaatccaaatctgccgaatcactcatgttatgatcttctacatcctaggtcttcccgtgccttcatctggcttatgttcttcatgtagcattcagactgaatgactctatgatatgacgtcgctacttccacatggtacgggtaacgtacgagacatctctatttttcccggggggaatccttagagtgaccacagcttagctttcaattcgcctctgaccatcaaatgaaatgtgaataaccc

SEQ ID NO: 20819 - DNA, 411 bp, Glycine max
agcttttcatcatgggctaagtttgaaattgggagggctgctgtctattggaaaaccatgaatggcctccctcctacttcagtaagtataaaagtattgagttaactcattgcttgttattcaatcaattatctttcagtaaaaaaatttacaaattttggcagggagaaaagctaaaacttttctataatccagctgcaactcaacttgtccctaatgaagaatttggaattgcttttaatggtaatttttgcaatgttacttggttgcccaaaaatgtcatttgccattgcatttgtaaggaaaaatatttggattcattataaacagacataaactgcaccaagaacaagcgatataaattacacatcgtaattcagaattagcatgtatgtttggagtcaatggaaa

SEQ ID NO: 20820 - DNA, 397 bp, Glycine max
agcttctctaaatattatgcgcctgaatcggacttccgggtgaaaagttatgaccattggaatttctcgagagcttccgatgttcaatttcgagcatctggatatattatgcacctgaatcggacttccgtgagataagttatgaccatttgaatttctcgagagcttgcgatgctcattatcgagcttctcgatatataatgcgcctgaatcggacattcgtgtgaaaagctatgaccattggaatttctcgagagcttccgatgttcaatttcgagcatctgaatatattatgtgcctgaatcggacatccgtgtgacatgctatgaccatttgaatttctcgagaccacacgttggtcaatttcgagagtctcgatatattatgcgcctgaatc

SEQ ID NO: 20821 - DNA, 383 bp, Glycine max
  unsure at all n locations
tttcatgcaagctttgcttttacatatcattcatggatattttgattctcgctagccaaattgagctgttcaacaccagttaccgtgcatatcattcaatgttttggtcaaagatgtgaaaaatacccaagggcctgngcaaaaaggtcatttcaggcatttttctgggtcctggctcgcctaggcccccaaatagcttaagggcaaagtaaccaactcacttgggtgagaaaggttactttggagtgaagcatcagctcaattgggtgagttgcaagaccaacaagtgctctcatttcttataaataggcatgatggaggctgaggaaggggttggaccttcattgttaagagaaattggagagaaattaatgagaagaaga

SEQ ID NO: 20822 - DNA, 403 bp, Glycine max
agcttggtatgattgatggggacccggtgttgagagaaacgaggatatgggctacgtgggagtacgtgagctcagttggaggtgggcaacaggggatggtgggtttatgcgcgcattgtggatgtggaaaacttgttgtgcaccatcgcccgaccgccacctagtaccacatgtgatgggtaccccataatcctacaagcttgagatgaggaagtgttgaagggtgaaacttcctgcttttattgttgaccacagagtggtacctggagatatgtcgcggcggtcaggagaccttggggacgtcaggtggggtgctattgcccaaaaccaagcttgaccaatcccgacccaacccgggcatagtcggtcagtgagaacctgtgatgtacctaagcaggcgagc

SEQ ID NO: 20823 - DNA, 414 bp, Glycine max
  unsure at all n locations
agcttgtttattcaaatttcaagatacaagtgaactccccaagaagtgacatggcccacttgtggttttccaatctagcttacattctgcaaagttagaatatgaaaatccaattaaactcaaggaggtacctttggggtaccttaaaccaacattggttgtgcccttaaggtacttaataatccttttgacaacatttaaatggtattccttgggattttatttatatctttcacatatgcacacacttagcatgatgtcaagttggcttgtagtcaaatataggagataaccaatcatacctctatactttgactcatctaccgatttacctttttcatccaagtcaagataaatggatgttgccattggtattgtttcttccttacactnttccatattgaaattcttaat

SEQ ID NO: 20824 - DNA, 413 bp, Glycine max
  unsure at all n locations
agctnttangattttcaaacgacaataactttttactcggatgtctgattaagtcccgtaatatatcgagacgctctaaattgaatgttgaagctctgaccaaattcaaacgacgataaatttttactcggatgtctgattgagtcctgtaatatatcgagactctcgaaattaaatgttgaagctctaagcaaattcaaacgacaataactttttactcggatgtctgattgagtcccgtaatacatcgagacgctcgaaatttattgttgaagctctcagcaaattcaaacgacaataacattntactcgtatgtctgattgagtcccgtaatacatcgagacgctcaaaattgaatgttgatgctctcagcaaattcaaacgacaatagacttttactcagatgtctgat

SEQ ID NO: 20825 - DNA, 413 bp, Glycine max
agcttgcatgatttacatctccccctttctcaagaaaattcttctttatatcatcaaattcttcatgatttacaagaaggtccacctgcatgaaattttttgttaggaagctttctcttttgtgcgactatgtcatcctctttctcaggtgtagaagcaagcttgacaggttcaggtgcaggtgctgctactagtggaggcacttgaatctggttgtcagacttcaaggtgatggcactcacattttttggattctgcatagtttgtgaaggcaatttgtcagaattttgggactgagcttgattcaactgagtagccatctgccccatctgatttgtcagactctaaatggaggctcttgtctcttgctgaaattgcatattctggatggtcatttgcctcactaactcttc

SEQ ID NO: 20826 - DNA, 412 bp, Glycine max
agcttatttcatgtttctatgttcaaatcaaattagtgttttgaaagttgttttttatcaagtgcatgcaaaaacttctaaattcatttggtatttgggaaagccattcattgattttcattctcaatgttgccaaaaatcactttgttgtgttttgatccaattcaaaagcaagtttcaaaatcactggttgctgattctttccaaaacatgttatgtccaagaaaaattttctgtttaagtcccaaaaagagttatatatattctacaactacgctaacagaacaaaattatttagtggtgtgtactaccaaaaagagggtgtcagaccctaatttcatccggggaatgtttttatcgttcgacacaacccgatcaatcatatgcaagaaccttgctcgagtgaatgagt

SEQ ID NO: 20827 - DNA, 407 bp, Glycine max
tgtttgtatgctaccgggctcatcctctcaacaattttaaagggtccatagaaacgcctcgaaagctttgactggcctgttccggccaccgtggtttgccgatatggtctcagcttgactagaacccacttatttacctgaaactcatggtccctgcgatgtccatccgcgatttccttcatgcgagcctgcgctttctgcaatttccggcgaaggaggttaaacatgtcttccctctgactgagcaaatcgtccactgttgctacagtggaggtgcctgttaagtattggggcaaacttggaggtttgcggccaaatgtaacctcgaagggtgttagcctcgtggctgagtggacagacgtgttatacgaccactctgcccacaacaggaagcgcccccacgaact

SEQ ID NO: 20828 - DNA, 403 bp, Glycine max
tgtttctagtcgtccatagacctcctcataggtacggtccagcgaacgttgcatctgtgcattcatcgcatccagtaacagacgttgaacgccgtcctactgatgatactcgtcaccaccgccacctgctccagccataattcaacaggaaaaaaaatgtgcaataagaattattaaggtttcaggacctcacaacactctactcacgtgttgaactcttagatggtagtacacttgcgcttaatgctctcagataggcttttgtgtaatgtattccctcttgccttttaccactcgtgtctcctcttaagtgcctggatggaccaaattagacacacaacgtaatataaaataaaaggaaagacaatataatgatcacaaacagacttgattcgggatgaca

SEQ ID NO: 20829 - DNA, 411 bp, Glycine max
tgtttgttggtcaactacatgccttggttaacctggtaacccagctggccttgaatcagaaatctgtacttgttgcaagaatctgtggtttatgctcctctgccgaccaccatacagacctttgcccttctgtgcagcaatctggagcaattgaacagcctgaagcttatgctacaaacatctacaatagacctcctcaacctcaacagcaaaatcaaccacagcagaacaattatgacctctcctgcaacagatacaaccccgaatggaggaatcaccctaatctcagatggtctagccctcagccacaacaacagcaacctgctccttccttccagaatgctgctggtcgaaatagaccatacgttcctccaccagtgcaacaacaacagctaccacagcatcaacaga

SEQ ID NO: 20830 - DNA, 411 bp, Glycine max
agcttgtatgtaaactagatgccttggttaacctggtaacctaactggccatgaatcaaaaatcaacacctgtcgccagactctgtggattatgctcctctgccgaccaccacacagacctttgcccttgtgtgcagcaatctgaagcaattgaacagcctgaagcttatgctgcaaacatctacaatagacctcctccacctcagtagcaaaatcagccacaacagaacaattatgacctctctagcaacaggtacaatcccgagtggaggaatcatcccaaccttagatggtttaatccttcacaacagccgcagcagatacaacagccttattttcagaatgctgctggcccaagcagaccatacattactccaccaatgcaacaacatctacagccccagaaacaga

SEQ ID NO: 20831 - DNA, 408 bp, Glycine max
tgtttattgagtttagacaataatgcatgattagtgcccaaacttgatgatattttttgtgcatactttctttgatcgacagtttttatgtatatactttctttttttgacagttattttgtatgtgcttagaacttataatttaggattatcctccatgagctaaaatggataattatcagaatataatggtgacgtgtgggaatgtgagatcatgatgcgttactttgcttttctgtgtttaattcttaatttgctagatgagaaacaatttcaaatgaaatgttcttcgcttttgacaaagaaaaacagaaggatttttttaataaactatttattaccgtgtgtttccttcggcagctaaacattcgcaagccgcaacagattatctagtctcaagctaagact

SEQ ID NO: 20832 - DNA, 403 bp, Glycine max
  unsure at all n locations
tttgcttgcaagctntgagcaaattcaaacaacaataactttttactcggatgtctgattgagtcccgtaatatatcgagacgctcgaaattgaatgttgaacctctgagccaattcaaacgacaacaactttttactcggatgtctgattgagtcccgcaatatatcgagacgctcggaattgaatgttgaagctttgagcaaattcaaacgacaataactttttactcggatgtctgattgagtcccgtaatatatcgagacgctcaaaattgaatgttgaagctctgatccaattcaaacgacaataactttttactcggataattgattgagtcccgtaatataactagacgctcgaaattgaatgttgaagctctaagccaattcaaacgacaataac

SEQ ID NO: 20833 - DNA, 403 bp, Glycine max
  unsure at all n locations
agcttgctcatctaagtaacttttatccaaaataattttcatatttgcaataattgagcatgcacgatagtacgcaaacggaaaggattgggttatatatcgtatgtatgtgacataaagaagaaaaatgaaaacgataataacgatatagattttttattctatttttatttgaataaagtaaaagtaatgccgacttttcaaatatatattcaggatctaagtaggcgaaattaaacacgaaaattatacattgaattgaataaaaatctaaaatcatactcgttcaattcaccatgatttgatgcanatgtatgttntctttctacctctctctttgcctgaatatgaaatcgatcactccaagctntnntctcctcactttntatcattatgaatggat

SEQ ID NO: 20834 - DNA, 416 bp, Glycine max
agcttcttcgtgtgctgaagtatactacagagagaaggatccaagttccaaagaagtttgagagataatgttgtgcatagacctgcagagaccacaactcggagaggaagccgtcctgagagcttgatatgagttcgtgagtgaatgtgacgacctagacgtggacgatacatccccgctacttttatttcttcaatccttcatctttctcttctctttgttgtaaaggaagcttcctagttatggagagctaaatcctttgttggttcttccttgtaggtacttgatgtaaatatttgcatatctatttaatgatgttttgtgtgttcactgtgctatcagaacttcattctaccatgcttttgccttgatcacatagatgcatgcgtttttagggtcattcaactttggaaact

SEQ ID NO: 20835 - DNA, 412 bp, Glycine max
  unsure at all n locations
agcttttcttacttgcggattgctttacgttggttgttatatgcaataatcaaatgtaataaataaaataattttctctttcaatgtacgattcatatggtagttaattttgtagttttgtacttcctagtttatcaagggattttcatgcataattcatattggcattgaattataatgttattttgtgtgttctgttggagatccaaaaggttccttaagattcgttctagctcattgtcatgaactatagttgcagttggttgattttcaaaattggtagccaagttgttatctttgttcttttaaattccctcgaagcacaccatcttgattccaaaaggaaacatacatgtaaaaacttgcactttnttcttaatatattgtcaaaactcacaattaacagatctac

SEQ ID NO: 20836 - DNA, 417 bp, Glycine max
agcttgcttcttaagagagagagagagagagagagagagagagatcagcaaaaatggatcaacggacaaacatgaaataggaatgatgcaatatgaaaagtgagggatgcacttttgaaaacaattatcaagggcaaagccgcataggatcggcagaaagggagaaggaaaatgataaaacttgaaatttattgaaattgaaagaagtgcttacaaagttgtcctaagtagagcacctctcttctcagactcctgaaaatggctaaatgaaagggtgcctcacaacatggtcgaggactccttttatagccaaaaacattactgtttgctacagtaccggtaacttgaccgaaactattataataattactacaataccggtgaaataaccggaataatcatgaaacggttatgtaa

SEQ ID NO: 20837 - DNA, 407 bp, Glycine max
  unsure at all n locations
agcttggtggttatacaaacactgaggcttangatttgttttcccccgttcagatcaacccggtgtttcaaaataaagctcttttatcaagttacgcacacattcgagtccattcagggcttcgggaaaaatcttcattgcattcacccttcaggtgcacacacattttttttctttcaaaaatctttttatgttccgacccgtgaattttccgaagaaaaaaaaagcggttattttctttcaaaagcatgttcgctnttagtttttttttagcttttcctttcaagcaaatttcttttgtgttagaaaaggtttgtaacccgggcaaagtcggtaaccgagattacactttatcaaaaggaaataaaggcatacgaatgcaaatacacaagactccctattttttt

SEQ ID NO: 20838 - DNA, 409 bp, Glycine max
agctttaaattaaacgtcctttctcaccttgattactccgaagctgttgtgctccctccttggcaagtttgctcatgaagattgtgacccaagtgcaagtagcactgtaggttcggaaagcaatcactggaatcctaaactcttgtgcaactcccatgacaatcgttgacatgagtccatcaactatgatgcaagatggttgctgccactgatcaccatttttctcgagaagtcttgagaacaattctcggaactctttggcaactaaggatctggcgctaggagtgataagcattggaaggtagtttattacggcaccttttctaggattgtcagagggtatgccatcagtgatggatgcaaagaggaaatcgggaaattgagtgtggaatgagggtaaatctgtgaa

SEQ ID NO: 20839 - DNA, 397 bp, Glycine max
  unsure at all n locations
ttgtttattgnttccttatttccttgatgcatctattacatatgccaaaactaacacagaggagttcattaataggtgccacacattgatgcaaaggttgctacaactcatgttttagctgcccttgttactcttggatctgaccaaaacctgaccgtaaagtatggccagcatagatgcatttggtgctgtgactcaacacttcaaaaatgagatggtatctatcaccaatatttctcccggttttctgattaaatgttgatgctaatgcagatccccatgtcaaattgcttgatcaaataaaatatcttccagattgttgacaagatacgtgttgaaatggatgcctttcttgaaaatggttcccatgaagctactatagctgttattcgtgcgt

SEQ ID NO: 20840 - DNA, 414 bp, Glycine max
  unsure at all n locations
agcttgtatgattatggggtacccatcacatgtggtactaggtggcggtcgggcgatggtgcacaacaagttttccacatccacaaatcgcgcataaacccaccatcccctgttgcccacctccaactgagctcacgtactcccacgtagcccatatcctcgtttctctcaacaccgggtccccataaatcctcccaagctttcccaacatccaagtaatacaacattcaaacagcacaaattatcacagccaagcaaaacagggcaaaggtagaaaactctgccaaaacaccaaccaaaatcacagcttttctcacttaaagaccccagtaacaattcctttgttccaattcgttaaccgttggatcgactccaaaattntactggaagtctctcgtacttaagcctacattg

SEQ ID NO: 20841 - DNA, 403 bp, Glycine max
  unsure at all n locations
agctnttgttaacgtaatgtctcctacatattcaggtgaaaatgagaagttctttatgtattaacaagtttatgcatatatccgaaaaattcaaagttgctccaaaattaaattgacgctcatcgataatgtaactagtaaggccaaaggtggaaacatatcccaaaataatataacagtatacgtcaatatttcatgatatttagtgtcaatggttgcaacttgcaagaaaagaatacaccaaagttacaagaatgtcaacaaattntaaaactagttatcgtattccttgcaatcatggcaaaagtccttgataacccctctgtggcaactattttagtaagtatagaacaagtaacaaagtaattaatattaggaaaataaaatatgcaagaaaaaaaga

SEQ ID NO: 20842 - DNA, 410 bp, Glycine max
agcttatgcttctaaaaagctataggtaatgtaatgtaagaagcaagtgtatgatgaattacttcatgtttctaattctccttattagtgattatctaattaacaatttcatgaaattaacagcttcctgaatacattggcattttcaaagatcatgaagaaatatgataaggtgaaaattcaattacccttcacttcattttactcatttaaactttattatctgtactatcacttgacatagtaacttcataattcagatcacgtcaagagatgcagctgaagcttatatgagaatggtggacaactcccaccttggaagttctgatgaggtgagagtgctaataagaaagtctcccattgagattcattattcttttacatgtaacttctatacaccgttagtttaa

SEQ ID NO: 20843 - DNA, 411 bp, Glycine max
  unsure at all n locations
agcttgatataacatagtcaaggctgtttccactatatgtccgtgcttcctttctaccagaccattttggtggtgtgtatgagggcatatgagtctatgaataataccaagctctgcaagatacttagtaaaaggtctgtattcccctccccaatcagactagacagctttaataggcaaattaaattgagttttcaccatagtttgaaactgtgtaaagataggtagtgtctctgatttatttttcaacaagtacaaccaagtgaaacaagtgtgagcatcaacagaagttacatagtatttataaacagtgtaaatgagttcaaaaggagttgaatacacagtaagagagggagaggagggaagttatgagattcgccaatgcaacaatgggaacaanagtcagaactt

SEQ ID NO: 20844 - DNA, 268 bp, Glycine max
agcttattaaagtccttactgatccacattgggtatgtatgactgcattgaatgagatgacgtgcaaagttaggaattctaatttcagttgttgcaattgatgcactcataatcaagacactcgagtgcttgagagaaacattattcttgtgatgaatgaagcgagcgtgatccccattgatgtatgtcatactcgctaatctattgtatattatattgcatctgtgcatacttttatcgtgaaacggaaccaggcgcgagcttgtga

SEQ ID NO: 20845 - DNA, 405 bp, Glycine max
agcttgtgaaatcaatggaatccaagattctgtttgacacaagtcgtttaattttgttcttagaaatgtgacctaagcgcttatgtcatttccaacaatattttaattaaaagacaacctaaacacattgtttccagatgaacacaaataacccaatttgtccaaataagaaaccaaaaccaaatttcgtctaaatgacggtacaacaaaagtgtctttcaaatccaaataaaaactagtacataataatctaaaatgccatatagcttccacctccacctatttaccatctccaacatatatccatctttcagaattaattggcttccggtagcttaggcaacactgcattgaaacactgatgttagtagtggcaccagactctaaccaccaagtgtttctaag

SEQ ID NO: 20846 - DNA, 411 bp, Glycine max
agcttgctacatatcacctatgttcaccactagggttccttcagatgggtttatatctatccactctcccttatttgatctgacttgaagccctcctatctcatgttgatataagatagtaatacaactcatatcaatgtgcatcccaagcccctcaacttgatcttctataacttctggagctgagtaatcgtttacccaacatatccaaccatgaacactccttcatacttgattcacttcttgtttgttcttttggttactttcatccgatagtcttcatgatgcaaaccatttacctttcaaaattttacctatacctcaatttttgctactgcacatggtaattggtaagcctaacaagtacatggaaaaaaggagatagaccccactggtttgcaagtaaactaa

SEQ ID NO: 20847 - DNA, 409 bp, Glycine max
  unsure at all n locations
agcttgtaattgaacaatggaagatcttgagaaattcaatcggtcttaacttttcactcggaagtccgattcaggcgcataatatattgagacgctctcgtgaaattcaaatggtcataacttttcactcagaggtccgattcaggcgcataatatatcgagatgcacataattgaacaacggaagctctcgagaaattcatatggtcataccttttaactcggagttctgatttaggcgcataatacattgagacgctcgaaattgaacaatggaagctctcgagattttcaaatggtcataacttttaactcggaggtccgaatcaggcgcataatatatcgagacgctcaaaattgaactacggaagctctcgagaaattcaaatggtcataactnttaactcgga

SEQ ID NO: 20848 - DNA, 389 bp, Glycine max
agcttgatccttgaatcttgattcttgaattcatccttcttcttgaatcttgaagtgttcttcaacttttcctcttgagacttgaattgatcttgattccatcttgaactcatcctttgattgacctttgagtttttgtcatcacctttgtcatcatcttttgttatcatctttgctatcatcaaaacatctttgaatcattcttgattcaccatgaagctttgcttctacacacgcaagttcaacgaaggggatcttgtcttaaagaaggtataccacgcccagatggaccatatgggaaaatgggctccaaactacgaatggccttttgtcgtgaataaggcctttatcaggcggagcattggtgcttgccagcatggacaatgaac

SEQ ID NO: 20849 - DNA, 415 bp, Glycine max
agctttacatattgaagaagctattcttgaacttggtatgggggcgagtctctaacaatttcttttggaaatatattcctagactctaacactctgaatccgataattagttttaaggggaattttttagaataaaacactaaaaatagaaaaggggtactcttagtaaatgaggggatgtatttagcaattgccatattctagtgatttcacatcctcattgctatcattattctttttttccaacttttttttatatagaactcttttcccactttactttcttgcgctccggatgttcatgcaatagagagaaattttcttaattcagttttgacaagatgtggtctattaattttcagatatccatatcgtctatggaaagatctgtttttaaagcgagtttaattgtatt

SEQ ID NO: 20850 - DNA, 410 bp, Glycine max
agcttatatcctttggatccaactttgtttaaggcttccttgacccaagaatcaaactattagttctatcttattctcatctttgtataaaatcccatgggacaagggtttgaaggtcttctggctctaactctaacaaccgaccaggttgttggcacacaacattgatgttgtcttgtgttattgcataccacacatgtcgggctacacactgtgtgcaaaattgggggtcacatggacccatttcaatccaatcaagttgtaagtcaaaacatatcacacaaacacattgaccttcagtatcatcttcatcactatcatcaatatcctctattgcataaaaccgacctttagtaatggcatcattctcaattgcatctccatgtctagattgaccgtcagagatcctt

SEQ ID NO: 20851 - DNA, 311 bp, Glycine max
tgtttatttaacaaaattgcctcaatcatttccaaatattcatgtgaattaggaagcatcaacaagaatcaagccaaggctattgtgcaagcaatcaatggggcaaaacacaccaaatgattatgatgatggatggctcaaattctcacaaaggtaaactcatcactttcaaattgagctttcaaaactatcatgacatgtagaggagaatcaaggatttcaagtcacaaaatgtcaagaacttttattttcaaaacaattacctgttagccaagtggcctcagatatcttaagaaggggggggggggggg

SEQ ID NO: 20852 - DNA, 408 bp, Glycine max
tgttatatcaacaactgttttaagatattgtaaattctatgcactttgtttaaactacaaaatcattgcttcaaaagttaagagatgatgggtgggagccattaaagatgtcaaaaatttttgtgttagtaatgttattgatattcttgattttaatactcaatatttaagaactcgaggtaagccccgtcataagaatgttgacacttttgtgactatggagaaccgttttagatatgacatatttacaactgccattgactttcaattacaagagctgaataataggctttgtgacctaacaatggaattaattatttttagctcagctttgagtcttaaggatgtttctaaatccttcaaagttgattatatatgaaatttagttgcataatattatcaaaggat

SEQ ID NO: 20853 - DNA, 415 bp, Glycine max
agcttgaggagtttgcttcaaagtctgcatcaacatagtaaactacttctcaaggatgggaagaaataataaacgctttcctacataaattcataataaagctaacattgtaaggaaactaaaaactccaacatttgatggcataaggctagcaaggagctatttaattactcacctgaacacttatatgatcacttttcagttaataattatgcatggaatgcatgaaatcataggccattatttccctccgttgctacaacttgcttctaataatggacaatccctgatggtcaatactaaaagagaagaaaccaatccctctttatgtaaggatataagttggtgagaacttgacatctcatggttttcaagagatctaagatgttgaagccaccttccatccaagcatttt

SEQ ID NO: 20854 - DNA, 411 bp, Glycine max
acccgggatgctctcaggcacctgaagctgctgcttttcggaccatagtataagactggtaacctcctctatcacgtacacaagatggctttaagcatatatacgtgcatgaaaaggaagtatccaaatctgtgagggacgagtactccactacaacatcagcctatcaatccttattatattgttgaaggtcctaacgagacgtatgcttattctcctatacaacgacaactgcatcaactacaacaacaactgtctcaacggggacatcacgcaattgccgctcctcctcatccttgcttacaagagttaatgacgcatccgaccatccataatatgctcttatagcctgagaccagagcctctattcccattctgacggatctaatgtggcagatgactacttatttg

SEQ ID NO: 20855 - DNA, 79 bp, Glycine max
tagtcttttatatatcgtttcgctgaatactgaacatatgttaacgctcgacatattcaaaggatccttactattcaca

SEQ ID NO: 20856 - DNA, 391 bp, Glycine max
ttgttgcaagcttgttctagaagcaactaagtttttacattgtataactcaaaatttcctattacgaaaaaaaataaatctcccttatacttggatgtctttcgtatatattttttcacattacaaatactatctggtacaaaaaaaatttaaacagctacaaatgtacaaactttgttcacttttattttattttttagttaagctaaagtgtatgataaaaccaattgtttaattaatcggtgaatatggaataacttaacatttaataattatgagtgtgtgtgtgtgtttaaataattattacatttcatatctcaatttatttcaaaaaaattacagtaaacccttatgtcctccttaaataataataataatgataataataatt

SEQ ID NO: 20857 - DNA, 398 bp, Glycine max
  unsure at all n locations
agctnttagctcaaatttctggctaacttatcttttattccactaacgacagagaaaggatttaaatgcttaattaatgtagttttaaaaggatgttgatctctccattgcgtangcaagagcaagacaacgcttaccaaacaaaaaccgctcttaatttttaaaacatataataaaatgttcccttattataataatcaaattgacttcaattagcataaaaataatagcctttagtgggacaatccatagtaacctaggaaactcagtacaaatacacattaaaaatacaaaagcccaaggatataatatgcttcaaatatttgttttccacactcaaattgccatatcacgggtgaataagtgaattcaaaccaagatctaaacaaanagctatc

SEQ ID NO: 20858 - DNA, 414 bp, Glycine max
  unsure at all n locations
agcttcttatccaaggctcatcttggtggtgaagctccttcttccatggcttattccctagtggatggcacctcctctcacctcttctcatttgtcttccgctgcatctccatggtggaaaatcaccattaaaggacctcattgaagctcaaagatccagcctccatagaagccccacaagcaagcttccatcacaagataccttggacacgcatgtatatggcaaaatagctcacaaaatatacgtatgtttaggtagcaaaatacctcaaaaaaaaagagagagagcaaaaagagagcgagcaagaaaagaataagaaaaaaataataataaaaagttgtctagctaaaaaacaacatgcttgtgaaaagagataatttccaacttttctttgaaagattntactgatctta

SEQ ID NO: 20859 - DNA, 392 bp, Glycine max
agcttgttattgaacaatggaagatcttgagaaatgcaatcggtcttaacttttcactcggaagtgcgattcaggcgcataatatatcgagacgctctcgtgaaattcagatggtcataactgttaactcagaggcccgatctatgcgcatagtatactcagatgcacatcatggaacaacggaagctctcgagagacttatatggacgtgacctttaactcggagttctgattcaggcacataacacattgtgacgctggagatggaacaatgaatgctgtcgagactttcaaatggacataactgtggacgtggaggcatgactcgggcgatgagatatagagacgctcataatgaactacggaagctctctagaaaatgaatggcacta

SEQ ID NO: 20860 - DNA, 412 bp, Glycine max
agcttgattgaacagtgcatttatattatccagtggttgatacttcattttggaattcagtgtttgtaattggtttgaattgatcaattgcgtgatttgagtgaattggaatgtgtagatcatgtgccatgaatgagcatgcagtcattagaagagaaagaacattgaattaggatcatgactaaaaatgttagttggtttgtcaagttgattgtgaaggaacgcattagccgcaacccggtgaaagtgtgatctttaattgtgagagaatgactaacattgagtaatgattcttgcatgaatatctgagtatggaatgaatgtgtgaaattgaagatgatgaaggccatgtttggattgaagatagccacttatctaaaaagcttaccttgtgcatgattgatttatccct

SEQ ID NO: 20861 - DNA, 415 bp, Glycine max
  unsure at all n locations
agcttttttacatgcatgcatcattcccagtgaaaattaagtcatcaacatacaaactcacaattaaaattcttttacctcctcctgttttgacaaagagagtgtgctcatgatcgcatcgttcaaatccctccttcacaaaataggcttcaattttgctataccaagcacgtggtgcttgctttaacccatataaagctttcttaagcttgtagaccttctcttcttcaccctttcgaacataacccggtggttgttccacatacacgtcctctgtcaattctccgtgaagaaatgcgcttttgacatctagttgatacacattccatcccttttgtgctgctagagctaaaaccatccggattgtgtcccaccttgctaccggngcaaacacttcgttgtagtcaatcccttg

SEQ ID NO: 20862 - DNA, 409 bp, Glycine max
agcttcttatccaaggctcatcttggtggtgaagctccttcttccatggcttattccctagtggatggcacctcctctcacctcttctcctttgtcttccgttgcatctccatggtggaaaatcaccattaaaggacctcattgaagctcaaagatccagccttcatagaagccccacaagcaagcttccatcaagtggtaatcagagcacaagagcttcaagtaggtgctccttaaacctccattaatttttttgctttaccttctcttccattgttgtttcttcatttttctccatgtatctcctcacatgtcttgtgctaaatgttgttaacatgattctttagattttccaccgattaaacttgctatagaagctagatttgattttctatggttcaaatttctt

SEQ ID NO: 20863 - DNA, 402 bp, Glycine max
ctgcagcttattgttgcccgagtcattcatccctatgagatgttgttgaagtattggcgatcagaattgccattcgttggattatagggttgaaccaagctcatgcttttacaaaaaggttcatcaagtcaagttgaaatatggaagtaaccgtcttgcaaaattggggcaaaagatgaatcgagtcacatcactgcttcgtctactgccaaacatatttaggattattgatgtccttgttacttccagtttcaccttgacaaagatgtcatggaccatgttgaaaatctaaattgattcaaccccatatcttgcgtaaaaattcgcaatacttcaactgtacatcattcgcatacatccatgcttttcattggttgcattgctcattgcattctttccttg

SEQ ID NO: 20864 - DNA, 411 bp, Glycine max
  unsure at all n locations
agctttatactttgtttttagaaggtaatatatactgtcttgatgtcctatatttttataatagcctgtatcaagtcagagttggtgcttcatatctcatggcattgaaacttgccacctgtcattttaagagaatcttgctcaatgtaatattgtaatctcaatctgcaaattgcaaaataggctgcctgcatgccaatgatacttgattgagtaatgattgatgaacatctggtaactctaaacacctcattaacacctattatctttctctccccatcacatcatatcaattaccatagctatatttctttctcttctcttttatttctcctcctaggtgtcatctagagtggacatgtccactaacaatntttggatttaatttcctattntcttctttgttcttca

SEQ ID NO: 20865 - DNA, 407 bp, Glycine max
agtttgtgtcacaattcactgtgacagtcaaagtgtcattcacttatcaaatcaccaaatgtaccatgagaggacaaagcacatagatgtgaaactacacttcatcagagatgtgattgaatctgagaaggtgaaggtggagaaagtttcaacagaagaaaatccggctgatatgttcacaaagtccctctctagtgtcaagttcaagcactgcctggacttgatcaatttcgaagatgcctaaagcagtttggtagaagtgcagccctaaatcacaaggaagacacttgctgatttggagtcaaggtggagatttgtggtgtgtgactcaaaatcacaatttgcacaagtgagaaggctttaaagtggtgttgtcataaatgttatcaagtattataactgaattg

SEQ ID NO: 20866 - DNA, 412 bp, Glycine max
ctgcagtctgtttcggaaacagcacaaacggaacacccatgaaggaaggagcgctttgaggaaggaagaagaaaaacaatagcggcagactatgcagaggaaggagggttttttaaattttaagtgaaaaacatttttaccattccacttaaattactggatgtactagcaataatagtgggtgcacattccacttaaattactggatgtactaacaataatagtgggtgcacctagagcacccgaataacttatatttttcgcatcctttggatcaagttctgaaagtgaaatatggatggatgcagagatgtgtctatcgtgataatatcaattcatttgaaaaatatacacgtgtatggtgtgtttctagaatgtcattacccaaaactcattatgtattgatgaaatg

SEQ ID NO: 20867 - DNA, 414 bp, Glycine max
agcttgtacaacatccatgcaaaacaacattcaaacagcacaagctatcacagccaagcaaagacagagcaaaggcggaaaactttgccaaaacaccaaccaaatcacaacttttctcacttaaagaccccagtaacaattccttcgatccaattcgttaaccgttggatcgactccaaaattttactggaagtctatagtacatgaacctacattgtgaccgttgggatctactagcaaacatccagaactcattctgtactactctttccacagccaaccacacacaagcatttttctgcacaaagccaaaatcctgctgcacctattttgacagcaaaattctgcataagtgcagatttcgaaaatcacacttcccttcatccaatcttgcccaaatcaaatgctacaagt

SEQ ID NO: 20868 - DNA, 401 bp, Glycine max
agcttattcgtaacaaaaaggaagatatttttcttatctttccaaggactactcacacgttcaatttgaagttatttagtgtcctctaagcactgcacaaggcaaataggtcaagtaagcacaaaatatgaaatttagctataattctcaattaatctcaatcatatttgcctaagaccaaaactgaattaaggtgagtaaataagagtcaaggagatagcaatgagctaagaagaatataaaaatattcaacaacaaatgctcaatcaaagtctatctcctatcatcagggcacccaccaagatcggaaactgtgtaccctacaacctccaagttgtcaactctcatatacacaagcatagactccttagtcttctacaagtacctcatcaccttcttag

SEQ ID NO: 20869 - DNA, 402 bp, Glycine max
  unsure at all n locations
agcttccttgagacacttccttgagaagcttacatgagaagattcctagagaagctagagcttagctacacacacctctctaatagctaagtgcacctccttaagatgagaagctagagcttagctacacaccccctataatagctaagctcaccccatgacaaaatacatgaaaatacaaaaaaagtccctactacaaagactactcaaaatgccctgaaatacaaggctaaaaccctatactactagaatggccaaaatacaaggcccaaaagaaggaaaaacatattcaaatatttacaaagaanagtggatccaaccttggcccatgggctcagaaatctaccctgaggatcatgagaaccctagggtcttctttagtagctctagcccaatcctctt

SEQ ID NO: 20870 - DNA, 416 bp, Glycine max
agcttatttatagtgatatatatggtggtgcacatggctgtttgtgtttcaaggaaattaaattgtacactaattctatactctacttttaaaatttccacaatttagtattcaacttttaaaatttcatgcattattccttattaattttaattaagtaattttttgcattgaaaataatataagaaaaaccaaaatacaaaataattaataaaaactgattacatgagaagtgaaggtaagttgtatttgaaaacattgtttttataattattttttggttttatttttgaatcttaaaagaatatggtgaacaacatagaggaggggtggaaggaaaaataaataatttggtgagattgcgcactaaagattaatacaaagactataaaatataatacatgataaatcacttg

SEQ ID NO: 20871 - DNA, 415 bp, Glycine max
agctttatgctgcacaattgctccaggttgctgcatggaagggcaaaggtctgtatggtggtcagcaaaggagcacacaaaccacaaactcttgcgacaggaacagatttctgattcaaggccagctgggttactaagttaaccaatgcatccagtttgccttcaagcttcttagtttcagatgatgcagatgggcttgtagctacctcatgcactcctctaatgactatggcatcatttctggcgctaaactgttgggagttggaagccatcttctcaattaaatttctggcttcagcaggagtcatgtctccaagggctccaccactggcagcatctatcatacttctctccatattgctgagtccttcataaaaatattggagaagaagctgctctgaaatctgatggtggg

SEQ ID NO: 20872 - DNA, 414 bp, Glycine max
  unsure at all n locations
agcttgtatgattatggggtatccaccacatgtggtactaggtggcggtcgggcgatggtgcaaaacgattcttcacatccacaaatcacgtataacccaccatcccctgttgcccacctccaactgagctcacgtactcccacgtagcccttatcctcattcctctcaacgtcgggtccctatcaatcctcccaagcttccacaacatccaggtaattccacctccaatcatcatggactaacaaaaccaagcaaaacagggcaaaggcagaaaactctgcccaaaatacaactcataatcatagtagcttttcacatacaaataccccagtaacatttccttcgttccaattcgttaaccgttggatcgactcgaaaattntactggaagtttctagtacataagtctacat

SEQ ID NO: 20873 - DNA, 404 bp, Glycine max
agcttgttattggacaacggaagctctcgagaaattcaaatggtcataacttatcacactgaggtccgattctggcggatagtatatcgagaagctcggaattgaacaacgaaagctctcgagaaattcaaatggtcataacttttcaaacggaagtccgattcaggtgcataatatatcgagaagctttaaattgaacaacggaagctcttgagaaattcaaatggtcgtaacttatcacacgggagtccgattcaggcgcataatatatcgagaagcttggaattgaacaacggcagctcttgagaaattcaaatggtcataacttatcacacggaagtctgattcatgcgcataatatatcgagacgctcgaaattgaacaacggaagctctcgagaaatt

SEQ ID NO: 20874 - DNA, 409 bp, Glycine max
gttagatgaaaattagtatttaatgcaagtaaggttagaaattaagtgtgaataattaaggttgataaatcgtgatctagatttcatagaattagaaaaagggtaattaaataataaaagtttaaagtggagggcatttcgtaaatgattatacaacttgtcttaaaatagaattttagtttatttatttggtgactaattaaagtgtttgattatatgatatagaattgtgtgtgtgtgtgtgtgtgtgtgtgtgcgtgtgcgtgtgcgtgtgcgtgtgcgtgtgtgtgtgtgtgttatttttctattcttcttagctcaatttacatctctttgatccttactttctcactttacttagttgtgatcttaggcaaatcattgagtttgattaataattgcggtttat

SEQ ID NO: 20875 - DNA, 408 bp, Glycine max
agttgtttcttgagtcatcaagagattataaatatgtgaccatggcatgagttttaatcgttcatcaatcatcaatcaataatcaatgatctatcatctatcatctatcatctatcatctatctttcaatctatctttctatatcttcttttatctctttcaacagatctttctgaattatttctcttcatctttctaaaagtttttgttcaacactttctcttccaagaaaagttctttgttcaaaaacttgcgctattcatctttttcatcctcttcttcctttgccaaaagaacaaaggactaaccgcctgaagtcttttgtgtctctctccctttgccaaaagaacgaaggactaactgcctgaattcttttatgtctctcttctcccttacaaaagattcaaa

SEQ ID NO: 20876 - DNA, 412 bp, Glycine max
agctttcaacaaaagttttcacaaataatcatcacacagcagaaacctagcaagactacccataatatctcccaaaaccccatacccacgaaaatcaagagggaaagaagtccacccaaacctgaattttcgaagtcccactcgtagccacgcacttcacgaccccgaaaatgccctcctttcgcgatttggagcagaaatgagtaccaaaggttggagctttgttggggtttcaatggagaatgagggaggagaaaatggcaacgtgagagagagagagagctgtctgaaaaagtgtgggggctgagtgatgagagagaaaagctttttggttttaaataaaaggttttcctcttttttttttctattattttattcaagctctgccacatgtccctatttgattggagca

SEQ ID NO: 20877 - DNA, 399 bp, Glycine max
  unsure at all n locations
agtctttttataacttcctgcaccacatgtaccttcaccttctacttccaccttgatgttcttggtcttgctagtacagcatgaggctgcaaattccgttgaagcacataccaatctatgattgtgcagctgagtgatggcagtttgtctgtcataggtaacacaatttttaataattaatatatttttatgtcttctatatccttttgatgctttaaatttggaaaattactcttggccccctaaatttaaagtgattaatttagttctattaatttgaaaatgacccatttttttgtactttatagggtttgttgggataaacttctcaaaagaagtacttataagagaaaaaaaaacaactaaaaatgaaataagttnttccattagttaaaatag

SEQ ID NO: 20878 - DNA, 405 bp, Glycine max
tgtctttttgtgggtcttgttcttcacataaataattaaatatcactgcctaccttcttagtttctttcctgattgattgctggcattagcataaactatttttgcttcatgtggttccaataaatcgttagaactgctgtttatctgaagtaatgcattactaccatttttttctcactaatgcatatattgttcacttagattcataatacacaggttctggtgccaagatgagtcgcgattttaattgcattcaaaaacttttttgtcagtgtcttgttagctatcattgtacagctcaatcttcgccattttattcatgattcttagatctttggtgaatatcacattctcaatggaggtgttcgacttttacgttggattgttggggatgggtcgcacac

SEQ ID NO: 20879 - DNA, 395 bp, Glycine max
  unsure at all n locations
agcttctcaaggaagctacctagtctataaatagaagcatgtgtaacacttgttgtaactttgatgaatgagagtcttgtgagacatacttcaaagttccacttctctaccacttttattccttcaatttcgtgctcccccctctctccttctctccctctttcttttcctccattgaagcatcctctccaaacttcttatccaaggctcatcttggtggtgaagctccttcttccatggcttatttcctagtggatggcgcctcctctcacctcttctcctttgtcttccgctgcatctccatggtggaaaatcaccattaaaggacctcattgaagctcanagatccagcctccatagaagccccacaagcaagcttccatcataacttttac

SEQ ID NO: 20880 - DNA, 402 bp, Glycine max
agcttgttaagatcccaatccatcccattccagacatctttaacctttaggatagaatcatagatatgcaccaaaggaactttgccacaaagaggctccttagaagctagtttcaccatcccccaccttaaaaggcgaaaccacaccttagatccctcaaaatctcaacccgaaacttagttagggagtgcattaagtcccaaaccagttttccatgaagagcagtattttgagaacgagccagcctaacacccaggccgtggctactcctccttttggtaatagtcttccagttaacaaggtggagacccctactcgtattcctcttccaaataaatattatcacagttttatgcaattcatcacaaacaaacatattgagggtaccagttcacctgcatg

SEQ ID NO: 20881 - DNA, 397 bp, Glycine max
ttgcttgcaagctttttaacagattttagtaatgacccactaacctagaattaaaataacttaatgccattaacctatggaattaaaaaaacttaatggctgagtgtaactgaaattgtggcaaccaaaagtcacccccaacagccaacaagtcagccaccatttggtctcccaaaaggctgatgcctatgttgccaattgggcccttattacaacttgaactaaacctaactaaagcccttttagttgattaacccaaaacatatttttggtcagccaactttacaaggattgggcaattatttagacaaactaaacactctaaaattgaaactaagtggtgtcatttagtcctcctccatttgggccatgatacaactcacaaccttggattttc

SEQ ID NO: 20882 - DNA, 415 bp, Glycine max
  unsure at all n locations
agctttctagcttttcattggtgtattttgatctccttttggtgctctaaattgtgggagtgtgctcaaatatatggggcaattttgatttgttttcttgcttgattaggttgaattaggggttggtatgagatggccctaggcctataatgcattttgaaacaataggacatgccacattgtccccgttctcttgctattgatgcctaaacgcgcgcccaccaagtgttcggtgaaatgcctcaatggcattagcgtgtgacttttgtaaggagacaacccatggggtattttggtttgtgcatattttctatttttttggaatatgtattcattcccgaaaaaggctagagtaattgccccacatatatcctagtcctagaaactgaaattntatgcaaaaagagcacaaaag

SEQ ID NO: 20883 - DNA, 410 bp, Glycine max
agcttgtagattggctagacatgatacatgtcagggttttggtttggttcaaggataaaagggacgccccacattatttccatgacacaaatgcaaaaatgatgatttggaaactttatgcaaaactggtcatgcatgcacctatgtggacactcaagtgtcaaatttttatggtcatgtgatgctagggctcaggattcatttcctccattttagtcaacccaatgtttccaaaatatgttcttttatcaatttgtgcattcatccgagtccattttgggcgtccggtgaaatcttcacagcattcacccttcaggtgtatacacattttttttcaaaaactagctatgatcagcgaattttcttttcaaagaagagttggaagtcatctcttttcaaaagcatgttgg

SEQ ID NO: 20884 - DNA, 410 bp, Glycine max
agcttaagcttgttgagattattatattattacatattttctttaaaaatacttaaatgtattattaattaaacacaataaattataacattattaattatttgaaagtattaaaaaatggaaagaaaaaaaaaacaggatcaaaattcgggtttgtattcttaacctgattttgacaaaaaaaaaaaaaacaagggaggggactgagattcagtgtgtctgtaacaaattctcaccctgaataacaaaaatgtctaattaggtaaataaaataaaaatctcgaagacctttcttgaatagttagagagcctaatgaaaacacaaaaattactttttaataaagtgtgaattttagaaaataaggtcaccggtattttggaacttcttagatccaaagaccaataaattc

SEQ ID NO: 20885 - DNA, 400 bp, Glycine max
agcttctacttatgtggcagggcgggcttccttcactttcttgtctccaacgcgagctttgaccactgttcttccttcccgcgatgcttcttttcatgtccgcctgagtgggcttatagcctaaaccatacttcccacgatttccttgggtatttatcaggctagttatgccgccgttgtctttgcctaaacccatcccgggttcataaccgttccccaacataactcgggccatcattactgctgcatcggatagacaaggttgcccagagagggagtccacggaggaaatgctgaccacctcaaaagactggaaagcggtttctaacgattcttctgtggcttccacataaggcatagaggatgggcagcttaccaagatgtcttcctcgcctgacac

SEQ ID NO: 20886 - DNA, 413 bp, Glycine max
agcttgtattgattcagtctaactagggatcaaggtttgtagaagtaagcttcatgatgatgaatcaagattgattcaaggagttttgatgataacaaagatgatgacaaaaagcccaagataatgagttcaagattgagtcaagaacacttcaagaatcaagagaaatttgatttcaagattcaagaatcaagtttcaagaatcaagaatcaagaataatcaagttgaagattcaagaatcatgaaaagactcaatcaagataagtactaaattttttttcaaaacattgagtagcacatgaatttttcacaaaaccttttaccaaagagtttttactctctggtaatcgattaccagcttattgtaatcgattaccagtagcaaaaattgttttcaaaaagctttcaactg

SEQ ID NO: 20887 - DNA, 413 bp, Glycine max
agcttgtatgtcttggatcttcttcacaaatggagtaatttgcttcttgaagatcaatagcagcgtaatggagatggaagaaagatgattggagacgccacttcaaggagaagatgtgtcaagaaaaaactcaccaccataggaagtcatggataagagcttgaaggtaggagaagatgaatggaggaagagggagagaaggagcacgaaattttgtgcctcaaatgagatttcaactttgaagtgtgattctcaaattatcaaagttgaaaaaatgcacatacatgacctctatttatagcctaagtgtcacataaaattggagggaaatttgaatttctattcaaatttcacttgaatttgaaattcatgaatttgtggagccaaagtttggagccaaaatttcactaatt

SEQ ID NO: 20888 - DNA, 414 bp, Glycine max
  unsure at all n locations
agcttgtatgattatggggtacccgtcatatgtggtactaggtagcgattgggcgatggtgaaagtcaactctccacatccacaaatcacacataaatccaccatccccagttgcccaccttcaactgagctcacgtactcccacgtagcccttatcctcgttcctctcaacaccgggtccccatcaattcctccaagcttccacaacatccaaacatcatgaactatccaaaaccaagaaaacatggcagaggcataaaactctacccaaaacacattcaaataccacagttttcttcactcatataccccagtaacatgctcttcgttntgattcgctaaccgttggattgaatctaaaattntactggaggtccctagtacataagtctacattntgaccattgggatctg

SEQ ID NO: 20889 - DNA, 412 bp, Glycine max
  unsure at all n locations
agcttattagaacaaaattgcctcaatcatttccaaatatgcatgtgaattatgaagcatcaacaagaatcaagccaaggctattgtgcaagcaatcaatggggcaaaacacaccaaatgattatgatgatgtatggctcaaattctcacaaaggtaaactcatcactttcaaatcgagctttcaaaactatcatgacatgtagaggagaatcaaagatttcaagtcacaaaatgtcaaaaacttttattttcaaaacaattacccatttcttgaacatgtcctataattcaaagaaaaacttgcaaagtcgtacatgcgcacagaattgacccanaatattaaactaaaaatccgacatgtttgcggaacttcaccggaaggttgcatgccacgatacaatggtccccgaa

SEQ ID NO: 20890 - DNA, 370 bp, Glycine max
agcttttcgcaagacttacggaaagatcttagagttgaccatagcagaggtgtccatagaagccattgcagcacttacccaatactacgaccagcccttgagatgcttcacattcggggacttccaattagtaccaaccattgaagaatttgaggaaattctaggatgtcctctcgggggaaggaaaccatatctttcctccgggtgtctcccctctttgagcagaattgcaactgtggtcaaggattcagccagaggtttggaccgcataaaacagactcggaacggcatagcgggcctgccacagaagtacctataagacaaggcgaggggtatggccaatcaaggagactgggtcccgtttatggat

SEQ ID NO: 20891 - DNA, 399 bp, Glycine max
  unsure at all n locations
agcttgctacttgaggagggaggannnntnngcttcttgaatatcaatancaacgtcatggatatggaagaaagatgattggagacgccacttcaaggagaagatgtgtcaagaaataactcaccaccataggaagtcgtggatatgagcttgaaggtaggagaagatgattggaggaagatggagagaaggagcacgatattttgtgcctcaaatgagatttcaaccttgaatggtgattctcaaattatcaaagttgataaaatgcacatacatgacctctatttatagcctaagtgtcacatacaattggagggaaatttgaatttctattcaaatttcacttgaatttganatgcatgaatttgtggagccacagtatggagccagaatctcact

SEQ ID NO: 20892 - DNA, 355 bp, Glycine max
agcttatctgataatatctgtgagttctacactctaacctatcaatatcttctatgtatgttaactttttttctgctatcataagtaattgatgcatttcatgtgtgaatgctaacaaactgttctgccagaacctgcgaaatgtttgtcttggcattctaaacggctgtgaagtaaggttggatgaactgaatctagatggaggtaggaattttgttgtgttgttaccatctcttttcttctagttcccataccactcgcattacaattcctaacttcatcagcagttttcatcagaatgatgtgtacactctgcactatgtaaatcttggtatttattggttatgcagacata

SEQ ID NO: 20893 - DNA, 396 bp, Glycine max
agcttgttattgaacaacggaagctcttgagaaattcaaatggtcataacttgtcacacggaagtccgattcaggtgcataatatatggagacgctcgaaattggacaacgaaagctctcgagaaattcaaatggtcataacttttcaaatggatgtccgattaaggcgtatattatatcgagaagcttgaaattgaacaaaggaagctctcgagaaattcaaatggtcataacttatcacacggatgttcaattcatgcgcataatatatcgagaagcttgaaattgaacaacggaagctctcgagaaattcaaatggtcataacttttcacacggaacaccgattcaagcgcataatatatcgagactctcggaattgaacaacgaaagctctc

SEQ ID NO: 20894 - DNA, 398 bp, Glycine max
agcttctctttgtcaaccttcttagccgagtggattgtctagtcttcctagacgtaccattgaaaggaatatcataatgtgtaggtgagggtggggatgtcgtcatgagtatacacaattgaaacaaatacaattagcagcacatgtcagttatataaacatatatgtcaacatgataaaaaatgtatgacaacatcacttttaacatctcagatatacaacataaatgtcagtcaaacaaacaaataaaatgtacattaagttgaatgaaattcaaatacataaatgtattacaattatgcaataggtcatatacattatcaataaaaacataagcagttacatttgattattctcccataaaccttcataatgatcatttctagttgcatgtacaa

SEQ ID NO: 20895 - DNA, 395 bp, Glycine max
agctttattgtgttcttttgttaaggctatgcgtcttttgctcctggatctataatataaagatctttctctcatctgttcctgcgtctctacccattctcatccatctgcatgtttatctctttatgtttaaaacgccagatccgacgacgagtcccttgaaggtactaatacctgagacccgcccatcgacttcgaacaagaaacgtctcagacataatatgaagaggacgaggatgtgagactttcctcggagtcggaaaggatagtcgcccaggaggaccataaaatggggcatcatcaacaagagacagaactagtatacttgggaactagcagtgtataaagggaagtatagatatgcacgagtatgaccacacccatccgcgaataat

SEQ ID NO: 20896 - DNA, 395 bp, Glycine max
agcttgtagaatagttaaacgacaacaacttttgactcggatatccgattgtgtctcgtaagatatcgagacgctcgtaattgaaaacggaagctctgagaaaaatcatacgacaataacttttaactcggatgtctgatcgaaccctgtaatatatcaagacgctcgaaactgaaaagggaagctctaagaaaagtcaaacgacaataactttttactcggatgtcttattgagccctgtaatatatcgagacgctctaaattgaaaacgaaagctctatgataagtcatacgacaataactgttaactcggatgttcgatagagccctttaatatatcgagacgctcgaaattgaaaactggagctctaagaaaagtcaaacgacgataactt

SEQ ID NO: 20897 - DNA, 478 bp, Glycine max
  unsure at all n locations
agacgtggggtgatgacatcaatcatacaggcaatacanctnnnnccccgggatccgttgatcctctacagtcggcctgcaagcatgtcttcttgtgcgcatanntggggtggggtcgaggaggcaggccctacatttttggttccaaaacagggaaagctccgatatattttcaacgcagtttaacttacctagaatatttacctgtacaaacatagtgtatttgtcactcacatcacacacctctgcttggatacatctacgtacaagcatatctaaagctttttggtgcccaaatatcgccatggtgcacatcttggtattctaaacacctatacaaacttcatgatgaatatcgtctatctactctataaagagctcctctacatgctcattaaagactcttgctacctaaagccgcatgcagggccaagtatttttaccttcgctgactaaaatagaatttataggcatatct

SEQ ID NO: 20898 - DNA, 386 bp, Glycine max
  unsure at all n locations
agtctttttagtcataacctctgcagttgaagaattgggcttcgagtttggacttttgttttgtgtaattagtttagttagttaattagttaggtagttagttagttactagcactctatatattagtgttagatagttagttaaggactagaacttcattgngagaaacacttctctagaacttcattntgtacaaaacttgttgtgcaagctctctttctctttctttntctctcaattgttcttcattcttcttcatcttttcacttctgttccaccatttccttacacaaatttcatggtttctccattggtgatgattatggagggctaaacaattaaccaatccaaggatccactccaagcaaagctgaatttgagccct

SEQ ID NO: 20899 - DNA, 388 bp, Glycine max
agctttgatggtgcgtagcccaccatcttttcatagtagagtatcgataatgtgtctaccatcacgatcatcgtctccctttccatcattgggggtaccacctgagccgccagatccctccaccttttgggcgtgttctttgaaagatccgtccccctttttgcaaatgttctgtaattgcatcctatccggaaccatatcaaaattgtactgatactgcctaacaaaggcaaccattaagtccttccaagaatggactcgggaagattccaagttagtgtaccaggtaacagctaccccagtaagactttcttggaaggaatgtattagcaattcctcatcttttgcgtattccctcatcttctgacaatacatatatagatggttc

SEQ ID NO: 20900 - DNA, 396 bp, Glycine max
agtttttgtgatatatttcaccagagacgcagctccccaaacacctcagtacccctcagtagttagacttgttccattcccctacaaaaacaaccacccagttccttggaggtatgcgcctccaagcgaaaggaaggaagaagccaccgacatcagctcgttgtcaaccaaggtaaccaatatcacggggctgagtggcgtaacctgcagtggtcacatgttcgcaccccccgacctgccaacaccacccgcaaacgttaaagggaaggcgaaggtagcggaagaacaaagtgacaaagtgatccctactctggacgagcatattccagtaaaaagtctttcggcgaaatgggatggctatggaaagaaagaagtatcgctagaggaggcaggtga

SEQ ID NO: 20901 - DNA, 304 bp, Glycine max
gcttgttgtagatccattgaccatagcccttgcgaatgcaacactagatagatgtggctaatcgaggcatcctgcctgtcatatgctcgcgctagaacacactgatgtgctttttctctgaagcaatatgttgctaagtgtcagaacgaagaccgtttgaatgaattcgcgtacgatgcgaaatctattaatgtgcccatacttgatgaattctgcacctgctttcttagacatcattacgctatatgtggagtaactgggctgagcgtgtgattgatgaggtaccagtaatcgccagcggatg

SEQ ID NO: 20902 - DNA, 389 bp, Glycine max
agcttatgaaggttgcttaatatctccaacagaattactgcaattaatccctaatatttataattagctgacagtctgatcatgctgatatatatcaataagttaaatttgatagtgatactgttgtatatattaaactacattgagatttggcaaaagcaaaaagctattaaacaatgtcttgtgttgcattctcattcaagaaacaggtttcaacttctgtacaaaacagaaaatccttacaataaaagaaaacagcttctgttcaaatttgcctcatcttatctgtctgtgtctccattagcatgatttacaggtcattcaaatgacaggcgacagttaggaactcatccttcttacatggtattgtgagaccacccattgcgtgc

SEQ ID NO: 20903 - DNA, 390 bp, Glycine max
ttgcttctggtaaagctcatatatgttcttaaacaatttgccaaagggatcatctctagcaatgatattcgacctatgaccagctttaacctgtttctttgtcttttctatgaatcctatattgttaatgaaaataataattaacctaatgtttgagttggagtttttaacactacaacattgtattaataatgttaaagaaaaataagtacttcatgggatacaagtttcacaagatgtgtcgaccatgcaatgaatgtgtcaagggcttgcctgacatactaaatctttgacgtcaaaaaagggacttaagtgtcaccattgtaaacttttgcaatactcaccttcaccacatcatcaccataaggcacgttgtgtatggtggatacc

SEQ ID NO: 20904 - DNA, 398 bp, Glycine max
  unsure at all n locations
agcttgtatgtgtactgngaaagattcaagaaattgtgtgcaagctgccctcaccaccagatttctgagcaacttcttcttcaatatttctatgagggacttagcaacatggagaggagtatgattgatgctgctagtggcggagctcttggtgatatgacccctgctgaggctaggaatttgattgagaagatggcttccaactcccaacaattcagtgcaagaaatgatgctattattcttagaggagtccatgaggtggccatggattcatcttcatctactgaaaataaaaagcttgaaggaaaacttgatgccttggtcaacctagtaactcagcttgccatgaattagaaatctacacctgttgcatgagtctgtggtctatgtccttcttt

SEQ ID NO: 20905 - DNA, 394 bp, Glycine max
agcttgttttttaattatttgtatgggttggatgttgaattctggttgttcctggtgcggagatgatggtacagcgggtgaaccagaagcggaagtttcttttggtgaggaagccatggaaaaacagagcgtttggaatgatttcataaatctcagaaaactattgggaaatgctggagaaaacacgaatgcctagcagatataaatttgaatgaagaatgtagaggggcgtgtgaagcaacggtcgaatttgctttgtggtgaacgtgctattaatgttaagtgattcgtttgggcacgttcagattgcagtagctgctataattcctctagcaaacaaatgcccagcttgcccctcagtttttcaaactgatttgcatccaaagcctttgtg

SEQ ID NO: 20906 - DNA, 394 bp, Glycine max
  unsure at all n locations
agcttgttttgtgttatgactccattgatgctgattatgaagttttttgagattgtctgttgggtagaggtcatgataaggactttcatgaactcaactttcttgagtaatagagaatctttgtcaatgtctatgacctttccaaagttagaaattatacttgagaggcactttgtgttccatgtagagaaaatgatattgtagcatctaatccacgtcaatctattacttgtgtgagttgattcttcccatttttgcactgatttaaagattgaaatgaagtttctttttcatgttctatgcatagactgagaacctattcctcatacaagccagatacgagtaccanatctccagcattatatctcataaaaacctcttggtttccttccat

SEQ ID NO: 20907 - DNA, 396 bp, Glycine max
agcttgcttgtggagcttctatggaagctggatctttgagcttcaatgaggtccttcaatggtgatttttcaccatagagatgcagcggaaggcaaaggagaagaggagaggggaggcaccatccactatggaataagccaaggaagaaggagcttcaccaccaagaattgccttggataagaagcttgaagaggatgctttaatggaggaaaagaaagagagaaggggggagcacgaaattcaaggaataaaagagggagagaagtggaactttgaagtatgtctcacaagactctcattcatcaaagttacaacaagtgttacacatgcttctatttatagactaggtagcttccttgagaagctttcttaagataactttcttgagaagcttc

SEQ ID NO: 20908 - DNA, 497 bp, Glycine max
  unsure at all n locations
catactcttcntctttatacggtcaaagagttatctatagtctttacntnnnnccagagggggctgtgcgtcgtactacaccgtnnatcntgncccgcgatactctaagagattttcctgcagcaggctctttttgatctattgcgtnagcataagcacaggataacctgtgagcgtcggattgaatatcaacaccatcggcgtaggaatgtgatccatacacaaaaccaccccgagagtaagccttcttcatggggcacggcaagcaagaacagaaagacgcccaaacatcgaaatcccgtcctagggtgagaagggggacagagtacgatctcggaccaaaccatgcatgccaaacgacaacatgttcaggaaaacaatagttaaacgatatcgatagggtgccctaggtgcaccataagctaataaaaccgaaaggtcgactaacgtcagcaaaagcaagatacacggcaattctgggtacacattaacgagag

SEQ ID NO: 20909 - DNA, 389 bp, Glycine max
agcttttatgtcaggctaagcaccactatgcttctgtagttttcctttgaataaggataagcgtagctgctgctctaagcccttgttgtgtgttgaggaggttgagctaagcgccatgcaacgctaagctcaactctctcattgtattttaagttactgcagctaagctaagtgcgccctgtgcgctaatcctgagtgtcattctgataacgttgagctaagcgcgccatgctacactaagctccaactctcttctattttgaaaattgtggacctatgctaagctcagcttgctgcgctgagcttaatctacataaaaaatactctgtgtattcaggctaagtgcgaggctactgcgcttagtcgctaagttaaactttataatgcgc

SEQ ID NO: 20910 - DNA, 293 bp, Glycine max
tgttctttattatgtctgacatattcatagtcgggcgccttattacttttggagacgggactatgacaccgatggagaaccagagaaccaaagctgctatatggaacagagcgagtgagtctcggaaggttgaaatacctactattgtgttaagaacaactttgacagacgggattgcattcaagggcatagtatgacattggcttctctacgtatatggcgtgcgtgctataggataacagtctgggagaacaatcagaattgaaatgatcctacgcgcatggcatttctgt

SEQ ID NO: 20911 - DNA, 390 bp, Glycine max
  unsure at all n locations
agtttttataagatgtgctcgtttgtataaacaacatctatatattggtagtagttcatgctcacataaccacaaactgcaataatgtgtgaacatggatagtgaagcgcagaataccttccgcattgacaatgatgaccattcaagttaactgcccacttttgtccgccacgttgcgttatanggttgaagctttcctctacttcaaaccttgtgaagtggatatcatacacgcgaacgatgtgcgtacaagcttgttcttgatttttccttagttctttaacaagctttgaacaatatacatgtccttcatttaactatctttgggcttggcggccacgctcaacaaagtactttcgacacctactgtacgttgatttgaccaatgct

SEQ ID NO: 20912 - DNA, 391 bp, Glycine max
  unsure at all n locations
agctntgggactaaaaaactatataacagcaccaaggttctagtttagagggctcttcgatctattcgttattagacatagtctctctctctctctctctcttcttctctctcctattttcgtttttagatttacgcttttcttacacacttttttgttttgcaattccagttttgacttttcattttagcagtacaatctcgctcttcaatctataatttccttctctattgattaatggaaggctagattttctggtgttgttccttttgaggacgaagcccaactctctttgaggtttcgcttgcaatgtggtttcctggcagttttcccttcaccagttatcccaatttcgtgaatattaatcagtgcacgcttcgcgttcgattaa

SEQ ID NO: 20913 - DNA, 588 bp, Glycine max
  unsure at all n locations
ctacgtttctagccaccncaacatcatctgcgtcttctgcacgcaactatggcgatacactatctatcatanacannccncaagaggagnctttgatggcactccttactacacggcgaggtcnagtgctgctccgcccgccgccgatctctctattagactaccatggacgctaggcatttcttttattctgggacgtctcgcgtgaggcagcgctcagctatatcacgacgctacataacccgaaaggagaacagctcctcgcctcccgctaacctgcaagaacctttagacggcggttctcgcgaggaggaacaccgcactcgtatggcgcacgcctcgcactgagaacaacagaacgctctccagctagagtccaccgcacaacaaactgattacgtcggagggacgaggaacaagatataatagatcccgaccccacgacatcgtatagcgaagccctccactactgctcactaaaattactgtcactcaaagggcagaccatccccaccaattgaagggaggccacaattggtatcgaccactacgcaagagaatccacccttaccttactatgtatcgagg

SEQ ID NO: 20914 - DNA, 392 bp, Glycine max
tagcttttcatctatagatatttattgttggatgccaaactactagaagatactgttctatgacattgaatgatggatattgtatttaggcaacaatatgtaacatagctattgtatttaggtaatagtatatgtccaactattgtatttagcttaacattgaatgatggatattgcatttagtaaatattgtatgactattgtttctttcttcttagtattgtaatctttcttagaagataaacagatagtgtttctaaaaacaattgtttgataaatcattctcacgcgttatgaacatacttgggtagatatagtgctctgttttattcttttcagaacctagtagctctcacaactaacataaaacttcttcgactagcaaatagtgg

SEQ ID NO: 20915 - DNA, 387 bp, Glycine max
agcttatcaccacaagttatttctgctaagcatgtcttaaatagtaaagcattgtaacaaatcttgattttacacacacacacaaacatatagtggaaatacaagaaattataaactttaatatagaagtactagacattgccaatctgaagtgagggagaagaaaataagtactgttgaagatacacaagtacatactatcttgcactgaaaactggttctgtgtcaggtgatggttgtgtccttcgagtgtatttgagtagcaacccttctgaagaaagacctggtaccttcagatctctgaaacatctcataaggggttaattcaaatgtaaaaaagatgatacgtttgaaggtaaaaataattatgagatgttcacctgatat

SEQ ID NO: 20916 - DNA, 396 bp, Glycine max
agcttgttgttttcttcaactcatgcattctactagattttggcatagcaataaccaatttatttgaaatttgatattcatgaacattgtatttctcacaagtcaatggttagattgatgaagatcacataaaatatgttactcaattgtcaaagtgtataaattatttataatgtcgctcatgttttactaacatgggcattagtttggaattaattagttgctatgaaataaaaaattgggacttcatggccataagtttcacctagtagtgttcagtaataatgtaatgttttaatttaacttctatcaatggataatctacagtttaggttgtcctcaattaataaatttattggttccttctctggttgattctgctaaaaaataagaata

SEQ ID NO: 20917 - DNA, 397 bp, Glycine max
agcttgttacataaataattatgtcactgtccaatctttcaagcatgcgtcatataatctaaacagacagtatttcattgctaaactcatgaaaaatgaattagaaaggtcacttacagagctaatactgggttgtctttttgcagcagagatttctggagaattcaaaagcagaggatttgtagcagagtatggttcagtcatagcaaacattagattatacaggtaagaatctcaattctcaatcttgaactaaacaagtaaaatagcacattgtgcacacattaacatagaaaggccctgtgttatgaaccataaaaggcagcatcggtctttatgaataagctttccaaatttaaggataacaaaactgcaacttcttcaatgtatgtgcgtc

SEQ ID NO: 20918 - DNA, 391 bp, Glycine max
agcttgctctcttaacaaacttgtttggaacagcaaggggatggcccaacaatagtcccgtttaactttgctcgtggagaagaaaacacacaacgctttcctcgatatcttgatgattgggaaacattcatgaagttactattcagtgtcgctaaggcgggcctgcttgatgaatatgacttgctcccaatgagtgaacgacctttgggagcagcctcctgccatccttcatctgagctgtcatgctgtgccaggttattactttcattgagccttgtttgagctaagagagtggactcaactattatcaatcccgtggactatgagttgagctccagatctattttctgtatcactagtaggctctgttatttaataaccgtgacacatg

SEQ ID NO: 20919 - DNA, 393 bp, Glycine max
agcttgatctataggtaagagacaatcattagggacccattctcttccaccgattcaccttcattccttatcccttcaccttttacatccttttgtacatttgagcccttcgtgaccatgaagggctaaacaacccattgttggagagctttccaccaaactctcttgatgtaaagactcttactatccatttaacattattgctagtttcattgttccttcctgtgtttatttccatgtacttggtttgatcatccatttaaatgctatgttaaggtttaagcattgggaaatgtagttaaccttagaacttggaagagcatctaaaatgcttcattgctagggataatatgacgtagcttatgtgaattatacgtctctattaatcatgca

SEQ ID NO: 20920 - DNA, 308 bp, Glycine max
agcttgtttttatggatagttggtatgagattaagatgttttggctttttacatgcctaacttcttttgagtggcatttgtattggttgctaacttgattgttgcgtctttagtacatttcatattggtttttcatgtgcatcgtcatagtgtgtgtgaaggaaatctcctaagttaggaattttttttatgaggcaaaaactctctattttaatcgattacagagtaatcgtaattgattacgacaagctctgaagcttgaagatgtaaagtctcgtatccgatttatgaatgtatgaatacatgaa

SEQ ID NO: 20921 - DNA, 382 bp, Glycine max
agcttttacccatgacttcctatggtggtgagcttgttcttgactcatcttctccttgaagtggcgtctccaatcacctttcctccttctccattccgctaccattgatcttcaagaagcaaaggactccattgatgaggaagatccaaggcctacaagctctacattgagctacatcatgtggtattagagcatcttcatctaagcgatgttcttttgcttcctctatctttttgttcggtcaattgactttaattccttgttcttcatcatcttctccatgtatctgctccattgtcttatggtttggctatttttagagtagattcaacaaaataaaccgattaaatcttagataagcactcgttcttgcatttctatg

SEQ ID NO: 20922 - DNA, 384 bp, Glycine max
agcttgttctcttatgtgcttgtactcagaattaataaaaaaacacagtgacttactaacacacctaatattacaggactagaaacaaattagactaatacaaatgctaaaatttcaagtttagataccagactcaatgatgctaagtaaatacagaaaatgattacaacataagatgtgttaaaatagtaaaatactactaatgacaaaataataataatagacggggaaagaaaaaccatatacgtaaaagacagaggttaaggtggggctgagctgaaagaagaaaaagcatggaactgaccagagtttagggttcacaattcagcattagttagcatactatctactaacaataagtatcatcatcatcatattaaactg

SEQ ID NO: 20923 - DNA, 380 bp, Glycine max
agcttgtggactataccttcgaccaaacactgccgtgtttctgtctcgacccagatttaatgcgggctgtagcaccggctccgctttcctaactgtactggaggtggttgtcgtggctttatcctctatagttttctggagttttagcatgacctccgagatggaagccatttgatcttttaaagccgatagatcggccttcatctgttcctgcacgccctcttcattatccatttttctggatcgagtgttataggggtgcctatgtgctttcttagttatgatgaaattcctaaagaaataaacaacggtgagtatgccaccaaaacatgaatatgcaaatgaatgatcggagcacttggatccacccccaggttttt

SEQ ID NO: 20924 - DNA, 396 bp, Glycine max
agctttattatcacagcaacacagaatctaggtgtccaacacccctcaattcaatgggttttctaggtttgaaaagtgaaatcgagaatgaggtaaatttgaagcatactctcacctcacaccagtccataacatcaatctaaacttgctcaaactggatttacgcttaaaatctcaccgaatcaaaatttgactcttccacacccaaatttgccctataaatggctctttgttcactttggtcatttgtttttctctctagcacagcctaatctttctcataagtcctaaatgacatttcaagctaagattaactcactctaacctccatttaccacagaatccagaattaaccttccaactctcaaagcctcactctttttccactcataacat

SEQ ID NO: 20925 - DNA, 280 bp, Glycine max
gcttgagtcgaaaaccgcaggcgtgaccttggctcattacctgtcatgggattttttaaggctccgctcggcttacatgaaagtctggctaggcccacgatcctatttgaaagcttgcttaaagacgtctctgataaatcaattattttaaatcctaatgaaatacttactaaaaaaagaaacttatgaaatcccttattagtaatgcacaaattctaaaataattgataaacaaaatgattatgaattctactcgtaaagcacacagtatattaaaaaa

SEQ ID NO: 20926 - DNA, 395 bp, Glycine max
  unsure at all n locations
tagctttatgttagcgaatgaaaggaaacatgaataaaccatacatgctcaaataacatatgaagataaacaggtacacctatatggtcacccaatataaataaataagtgtcatgtgccataaagagtagcaaaatataatgtgtcctaatgaaactagggagtaacatatatagtcccaactaaagtaaagtagtaatgactaattaagtacaaaaggtctgagcctaagtctacccatcccaaaatactcgtaagggcaaaaacctaagacttagagtagtcacctctacctaagtccaaagtcaggtgactgcaactcagaagggataacaacctctggcataggcacaacaaagcggtaatacgacagtgtangctaggtctaccaaatg

SEQ ID NO: 20927 - DNA, 390 bp, Glycine max
atctttatcggatgacgccgatcgaacatttcctaaccgacgtcatgcaaatttcgttcagggattgaattgagaactcgttaggcgacatctgtcgtgaagtagcgaccgatatttttcagccgacattgcacaattctttttagaaaagctcgctggtcgataatggtctttttacggcagagtaagttttcttgttttggtgttgcataaaaaagttacaatgtacttcggctaggtttttcgtgcgagttcaaccgacattttgtttcggccaggaaaacattagcccacctctgcaaaaaaaatatttgctaaccgtcttcatgcatatttcattcaacgattgaatagaaaactcaatagccgacaacggtcgtgaaatagtcc

SEQ ID NO: 20928 - DNA, 395 bp, Glycine max
  unsure at all n locations
agcttcttattcattgctcatcttagtggtgaagctcattcttccatggcttattccctagtggatggcgcctcctctcacctcttctcctttgtcttccgctgcatctccatggtggaaaatcaccattaaaggacctcattgaagctcaaagatctagcctccatagaagccccacaagcaagtttctatcaagtggtaatcagagcacaagagcttcaagtaagtgctccttaaacctccattaattttttttctttaccctctcttccattgttgnttcttcatttttctccatgtatctcctcacatgtcttgttctaaatgttgttaacatgattctttagagtttccaccgattaaacttgctatagaaactagattngattttctat

SEQ ID NO: 20929 - DNA, 398 bp, Glycine max
agcttctccggatgacgccgatcgaacatttcctaaccgacgtcatgcaaatttcgttcagggattgaattgagaactcgttaagcgacatctgtcgtgaagtagcgaccgatatttttcagccgacattgcacaattctttttagaaaagctcgctggtcgataatggtctttttacggcagagtaagttttcttgttttggtgttgcataaaaaagttacaatgtacttcggctaggtttttcgtgcgagttcaaccgacattttgtttcggccaggaaaacattagcccacctctgcaaaaaaaatatttgctaaccgtcttcatgcatatttcattcaacgattgaatagaaaactcaatagccgacaacggtcgtgaaatagtcccgactgat

SEQ ID NO: 20930 - DNA, 390 bp, Glycine max
agcttgttatctatcacattatatagcggatacgtactgctaaaagcctgcatatatggttttttaatgcattccaacttgcattgcaaccatttgagggaccctttcatcaaagatatgaaattattgacactcaaggggtcggcatctcccactccatgtaccttgatttaacttaaaactcaaggatcaccacaattttattgtagcagctgaaatccatagcatgattttttttcttagtgatgctgcaaccctttactatatgaacccatataatataagtatcatttttttttcagtaacagtgacttgtatgtcattatgattgagtggctataatatatgggaaatcatctaaatgaacttgaggcacgaaatgatgaacat

SEQ ID NO: 20931 - DNA, 392 bp, Glycine max
agcttcttctcaatggacttaccttgaattaattcctttgatagcccttttgagccttgtttccctttccttgttttgaagctcactacaagccttaagtgaaaaaccatgatattaccatatccttaaggaattttggatctttggaattgttttgggaataagtgtggtgggtttttgtttcattggacaacttgttttgttggctatgcttcatgatgtattttgggccatacttgatgtacattgtatattggttaaatgttggacatgctgaatgaaatgttgtttctcaaaggccaaagagtaaaaaaaaaaaaatatcgaaaaaagaaaaagaaaagcaataaagttgagtgaataagatcttaaatggcacaagaatgatgaaa

SEQ ID NO: 20932 - DNA, 375 bp, Glycine max
agcttctctcggattattccgatcgaacatttcctaaccgacgtcatgcacatttcgttcagggatcgaattgaaaactcgttacgcgacatctgtcgtgaagtagcgaccgatatttttcagccgacattgtacaattctttgtagaaaagctcgctggtcgataatggtctttttacggccgagtaagttgtcttgttttggtgttgcataaaaaagttacaatgtacttcggttaggtttttcgtgcgagttcaaccgacattttgtttcggccaggaaaacattatcccacctctgcaaaaaaaatattagctaaccgtcttcatgcatatgtcatttaacgatcgtatagataactcagtagccgactac

SEQ ID NO: 20933 - DNA, 362 bp, Glycine max
atcttatttattctgctttagggctttatgatgatgcttgcgatgtttgtgtgctgaaattgctgatggaaaactgatatagatgaatggtagagctaacctaaggctaacaagtgagaatgtagtgatatgagtggaaaaatgtgacgctctgagggtttgaaaggctatatctggatttagtggtaattggagattaaagtgagttaatcctagtctgaaatgtcctttaagacttatgggaaagcttgcgctgagcatatgatgaaaatgagtgaccaatgtgaaagcaagagccatttctaagtgtaattgcgtgttgatgggtcaaatattgattcagtggagttttagtcgtataa

SEQ ID NO: 20934 - DNA, 517 bp, Glycine max
  unsure at all n locations
cgcacgtcnnnttaagatgtgttcaatccacgcgccgagagctagctccgcgcggatcgctctctatgacagtcctagcactgcactgcatagcatttcttgtgttgtattccattcaatacatatagctagctcggcggcatgcccattacgctcacgaatagtatcgccaacccggcttgagacacacagtcatgttagaggaaccgatcttgtcttgagatgagacatggctcacttctactttcttatcaacgagccgtatcccgtccgcttactggacggttgtacgggccagcaagccatattgttttgctgctgtacaacaacgacaccatgtacttcggctacgtcagtcgcgccagagacaacagagcttttgatgctgcctcataaactttcgtacaacagttgagagaagaatatgaccataactcgatatgctgtgtattacacgagacagaatgcttatatacacagacttgcctataacaggcgggagatgactacgaatggg

SEQ ID NO: 20935 - DNA, 395 bp, Glycine max
ctgcagtttttatgaggaagtgttgaagggtgaaactttctgcttttattgttgaccacagagtggtacctggagatatgtcgcgggggtcaggagaccttggggacgtcaggtggggtgctattgcccaaaaccaagcttgaccaatcccgacccaacccgggcatagtcggtcagtgagaacctgtgatgtacctaagcaggcgagctccttgcagtcaaccgataaaaggataacatagaccacatagcaaggaggcttgtggtggctgaccagctgtgaatttgtgtgatatgtggagtatagtctctggtaatcgattaccaagggtgggtaatagattacaaggcttataaatgaagacaggaggctaagatggtctctggtaatcgat

SEQ ID NO: 20936 - DNA, 370 bp, Glycine max
tgcttattgtttatggaaaaagtatagacatccaattgcctcgaccaatttataagatttgcggagaacatgcaaaatatttcacgtctgacgctcatatgcgtatccgctttacaagataatggttgggttgaaattagtaaagattatgtaaacgaaacgcgacagcatgtgaaggatcatatataattaagtcaattatattcaatttattcatatatgagaagatgagtgatatcttcgaattagatcgataagcgtattgtggcagtatctaattcccgctttttctgatgaagacatgtaatataaggatgcttttagtttattagatgagacgaatgaatttgctgtgacgcaaattcaatct

SEQ ID NO: 20937 - DNA, 540 bp, Glycine max
  unsure at all n locations
ctcacacgtcccctaccatctctgcacacttacagccacatgcatacggtattgcgaacncnaaggggggtggtgtgactcttcaccacgngaaangagatcgcggccgccgaggactcanagtagaccatgcacgcatgcatttttgtgtctgcgacaagaatacttctgcgagggcagccgctgacgaccaccgacggaggataagagctcctcatagaagaactcgggactcactacgtaccaagtcgcacgaacgggcgagaatgctgcgcgccgggtgtcagcgacgaccgagagaccgctgacgcaagaaagagaccgatcgcaagacaacactatatctttcgactaaggtacgaccggctccatcgcaacttctatagaaccgcggcggtcaccgacattcgtgatgtgtgcgctgataaccgcccggccacggacactaatggaacctgaccctgtgggtgtataacacccacacaaaatgcgcaaccgcacacccacatcttccacagcgtcgcatgcacacagtccacg

SEQ ID NO: 20938 - DNA, 384 bp, Glycine max
tttcttgtattgattcagtctaagtggggattgaggtttagtaatttaggctacaacatagaacacaaaagcatgattaattagagaaacatctttatatacatcaactggtttgttagaaagacccaacatctttacctactgttgtcaatcttacttacttgcatttttactgtttttagcctagacttagttttattttgttctaaatcatcaaattatcaatgtttctttcaacaatgccttatttctgaatttaaccatgtctaagactagttccctgagttcgatactcagattcatccgttttaattttaaatacttgacgatccggtgtgctttctgataaaccggatttcccttgaacatatttgtataaagaaa

SEQ ID NO: 20939 - DNA, 390 bp, Glycine max
tagctttatatggtaaatagaaagcatgaaatcagaaaggtaaatttttggctgtaacttatgaattatttttagtatttactttatacctgaatgaattccaaattgtcatataattttttttaggattcattttttcaatttattggaaacatctcacatgtgtttgacagggatcaaagaacttttaaaatctttacttgattttgttctagacggatttgttgattgcttcttatgtgtttgatcaaatgccaaaaagaactttgaaatttccctttgcaagctttaccgattgatttctttggtctatttttaatttactgactaaaaaaatataaatttagtgggtcagtagtactaactgaacatgcaatgaaacatgcacac

SEQ ID NO: 20940 - DNA, 398 bp, Glycine max
  unsure at all n locations
agctttctttctggaactatcaaacaaccataaaaaacctacagaatcatggatgaatctttcatatttaagtaacaatattaggaaatatacaatatatataaacaactagatttaagggtaatttagaagaaaactattacaatcaaaggataataagtgctaacaatttaatcccaaaaataacttaaatttggcacttatcaactccccccaacctagaatccttcttgtcctcaagcaaagtaaataaaaatagtataagtatgcttctaaaattatgaacatgctttgaaaagaatcaatccccaaactgattangacgacatttttcanaatggaacaatgagaaatgaaagcacaaagatggaattcacataaccaaaaaatgagattaa

SEQ ID NO: 20941 - DNA, 395 bp, Glycine max
agcttcttggtgccctcccgtttttattttctctccatctctcttttttcacactgtagcagacatgttcatatgtctgttgggtttgaaatgacagcactgtccatcattgagctctgatataatcatgaaataccaaggaataactacccttcattttcatgtgttcgtcaattacctgatggatggtagtatagtcatgaccttatgtggtacacgtatgactaccaaaaatactgagaaatagagatagagatatctcaagatatgtatggcattgctttgcaccacttgtcatatccttatatcatatatatacctttggcctaagcataaattcagcttgcttttgtatgtacgttaaaggaacctgagagagtaacacttatatatat

SEQ ID NO: 20942 - DNA, 394 bp, Glycine max
agcttgatattcattaatagaattatatttgactatatttcaagtacacatttaacattgttttctctaaaataaaacttaatgggcttctagagcagaagagagtttttcaacttcaaccaaataaataaacttcatagcattgatctttgtttgcggtaactctaattacaaaacatacacatatataattaattttcaattaagagaaatcaaattacctcttcaaacaatgtgacatataagatgtaacacaccacataaaataatcatgaaaggaagagatatatttatttccaaccacacatatcaaatattcatttaatgaatgtgaaattacaaaactacccctaatacagatactagtctatagtgcgctaatatacaagggctg

SEQ ID NO: 20943 - DNA, 392 bp, Glycine max
agctttcttttgccatttcctgcgaaggcaaacatttggaaagttagttttaccaagaaatgctactcttaaaacaaaaatggcatacaacctcctccaataaacacaaacatcaatgtaaatttagagcaaactcatgcacatacttctttacgaacattcactcgcacaagatattcttctaactaagaaaaatgcacaatcaaggcaccttcgttacctagattatttatatgtacttccaaggtgtatttgctatctacatcacatgcacttcctttgctaaatttacatacatgcatactcaaagcattttggctaccaaaatttgcacacgtgcacattctggtatttccaatacctatacatatacaaactgtgtgatgaatctt

SEQ ID NO: 20944 - DNA, 566 bp, Glycine max
  unsure at all n locations
caccaaccacnacctcctaccatagacgaaccgacacaatcacatagtgnntccggcctnnananttanannctaagaggagnntttgatgacgtcgataacgacacggcgaatncaaactcggaaccccgcgagcctccacagtacgcccgctggcatgccagctagtttggttaaagagcaacgaacgtcacgcgcgcatgcaacaaaagcgagacgcggctataccagacaacccgccaaacaaaggccaggttacagagaaactcggccagtgcaatattcaatgcaagcgatatgtgaacaaagagaaagatacacaaacgctagaagaaacggaaaaagaagccacaaaaacaccgggcccaggggaaacgaaacactcccctgcgttaccagacataacgagcacacagaagcgcacacggccagagaaaaacaaaagcgcgggacagagcatcgacacgcgatgcgacccagaagcagcgaaaaatcaagacacaccgagcgagatacacactaatccagagcgtgccacgaggacaacacgtagcgagataacaccg

SEQ ID NO: 20945 - DNA, 388 bp, Glycine max
tgcctgcatgcatgctagttttctctatctgccagaccacctttgacaacctacagactcgtggatgagacttttctattttcataacggtattaagagatctactgtatctatgatcatcgtggtatattggcctttgataagatatctattacctacttaagatccagttgctggcatttagcccctgaagtaactcagatttggcactaatcaactgtccccaacctagaattcttgttgtcctcgagcttagagcattaaatactttcagtgtgcctctgaaactatgaacatgcattgtaccgaatcactcctcctactgattatgacgacattgttgaaatggacacagtgataaatgatgtctcatagatggaatgcacat

SEQ ID NO: 20946 - DNA, 392 bp, Glycine max
agcttgtgtttgaggtacttacccgttgaagatcgaagaacgatgaagaacgaatgaagaacgtcgaagaacggtcgaaaccttcgcaaaattcctcacggaaacgttacggaagcaacagccttctggaggaatcttctggagggcccaagtgggcctgattgctatttgcacccccatttttactaagtacaccccctgccttattttggtgattcttttttcgtaaagttacggaaacttacgaattttgtaaccatacttgttttctttccgtaatgttacggaaccttgtggattacataatcatcccctttttgacttacggaatgttacggaacctcactaattgtgcaacgatgcctccatttgatttccggtgtgacacggaa

SEQ ID NO: 20947 - DNA, 374 bp, Glycine max
tgctttgtggggtgattcagaccttgcttgggagtgcctgcctgctatgaatgctgctgggggtctgctatgcgtttggaataattgtaattttcaggttgatcttagagtgtctgaaaagggtttcattatgctgggaggggtttggattcccgacatgcaaaggatagtcgtggtcaatatgtatgctccctgtgatattgtgggtaaaaggcaactatggcaggatttgatcagtatgaagttgcaatcccaagacccgtgctggtgtctagatggggattttaattgcatcacgcacccctctgatagaatggggagctatcgtggaaattcaccgctttctattatatctgaatttaatgactggctcg

SEQ ID NO: 20948 - DNA, 340 bp, Glycine max
tgcttttttctacacggacttacctagaatcaattgcttggacagcaccatttagcctctgttccctttactgcgcccgatactcactacgcgccttaattgactaaacaagatacctgcacatcctaagggaattcgggacgctcatgacacgcattggcattgatagtggtgcggacttgcttactccatggaatatgtggtaccgatgactgtacttgatcacgtattgggagctctacatgatatacaaactttatgacgaatattgactatctactcgatagacaggtacattctctgctgttatcaagtcattgctacctatcgccgcatgcaa

SEQ ID NO: 20949 - DNA, 517 bp, Glycine max
  unsure at all n locations
catattcctcttccgccaccagctaatactcacacttataaatcagtataacaaaatcnnnncagagggggttgtgcgcacgtcaaccgggagaaatttcgctccccggaaccctatgagtccgccgcgagcctcctactttttggtaagatgtagatcgtcgaccgaacattaataaatacacacgccccgcagcgggagattcactacaaccacaagccagtggctacgaagggctgcatcaattagagagaaccccgcttaatccacgtgcaaagccagcaaaacagtgttccgcaaagcgatgaaaaaataaggtccaggtgcctattagcagtaagataaccactaagagcgcaaaggcgtaaaacagatactccctaccgaagcaagaaaaaagaaaaacacttatcacagtctgtctcggtccctaatgcctgcgactaagagaacagaaacgcgagcccgccgcctaaaactagagcctaccagcaccgcaccagaaaccacacgaccg

SEQ ID NO: 20950 - DNA, 344 bp, Glycine max
ttttcttgttatgaggaagtgttgaagggtgaaacttcctgcttttattgttgaccacagagtggtacctggagatatgtcgcgggggtcatgagaccttggggacgtcaggtggggtgctattgcccaaaaccaagcttgaccaatcccgacccaacccgggcatagtcggtcagtgagaacctgtgatgtacctaagcaggcgagctccttgcagtcaacagataataggaaaacatgaccacaaagcaaggaggcttgtggtggctggccagctgtgaaacttgattgatatgtgagatatggtctctggtaatcgattaccaaaggtgggtaatcgatta

SEQ ID NO: 20951 - DNA, 390 bp, Glycine max
atcttatgcgcatatttccttacgaacgttcgcttgcacaagacattctttcaactaagaaaaaaaatgcacccatatacaatcaaggcagcttcattacctagattatttacatgtacttccaaggtgtatttgttacttacatcacacacatctccttggctaaatttacatacatgcatactcaaagcattttggggtaccaaaaattgcacatgtgcacatcttggtatttctaatacctatacaaacttcatgatgaatattgactatctacacaataaagtgctacatttcatgctcttttcaagtttttgctacctaaagccgcatgcaaattcaagtatattttcctttgctgactaaaattgtattaaaaggtatatattc

SEQ ID NO: 20952 - DNA, 396 bp, Glycine max
  unsure at all n locations
agctntttcttctgattcagacaaggtcaaaggtagcttggctatccgacttttgagaaatctaattgcatttcccatgctgattgacagaggtcgacactcaataagaaatgatacataactaccaatttttgctgtcaagtctctcacaagagtcttctcaggtggaaccttgtagtctttgatggcctcttgaaatgcttgaagcattgcaatgcaacgagcattgccaccagatatatctccagttagatactgcaagcccacctgaaacaccataaaacaagatcattaagatttgggaaaaaatatttcaaaaggtctaggtcacaaaacatattgacctgacccaggtcctaatcactgatattcattaaaacaccataaattttaatt

SEQ ID NO: 20953 - DNA, 399 bp, Glycine max
agcttttattttatgtcttcacaaataatcatcacacagcagaaacctagcaagactacccatcatatctccccaaaccccatacccacgaaaattaaaggagaaagaagtccacccaaacctgaattttcgaagtcccactcgtagccacgcacttcacggccccgaaaatgccctcctttcgcgatttggggcagaaatgatggccaaaggttgaagctttgcttggagcttcaatggagaatgaagaaggagaaaatggcaacgtgagggagagagagagctgtctgaaaagtgtgggggctgagtgaagagagagaatagctttttttggttttaaataaaagggtattctctttttctattattatatttgagcaatgccacatgtctccattt

SEQ ID NO: 20954 - DNA, 385 bp, Glycine max
agcttgtaatctattacacacatactgtaatagattaccataagacattatcagaaaatatcctcaattgtcacatcttttcatttggatcttgaatggctatcaaaggcctatatatatgtgacttgagacacgaatttgctaagagtttttcacaacaaaaaggtcttatcctcttaaaaagacaaatcgttttatcctcttacaaattccttggccacaacacttgtgattcaataaggaattatctgagtgctcaaattgatcaatctatctttttcacgagagatatcgtcttatcttcttctctattctgaaaagggattaagagaccgacggtttcttgttgtgaaataattctaaccacaatagaagaattgtcctt

SEQ ID NO: 20955 - DNA, 395 bp, Glycine max
agcttgttcttaactgggaaggtccctttagggtcacaaccaaccttgacaatggagcataccgactacaagagctagatggcaaagcaatcccacgaacgtggaatgccacccacctgaagttctacttcagttgacctacactctaaacctaatgttgtactcttttccctatgcaagttttttgtccccaaaatacaaaatccagggttttggcttggagggtttttaatgaggcacatttgggcaacgaagggaatttgtactcagttacatacattgaataaaaatctacatcccttccttttcgcatttctcttatcaagacaagagcatccatagttgtacctccaaggctcttaaaacccaaggtccatccttggtgagcccttttt

SEQ ID NO: 20956 - DNA, 391 bp, Glycine max
agcttcttatccaaagcacattcttggtggcgaagctccttcttccatggtttattccctagaggatggtgcctcccctctcctcttctcctttgccttccactgcatctccatggtggaaaatcaccattgaaggacctcattgaagcttaaagatccagcctccatagaagctccacaagcaaacttccatcaagtggtaatcagaggaaaaagcacaacctatccttaaacctccattaatctttgctttcccttctcttccattattgtgtcttcatttttctttgttgcaacctacccttttgcaagcgagcgaggcgaggctcacgcgtgcgtcttccaaatgaggaaaatgcacggagtccccaccaacgtctatttgtggaaa

SEQ ID NO: 20957 - DNA, 387 bp, Glycine max
atcttttccagatagaatgtcaaagatggacgatactttaacacaatttatgcaagtatccagcacaaaccagaagaagactgatgcatctattaaaaatctagaagttcaagtatgacaactggcaaaataactatccgaacaaggaagtggatctttctcagcaaccacacaggtcaacttaaaggaacattgtaatttaattacaacaaggttggggactatggttggtttgaaggataatgatgaaaaaagaataaaaaaagagttgaaaaagaaaacgagaaaaatgatgaagtgatgactagtgaaaaagtggaagacaaagtggtaagtgaagaagagaagaagatatcaaatgaacaaaccagtaataaaggtaaagct

SEQ ID NO: 20958 - DNA, 370 bp, Glycine max
agcttgttcttatacaaacgaccataactttttactcggatgtttgattgaggctcgtaatatatcgagacgctcgaaattgaatgttgaagctctgaaccaatataaacgacaatgaccttttactcggatgtatgattgagtcccgtaacatatcgagacactcgaaattgaatgttgaacctctgagcatattcatacgacaataaattcttactcatatgtctgattgagtcccgtaacttatcgagacgctcgatattgaacgttgaagctctgagccaatacaaacgaccataactttttactcggatgcctgattgatgctcgtaatatatcgagacgctcgaaattgaatgttgaacctctg

SEQ ID NO: 20959 - DNA, 392 bp, Glycine max
ttgttttctgtatgctagctatcatgatttcatttgtattcctcataatgtattctttgatatccttaataaaatgacatgaatttgtttccttataaaaatatctatagcgccatgtaactaatatgaaagtcacaagaggtgaagaatagtaaagagaaggttaaaaagtggttgttgaaactgaggtttttcatttacttttctaatggccaaagatgcgatgtaaaagttgtgattgttcgctttcgatccaacctcctgtttgcaccataatttgtgaacataatgataacaatgcccaaccaaaagaatcagtgcgtgcgtgagctggagaaacaattgaaacaacttatcccacaccaaaccaaacgtgtttgccatttgatcac

SEQ ID NO: 20960 - DNA, 329 bp, Glycine max
tgcttttccttttggtcctcctcataggtgcggcacgagaaatcatgctctattcatcatctcccactccaagtaggcctccggatcattccttcctttaaatggaggaaccgtgagttgaataccatcaatcctgctattgactaagaacaccgtcattccctcttctccttctttcttcttcattacgacctctattctccatttgatccaacctctcatggagcgcatcatgtagatgaggcattaacctctacacatgtagcatcaaagctcgcatgtggaattgcgatagccccactccatcattaggattattacctgacatc

SEQ ID NO: 20961 - DNA, 540 bp, Glycine max
  unsure at all n locations
tcgacaaatccctcccccctaccaccactntagntcattcgagcatttccacaaaccttccccacnaagaggaggtttgatgctgtatacatccnagcgacnannacnagnccgccncgaggcaccaagaaagaccagcagcaagccagccatttagacccatagacacacaaacangcacgccgacatggattagcaagtggacggagctatccaatgcagactgacaccaaaaagaaccacacccaccatcaaacccacgaaaaagactaccgaaaggcaagcacaggaaccccaatgacctatggtgacagaaaggggaaaagagggcaacccaaataaatgcgcggccaccacgaggaggagaaccccaacaacagccagcaaaaagaacaacgcatagggaagatcacgccccggtcgtggtccgaaacaaaaaagacacagaatgaacaccctctgcggaagcgaccacgaaataacaaggcccacacaagggtgcgagaaggtgagactgcccgccaactatcaaaagaagcg

SEQ ID NO: 20962 - DNA, 389 bp, Glycine max
tagcttgttcacctttttcctcacatcttccttcattgatgggttgagccttctttggggctgtctgactggtctgtaatcttcttccatcattatcttgtgcatacagtaagcgtggctgattcttttgagatctgatatgtgccacctaattgcctccctgtatctcttaaggacctttaccaacctgttttctttttctgctgtgagctcactgctgatcaccacaggcttggtcttgttcttctccaagaacacatacttcaggtggttgggtaggatcttcagctttaccttggtcttctctgatggactcccgcttttcaattcttcgaaactggtccccattacagtaatattgtcttcacaatctaagtcttccaagaaag

SEQ ID NO: 20963 - DNA, 374 bp, Glycine max
  unsure at all n locations
tttntttttatcccatctacgcatggaagacctttcatcatattcttttcatgtaccaacttcaaagcttgagtgtggaagtgaccaaatcttcgatgccataaccatgaatcatcaattgttgctctcatggaaacgctagtactagtagtatacttgaagcttattggaaaaatactatttactttcaacattttaactttgacaatctctgtgcttttgctagttgtatcaaatactgcacgtatctcctttgaatgaacagattagtctttctccatcatttgtttaatgcctaagagattgtctttaagatctggaactaaccatacatctctgatgaatcttgtacctttctttgtctacagcatgat

SEQ ID NO: 20964 - DNA, 397 bp, Glycine max
agcttcttattgtatttgtaccatagtagtttgtaacttcttcaatttgcttgcatgtcagttccacactgaattcattctcacccatatgggtacatagtctacaatttatccctacttgcatcattaaatactatttaacgttatggttaaatttaatttgccctatgtggtttggggagtatcactttggcaccacgtggtttaaactttgtcactttgctcccctcatattttcattaacatatttgttatctccttgtgtcttttttggctgtcaactatgaaaagcttattcatgctataatccattaaaccagcaggtttacatatccgacatgtctgtctgttcctaacttttgacaaggagaacatatttctaggaaaataaacaaag

SEQ ID NO: 20965 - DNA, 385 bp, Glycine max
agcttgtgctcactgttgctaccccacaaagctccacggaatttgtctcggccatgctcttccttgcgagccctcttggtttcttgttcaagggctcttgcggtagctgcattttcttctcgtaactcggcacactctttctggacgtctgtagcgactaacttgaatttttctttggcaagtcttgcttttcctagttctgtttttagagctcggacttcttcatcctcttccggagcttcgaagttcccctcattgataactttcaatttggagagccaatctaacccccgtgtacgaactttcaaccattcatgataaccaccgatgatgccattacggatgcccctaagttctttatctttccttaacgggctttcccacg

SEQ ID NO: 20966 - DNA, 396 bp, Glycine max
agcttgtccctgtcttgaaagcttgtttacatgtcctattctatataagggcatataaacaaaccaataggtctaactaggccaatgggtcttgttcatcacctaaattatttgatgttttctaaagactaataatattaaagaaaaaaaagaaaataattcaaatttactttttcccctataaatgtataattattaatagtcaaatccaagcacaaaatgtgcaaaggattgttgcataaaacttaattacaagtagtaccacaccaacacctataaatataaaacgaaatattggtgaaaaagataagaactagcagcaaatacttacccccacacattatagtcagtaaaaacataatgtttttatctcttaaagcacctgccgcaacctac

SEQ ID NO: 20967 - DNA, 390 bp, Glycine max
  unsure at all n locations
agcttaatgtatgtttctatgttcaaatcaaattagtgttttgaaagttgttttttatcaagtccatgcaaaaacttctaaattcatttggtatttgggaaagccattcattgtttttcattctcaatgtttccaaaaatcactttgttgtgtttcgatccaattcaaaagcaagtttcaaaatcactggttgctgattctttccaaaacatgttatgtccaagaaaaattttctgtttaagtcccaaaaagagttatatatattctacaactacgctaacagaacaaaattatttagtggtgtgtactaccaaaaagagggtgtcagaccctaatttcatccggngaatgtttttatcgttcgacacaacccgatcaatcatatgcaag

SEQ ID NO: 20968 - DNA, 390 bp, Glycine max
agcttttatacaaatttctattttaaaatgcaaaatgtcatgatttacgattacaattcttttatctaatatattttaccttttaaaaatttaacttaaatttaacaatacccgtataaagactagtgaatggaaaagacaagtacaagaataactttgtattgttggattcactcaactcttcagtaaaaattaactttcgaataccaatgtttgaaaacccaaaatcagatcgctcattaaacaacttgattatttcaatatgcaacatgattaatctaagacaaaaaataatcctaatttacaaatttagtatggaatcaaccaagaaaaggctatgcacacaatttgtcaagcagagttttcgctcaaggacatagttcatcaatt

SEQ ID NO: 20969 - DNA, 387 bp, Glycine max
  unsure at all n locations
tgctangttattttcatacgctatgagtcttaacttattcagctcattcaattgttgctacctgaagctacctacaatcctaagatcagagttcataaactatatagcccacatggctgcgtgaacaagtccaacaagcagatggaaattctttccataaactatactaaagggagacatcatagcgggagccctacagggttttatgtatgcccatattgtgtcatccaatttcaatgaccaaatctttctatatgctctcacagttttttgtaaaaccttctatagatacctattatatacctcaacttaaccaattgcttgatggtgatacaaagtaataaccttatgggtaacaccatatttagccacatggctatcagacaa

SEQ ID NO: 20970 - DNA, 281 bp, Glycine max
tgcttgttgtctatgtgctcaccaacactagatgagaatccctatcgcagcagcatggctaccatctcgattacaccaccgtgtaggaccgccgtcaccgcatccgtatgatgcgcctaaacatccatgtgaactatcaaggccggaggcacccgaatatacaatctcttagatataagggaaagcgtcgctcatgaattgacctcatccctgagatgtaaccttattcactagaatcgccgtatgactattaatgttttctttttagtctgtcgtggtga

SEQ ID NO: 20971 - DNA, 391 bp, Glycine max
agcttccatgtccaagtttcttatgccagacccaatgatcttgtttgacataaagtaagcaagattttgatttgataactctcttagtctaatcttataaagatttccttttctcttagcagaataaagtaaagacacatttttgttctggatgatacattcatccttgttaaagaaaacatcatatccattgtcacataattgagttatgctcagtagattgtgtttgagccatttaaaaaataagaaattatcaataggaggatatggatgtatacctatcttacccactcttgttatttgcccttttttattccctatgaaagtgatggttccaccatgataaggagtcatacattggaacatgcacctttctcctgtcacgtgccat

SEQ ID NO: 20972 - DNA, 536 bp, Glycine max
  unsure at all n locations
cccactcaccccntcgccgattcgcgcgcgacactcaanatcattgacgcttcaataacantnnnaanncagagggnntttgtgctgagtccctcggaanccccanncaanntcaccccgacgcgccaaacatacagctgcacgcagcccgctgtccgttttcacacccaaccacagagacggcgagaacagacgtcaatcaccacgaccaaagcaaccacaccacgaagagtcctgcgaaccgacagaagaacgcacccagaaaacggcgaggcacggcagaaaaaaaaagtgaccagccagaggacgccagacaaacaacacaaaaagccggcaccgagccgcacacccaaaggggtgccatccaacaaggcccggagaagagcccacagggggaagcaagcgacgatacaagcagacgaagacgagatgaggacggggcaggaccagacacaagaacaacccacgcacgtcaaacgacccagggacagccccgccagctcagaacagactgcacaacgagaaccgccacgccg

SEQ ID NO: 20973 - DNA, 377 bp, Glycine max
tagcttttgtgctaaaaaaaactatataacagcatcaaggttctagttttggcctctcttctctctcccctatttttcgttttttagttataagctttttcttctctttctcctttatttttcgtttatgcaattccagtttgactattcattttagcaataaaaattcgttctctaatgattaatggaaagctaagtccccaacgctgctttctcttgaggatcaagcacagttctctttgagggtctattattattgttaaattctgatcaagttttccttcttcgtatatactctcgatttgttgctattaattcatgcatgcttagtgcttgattaattttctctgcacttaatttacgctcatgcttaatga

SEQ ID NO: 20974 - DNA, 367 bp, Glycine max
tatcttgtatccggtgcttgatgtcagggtgatgtttcctatcccaacagtcttgctcctatcttgatttcccatttgcatcgtaccaaagtcaccgctttggtaggatgagaagaaacttccatgtggagtaacatggaaggaggcaccggaatcgacaatccaagagctatcatcacaagcaatgtttatgatattaccttcaccaacgagatataacaaatcttcttttgaaactacggcagtagtattcttcttttctttcttctttgttgggctgacttggtctggcttaacgttaccgattgtgtgatctctcttgaaggattgacattctatcttcctgtggcccatccttccacagtag

SEQ ID NO: 20975 - DNA, 384 bp, Glycine max
tagcttgtctttacaactctaaatgagcgatcacttcatatcctttcatgccttgacaagaataccattattgtttttcttccttaatgatgaggacatgaccaacagcaatggcaaggatccaattgaatgacttggaggacctatgacaagggctagatcaaggaaagcaaacgaagctcttcaacaagtgttgtccatactatttgaatacaaccccaagtttcaaggagaaaagtccaacgttgtgagttgtatcatgacccacatggacgatgactaaatggcgccacttcctctcaattatagagtgttcagtttgtctaaataatggcccaatccatgtgaagtcggctgaccaaagatatgtcttgggttaatcaa

SEQ ID NO: 20976 - DNA, 371 bp, Glycine max
agcttattcttgttctatatgatcggagcgttgtcgcgaaagacagaggccctgactgtgctttctatgagagcatctaccgcgagtgactgggcttaccactgagtggtgatgtcttatcctgtacttctgggcgcccgacgaggcttttcattgacctggtacctcattacatataggatggaatcatagaatattggctgcataacgcccgcgtatagagacatattgatcgcttgagtgactttgtggctggaaccttaaagacatctacggtgtgaaaatgctggatacgtcgtgggtcaagactgcatggctcgcgcactggcgggaatgacatagctatgtcctggtactgagtacttcatgat

SEQ ID NO: 20977 - DNA, 398 bp, Glycine max
agcttcattctttcctcttagtaatgccttattcatcatatctacaccattaaaggatttcaccttcaaagggccacaaacatttgaatgcaccaattcaagcaactcaaattttctggagggagaatgcttcttgaaggatactctggtttgcttaccaaccatgcaacatgaacatttctccaaatttgcattcttcaatcctagaaacatatccttcttggctaaacaattcagccctttctcactaatatgactaagccttcagtgccacaaaaatgcctccatatccataacattcacattgtctctagcaaccaaagcttttgcccaatacaactttgaaagtttctcccccttggccacaattatgttacccttagtgagtttccactttc

SEQ ID NO: 20978 - DNA, 392 bp, Glycine max
  unsure at all n locations
agcttgccattctgttcacgcaggcgagcagggatgcttcctccataagcaacagccttctggaggaatcttctggagggcccaagtgggcctggttgctatttgcacccccatttttactaagtacaccccccttttctatttttttgtaactctttatctgtaacgttacaaaactttacgaactttgtaacgatacttattttttcttctgcaaggatacgaacccttacgacttatgtatgtactcttttttagctttcaaagaagttacagaaacttacggattgcgcataaacacctctttttgacttccgtcacattacggaagttcacggatcgcacaagcctgcttccttttgatntctgagacatcatcgaacttcatttat

SEQ ID NO: 20979 - DNA, 396 bp, Glycine max
  unsure at all n locations
ccataaaccacaacgcaagcttaacggataacgantagatactctaccnncagcaggtgtgatcgtgaaaccaacgaccgcccgcgaccccaagcgacgcagagcagctcaatacaggaggaacagctgacggacgactggcaaacgacaccagacaaagcaaaaacggggacacaagcaacgaccgcaaaacgagaggagcaacgtaccaagaacgggagaacggaagaccgctacgcacaaaaaaaactataagaggaagggcctaaagaaaccacacaacccatgggaagagactaccgaaaagcggcaacccacgagagcactaccaacaccacaacaagacgggtcgcgccacagaataaccaatacgcggaaaagaggtaaaacagccgg

SEQ ID NO: 20980 - DNA, 386 bp, Glycine max
tcttcttatgcttgatccatcatacaattgataactatatcagctatttaaagcctacacaaatgctgagttgcaatcaagttgtaattgcaagttgagagacagactaagtaacaacgagttagtgatatacaaatgctaatatatcaattatggtcaattaattgtctttagtcctttaaaagtgaaaatactataatatagtagatgtatcttgacactcttcgaatccctcgcatatataaaagaaaaaaaatagtagatgtatcctagtttggtttctgtttgacacccacattgaggaaatataagattagtgagtcaataaagcttatatgtatccatatgtaatattttgttgtgtgggcccttaaatttatacaaat

SEQ ID NO: 20981 - DNA, 395 bp, Glycine max
agcttgttgttgatgcttaacttgagaagtgagagaattaagaccacccatttctttttcaaacccacctctgtcaagttgttgtcttgtctacaggatcaatttcagttagatcagccaaaacataattccagcacaggatcatacatgaaaattcacaagaagtgcacataatgataaaaaaaatggcaaagaacaacaacgttggtttgctttcatttacatggtctcaatacaattttatttaagctggtcaattttccaattccgccatcaaagaaagaaacgaaacccgctggtgaaaaacgggtgtgggggtggtggacgggtaaactatgctaaagtttttcacctagttacattcacattctgcagtatcaacttctgcaatatca

SEQ ID NO: 20982 - DNA, 357 bp, Glycine max
agcttttagctaattcaaacgacaataatgttttgctcggatgtctgattgagacccgtaatacatcgagacgctcgatattgaatgttgaagctctcagcaaattcaaacgacaataactttttactcggatgtctgattgagtcccagaatacatcgagacgctcgaaactgaatgttgaagctctcagcctattcagacgacaataacttttttactcatatgactgatcgagtcccgcaatatatcgagatgatcgaaagtgaattctgaatctctaagctaattctaactacaataactttctgctcggatgtctgattgagttccgtaatctactgagacgctcaatattg

SEQ ID NO: 20983 - DNA, 393 bp, Glycine max
agcttttctgtgcaaggaatatccaaggaaaattccatcatctgacttagcatcaaattttcctaagttttcattaccattgtttaatacaaagcatttgcaaccaaaaacatgaagatgtgaaatattgggttttctaccattaaacagttcatatggagttttctttaaaatgggtcttattaaagacctattcatgatataacatgcagtattaacggcttcagcccaaaaatattgtggaacaggagtatcattgaataaaggtctagcaatctcttccaaagatctattattcctttcaacaactccattttgttgaggggttctaggtgcagaagaattatgttcaatgccatgcttttcacaaaatagatcaaattctttattttc

SEQ ID NO: 20984 - DNA, 379 bp, Glycine max
agcttcatattatctgtgagtgattcacgcttaacgtcactatctgcgctaagcgtacttccaatgatttcaaaacaaaacgatgttggcgcttagcgcatcctttcccgctaagctcagcttgaaagctcaactgacaaaatgaatttgggacttaccgtacaatgacgcgcttagtgcaactataataaattctcatagagaggaagtggcgcttagtgcatcatccacgctaagcccactgcttaaggtgcaactcacagtgaagatgatgggcttagcgcactgatgtgcgcttagctgaaccattcacccaatcaatcatgggtctctgcgcttagcatgagcaagctcagcttagcgcgtgaagagatggtgc

SEQ ID NO: 20985 - DNA, 318 bp, Glycine max
tggaagctggatctttgagctttcaagaggcccatcaatggtgaatctccaccacggagatgcatcggaagacaaaggagaagaagtgagaggaggcgccatccactacggaataacccatggaataaggatctttaccacccacatgatcattggataagaagcttggagaggatgcctcattggaggaaaataaagagggagagaaatgagagagggggggagcactaaacttgaaggaaaaaaaaagtgttaaagctgaactttgagaggtggctcacaagactctcattcatctaagctacacaagtgttacac

SEQ ID NO: 20986 - DNA, 390 bp, Glycine max
tatttgtgctcaatgaaagcaccaatgatacctagctttcgagggctagggaacctccgcgatacccgtgacctttggaagctcgaaggaactcgcaaagagagagaaaacgcgagttcagagagagaaactagaagaagaaaaggactcgagaggaaggaagagaagcttctggatttttctatattccttcaaggtttgttacaacttatttatatgcgcgagggtccacaactaaccgcaagtggttagctactgctgctagccctaactaactaaacaacatctaactacccttcccgccaacgaatcacaagaacagcttttacccaggccctcttatcctaactggtagatatcccagtgcttaggtagttgcttcgttcgtct

SEQ ID NO: 20987 - DNA, 363 bp, Glycine max
atcttatgcgcatatttccttacgaacgtgcgcttgcacaagacattctttcaactaaaaaaaaaaatgcacccatatacaatcaaggcagcttcattacctagattatttacatgtacttccaaggtgtatttgttacttacataacacacatctacttggctaaatttacatacatgcatactcaaagcattttggggtaccaaaaattgcacatgtgcacatcttggcatatctaatacctatacaaacttcatgatgaatattgactatctacacaataaagtgctacatttcatgctcttttcaagcttttgctacctaaagccgtatgcaaattcaagtatattttactttggtgac

SEQ ID NO: 20988 - DNA, 80 bp, Glycine max
agagagagagagagaaaatccgggggggggggtgccaatttattgaaattagggaaaaaaattgaacttttaagtgtgtc

SEQ ID NO: 20989 - DNA, 470 bp, Glycine max
  unsure at all n locations
cgcttgtggagcttctatggaagctggatctttgagcttcaatgaggtcctttattggtgatttttcaccatagagatgcagcggaaggcaaaggagaagaggagaggggaggcaccatccactatggaataagccaaggaagaaggagcttcaccaccaagaattgccttggataagaagcttgaagaggatgctttaatggaggaaaagaaagagagaaggggggagcacgatattcaaggaataaaagagggagagaagtggaactttgaagtatgtctcacaagactctcattcatcanagttacaacaagtgttacacatgcttctatntatagactaggtagcttccttgagaagctntcttaagaaaacttccttgagaagcttctttgagaaaacttccttgagaagctagagcttatctacacacacccctctcataactaagctcaccttcttgagaagc

SEQ ID NO: 20990 - DNA, 363 bp, Glycine max
agcttctacattggttgaaaaccggtatctacgacgggccccacaccgtctttggtccaaatgtcgttgtatgtcgaccacaacaacatcggtcatcctaggacccgtctttggtatgcaagaatacaacgtcagtggctataaaagaatagacgttttaaaaaaggattcaacgacgcacatattagacaacccgtcgtttgtttggtccatttcaacgtcgggttcgcaagactcatcgttgttggtgtccatatcaacgtcgggtaccaataacacccgtatttgttttgtttctgtcacatcggtggcggctcacaccgacgttgtttggagtatgtaacgtcagggtgtgacaccgtc

SEQ ID NO: 20991 - DNA, 473 bp, Glycine max
  unsure at all n locations
cttgtaggattccggggtacccatcacatgtggtactaagtggcggtcgggcgatggtgcacaacaagttctacacatccacggtgcgcgcataaacccaccatcccctgttgcccacctccaactgagctcacgtactcccacgtagcccatatcctcgtttctctcaacaccgggtccccatcaatcctctcaagcttccacaacatccaagcaaaacaacattcaaacagcacaagctatcacagccaagcaaaagcagagcaaaggcagataactctgctcaaacaccaaccaaaatcacagcttttctcacttaaagaccacagtaacaatttcttcgatccaattcgttaaccgttggatcgactccaaaattttactggaagtctatagtgcataagcctacattgtgaccgttgngatctactagcaaacatcaagaactcattctgtactactctttccacagc

SEQ ID NO: 20992 - DNA, 406 bp, Glycine max
agcttgggtataagctttttttgtaaaagccaagagtgattgtgaataatacttgtaactctgttaaagttagtggaactttttagatttggatagcccaatgtgattcatctagacaatcttatataccgatggttttgatgattacacagatataaattgctgatggactaatgatttacgcttaaggaaatagggcatatttgatataagcttgattggaatatacttatatgcttatgtgttaccagttatcatgcaaggtaattggaacttatttgtataaccactatattctgtgtccagagcactgctatacagagagcgttcaatgatattgataaaattagtcctatgcgctatgtgttcatatgtgattataggacatgaggaacctacactaatg

SEQ ID NO: 20993 - DNA, 241 bp, Glycine max
atcgaaaagttggctgagacttgtattttcttcacaaacggggcatgcatgatgacccttaacactgtaaccgctgagattcccacatgctggaaagtcactaatgagacagaagagcattgcactcagtgcacaggtgatacttgagaatcgcatcggtctctactacaccctgattccacagatttctcatatcgtcaaccaacggacttagatagacatctgtgatctttcctggctg

SEQ ID NO: 20994 - DNA, 387 bp, Glycine max
  unsure at all n locations
agctttcttcaacaaacaaagccttgattcaagatttcttcaagatcaagccttgcctcaaaacaaagggtttcaaagtcatgcaaggctctggtaatcgattaccagaagggaagtttgagaaatagctgttgaaaagggttttgaaattgaaatttgaacatgtaatcgattaccatntntttgtaatcgattaccagcaatgaaactcctgatattcaaattcaaaagtcacgacccttcaaaatataattgtgtaatcgattaccagaaacctgtaatcgattaccagtgaagaaattcatataaaacttcttgaaaagacacatctctttacaccatattgaaaaggcatgaatggcctatatatatgtgtgtgtgtgactt

SEQ ID NO: 20995 - DNA, 462 bp, Glycine max
  unsure at all n locations
ctcaagcttgagaagctctctatganatgaaataatcgactgccccattctgtaatcaatttctaagtttctaggaatggaaaattagagggatttgaatgaattaattgactatctcatttgttaatcaattaaatttgctttttctgttaaaactatatatacacttacttgttcattcttattagtgactcttgattagatcttatgttttaaaaatcctttctaaggttatctaacggaaccattctgcatttcaatgagagattcatggtgttcaagatttgttcattttttaccatggtttgagcaaggaaagaatgacttgaagatattgtgatatgcacattttggtgtattcaatcatgtttcgatttctttctacgttattaccttgattaaggttatcaaggatattatgtgagttctgatctttcttttgtaaggtcacgacaagagtag

SEQ ID NO: 20996 - DNA, 414 bp, Glycine max
  unsure at all n locations
agctnttcgcaaagcttatggtaaaatccgggacctagccatggtagaagtctccacagaggccattgcctccctcgcccaatattatgatcagccattgaggtgcttcacctttggggacttccagctatcacccatggtagaagaatttaaagagatcctaggatgtcctctagggggaaggagaccatacctcttctcatggttctatccctcattagctagaatttctaagatagtccaaatctcagcgctggaattagaccacagaaagcaagtcgaaaatggggtggttggaatagcgagaaaatatttggaggtaaaagcaagaaacttggcaggtaaaggcgaatgggccccattcatagacattctcgcactgtngatcttcggaggagtcctctttccgaatat

SEQ ID NO: 20997 - DNA, 98 bp, Glycine max
ctcttttacgagttcaggactatttgcatggtatatgacgacaagtcaggattgttcgagactggtcgccatagatgtcagttcagaggaaataaaac

SEQ ID NO: 20998 - DNA, 408 bp, Glycine max
  unsure at all n locations
cagcttttatctgatatgaattataactaccaaagttgagtctaatctattgattttttttttggtctttggacatggagagaagatgcagacgtgcttctcaaacttggttccaaacatgcacctactttttacatgtcaatttttaagatctcagctgaaaatctacttacaccgcctgttttgtataaaagcttataaacgtgataggctataaatagacctttaaacatacctatctcttttttggtttgcttcacttgtcagttcgatttacgtgaggcaaggtactatttttatgagataagcaaatcaaggtaattttatgactntaatcctgtttggtgtcaattttcttcacatttattaattntatgacttcttattttattttttagactgaagtca

SEQ ID NO: 20999 - DNA, 431 bp, Glycine max
  unsure at all n locations
tgtgggtatgatacacaaaagaatagaagcacataattgattatattcatcttctaattntgccggatcaactagttaacttgaaattgaagagcgattaatatgtttcacccttcataacttataagtacatgttgataacaaaaaatagcatcttcaaatgacaaacacattaaatttattttaatcattttgaaaattatgtattttaaaaaatattgggcttcactatggtcacaaagttgtatagaatttgtggctgttgggcataattatctctaaatttagattgttattttaaggaaaaaaaatcttgaaagatgatagagaatgaattcggtgatcgaataataataacagttatataacaatgatgaatgttgttattgaaaagcacataatattcatcttctaatttcatcggatcaact

SEQ ID NO: 21000 - DNA, 382 bp, Glycine max
  unsure at all n locations
tgcttataaatcttcccaaaatcatacaaacaaagattaatagactagaatgataacgttcttattttntcaatcaaacaatcgtttttgatcaaataaaaaaaggactcattgacatgtttattcaccagattttaaatagtctgctgtgcatgacaaaaagaaaagcagtgtcgagaagagatttgcactgacaaatgcaattacaggtaaacccctacctgggggaaaaaaattgaccaagcaaacctgtcaatgctaggaatgggaaaagaacaaagtaaattgaaatatgtatcagaagtaccgttgacagactaccacgctgagcctctggtggaatctcaaaatccagttcacgtttctgcaaaatcatgcatct

SEQ ID NO: 21001 - DNA, 458 bp, Glycine max
  unsure at all n locations
tgtaatcgattaaaccgatatgaaaacttatctgcaagctattatacacttatgtaatcaattacgattagcctgtaatcgataaaaatagagagttttaaacacagaagaaattttctaactttagaacctttcttcttactcctacatgatgatgcatgatgcacatatgaaaagatagagactaagatgcaacacacatacaataatcaatacaaatgtcactcaaaagagttggacatgtaaaagacaaaacttcttcaagcttcaaggctaagtcttcatgttgctccacctatctctaacaatagacaggttatctctaacctcttaattatntggatatacnctaaccactttatctcttgcaggtatntaattatctacaagcaacacattatctgttagtactaaattatctactagctnttatctcntaaatatatattatctctaat

SEQ ID NO: 21002 - DNA, 413 bp, Glycine max
  unsure at all n locations
agcttacacaaacattcattagtccaaaacacactcaacanatagtcatcatccatccacaattccaatcaatcatgctcagtatgatgcatgcacctgacctcaaatctcaaatgcaatgtggtaccattatcaaggaaatagcctaagagtctccacatgacactctcacttatgaaaactaggcagtaagtgtcgaggtcaccctgtcatgcacaggaaactccccccccttggtgatcaacctgagtctcaagggaattccaaattgagtgacatgtgtgacatcctggaaatttctacccggaatttntgtaaacggtgcatnttgaatggctatatatatatataagtattattcagtgtatgtatatatgtatatatattcctggtaggagtangtattttggggg

SEQ ID NO: 21003 - DNA, 423 bp, Glycine max
tgtagggttaaagtctcacgattgtcacgtgctcatccaactattgttagccgtggctatacgagacatcttgccaaacaaagtcaggttcacgataactcgcctgtgctttttcttccatgctatatgtagcaaagtgattgatccagtaatgtttgatgagttggaaaatgaggccgcaattatactgtgccagctggagatgtattttccccctgctttctttgacatcatgattcacttgattgtgcatctggtcagagaaatcaaatgttgtggtcctgtttatctatggtggatgtacccggttgagcgatacatgaagatcttaatagggtatacaaagaatctatatcgtccggaagcatctattgttgagaggtacattgcagaagaagccattgaattttgttcagaatactt

SEQ ID NO: 21004 - DNA, 411 bp, Glycine max
  unsure at all n locations
agcttgaagaggataatttaatggaggaaaagaaagagagaaggggggagcacgaaattgaaggaataaaagagggagaaaagtggaactttgaagtgtgtctcataagactttcattcatcaaagttacaacaagtgttatacatgcttctatttatagactaggtagcttccttgagaagctntgttgagaaaacttccttgagaagcttctttgagaaaacttccttgagaagctagagcttaggctacacacacccctctaataactaagctcacatccttgagaagcttccttgagaagattcctaaagaagctagagcttagctacacacacatctctaatagctaagctcacctccttgagatgagaagctagagcttatgtacacaccctctataatagctaa

SEQ ID NO: 21005 - DNA, 448 bp, Glycine max
  unsure at all n locations
tccatcaatgaataacaactaataatgcacctgacctcaactatcaaatgcaatatggtatcattcattagaaaatagcctaagcgtatccgcgcgacattctcacctaagaatacttggtaacaagtgtcgaggtcaccttgtggtgcatagacaactcccctccccccccccccccccnngcatggtgatcggcctgagtctcaagggagttccaaactgagtaacatgcccccaagtataagtatttcccctcatgagaaactacaagtacttattggcaagctatttccatgaaatatgaagtatgaaacataggcaccatcaatgcattgaccgtggataattaaagattttaattcatccccctctagagatgctttaaactctttaaccattctatttctccgaccaaggatatctatcatggtcactgcatccctcatgt

SEQ ID NO: 21006 - DNA, 395 bp, Glycine max
agcttgtgcatagttgttacagacaaatggacctacaaaattaataatcaaatagtattgataaaaaatgtgcataaatcaagtacaaacccttcaaaacaaagtaaaatcaaatagcaattttagctgaaaatagaaaaagaagaaaaaaaagggataagaaactaaagttacaactaaatgtaagaacaaaatcaaaacccttgaaatttaatgtgtgtgagagagagctgaaccgaatgaattgtgacttttgaaaaacaaatcaaagtgaaaataaatagaagagagtgattattttgaactaagaaatatatacttcgtggcatggtttttgcacagccatatcataatcgtcctttgagaccattgagaaatcgagattcattggcaat

SEQ ID NO: 21007 - DNA, 456 bp, Glycine max
  unsure at all n locations
cgtgacactatgaaactcagctnataagcgcgggttcgggagacaaaggtttagcgttcgctatatgcgaagatgatattccgagtactgtggatttggtccgaccatgccctcctgatttccagctgggaaattggcgagtggaggaacgccccggcatttacgcaacaagcataatgtaaacctttacggttntaaaagctctatagttgggcctaagctttagagtntttccttttgttaagggcttgtgtctcttggttttgaaattataatacaaggatctttcttcatctgttcctggtctctacccactctcattcatttgtatgtttacttctttttctgaaacggcagatccgatgacgagtcccccgaaggtactaatacctgtgacccgtctatcgacttcgagcaagaaatgaatcanacggaagatgaaggaaatgatgatgt

SEQ ID NO: 21008 - DNA, 489 bp, Glycine max
  unsure at all n locations
tctcatactttatctcgacccatcgatgtcgttaattttaataacaaaannaatnaagcgtggtgtgctgatgcactaccaatggcgatnagccggcccgggatacttaagacgactgcagcatgctatctttgtccctccgcaagccttccctggacagggccctgaaatcaccgaaccttttattttaaaaaaaaaaaaatggcggggattttgcttggccaaccacccctgggccaaaattataaaaaaggacgaaggggaacgtttttgcattcaaaactttttttccccccattcaaaaccatacccccggaatttacaagtttgcagcctagggcactattttcaattttttgattcgtttgggctgtattcatcacaacaagtagtatccttcctaagcttcagctttcatgggtatttgactctttgtgcttaaatgcggatgagccaaaaggggggattcggtggttctgttggcgggga

SEQ ID NO: 21009 - DNA, 441 bp, Glycine max
  unsure at all n locations
ntataagcgcgggtctgggagacgaaggtctattgttcgcgatatgcgaagatgatgttccgagtactttggatttggtacgaccatgccctcctgatttccggctgggaaattggcgagtggaagaacgccccggcatttacgcaacgagcataatgtaaacctttacggttttaaaagctctatagatgggcctaggctttagagtttttccttttgttaaggctttgtgtcttttgttcttgaatttataatacgaggatctttcttcatctgttcctggtctctacccattctcattcatttgcatgtatacttctttttctgagacggcagatccgatgacgagtcccccgaaggtactaatacctgtgacccgcctatcgacttcgagcaagaaatgactctaacggaagatgaaggaactgatgatgtgtgact

SEQ ID NO: 21010 - DNA, 404 bp, Glycine max
  unsure at all n locations
agcttgtagaatggctagacatgatacatgtcagggcttggtttggttcaaggataaaaggggtgccccacattatttccatgacacaaatgcaaaaaatgatgatttggaaactttatgcaaaactggtcatgcatgcgcctatgcggacgctcaagtgtcaaatttttatggtcatgtgatgctagggctcacgattcatttcctctatcttaaatcaacccaatgtttccaaaatatgatcttttatcaatttgtgcattcctccaagtccacttcgggcgttcggtgaaattttcacagcattcacccttcaggtgtagacacgttttttttcttcaaaaatcggttatgatcattgaattnttttcaaagaatagttggaaatcatctcttttcaaaag

SEQ ID NO: 21011 - DNA, 394 bp, Glycine max
  unsure at all n locations
tgtctancgcttatgctttacggagactatcttgctagctatcatcgccaagtaccaagaagagttaggtctatccgcgggccacgagcatatgattgcggacgaatatgcccaagtatacgcggaanaaaaggctagatgaagggtgatcgactctttacaccaagaggcaaccatgtggatggatcgatttgctcttaccttgaacgggagtcaagaacttccccgattgttagccaaggccaaggcgatggcagacacctactccacccccgaagagattcatgggcttctcggctattgtcagcatatgatagacttaatggcccacataattagaaatcgtaggacacttgtatggtctctcagaccttgactagatatgacttccttt

SEQ ID NO: 21012 - DNA, 409 bp, Glycine max
  unsure at all n locations
agctttatcttctttangaatcttcttaaggaagcttctcaaggaggtgagcttaattattgaaagggtgtgtgtagctaagctctagcttctcaaggaaagtttctcaaaaaagcttctcaaggaagttttctcaagaaagcttctcaaggaagctacctagtctataaatagaagcatgtgtaacacttgttgtaactttgatgaatgagagtcttgtgagacacaactcanacttcaacttctctccctttttcttccttcaatttcgtgctccccctccctctttctctccctctttcttttcctccattgaagcatcctcttcaagcttcttatccaaggctcatcttggtggtgaagctccttcttccatggcttattccttaatggatggcgcctcctctca

SEQ ID NO: 21013 - DNA, 353 bp, Glycine max
  unsure at all n locations
tgcttctacataccctaatttcgtccggngacaattgttgtcgacatgcggatttttgccggccgagttgagctgcttaacatcaatcgctatgcaatccatagggtttcacaatgttacggaaagaaatgagcaaatactcataatgagggcaattgtttgtcgacatgtggattttttccaaccgagttaagctgcttaacagcgatcactgcacaattcgaagggttttgcaatgttttagaaggaaatgggcaaggaactcaagatgggggcaaaatggtccattatagaacgttccacaacccctgggcccacctggatccactagatgacttangggggaagcaacc

SEQ ID NO: 21014 - DNA, 404 bp, Glycine max
  unsure at all n locations
agcttccatgatatagaaaaatgaaaaacctcaattacttgaaaataataaaacacatggagaagttgaccataccaggaaaataatttttcagcaaacatttctgcagcactaaaagaaccataagctgaaaaccacaagagagatcggtgtngattcacatgcagacaagagagcacaattagtagtctaaagttacacccaatcccactaacttgagaattctccaaacgagttcatttcaaattcataagcaatgacccaaaactttcaaagatatataccctcatacgataaaaactactaaaatggtatttaagttgtacaaggaaaaatcaaaatacaccagaatagtcctcttaagtcttaacccgtgacctcaatatatgtattctacccatcat

SEQ ID NO: 21015 - DNA, 456 bp, Glycine max
ctctagatccttgaggtaatatgcgtcaagctagtgacgttaaagaagcgcttactgggaggcaacccaactctttttctttgttttcttaatcattgcatatagttaggtttcaacttgtttgggattgctagagtaagacatcaacatgttttgtatgagaaaaaaagggttgttaacgcttctgtgaagctgtggatgagaaataactctgaaaaatttttagtcatccactcgcttagcgctccctgtacgctaagcgaatcatccttcatgtgtcgagcgagtcctcactcgcgctaagcgcaccaacccttacccattggctgaaggggtccatctaagcgagacagttgtgccaagcccaaaaacttctttggaatcgcatttattggaattgggctaagcgagtcaactcgctaagcgcacctatgcactaagcacaaatatctctct

SEQ ID NO: 21016 - DNA, 410 bp, Glycine max
  unsure at all n locations
agcttctagacaaattgcacgctagtatatttctcgcctttacgctaacttctataaatttctgttacaaaaactaatttcgcctttatgccgccaaagtacataaagttggatctctaccacacctcaacactaaaacgaataaaccagatttgaatgcacttttttttttttaatcataactacaatttatcgtaaacagcatttcagcatatgcatcacaggtgaatgcatgtgttttctcacctggattaaaaacccaatccatgccaatgccaacccctacgtaacaattgggaagatcataaagaaggctatatccaattcggagatgaagaaaacgaaactgtattcaatgcaaaagaagaacacttgttaaatctctagcaaaggaatntacatcaatactc

SEQ ID NO: 21017 - DNA, 441 bp, Glycine max
  unsure at all n locations
tgcagctaaacaggccaaaaagttgagtacattnttttcgagtggtcgtgaatcatcgactaccatttgtattgcttgtaagcttgggttcttcatgtttaattcccgtaaacaatttgataatacaatgaaggggctaatggcttatattccaattgcttctatgataagtattatttccatctagcagatatatgaacatgaacacggaagggggaacaaactcagaccaacaaacaggatctaaaatatgtccgtaaaatttttctttcgtggaagataacgagtgaccgagctgccgttgacagaatcacagttgctgttcttcatagacccgataaagggcaacatattaatccaggtttccatgacaagcgtggcgagtttgaggacacattntcccttgaaccatcatttcgtgagtcgatcacttttttaccc

SEQ ID NO: 21018 - DNA, 408 bp, Glycine max
  unsure at all n locations
agctttctcaaagttttccggttttccaaaccttgaaaacttgtgctattcatccttttcattctcttctccctttgccgaanagaaatcaccatggactaaccgcctgaattctttttgtgtctctcttctcccttttccaaaaagaacaaaggactaaccgcctgaattcttttgtgtctcccttctcccttgtcaaagaattcaaaacgacacagtctgagaattcttttgattcttccctttcccatatacaaaagatttcaaaggacaaaccgcctgagaattcttttgtatccccattcacaaagtttcaaaggtttaaccgcctgagatctttctcttaacacattggagggtacatcctttgtggtacaagtagagcgtacatctacttgngtttgactg

SEQ ID NO: 21019 - DNA, 450 bp, Glycine max
  unsure at all n locations
tgtaggattatggngtacccatcacatgtggtactaggtggttgtcgggcgatggtgcacaacaagtttttccacatccacaatgcgcgcataaacccaccatcccctgtagcccacctccaactgagctcacgtactcccacgtagcccatatcctcgtttctctcaacaccgggtccccatcaatcctcccaagcttccccaacatcaaagtaatacaacattcaaacagcacaaactatcacagccaagaaaacagagcaaaggcagaaaactctgccaaaacaccaaccaaaatcacagcttttctcacttaaagaccccagtaacaattccttcgttccaattcgttaaccgttggatcgactccaaatttttactggaagtctctagtacataagcctacattntgaccgttgggatctactagcaaacatccagaactcattc

SEQ ID NO: 21020 - DNA, 415 bp, Glycine max
agcttcaaaactcaactcgaggatttgacaaagaacagagcctccaaccctcccttcgcgatttttttgaggtaatcatgatttctatgttttttcctagttagattgagcctattagtgtatctcttgtgatttggttaccgttattagatgtttttacatttcctttgaaaaacccttgaaaatgagacattataaaagttgtcttttataaaattgatttcgtttttgtgacctctgttgaaccctgatcacattggcgtgatcgttatttcaaaatgacatctctttgatgtggaccccaaaaacaccattttagacccttttaaaattgaatgggtgttttaccccggatgttaaaattgacattgtctttgaaatctatactaaattgtcttttgattgatatataaag

SEQ ID NO: 21021 - DNA, 428 bp, Glycine max
  unsure at all n locations
aatggatgtaaagagtgcattnttaaatggcttgattcaagaagaagtatatctagattatcccctaggatttgaaaactcagacaagcctaatcatgtttataaactgaaaaaggctttatatggtttgaaacaagccccaagggcttggtatgagcgtctgagtaaatttattttaaataaaaaattntctagaggtaaagtggataccactctttttataaagagaaaactaaatgatattctattggttcaaatatatgttgatgatattatttttggatccactaatgagtcattatgcaaggaattctctcttgacatgcaaagcaagttcgaaatgtcaatgatgggagaattgaattactttcttgngttacaaataaagcaaactaaagaaggaatanttttcaaccaagaaaaatact

SEQ ID NO: 21022 - DNA, 401 bp, Glycine max
  unsure at all n locations
agcttttgaacccacacttgtagcgtcaatgcaaggaaacatgcttatggctaggaatccaaaatttggttttagagttagaaaaacatgaaaattaagatttgcttgtgagaagtttttgctcgaatttgggctgccccatgtttgatactttacatagaggtagcgtggaaaacaccttgcaatagtgtgtatacataggtaaatataaggagcatgaaattcctagcaaagtatgaataattgttttcttaaatgaatgtatgatagtgtggaatgccctttttaaatgcaaatatgtgcaggatgtaattagctttccaatatgcatataaataaataggagtgaaacagtaaaaatttgtatggtgtacttcanatgtacgtaagtagtttgtgat

SEQ ID NO: 21023 - DNA, 448 bp, Glycine max
  unsure at all n locations
tanacattcaatttcgagcgtctcgatatattacgggactctatcaaacatacgagaaaaaagttattgtggtttgaatttgctctcagcttcaacattcaatttcgagcgtcgcgatatatattacgagactcaatcagacatccgagaaaaaagttattgtcgtttgaattggctcagaggttcaacattcaatttcgagcgtctcgttatattatgggactcaataagacatccgagtaaaaagttattgtcgtttgaatgtgctcagaggttcaacattcaatttcgagggtctcgatatattatgggactcaaccagacatccgagtaaaaatttattgtcgtttgaattggctcataggttcaacattcaatttcgagcgtctcgatatattacgggactcaatcaggaatccgagtnaaaagttatgtcgtttgatttggc

SEQ ID NO: 21024 - DNA, 308 bp, Glycine max
agcttcttattcttggctgatgaagatgaatttgtggctacttcatgcactcctctaatgacaatagcatcatttctggcactaaattgatgggagttggaagccatcttctgaattaaatttctggcttcagcaggggtcatgtctccaaaggctccaccactggcagcatttatcatacttctctccatgttattgaatccttcataaaaatattggagaagaagttgctcagaaatctagtggtgagggcaactggcacataagtttttaaatctctcccagtattcatatatgctctctccact

SEQ ID NO: 21025 - DNA, 454 bp, Glycine max
  unsure at all n locations
tatgctgcanatatttataatagaccccctcagtagcaaaactcaacaacagttttataattatgatctttcaagcaacaaatacaatccaggttggaggaatcatccaaatctgagatggacaagtcctccacaaaaacaacaacaacctgtccctcttttccagaatgctgctggtctaagcaagccatatgttcctcctccaatacagcagcagcaatagcaacagtcacaacaaagacaacaagcaactgaggcccctcctcaaccttccttagaagagttagttaggcaaatgaccatctagaatatgcaatttcagcaaaagataagagcctccattcagagtctgacaaattagatggggtagatggctactcagatgaaccaagctcagtcctaaaattctgacaaattgccttcgcaaactatgcagaatccgaaaaatgtgagt

SEQ ID NO: 21026 - DNA, 398 bp, Glycine max
  unsure at all n locations
gtttttgccggcgagaagaagacttctgcgacggataccacttangaacaccatctatgaatgagcgcggaagaagactctggaccaataagaataagtcgaagaatgggagaaggttgttgctgggtgcacggacgatgtatgagcgcggaagaagacaggttttttttttagaaaatttattaagttgtgatttttaaatgaagggcattttcgtaacttcaatgaattgctgggtgcaccaacaattatgctgggtgcacctagcaacagccggcccacaatgagaaaaagatcccaaattttatttagtactaatatacctcaaataatatattattgctaaattatatgtgataataaatgttacataaagcaattataattttaataaatta

SEQ ID NO: 21027 - DNA, 427 bp, Glycine max
gtgtcggtgcgatcggtactccgtagttgtggcagagacctttaatcaatgccggataacccactgcactattggacttctcaaggtccaccgggtgtctcggtggtgcaatacctacaaactagtggatggcatctaagataagttacgccatatggacattgatctgggtcatgatgttatagaccaactgacatttgggtagcgtgagatcagagttatggtcactgggaaggatgttattgagcaggagcgtcatccaaatttgagttagagtggtcatgctagtgcgcatgatccgcacccgcctccttgctacgctccatgcaaaatcatgtcccggggagcaaagtagctgacttatggcctcttcattcaaaacctaaaattggcttcttctctcaatgtacttgcatcattgtccctc

SEQ ID NO: 21028 - DNA, 400 bp, Glycine max
agtctgttggtaaccacctccctcttttcccctataaataggggaaagagggcaaagcaaattcgttcagcccttctggtatttaggattcacttgaaattagtgacaaaaattgttttcgtgaagaaaatccaagccgaggtgcttccgtaacgcttctgagacgtttccgtgagcgatttcgtgaagattctccaccgttcttcatcgatcttcgttcattcttcgtcctacttcggtcttcaaccggtaagttcccgaaatcaaacctttcaattcattctatgtgcccttagtggtccacacttgtttcgcgtgcttttatttttatttcgtttgtttcccgtacccctgtattgatgtgttttaaccattcatataagtcgttttctcgcctaat

SEQ ID NO: 21029 - DNA, 410 bp, Glycine max
  unsure at all n locations
ggaggagtgtgcaagtgaggactcacnccttgtttaacaccttcttacgcnaatatgctggccnatgtgcgggagtactcgcctgacacccatcatccggtgcactccccgcctacacggtagctcattttctcccaagccttgcatcatctagtgtttctcaaaaacgaaaacccctcaatcatgctcacgatcaaagcttgaggttcgcaatgttacacgaacaaactctccgggcaaagaactgacctatgcatacacttgcccacatccaagcaaaagccagcgtttcacttatgacccagagcagtcctcgttcattcgtcaccgtggacgacccacttttatggaattctatactagactcatttgacggtggactttacatactccaaataatctgcctgtcg

SEQ ID NO: 21030 - DNA, 404 bp, Glycine max
tgtcttatggtgatggagagagaaggggtaaaagggataaaaagaataagaaagaacgaataaatctcaatcatcaattaataaaaatctgacgatgtaaaatgcatcctcaactctccttatagctagagtctacaaaatttaatgcctttaagatttttgtgtgtgagtgaaaataataaatatttgtcaagattaaatcacaaaagttatgtaagttttttaaaaactcaatcattcttttaaggaataatataacattaaattttgaatatatatatatatatatatatatatatatatatatatatatatatatcctagatatacttatctcactctcatattaaaatagtcatcctaatatttgtgtatgtcatcctaatatttgtgtatgtcatgta

SEQ ID NO: 21031 - DNA, 448 bp, Glycine max
  unsure at all n locations
tgtcaaccacgatgcccaggtgctagtgctccttactcatctgcaagttagagcttatatggaccgattggggttatcagctcttgttacggtgcagtatcctaccgcatagtggatgatgtgtccatgagattaccatcacggtggatgatcttgtctgttgcacttacctgtgacaagaaagcccatttatcatgtccctctgctctttgatagtgaggcggtgaaggtttacatggctagtaggcctatctcaccgttatgttgatttaggctcgtatgtttgggctatcatgacttatctcatgcacttgatcgacantatgatacttatatacaagtcatcgactcacattcatgtcacctacctttagtatctcaacaacctggatgcttgccactagtacgcatgggaagtagctacactggcgtgcctttacaaccatct

SEQ ID NO: 21032 - DNA, 354 bp, Glycine max
ttatcttgtaacaatttaagggttatgttagggtaaacagatcaatttaactccttttgaatgtgtgtatcatctaagttcccataagttgtttctataatcgaaaagaaaatatggataaattgtttttatataacttgtcaggtgttttcataagttatcctagagaactaattaaaataaccttgtaacagctcatggacatataataagttatttcacaaattctctctattatcataagatatgctcacatgagtcgttcaaaataatatccacaccctaaggtcgtaacagagaaagaaaattaaaaaccatccaagacataacagatgatattcagacttaatatat

SEQ ID NO: 21033 - DNA, 441 bp, Glycine max
  unsure at all n locations
tgcacatttacactaagactcactcaatcagatcactaaatttatttgacatgttttttcgtgaaaaaatgttaactattaattattaattttttgtttgtatgaaaattgaaatccataacctttctattntgccttcttcactcaccaccaaaacaaacattataaccccaaagtatttgacatattagataattttttctactaaaatattatgttcatattagaacattttgctcctatcgttttcacgaacacttcctttaagattcctttacttaccacatgcacganatgagtgtcaagtccattcgattgtaagttaaacgcatagctggagcacatgcttcgtcaacacatttcgatattntttattggggataccactacattttcttttttaanatagagctagtaacaaaaaacaggtaaaatgtgttt

SEQ ID NO: 21034 - DNA, 404 bp, Glycine max
  unsure at all n locations
agcttctatccaaatggacttaccttgaattaattcctttgatagcccttttgagccttgtttccctttccttgttttgaagctcactacaagccttaagtgaaaaaccatgatattaccatatccttaaggaattttggagctttggaattgttttgggaataagtgtggggggtttttgtttcattggacaacttgttttgttgactatgcttcatgatgtattnngggtcatacttgatgtacattgtatattggttaaatgttggacatgctgaatgaaatgttgtttctcaaaggtaaaaaaaaaaaaaaaaaaatcaaaaaaaaaaaaaaatccaaaaaaaaaagagagaaaagcaataaaagtgagtgaataagatcttaaatggcacaagaatgat

SEQ ID NO: 21035 - DNA, 409 bp, Glycine max
  unsure at all n locations
tgcatagcagnttctactacttaagctgattacatagttgtatgaagttgttgtactcaaagtctttggatgaagcaacaactcgaagactttggagtaaaccttgatcacattcctctaaaatgtgacaacacaagtgctaccaatctaacaaataacccagtcaagcattctaggactaaacacatataaataaggcatcattttcttagagatcatgtgttaaaaggtggctgctgcattgagttcattgatagtgagcatcaactagaagaaattttcactanatcttctgctagagataagttttttattagaaatgaactatgcatgttagatgcatctagcataaaatgacattctgtttgcatagtgtgtgatgcacattgctactcatatcnatttgttt

SEQ ID NO: 21036 - DNA, 396 bp, Glycine max
  unsure at all n locations
agcttctcgttattagtgcacagtgtcataccctaatttcgtccggggacctttgcttgataacatgcggcctttctttggtcctttgaaagtgcttgacacccatcattaagcaatttgtgaaattccaagacatgccgaaaaaccaaaaaaatattaatgcacaatccgtaagtttccgtgacacaccgaaaattaaatggaagcatcgttgcataattaagcgagattccgtaaacattccgtaagtcaaaaaggggatgattatgtaatccggaaggttccgtaacattacggaaagaaaataagtatcgttacgaaattcgtaagtttccgtaactttacgaanaaagaatcacaaaananaaatcagaggggggtgtacttagtaaaaat

SEQ ID NO: 21037 - DNA, 457 bp, Glycine max
  unsure at all n locations
nttgcaagctggaatcatttatcctatctctgatagccgatgggtgagtcccgtccaggtggttccgaagaagaccggcctcacagtgataaaaaacgagaaggaggagctaattcctactcgggtgcataacagttggagagtctgcattgattataggaggctgaaccaggttaccaaaaaggaccattttcccctgccattcattgaccagatgcttgaacgcctggcaggtaaatcccactattgtttccttgatggtttttctggttatatgcaaattactattgctcctgaggatcaggaaaagaccacattcacctgccccttcggcacttttgcctataggaggatgcctttcggcctgtgcaatgcccctggtaccttccagcggtgcatgattagtattttcagtgattnttagaanatgcatagaggtgtcatggatgatttcact

SEQ ID NO: 21038 - DNA, 405 bp, Glycine max
  unsure at all n locations
agcttcttatctaatgctcatcttggtggtgaagcttcttcttccaaggcttattccctaatggatggcgcatcctctctcctcttctcctttgtcttccgctgcatctccatggtggaaaatcaccattaaaggacctcattgaagctcaaagatccagcctccatagaagccccacaagcaagcttcctaaggtgttcctcctcagttttagacttggcgatcatgtcgtctatgtagacttcgatctctcggtgcatcatgtcgtggaacacagccaccatagcccattgataggttgccccgacgttcttgagcccaaaggacatcaccttatagcagaaccttccncacagggtgacgacacatggtcttttccatatcctctggtgccatctttatctg

SEQ ID NO: 21039 - DNA, 468 bp, Glycine max
  unsure at all n locations
ctcaagcttgctaacccatggaagctcctaatatctcccacactntntggggtgggccattcttggatggccttgattntctcagggtccacttggaccccatttctaccaactacaaaacctaagaaaactatattatctacacaaaaggtacacttctctatatttgcatagagggtgtttttcctaaggactgaaagaacttgcctgagatgtcctaagtgatcatctaggctcctactgtacactaaaatatcatcaaaataaacaactacaattctacctaggaaatcccttaagacatgatgcataagcctcataaaggtgcttggtgcattagtgagcccaaaaggcatcactagccattcatacaaaccaaacttggtcttgaaagccggtntccactcatcacccnttttcatcctgatttggtgataaccactnttaagatcaatttntgaaaagata

SEQ ID NO: 21040 - DNA, 410 bp, Glycine max
  unsure at all n locations
agctttgtgtaatcgattacactaatttggtaatcgattaccagtgattgtttctgaataaatcaaaagatgtaactcttcaaatggtttttgactttttcaaattggttttaagtttttctaaaagtcataactcttctaaatggttctcttgaccagacatgaagagtctataaaagcaaggctttgatttgcttctcaatatacttttccaatcaatcttataaaatcatttacaagccttgaatctctttgaacttcttcttcttctttgtgccaaaagctttccaaagttatctggttttctaaatcttgaaaacttgtgctattcattcttttcatctcttctccctttgccaaanagaattcgccaaggactaaccgcctgaattctttctgtgtctctcttc

SEQ ID NO: 21041 - DNA, 448 bp, Glycine max
  unsure at all n locations
tctaaaggaggtcaacaacaggatgggtgtaaggaactatggttgattaaactttctagcaaaataacagtttttgcttggaggttaatagaagataggctaccaaccaagatgaatttacataggagacatgtgcaactgcaggatctgcgatgtcctttctgtaaagaagctgtagaggaggcatctcatttgttcttccattgcatcttcatccaaccaatttggtgggcatcgatgtcttggctgaactatcatactgcctttcctcttgggcctaaacaaaattttctacagcatatcttcactgaggtaaaaggattaaagattaagagatggagatattggtggatggcggtcacatgggctatatggaaactcagaaacagaattctgttttcgaatgcagaattngatgctaacagattgtttgatgagggctgtttct

SEQ ID NO: 21042 - DNA, 414 bp, Glycine max
agcttccctctcatcacttgcaaacaaatagaccttaaacaagccatgcacccactatctcaaactcttgctaaccaatatatgtttgtcgtagtcatcaatgaagattggttaaagaggaatagcaaaataatagagtatgatcgcgagaaagaaaagagaatgaaaaaaactcattaataaaagcagaacaaggtgataaaaaaaataaaagaaattggataagaatatttgagaggaaaggaagatcgtccgacaaaacaatacacttttgaaaataaaatagacaatttatataaaaaaaacacaagtataaaattttcataagttaaaaaataaaaataaaaataaagattcaaacaaaagaatgaaaaatgaagaatattgaaaaagaatacgaaatgaaggggaagc

SEQ ID NO: 21043 - DNA, 462 bp, Glycine max
  unsure at all n locations
tgatgataaaggtgaaaaatgtatctttcttggtgttagtgttcagtcaaatttatataaattgtataatcctaccactaaaaagatcattattagtcgtgatgttgttttttatgaagaaagattntgggaaaataacatagatgaaacaaatcaaattcttgcaaactttgatgaagagttgcagacaaggttgctagaagagcaacaaatttcagcaatcacagttgaagatgaaagacctcaacgagcaagaagaaggcatgcatggatgtctgattataaggtaacagaaattgaagatccgattacttattttgctttgttttcatattgtgaccctacaacctttgaaagtgctgtcaaagaagaanaacggagaaaagcgatggatgatgaaattgattccattaaaagaaatgatacttngggattgtgtgatcttccaaatggacataatat

SEQ ID NO: 21044 - DNA, 407 bp, Glycine max
agcttatggaaataatacataagaaagataactaagagtcggccaggggatcaaagcaacgcctgatgaagctcatatcattttcaagcctagtgatacaagtatccatcccataaaagcgagtatccatcgcatcaaaatgctcacccacaaatgctcgaagatcgtggagctctgtgaggatttcagtcagcagagaagaagcattcctttatggtggaggagatggggtacgttcgttaggaataggcggtgacaagtcttgtttgcaaatccactgaccatcaacatcctttcggtaaccaaaggaggtaacaacaccgacaccaatggagaaagaccttttaaccttgacatatggttaatcatccaaaggaacattgaaatgatgaagaacaagagtaaca

SEQ ID NO: 21045 - DNA, 418 bp, Glycine max
  unsure at all n locations
tccgtgaacatcaactcttctgactncattttgtaaatagtttaggctatctaccactttcgagtatcgaattaatagtatttattatttgttaaatagaatggtttttcaattccctgtgctcaagtacgggtataatttgggggactaattccccttcccattcaacaaaaaaaaaaagtgcgagtaaagaaataatgcgctatatgcatccccattcaccagagaaaaaaagggtacaagaatgtcattaataatacgctatagtcttgatgcaaagcatcatanatngagagtatatttgagtgaacgtcttgcaactttatngaatgtgtaatgacgtgactttatgtagaaaattatcttaagacttanatctgtttcttttttttgtaatgtanaaaaaaatcaacaatga

SEQ ID NO: 21046 - DNA, 576 bp, Glycine max
  unsure at all n locations
actgtctaacacttaaccaantanacactgatcatngaatcgttaagagagatagagaaggtnnnnnnnnnnnnnaagaggatgaacgtgtggatacgctagctattacgcgcacctatnnaanaccccanggnggancacaacnataacntgctcgatgagggccggctctattctactcgcatgagagagagggagcacagcaggctgaaaagcagaaccatcttccttgaaagggactaaaggtggctcccccagtaatacaaggcagtccaaccacatgaccaaagaaccaacccagacgatgaacaatcgatacacatgacagaagatgcaacacatggacaagtgagctcacccacgttgaccatgcgcgctgtgagagacatagcgaattcaataggaatctgacgaccaagatacaacaacatgaatccaacgctgatactacaaaaactggaaaagggtgcccgaaacgacaggacaaagccgcgagaacatgaaactggagacagaaaaacacacaaacgtcgggtcttataacatgcagcaagagagcacaggagagatacggag

SEQ ID NO: 21047 - DNA, 274 bp, Glycine max
agcttgtttctagcctggagaggagggtgcattagttttccagccaccatgattgtgtccgaactgagttctttaaaggttgggctaagaatttatccttgaaagaatgtagttctttctactttggtatgagttatgctccacatagaaacgcccattttctttactctggcttttgtactggcattgttaggattcaatgcaagtattatttcctcattctctcaatgagaggttgtcaaatttaatgggtcggctgatctagaatcaattc

SEQ ID NO: 21048 - DNA, 449 bp, Glycine max
  unsure at all n locations
actcaagcttatctgctcatacattgcctcttcttttgaaaaacattnctctacgagaatctcatccactatcatctagagcttggtttctgaatgacaagtgataaatgacagtcgaagcaactttataaagcatgatttgaatagaaaagtataaatgtatactaatatataatattattatagcgcattaatatatctaacttataaccatttatttatctcttttataatatactctcttctattttcatttctaacattaattttaataaatcgttctagaaaatggttaatatttaattatcgttatatcatatttaaattgttcatcttcaattcagaatataatgtatgaatttagaaatatttagttattataataaagatttaattatataaaaacaaatatcgctctgaagaagcttaattcgcatctatatcctatt

SEQ ID NO: 21049 - DNA, 407 bp, Glycine max
  unsure at all n locations
agctttgctccacaaaagtgatggtaatttctcctcttctttcaatttcaattgtatgattatgggtctttgggtttatgtgtaaggctttaattggaagacaagtatttgaaattgtgagatgttgttgtttcttgcttaattgacttgctctgcgagacgttgttgtgtggattttaatcaaattactgtgagtttgtgctttcttttgtgctctcangtagtttggagtaaggcacatgtgtgtgtgtctatatatatatatattaatacttgtccgggaatgtaataacaggtcataatcatagatgttgcaattcatactatgatattaaataaatagacatacaaaaccaggggctaagggtgtttctttctcaaagaagcttcagatttgttgaaagtta

SEQ ID NO: 21050 - DNA, 439 bp, Glycine max
  unsure at all n locations
tgacccttacgagtcagtttagtcaaatgtttagctaactatgagaaaccttctatgaatctcangtagtatcctgctaagcccaaaaatctcctaatctcaaaaatagatttaggactctcccattcaagaacgacttctatcttagagggatctacaactatacccccttgagatatcacataccctaggaaactaactttctctaaccaaaactcacactntgacaagttagcataaagttgtcggtccctaagggtatgtagcacaatcctgaagtgttcttcatgttcctctctagtcttggagtataccaaaatatcatctatgaatactaccacaaaactatctangtaagggtgaaagactntattcatgaagtatataaacacacctggagcattagccacaccaaaaggcatgactagatactcatagt

SEQ ID NO: 21051 - DNA, 407 bp, Glycine max
  unsure at all n locations
agctnttatctgcagacatatcctgatgaagcaatggaatcttatctgattcttctgcccttgcttcctttctgaggttgagattgaagcttggtgacttttgcatctgacaagagatggaattgtcggggtttgattcagtactgagccttgttacactgtcccttgtttcataaccaccatttgcaaatatagaatagattgaagatggttcaatggacatggtagctgctgaaggtgttaattctgcccctgcagatgaagctgcttttacatgttgtagatgttcttctcgtttctcanatgcttcatcatcaaccaagtccacagatggaactgttaacttataagaaacatggatgtcaatggcaaagtatttggtctcatttgctagcttccaatctgag

SEQ ID NO: 21052 - DNA, 443 bp, Glycine max
  unsure at all n locations
ntaagcatatatcaatcctatatatcctatctctntaaatcttaacctaacttataatataaatggcctccataaaacatatagctggaaaacaactcaaggatgtaatgttagagtggtgagtatttccaaagagataacttaagatgatggctggaatgaccattagcctgtaaaaaatttattggcaggcaatcatgtatagcaaggttaaaccaaacagttagtccttgtagtctactagatttgtattttggtccctatagtttattggctttgtatgagggagagccttggaacaatggtaaagttactgctttgtggcctagaggtcacaggtttaaatccaggaaacagcctctccagtttccacttgtgggtgtaaagctgtgcacatctaccttccccanacctcacttagtgggagccccatgtacttggtc

SEQ ID NO: 21053 - DNA, 403 bp, Glycine max
  unsure at all n locations
agtttgtttcgaggtacttacccgttgaagatcgaagaacgatgaagaacgaatgaagaacgtcgaagaacggttgaaacctttgcgagattcctcacggaaaacgttacggaaacgtttcggaagcgcctcggcttagattttcttcacggaaacaattttcccaagcaaattcgaaagagagagaagtgcctaaggggctggaccccttccttcttcatttcctcccctatttatagcagaataggggaggtggttgccgcccagctcgcccaggcgagctcagctcgcccaggcgagcatggttgcttcctccagaagcaaccgccttctggaggaagcttctggagggcccaagtgggcctgggtgctatntgcacccacatttttactaagtacaccc

SEQ ID NO: 21054 - DNA, 456 bp, Glycine max
  unsure at all n locations
tataagaacaaaattgcctcaatcatttcttaatatgcatgtgaattangacgcatcagcaagaatcaagccaaggctattgtgcaagcaatcaatggggcaaaacacaccaaatgattatgatgatggatggctcanattctcacaaaggtaaaatcatcactttcaaattgagctttcaaaactatcatgacatgtagagaagaatcaaggatttcaagtcacaaaatgtcaagaacttttattttcaaaacaattacccatttcttgaacatttcctataattcanagaaaaacatgcaaagtcgtacgtgcacacaatattgacccaaaatattaaactaaaaatctgacgaaactaacaacattaacaaattaacacaactaacaaattaacaaaaccaacataactagcataaccaaagaacactccccnccccccatacttaaacaaca

SEQ ID NO: 21055 - DNA, 400 bp, Glycine max
  unsure at all n locations
agtcttaccttctggtcctcctcatagttggtgcatgagaaaacatgctctattttcatctcccactccacgtaggcctccggatcattctttcctttaaatggaggaatgttgagtttaataccatcaattccgttntgtctaggaacaccatcattccctcttctcctcctttcttcttcattatgatctctattctccatttgatccaacctctcatggagcgcatcatctcgttgtttcattaacctctccaaatgttgcatcanagcttgcatttggaattgcgaaagccccactccatcattaggattagtacctgacatctcanacaaacatatcanacgtaacaagacaattatagttgctgttcgatacctcaccactcaagtgtatacac

SEQ ID NO: 21056 - DNA, 428 bp, Glycine max
  unsure at all n locations
tctggtgggacatcttgacttgctttccaatctgacattcttcacagattctgccttcttctattttcagattgggaatgcctctaacagcacctttgtcaataattttcttcatgcctcttaagtgcagatgtccaaatctttgatgccatattttgacttcatcttctttggagaatagacatgtggaggagtaactggtttcttgaggtgtccataggtaacagttgtcctttgatctgctgcccttcattaggacttcactcttctcatttgtcaccaagcattctgactttgtgaagtttacattgaatccttcatcacacaactgactgatgctgatcaagtttgcagtcagtcccttcaccagcagtactttgttcagactangaagtccatcatggactagctttcccattccagtgatc

SEQ ID NO: 21057 - DNA, 399 bp, Glycine max
agcttcttgcgtagccgctcttggtgctcagaaaatcccaaaaacaaatccctcttattactagctattttgaattctttagttcctgaatgtacaaccttcaaattgttgctcgttctcctctttcttttctgcaaaaaagaaaatcaatatcaaagaaaacatggatgaaatcctaagaaaatcaatatcaaagaaaacatggatgaaatcacaattaaaaagcacaactaccaatctttcagagtcctttggttaatttgtcttgtctccttatgtggtggggttttgtttaataatattatacttttgccttccaaaaaaaacttatgactgatcctcttttcattaatcctatcttgtatgttattgtataaaagatcatgggttctccacctt

SEQ ID NO: 21058 - DNA, 406 bp, Glycine max
  unsure at all n locations
tgtatttcagtatcttattgatcagttatgccaaatgcctgtattggccttacctgattntacaaagacttttctagtggaggtggatgcttcaggagtgggggtcggagctgttctcatacaagatcaccattccatagcctttataagtagaagcttaaatgttcagcaacaatccatgtcaacctataagaaagagttactagctgtggtgtttgttgtacaaaagtagagacattacttattacctaagcagtttgtaatcaaaactgatcacaaaagtctcaagtatattcttgaccagagactttccacagctttccaacaaaaatggttggtaaaacttatggaatttgatttcattattgaatacaagtagggaagtgagaaccaagctgctgatgca

SEQ ID NO: 21059 - DNA, 401 bp, Glycine max
agcttctattttactgtctccgtgtgagggacgtttctctttctgtggacattatttcacaaatttcaatggtggagatgtgcaaaaatgggttccaaaggtggtatcgaaatttcacgacaatccaacagttgacgagtctgaaatcgtagttttacgaagacaggttttgggtctctgtggaaaaagagaaagctacgatacgaatgacatttctctcacctcagataatatttcgcaaattccaacaatgagaatgttcgaaaatgagttctgaaaggtgctcaaatttcatgatgatccaacggttaacgagttcgggatcgttattttactgagacaggtttgagtgtatgtgggaaaaagagaggatttaagagaagaagaaggaaaacaaattg

SEQ ID NO: 21060 - DNA, 458 bp, Glycine max
  unsure at all n locations
tctagctcccaacaaaaggggtttagtctctcataaccatgagaggctttacttgtcatggatgactaacaacaagaaaaaaggagaatgtcgaaagcgagagggtttctcctaagggatagaccccgtgtgtgggttgtgagacggtgtgtattttccttctgttttctctctcctccttatataggtagcttacttacttcgcacttagtgcaggcattcacgctaaacgcgcctttgggctttttcgtgggccttatgcgtgcttagcatgtaacgcgctaagcctggagtgtaggttaagcctagagtgagtgctaagcctccaacgtgcacttagccaaaattgacacttgaaataaagatgtcaatttttcctttcagaattttttcttccagattntacatcaaactttctcatttgttntaattaattcaatttaagggtatggcagtat

SEQ ID NO: 21061 - DNA, 416 bp, Glycine max
agcttatttatatcgaggcgctcgaaattgaacaacggaagctcttgagaaattcaaatggtcataacttttaactcggatgtccaattcatgcgcatcacatatagagacgctgaaaaatgaacaacggaagctctccagaagttaaaatggtcataagttttcacactgatgtccgattcaggcttatattatatcgagacgctcaaaatttaacatcgaaagctctcgagaaattcaaatggtcataacttttcactcggatgtccgattgcagcgcattacatatacagactctcgaaaatgaacaacggaagctcccgagaaactcaaatggtcataactttttacactgatgtccgattcaggcctataatatatcgagagcgctcaaatataacaacggaagctcttga

SEQ ID NO: 21062 - DNA, 465 bp, Glycine max
  unsure at all n locations
agcttatgcgcatatttccctacgaacgttcacttgcacaagacatcctattaactttgaaaaatgcacccatatacaatcaaggtagcttcattacctagattatttacatgtacttccaaggtgtatttgttatttacatcacacacgcctccttggctaaatttacatacatgcatactcaaagcatttcggggtaccaaaaattgcacatgcgctcatcttggtatttctaatacctatacatataaaaacttcatgatgaatcttgactacctacgcaataaggtgctacatttcatgcttttttttttcaagtttttgctacctaaagccacatgaaaattcaagcatattttcctttgctgactaaaattgtattcaaattagaaggtatatatttttttgtaatatgttttcttcacataacatgcaacacatttatatatatnttttgtgagacat

SEQ ID NO: 21063 - DNA, 415 bp, Glycine max
  unsure at all n locations
agcttgtatgattatggggtacccatcatatgtggtactaggtggcgatcaggcgatggtgcaagtcgactttccacatccacaaatcacacataaatccaccatccccagttgcccaccttcaattgagctcacgtactcccatgtagcccttatcctcgttcctctcaacaccgggtccccatcaatccctccaagcttccacaacatccaaacatcatgaactatcaaaaccaagcaaaaacagggcagaggtagaaatctctgcccaaaacataaaccaataccacagtttttcttactcaaataccccagtaacattcccttcgttccaattcgttcaccgttggatcgactcgaaaattttactggaggtccctagtacataagtctacattntgaccgctgggatctg

SEQ ID NO: 21064 - DNA, 460 bp, Glycine max
  unsure at all n locations
ntgaaganataggatacgaatcctacatgcatccattcacactttctataaaaagcattatgtatattcttggaaagttggaaacactctcaaaacaccttgtatatgctaagagaaaagactaagagcttagctttcatatttgtttgtaagacaattaagagttagtcagtgagaaaacaaacttcaaatcttttgatttatttttagctagcagtgacttggcaggacaaagaatattggtttgtttcaagcttgttaaaaatggaagaaaagaaaaccttcacggatttgctcacggaaatgtcgaanaacttacccgttgaagaacgaagaacgaacgaagaacgaatgaagaacggtgaagaacgacgaanaacattcacggatttgctcacggaaatgtctcggaagcgttatggaagcacctcggcttgggatttcttcacggaaacaattt

SEQ ID NO: 21065 - DNA, 413 bp, Glycine max
  unsure at all n locations
agcttgaaggcatgtaacccaccatcttgtcatagtagaacactagtaatgtgtccactatcattgttatcatttccctctccatcgttgggggtgctacttaagctgccagatccctccacctttggacgtattctttgaaagattcatgctcccttttgcacatgttctactactccattctatccggagccatatcagaattgtactaatactgcctaatgaaggcaaccattaggtctttccaagaacggacctgagaaggttccatattattataccaggggatggctaccccagtaagactttcctggaagaaatgcatcaacaatttttcgtctttcgcgtatgcccccattttcctacagtacatgttcaggtgattcttgnggtaagtagttcccttgtactta

SEQ ID NO: 21066 - DNA, 459 bp, Glycine max
  unsure at all n locations
tccatcagttntgatgatgccaaagctcanagagttgttttatgattaaagaatcaagcattcaagattccactcaaagattcaagaatcaaataaagaaatcaagaagcatcaagccaagtcaaaataggtagtaaaaagtattttttcaaaaaacatcaaatagcacactttttgtttgaaaagtgattttctgaaatcttctaagttaccagagtttttactctctggtaatcgattaccattttatagtaatcgattaccagtaaccaggatggttttcaaactggtttcaatgctttgtaacgttccaaaatgattttcaaatagtgtaattgattacactatattaataatcgattacaagtgaatctgaacgttggaattcaaatccaattgtgaagagtcatagctnttcataaaatacattgtgtaatcgattacactattatggtaatc

SEQ ID NO: 21067 - DNA, 415 bp, Glycine max
agcttctggtgggacatcttgactagctttccaatctgacattcaccacaaattctgccttcttctattttcagatagggaatgcctctaacagcacctttgtcaatgattttcttcatgcctcttaagtgcagatgtccaaatctttgatgccatattctgacttcatcttctttggaggatagacatgtggaggagtaactggtttcttgaggtgtccataggtagcagatgtgctttgatctgctgcccttcattagaacttcactcttctcatttgtcaccaagcattctgactttgtgaagtttacattgaatccttcatcacacagctgactgatgctgatcaagtttgcagtcagtcccttcaccagcagtactttgttcagactaggaagtccatcatgagctagct

SEQ ID NO: 21068 - DNA, 379 bp, Glycine max
tgttaaagaacttaaaaaaaatcaagaacaagcttgttcgctcattgttcgcgtgtatgacattcactccacaaggtttgaagtagaggagaccttcaatcctattacgcaacgtggcggacaaaaatgggcagttaacttgaatggtcattattgtcaatgcggaaggtattctgcgcttcactatccatgttcacatattattgcagcttgtggttacgtgagcctgaactactaccaatatatagatgttgtttatacaaatgagcacatcttaaaagcttactccccacaatggtggcctcttgagaatgaagcggctattcctccttctaatgacgcatggacacttatccctgacccaactacaattcgtgcg

SEQ ID NO: 21069 - DNA, 396 bp, Glycine max
atcttatctgataaatgtatttgtatgcataattaatttcatgcaatatatttatgactatatattctaaaatataaattgcattggtaatatattaaaatgtagaatgtttgttttacatgtcatggaaattatttataactaaatttatactaaatttttcggcaagtttttctgaatgcatatatactaacattgtcaatcaaaaattaatctttcatcttgttaaaaagtgtaatattaaaaatatatttatagctaaaaaataactttgaaagtttgttgttgtcttacaaacaatgctcaaaagaaataaaaacgagagaatgaaaataaaatcgaaaatagtgaagggggaatattcatttgatctggaaaatattactactactatta

SEQ ID NO: 21070 - DNA, 443 bp, Glycine max
  unsure at all n locations
tgatagtgtgtttgatttgtggtgtggtgaaagagaaataattattntttcacgttaaaaaacacaactctttgtagcttcaagatttttagggtgaaaatttgattatttttttttcagtgttacggtgaaatgtactaaatagttttgtaaatagtaaatacacatcaacatcacgtggctgatcacgtgacctctctgaatttcctgtccctctttcctgtttttcatcaaatcccaaggctaagacagtacaaaatgtagcagttacagcacgtgatcccaaaggcatcaaatccaaattttcagatatttaccatttcactttcagattgtactaaaaagaaagaataaataaatgctgatttcacttgaccctcattggcttgaaggctcttaagtaatgccacgggcactacacagaatccttcaccacaacaatg

SEQ ID NO: 21071 - DNA, 414 bp, Glycine max
agcttgtatgattatggggtacccatcacatgtggtactaggtggcggtcgggcgatggtgcacaacaagttttccacatccacaatgcgcgcataaacccaccatcccctgttgcccacctccaactgagctcacgtactcccacgtagcccatatcctcgtttctctcaacaccgggtccccatcaatcctcccaagcttccacaacatccaagcaaaacaacattcatacaacacaagctatcacagccaagcaaaacagagcagaggcagaaaactctgctcaacacatcaaccaaaatcacagcttttctcacgtaaagaccacagtaacaattccttcgatccaattcgttaaccgttggatcgactccaaaattttactggaagtctatagtgcataagcttacatt

SEQ ID NO: 21072 - DNA, 440 bp, Glycine max
  unsure at all n locations
tcatgatgatgaatcaagttgattcaagtagttntgatgatttcaaagatgatgacaaaaagcccaagagaatgatttcaagattgagttaacaagtttcaagaatcaagagaagtttgatttcaagaagaaaagatgaattcaagattcaagtgaagaaatcaagaagacttcacaaggggagtattgacaagatttttcaaaaaacaaacatagcacagttttgtttttcaaaagattttttctcaaaattttctaagttaccagagtttttactctttggtaatcaattaccagtttcttgtaatcgattactagtggcaaagtttgatttcaaaagcttttaactgaatttgcaacgttccaattgttttttaaatggtgtaatcaattacaatatattggtaatcgattaccagtgtatctgaacgttgaaattc

SEQ ID NO: 21073 - DNA, 404 bp, Glycine max
agcttcattcatgtatccacgtagtagtcgtgcaggtacggtggcgtcttcctggtgcgtactggcctcgaggtggttactggtatcgacggtgaagacggtgcctgtgaggtgccggtggtgctgtcggtggtgctaacagtttggaatttcaacagtgttgccggaacaaattccgcagctttactcgcagatgggagtatatgttagaggaggaaagatgcacaaatggaaaattctgttttggtacgtgacgttatagtgcatttggaatctgaggaacaaaattgcttttagagatgctgatgtagagataggtcatcttttacaccgcatgatatctatatcttgacaatgcgttttgtataggaatgggtctaaaccatgatattctctctctgatt

SEQ ID NO: 21074 - DNA, 434 bp, Glycine max
  unsure at all n locations
tctatagaaggttcgttcctaatttctctttctttggatcttctctcaatgagctggtgaagaagaatgtggcatttacctggggtgaaaaacaagagcaagcctttgcttttctcaaagaaaagcttactaaggcacctgttctagcttttcctgacttttctaaaacttttgagctagaatgtgatgcctctggagtgggagttggagttgtattgttacaaggtgggcaccctattgcttattttagtgaaaaacttcatagtgccacccttaactaccccacctatgataaagagctttatgccttaataagagccctccaaacttgggaacattaccttgtttccaaggaattngtcattcatagtgatcatcaatcacttaagtacattagagggcaaagcaagttaaacaagaagcatgcaaaatgg

SEQ ID NO: 21075 - DNA, 380 bp, Glycine max
agcttattcatgtccatgttgaactgatgatgatgatcctctaaccattgtcctccattgctctcaaaggtatcctaaaaaatctcatgtaattctctaatgtatgggttgcggatttgttaagcatttaagattctgccatttagaaaaagtaatcatatgtggtgcctgttctattgatatttattttccataccataatacattaagacttgcgtggtctagtgccataagatgctatgtatacatcttttcaattccttttccaatttgtgttatattgtgagattcgagtacttaatggtgattctgaatattcagctttaacttcatacgaaaattatcatctgcgtctttctacaaccgtcttacaatcctaa

SEQ ID NO: 21076 - DNA, 300 bp, Glycine max
tcaaacttgcaacaaaggagttgagcatgtataaagattctttcttcaacttttagaggtgactttgagcgtctgtttatggaggagtcccaatcaatttctgattatttttctcgagtattggcccgtatcaattaacttaaaagaaatggtgaagacgtttatgaagtgaaggtcatggaaaaaatacttccaactttacatccaagttttgacttcattgttaccaacattgatgaaaacaaggatgtaaagaccatgactatcgagcaacttatgggttccttacaagcatacgaa

SEQ ID NO: 21077 - DNA, 411 bp, Glycine max
agcttttcatataactttacctctgctgtaggctacttatttgggggaaaaaatgataaatttgaagttttgtatgtggttgtgtatggaatttgtaatttgggaatttgtagtcttttattgtgtgtttggttttagtaggattttctagggtcatgttcaataccaattaatttttcacatgtttagttccatgttgagaaattgattgagcccagaattgatgagtttaagcaactgtaggtagttttttttgcgttggttcaagaattttatattgagttttactactaatatcttttataataaaaacatccaaacataacttcaaaatcatttttccaacgctcatccaaaattcctaattttcttactgactcttaaggaatgagaatgaagtttatgatgatt

SEQ ID NO: 21078 - DNA, 453 bp, Glycine max
  unsure at all n locations
tcaagaaaaagatggcctcagcaaactccttatttccagattggaattctatcaatagacctccaatctttaatggagagggttaccactactggaaaacccgaatgcaaatttttatcgaggcaatagatctaaatatctgggaagccatagaaatagggccttatatacccaccacagtagaaagagtttcaatagatggtagttcatcaagtgaaagcataaccatagaaaaacctagagatagatggtctgaagaggatagaaaacgagtacaatacaacctanaagccaaaaacataataacatctgccctaggaatggatgaatatttcagagtttcaaattgcaagagtgctaaggaaatgtgggacactcttcgattaacacatgaaggaactacagatgttaaaagatctanngataatgcactaactcatgagtatgaattat

SEQ ID NO: 21079 - DNA, 358 bp, Glycine max
agcttcattgcctaacaagccaacttacaacagctagccccaagagactcagcataaggatgcacagaccaaagttgcgtatgtaaaaaaattgtatgaccaagtgaaggtgcaaattgcaaagaagaatgaaagctatgccaagcaagcccaaaagaaaaggaaggaagtggtacttgaacccggtgatgatcttggacatttgaagacaaatgttttccaagaaggagggaatgatgagaatcatgaaacaggccaaatacagtctaaaggcccaagtggagaacgacgaacgcccaagtggagaatgacaaagcccccgagtggagaatgatgaatgcccacgtggagaatgatg

SEQ ID NO: 21080 - DNA, 376 bp, Glycine max
  unsure at all n locations
tcattgcctaacaagccaacttacaacagcttgccccaagatactcaacataaggatgcacaggtcaaagttgagtatgagaaaagattgtatgaccaagtgaaggtgcaaattgcaaagaagaatganagctatgccaagcaagccaacaagaaaaggaaggaagtggtacttgaacccggtgatgatcctggacatttgaggacaaatgttttccaagaaggagggaatgatgagaatcatgaaactggccaaatacaggctaaaggcccaagtggagaaggacgaaggcctgagtggagaaggacaaagaccctgagtggagaaggatgatagcccaagtggagaaggatgaaggctcaagtgtagatggatg

SEQ ID NO: 21081 - DNA, 406 bp, Glycine max
  unsure at all n locations
agcttgtcaatactttntaccttatgtttggctctaattgagacatggaagtacgcattattttcgtcccccaatttgagccagtcaagttttgatctctgttgtagaatttcctcatcaatctcgttccacctaatcacagtttttgtacacatattcactttatcaattttctctttattcatcctgtcatttacaagcgagtcttgagcttcagcaagatcttcccgagctttggccagctggagtttcgtatgagcaaattgttttgacaaagtacctaaaaattttcttaatcttttcaatttcttccacatcgctaccataggactaccatcaacagggctattccaactctatgcgacagcgtcatcaaaacctggcagcttggtcacacaattgagaa

SEQ ID NO: 21082 - DNA, 434 bp, Glycine max
  unsure at all n locations
tgtccaatgtactcttgtgcatgacatcaagcgacgagcctttgtcgataagcattntggccacgatgtggtccaaacacttgacggatacatgtaaggccctattatgtccccgaccctcgacgggtatctcctcattggcgaacgtgaggtaattgttggcagtgataatgttgatgattcctccaaagccttccacaaagatgtcttgggctacatgggcttcattcaagattttgaccaaaagcgcccgatgaggctcagaattcatgggtagttccaacagggagaccctagttggggttttattgagctgttcaattaccttgaactcgctntgctggatgatccgaaagaactcatttgcttcttcaacggatattntctttttgttgaagtcttcctctccctttgcaaacctcccagtcgggatc

SEQ ID NO: 21083 - DNA, 415 bp, Glycine max
  unsure at all n locations
agcttatgttaatttggcatggaaggtacaaggctggcggcttaaggttcaagcaacccaagtaagggctttaggcccaaaaaaaaaaaggtccaaattttttttagtactaatatatctcaaaaaaaatttattgtaaaattatatttgaaaataaattttaattaaaatattataagtatctgttactctttttattgatacgcaagtaacaattaatgagcaacaactcttcatcaatatcatagttttgttcaaaaaaaagaaatttaacagttaatagttaaagaaatccaaaagtttttctttcatttctattctctttattggctttctattcaattntaattcattcttcttttctcaatgtctttcatacttctttgtcttcacatgttgacctccttaattatat

SEQ ID NO: 21084 - DNA, 457 bp, Glycine max
  unsure at all n locations
tgcataagctattcatataaggtatcttacagaacttgtataaataagttattaacatcttatatatggattagttataacataagtttgtaagttctcgctaacactttcacaaaaacttaacatatgatcttagtcataaaatattgttaactcattgacaagtgtaccgatttgtctcaagtagtaaagtactcagaagtctgagtatcgaatccacaatgactttgtttgtacttagattgatgcaaactcaatttacaagtaagagataaagaatttaaaataaaagataaagaaagatagaagataagatacatatttaaaagaaaagataagagatttaaagataaaaaattagaagatagaanagataaaaaaatttaaattaaaagatgataaagataaaaaagtataagataaaatagataagataagtaaaagataaagataatga

SEQ ID NO: 21085 - DNA, 369 bp, Glycine max
agcttatctttatatttaaaaaacattgatagaatatacacagtacattattaatttgaataaatgacgcatacatgacattgattgacataatacatattgtacgaggatctaaagaaattgactaaagtggcgtaacgcagttgcagtcacaagtagttgattatctttatattcgaatgggcctgaccctgacatgcacgccacatgcatcattagttcataacatttgtttggcaactattaatcacagtattgtggccaggaccatgcatagtcacacatcagcatatatctcatcttcgtcaacccagaactggattcctcgacttaccttttaaaataatctgcatcatcgatttatatttt

SEQ ID NO: 21086 - DNA, 463 bp, Glycine max
  unsure at all n locations
ctcaagctggttgganaaggattaatattcattaacctgaaaaaagtcttttccttattataagtgttttctccaactcctaatgatcaagaaagagaccggaagagtagtcaaataagtaaaatcttattttttttctctttcaagaagttaaaacgcaccagaaaaaagtctcactataaaaaaatatacatattgggtatctattatttttgagaatcacatatttcaagatcttactaatttcctataattgttaatcttcaaaacccttaaaacccttcaagacatgtataagaggtgagtctctgcaccacatgaatcgtgtaaatctatgcccacatcaatttaaatataaatatttcaattgcaatgcatgccgaacagcaatatcacctaacaaacacgtctgatccacagataaagatactagggttgcctaattctctacatttcaatgacc

SEQ ID NO: 21087 - DNA, 404 bp, Glycine max
agcttgcccagagaatgagtccacggaggaaatgcttaccacctcaaaagactggaaagcggtttctaatgactcctctgcggcttccacataaggcatagaggatgggcagctcaccaagatgtcttcttcgcctgatacgatgaccagatgcccttccactacgaatttcaacttttggtggagtgtagagggaacaacccccactgagtggatccacgggcgccccaacagacagctgtagggggggttaatatccattatttggaaggtgacttgacaggtgtgagggcctatctgtactgggagatcgatctctcccctaacctctcggcgggtgccgtcgaaggcacgaaccaccatagaactcggctttaagtgggaagcattgaatggtaatttct

SEQ ID NO: 21088 - DNA, 454 bp, Glycine max
  unsure at all n locations
cgattcaatctatgtacccgtagtggtccacattgtgtttcgtgcatttttattctcgttttgtttactttntataccccctcttgacgtgcttgagccattttacttaagtcatttctcgcttaacttaaaaataaaataaatttccaccgaacttttgaattgtattatccattaacttcggttaaaataaattccgaccgttcggtcgtgccgtaaccacgttggaaatcaaaaagaggtaaaaaataatataataatcaaaaagacatctttagtaaaataaagcgaaaaatcaatcgggcgttntctctttgggatttctcattcttaatcgaattgattaataactaaagtgaaactaaaggctaaaatcaattcgcctagtcaagctcgtccataaaaatagggctttgaagtttgtcatttcattntctcactaagtaaaatggat

SEQ ID NO: 21089 - DNA, 414 bp, Glycine max
agctttgcctttatggcttgtacctcatcactttcttccgaagctttaacctcatcgtctctcacagtctttagatttgggagccaatccagtccttgtgttcggactctcagccacttatgatagccgccgatgatcccattactgcttcccctaagctctctgtcctttcttcacgctgcatcccatgccttgcgaactccttggagtaccctcgcgttgtggtcactgaaacctcgtgcgatgaaaggcgtgatgctttcgtctaatggcgctcctctcatggggtagccaagctgtcttatggtgagaacgggattataattaatacaaccccttgttcccatcaagggaacatttggacatccttcgcatgaagatagaatcttgattcttccttccttctagcgaggg

SEQ ID NO: 21090 - DNA, 467 bp, Glycine max
  unsure at all n locations
actcaagcttcatgattgaatcaagattgattcatgatgatgaatcaagattgattcaaggttttntgatgataacaaagatgatgacaaaaagcccaagagaatgacttccagattgagtcaagaacaattcaagaatcaagaatcaagtttcaagtttcaagaatcaagaatcaagaaccaagaataatcaagatcaagattcaagactcaagattcaagaatcaagaaaagactcaatcaagataagtactaaattttttttcaaaacattgagtagcacatgaagttttcacaaaagcttttaccaaagagtttttactctctggtaatcgattgccagtttactgtaatcaattaccagtagcaaagtttgttttcaaaagctttcaaactgaatntacaacattccaattaatttcaaaatggtctaatcgattacaagattntggtaatcgattaccagt

SEQ ID NO: 21091 - DNA, 407 bp, Glycine max
agcttttatttagtattcaattaatctatcttgcatcatgtcagcccactttggacttaaagtgatacattcagttacgactctatttctaagttataaattataccacagtccacataattcttagttaagaaatacgaatattgaatcatttgtgtcaataacttttaataaatcatacatttcaatgcagacctagattgcttttacaattcaagtatttcaagtaacattgttcgaaaagtggtttacggcctcaattacgcttgtaacttcacaatattgtggctttttcagtcaaaattgtgacttttagtgtctctggccgcaagttaaaaccttatttgttgctaggttaagttctatggatctgactagcattactttaatgacattgatcatgcatg

SEQ ID NO: 21092 - DNA, 366 bp, Glycine max
  unsure at all n locations
tactcaagcttatgccacggaaatgtaattatganatcgagatgcccgcttttcaccatnctctagttaaccatgcatgtaagtaccatgttcaattattttgttttgttgctgtgaaacgggtttatgatcccaacatggttggctcatggtaccgaatatatgcaaccaagaatgcatcatgaattttcatgcttcccttttttttgttttcgttttgtagaggaaaatgcagtgcttatgcatgagaaaacatgaatacaaaacgtatgcagtttgtagaacaacaagtatgttgaacgcatatgcatgatgatgctatgactcatgcaaaatgcgaggcttgaatatgataacggacaaatg

SEQ ID NO: 21093 - DNA, 404 bp, Glycine max
  unsure at all n locations
ttcaaccaatgagattgttcgaggcctgatctttctcctaatcatgattgctacacccggaaccaatctcgaaacaaagcttaacctttgaacgccaggcgaagcaaccttgatcgaaagacaaatatgaaacgtcctcgaatgactgagaaccgaccccgcgtgtatcgtccccagtagcataagtctaaaacacttgacacgcacagttagaaaaacaccaacacaaatgtcacaactttacgaacttgctcgcgttgaaaacccctacaaccaagagatcctaatattaacctatcaggccccaaccccttngattcaacacaacatgccattgaagcacgaattgaacaaataatagtgaataaccactggtattatctagcactccttacaaacatgcg

SEQ ID NO: 21094 - DNA, 424 bp, Glycine max
tggatgatcaaatagtctgaccattggtgttttaccattatttgttacactcaacattagttaatagttagtctatattgcttagaatggatccatccaatatggcaagaggtgtgtacggtgaaatgctctgacatttccaaaatgaagacattggagtctctctcatacaaagcacattgttaaattttcaaactctaaagtagatgttctcgaccagaacatcttggggtatgctttcaggagatttcatcatacatagcacacatctctcatctattgcccttaaagctaaagaatcaccagatgattttaataatgaaagtggtgaaattgatgaactttccatcataaccagaagcttacacaagatgttaggcaaaagggaaatcactacaccagtaatgcattcaagtatcgcact

SEQ ID NO: 21095 - DNA, 392 bp, Glycine max
  unsure at all n locations
agcttatagccttttcaaacgacaataactttttactcggatgtctgattgagactcgtaatataacgagatgctcgaagttgaatgtttaagctttgagccaattcaaacgacaataactttttactcggatggttgattgagtcctgtcatatatcgagacactcgaaattgaatgttgaagctctgagccaattcaaacgacaataactttttactcggatgtgtgattgagtcccgtcatatatcgagacgctcaaaattgaatgttgaagctctgagccaattcatacgacaataactntttactcggatgtctgattgagtcccgtaatataacgagacgctcgaaattgaatgttgaacctctgagcacattcaaacgataatat

SEQ ID NO: 21096 - DNA, 421 bp, Glycine max
  unsure at all n locations
taaacattcaacttcgagcgtctcgatatattacgagtctcattcaaacatttgagaaaaaagttattgtcgtttgaatttgctcagaggttcaacattcaattttgagcgtctcgatatatgacgggactcaatcagacatccgagtagaaagttattgtcgtttgaattagctcagagcttcaacattcaatttcgagcgtctcgatatgtgacgggactgaatcagacatccgagtacaaagttattgtcgtttgaatttgctcagaggttcaacattcaatttcgagcgtctcgttatatcacgggactcaatcagacatccgagtataaagttattgtcgtttgaatttcctcagagcttcaacattcaatnttgagcgtctcgatatatgacgggactcaatcttacatccgagt

SEQ ID NO: 21097 - DNA, 410 bp, Glycine max
atctttaacatagaaacctagttagattagtgctttgacaggtttgataacaagaacatatttgtgggtttgacaagaactatatacagctcatgactattctccaaccgagcaccacttggaagggttctacacccaatgagagtcgaggttgtgttgattgccaagcttcaacatagaaacctagttagatttttgggttactgtgtggaaggagaagaaaaaatgctagtatatgaatatatgccaaacaaaagcttggatgctaccattattttttgtaagactatttattgcatttgaaatattttgtttacgtgcctttttttgtacactcaaaattctattttgaagtagactaatgtaatgtatcatgcccctaatgaactacaagactgaaagttgtgtgt

SEQ ID NO: 21098 - DNA, 441 bp, Glycine max
  unsure at all n locations
tgtctcagcgtttatgcgagacggagaccatcatgctagctatcatcgccaagtaccaagaagagttaggtctagccacggcccacgagcatagaattgcggacgagtatgctcaagtatacgcggaaaaagaggctagaagaagagtgatcgactctttacaccaagaggcaaccgtgtggatggatcggtttgctcttaccttgaacgggagtcaagaacttccccgcttgttagccaaggccaaggcgatggcagacacctactccacccccgaagagattcatgggcttctcggctattgtcagcatatgatagacttaatggcccacataattagaaatcgttagggaacttgtatggtctctcagaccttgactagatacgacttcctttttgaaataaaatgagttggtcccatgttntctactccaaaaactt

SEQ ID NO: 21099 - DNA, 405 bp, Glycine max
agctttattgtctaacaagccaacttacaacagcaagccccaagagactcagcataaggatgcacaggtcaaagttgagtatgtgacaagattgtatgaccaagtgaaggtgcaaattgcaaagaagaatgaaagttatactaagcaagccaacaagaaaaggaaggaagtggtacttgaacctggtgataatcttggacatttgaggacaaatgttttccaagaaggagggaatgatgagaatcatgaaactggccaaatacaggctaaaggcccaagtggagaatgacgaaagcctaagtggagaaggacaaagcccccgagtggagaatgatgaaggcccaagtggagaaggatgaatgcccagaggcagagacactatcaagacaattaattgttgctaaa

SEQ ID NO: 21100 - DNA, 447 bp, Glycine max
  unsure at all n locations
nttcgattcattctatgtacccgtggtggtccacattgtgttttgtgtatttttattctcgnttcatttactttttatacccccttttgacgtgcttaagccattttatttatgtcatttctcgcttaacctaaaaataaaataaatttccaccgatcgtttgaattgtattatccgttaacttcggttaaaatgaattccgaccgttcggtcgtgccgtaaccacgttggaaatcaaaaagaggtaaaataataatataataatcaaaaaatgtcttttagtaaaataaagcggaaaatcaatcggacgttttctctttgggatttctcattcttaattgaatggactaataactaaagtgaaattaaggctacaatcaactcgcctagtcaagctcgtccataaaaataagtttttgaagtttatcatttcaatntctcactaag

SEQ ID NO: 21101 - DNA, 412 bp, Glycine max
atctttgaaatggaggattggggaaattttctccatcgaatccttaaggaggattctaaggattccgctccgattaaaatgttcctcttggtgtgggggtttggtggcaagcaacggcagctcgtggcggccaccggtggtcatgggtggtggagaaagaggtgttagggtttgggtggtgttttggagaggaagagagagtggaaatcgtgtttttcacactggagaacaaatttataatctacagatctcgcttagagagctcgtctcgctaagcggaagtccacttttcgtgcttagcacgacaattcgagcttagtgcaactccctctacactaagtctcgcttagctggccaattctcgctcagcgtaattccctctcgggttggaattatacttagcgcgcccctg

SEQ ID NO: 21102 - DNA, 430 bp, Glycine max
  unsure at all n locations
tttgtttggaattcattntcaattacctcttagttctgaacgcatgataataatatgtaccaaaagcatacaaagcatgataatatgttggacagagctcttcatatttttgcttggtgtaaattaatgaaaagttggtgcgtttggttaagtgtttattaactagatttgaaattatttgattntatatatganattgatttttattanaaatgaaattaaaataaagtgtcatgtttataaatattcattntaaagtaagtttatattacaacttaatatgattctttaacttanaatgaaaattttatttagagaataaaatatggagttatagtcatcgattaanagttaataatttaaattaattcatatattagagagtgatttgaattgtatcaatattggtcagcggctganaatgaaaaca

SEQ ID NO: 21103 - DNA, 340 bp, Glycine max
agcttgttgtgagaaagtatggaagagtcagtcttcctatttttgtttgctgaccacagagtggtacctggagatatgtcgcgggggtcatgagaccttggggacgtcaagtggggtgctattgcccaaaaccaagcttgaccaatcccgacccaaccccggcatagtcagtcagtgagaacctttgatgtacctaaacatgcaagctcctggcagtcaactaataaaagaacaaagtccacaaagcaacgaggcttgtgtggcggctggccaactacgaatcttgagtggtatctggaaattggcctctggtaatcgattaccaacggtgtgtaatcga

SEQ ID NO: 21104 - DNA, 432 bp, Glycine max
  unsure at all n locations
tgagaaatatagtgaaagttgaatcgaattatagagttttcatacatgtccttgaaaagttccttaaatttttttttcaattaggccctgaacttctgtttattnttaattaaatttgtcattgaccatagtcaacatatttaacaaggacctaattaaagaaaaaaaaatataagttagggactcaattgattttttttattaaaaacttaattaaaaattatcaaataattcggggatgtgcaaactaatttaacttttttttaactcaaagatgcctatatcatttcatcgaagataataaaatcaatacatgaagggactacattaaaaatacaataactaacatgaaattaaatactttaataagtgaacgagcgacttaatttgtttgtctctaaatgaaaaaactntaagctttgaacttgcaat

SEQ ID NO: 21105 - DNA, 402 bp, Glycine max
agcttttactctctatgtctccattatccagcaatatcttggctcttttatttggacattgagaagcaatatgtccaactccttggcacctgaaacatttgatatcatgggatctagaagatgaattaatttccattttacctttaggtgtagcaaatgaatttttggacttagcttcatctttttgactttgtcacagatttgttgttttgccaatttgacttccacaaagaagtggaagcaaatttggaagtactattagctttgcattgcctttccacttgaatagatttgtgcaacaagtcttccatctccacataatgctacaattctaccatattagctatctctttctttatacctccaatgaatctggccatagttgcctcacagtcttcttca

SEQ ID NO: 21106 - DNA, 429 bp, Glycine max
  unsure at all n locations
ntanacttgatattggatagtttacaatctgcattcagatttaaaagtcgtagacaatcaacttccgaagaagaagaggaggaggagtattcatgtgcaagaagacatggaagaaggcaaagaggtgaaccaagaagagataatcattttgggagcattaagatggcaacccctatgtttcaaggtaaaaattatcctaagttgtatttggagtgggatagaaagtttgaacatgtgtttcattgccataattatttttgaggaaaaaaatgttaagctagttgttgaattcaccaattatgctagtatttggtgggatcaccttatgactagtaggtgctcatcatagcctccatcattatggccattntctctttcatggccttcatcattatggccattttctctttcatggtcttcatcattatg

SEQ ID NO: 21107 - DNA, 405 bp, Glycine max
  unsure at all n locations
agctnttgatgtcatatatgaaaataggctcttcgccgaaatttccggttgttatgaacgccgataatgcaaatggggttatatataccaaaaatatatagtgcaagaataaaagttaggtgcacattttcagtatttaaagtggctttataattgatgggtaatcaaaattaaaattttacccctatattcaacgtcaattcctaaatgttgattatacgaattgtttaagatgaaactctgattttaataagaaaaaatattaaaaatacttaagaaactccgtcaaagtgtttgccatagtgcaattagcatagaaataatatatcaaggctccaaactctttttggnggcaaatcccttctgctgttggtagatagcaaccattgtcaatgtgattttgaa

SEQ ID NO: 21108 - DNA, 443 bp, Glycine max
ataagttagttataccatagtctaaatattaatatcaatttatggaaaactaatgatcaatgttacatgcacaggtataataaattataaattatgaatatattgaaatattaatcatcgtgtatgaaatatttactctaatacttattaacatttcttttcttggaagctgcgaagccactaatgatttaatttttttataggaattcacttttttaattttcataataaaaaatgattttaaataaacaagtcatttgtcaaaaatgttattataaggaaaaatttactagaaataatcaatcaaaattactcatcaatagatacttcattaaattacttaaaatataacattatagtgatcataaattaaaaggatataaagcataaatcaactactaaccaaatcctagaaacactgcatgtcccagatacaaaatgat

SEQ ID NO: 21109 - DNA, 408 bp, Glycine max
  unsure at all n locations
agctttaagcaaaatcaatcaacaataacattttactctcctgtccgattgtctcccgttgtatatcgagacgttcgatattcagaatagaagctctgagcaaaatctaatgacaataacttttttctcggatgtccgattgtatcccgtagtgtattgagacactcgaaattcagaatagaagctctgagcaaaatcaaatgacaataactttttactcagatgtccgaatgaatcccgtaatatatcgagacgctcgaaattcagaattgaagctctgagcaaaatctaacgacaataactttntactcagatgtccgattgtgtcccgtagtatatcgagacgcacgaaattcagaacagaagctctgagcaaaatgaaatgacaataactttttactcggatgt

SEQ ID NO: 21110 - DNA, 445 bp, Glycine max
  unsure at all n locations
cgaattcagatcgaattgaagttagcttagctgaaccttggccagcttatcggaatgattcagcctcagatgcaagggttgggcgctaagtgcttgagactcatggcttagcgcatgaacagagatgcgcttagccgcaggcttgcgtttagcgaaaggactgttttttttttttcagaaaagtgttttctaagttatttttcagtcctttttccaagaaattgaaacccttgtgttaaacattcaaagataagctgatatactcctatgtacaaattatacagcaagttccacatgatataatgcatgaaaaaacagagataacaaaaattaaaactgggttgcctcccaagaaacgcttctttaatgtcatgagctngatgcttttatctcactgggtgatcanatgaacagtgccctgtgtccttgtanattcttcatcatg

SEQ ID NO: 21111 - DNA, 414 bp, Glycine max
  unsure at all n locations
agcttgtatgattatggggtacccatcacatgtggtactaggtggcggtcgggcgatggtgcacaacaagtttttccacatccacaaatcgcgcataaacccaccatcccctgttgcccacctccaactgagctcacgtactcccacgtagcccatatcctcgtttctctcaacaccgggtccccatcaatcctcccaagcttccccaacatccaggtaattcaacattcaaacaacacaaactatcacagccaataaaacagggcaaaggcagaaaactctgcccaaaacaccaaccaaaatcacagcttttcccacttaaagaccccagtaacatttccttcgtttcaattcgttaaccgttggatcgactcgaanattttactggaagtttctagtacataagcctacatt

SEQ ID NO: 21112 - DNA, 450 bp, Glycine max
  unsure at all n locations
tgaaacttgagtgctattgatatgaatattgtgtggatttgcctcanaatgtttctgcagcttatgaaattttatttcattggcttcttatgttttactgtggatcagaatcaattaattatgagttgctttcagaaatgtctttgtaccatttttctgttctgtttgaagtgattctcagcttttatgagatttagttttggttattgtttaaggttatgtttggtttttgcttttctaaattccctttcatgaatgtttggttactttgcaagtatgttgtatattaatttttttttcttctgaaactcaattttataaaatcaaaacttgatttatttttacaatttcaatttacaaacaactatgaacttagttagaaacagaatttaaatattttagtgagaaaaaatagtctataataccttcatagaaaaaaatattacctat

SEQ ID NO: 21113 - DNA, 415 bp, Glycine max
  unsure at all n locations
agcttgtgcattcaatatcctaatgagggtgttccatatgctctcaaaactggactaatacatttactgcccaagtttcatgatcttgcatgtgaagatcctcataagcatcttaaggagttccatattgtttgttccaccatgaaaccccctgatgtccaggaagatcatatctttctaaaggcttttcctcattctctggagggagtggcaaaagattggctatactaccttgctcccaggtccattttcagctgggatgaacttaaaagggtgttcttggagaaatgtttccttgcatctaggaccactgccatcaaaaaagacatttcatgcatcangccacttattggagagagcttgtatgagtattgngatagattcaagaaattgtgtgcaagctgtcctcaccacc

SEQ ID NO: 21114 - DNA, 420 bp, Glycine max
  unsure at all n locations
aaagaccttttgatcctcatgtgcttgtgtttatgggtttattgtcaattttagaatcttgccaagtttatgtggtgtttgttttcatgggtgctttgagggtaaatagtagcctagacacttgaaagatagagtgtatatcttgtgaggctttatcacttttcattcttcaactgattaactattttgccatgattgggttgcttggatgattttcatgaatgtcttgacttttcggatctccttatgttagatgttacccattcctttcattccttgatgttcattgaaaaatatgtgaatgtttttgtttgcctctctttgatatccttggattttgttctttgcttcattttgcccaagagttgcaaaggctatgtatggngggttctgatgtgccatcattttcttctattttct

SEQ ID NO: 21115 - DNA, 409 bp, Glycine max
agcttttaatgaactttctcttcataataaaattcacataagtgttttgaggcataaaacacacgtcatacatatgattcgttcagataacaatcaatgtatattgatgttctcctttgggtgtacaccaacacacaacatacaaacatgatgatgctaataaaactcttaacattatttgacaattaaatatgcatcaattagtagtacctatttcctttgggtatataagtaaaactaattatacacacaaataacttacaattatattcattaattataagaacaactaatcaacctttgggcgatccataaatgccttataacaatgaatttcaatgtacccataaaccaataatcatataatttagcatccattattctatgagtaattgaaataatcattaat

SEQ ID NO: 21116 - DNA, 443 bp, Glycine max
  unsure at all n locations
tccatcaagtggtatcagagcacaagagcttcaagtaggtgttccttaaacctccattgaattgtttgctttaccttctcttccattgttgtttcttcattttttctccatgtatctcctcacatgtcttgtgctaaatgttgttaacatgattctttagagtttccaccaattaaacttgctatagaagcaagatttgattttctatggttcanatttcttgttcttgttcttgaaccatgaattgtgttgagtttaggttcctttgagttttgtcttgttattttttgttgctgaaacctaaatcataaaattcttacaaaaatattaaagtagaagaaaacctcaaaaatctagagtgacttgttcacctattgtagttntgtcatagaagtcatgtctagtcatgaaactngtcacataagatttcttatgttgtgctg

SEQ ID NO: 21117 - DNA, 411 bp, Glycine max
  unsure at all n locations
agcttgtctcttagttctacatattttcataatgaatatataaataacaaaggctagtaaaatcttcactatcaatttaaataaatgagctatccgtgggccattaatgttgagcttgtaatgcttgaacttgactcatttaaataattgagcctatttccaagcttcactttgtttatttaattaaacaaatgagcttgattgagcatttaataagttgagtttgaatagttcaggaatagctaagctcatttacatccctaaatttattttattttggaatctaagttccttatgtggtttagcccaagagcatggtaaatgtacatcatatgtggcactaactttattagttntttttgtctttctccaatctcattgctgttagcatatctaatgtaatatcaaatt

SEQ ID NO: 21118 - DNA, 427 bp, Glycine max
  unsure at all n locations
ntacaaggacaagtccaatcatattgtctttgttgagtgcttttagaagatgcaggaaaatcccataccttagcaaagtgagcatgcattangcatgcttgaagataagttgcttttcttgcaagccgaaagaaggcaataaaattacccgttcggcacgctctgaaaaggaaaacaagaaggaatggtcagatcgcaaacatgataaccaaaaaagaaacaaaaactaacttctacaggaatttcaaccttgctacactgcgagcaaatagaacttctggagtctgccttattgctggagtcatcttagcaatttcaagggagagctctgcaggttcaacctagtatgacatgcttagttccttggttntttcgtagtgaataaagccatataaatcanagcactacagaggctacttactttata

SEQ ID NO: 21119 - DNA, 408 bp, Glycine max
agctttatcttctcaaggaagcttctcaaggaggtgagcttagttttcagatgggtgtgtgtagctaagctctagcttctcaaggaagttttctcaaagaagcttctctaggaagttttttcaagaaagcttcttaaggaagctacctagtctataaatagaagtatgtgtaacacttgttgtaactttgatgaatgagagtcttgtgagacacaactcatagttcaacttctctccctttttcttccttcaatttcgtgctcccccctctctctttctctccctctttctttatctccattgaagcatcctctccaagcttcttatccaaggctcatcttggtggtgaagctccttcttccatggcttattccctattggatgacgcctcctctcacctcttctcct

SEQ ID NO: 21120 - DNA, 452 bp, Glycine max
  unsure at all n locations
actcagctatgtgccaagggtgtcggggttattgctaatctgcacctttggtgaaatatattaccaaaggtttgggcttcgcaagactgctctccctcgcggactgcatgcagatatgctgctcttctcttccctcactgccgacttccagtcgaccttgatctatcatctgctgtaacaattcctccacttacaaacacgtttccatgttatgcagctcgctggaatgcagcaaactaaaatcctccttatgcccaccatggggaatcacacctccctnttgtagggcctcaatgataaacctcctaggggttgccacatcctttaaaggttagaccggcagggcctatctgacccaatggcgttaaccgccccccctccatgattggcgaagcgggttggtttcacgttgggccgatcctcttggaacgtcagccatccagcatctatca

SEQ ID NO: 21121 - DNA, 410 bp, Glycine max
  unsure at all n locations
tgctgtgtttttttgattntagataaaactaattgtgtgaaatttattttgtttgaaactaatttataagtgatatgattaatgtttagatattttcattatgaaacttaagagtaaaatttagtataatttttatatcaaatctaaaaactattcaaaattatttaaacccaaaatcaattatagatccaaattcaattttcaaatcttctgtatgcataaaactaaagacaagagtatatctaaaataaattctaaactcaaaataaattcttttacatcaaactaaacacatgatgattntttatttttagttttgaatttataaaatattaaacctaattctaattctgagggtgatgtttcggttttaagatattagatgttgctttaagttgaaaatagataaa

SEQ ID NO: 21122 - DNA, 448 bp, Glycine max
  unsure at all n locations
tctaaatgaggggggaaaatgcgtaattttccagcatgtnctttaacgcatttgtataatatttaggcatcatttagcaagagttagtatgctatctaacaccacagcaatgcccttacagccatgctatgctgactggaaaaaatacaattgaaagtgcaggttcctgttgcatacaggtctgacccaacggtgatgctgtgcctgtacagtttcaaagaaagtcaaattttacctgatgtgcaaagcgagagttctgataaccagtcttcatcagctggccccatggctcgtgaaactgtataaagtaaattgcatgaattctagtgtccctgaccagtagaaacagaacttataatattgggaaaaggctaaacctcttctaccttntggtgtaatattctttgagcttcttgatgacttaatcgtactctctctctttcaagct

SEQ ID NO: 21123 - DNA, 393 bp, Glycine max
  unsure at all n locations
agcttaacatcagaccacttccagggtgctggaactacttcacatggacttgatggggcctatgcaagttgaaagccttggaggaaagaggtatgcctatgttgttgtggatgatttctccagatttacctgngtcaactttatcagagagaaatcagacacctttgaagtattcaaagagttgagtctaagacttcaaagagaaaaagactgtgtcatcaagagaattaggagtgaccatggcagagagtttgaaaacagcaagtttactgaattctgcacatctgaaggcatcactcatgagttctctgcagccattacaccacaacaaaatggcatagttgaaaggaaaaacaggactttgcaagaagctgctatggtcatgcttcatgc

SEQ ID NO: 21124 - DNA, 458 bp, Glycine max
  unsure at all n locations
tcntatttagacctcgatcggtcatcttttctggccgacgccgactgtcatttttttcgagcaatatcggtgaataatatttttttgccgaggtgggctaatgttttcctggccaaataaatgggaacatgccagtttcggccgaaaagaaacatcggttgagctcgcacggaaaaacctagccgacctacgttgtaaattttttaggcaacaccaaaacaaaaaacttcctctaccgttaaaaaaaacattatcggccagcgtttgtaaaagaaattgcgcaatttcggctgaaagatatcaatcagggacatataacgaccgacaccggccattgtttattctatttaatccctgaataacaattggatgatgtcgattangaaatgttcgatcggcatcatccggtgaagcttcttttttagacctcgatcggtcatctttcctggccgacgccg

SEQ ID NO: 21125 - DNA, 405 bp, Glycine max
  unsure at all n locations
atcttgtattacaagcatttcaaacaagatggatgcctacccttgtagtggtactttttagttagttgtgggggtgatgtcgttgtttgctaccattgatggtggtcaaagaaaaaaatttccctcaccccactgtggacgccaaatgttctttctggatttggcaagatcttctcatagtggtgttcctttataagctcctccacgaattgtggtaagtggtaccatacttgcaaagacactttgacattcaagttaaaggtgcagaggtatgcaagcatcaatatgtangttgaaatcaaaatgaattacctgaaccacaactatcccttntatagtggtgagaatggattatcttatctcaatctctcatctaagactaatgtaacatgannaaatatgatc

SEQ ID NO: 21126 - DNA, 436 bp, Glycine max
  unsure at all n locations
tgtangccttggatcttgttcatcaatgtgtttccattgcttcttgaagttcactggcagcggaatggagaaggaagaaatatgattggagatgccacttcaaggagaagatgagtcaagcacaagctcactaccataggaagccatggataagagcttgaaggaggagaaaatgagtggagggagaaggagcatgaaaattctgtgcctcaaatgaggtctgaactttgaattataattctcaaatgatccaaggcctacaagctctacatggagctacatcatgtggtatcaaagcatcttcctctacgtgatgttctattgcttcctctatctttttgtttggtcaattcactttaattccttgttcttctccatgtatctcctccattgtctcgtggtttggtgatgtttagagtagattaaaaaagataac

SEQ ID NO: 21127 - DNA, 399 bp, Glycine max
  unsure at all n locations
agcttttgaagcactgtaggacaggtgcatgttgctgaatggaactatgttttcaattcctttgtagttctttttctatctttagtaaaatgtgatttgttctttgaatttcttcaacctttgtccaatgttcacttgattctaatttatagaatgagcaatttagatggtattattgttttgtctgataaagcagaatgttaaatgcaatttataagtatatatttatcagtaaattggcattcattcctgcaactcaatacaattaaacctattgtatctatgctaaataagaacttaaaatgaactatataaaattatttaattgcacgaatganattatattcatctaagagcttcaattatttgaattacgcagcaattntatgaacgctgttg

SEQ ID NO: 21128 - DNA, 422 bp, Glycine max
  unsure at all n locations
tgtatgagttagtttatgtgtagttattatttgaggganagatctttagatagttaagtagttataactagctgagtttgttgttgtaagctccctccatgtatgaaaactattcattgtaaatcattcaaaggtgatcaataatacaagtctcattctcaattctttattaattcccctctaaatagaaactctgtgtgtgtaaaccacccttgctccaatagatttggtatcaagagccttgtgcgatcaagggagcttctgctgaaactgagagaaacgttcattattattgatcattgttgctacaaccatggctgggaattcgtgttttctaagaaatttaccaatacttgatggcaagaattgtggacgatggaacattcaaatgaaggtaatattttggtttcaagatgttcttg

SEQ ID NO: 21129 - DNA, 394 bp, Glycine max
  unsure at all n locations
agctattcttcgtgggttgatgggttctgtctcatagaatggcatgatcactggctgacatgttctcaattaactcagttgcttcttctggggtcttcagttttatctttccccctgcagaagcatctaacaattgcttggtttatggtctcaacccatctataaacatattaaatcgaattggctcataaaacctatgggtgtgagttcttctcaataaacctctgaacctctccaatgcttcactcagagattcatcagggaactgatganatgaagagattgcagctttcccttccgcaatcttggactctgggaagtatctctttaggaacctttcaacaacttcttcccatgttttcagactgttacctttaaataagtgaagccacct

SEQ ID NO: 21130 - DNA, 455 bp, Glycine max
  unsure at all n locations
tcaacccctcaccctttctcttccattntgtgtgtgaagatcttcaatggtatgtgggggagttcttcttaatgaactcagttcttggtttcctttgggagaaggcaaccttggtgtaatgatcctccatgcgtccgcatttaaaaatcttaagttttgtgaaaagaaaatatagtttaaccaaatttgtttttgtgaagctgtgatgaattcttgcagactgcttgttttcttcttcattttttgctctatttgtgattgggagagttacaaataaaaaggagactctgctcaatctttttagaattttttcacaagcttaagtttagaaatttggggccatgagaatggtgagattgactggaagattgagttctctggactagtctcagtagttcaagcctatcttanaatctacccattggtttttcatgaaattggtctttntttgcttt

SEQ ID NO: 21131 - DNA, 390 bp, Glycine max
agcttggacaatggttgggaaatcttgctaaaatcctagataaatctcttgtaaaacttggatgtcgcagaaaagaacgtacttcccgcacagatgcgtcgtaaggaagagaagtaataacatcgatctttgccttatcgacctcaatacctctactagagactgaatgccctaagactatacctccatggaccataaaatgacatttttcaaagttaagaacaaggttagtctcagcatcggtcaagaactctacagaggttatccaaacatgcatcaaaggaagaaccataaacaatgaaatcatccataaacaccttcatacaactctataataaatcagaaaagatactcaccatgcacctttggaaggtgccaggagcgttgcat

SEQ ID NO: 21132 - DNA, 462 bp, Glycine max
gcttgagtgatattgtcacagaatacacttgaggcacctcctctatttcatccaccccacttgaattctagtcgcgcattagttaaaaaggtgtatatttttacagcattgaggagaaataataatcaagggaataatcattctattttcaaaataataattgttacagctgtcatgaattactagtagttagttagagggggtaagaaaataaataggaaagactgacagagggaggagaataataaatgtaagaagagttggcctctcaaagagctaagttaggattgatgcagctcttgctacttcatgtattttgataaagaactatccaaggaagaaaagtttgacttaagtgagctcaaattggatggactaatcactagagcaaggagtaaaagatttcaagaagagtttgtcaagagactaaattctctcatggagggaaaagaagaagaagtg

SEQ ID NO: 21133 - DNA, 411 bp, Glycine max
agcttgatccacctgcagttggcaaaatagtggcatatgtggaaaacaattaattaatacaacttttttgtgcaatggaaatgaaaaaaataaggatgatatcttgtaaatggaaacttggggattgtttggttggaccaatttatgcagatacatatacattggaatttatttttctgaggttaatttcagtcatgacctcttggaagtaattatgtcttttgcttctttggatattttgtggttcccattcctaattcattttttaatatctgccacagggtcaaaatcagagttttgatcttcctattaagaaaaggagtgacatctgtacaataatgtatactagtggaactactggtgaccccaatggagtgttgatatcaaatgagagtattattactctcttag

SEQ ID NO: 21134 - DNA, 453 bp, Glycine max
  unsure at all n locations
tattaaacaaatagttgattnttattgtaattntagctgtttatttgttaatttacagtccttatagtaaaacacaggtagaaacgtgatatataatttctctggcagtttaatttttgaagctgtgcatgttaaacaatccaagaagaggtgagtagttattatgagatggcgcaatttgcagctccaactaataaggctggttacgtacgcagacggagcacatggtccctcagagacttattaactttacttgtctaattcactgcttatggcgcatcacgtgcccctactcttaccattaaggacttggatactaattgcaaaactttntttctcctatttttaccagtaaggtcaagtgtttaaatagattgtaaattactagtatnntgattttttaatatgattatatacacattattggagaataaatgcaagtttctgtattct

SEQ ID NO: 21135 - DNA, 325 bp, Glycine max
agctataaattttgatttaaaacgttcagaaactgctggtaatctattaccatatatgtgtgatctattacacagggcaaattttgaatgcaaatgttatatagctgttgtaaatcaggattggctcactggtaatatatgacatcctctggtaatcgattaccaaacagtttgtagtatgcaaaggactgtgtaacttacatctcttggacaaaccttgtgctacttcaataggaagacccttcctatttaatataccctttataagactctatatactgtcttgatcatccatcgcgaatatcatgaattgcttggtctcgaa

SEQ ID NO: 21136 - DNA, 457 bp, Glycine max
  unsure at all n locations
tgtctcttcatatttaaaggcaatgaaattcttattttgcttatactccttgttttgatggtgaacttcatagactctcaagatgctcagtagctcatcccatgcaagatttttttttttatctcttgcttcttgaataactatggtctttggttcccagaccttagggaagctatatagttccaaaaatataatcatcanaataaataaaattatgacttagaaccacatattagtggatgttatccaaacctctctccatgtgatgtgtgtacaccaaagcttaaaagcttctcttgaagtgtcatgttgatttcgaacctcttagagcatccncaatgagaaatgcttacatgaattgtttaactttaagtaacgttgcttattattgtcaggccccactagtctatatttaatataanacaatattataagaatttactttctatattaaaat

SEQ ID NO: 21137 - DNA, 408 bp, Glycine max
  unsure at all n locations
agctntagtctctatagatcttcacacagcaaaatctctcagaactctctggaacttggacctttctctctctaaaatctctagacatgcaaagctctgaatcccagtccaaactccttatctaaaatctgatttcaggcttaaataggtgaccttgttcgtgctcgtgcgcttagcgcaattttggaccgcttagcgcacattagtgaatttcggtttagcgcgtgcctttgtcgcttatcggatggactgaagcggtgcgcttagtgagatgaagcggtgcgcttagcgaacctatacaactcatcttcttccagattcttccttgcgcttagccaatgagtgttacgcttagtgggcgctcgctaagccaatggactggcttagcgagaaggtgaanaacaacac

SEQ ID NO: 21138 - DNA, 445 bp, Glycine max
  unsure at all n locations
nttatccatgacttcctatggtggtgagcttattcttggctctccttctcctttaagtggcgtctcaaatcacctttactccttctccattccactgccattgatcttcaagaagcaaaggactccatttatgaagaagatccaaggcctacaagctctacatggaactacattataaatggagaatgtgtacagattgtagggctatcaacaacataactgtgaagtataggcaccccatttctaggcttgatgatatgcttgatgagttgcatgtgcaaacatattttccaaaattgatgttaaaagtggttatcaccaaatagggattagagaaggtgatgaatggaaaaccgctttcaagaccaagtttgggttgtatgagttgctagtgaatgcctttgngctcactaatgcaccaaacaccttcatgaggctaatgaat

SEQ ID NO: 21139 - DNA, 407 bp, Glycine max
  unsure at all n locations
agcttgtaatcgattacacatatactgtaatcgattacctgagcagattttcagaaaatattctcaacagtcacatctttttatgtggttcttgaatggctatcaaaggcctatatatatgtgacttgagacacgaatttgcgaagagtttttcaaaacaaaaaagtcttatcctcttataaagcaaaattgttttatcctcttacaaattccttggccaaattacttgtgattcaataaggaatttttgagtgctcaaattgttcaatctatctctttcaagagagatttcttcttttcttcttcttcattctgaaaagggattaagagaccgatggtctcttgttgtgaaagacatctaaacacaaagtgatgtgaaccttacngtgcacggatcgcttgataca

SEQ ID NO: 21140 - DNA, 446 bp, Glycine max
  unsure at all n locations
tattgctntagcactaattttcagctcgcttgngcgagctgtaactgccccaaagtgaccctttgcctataaatagccatcctaggggtgttttaaggggttccaaggttcagaaggtgagggaattttgaaaagagagaaagaagaggaaacaaagtcgaggcattgccgaattgcaaccgcgatcattccctatttcgttntcttgttctgtgttcttcgtgcaaccgtcagttagtttattttttttgtaattgaatgtgatctatgtacccttaggggtgcccccccccccttgttattttgtgcatattcatttcctccatctatcattgacgatctcatttttctttataaagttcaatcttaaccgatcactagtgttgtaaagttgtctttanagagattgaaagttaataaacaaagccaagataaaaccaactcat

SEQ ID NO: 21141 - DNA, 407 bp, Glycine max
  unsure at all n locations
agctntggagtttccaagtgccaattcgtcttcttccttagtccagtcttcttctggcttcaattcatcagtgggctttccttctgtgtccagcatcttgggatgttcccagcctttgatgacagctttccaggttctgctatccagtgatttgaggaaggccaccatccttgctttccagtattcatagttggttccatccagaataggtggtctgttcactggtcctccttctttctccatgttcatcagaatttatctccctagatctcactcagtgatttcgagtgttggctctgataccaattgaaattctgatactggngacagatgtcgtacaggatgtcacgacatcacgcttcagaacatgcagattgtatttgacagtgtgcacagtttaagcaagt

SEQ ID NO: 21142 - DNA, 445 bp, Glycine max
  unsure at all n locations
ntaacctcatcgtccctcacagtctttatatttgggagcgtatccaatccttgtgttcggactctcagccacttatgatagccgccgatgatcccattactgcttcccctaagctctctgtcctttcttcacgccgcatcccatgccttgcgaactccttggagtaccctcgcgttgtggtcactaaaaccccgtgcgatgaaaggcgtgatgctttcgtctaatggcgctcctctcatggggtagccaagctgtcttatggcgagaacgagattataattaatacaactccttgttcccatcaagggaacatttggacatccttcgcatgaagatagaatctcgattcttccttccttctagcgagggaaccaattaacagacgcccccccatgctagccaagagttggtcccaattcgcctttcctttntcgacgcacgagcg

SEQ ID NO: 21143 - DNA, 407 bp, Glycine max
agcttctccatgcaaacttcattaaagaggtcaggttttgtacttggcttgccaatgccgtcatggtcaaaaaggccaacggcaaatggcgaatgtgcaccgactacactaatctgaacagggcataccccaaagacgtgtaccctctccccagcatcaataggttggtcgatgaagcgtacgaattccaggtgctaaccttcttggatgcctacttcggatacaactagattagaatgcatcctctagatgaggagaaaatgaaattcataactaaaaatgtcaacttttgttacaaggtcataccattcggcctagaaaatgcaagcgcgacattccaatgaccaatggaccgagtcttcatacaacagatcggacgaaatgtcatggtatatatggatgacatg

SEQ ID NO: 21144 - DNA, 414 bp, Glycine max
  unsure at all n locations
tgaatatganaaaaaaaacgagaattaaatatccccatctttttatccaaacatctttggacgttgcttccaatatgcttcctcatgggcaaggagatggttgagcttatatttgataatggaaaattgaagagttggctcttcataataagcttctctaagggtctccaattctttttggtatgaatctatttggatgcaaaaagaatttttcagttaacatccccaagcatgcatgtctgaggaagattttccaagacttgaaaggaaatcatcattgggtgcactagtccacccctactcaaaaacaagatcaatatctagtttaaggagccaagagttttcaaagtagaatttgcttttgaacaaatcttttgtgttgacatcaacctttaaaatgattggagagtgatc

SEQ ID NO: 21145 - DNA, 402 bp, Glycine max
  unsure at all n locations
agcttctaagaattggggctgcaatgattgtgcgaaattctccatatagaataacagaggaccaaagaccctgtggttcctacttataacttatgaatagaacatgtgtcattgtgaaattttgaaactgataatgcttctctaaactgatgcatcacccttccctctttaactacattatcatctcataaactatgcccaccacctgcttgtgacaattcttacataaaactgaaaacaatgcttaagaatatgcgactaaaacaagtatgaacattaaacaattcaagtaattaagcatggcttcttcctcaaatgtatgttctgcagcaagaacaatctttcccttaagtcctaatttggagaanaataaaacttggaactaaaatngaaagcttgctt

SEQ ID NO: 21146 - DNA, 387 bp, Glycine max
  unsure at all n locations
tatttaattntcttttcctataagtgcttatggagaagtttatccaaacagggcatcaattgcatttcgttcattntgtttatttaattntccctactaagtctattcatgtcttgctgcaaattntattccaatttcttgtcttanaattttctgcattaactgccatgatctccttcattntgtattttaaaacaaatatgctctcatacgtaaagtaaatgttctcttcgaatagtttatgtttgacttaattcaatggcatttgatctatatggcgtggatctcacgtagtgggaaaaggttatgggtttgttgatgttgaattccatatataattaaaaaagaataatggatataatattctagagacccatgcactcattt

SEQ ID NO: 21147 - DNA, 379 bp, Glycine max
agcttctcaatagagttaggcaggtaactctgtaataagtcttaaactctatccctacatacattatgcaaaatatgcagttgccctccctgtagagcttgtaggccttggatcttcttcatcaatggagtcctttgcttcttgaagatcaatggtagtagaatagagaaggaggaaaggtgattggagatgccacttcaaggagaagatgagtcaagaacaagttgaccaccataagaagccatggataagagcttgaagatagaataagatgagtggagggagagggagatgatgggcacgaaatctatttctcacatgaggtctgaaatttgaagtgtaatttctcaaattatcaaagctgaataatatgcacaca

SEQ ID NO: 21148 - DNA, 435 bp, Glycine max
  unsure at all n locations
tgtaaaaatttatagtgacacccttcaacatacatatagtgtaacacaaattcacgtcactcagtttcactttccaaaggaattgtttaatttaaaaaccatagttggcatattttagaaaaataagagtctaagattatactaaaataggaaaacactttaaaagtttgtggggatttacagagactatttacaatgtcatagtaacaaaacatatttttccaaaactaaatttgcattccaagtacccttttcaaacttattttccttttgttggcaaaattctattntagtcgtaataaatcatttttaattaacaaagtaccttgaaaatntatgagaaaaatgaagcattctctttagagataactntacgacanttcattttcatgcatganatatatgcactanatcactaaatatatactttttttc

SEQ ID NO: 21149 - DNA, 404 bp, Glycine max
agcttgtgccaatcccacatggttggagcattcttgcaaaacagcgtgaccccaactggtctctctatgattttacctagtgagagtgacctaacttactagtgtatggtttgacttgttatgtactcctaggcgcccgacgaggtttttcaatgaaacggtaccacattgcatataggattgagtcttagtgtatttgttgcataacgcttgtgtattgatagatattgattgatttagtaatattgtgttttgatccttgagtacgtgaatgttgtgaaaatgaacgagacatgtgttgtgatgtgatgttacacgacaaagtggtggaatgacgcgaactatgtttaagtaagttgtatctcatttatatgatatgtatatctatgttgtctcatttctct

SEQ ID NO: 21150 - DNA, 438 bp, Glycine max
  unsure at all n locations
atagttntatgtcaagattcatgaatagttttatattacattctaattatcccttcatgccaaatcccttatggcttgaagcgtggatagtgtgcaatcccaccagcctcgtgcttaaatttaactttntattacaaaaattggggcagcacagattgaaatctagaacactaagtcatagaatctttgttaccatatactggacctattatcccaaaatcttgagctattaaagtgaagatgcatgatgattntatattacgtctctaactcccataatatttaacaatttggcacttggatgaataaattntgtttgacttctgtcatctttctgtgcttgtgtgtgtagaatgtgatagagagagatgaaatgaatgtctggagatcttgaattggaagtttatgtatgatttcacatgtcaattcactgactaa

SEQ ID NO: 21151 - DNA, 398 bp, Glycine max
  unsure at all n locations
agcttcacagtttattnttttcaaacttgagttttggaagaccaattactaagtctttcctaactagatgatataaatgatggatgttaatgtgttcaaccctacaatgccacaaccatgaatcatcatctatcttactcaccaagcaacttagctcatgaaaagatgcatgctcaacattcagcatataaatattacctattctcttaccaatgtggacaactttaccagatatggcttcacttataagatagcaatttctgtcaaactcaatcttgaaacctttatcgcaaagttgactaatgtttagaaggttatgctttagtgcatccatatgtagcacattctttatctgagttttgtgttaattccctatatttccttccccagttattttt

SEQ ID NO: 21152 - DNA, 452 bp, Glycine max
gcttcatgatgatgaatcaagttgattcaagtagttttgatgattacaaagatgatgacaaaaagcccaagagaatgatttcaagattgactcaacaagtttcaagaatcaagagaagtttgatttcaagattcaagagaagatgaattcaagattcaagagaagaaatcaagaagacttcacaagggaagtattgaaaagatttttcaaaaaacaaacatagcacagttttttttttcaaaacagtttttctcaaaattttctaagctaccagagtttttactctctggtaatcgattactagtttcctgtaatcgattaccagtggcaaagtttgatttcaaaagttttcaactgaatttgcaatgttccaattaatttcaaaatggtgtaatcgattacaagatattggtaatcgattactagtatatctgaacattggaattcaaatt

SEQ ID NO: 21153 - DNA, 412 bp, Glycine max
  unsure at all n locations
agcttgtgtgatgttgcgcgtactgatgggtaccatgagatgttttctggggtttgacccacgcgggtgttgaagagacggcatgggcatctccttccttcctttntgcccctgttgccccgattcttttggcattcgcgtttgtagaggaaacgtaatcaaactttcctcttttcaatccaacctcgattctttccccggcaaacaccagatccgcaaagctggacggcatgtaacccactagcatctcatagtagaacactggcagagtgtctaccatcatggtgatcatctctctttcaaccatgggaggagctacttgtgccgccaaatccctccatcgctgcgcatattctttanaggtttcaccctctttcttgaacatattctgcagttgagtacggtcaggagc

SEQ ID NO: 21154 - DNA, 446 bp, Glycine max
  unsure at all n locations
tctatggaggctggatctttgagctntaataaggtccttctttgtgattttttgtcatggagttgtagcggaagataaaggagaagaggttagaggaggcatcatccactagagaataagccatggaaagagaagcttcaccaccaacagagtgccttggataagaagcttagagaggaagcttcaatggaggaagagaatgagagagagggggtgcatgggaattgatggagattagggagagaagttgaactttgaagtgtgtctcacaagtttctcattcatcaaagttatgacaagtgttacacatgtttctatttatagcctagcacatgggaagcttccttgagaaacaatgaaggtagcttcccggggaagctagaggaagaaagcttccttgagaagttagaggggggctactcacacccctccaatagctaagctca

SEQ ID NO: 21155 - DNA, 413 bp, Glycine max
  unsure at all n locations
agcttgtgatgttgttgtttgttggtttggcctctggctctttcacttatagggatagtattttgcattgtgttatgttctgtaatttgcttggctttggtactagtttctaactaatgctctcatgaatgaaatatactattattaggtgctctcagtcatgggtattttagggatcatttgatgtagctatatgtttaaggacaccctcccaagacccactaaaccttgatgccctataactataccacccagctaactgcattttgatgatgtccatcagtcacctcgtcagacacatgtaggctgaagtagtaacttgtggttntgtggaatcgtgtccccaggattagacctctccagaggagcatttcgaaacaattatttggtctagaaaaggtactttgatgtaa

SEQ ID NO: 21156 - DNA, 462 bp, Glycine max
  unsure at all n locations
gcttctgcatgtctagagatttctagagacagaaaggtccaagttccagagagtttgagagattttgttgtgcaaggacctgcagagaccggagcttgaagaggaagttgtcctgagagcttgagatgtgtttgtgagtgagtgtgaggtcctagaggtggaggaaacatccccactacttgtatttcttcaatccttcatctttctcttctctttgttgtaaaggaagcttcccagttatggagagctaaatcgtctgttgtttcttccttgtaggtacttgatgtaaatacctatatatctatttaatgatgttttgtgtgttcactgtgctatcagaacttcattctaccatgcttttgtcttgatcatgtagatgcatgtgttaataggatcattcaacagtggaaactggtttgattcttanaacttgataaggcagggctagtttatcgtattatc

SEQ ID NO: 21157 - DNA, 412 bp, Glycine max
agcttggacgaataaggtgatgcacttaggaaacacaacaacaaacaggtatgaaaatgttcattttttattagggttgatgaattcatggattttaattgttttttgtgtatttgaaatgtagggttgaatttgctcattgttatttgggatgccatgaacaacatgataacgctgcaacacactgaagttaaggcatcctttgagacaaatacacatgtggttgtacatgtttttaaagttaccttatacaagaggctacttggcatggtatcaaggtatgctttaaatcagattgctgctgagtatggccgtgcacattatgctggaaaaaaacccttctcattgtggatgtgtgataagaactacccacggtcttccatctgcatgtgagctattgaagtatgctctt

SEQ ID NO: 21158 - DNA, 441 bp, Glycine max
  unsure at all n locations
ctcaagcttggatttcctttgctctggaaacctctcctttcttatgtgaacccaaacccatctctccagattggaaaataacctttttgtgccccttgtttgcttgtttaacataactctcattcttcttttcaatttgggccttgactatttcatggagctttttcacatagtccactttggcttccttccttatgcttaaaaactgaaatattagacattggtaacaaatcaagaggagttagtggattgaaaccataagcaacctcaaaaggagaacaactagtggtgctatgcacaaccctattatgagcaaattcaatgtgaggtaagcaaacttcccaatttttaagattctttntcaaaatggtccttagcaaggtacccaaagtcctattcacgacctccgtttgtccatcccgttgagggtgacaagtagta

SEQ ID NO: 21159 - DNA, 405 bp, Glycine max
agcttgtccttctattgttacattctccccacactgcaagttctgacttgaaaaaaaaaaattatatcatgcaaatgctccaaatgaatgtggcacgtttctttttcaattctcacaaagttatgttggatcatatctcccaaaaagaaaaagaaagaaaggaaaaagttaagttggatcatggtatgcataattgaatcaattgggcaaaaattgacaacacaacatgtgatcaataatgttttgttaaactatgaaaaagaaaggttttgttaaacggtgcatagggagttctgctttcagaatctactactattttttctgatttcagaatcaaaaccataaaaggctacaaacaattacagctagttaaccaaacagcttgcttcaattcctcatctcata

SEQ ID NO: 21160 - DNA, 446 bp, Glycine max
  unsure at all n locations
tgcccagagaaggagtccacggaggaaatgcttaccaccttttaagactggaaagcggtttctaatgactcctctgcggcctccacataaggcatagaggacgggcagctcaccaagatgtcttcttcgcctgatacgatgaccagatgcccttccactacgaatttcaacttttggtggagtgtagagggaacaacccccactgagtggatccatgggcgccccaacagatagttgtagggggggttgatatccattatttggaaggtgacttgacaggtgtgagggcctatctgtactgggagatcgatctctcccctaacctctcggtgggtgccgtcgaaggcacgaaccaccattgaccttggctntaagtaggaggcattgaatggtaatttctccaaagtgctcttatgcatcacattcaaactggaaccattatcgat

SEQ ID NO: 21161 - DNA, 410 bp, Glycine max
  unsure at all n locations
agcttgcacaacaagtaactaaatctgtttttgtttttttttacaaaataaagtaactaactaaattccactaatatatagagtgactactcagaaggaagggttaggcattgattaggtccatctaatctacctaattaaactatttacacaacacaaagcccaacttcgcaacccaattattaaagtgcagaggttctgacttccaagccgaatttgaccctcaaaatgacagaaatgacccaagctaattttgaaaaaattgaagatctttttcttagctnttcagagactactcacacaccccatttggagttctacaatgtactatagactctgcacaagacaaataggtcaagtgagcataaaattctaagaataagccacaattattaattaagcttaatcat

SEQ ID NO: 21162 - DNA, 445 bp, Glycine max
  unsure at all n locations
tcttatccaaggctcatcttggtggngaatctccttcttcttggcttattttctagtggatggcgcctcctctcacctgttctcctttgtcttccgctgcatctacatggtggaaaatcaccattaaaggacctcattgaagctcaaagatccagcctccatagaagccccacaagcaagcttccatcaagtggtactccaccttggaaaggatttgacctcaaatcccgaggttctttatactctgggctccttccctcaacacctgtaaaaagaataaaaacatatgtattagcggtgttgggttacagtagggtaaggtctgaaaacccctttcatggacatcttcccatgagggaacatggttcctcaccaattcaatgagtggtgctacaagtatagaagaatatgggacaaaccttttgtaaaagtttattaagtcatg

SEQ ID NO: 21163 - DNA, 405 bp, Glycine max
  unsure at all n locations
agcttggatttcctttgctccggaaacctctcctttctcatgtgaacccaaacccaatctccaggttggaaaacaacctttttgtgccccttgtttgcttgtttagcatagctctcattcctcttttcaatttgggccttgactctttcatggagctttttcacatagtctgttttggcttgtccttccttatgcttaaaaactgaaatattacgcattggaaacaaatcaagaggagttagtggattgaaaccataaacaacctcaaaaggagaacaactagtggtgctatgcaccgccctattataagcaaattcaatgtgaggtaagcaaacttcccaattnttaagattctttttcaaaacggtccttagcatggtacccaaagtcctattcacgacctcc

SEQ ID NO: 21164 - DNA, 443 bp, Glycine max
  unsure at all n locations
taaggagacaagcctagatgactatgtgattgacctatggtttaccctgtttaacatgccaagccatgccttttaggattagagttgcttttgaaattntaaccaaaaatggttaaagtaagtttaaaccaaaaatggaaactcatcctatcctaatcccttagatagaggtgtgtaaccttccttggattttgtgtaatttgagtgaaccttgcacaaagtccactctcatagagcaaaattacactgtcactcaagacatagtgtaattctttcacagatgaaactttagctcataaattntttatatctctctcaagctatgtattntaagacaattcctagttataatttgctaacacattcatactaaaaaacaatggtgcatacgttaactgatatctataaaaatatatacaaatacttaagtatttaatattaat

SEQ ID NO: 21165 - DNA, 412 bp, Glycine max
agctctgcattatcgagaggaagcacttcctccaccaccttgtgattatgagagataggatttgttggagggattttgctggagagaattgaagcctcaaaccagaatgaatctagcaacctcagaacatgttctgcagccattattattactgtcacaaaatgaatgaatagcttaaattgaaattagatcctacaaagatatgatgaggatagaggagattatagagataagattaagatgtgtgtcctatgtggctatttatattaagagtggcattacttaattgccagtggctctatatgctgttgttttattcccctattttattcgaatatgcaatatgggaaatctcacgaagctttcttcttatgtttgtctggttctgagaaaatgatgaaattaatatctc

SEQ ID NO: 21166 - DNA, 471 bp, Glycine max
  unsure at all n locations
agctctgtacgtctgatacttgctttacgcgtccttagatactcagctgttcggtggtctacacttacctcagattaaaagttttttctcttctttgatacataaatgaattggttaaatgaacctaaaagatggtttttttttttataaaaaacatttgggtaaagcagccaattcttaagatgctttggtatcccgctccaaatggtacattcttgttacacaactgttgttctgaacgtataatatattgtaatcaacgaaataaaattactatcaatcaaagatactagggcattaacataattatgagtggattagttggaattaaaaaaaaactgantaacggggttgattgaatttaactaaattcaattataacctttttctcagtaactaactaattacaaaaagcaacacaagactcgatgagtgtcttcatgccccaaaatatgatactatgttacatag

SEQ ID NO: 21167 - DNA, 387 bp, Glycine max
  unsure at all n locations
agcttatcaccacaagttatttctgctaagcatgtcttaaatagtaaagcattgtaacaaatcttgattttacacacacacacaaacatatagtggaaatacaagaaattataaactttaatatagaagtactagacattgccaatctgaagtgagggagaagaaaataagtactgttgaagatacacaagtacatactatcttgcactgaaaactggttctgtgtcaggtgatggttgtgtccttcgagtgtatttgagtagcaacccttctgaagaaagacctggtaccttcagatctctgaaacatctcataaggggttaattcanatgtaaaaaagatgatacgtntgaaggtaaaaataattatgagatgttcacctgatat

SEQ ID NO: 21168 - DNA, 394 bp, Glycine max
  unsure at all n locations
taactgttttgtaaaatggaacatatgaactaaatcatgtttgtgataacaagatatgttntaaaccaattctattatatgcatcaaagtatgaaaaatttcataaaacatgaaaactattttgttcatgaaaagctcaaattaacattttgaacaatagctttctgaacacaacattttgagtactgcatctgcataacataaattgggtttttcataataacagtattctaagagacattaggttctcacaattgggttttacataacattttgaacttgagcaaatgtgattgacattaggttctcacaaatcatatcaaacatttaataatgagtataatgactaaccacttagaaagcttagctatctaagtacttgaacctctatgtc

SEQ ID NO: 21169 - DNA, 404 bp, Glycine max
agctttatgctgttcaattgcttcagattgttgcaaagaaaggcaaaggtctgtgtggtggtcgacagaggagcataaaccacagagtctggcgataggtgcagttttttgattcatggccagttgggttaccaggttaaccaaggcatctagtttaccttcaagcttcttagtctttgctaatgaagatgaattcgtggctacttcatgcactcctctaatgacaatagcataatttctggcactaaattgctgggagtttgaagtaatcttctcaattaaatttctggcttcagtaggggtcatgtctccaagggctccaccactggcagcatctatcatacttctctccatgttactgagtccttcataaaaatattggagaagaagctactcagaaatct

SEQ ID NO: 21170 - DNA, 409 bp, Glycine max
  unsure at all n locations
tgagatgaggaagtgttaaagggtgaaacttcctgcttttattgttgaccacagagtggtacctggagatatgtcgcgngggtcaggagaccttgtggacgtcaggtggggtgctattgcccanaaccaagcttgaccaatcccgacccaacccggcatagtcggtcagtgagaacctgtgatgtacctaagcaggcgagctcctggcagtcaacagataaacgganaacaagaccacaaagcaaggaggcttgtggtggctggccaactgtgaattttgtgtgatatgtggattatgacctctggtaatcgattaccaagggtgggtaatcaattacaaggcttanaaatgaagacaggaggctaagatggtctctggtaaatcgataccaaggggtgtaatcgatta

SEQ ID NO: 21171 - DNA, 205 bp, Glycine max
agcttctatcctatggacttaccttgaattaattcctttgatagcccctttgagcctattttcccatttctttgttttgaagctcattacaagccttaagtgaaaaaccatgatatcaccttacccttaaggaattttggagctttggaattgttttgggaataagctgggaataagtgtgtggtgggggggggggttttaaaat

SEQ ID NO: 21172 - DNA, 349 bp, Glycine max
  unsure at all n locations
tatatatncaatagtatttatatggtctatntatgtatatgtgntatatttgataaatgaatagtttgaggtagtataagataacaattttgtatagtttagtttgaattgttaatgttatatatgccagattatnttttgataaatgaatagttttaggtagtataagataataattctgtgtaatttattttgaattgttaatgttatatatgccagattatattttgataaatgaatagttntaggtagtataagataataattncgtatagtttagtctgaattattaatgttatatggtagatatgatatacggttatatgataaattagtgtcgcaacctacc

SEQ ID NO: 21173 - DNA, 394 bp, Glycine max
  unsure at all n locations
agcncgctacattggataacatganaaactgtctttgcagagacagagagggaaagatgtgaaaacccagttacctaggggaattttgcgatccgctccgagtaaactacactagtttggcactaggtttgatgacatgtcaatgagttacttacagaaatgatccaacaattgaatcagctcggctaagggtctggttttcgattcaaccagccgggccgagccgagtttaataacactgattgngtgggttccttacttagtattgaaaatcctgctttcaatttgatagtaggtagtaaagttcttcttcatggagtatgtctcattaagattctcccgcatttcacaaatggaggtagaaaacatacaattacagcttattttttgaatc

SEQ ID NO: 21174 - DNA, 369 bp, Glycine max
  unsure at all n locations
tgatgatgaaccaagcaattntgatgatgccaaaagcccatgtgattgattcaagacttcaagatcaagcatcaagaatccaatccaagattcaagagaagaaatcaagacgcaacatgtcaagacttcatataggataagtattaaaagaatttttcaaaaaccaaatagcacagttttgttttacaaaagaattttctcaaaattntctaagctaccagagtgattactctctagtaatcgattactagttatcagtaatcgattaccagtgaccggtttggttntcaaaatgttttcaaatgatttataatgttccaaaatgattntcaagtagtgtaatcgattacactgtattagtaatcaatt

SEQ ID NO: 21175 - DNA, 412 bp, Glycine max
  unsure at all n locations
agcttgtatcggacatctgtgtgaaaagntatgaccattggaattttttatgagcttccattnttaaatttcgagcctctcaacatattatgcgcccgaatcggacatccgtgtgaaaagtcatgatcattngaatttctcgagagtttccgatgtttaatttcgagcgtattgatatattataaccctgaatcggacctcagtgtgacaagttatgaccatttgaatttgacgagagcttccgttgttcaatttcgaatatcactatatgtgatgcgcctaaattggacatccgtgtgaaaagttatgaccatttgaatttctcaagagcttccgttgttcaattctgagcgtctcgatacgtgattngcatgaatcggacatccgtgtgaaaagttatgaccatttgaat

SEQ ID NO: 21176 - DNA, 371 bp, Glycine max
ttcgtcttcttctattgtccagtcttcttctggcttcaattcattagtgggctgtccttctgtgtccaacatcttgggatgttcccagcctttgatgacagctatccacgttctgctatccagtgattcgaagaaggccaccatccttgctttccaggattcatagatggttccatccagaatgggaggtctgtacactaggcctccttctttctccatgttcatcagaattcatctccctagatctcactcagagatttccagtgcccgctctgataccaattgaaattctgataccaatgccagatgtcccacaagatgtcacgacatcacgcttcagaacatgcagattatatttgagagtatgaaca

SEQ ID NO: 21177 - DNA, 406 bp, Glycine max
  unsure at all n locations
agcttttccattttttgcctgatgcctgaaatgtcttttttgatgttagtggncctagatgcacggaagaatttctccaagaacaccctcttaaggtcatcccagctgaaaatagacctgagagcaaggtagtataaccaatcttttgccactccctccagagaatgaggaaaagccttttgaaagatatgatcttcttggacatcagggggcttgatggtgaaacaaacaatatggaactccttaagatgcttataaggatcttcacctgcaagaccatgaaacttgggcagcanatgtattagtccagtcttgagaacatatggaacacccttatcaggatattgaatgcataagctntcataagtgaaatcaagtgcagccatctccctaagagtcctatcac

SEQ ID NO: 21178 - DNA, 443 bp, Glycine max
  unsure at all n locations
actagtcacttaaaaagtttttgtctttcgtaaaaatctttanaaacaagtcactggaagaattgtgacttttggaaatgtatctatcgaaatcagtcactggtaatcgattaaatgtgactcttcattctgaattttgaanattaaaacgtttagaatgtctggtaatcgattacaagtgttgtgtaatcgattacacaagtttataatgatntaaaactgttaaacacaagttgtaacttttgaaattcgaaatctgaacattttaaactctttggtaatgattatgtgaaaacttcttgtggtattcaatgttctgacaagcttttttagtacttatcttgattgagtcttctcttgattcttgaatcttgagtcttgaatcttgatcttgattattctagaatcatgattcttgaacttgattcttgaatcttggattt

SEQ ID NO: 21179 - DNA, 404 bp, Glycine max
  unsure at all n locations
agcttgtttcttatatgttcatgaaggacaaggcaaccgaaggaactagttccgctccggagtatgacagtcaccgctttaggagcaccgtacaccagcagcgcttcgaggccatcaagggatggtcgtttctccggaagcgacgcgtccagctcagggacgacgaatatactgatttccaggaggaaatagggcgccggcggtgggcatcactggttactcccatggccaagtttgatccagaaatagtccttgagttttatgccaatgcttggccaacagaggagggcgtgcgtgacatgagatcctangtaaggggccagtggatcccgtttgatgctgacgctatcggccaactcctangatatccgttggtgttggaagagggccaggaatgtgagtat

SEQ ID NO: 21180 - DNA, 467 bp, Glycine max
atctatgtatctaacacccctcaatttattggattttcaaggtttgagaagtgaaaatgagaatggggtaaatttggagcaaactctcacctcacacgagtctatatcatcaatctaaacttgctcaaactggttttacgacgaaaattctaccgaatcaaaatttgactcctcaacacccaattttaccctacaaatggctcttgccttcattttggtcatttgtttttctctcttgcacagcccaagcttcctcataagtcctaaatgacatttcaaactaggattaactccctgtaacctccaaataccactaaatccagacttggccttccaactctcacagtctcactctatttccactcataacactacattctcactgtctaaccctatgttaactctacccttcatgcctagcagttttccatccacaatttcagcacataaacatcacaagcatcatc

SEQ ID NO: 21181 - DNA, 411 bp, Glycine max
  unsure at all n locations
ttcttgtgttcttggcaatttctttaaaactagtcacttaaaaagttgtgacttttgaaaaaatcttcagaaacaagtcacttgatgaattgtgacttttggaaatgtatttttcaaaatcagtcactggtaattgattaccattaaggtgtaatcgattacacatcaacagatatgacttttcattntgaattttgaaaattaaaacatttagaagctctggtaatcgattacaagtattttgtaatcgattacacaagtttaaaatactttaaaactgtttaaacataagttataactcttgaaatttgaaatcttagcgttttaaaacactggtaatcgattactaccttctggtaatcgattaccagagagtaaaactctttggtaatgattctgtgaaaacttctt

SEQ ID NO: 21182 - DNA, 405 bp, Glycine max
  unsure at all n locations
gaagctagatcttagctacacatacctctctaatatgcttatctcacctccttgagatgagaagctagagcttagctacacacccctataatagctaagctcacccccatgacaaaatacatgaaaatacaaaaaaaaagtccctactacaaagactactcaaaatgcctcanaatacaaggctaaaaccctataatacttgaatggccaaaatacaaggcctaaacgaaggaaaaaacctattctaatatttacaaagataagcgggctcatacttagcccatggactcaaaacctaccctaaggctcatgagaaccctatggccttcccttggatctctggcccaatctacttggagtcttctatccaatgcccttggagggtaggattgcatcacctatcac

SEQ ID NO: 21183 - DNA, 413 bp, Glycine max
  unsure at all n locations
agcttcttatttttttcctataaataggggaaggagggaagaataaaaatgttcaaccctcctggtatttgagattcacttaaaattagtgagaaaaattgtttccgtgaagaaaattcaagccgaggcgcttccgtaacgcttccgtgacgtttccgtgggtgattttgcaaagattntcaaccgttcttcgtcgttcgtcgttcgttcttcggtcttcaaccggtaagttcccgaaatcgaacttttcaattcattctatgtacccttagtggtcctcatttgtttcgcgtgcttttattttcatttcatttactttctgtacccccttatgacgtgcgttagtcatttatttaagtcattatctcgcctaatcgaaaaataaaataaatttccaccgatcattcgtattg

SEQ ID NO: 21184 - DNA, 404 bp, Glycine max
  unsure at all n locations
ctatagaacactcacgcttgttganatccatggtttttacatagganacagnatctcataaattttatcctttttacatagngttctagagcaacaatactctgttttgtttataatgaaatctggaaccaattctaacactagcaagaaagctccaattctaggagctatggggaaatcttagtgctgtgcaagaaacaaggagggttcatgatgtagcataccgaatggagggattaacagaaaagttaaaactttggagaacttggtaccacatcagaaaaccaagactcgcacttgaggatgaggaagactggagagatgttagagcgcataatggcttcccccaacaggggtcccaaaacatctgcagggcattcagagggcaatgcagagcataatac

SEQ ID NO: 21185 - DNA, 406 bp, Glycine max
  unsure at all n locations
tgttttatgatgaatcaacaatgaaacaaagggggggngatgattacaangangacaacacaagaagaagacaaaggggangaacaaaaagctcanaagatcaaagaacaactcaagggaatcaagaacaactcaagagtncaagaatcaagatgaattcaagactcaagaagaaagtctacaatcaagaatcaagattcaagattcaagatctcaagaatcaagatcaagattcaagactcaagattcaagaatgaagaaaatactcaatcaagataagtattacaaaggtttctcaaaactatgaatagcacatgagtnnttgacaaaacctttaccaaagagtttttactctctggtaatcgattaccatattggtgtaatcgattaccagtagcaaaatgag

SEQ ID NO: 21186 - DNA, 144 bp, Glycine max
  unsure at all n locations
ctnntgaatgggctctattcaatgnnngagttgacaagaaaatatcttctttatctgttatcatacacatgcccacagtggccaaagatgcagtgggtagatctctgannaannncactcatgataggatacctcnncaaagtg

SEQ ID NO: 21187 - DNA, 364 bp, Glycine max
  unsure at all n locations
atttngtgatttatatcttgnatcggattaatcaattactgtcttatcataatcaattacatagttgtttttgagacaatgacagatttattcaggagtctctactttaattgattaccatgtgatataatcgattacttctctttctgtaagtgattcagatgtgaacaaagacactttaatcgattactttgagtatctaatcgattacattgttcttgagttgtntccgggggtnnggaaaaacactttaaacgattaaaaagataatctaatcgattacttcattgaattagtcaattacttcttcaattatgcaaggttttgcggacaggattgatcgggtggtatctatctatactct

SEQ ID NO: 21188 - DNA, 131 bp, Glycine max
tctataatactcagcttgaaatcgattcttgagaggagttgcattacttctttattgcctctgcatgtactagaatctggccttggcttgaagctattgcatgtttaggaacttctagagagagaaacgtc

SEQ ID NO: 21189 - DNA, 208 bp, Glycine max
ttcttgttgccttggatcttcttcatcaatggagtcatttgattcttgaagatcaatggcaacagaatggagaaggaggaaaggtgattggaaacgccacttcaaggagaagatgagtcaagaacaagctcaccatcataggaagtcatggataagagtttgaaggtaggagaaaatgagtggatggagagagagagggggggggggg

SEQ ID NO: 21190 - DNA, 455 bp, Glycine max
  unsure at all n locations
tccgttcccgagagcatctcttatttaagcatttcagcctttgttttcgtgtagcttaggaaaaacgtcatttcttcttctttctttcttccaaagccatttctaaagttccaagaactttctccatcacccacaaccaccattagccaccacaaaccatcgttgttctccacatcgagaggaacccttcaaccgaagcggaatcttccaacttggcttgcggtttcggtagagaacgaaaccctaatctgacctttcattttctttcgaggtaaccatggttctacgcttgtttcttgttagtttcatcttgtctttgcatcttttctgactttggaaccgccattgtatgtcttatgcttcctttgaaaaacttttgagaaagagactntgtaaacgttatcctttcatgaaatgcatgttattttcgtaacctacactgaaccccggtcaca

SEQ ID NO: 21191 - DNA, 371 bp, Glycine max
tttcttttttgttcaattatgagtgggtcgatatatgatgcgcctgaatcggacatccgagtgaaaggttatgaccatttcaatttctcgagagcttccgttgttcaatttcgagcgtctcgatatgtgatgtccctgaatcggacctccgtgtgataacttatgaccatttgaatgtctcgagagcttccgctggtcaatttcgagcatctcaatatatgatgtgcctgaatcaaacatctgagagaaaagtatgacaatctcaatttctcaagagcttccgttgttcaattccgagcgtctcgatatgtggtgtgcctgaatctgatatccgagtgataagttatgacaattttaatttctccagagct

SEQ ID NO: 21192 - DNA, 414 bp, Glycine max
  unsure at all n locations
ntcgagaatntaaaattgtcataacttttctctctgatgtccgattcatgcacatcagatatctagacgctcgagattgaacaatggaagctctcgagaatttaaaattgtcataacttttcactcggatgtccgattcaggaacatcagatatctagacgctcgaaattaaacaacggaacctctcgagaaattcaattggtcataactnttcactcgtatgtccgattcaggcgcataatatattgagaagctcgaaattgaacaacggaagctctcgagaaatttaaatgatcataacatttcactcggatgtccaattcaggcgcatcatatatcgagacgctcgtaattgaacaatggaagctctggagaatttaaattgtcataacttttcaatcggatgtccgattc

SEQ ID NO: 21193 - DNA, 372 bp, Glycine max
  unsure at all n locations
tgctttttgcatgagaacaattctcaagttgtggtaccaatcatcataattggctccgactagtttttcagattcaagaataccacgaagcgataagcgatagagaagatatactgttgattaagcacacaacaaaatataattatgtcagagcataatttttcaaaccttttaaaaaatataaaaatattaatgatatttctaataataatattgaaatgtaagagatacttatttcttttaagtggatcatataaagcctcttacaaattatgagtgagccacttggttatcaagttgtttctcatacacattataagacaatgtatcatatacattttcanatcaaaataaaaaataccatatcacata

SEQ ID NO: 21194 - DNA, 467 bp, Glycine max
  unsure at all n locations
ctanatgggtattgaatatgaattttatcttctgcagctngcagtgttatgttatgtgttttgtatttattctatttagatttgtttttctatgttttgcttttccgtaatatcttgtagtggttaaagcgtgtatatcagagaaatatatatgggatctatgatggttntcagagactgcattatctatctgtagtttcttcaaaggagttgaagataatcgtaattgactgagatcttgcttggcttgtagttttcgtcgattccattttgatttttgggggagaaaactatgcgttttgggtcacacttgttggcaaaacatttgtttaacaatctactatttcttcaaggtgcttcatataatggtattgcagtcttgaattgagtctcttgagttatcttgngaaatgatattttgaatacaattgtaaattttgtgatgcanataactaaataatctgatg

SEQ ID NO: 21195 - DNA, 382 bp, Glycine max
  unsure at all n locations
agcttgtctcctctgagttttccgactatgctcttgtgtggtggaacaagctacaaaaggagagagcaagaaatgaagagccaatggttgatacatggacggagatgaaaaagatcatgaggaagcggtatgtgccggctagttactcaaaggacttgaaattcaagctccaaaaactaacccaaggcaacaagggggttgaggagtatttcaaggaaatggatgtgctcatgattcaagcaaatattgaagaagatgaggaggtaactatggctcgatttcttaatggtttgactaatgatatccgtgatattgttgagctgcaggagtttgttgaaatggatgatntgcttcacaaagcaatccaagtggagcaacaatt

SEQ ID NO: 21196 - DNA, 404 bp, Glycine max
  unsure at all n locations
tactcaagcttgaatcgacatccgtgtganaaggtatgacgatttgaatatctttagatcttccgttgttcaatttcgagcttctcgacatattatgcacccgaatcggatatccttgtgaaaagttatgactatttgaattttccgagaatttccgatgtttaatttcgagcgtatcgatatattataagcttgaatcggacatccgtgtgaaaatttatgaccatttgaatttctcaagagcttccgttgttcaatttcgagcttctcgatatgtgatttgcctgaatcggacatccgcgtgaaaagttatactaattgaatttcgcaagagcttccgttgttcaattttgagcgtctcgatatgtgaattgcctgaatcggacatgcgtgtgaaaagtata

SEQ ID NO: 21197 - DNA, 403 bp, Glycine max
  unsure at all n locations
agcttcttggattataaacatgggaccaactcattttatttcaaaaaagaagtcgtatctagtcaaggtcttagagaccatacaagtttcctaacgatttctaattatgtgggccattaagtctatcatatgctgacaatagccgagaagcccatgaatctcttcaggggcggagtangtgtctgccattgccttggccttggctaacaatcggggaagttcttgactcccgttcaaggtaagagcaaaccgatccatccacatggttgcctcttggtgtaaagagtcgatcacccttcctctagcctctttttccgcgtatacttgggcatattcgtccgcaatcctatgctcgtgggccgcggctagacctaactcttcttggtacttggcgatgatagct

SEQ ID NO: 21198 - DNA, 468 bp, Glycine max
  unsure at all n locations
ctcagctttactatgtggcgggcgggtttcttactttcttgttcctcgtgagctctgaccactgtcttcttcccgcgatgcttcttttatgtccgcctgagtgggcttatagcctaaaccatacttcccacgattcccttgggtttttatcagactagttatgccgccattgtctttgcctaaacccatcccggcttcataaccgttccccaacataactcgggccatcattaccgccgcatcggacagacaaggttgcccaaagagggagtccacggaggaaatgctgaccacctcaaaagactggaaagcggtttctaacgattcttctgcggcttccacataaggcatggaggatgggcagcttaccaagatatcttcctcgcctgacacgatgaccaagtgcccctccactacgaatntcagctnttggtggagtgtagaaggcacaactcccactgagtggat

SEQ ID NO: 21199 - DNA, 410 bp, Glycine max
  unsure at all n locations
agcttgtttaataattnttcaataaaatattaattgttattcaaaaaaattattagacaaaaaaaaactttattttaaaattcgttntagacctttaaatgtgttgggctgccctgcataggtttaagagtggttggaagaaaaagggggacaatgacaaactttaatagtgaaaaaaggaaggaaatgtaagggaaaaaggaagagaaacatcgaggagaagaagaaaaaaataaggtaacattgtcatgtactcgacaaaagagaatgcatacatactataagtaatgagttntttttttttctctttatttatttttatcttanatatcaatttgatcaacacgattatgtgataatctcttctgatcgacagagtcttgaggtcaatatttgacctatgctaaaat

SEQ ID NO: 21200 - DNA, 304 bp, Glycine max
  unsure at all n locations
acaattctaggcttgaaagatgttccaatgactctntcgtagcttccacatagggtgtagaggatggacaactcactagtatcttttcttcccctaacactataaccagttgtccttccgccataaacttcaatntctagtgaaacattgatgggaccaccccaacagaatggatccaaggccgacctagcaggcaactntaggcggggtttatgttcattaattggaaggttatctggcacgtttgtgccccgatttgaattgagagatcgatctctcctctcgcatcatgttggctaccatc

SEQ ID NO: 21201 - DNA, 397 bp, Glycine max
  unsure at all n locations
agcttcttgcgttccgctcttggtgctcagaanatcccaaaaacaaatccctcttattactagctattttgaattctttagttcctgaatatacaaccttcaaattgttgctcgttcccctctttgagaatgaggaggatcttcataggacttcatccagctgatgtttgtcngcantttcatcatccaccacccttttcttctgtgccttctcacgttcattggtgttaaacccatatttatgccttcttcccttcatgtcttggttgatcacaactttagctgaatctcccatcttcagcatagttgaatctcctatcttattgtcacatgccacattatgatggcctgtatctcttatgatcgtatgttccactggctcaccttcacaatgcat

SEQ ID NO: 21202 - DNA, 416 bp, Glycine max
  unsure at all n locations
agcatgcgttgatgttgaatatcttatagcacttagcatcaggtggagttgataacaaagctgccaaagctgcaacataccttattattaattggagcatgtgttgatgttgaagaacgtaaagcacttagcttcaggtggagttgataacgaagttgccatagatgcaacattaaattctgatgccgtttgatttagttcagtctctacaagaaattgaattntttgctccactgttgccatttcttgaaaacattnttcctcggttgttgccatttctttgtcgcattnttcttctatctcnttgaatttatcatttaattctttcacctttntcaacatgtctttnttcgattnttgaaattntatttatttttcaagagagtangtgtcgtagttnttctgtgacaatgtac

SEQ ID NO: 21203 - DNA, 417 bp, Glycine max
  unsure at all n locations
agcttgtatgcttgtnttctaccttcttctcatagtagaacaccggtaacgtgtctactatcattgctatcatctccctctccatcattgggggcgctacttgagctgccagatcccttcatctttgggcatattctttgaaagattcatgctccttcttacacatgttctatagctacattctatccggaaccatataagaattgtactgatactgcctaatgaaggcaaccattaggtccttccaagaatggactcgggaaggtttcatattagtataccaggtgacgacttccctagtaagactttcctagaagagatgcatcaaccaattttcattttttgagtatgcccctattttcctgctatacaccttcaggtgattcttggggcaagtagtcccattgtatttatcga

SEQ ID NO: 21204 - DNA, 426 bp, Glycine max
tggagatgatgcttcaatggaggataagaaagagagaaggaggtgtcactgttattgaaggtataaaagagggagagaagtggaactttgaagtgtgtctcataagactttcattcatcaaagttacaacaagtgttacacatgcttctatttatagactaagtagcttccttgagaagcgttcttgacaaaacttacttgagaagctactttgagaaaacttccttgagaagctagagcttagctacacacacccctgtcataactaagctcagctccttgagaagcttccttaagaagattcctaaagaagctagagcttatctacacatacctctctaatagctaagctcacctacttgagatgagaagctggatcttagctcacacccctaatatagctaactcaccccatgcgaaaacatg

SEQ ID NO: 21205 - DNA, 355 bp, Glycine max
ttcttgttttattttaaaaccaaggccaccatcttttgtgcaatttgattgcatgttgactttggtagcatgaaacatctcatcacataagaaggaatagcttgcaccactgactttattaggccactcatcctgcttttgaaaacgtcttctccttccaacctttcagcttcttccaaactctatctctagcaaaattaaacacttgagtctttgatctccccaaaatggttggaagacccaaataatttacatgtctctccactgcctttaccccataacttatcaagttcatcaattctggtactagaacacatttggatacaagagagctaagatttctctagattgatcc

SEQ ID NO: 21206 - DNA, 426 bp, Glycine max
  unsure at all n locations
tatactcnctccatcccataataatagtcgtgtaagaaaataattattgtcccaaaataattgtcattntagctcttcaatataatattaattgttttttttcacttatatcccttataatattaatgatatggactacaaaaactaaaaatgaattaatgatgataaggttaattttgtaaaattattattctttttcatttgcttattagttcttcttggtctgagtaaacaaactggtatgggacgacaattataatgagatgaagggagtataaactctcatccgtggtgcatacagacacacaatttcagttcaatgcctttgtttcctctttcttaagatggtattggagcctatcctaaatctattaccgataacctaccatattatccatgcaccanacccaaaaagtactgggcgtg

SEQ ID NO: 21207 - DNA, 417 bp, Glycine max
  unsure at all n locations
agctnttgtagattctgggtgntcttttactttcatatgcaaaagtgttcagccccaacataattgttttcgaagtaacataataactaaacctaaaactatgtttggagacataataaccaatgacacagaaacaaaaaattttactatccaattatctataaactgtgatatctttgacaacaaaatctttataaataaagcagatgttgtagatttacaaccagccaaagaaaaaatgattntaggactcaattttattgtacatgataatagatcaatcactattactaaggattatntattgatctctacaaattcacagatgtcaccaataatagatgaactcacatcagagttgtgaacaaagcatggtggtacccctattaatgttaataataaatgcccttgtgacac

SEQ ID NO: 21208 - DNA, 481 bp, Glycine max
  unsure at all n locations
tagaaaatntatttcacgagaacatatnagtaaatttaatatttttatgcttacatagataatataatactactatacgactattaaaggagtgtgtgtaagaaaataaataaattaatgtgcacaagagttgaacacaagatgtttttattgagggtattcaactttactagttgactntaatcgtcattgttgccttgtttagagttagatgcttatgtgaggaaatgggagatattttatttatttaatttaagataaagtctttccgttgtttactcttgaatcttgatcaatgataaagaacaaatttggaaattcgaagaanaagtaccaaaaacacctttntttcgtgtattggattatgatttaaaaaaatctggtaatataatgtaatatttaattaagaattttaggaatttttttanaaagttaacaaaatgaatttntataactntaaaaaaatctttagatattaaaa

SEQ ID NO: 21209 - DNA, 369 bp, Glycine max
  unsure at all n locations
attgncttatcatatgaaaattatatagtgattacattntacacatatatactataataatgagtatanttttaaaaataaagaatctaggttcatgaatcgcaaacagattcctaaagtatacttaagtaaatatatatcatatacaaaattataatctaaaatgagttgtcgtagttgtatcattaaataaatttataaatttatactacaaatcaggatcttatctatatattccaaacatgaatgaatatacactaattatattgaaaatgcaaactacaaggcattcaaagcacaaattaattcaatatttatatcacaatacaccaaaattcaaccaaaaattactgcataataatttcaata

SEQ ID NO: 21210 - DNA, 395 bp, Glycine max
catgaaaagacctatgccctttcttttaacttctccaaatggggagtctcaacagccttttgctttcccggagagtagtagagtcactctgaccttccttctcctggcacataatccttgggcttgtcagctcatcaccactcttggggagtggacctgagcaaatatcaatctttcccttgcctgagaatcctcatggataccaagctctaagttcttagagaaagcctcatagaacttggttgaatcctccttggtctctgtcattacatagaacagctcaatgcacttcttgaccaagctcttacggatgaccttcaagatcttgatctggtgcaacatttcatcttgaaatgctgagtgggagatcttcagaatcaacaataccccttgac

SEQ ID NO: 21211 - DNA, 403 bp, Glycine max
  unsure at all n locations
ttcngttatatttttgaagtcaaaatgcaattccaaagcagtatcatttaaaatatttaacaaaaaatattattaaatgagctaattaagatattaatataaaataataatgaaaaaatcttgctttctaattttacgacaatttaaaaaattataataagtaaaatataagtcgcatatataatttaataaactattaatttggcctttntaaatatttatttgacattgattntgcttttaatttttagtgagatggagtgagtcttttaaacattgaaaagtattaaaatctttttgtgatatggagtaagtcttttattntaattatgtaagtttgctccttacatataatagaaatggtttttctcatatattttttttatgaaatgcgagatgagtg

SEQ ID NO: 21212 - DNA, 366 bp, Glycine max
tatataacactcaagcttgtgggaagacactgatcgaatcatcatcatcaccactcttgatacagctctctctagacgcgtactttgcacgcttccttccgcacagctattcttgcactgcggtcgttggctctctatgctctcgggttgctctctcttctttacctcctacggtgcttgatatacttaaagatggtaaaggcggagttcttgcatcccgtatgggttaactacctattcgctccgtggatatcgtggattctattgcttcaatcggagccattcgtggcgccaacaacagcaacctacttggttctgtggagggtgttcacggtgccggtggtagtgctggacgtgaagatctac

SEQ ID NO: 21213 - DNA, 415 bp, Glycine max
  unsure at all n locations
atctnatgtatgaagagttcaaaatgagtatgatgggagaattgaagttcttccttggactttaaatcaagcaagcggacgaaggaatatgcatacatcaaaccatgtagtgaaaaaacttctgaagaagttcaaggtggacgatgcaaagcatatgaaaacccccatgcatccaaccattgtacttggactggatgatgaatcaacgaaggtggatgaaaatacatgcagaggaaatatgatatctcttttgcatctcactgcgtccagccttaacattatgttcagtgtatgtctctatgttagattccaaaaggaaccaaggaaaattcatttatatgatgttaaacgcatatttagatatttgattgaaacttctaaccttggtctttgctttaagagagaaatcgaatac

SEQ ID NO: 21214 - DNA, 430 bp, Glycine max
  unsure at all n locations
tagatataaacattgaacagatgataataacctcaaatatatttataaatgtttacatcaagtgctcagtagaaattcccaacaaaggattttagccctccattacaagggagtagcttttagaaatatgagaagggttttagagaaattaccagatgacaaagtagtggggatgtctcctccacttctaagaacctagaaaataaatctaacacctagaatctacctaaaagttaggacctttgcttccttgctcagcttttcctctgttctttgcacacaattcatagtcaattcaaacctctttcacattgtcatactctcttcacgctttctctttntttctgtgcaaatcaggcttaaaaatggctttctgacctcgaaggcgcgcttagcgccatcctcgcgcttagcgcgagtaagtgatatt

SEQ ID NO: 21215 - DNA, 437 bp, Glycine max
  unsure at all n locations
caattgactgtgtganctttganaccacctaggaaaacgcgaggcttggcagccatttgtttgcgacttttatggaaaaccgcgaggggctatgggggatttcgccgccttcgtacagccggagagggccaagaatgagcacaaaaggcgaatatgaagatagccacctaccgcaagttcttccagatcgaaccgtgggaagaaagaacctctgaaagaaagggagacatgcaaccaactaaacagtacacaagcaagccgagaaaggcacctatcatgataatcataagcctagtcgggaaaacatgagcgatccaccgcagcttgaatccacatcagagcaaattgaaacaacgactggattgtgaatgtcgcctgacatatcgcatggagacggctgagtcatatcctcacctcggaaattttgaatgacatcg

SEQ ID NO: 21216 - DNA, 357 bp, Glycine max
  unsure at all n locations
ttctttttattaaaaatcaataaaaaaatactaagaatatatattagtgtacttagtgttgcgttgattttatacaaataaatcatagaaattcaaaattatttattccagcattatccagctcaccttanaacgaattaatgataatataatttattaaaaatgaatacttataacgttataagatgtttattcaactaattaaaataaacaagtcaataaaaataataacaatagattggttctaccagatcggcgtcacctccgccgaanaatgtcgatcccacgcaatctgcaacaattacaatggttcatgtatagatgttgtcatcaacttttcaacaaagatgagctcat

SEQ ID NO: 21217 - DNA, 469 bp, Glycine max
  unsure at all n locations
ctntanatgagcttcacctttctcgcgactatcatgttgtctgtctcgtgtgcttttagtttatcctanatttatcaacgattagtcaacacaaagttaccatctcaacttcaaaatattttctgctttaaaaacacatcaaaatatatgctactttagaaaatcaagatcaattatatttattttaataatatttttgtttattttcttagtatagactatatatatctttaatcagaacattatgaagtatggaggataaaattttagctntgaatctttaacacatttacatatccaaaaatatattcattattggtatcttatgtgaaatattntattaatttacaatattatactgtaactcctttaatgaaaatattntaataaaagaacatgagaccagcttattaaaaattaaaaaatggaaacttatcacacttaaccaagctagtcaaaacaaatatta

SEQ ID NO: 21218 - DNA, 423 bp, Glycine max
  unsure at all n locations
agctntcgtatgtgaaatcatgtgcagccatttcccttagagtgctctcacagggtggaggttgtgccatgttctcagaatgttcaaaattataatgctcaaaatcaccaataacagaatgctcangatgctcaaaaggtactaaatgatgtctaactaatcaatgaaatgtcctatctatctcangatcaaagggttgtaagttagatggattgcctctagtcatacactatattcagcatgcacaactagttgccttcttatgcaagtaacaatgtaggtttgaactacggctaccattaaatgatatccaaatgacttgaaattntgtgagcaaccttataaaatgatgagaagatagcacanaaaatttcaaacaaaaattcaaagtctaactatagaagctaanaatgataagttaag

SEQ ID NO: 21219 - DNA, 468 bp, Glycine max
  unsure at all n locations
ccttccctggttagtgttntggtttgtgttattggtggtgtttggaattggatgatttaggggtggcctttatggatgattgagtgttcttggttgatagggtggtgggtaatgaaaagggttaatattggctgagtattgatattgttgagctggtgagaaatttggccatgtaggaatagtagtcataacatgggttcctccttccttctcattctctccatttgccccaggcttcctattcatcaaagcaggataatcaaattttcctctcttcaaacccacttcgatcctttcaccggtgaaaactaaatcagcaaagcttgaaggtgtgtaacccaccatcttctcatagtagaacaccagtaacgtgttcactatcattgntatcatctctttcttcgtcatntggggcgctacttgagttgccagatccctccacctttgggcatattctttgaaagattc

SEQ ID NO: 21220 - DNA, 416 bp, Glycine max
  unsure at all n locations
agcttgttcgtatttgagtccacggaggaaatgcttaccacctcaaaagactggaaagcggtttctaatgactcctctgcggcttccacataaggcatagaggatgggcagctcaccaagatgtcttcttcgcctgatacgatgaccagatgcccttccactacgaatttcaacttttggtggagtgtagagggaacaacccccactgagtggatccacgggcgccccaacagacagctgtagggggggttaatatccattatttggaaggtgacttgacaggtgtgagggcctatctgtactgggagatcgatctctcccctaacctctcggcgggtgccgtcgaaggcacgaaccaccattgaactcggctntaagtgggaagcattgaatggtaatttctccaaagtgctctt

SEQ ID NO: 21221 - DNA, 459 bp, Glycine max
  unsure at all n locations
cttcgattcaatctatgtacccgtagtggtccacattgggtntcttgctattttattctcgttntgtttactttgtataccccctcttgacgtgcttgagccattntacttaagtcatttctcgcttaacttanaaataaaataaatttccaccgaacttttgaattgtattatccattaacttcggttaaaataaattccgaccgttcggtcgtgccgtaaccacgttggaaatcaaaaagaggtaaaaaataatataataatcaaaaagacatctttagtaaaataaagcgaanaatcaatcgggcgttttctctttgggatttctcattcttaatcgaattgattaataactaaagtgaaactaaaggctaaaatcaattcgcctagtcaagctcgtccataanaataggcttttgaagtttgtcatttcattntctcactaagtaaaatggatca

SEQ ID NO: 21222 - DNA, 411 bp, Glycine max
  unsure at all n locations
agcttattctggctgaatgcaccngnngngcttagcgcactgatctcgtgcttagcacgtggctttgatgttgatgctctgccagattctcctttgtgctaagcgtgctgaagctgcgcttaacggtggaattagggtaccaattaaagctacatcttgaaagggtaccaattcacaccccctcttaatttgtgagttccatcatctttttcaattggtatcagagctacatcttgtaagttactcaagatcacaatttttctaaagacgggctccaaacaaacaatctttaaatcaacctcctttgtttgagggagaacattnttcctttcggcaaaagagaatgaaaatctttatttaattagttgatctcgatgcatggaatgccattgttaaagggtcctttatacc

SEQ ID NO: 21223 - DNA, 410 bp, Glycine max
  unsure at all n locations
aaaacttaatctgcagatccctcttgtaaagctaagttntaattctgcttcattcaagttctaaggcaacaatacatttcccaatgttaaaatcacctaactaggcacacaaatggttgattagaccaagagaatacaaaatttaagcactgaaagaagcattgaacacaagatacaaaatcaattagatatgaaataattgcatcagctgttcattagaaatccccaacaagggtgtttagccagccattacagacgaaaccctaacaataataagcttacaaaacctaagcatctctgcaaaagttgttcctcttgctgcctctagagctcttttcccgaaataagcattgtggcgtgatgtggaatattgtgccctggccttcttgttgttgttttaccctaattct

SEQ ID NO: 21224 - DNA, 395 bp, Glycine max
  unsure at all n locations
agcttgttaagttcccagcttggacaagtgttgcccagactgtttctgctaagttgtccaaggaggacatattttttattttacaggtgaagtttgacatgtcaagtgagtaaaattcctatatttgataattctgtccttttctgatcgttggaaaacgcattaaagacatgtgtttcgtttgtctttttccgcaggtgagtgcagcacacacacgttactcttgcttacatgtcactcgaggagtggacacatattggagacgcggtgtgtggtgcaaattttcagggtgtcatttcagctcccaccaattaccanagagtcgtacctccacttaaatagagtgtacatttggtttttgatcaccaccattttntaattcctgctntgaaatc

SEQ ID NO: 21225 - DNA, 467 bp, Glycine max
  unsure at all n locations
tgtgagacactagannataaagtagaaaccatgttntacacactatataaatacatagtatagtaatataaagcttgtcaatatagctctcctttgcttaaaacttatttgtctttgattaaatntagacttagcctatagaacttgagagtgtaaatttaagcatagacttagtctatgcttaaattttcattgtggctgaacaactganaatatgtcacaatgaaaatttaagcatagtgttgtaaatttaagcatagacttagtcgatgcatgatcctttntttctctgaataaccttagcataatgtttaatagcacattaatctgtgttaagctgcatttttcttataacatttgaagggtctggctacattgagcacataaatatactgttgtagtagacttcacctcactgngaagaccccataatctacgcanaaataagtntgattctgcatttacta

SEQ ID NO: 21226 - DNA, 417 bp, Glycine max
  unsure at all n locations
agcttgtatcgttcattcgtgtgaaaagttatgaccatttgaatttctcaagagcttccgttgttcaatttcgatcctctcgacatattatgcacccgaatcggacatctgtgtgaaaagtcatgatcatttgaatttctcgagagtttccgatgtttaatttcgagcgtatcgatatattataaccctgaatcggacctcagtctgaaaagttatgaccatttgaatttgacgagagcttccgttgttcaatttcgaatatcactgtatgtgatgcgcctaaattggacattcgagttaaatgttatgaccatttgaatttctcaagagcttccgttgttcaattctgagcgtctcgatatgtgattcgcctgaatcggacatnccgtgtgaaaagtataaccattngaatttctc

SEQ ID NO: 21227 - DNA, 489 bp, Glycine max
  unsure at all n locations
cgtctcagcgtctatgcgagacaganaccaacatgctagctatttcttcaagtaccaagaagagttgggtctagccacggcccacgagcatagaatcgcggatgagtatgcccaagtatatgcggaaaaagaggctagaggaagggtgatcgactctttacaccaagaggcaaccatgtggatggatcggtttgctcttaccttgaacgggagtcaagaacttccccgattattagccaaggccaaggcgatggcagacacctactccgcccccgaagagattcatgggcttctcggctattgtcagcatatgatagacttaatggcccacataattagaaatcgttaggaaacttgtatggtctctcagaccttgactagatatgatttctttntttgaaataaaatgagttggtcccatgtttctactccaaaaagcttgtgcanatcanatcactcctacatctcatctctagcatgcattttctt

SEQ ID NO: 21228 - DNA, 399 bp, Glycine max
  unsure at all n locations
ttcttctatttcaataatttagattcatttattgtttacaaattaaactacgttttcataatgtagtactttatacttttcacacaaattatttttaatttataattgattttattatttaaattattagtacatttatgtattgtaaaaattaatcaattaaaaattagtgcatttttttcacacattataattgattgttttttgcatttagttctcattggcaaagctttctaattggaaattgcaaatttttaggcgtttttgtgctttctaattggaacattttatgctttctacactcatcatgtataaactnttttaccaccaaaagttgtactccaataacattttccaattntaaccattcgaatacattcaagtgggtgcaattcttat

SEQ ID NO: 21229 - DNA, 481 bp, Glycine max
  unsure at all n locations
tgatcattgggccaaattcacaagtcttaggtaggatgctttggttttatttgaacctcttaattgacctgggttcgcctttgggtaatgttagactattggcaagtgcaccaaattatcacaagtagtaaagttaaagtagaagtctgagtgtcgagtccacagaaactttatttgtacttaggtatgtgaatatttaattagtaaattaatttaaagaaattgatttgaaaaggttgtgagaaaacagtaaaataaattggcagaaaattaaaataaacaaggaaagaaattaaacatgaatttaaattaattaattaaaaacagaatagatgagaaaaaccaatattatagaagttaaattcagaagatgagaaagttggggacttagcctaagagagctactcttgatataatattaatgaattttctctaattatggttattccaattntacacctacacctactcatatactcta

SEQ ID NO: 21230 - DNA, 374 bp, Glycine max
atctttttttgtctaagacgatgcattcaaagaagtcaactacaacgtcagtcagaatcatcaaggattctatcaaggaggtctgccaaggtactatcaacaacgaaatttctcacaaagccaatgttggagatcccatccagggaataacttcaacaaaaaccaatgatgttcatccaatagacctcccacacaaggcccaaatctatatgagagaaccaccaagttggaagacacgctgacacagttcatgcaagtttccctgtcaatccaaaagagcactaagttagccatcaagaatttggaggtgtatgtgggccaattatctaaacaactgactgaaaggcccactgtaacctttgttgccaacactg

SEQ ID NO: 21231 - DNA, 384 bp, Glycine max
  unsure at all n locations
atgtgactcttcacattngaatttgaattcttctgttcaaaggcactggtaatcgattaccaaaacattgtaatcgattacagctttttgaaaataattggaacgttgcaaattcaatttgaaaactttttcaaaacaattttgctactagtaatcgattacaacaatctggtaatcgattactagagagtaaaaactctctggtaaaaggttttgtcaaaaactcatgtgctattcaaagttttgaaaaactttgtaatacttatcttgattgagtcttctcttcattcttgaatcttgagtcttgaatcttgatcttgattcttgagatcttgaaccttgaatcttgattcttgtctctagactttcttcttgagtcttgaa

SEQ ID NO: 21232 - DNA, 385 bp, Glycine max
attcttttccaaacaaatatatattgaagcggtggacacgacaagcaagatgtgatacgtacaatgataatagtgggaggcaaattgatgttgatcctaggttggagagttcaaatcgatataagcaattatgtccaatgcttatgagattgtccgatgaggcatctgactatccggaagcatgttctttagtttatcaaggggtgttagagcttagtaagaaagtggctgaaattcgattgaaccaacaaccacatggtcctcgtgattccacacgtgaagccacaaggtatgctatggagcctttggcatccaaaggaattggatctaagaagagagatggtaaaaggatgaataatataaccctctgggaattggactgata

SEQ ID NO: 21233 - DNA, 410 bp, Glycine max
  unsure at all n locations
tgctagttcctacaaatgaacactcgcgtaggagaggtcgttatatggcttagtctgttcgcattttggtgctaatgatgaagatacatcctacctttctttgtcatgaccttttgtgagtgagctttggcaatgacttanttctatgtataaagtggcgctagatctttcttctccgagtgctctcttatatgtatacaattggggttttagtaagcaagtatctgaaagatgcgggtgtcaggatcataaatgatgcttgcgttatttggattcatatgaataatatccatttagagaatgtgaatatacccatttgctcgttaaaatacaacattatggcatatctagccttgacgtaaaggttctctagactaactatggtttctagtgtagaggagttctctatt

SEQ ID NO: 21234 - DNA, 399 bp, Glycine max
  unsure at all n locations
agcttgtctaattaacctgaaattgagaganaatgattattaaacacacaaaatggaagtactaagtatttatcacctatacttaatagaaaatacttataacactacaaaataaccataaattggaagagtttgatacaatttatacaagttttatgcacaaaagttagtcgtattcaccgactaatacataaactccctgttttaatcgatttccaggctattcataatcgattacacaagtcttttgagaagctttaagagagatactcattttgattaccggtcatccgtaatcgattacacaattcagttaagaccatgtctagtttttaggagtctctattntaattggttaccaggtgatcgtaatcgattacttcattcttgaaagtgttc

SEQ ID NO: 21235 - DNA, 428 bp, Glycine max
  unsure at all n locations
cttaccctatggcttgcctccggatttcactccccgtgccgtccttgaagatttgagtcaagcccctaccttcgaggggcaactcccaccttatgacgattatcccgtgcaagacgatgaggaaggagatacccatctcggccccctgctccacctcaaagatccacccccccatgaactaccccaaccaaacatagtctgccacgttccatcttcacccacacccgtaatcgaatccattcccttcgcagaggataagggaaagattgatgcacttgaggagaggctgatagcggtagatggccttggcaattacccattctcggatctagcgaacctatgtctcgtgcccaacatcgntatccctcccaagttcaaagtaccggactttgataagtacaaagggacgacatcgtccgaaaggcatc

SEQ ID NO: 21236 - DNA, 412 bp, Glycine max
  unsure at all n locations
ttctntttggtgtcgagaagaaataacatgtttgtcatcatcaaaaagggggagaatgtgaatgtatgtatacatgattttgatgatgtcaaagaagaatctaacaaggctacttcaaatgataagcatttgcttcaagaataattcaagattgcttcaacaaacaaatccttgtttcaagattcactaaagaccaagccttgccttaaaacaaagtgctttcaagacatgcaaggctctggtaatcgattaccaggaagtgtaatcgattacccgaagacagggttgagaaatagctgttgaaaaaggttttgaatttgaattntcaacatgtaatcgattaccatatgtctgtaatcgattaccagcaacgaaactttggaaattcanattcaaaagtcattaacccttc

SEQ ID NO: 21237 - DNA, 227 bp, Glycine max
tacattttagatgttgacaaggcaacctcgatatggcgctgaacatcggtgtacataatatataaagtagagaaggcctattttctgtctattagaaacattagacaaacccctagcaaacaacgaatggacggatgagacctgctacttcagctcatattgagaaccgcatggccgtatcatggtgtatgagaagagacaatttatcgtccctaatctcatacttt

SEQ ID NO: 21238 - DNA, 376 bp, Glycine max
  unsure at all n locations
agcttattgtatnnataagnctcattcaacaaatgtttgttgtctctaaacagatatatttcttcacttgagcttgcgtctgaagagtgtggccgttaaagcatttaattcttgcattaaatgcacatactccttcatgttgaaaaaccattcttatgagctattgtgtttatcactcaagtagaaaaccacttgctttaagtcagagcaggtatgtcaccaaaagtgagtgtcttttgatggtgttcgacaactttcagatcttgaacttcatgtattcttcatagaattcgatagattctaggagaatgtctttataaaacaaatctcatgacatgtatcttctagcgtctaataatacagatgtagatgtatg

SEQ ID NO: 21239 - DNA, 462 bp, Glycine max
  unsure at all n locations
ntaggaataacattaagagaaccatgcgtgngttataattcattatccacatgttcaagcctatcatgtcacatatcagaacattcaacgtttgcaacaaaagaagaaatgctagatattttattaatagaaataagcataataattaacctaaacatcccatcacgaatatagcctttaccaataaaaacactatgtctagcaataacaactctatttgactcanaaacatccttgtacccttgttggactaacaaagaagtaattagaaatgtgatagactctatctaaaataggaaaattccctaaagatagctctagcttcacttgaccttctcttaacacatgtgtcatactcccattccccatgctcacaatatgtgtgcttgattcatgatatanagaanacaattgtgtatcatcacacacatgaacattagccgcggagtccataatccaatc

SEQ ID NO: 21240 - DNA, 384 bp, Glycine max
  unsure at all n locations
ttctttgtttatgagaaatacatatattcagagatgaatatcttgacctacaacattagggggctaggtagaggccttaaatgggcttctattangaatttggtggataaatataacatagatcttctgtgtctgcaagaaactaaaaaggatgtgttagacaaagcttcgtgtcaattcctatgggggcaatctgatttagactgggaatggcagcctgccttanatgctgcagggggtctgttatgtatttgggacaacaacaaattccatgttgatttaaggatttcagataaagacttcattatgctgggtggaatatggctacctcaaatgcaaagagttgcagtcattaatatatatgccccttgtgatcatgctggg

SEQ ID NO: 21241 - DNA, 451 bp, Glycine max
  unsure at all n locations
ctaattntaatatgatacattattgaaagttttagctnttaaatagtcattattataattattgttttatataataatgtaaaactataataaacagaacttggattataattttttacatctacagtaaattctatttgtaataattcatacacatacacaagttaatttaaaccattattgagatatggtttttatattacctaaccggcactaggttatacgagagcatcattctcccaactcattgtgcaagttaatcaatttcctggtttttaacaaagattcaatgaaaatgatccatcatgaaaaagttcatatttaaaaatgaaccaaccgtattttcacaaatgagaaatctactaaagttttgaattaaccatcaacattgtaaaaactcaaatntgatntgngctgctaggatgctcaccgaacttatattagccatcat

SEQ ID NO: 21242 - DNA, 75 bp, Glycine max
tcgcatgcagatcagaagggatatatttctttgtaatatgtcttcttcacataacatgcaacacatttatatata

SEQ ID NO: 21243 - DNA, 416 bp, Glycine max
  unsure at all n locations
agcttttattatttgaagaaaaagacccattccatccattgtttaatagtctaatgaattaaggaaaaaccaattaatcatattaaccatccattattcacatttcacaataactcaacccatgcaatacatttaaatatatttttttaaaatgaataaattggattgaagtatgaatgcattgtttaaattagacacatgaatcactttcccaactttattcaacatcgacaatcatttgtaataattttcataaatcccgaaactttaataacctttttattgtttacaaactgtgccccccatcaactaataagcaatttacacacttccagctntgttgataagatgtttggcttgaatgtattaacagacaacggatcgatgctgcttatttcatatcatctatccgacac

SEQ ID NO: 21244 - DNA, 481 bp, Glycine max
  unsure at all n locations
cgactggctgaacaagtntgtagaatatatgtggccgtatcttgtcttgtttgtagttntaatatatgctntaactcttcgagattaacatctactatactaggcttttgattctccttgtttctaagcttgtttgactatggagatatttttaatttatttaggcaatttgcaagactgcgaagaacattgcaaaacctataattgctgagcagattcctaaatacaaaattgattccgttgagtttgaaacactcacactgnggtcactgcctccaacatttcaaggttagtaagtagatccggataagaaccttgtaattgtccgacaatgtcttgtgaacagtgttagctgttttcaccgagtttctattctcttctattgcttacaaggggataaatatttgatgtgngatttctgcagtcagaaagacagaatnttgaatcttaacctttacaacaacaacagcaacgccttatc

SEQ ID NO: 21245 - DNA, 390 bp, Glycine max
agcttggacaatggcagtgaaatcttgctaaaatcctagataaatctcttgtaaaacttggatgtcgcagaaaagaacgtacttcccgcacagatgcgtcgtaaggaagagaagtaataacatcgatctttgccttatcgacctcaatacctctactagagactgaatgccctaagactatacctccatggaccataaaatgacatttttcaaagttaagaacaaggttagtctcagcatcggtcaagaactctacagaggttatccaaacatgcatcaaaggaagaaccataaacaatgaaatcatccataaacaccttcatacaactctataataaatcagaaaagatactcaccatgcacctttggaaggtgccaggagcgttgcat

SEQ ID NO: 21246 - DNA, 475 bp, Glycine max
  unsure at all n locations
cgagtgatattgtcacagaatacacttgaggcacctcctccatttcatccaccccacttgaattctagtcgcgcattagttaanaaggtgtatatttttacagcattgaggagaaataataatcaagggaataatcattctattttcaaaataataattgttacagctgtcatgaattactagtagttagttagagggggtaagaaaataaataggaaagactgacagagggaggagaataataaatgtaagaagagttggcctctcaaagagctaagttaggattgatgcagctcttgctacttcatgtattntgataaagaactatccaaggaagaaaagttngacttacgtgagctcaaattggatggactaatcactagagcaaggagtaaaagatttcaagaagagtttgtcaagagactaaattctctcatggagggaaaagaagaagaagtgacattcatttatttta

SEQ ID NO: 21247 - DNA, 399 bp, Glycine max
  unsure at all n locations
agcttcttatcctaggctcatcttggtggtgaagctccttcttccatggcttactccctagtggatggcgtctcctctcacttcttctcctttgtcttccgctgcatctccatggtgtaaaatcaccattgaaggacctcattgaagctcaaagatccagcctccatagaagctccacaagcaagcttccatcactgaggacatggaaaggatgatgttcgtcaccctttggggaatgttctgctacaaggtgatgtccttttggcttaagaacgctggggcaacctaccaacaggctatggtagcattattccatgatatgatgcacanaagaaatgaagtctacgtggatgacatgattaccaagtctaaacccgaggagaaacatctcatcaactt

SEQ ID NO: 21248 - DNA, 455 bp, Glycine max
  unsure at all n locations
tatgcagcggaaatgtaattatganattgagatgcccgaagaatttctatttcctagttaaccatgcattangtaccatgttcaattattattttttgttgttgtgtgttttttttttttagaaatgggtttatgatcccaacatggttggctcatggtgcctaacacatgcaactaagaatgtagtgtgaagtttcacgcttccccttttttgtttttgtagaggaaaacacaaggatgagcaaacatgaaaacaaatggtatgcaattttgcagatcanaaagtttgttgaacgcatatgcatgatgatgccatgactcatgcaaaatgtgaggctggaatatgataacggaaaaatgcaggaacgatatgttcattatgatgttatgaagagatgcttatgatatgaatgcattntacggacacgagagcccggaaaattatctcttcttac

SEQ ID NO: 21249 - DNA, 410 bp, Glycine max
  unsure at all n locations
agcttgtattntccaggttttgttttatttctcatttcgtttgatcacttgcatgtactagaaattgaggttgatcagtagtgctatacaataccatatcagttgcttctggatcatttgtcaaacaccattacgtaacctagtactctgcttaattaaaaaaaaaaaattgaggtcaggttatttaagtttatttaaaaaaaaataggtttttcttatataaaataagtaatttttataatattttgatatgtttgttttaaattgttttacttanaataaatgttttttttgtttttttttaaaacaaatactatctacttcttataaaanaaaggctnttataaaaagcactttttttaatttttttttttnttagtttacccttttttgttcttgtgacaatatgt

SEQ ID NO: 21250 - DNA, 451 bp, Glycine max
  unsure at all n locations
acccatcacatgtggtactaggtggcggtctggcgatggtgcacaacaagttttccacatccacaaatcgcacataaacccacaatcccctgttgcccacctccaactgagctcacgtactcccacgtagcccatatcctcgtttctctcaacaccgggtccccatcaatcctcccaagcttccccaacatccaagtaattcaacattcaaacagcacaaactatcacagccaagataacagggcaaaggcagaaaactctgcccaaaacaccaaccaaaatcacagcttttcccacttaaagaccccagtaacatttccttcgttccaattcgttaaccgttggatcgactcannaaatttactggaagtctctagtacataagcctacattntgaccgttgggatttgctagcaaatatccagaaatcattctgcactactctttccac

SEQ ID NO: 21251 - DNA, 399 bp, Glycine max
  unsure at all n locations
ttcttatatcaattcagatcaaattgaagttagcttagctaaaccttggccagcttagcggaccaaattagccttagatgcaagggttgggcactaagcgcttgagactcgcgacttagcgcatgaacttagcgcgaggcttgttcttagcaaaaggactatttttcagaaaaaaaaatttctaagttatttttcagtcctttttccaagaaattgaaacccttatgttaaacattcaaagataggctgatatgctcctatgtacagatcagacaacatgttcaaaatgattaatgcatganaaacaaagataacaaaaattcaaaactgggttgcctcctaggaaatgcttctttaacgtcattagcttgacgctnttacctcactgggtgatcttat

SEQ ID NO: 21252 - DNA, 472 bp, Glycine max
  unsure at all n locations
aatactacgcttgagatgaggaagtgtagaatggtgaaacttcctgctntnattctttgaccacagagtggtacctggagatatgtcgcggtggtcaggagaccttggggacgttaggtggggtgctattgcccaaaaccaagcttgaccaatcccgacccaacccaggcatagtcagtcagtgagaacctgtgatgtacctaaacaggcgagctcctggcagtcaacagataaaaggagcaaagactacaaagcatggaggcttgtgtggtggctggccagctatgaactttgattgatatatgggatatggcctctggtaattgattaccaagggtgggtaattgattacaaggcttaaaaatgaagacaggagactaaaatagtctctggtaatcgattaccaaggggtgtaatcgattactatgcttgaaaacgaagtcaggaagctaggggagcttctggtaattga

SEQ ID NO: 21253 - DNA, 399 bp, Glycine max
tttctatatcattttattaataagaaaaacatcaattgttctatacaatgatgagaaacatcaaaacattatggattagcatagaacctagacgacatctttgcaaggacatgaaccatttggttcgccaaaattcacatttgagatacctagtaaacgaaggttattattacaaaagtgaaaccaatttcgaatccatatatattggagcacgactgaagcaagtcacaaacatgtttgcaatcagtctcgaaggtgacgttgttgtcgcccaactcaatcgtcctttagatttcctctgcagcagggatgttttcagctttgatagaagtcttgcacatacaaagtgacctccataatcacaaatggtagctttcatggatgcatttacattacact

SEQ ID NO: 21254 - DNA, 399 bp, Glycine max
ctcacgcttgtatatccgttagtaagatgattaagaactagtcagcgattcatttctatcaaaatatattatgattatgtttagagccattaatagcttggtagaataaaacatacccggttcttcaagcttgttctgttatagccagaagtggcagtggaatataatacttgtaacatgtagaagttaaagaaacttggtggtatgctctaggtgcagactataatgaatttgtaccacaaccgatctaaaaggacgttctcatgcttcttaagcgttacccaaactgaaccttttacattggttgtcaagcaactgatgtataaagtagatgtcttatatccattgtgtttacgctcgatgcaaaaagtattgatttctatcaaataattaatggat

SEQ ID NO: 21255 - DNA, 410 bp, Glycine max
  unsure at all n locations
agcttatgataatgaagttgttacaaattntatcttgaatgaaactgtgccaaaaatagatgtcatgaagttgttacaatatataatgcacttaataaccttgcaaataaacttcagataatcttaatctttggaaatgtattgatattaggacaaatggtcatcacatatgcaacaaacatatagccatcctaatttactcagttacatgaagcttgttatgttcaaaatatcacacatgcaaattgatgacaccttatagataatagccttagaagttgattatcatgactcanaattaagggtttcaccattacactatcatatcatttaaccacaacagagaatttaatacaaagtcacactaaacttgagttacatcacatctacttatggcactaagtataaac

SEQ ID NO: 21256 - DNA, 647 bp, Glycine max
  unsure at all n locations
acgcaaccctattttntttgttgacattcnctagctatctagcgtgacatctattatgaatactcacagccttgagggaagaaaattgtcccttacccttcaacactttgannaatgtggttttttcatatatgttcnntaaatgnnncccacganatnngtcttatnntgtagattanagaaatgtcatttcgaagaaagaacgaaatgataaatnttgcgcanagtaagggggccaaatgtaagtgttcattggtttgcttgaaagggttgagggagcccattgcagatgcccgaatgggcattgacnccaagnnnactcataatggcnncatggtgaaagtttgaaatgggttgttttgcttatattcangtctcttttcatttanngatttnnggtggtagccccttgcaaaagtggtcccatttttcgataaacccagcagggcacncttcctatattcatttctagcangcttcattcanatgnngtagggatttttgggaattgatcccttatacggtcattggcngtttatatgccacgatannatccacacagaaatgccatgatccatcccctcttcttgaccaacaaaaccggcaacgagaaaggaactggagtggatttgataattccatttagg

SEQ ID NO: 21257 - DNA, 386 bp, Glycine max
  unsure at all n locations
agcttgttaaacaatataagcaatgaagaaatgctgattnttaatgagtcgctcaaaaaccaaatactgctcatcaccaaataatcaaataataaataaaaacaaaagaaaaagaaattaatacttctctccgagtgcttaaataccaaatactgctcatcaccaaatatggtttctagtaagtaatttcaccaactggctgaacttaagattatgcaaattgctgaatggtacaaagcatatctcacacgaaaagtacgaaaatagaaatcaacggctgtccatcatttccgtcaattctggttttcagtattcttttatttttttcatttaatgttcaaccaanaaacaaagcaagacatantctcatatctttcatggttatg

SEQ ID NO: 21258 - DNA, 400 bp, Glycine max
  unsure at all n locations
tatacctgatgagaataacttaattgataatatatacgtttattttgtagataagatctggatttgattatcacataatatatgtttagaacagtaatagattttaagtgtgattaaatcttaaattttaaatgtaagattagtcttataactaccacaagaatctaaaatttgtgaagatcctttggagtcctactctatgagctgtgaactcaatggttagattacagattcattatattgcgaatattcatgttgtgtgatggtctacaactgtacctacatatgaggaaaataaattagagatntctttatctttcctactcttatgaaatagatcctttatataatatgagacacctaagtacattatcatatttttctctcatattattcccag

SEQ ID NO: 21259 - DNA, 397 bp, Glycine max
  unsure at all n locations
atctttgttcctttcacgcgagccattcccttgtacagtcgcctctgaaatcaaccgaccttttttttttaaaaaaaaaaaagtgcaggttagttgcctgggcaagcagcccctgcaccaaaatataaaaaatgaagaagggagacgtttttgcattcaaaaacttcttttccccccattcaaaagcaatacccacggaatttacgagtttgcagccctagggtcactatttttcacattttttgattccgttttgcgcttttattcatcaccaacaagtaagtattccatccttaagctttctagctnttcattggtgtattttgatctcctttcggtgctttaaattgtgggaatgtgctcaaatatgtggggcaattttggtttgttttcttgc

SEQ ID NO: 21260 - DNA, 473 bp, Glycine max
  unsure at all n locations
ntataagcgcgggtctgggagacgaaggtcaagtgttcgcgatttgcgaagatgatgttccgagtactttggatttggtacgaccatgccctcctgatttccggctgggaaattggcgagtggaagaacgccccggcatttacgcaacgagcataatgtaaacctttacggttttaaaagctctatagttgggcctaggctttagagtttttccttttgttaaggctttgtgtcttttgtttttgaatttataatacgaggatctttcttcatctgttcctggtctctacccattctcattcatttgcatgtttacttctttttctgaaacggcagatccgatgacgagtcccccgaaggtactaatacctgngacccgcctatcgacttcgagcaagaaatgaatcanacggaagatgaaggaactgaggatgtgggacttcccccagaactagaaagaatggtcgcccatg

SEQ ID NO: 21261 - DNA, 386 bp, Glycine max
  unsure at all n locations
agcttcttcgatctattggggaggctacatgcatgagattgcacgtactttgataatagaaagcttagctttcagagcaattaataaagcaaaagcattatagagagcttctataaattatgtgaaggcggtgcatgattcgtattaaattagacaaagaaagatcataaagatgcatcttcgattggctgaatgattgattgtaagggctcgatctgtgacatatcattttgtgtgagaatgatttttgaccaggaacttttggagaagaggacttaagtgggattcaataatagaccctctttattgctgaaatggatatgtnttttggcaactggaaagatagataaatggctcaaagtaaaaaggagtagtcttaattacta

SEQ ID NO: 21262 - DNA, 355 bp, Glycine max
catgcaacaattgttagccgtggctatacgagacatcttgccaaacaaagtcaggttcaccataactcgcatgtgctttttcttccatgctatatgtagcaaagtgattgatccagtaatgtttgatgagttggaaaatgaggccgcaattatactgtgccagttggagatgtattttccccctgctttctttgacatcatgattcacttgattgtgcatctggtcagagaaatcaaatgttgtggtcctgtttatctacggtggatgtacccggttgagcgatacatgaagatcttaaaagggtatacaaagaatctatatcgtccggaagcatctattgttgagaggtacatt

SEQ ID NO: 21263 - DNA, 378 bp, Glycine max
tatctttgttcacaaaagtcacttaaaaccgttttaaggtccaacgccttaaacggtcctctttgcttttatcggttaacatggaccaagcaagaaacgagtcagacagagggtgaagaagacgaagacgtaggacttcccctagagctagagaggataattgctcaggaggatcgagagatgaggccacatcaagaagagacggagcttgtagacttaggtgctggcagtgaaaggaaggaagtgaaagtaggcataggtatgaccccccccccccccatccgtgaggaattcgtggccctgccgagggactaccatgacgcctttgcttggttgtaccaagatatgcctagtttaagtcacgacatcgtgaaacat

SEQ ID NO: 21264 - DNA, 465 bp, Glycine max
  unsure at all n locations
tataagaacaaaattgcctaaatcatttccaaatatgcatgtgatttatgaagcattaacaagaatcaagccaaggctattgtgcaagcaatcaatggggcaaaacacaccaaaagattatgatgatggatggctcanattatcacaaaggtaaacttatcactttcaaattgagctttcaaaactatcatgacatgtagaggaaaaacaaggatntcaaatcacaaaatgtcaagagacttttattttcagaacaatttcccattntttgaacatatcctataattcaaagaaaaatatgcaaagttgtacatgcaaacaaaattgacctataatattaaactagaaacccaacaaaactaacaaatttaacacaaacaaaactaacaaaactagcaaaaccaaaaccaaagaacactcccncccccatacttaaacaacacatggtcctcaatgtagcacaat

SEQ ID NO: 21265 - DNA, 416 bp, Glycine max
  unsure at all n locations
agcttgttcttattaaaatggacataaatagtgggatgttaagttagttttacggggatttcaatttgaaatctgaaatgtgttcattttattttgtgaaggtttttgattcttctgcccagcaaagggatctttatgaacaagttgttactctgatagttaatgaagttctagagggatttttatgcaggccatgctagcaatcttgccactcaagcagaccaagttgaggttgagttgactgttaattattttcattatttatactcttgctaattatattcttatgtttgatttcatttgcacttggaaatttgagtgcaaaacatatgtggactgacatgctacaatggaggaaggagtttggtgttgatactattatgcacgtaaatgcanttggaatttatggcatttgt

SEQ ID NO: 21266 - DNA, 464 bp, Glycine max
  unsure at all n locations
ctggagaaccaagccaatcagaatgctagacgaaatatagatggttatatatgtaacaatggtggtaatgacggaccgaggcataaccgggttgagggagtaaagctcaatgttcctcccttcaaaggtagaagtgatccagatgcctacctggactgggaaatgaagactgagcacgtatttgcctgcaatgactacactgatgcgcaaaaagtcaagctagcagcagttgaattctccgactatgcccttgtttggtggcataaatactagagagaaatgttgagagaggaacggcgagaggttgatacatggactgagatgaaaagggtgatgagaaaaaggtatgtgcccactanctataacagaaccatgcgacagaaactccaagggctgtcccaagggaatttaaccatggaagaatattataaagagatggaaatggcgttagtgagggtcaacat

SEQ ID NO: 21267 - DNA, 411 bp, Glycine max
agcttagtaaagttaagcactaacaatctccccctttgggaaattttgtctaaaacatacttagacacttcctgagcaggtacgagcagttatgcaagtgggatcagcaactttcattatcagagtaatcaagcacagcggaaattctgcatgttgcaagtcgtttccaggatgtcaagacatctcacatgacatcagctttctgcttctgctccccctgtctccatgcttactgcagcatcttctaacagctactagtcttttccaggatgtcaagacatctcatgtgacatcagctgctccccctgtctccatgctcttactgttgcatcttttatcagctactagtagcttacaccagtcatcatcagcagcagcagtctccccctcaaatcatatacatacaactcc

SEQ ID NO: 21268 - DNA, 489 bp, Glycine max
  unsure at all n locations
tactcagcttcctcaagatccttttatctccctgttgaaatctcatntgtccattagttgngggtggtaaggtgtggaaattctgtgcacgaccccatactttntgagcaaggcatacatggatctattacaaaaatgggtgccttgatcactaacgatggctctagagactccaaacctgcaaaacatattagatctaacaaaatccacaacaaccttagcatcgttagttctggtggctntaacttccactcactttgaaacataatgaacaacaaggagaatataaacaaaaccaaaagagacagggaaaggccccataaagtctatacccaaacatcaaacacctcacagaacaacatgggttgttgaggcatttgttgtctccatgaaagtgagccgcctgctctctgacaaggctcacaagtgctacagattctccacgcatccttgaagatggtgggccaatagaaaccacagtcaagcact

SEQ ID NO: 21269 - DNA, 418 bp, Glycine max
  unsure at all n locations
attcagctcggacccgggatcctcttagtcacctgcagctgcagcctttttgttcttttatatcagagggactgatggtcactatgaatgacaaatctcttgagataaaggtagtgttgccatgtattcaaagcccgtactaatgcatacaactccttatcataagttgaatagttaatggtaggaccacttaactnttcactaaaataagcaattggatggcctttttgcatcaacacagccccaatcccaacatttgaagcatcacactcaatttcaaaagatttttgaatgtttggcaacgcaagtatggnggcattagctagctcttgctaagatcattgaaagctcttcttgtttctctcgccatatgaaccaacatttttttgacacttcattagaggtgctgcaatgtgct

SEQ ID NO: 21270 - DNA, 515 bp, Glycine max
  unsure at all n locations
agagatacntttgatgcctcgtagatctacacctttatacacacgccagcgaagctaatcactcacaatataatcaagtgccaatacattttcttgcatgaggagtttcaggcatgcagataagaatgaagatcaggcttgtatgcatccactgtatggacaaatactctcccaacgaatacagaatgatctgctcacatggtgcccatagcattcaaaacactttaatgatcagctatatcacctatctccatagatagtgtgcatgcatgtacatctatcacaaaacgagcagagaccattatctgcctaactataacgatgggatcggacccttcgataattccagcaacatanccaaaggtgtcaatccacacggattgccctacactattctacactagcccacctatattaaccttctgataggcgcacttatatacctgactgacctatacactaaatgctgctcccgcgtcattaacacacattgccttacggaggcctacaaacag

SEQ ID NO: 21271 - DNA, 414 bp, Glycine max
  unsure at all n locations
agcttgttagtatttattggtgtaatttgcctgttccattatgctcttaatgtctttagaggttacttcctcattgacatcttttgtcttgaatggaattgccatgacaggtctgttgttactgtctttgatattcggtagttgatattgtgttgcgggaggtaattccgattggattaactcaccatccttcacttgccaatttgttatgacatttgttgttggatcacctatgatgtcttgtttccaagggtaatctatatcctttctgatggcataagcatgaaaccaataaaagaaaaggacattaattntgactcgttcgacaaattcgtagaacttgtcttggatttgttttctgtttgtacccttgtaatgttggaaaaaccatctcctttgaggttcattcttcgg

SEQ ID NO: 21272 - DNA, 464 bp, Glycine max
  unsure at all n locations
cgagaactctctcttagggaattctttcttctctatcatcattttctatttcctttntccatcccttctcctccatcaattcctataacccttgtctagtgtaaggtcccttatggttatgagaggctaaacccttagttagggtctgacaggcctaaaaagtcaaaaaatgtattgtatatttcatatctatcaatgcaaacaagtgttttctttcctattatcttttcttacttttaatttcatgcatcattcatccttacatcatttttgggggttaggtgttcgacaaaaagtaatccttaatagatatacaaggaaggtcttacatgtatctattttatgagctcgacagagggtaatntctaatagaattaanaggaanatgtatctgttcttctttccaacgtgtgtaataaacataaaatttgaatgcattctctctctatctccnactctctttc

SEQ ID NO: 21273 - DNA, 407 bp, Glycine max
agctttattattatgccaaactcccttccaaaatctgatttcaagcttaaataggtggctttgttcgtgtttgcacgcttagcgcaactctaaaccgcttagcgtgcattagtgaatttcagcttagcacatgctttcctcgctcaacggatgggctgaagcggtgcgcttcgctggatgacccttcgcatagcgcaatttcacaactcatccttcttccagattcttcctcgcgcttagtcaaggggtgtttcgctcaacggatggctcgctaagccagaagattggcttagcaagagggtgaaaatcaacacttcacaaacttgcctaattaacctgaaattgagagaaaatgattattaaacacacaaaatggacatactaagtatttattacctatctttaac

SEQ ID NO: 21274 - DNA, 480 bp, Glycine max
  unsure at all n locations
tgtcttagcgtntatgcgagacggagaccaacatgctagctatcatcttcaagtaccaagaagagttaggtctagccacggcccacgagcatagaatcgcggatgagtatgctcaagtatatgcggaaaaagaggctagaggaagggtgatcgactctttacaccaagaggaaaccatgtggatggaccggtttgctcttaccttatacgggagtcaagaacttccccacttgttagccaaggccaaggcgatggcagacacctactccacccccgaagagagtcatgggcttctcggctattgtcagcatatgatagacttaatggcccacataattagaaatcgttaggaaacttgtatggtctctcagaccttgactggatacgacttcctttntgaaataaaatgagttgttcccatgtttctactccaaaaagcttgtgcgaatcaagtcactcccacattntatctctagcatg

SEQ ID NO: 21275 - DNA, 398 bp, Glycine max
agctttgttgggtgcaccagcaaaaatgctgggtgcacctagcaacactcaactttttatggaaatcagactttgtcctggttcggtccaattgatacttgggctgtaactcctgaacttgtcttgaaaaaaattatttcctaattgagcctaaattgttttggaattgttgagcaacaattaccataccgctggtatcaataattattatttatcaaactaacttataaacaaatggtttgaaatacctttgttgtactatttgtttattaaaaaaaatacatatttattaaagaaattataaattaagtaattaaagtatgtaacttttattattaattcaaaggatttgagttaaaagtatgtaactctttttatataaagtatctaaacttatc

SEQ ID NO: 21276 - DNA, 435 bp, Glycine max
  unsure at all n locations
tgtgaacattctcgaaggcttgaactgcacactggattttattgctgctgaacagaagaggattgttaattatgtcgcctcgttgcaggagatggggaaaaagggagaattgaaaggtttgttatctcaactcaatatctattntgtggttatctaatgatgcaagaactgatcttggactgaatttcatccatgttttgatattgttgttgttcaatgaatttacaattgttggagaagaaagttatgtgtttgggaagtttggatagtttgtatgaggtcttangttttatttgggctgaaaccagggtatccttcagcttagagtcgtagagtaatttcgtgaggtactgagatntgtttaagacgattatcactcctagaagatctgtattccatacacacggacctgaggaccgaacctttgactacatg

SEQ ID NO: 21277 - DNA, 409 bp, Glycine max
  unsure at all n locations
agcttgtatcttaatttagaattcctctataataaagtttattacatcaatccttttcattntttggtggtaaggacggctttagcccatcaatcctttttctatatctatcatattaatgatccgggctcctttgaatattttacaggaaagattctatttcacctgtaatccgatttcgtaatcccgtgatgtgaccgttttatttcatataaattaattccttcttttatatgtgcacatacaagagttgggttagccgtttttttcttgtacaaaagtaaattaaaccattttcaccagtttagcggctntcgccaccttcttctacctctacaatatcccaccactgccacaatgcccccttcacgtgtcacctcanggcgtcngacatcctcctctgtcatgt

SEQ ID NO: 21278 - DNA, 444 bp, Glycine max
tgatatttgtgccatagtaggccagatattgattatggtatgggtttggtaagcagatatatgaatgatctaaggacttctcatatggctgcagtaaagagaattttgagatatgtgaaaggcacacttgattatggcttcttattctccaaagcaaatcataatcaaggaataaggttaattggtttttctaatgcagactatagtggtgatgtagaggacagcaaaagcaccactagatatgtcttcaaattacttggatcaacaatctgcttgagttctaagaagcaagaagatgttagactttcaacttgtgagttagagtacatggctattgtctcagcagcttgtcaatcagccttgttggagtccctgttgtagaattgaatattcagcttgattcagttgttcaacttaatatggacaacaagtctgctatatgtc

SEQ ID NO: 21279 - DNA, 411 bp, Glycine max
  unsure at all n locations
ttcttgtatcatataaagtggatccgaggaactctcaaggacttggtcaagatgtctataagctggttgttggagttaataaatttagtactaatttctttggactgcagctttttccgaacaaaatgacaatcaatctctatatgttttgttcttttgtgaaatacaggattagaggtgatgtgaagagctgcctgattatcacaatacaactttatttgctgaacatcacanaattttaattattgaagttgtttaatccacaacaattcacaagtaacaagagccatagctctatattctgctnttgcacttgatcaagcaaaaacactctgtttcttgctttttcaagagacaatatttcctccaaaggatacaccatatccagtggtggatcgcctgtctatggga

SEQ ID NO: 21280 - DNA, 402 bp, Glycine max
  unsure at all n locations
ntcctttcttgtaaaagataaaaaagttcacttatataattctttcattcatgcttgaaacaagtaaaataatccaactaagcataaactaatacaagtagaaggataagaaaaaccagtaaatgatcaaaccaaactgtattttattcatattccatgtagtcttagatacatggaaatttgatcacatgaaccccattattctagtccctttttttgacacaagtaaattaacaagaaacaacattgagtgacactacttaattataacaaacaaattaacggaataagtgatgactagtactacttattagttgtagtatgttcctggggtttggaaccagtgcatgtatatttaatttcctttctcataaatctggactttggtgtcataagtagcac

SEQ ID NO: 21281 - DNA, 407 bp, Glycine max
  unsure at all n locations
ttcttcttgttgttcattgactccagattgctgcaaagatagacagagatctgtatggtgatctgcaaaagaacatagaccacagactcttgcaataagtgcatatttctaatttatggcaagctgagttactaggttgaccaaggcatncaagtttccttcaagctttttattttcagtagatgaagatgaatccgtggccacctcatggactcctctaaggacaatagcatcatttcttgcactgaattgttgggagttggaagccatcttctcaatcaaatatctagcctcagcaggggtcatatcaccaagggctccaccactaatgagggcagctngcacacaatttcttgaatcttttccagtactcatacaagctntctccactaagttgcctgatgcct

SEQ ID NO: 21282 - DNA, 459 bp, Glycine max
  unsure at all n locations
ntgaaatgggctcacatgtaggggtgagttgcgagataaatctctcgatataattcaacctgcccaagaaacctcgaacctgcttctccgtgcgtggttccggcatttcaataatggccttcattttctcgggatctatcgctatccctttctgacttacgataaatcccagcaacttccccgactttaccccgaaggtacacttggttgggtttagcttcagttggtatttccgcaaccttctgaacagcttacgcagattgacgaggtgttcgtcctcagtctgagatttggcaatcatgtcatctacgtagacctctatttccttatgcatcatgtcatggaacaacgccaccatggcacgctgataggttgccccagcatttttcagcccgaatgccatcactttatatcagaacgtcccccatagggtgacgaaagtggtcttctctacatctt

SEQ ID NO: 21283 - DNA, 410 bp, Glycine max
  unsure at all n locations
ttcttgatggattacttgatgccttggtcaacctagtaactcagcttgacatgaatcagaaatatgcatctgcacctgttgcaagagtctgtggtctgtgttattctgtagatcaccatacagatttcatccttctttgcagcaatatggagtcaatgagcaacctgaagcttatgctgcaaacatttataatagacctcctcaacagcaaaaccaacaatggcaaaataattatgagctttcgagcaatagatacaatccaggttggaggaatcatccaaatctgagatggacaagtcctccacaacaacaacagcctgtccctcctttccagaatcctgctggtccaagcaagccatatgttcctcctccaatacagcagtagtcacaacanagacaacaagcaactg

SEQ ID NO: 21284 - DNA, 475 bp, Glycine max
  unsure at all n locations
tatatttgacanaatngaagaatattttcttatctttccattgactactcacatgctccatttggagttatgtagtatcctctaggccctgcccaaggcagataggtcaagtaagcacaaaatccaaaaattagctacaattctcaattaagctcaatcatttacctaagaccaaaactgagttagggtgagaaaataagggtcaaagagatgttaattgagcgaagaagaatagaaaaatattaaactataaatgctcaatcaatattttacatttttttggtttattgctaattatacgacatgagtttttctaaaaaattgatgttgtgaagtgtatgttaacattagttttttgaaaaccaaagttaacattgagttcattaacgttggtgtttaaccaatgttgaaagttgaaaaaaaccaaagttaaaatcctattttctagtagtgaatcanactntcccaagttatc

SEQ ID NO: 21285 - DNA, 395 bp, Glycine max
  unsure at all n locations
agcttcttatccaaggctcatcttggtggtgaagctccttcttccatggcttattccttaatggatggcgcctcctctcacctcctttcctttgtcttccgctgcatctccatggtggaaaatcaccattaaaggaccccattgaagctcanagatccagcctccatagaagccccacaagcaagcttccatcaagtggtaatcagagcacaagagcttcaagtaggtgctccttaaacctccattaatttttttgctttaccttctcttccattgttgcttcttcatttttctccatgtatctcctcacatgtcttgttctanatgttgttaacatgattctttagagtttccaccgattaaacttgctatagaagttagaattgattttctat

SEQ ID NO: 21286 - DNA, 454 bp, Glycine max
  unsure at all n locations
tcttcatttataaccttgatattcatgtatttattgtgtcacatcggttggattcttcactcttgttcttcgtttgaagtcttgagcctgttggagcatttagtgcttgtactaaatgcacatcccttcttcattcaaagtccatgccaataggctagtgtgtcttgtattttagcaggaaagtcatttctttcaacataacatgattgtaacaatagagtgtgccttttgatgaggatgtgtgtctttcagacagtggtctccatttattattcttaagactttgaaagatcccaggagaatggtttatgcagganagaatctcacacacagagtattaaatgaaggtcttanatacactacttaaatgctatgttagatcgtcttatggatgcaacatatgaatatacagtcgtagagatacagaaaatgatttcatagcatatcacacacc

SEQ ID NO: 21287 - DNA, 398 bp, Glycine max
ttcttgtgacatgaggccattaagtgcctctgccacaatgttataaagaagaggtgatagagggtctccttgccttagtcctttctgaggtaggaactcagctgagggactaccattcaccaaaaatgaaacagatgctgattttagacacccctcaatccattgaattcatttgctgcaaaagcccatcctacccatcatataagtgagaaactcccaagacacaaaatcatatgccttttcataatcaaccttgaagacaatgcaaggcttttggcatcttttggcctcttcaactacctcatttgtagtcaccacgctgtgtagcatatgtcttccttctataaatgctgattgcctctcatgaataataaaaggcatgaccttcttcaatctat

SEQ ID NO: 21288 - DNA, 466 bp, Glycine max
tgtaggattatggggtacccatcacatgtggtactaggtggctgtcgggcgatggtgcacaacaagttttccacatccacaatgcgcgcataaacccaccatcccctgttgcccacctccaactgagctcacgtactcccacgtagtccatatcctcgtttctctcaacaccgagtagatgcaatcggctctgatgtcttgatgatgatcatgatgatgtgttgcaattgatgcaaatgggctgttcaagattaaaattcaagacaatacttcaagattacaaggcacaacatcaagatgatcactagaatattatgaagggaattcctaattgaattatcagaggataggccaagtgatttacaataaaaagtgtctttcagaggctctactctctggtaatcgaacaccagaggatgtaatcgattaccagtggccaaatacgtgttataacagctatgaaaac

SEQ ID NO: 21289 - DNA, 405 bp, Glycine max
  unsure at all n locations
agcttcttatcctaggctcatcttggtggtgaagcttcttcttccaaggcttattccctagtggatggcgcatcctctctcctcttctcctttgtcttccgctgcatctccatggtggaaaatcaccattaaaggacctcattgaagctcaaagatccagcctccatagaagccccacaagcaagcttcctaaggtgttcctcctcagttttagacttggcgatcatgtcgtctatgtagacttcgatctctcggtgcatcatgtcgtggaacaaagccaccatagcccattgataggttgccccgacgttcttgagcccaaaggacatcaccttatagcagaaccttccccacagggtgacgacacatggtctnttccatatcctctggtgccatctttatctg

SEQ ID NO: 21290 - DNA, 482 bp, Glycine max
  unsure at all n locations
tgctaacccatggaagctcctaatatctcccacactntnntgggtggtctcattcttggatggccttgattntctcagggtccacttggaccccatttctaccaactacaaaacctaagaaaactatattatctacacaaaaggtacacttctctatatttgcatagagggtgtttttcctaaggactgaaagaacttgcctgagatgtcctaagtgatcatctaggctcctactgtacactaaaatatcatcaaaataaacaactacaattctacctaggaaatcccttaagacatgatgcataagcctcataaaggtgcttggtgcattagtgagcccaaaaggcatcactagccattcatacaaaccaaacttggtcttgaaagcggttntccactcatcaccctttttcatcctgatttggtgataaccacttttaagaatcaattttgaaaagatattggcaccatgcaactcatca

SEQ ID NO: 21291 - DNA, 270 bp, Glycine max
ccaataaaggaccccattgaagcttaaagatccacgctcactagaagcccccacaagcaagtttccatcaatatggataacatatagatatgaccataatcactgagataaacttcatgaaacaggacctcaacatcgggcaacatgtcgagcacaatgtcgatgaaacttaagacacttgagcatctcacaacaactgaatttctatactctggacggaccttagatatgaaggcgagcacattacccacgaactgatcaagtgcttca

SEQ ID NO: 21292 - DNA, 416 bp, Glycine max
  unsure at all n locations
agcttattatatctaaattgcctaaatcatttccaaatatgcatgtgaattangaagcatcaacaagaatcaagccaaggctattgtgcaagcaatcaatggggcaaaacacaccaaaagattatgatgatggatggctcgaattctcacaaaggtaaacttatcactttcaaattgagctttcaaaactatcatgacatgtaaaggaaaaacaaggatttcaagtcacaaaatgtcaagagacttttattttcagagcaattacccattacttgaacatatcctataatttanagacaaacatgcaaatttaacacaacaaaactaacaaaattatattagaacccaacaaaactaacaaaattaaactaatttaacatgactaacaaaaccaaaaccaaagaacacactccccc

SEQ ID NO: 21293 - DNA, 379 bp, Glycine max
tcatcaagagattataaatatgtgaccatggcatttgtttcttgaatgatctctcatctatcatctatctttcaatctatctttcaatatcttctttcatctctttcaacagatctttctaaattatttctcttcattattctaaaagattttttcaacactttctcttccaagaaaagttttttgttcagaaacttgtgctattcatctttttcattcacttatccctttgccaaaagaaccaaggactaatcgcctgaattcttttgtgtctctcttctcccttacaaaagattcaaaggactaaccgcctaagaattctttggattcttccctttcccttaagacagagattacaaatgactaaccgcctgagata

SEQ ID NO: 21294 - DNA, 415 bp, Glycine max
  unsure at all n locations
agctnttatttcaataaataagtttaaataagttggcccataatcaatataaagtaatggaaaaaaaacataatcaaacatctatttgtctttatcaagtctatttcaagtctagtattaaaattcaatatttttttttatataatgttactctgtaataatttttatatgcatttattatcaaaattaaaattcattntaaatgtattgaaatagagtaattntaattaaacatatacaatttttaattattttaaaacaatatttttaatgattntaaagatattaattntcattatgtgataatattaaagattaatctcatcgtataataaataaaacactntcatttagtataattaaaattatatattattatcattattattatcaccattaaaattataaaacactt

SEQ ID NO: 21295 - DNA, 421 bp, Glycine max
  unsure at all n locations
tagtagggaatctatccttcctaagatggagttctttccagtcactgtcgttaagaactagctcttttcttcctctattgcctttagttgaatacacctttgtgtggttctctatttggttcttaaccctctcatgcaacttctttacaaactctgacctagattccctttcttgatgtataaacaaagtgtccagtgggaggggaataaggtctaacgatgttagggaattgaacccatagacaacctcaaaaggggattgcttggtggttctatgagctcccctgttgtcggcaaattctacatgaggaagatactcatcccaagacttatggttgccttttagaagagcccttganagggtagataaagacctattcactacctctatttgcccatcagtttgtggatgacaagtagt

SEQ ID NO: 21296 - DNA, 421 bp, Glycine max
  unsure at all n locations
agctttttcagtttcataaagcttttggactaattaaattaatactttcaaaattaaagataaatatttcatatatcatcatttttatatttttattattttaaaaatgaccataatatttttatgtaaattaaactagttttctaggtttttaaccataatatatgtatttttcaaaacttccatttcaaagaaaataatatttattattttaagttcaaaactcaaagaggaaaaaatgcatgcaaacaaattcaaataataagtattggctaaaatatttttattatgaaattaaattttttaaggataaataatttcattntttgtaatatttgatattttgattnttatttgatccttanaagtaacattgtaacaataaaataatatttttcanagtttatgaaaaaataatata

SEQ ID NO: 21297 - DNA, 482 bp, Glycine max
  unsure at all n locations
ctgagccaaaatcccaacttaccatataccttgaaccagggtgttattataatccttgccctcggaagaaaacacaaaaagataggaacttcccaatcaaaagagtggaagaaaacaaaaagagaaaattcccaatcgaagagtgggagaaagcaaaaaaaaggaaagaaaattcccaatcaaagatcggaggaaaacagaagaaatatacagaaaggtctttggaccagacaatatctgaacaatacagaattgtcaccaagaaaatatgaaaagaaaggaaaccacgacctanagtggtcctctccctttgattaccaaccaaaatcctgtgcgtcggtgacttgtttgcctcgcgctaaacaaaaatagaanataaaaaggccaaaaacactcaaagccaaatttcccaccaagaataaccccattcccaagaaaaagtcctactgatccatgatcacgcatgtaatctttgatttgat

SEQ ID NO: 21298 - DNA, 409 bp, Glycine max
  unsure at all n locations
ttcttataataataaacttggccttctcttaattgtctttgggcttggcgaccacgatcaacaaagtactttcggcacctactatatgttgacttgaccaacgctgttattggaatgctgcgacaatctttcaacaccttattcacacattctgataggttggttgtcatgtgaccatatcgtcgtccagatgtatcgtaagccatgctccatttttccttcgaaatgcgatcaatccatcttgctatggctggactcagttgacgaaatttttctaagttttgatcaaacacatgcttgcaaggagtgtacgctgcatcaaatttgttatcatganaagttatacgtagacatcaaagtcaaaataatataatgtataaaataaaccttacccaatttcttgaacatc

SEQ ID NO: 21299 - DNA, 477 bp, Glycine max
  unsure at all n locations
cgaagatgatgttntaatggaggataagaaagagagaatgtgggtgcacanaattgaaggaataaaagagggagagaagtggaactttgaagtgtgtctcataagactttcattcttcaaagttacaacaagtgttacacatgcttctatttatagactatgtagcattcttgagaagctttcttgagaaaacttacttgagaagcttctttgagaaaacttccttgagaatctagagcttagctacacacatccctctaataactaagttcacctccttgagaagattcctaaagaagctagaacttagctacacacacctctctaatagctaagctcacctccttgagataagaagctagagcttagctacacacccnctataatagttaagctcacccctatgcccaataacatgagtatacagaaaaagtccctactagcaagactactcaaaatgccctgaatacaatgcta

SEQ ID NO: 21300 - DNA, 411 bp, Glycine max
  unsure at all n locations
agctttttcatttgaagaagaagaaagataagtagcaaaggtttcaagatttctcaaaagttgttcaagaaattctaaaaaattgttctaaaaagttattaaaatgcaagtcaaggtcttgcttttatagactcttcatgtctggtcaagaaaaccattggaagagttataaccttgagaaaaacctgaaaaccattggaagagttacatctcttgactttttattcaaaacttgtcactggtaattgattaccaaaaccatataatcgattacacaaaacattntatgaaaggatgtgactcttcacaattgattntgaatttcaacgttcagatacactggtaatcgattaccaatatattataatcgattacaccatttaaaaatcaattggaacgttgcanattcag

SEQ ID NO: 21301 - DNA, 478 bp, Glycine max
  unsure at all n locations
tcttatccaaggctcatcttggtggtgaagctccttcttccatgtcttattccttaatggatggcgccttctctcacctcttttccttttcttccgctgcatctccatggtggaaaatcaccattaaaggaccccattgaagctcaaagatccagcctccatagaagcccccacaagcaagtttccatcaatatggataacatatagatatgacaataatcactgaaataaacttcatgaaacaggacctcaacatcgggcaacatgtcgagcacaatgttgatgaaacttaagtcacttgagcatttcagaacaactgaatttttatactttggttggaccttgattntaaaggcaagcacattacccaggaacttatcaagtgcttcagacgatgcanttaaattgagatcaccatccttgaacaaagataatcaatttctgcatcaaacagttgtgatgatagcagataacatac

SEQ ID NO: 21302 - DNA, 394 bp, Glycine max
  unsure at all n locations
atctntttctgcacatttgcctcaattattttttcattccctacatcccattcaagtaagtgccatctccatctaattttacctttgccttgagatgtttggtgctttgtttgttgatttctttgtaatgtttgtgagatgagttgtgtgtaaacccatggtccaatgctttgattggtggctgtactagatggctctaggcctatctttgattttttttttacagattagcatgtcatgttgctccttatccctcatttatacatgctttaacatatgcacaccaactatntgatgaaataacacanttgctattctacgtgttattttgatgcttgaatgggtaatgatatctacacatgttcagccattattttacgtgtatgatcaactt

SEQ ID NO: 21303 - DNA, 467 bp, Glycine max
  unsure at all n locations
cggattgatttaatctaactagggatcgaggtttagtaatttattgctcagcatagagcacanaaacatgattgagtagagaaacatctttatatgcatcagctggtttgttagaaagacctaacacctttacctactgctgtcaatcttacttacttgcatttttactatatttagcctagacttattttaattttgttttaaaccatcaattatcaatgtttctttcaacaatgccttatttctgaatttaaccctgcctaatactagttccctgagttcgatactcggattcatctgttttaattntaaatacttgatgacccgatgcctttccatcaaaccggatttcccttgaacatatttgtatgaagaaaaagtggaccaaaaagtatatgcatgggaaatccaacactggtcttatctgtagtatgcttttgcatactaagcatgtgattaagatcact

SEQ ID NO: 21304 - DNA, 412 bp, Glycine max
  unsure at all n locations
atctntggaaattgattnctatacaaaagttagtcgtataaagcgactaacaaactcccccaaatttacagttttgcttgtcctcaagcaaagaaagaacagttcacttgtcctcaagtgacaaagacagtggccaaataaaagaaaatggtgtttgattcatcaaggacatcaaccatatgaactgaataccatggaatgcttaaatcaattacttctcacaagcatgcagtctttcaaagataagagcacaagtattagagtcacagctgaaataagctagtaagcatgacaganatcaaggaaggatcatcaaccaaaacctcacagtcattgtttcactcaaactcaagtgtntaggcttattccatcatatacaaccaacacaagttccaacctttgcatttcatct

SEQ ID NO: 21305 - DNA, 403 bp, Glycine max
tggttcgaggtacttacccgttgaagatcgaagaacgattttatcgaatgaagatcgtcgaagaacgggtcagacctttgcgagattcctcacggaaaacgttacggaaacgtttcggaagcgcctcggcttagattttcttcacggaaacaatttttccaagcaaattcgaaagagagagaagtgcctaaggggctggaccccttccttcttcatttcctcccctatttataggaaaataggggaggtggttgccgcccagctcgcccaggcgagctcagctcgcccaggcgagcagggttgcttcctccagaagcaaccgccttctggaggaatcttctggagggcccatgtgggcctgggtgctatgtgcacccccattcttactaagtacacccccctc

SEQ ID NO: 21306 - DNA, 409 bp, Glycine max
  unsure at all n locations
agcttgtgatgttatgagcaagtggaagagagttgagcttatctgactttattaaaggaagtttgtattgataatcgaaaagataggaaggaggatgggtcttgctagctgaacggcgaggagaagaaggttgatgggagattggtgattcatttgaggaaggaggagacatggttgatggtgaataaagggacggctcgttgaatggaggattggaaatagggctactaagtgaatttggtaaaggtgatgaaggggatgtggtctcaaagggaacaaaaggtgtgttggttggtatagcaggtgaggatggtgtatttagtaagttagtgatggaattattangaagaggaggtgaatgtnnggttggattgataggagtagtgtgaaaaggaaaaattagttcatg

SEQ ID NO: 21307 - DNA, 370 bp, Glycine max
  unsure at all n locations
cgccattgccaaanaatattaatatcactaagtttacttttatgtattttntattccatttatatattcttgttttttattttaatttttaccgattaatttggaattgtatttatgttttatttttttagcattcttgaattttcatgtttctaacctttataattttttttctatttttatttaattttttttatatgaaatagcaattaaatgcgtattaagatttaagggacacctcatagagggatatctcatgcacgctcaattctcttaattatgagtcacggtttgcaaattgcaacccttgaaattataggatagaagaggaaattgattatcaattcatttggggtaatggatgagatag

SEQ ID NO: 21308 - DNA, 400 bp, Glycine max
  unsure at all n locations
atgcttttctccatcaccacaaccaccagtagccaccacgaaccgtcgtagttctccgttgaaacctcacaccgagaggaacccttcaattggagcgaaatcttccaaacttacctcacggtttcggttgagaatgaagcccaatctgaccttcgcagttttcttcgaggtaaccgtgattctaagcttgttccttggtagtttaagcttatccttgcatcattttctgactttggaaccaccattgtaagttttatgcttcctttggaaaaccctagagaaagacactntgtaaaagttatctttntatgaaatgggtgttattttcgtgaccttcactgaatcccagtcgcattggcatgactnagaatttcaaatgatgctccttttgtagactcga

SEQ ID NO: 21309 - DNA, 464 bp, Glycine max
  unsure at all n locations
nttaaggccaaaccttntcaaccatcatgatattctnttaaaatataatggactaacatgaatcttttcttttgatctcttgatcttgacttgaacttgtagtgtaaaaaataatggactaacatgaatcttttctttaggtcacatgtttgttggtatatgtagaggatgaagactcacccatacgaccaacatttttcaaatggaatcattgatgttttgtagtcgttggggatggaatgagttcgctacaacaagcaataataaggtggatggacttgttcaaggaaatgaggatcttccaaggatacatcatgagttcaaaagggtatatgatgaattntagtttatggattcattgctctcggtcttactcatttcttggatattagagagggtagactagactgtcgttcatgatgtattaaactcttggatctgacttagatgttatatgtatttaa

SEQ ID NO: 21310 - DNA, 387 bp, Glycine max
agcttttataggtgaaatcaggtgcagccatttcccttatagtcctctcacgaggtggaggttgtgccatgttctcagaatgtgcaaaatcagaatgctcagaatcagaatgctcaaaattataatgctcaagattaggatgttcaaaatcaccaataacagaatgcacagattcaccagttatacaatgctcagaatgatcaaaaggtataaaatgatgcctaactgaaattctgatactgaggacagatgtcgtacaggatgtcacgacatcgcgcttcagaacatgcagattgtatatgacagtatgaacagattatacaagtaaataacacaagagaattgtaacccagttcggtgcaacgtcacctacatctgggggctacc

SEQ ID NO: 21311 - DNA, 464 bp, Glycine max
  unsure at all n locations
nttccacttccacacaaaaatgtaattctaattctatcacttgtttntactgtggaagaagaggacatggcatatcaacttgctacttcaagaaaaattatagtaacattaaaatgatatgggtcccaaaaggatcctcagtttatactaacatgcaaggacccaataaaatttgggtacctaagtcaaaaacttgattatgcaggtatctttgagaaagaagtggtacatagatagcggatgctcaaaatatatgactggagatgcatcannatttacacacatatctccaaagaaaagcgggcatgtaacatatggtgacaacaacaaaggtagaattcttggagtgggtaaaataggtacannatcttcanactccattgaanatgttctacnttgtgaaggccttaagcacagcctgcttagcgttagtcaactatgtgacanaggctatctagtatcat

SEQ ID NO: 21312 - DNA, 407 bp, Glycine max
  unsure at all n locations
agctntataaagtgtntgtctccttcgtagtcaaataacacataacttggataatttgaggaccattgtctatgataagcaaaaggaacctcaatgacgttctgcaaattaacatttgaagcatattatttatttgatattaacataaataagtaaatgtttaggggtgaaagtcatgacctgctcaagatggaatgacgcatcaaatcggtgcacaattctcggtactcataaatttgatgggccctagatgagaaacgtttatgtaatgagtaagtgaacaaagatgtacccattgaaaggagaagataaatatgcgcaatatcaaacatgtactatgaacganaagagcaagcatagaaagatgaaggatgcatgatgaagcaaactcgaacatatacttataa

SEQ ID NO: 21313 - DNA, 474 bp, Glycine max
  unsure at all n locations
ctatcttttaatgcgagtntagatactagttgatatgtaaaatatcatctcaacttcactagacaatgtgaaagttataactactagcttatgagaaaacatgaaaaaccacatctagatggtgaaatcaaacacgctattaatccttgagggaagtatattactattgattntctatttccatcatttgtgtaataaggcatttctttccttgaactataaattagtataattggggatcttaatgcttaattggactatctgactcacagatcccaaatgaccttttagttttttaagctctgaatttgcgtttctaattgaaagatgaatgactaatgatctgaattttcttcttgcaatggtgacattnttggcagacttatgtgtccaacaatgaaaagattgtgcatctcagaccccggacttcaaccaaagaattcaagctaacaagaaaatccaagtttgataatc

SEQ ID NO: 21314 - DNA, 416 bp, Glycine max
  unsure at all n locations
agcttgttcattttatattctgatgagggtgttccatatgttctcaagactggactaatacatttgctgcccaagtttcatggtcttgcaggtgaagatcctcataagcatcttaaggagttccatatcgtttgttccaccatgaagccctctgatgtcctagaagatcatacctttctaaaggcttttcctcattctctggagggagtggcaaaagattggctatactaccttgctcccaggtccattttcaactgggatgaccttaagagggtgttcttggagaaattctttcctgcatctangaccactgccatcagannagacatttcaggcatcaaacaacttagtggagagagcttgtatgagtactgngaaagattcaagaaattgngtgcaagctgtcctcaccacca

SEQ ID NO: 21315 - DNA, 283 bp, Glycine max
  unsure at all n locations
gtgaactccggaagcctatttactggattgtttctccccggattgtaacttgtgccaggattgaaatcaccggtgggacgaggccttgcangagctgtggcttgagtgatggctctttatggtggggttgatgtcccttgccggacgggtgtcgagttggaggggtttccgacgtgggccgaaaagctcggaaggtgctgggtatactgatgattattgtgatggggtgatagtggttttggccaagcatgatccgacgttatggagtgagcatccacttctt

SEQ ID NO: 21316 - DNA, 414 bp, Glycine max
  unsure at all n locations
agcttgttccttacatggacatccaactcaaaagacgttaaagaagcgctcatgggagacaacctagtatttttgaactttcttttaatttcttttatacttcctggttacatatttgtgttgtttaaatatttatttatttgaactctttttaaattgttaagattatacttaattataagtttattataagagtttttgtacccatgaaaaaaaaattgcccttaactcacctgngctagtggacagctcgctttggcgagtgaatgtctgtagtgaaaaataaaaatgggtgaaatctaatttcaccccactctcatttcacacttcttcttccttctttttgcatganaccttagccctcattcttccaaaactcgcccaagctaccttcttttccacaaatccttcatt

SEQ ID NO: 21317 - DNA, 477 bp, Glycine max
  unsure at all n locations
gcttcatgatgatgaatcaagttgattcaagaagttntgatattgtcttgttgttgacaaaaaacccaaagaatgatttcgagattaaatcaagatcaaattcaagaatcaagagaagtttgatttcaagattcaagaaaagatgaattcaagttccaagagaagaaatcaagaagacttcacaatgggaagtattgaaaagattttttaaaaaacaaacatagcacaattttgtttttcaaaagagttttcacaaaattttctatgttaccagagtttttactctctagtaatcgattaccagtttcctgtaatcgattactagtggcaaagtttgatttcaaaagcttttaactgaatatacaacgttccaattgatttcaaaatggtgtaatcgattacaagatattggtaatcaattactagtgcatctgaacgttggaattcaaattcaattgtgaagagtcacatcctttc

SEQ ID NO: 21318 - DNA, 419 bp, Glycine max
  unsure at all n locations
agcttggttcgttgtacttacccgttgaagatcgaagaacgatgaagaacgaatgaagaacgtcgaagaacggttcaaacctttgcgaaattcttcacggaaaacgttacggaaacgtttcggaagcgcctcagcttagattttcttcacggaaacaatttttctaagcaaattcgaaagagagagaagtgcctaaggggctgaacccttttccttctcacttcctcccctatttatagcaaaataggggagatggttgccgcccagctcgcccaggcgagccangttgcttcctccagaagcaacaaccttctggagaaatcttctggaggccccaagtgggcctgggtgctatttgcacccccattnttactaagtacacccnctctgcttntttttttgtgattcttttttcgtaa

SEQ ID NO: 21319 - DNA, 306 bp, Glycine max
tctaagatgggctaacttgagccatagtccatttatggctccatagtagttaattattgagagggttccttgcatggtactgaatcttgctttcaatttcatagtaagtagtaaagtccttcttcatggagtatgtctcattaagattcccctgcatttcacgaatggagggataaaacatgcaattacagcttattttgtgaaccaaagtgccatatctaggtttatgataagagagtcttcatcatccctagcctcaaactttggacctaccctttcaatatggctcaacttcatatgcctttt

SEQ ID NO: 21320 - DNA, 366 bp, Glycine max
  unsure at all n locations
ttctttttctttanggcttgtacctcatcactttcttccgaagctttaacttcattgtctctcacagtctttagatttgggagccaatccaatccttgtgtccggattctcagccacttattatagcctccgatgatcccatcactgcttcccctaagctttctgtcctttcttcacgccgcctcccatgccttgcgaactccttggagtaccctcgcgttgtggtcactgaaacctcgtgcgatgaaaggcgtgatgctttcgtctgatggcactcctctcatgggacatccttcgcatgaagatagaatcctgattcttccttccttctagcgagggaaccatttaacagacgcccctccatgc

SEQ ID NO: 21321 - DNA, 436 bp, Glycine max
  unsure at all n locations
ntctanactntgttnttctgcaagtggaaattctgcagattatatatctgtgctattntttcttccttctccctcttgcctaaagattcaaaggactaaccgcctgagaattcttttgattcttcctcttccctttaaacaaaagatttcaaaggactaaccgcctgggatatcttttgtttccccttacaaagattcaagggactaacctcctaagaattctttgtcttaacacattggagggtacaccctttatggtacaagtagagggtacatctacttgggttgttatactgagaacaagagagggtacatctcttgtggatcagttcaagtggagggtacatccacttggatgttcaaagagaacaagggagggtacatcccttatggatctttgcttgtaaaggattttacaaggttattggaaatccta

SEQ ID NO: 21322 - DNA, 411 bp, Glycine max
  unsure at all n locations
ttctngtattgattttgaaaggngaaaccctgctgcttggacaagatctgcctttaaggtaaacacaaaatgtgatttgcaagtgaataacatgtgtgaagcattcaacaatggtaaatggagtacaaagataaaccaattattactctacttgagggaatctgattntacataagggccaaaattgtgaagctgaggactatcctcatgagctatgagggttcaatctgtcccaaaatttagcaaatcattgaaaaaaaataaaaaaaagcatgtgaagcatggtgggcacattggtgtggtgatgctgatttatctttgtttgaggtgtcaagggcatggaaaaanttgttgtgaatcttaaaanatagaaatgttcttgtagaaagtgggagctaactggatcaatgg

SEQ ID NO: 21323 - DNA, 476 bp, Glycine max
  unsure at all n locations
tgcagccagtacctttatggcacagaggatcacttctgtgattgttctgtcagcactctgtgagactattgatgctgatgtgtcaaggttatttttatttttattnttttatttgngattgttagttgttagtttttgttagaacatctccaatgcatgatgcttaaatgaattgcttaaagttaaacaatgtttcttaacaattttttttattanaatggatgatatgtcaatgctctgtataattgagttgtttaattgattattataaaaaaagaccaattttttaatctaaaatttaatgtgactcaagttaagtgcttactttanaaactttagagctgaaataaattcttgtataaagttcttaaatctatgtggcattaattgtaggattcacaaatttaagacaaacaattcatttaagcaatcatacatgatagacgcttttggtggagaaattcgaacccccaact

SEQ ID NO: 21324 - DNA, 413 bp, Glycine max
  unsure at all n locations
ttctttttactgaatttgcaacgttccaattgatttcaaaatggtgtaatcgattacaagattttgataatcgattaccagtgcatctgaacgttggaattcaaattaaattgtgaagagtcacatcctttcataaaatgctttgtgtaatcgattacaaggatttggtaaatcgattaccagtgacaagttttgaacaaaaatcaaaagatgtaactcttccaatggttttcaggattttctaaaggttataactcttccaatggttttcttgtctagacttgaagagtctataaaagcaagaccttgatttgcatttaaaacaatactgacaacctttacaaacaacttttccacatattcttttactagctntgaatctctttgaacattttcttgaacttcttcttctt

SEQ ID NO: 21325 - DNA, 480 bp, Glycine max
  unsure at all n locations
nttanattgaatntacaatgttccaatttatttcaaattgttgttatcgattacaagatattgctaatcgattaccagtgcatctgaacgttggaattcaaattcaattgtgaagagtcacatcctttcataaatagctttgtgtaatcgattacaaggatttggtaatcgattaccagtgacaagttttgaacaaaaatcaaaagatgtaactcttccaatgattttcaggtttttctaaaggttataactcttccaatggttttcttgaccatacttgaagagtctataaaagcaataccttgacttacatttaaaagaagaacttacaatacttacaacctttacaaacaacttttccacatattcttttacaacctttgaatttcttcttcttcttcctttgcaaaaagctntctaaactnttctggttttccaaaccttgaaaataaaagtgtgctattcatctttttcattccc

SEQ ID NO: 21326 - DNA, 415 bp, Glycine max
ttcttgtatactctagattcacttgtcttctttcattatcatcatcaaaataccttttgaagcatttcaatctttcacgagtaagttttccatcttagtgtgaaagaattttatttgaatcttcacttacgagcctatgaaagatgaagaaaaaattataaaaattggaaagcaaataaaagatttcaagggtgcaaaccttacaaagttccaatgcacccaacttgaaccaaaatagtaaatcagaggtcaacaactacaaatgcaacaaacaacaagtcaaagtcagcaaccgtaaatgctatgaaggtcataagcaaaacgaacagcgataacaacaaactcaaaccagtaacgaatagacatgaatgagagaaccaataaaaacgtacgtgaatgaaggagtgacatgact

SEQ ID NO: 21327 - DNA, 378 bp, Glycine max
  unsure at all n locations
tgtcctcggtgacgaanacaatagaataagccccttcgattctttcacaggcgtcatctattcgaagaatgaagggtctgtgtttggaggtggcgatgaggtggaggacaacctcggtgtcagaggtggtgttgaagatggagccgttgtcttcgaggttggttcggagggtcttatagttgacgaggttgccgttgtgggccacgccgacggagccgaagcggtaaccggcgacaaagggctggacgttattgagcatggattggccggcggtggagtagcggacgtggccgatggagaggctgccggagagctggtctagttttgattggttgaagacttctgagacgaggccaacgccggtgatggattggatga

SEQ ID NO: 21328 - DNA, 391 bp, Glycine max
ttcttgttcctggaagaacttgttccctggagctattgagaaaagcttgatgattttagagcactgcaagaaaagggtctattaaggatgcaaaatgggtgtgtgatcaatcaattgtgcctgcagtataagccaattgaggaggaacatgcttgcattttgatgatgacaattcacaatttattttgaagagaccagcaatgacatcttatctggcagtcaaagactgtaaaagatggcattccatcggttttaatggcatcccagattttggatcttgtgtcatttagtttaatttgactctaacattaactagtttgttatttaacctgctatgtttattaactattaagaaatacattagagccattacatgcaatcactctttcat

SEQ ID NO: 21329 - DNA, 445 bp, Glycine max
  unsure at all n locations
tggctaggcttggctcgtttccaccctatattgtatgctaataattgtaagcagcactaatgggtagtgggtgccagcacatggccgcctgctccaccaatccaacttccctttcttaaatcatataaacataaggacaaatttgtaatcatttatttatcaaaaaacttttttaattcaattatttttatagttgaaagctagctatcagactaattcttctttttgtgtgtttgatttcaaatccaaaatttacatttagagtaaaatcacattaaaagattatcttatgtaatgttacaataaaaatatataaaaataatactagtttgaccaacattactaatgtaattctatgtttttctctaatctccccttcattntcaattcaaattgcttcgacttgttttgttcatctctgacatgtgttaattctgccatatcg

SEQ ID NO: 21330 - DNA, 344 bp, Glycine max
  unsure at all n locations
ttctttttgtgatgatcttagaggaagaacataggagtaacttgagcatccaccctggtgctaccaagatgtatcaggatcttaagacaatgttttggtggccaaacatgaagagaaaggttagtgagtttgtgcatgcatgtttagtctatcagaaggctaagatagaacatcagagaccctcaggtaagctgcaacccttagagataccttagtggaagtgggacgatatctccatggatttcattgtagggatacctangacccccaaaggtgtagattctatttggtttgttgttgaaagattaatcaaatctactcactttatccccatcaatatcaag

SEQ ID NO: 21331 - DNA, 464 bp, Glycine max
  unsure at all n locations
tgcctaattaacctgagattgagacattatgtattttaaacactctaaatggaagtactaagtatttattacctatacttaacagaaaatacttataacactacaaaataaccaaaaattagaagagtttgatacaatttccacaagttttatacacaaaagttagtcgtattcaccgactaacagtctgtcgatccctactatcacaattgtctttgggaatatcccatgagctcttggttgaatgagttttcttctcaaatgtgcaagtgtgaaacctcaaggattctctttttctttatatatatattntttaaacaatcacaagcgtgcatgggttccattccagaatcaaaacttantagcaaaattagtcattccttgatccacatgggctttattgggcttgtaacatggtcaggggtaagaggtgatgcantcctaccccgcaagggtatcggata

SEQ ID NO: 21332 - DNA, 389 bp, Glycine max
ttctttttccaaatggacttaccttgaattaattcctttgatagcccttttgagccttgtttccctttccttgttttgaagctcactacaagccttaagtgaaaaaccatgatattaccatatccttaaggaattttggagctttggaattgttttgggaataagtgtggggggtttttgtttcattggacaacttgttttgttgactatgcttcatgatgtattttgggtcatacttgatgtacattgtatattggttaaatgttggacatgctgaatgaaatgttgtttctcaaaggtaaaaaaaaaaaaaaaaaaatcaaaaaaaataaaaaatcaaaaaaaaaaagagagaaaagcaataaagttgagtgaataagatcttaaat

SEQ ID NO: 21333 - DNA, 458 bp, Glycine max
  unsure at all n locations
tgcatagcagtttctactacttaagctgttacatagttgtagtttagttgttgtactcaaagtctttggatgaagcaacaacttgaagactttggagtaaaccttgatcacattcctctaaaatgtgacaacacaagtgctaccaatctaacaaaaaacccagtcaagcattctaggactaaacacatagaaataaggcatcattttcttagagatcatgtgttaaaaggtggctgctgcattgagttcattgatagtgagcatcaactagaagaaattntcactaaatcttttgctagagatagtttttttattagaaatgaactangcatgttagatgcatctagcataaaatgacattctgtttgcatagtgtgtgatgcacattgctactcatatcatttgttntgtttagcttgtgtcccagtttattgattcatatgcatactcattagtag

SEQ ID NO: 21334 - DNA, 112 bp, Glycine max
agcttattcttgcatcattttgtgacttgggaaccaccaatgaaggtatagggcatccttggaataacactaaagaacgagacgttgtacacgctatccttacgtgagacgg

SEQ ID NO: 21335 - DNA, 510 bp, Glycine max
  unsure at all n locations
cgcctttgtgcttcgttgacggacctatgatactcagcttgtccgcagctcgctcatgcgagcatgggtgctacctacacagtcttcttacgtctagacgaaccttcaggagggcccagatgggtatggctgatataagaatgcacatctttactatatacacccacttgccgttcctaaggtgatcctattctcgtacagagatgcctctgacgaattacgcctcgactcttgagctctttccggactgcatccgaaccttgcggatttcatactcatacccttcattgactatcatgatgctacggtgcctcactaattgtgcagggatgcttacatttgacaacgcgtgtgtcaccgaaccgtgcggacangtgcgtgatattacctttagatttccagcatgtaccggagttccacaattgcctacgatgggtgcatgcacctccatcgacgtacttanatagatgtctacggcgatagccacgacgacattaggcttacagtgcn

SEQ ID NO: 21336 - DNA, 415 bp, Glycine max
cttattgagataccctgggggatatgagacaaatttgatttaggaagtattttagccccactttttttaacttctcttcttaaaaggagagatgttgagtcaaacacattttttaaagagctcttaaaaggtttagcagtttaattttataaagagaaatgaaaacaatagttttcttcttctttttttaaagctaggtgacctggtgaaggagattttcaaatcaagttgtcatctcctttctctcccctctctcgctctctccatgttctttctatttctctctctccccactttctgtctcactctcttcctgttctctcctctctttctctctctctctctctatctctatctctctccctgctcttttatctctccgtcttccagctctcactctcacaagtcatctctt

SEQ ID NO: 21337 - DNA, 219 bp, Glycine max
  unsure at all n locations
tacaatacggacatggctcccgatcggaaccagcttcagggtatgactaaacgagagcatgagtccattaaggaatatgcccaaagatggagagatctcgcagcccaagtcgtaccgcccatgacggagagggagatgatcacaattatggtagatacgttacccacattctactatgaaaagctgataggctacatgccagctaactntgcggatctt

SEQ ID NO: 21338 - DNA, 414 bp, Glycine max
  unsure at all n locations
agctttctcggttccattttctgcgaaggcaaacattnggaaagttagttttaccagtgggacactactaaaaaaaaatggcatacaacctcctcccataaatacaaacatcaatgtaaatttagagcaagcttatgcgcatatttccttacgaacgttcactngcacaagacattctattaactaagaaaaatgcacccatatacaatcaaggcagcttcgttacctagattatttacatgtacttccaaggtgtatttgttacttacatcacacacatttccttggctaaatttacatacatgcatactcaaagcattntggggtaccaaaaattgcacatgtgcacatcttggtatttctaatacctgtacatgcacaaacttcatgatgaatcttgactatctacacaat

SEQ ID NO: 21339 - DNA, 486 bp, Glycine max
  unsure at all n locations
tcttgagatgtgaacctggatctgtcatatatggcctgngtatgtgtataaggagcctttcttttcttagatgcaatttgtaaaatataagacaaaacacaaaagattagcacatgttattttcacaaaaacataaaaataaaactgaaattttgattaagcgcttagcgcagcaggctgagcttagcgtgccttatgaaattttacacatgcgctaagaaaaacagactggcgcttatcctgaagacacataaaatattttttctacagattaagcttagctcaacagctgagcttagcctaagtctacaattttgaaaaccaaagaaagttggagcttattgcagcatggcgcgcttagctcggcctcatcagaataacactcangcttaacgcacaggcgcgtttagcctaactacaaaaatttaaaagacaatgagagagttgagcttagcgcatcttggcgcttagctcaacacacaacat

SEQ ID NO: 21340 - DNA, 416 bp, Glycine max
  unsure at all n locations
agcttatctcataaagcatatatcaataaagtactagagagattcaggatgaaaaagtgtttaacatcacctgttccaatttagaaaggagacaaatttagtcttgcacaatgtcctagaaatgatatgaaacgaaaaacaaatggaagcaattccatatgcatcagttgttgttgcatctactatggaagctgaatttgtagcatgttttaaggctacaattcaagctaattggttgcagaactttatttcaaggctngaaattgtcgacagtattgttaggccactataaatatgttgtgataactctgcagtagtatttttctaagaatgacaagtactctaagggtgctaagcatatggaattgaagtactntgtcgtgaaggaagaagttcagaaacaaagagtgtcaata

SEQ ID NO: 21341 - DNA, 443 bp, Glycine max
  unsure at all n locations
ntgaggatntggtctttgccagtgaaaggatcgatgtgggtctgaattttgcaaatttgatcatcctactaggacgactgagataactggggcaaataaagagggtgaggatgagggagaaacccatgctgtgactgccattcctgtacggccaagtttcccaccaacccaacaatatctttactcagccaataacaaactttctccttacccaccacccagttatccacaaaggccatccctaaatctaccacaaagtctgtctaccgcacttccaatgacgaacaccacctttagcacaaaccanaaacaccaaccaagaagtgaattttgcagcgagaaagcctgtagaattcaccccaattccagtgtcctatgctgacttgctcccatatctacttgataattcaatggtagccataaccctagccaaggttcatcaa

SEQ ID NO: 21342 - DNA, 387 bp, Glycine max
tttcttattattgtacgaaatggacaaacatgaaccgtgttcttgaagaagtgggtctgcctcaagaacctcatttttctcattataggacgtatagcaatggtggaaactaatgttacgtagaacggaaagcgatctcccatgtttgctcctaataaagggttgcacaaaggtgatttgctattaccttacctctttgttttaggtatgaacaaactctcccacattatcttgaaagcagtggaagcttggaaacctttttgtatgggaagaaagggccccctcatctcgcacttcatgtttgcggatgacttattattgtgtggtcaggcttctactaagcatatgaaatgtactttggacactatgcatttgtttggcgagatg

SEQ ID NO: 21343 - DNA, 562 bp, Glycine max
  unsure at all n locations
cagacacgaacacgccgaagcacgaattaagtaaaaaaccaaaacaaacncacaggcggnnnnttgatgcctcgtggacagccacccaaagaagcgcgcaggaagagcaacccacaaaaaagaaaagacgtcgtttaaaaacacaaaagccgccagggggaaagcgcagaagcaacacccaagagngagcaaaacaaagacacagaggaggagaaaaccacggccgaggaagcaacacaaagagggccccacaaggaggaggaggaggacgctaaaagacgggcaaacnccacacccgaaaacaagaacacacgcgaccaccgcaanaagacgacgcaaacggcaaccaaanaccggcaaaacaaacaaaccaaacgaaaagaaggcgacaccgaagaggaccccgggacagagaaccgaagacagaaagaccccgcggagggcccagaagatagagggacgaacaagagacgagagcgacaccggcccagcgggaaacgacacaaaaggacataaaacggcgacacacgccagccgaaagaggaacaagaccacaaaagag

SEQ ID NO: 21344 - DNA, 410 bp, Glycine max
  unsure at all n locations
ttcttctcttgttctggatcagctntggatgtatcaaattgtgcccaccattttacaaatgcttgcctccgtagtgatggatattgattagttttctcagtcttactgtaacgatattgccatgaaaaaattcatgacaaagaaaaactggagaaatattttaagtctgtcggaattcgtgattcctgagaattaaattgttttttaaattgagcaaatccttgttgaacctgctctgagaaaatctccggaatagggccaaagaaatcccaccattgtaagaaccaatttgggaaattatagattgtgttggttttgaaatatattaaccatgagtgcttgaagcgggtgtnttggtgccaaaaaacctttgtccaagcatcaacataatcccaataggtataacctac

SEQ ID NO: 21345 - DNA, 443 bp, Glycine max
  unsure at all n locations
acactataatactcagcttgaactattggtgaggtagactagganaagagaggttggttgtttaattctactcaatatcctcaatattagaaaataaatcaataaaataagaatttaacatgtccttaatttgatgatccttctctatccattgcccttaagtatttcttaacataagaatcttatttctttttcttatgttgatagtcttgagatgctagaatctcgtgtttctgtctccatcttggatccacttggttcttgattgttgaaaccaatcaagctcctcctgcttaaggattgcatcatactcatttagacccttttccattcacaaccaanattggttggatctcccttcataaatctttttttggatctctcccaacctattaatgactctctgctttctatatctaatgcaaccaaacacctttctcttc

SEQ ID NO: 21346 - DNA, 409 bp, Glycine max
attctttgatggttttgagaagaaatcacatgtttgtcatcatcaaaaagggggagaatgtgaatgtatgtatacatgattttgatgatgtcaaaagaagaatcaaacaaggctcattttgcttcaagattaatacaagattgtttcaacaaacaaagccttgattcaagatttcttcaagatcaagccttgcctcacaatgaaaggtttcaagtcattcaaggcacatgtaattgattaccaatacatgtaatcgattaccaatggtttgaaagtgtgtaatcgattacacatcatatgtaattgattaccagagactctgaacgttgggaattcaaattttaaatgaagggtcacaactgttcaagataaacaactatgtaatcgattacactaattctgtaatcga

SEQ ID NO: 21347 - DNA, 630 bp, Glycine max
  unsure at all n locations
cggcaacgatggggnntttgtagacnatcnctagctacatanctcgacatctatttagaatactcaagccccttgaagtgacangnnttgactanatacctnntgtaatnntagttaaagttttatgatatactnntggtagtnttgtcanatannattganacaccanatttcatgtggggtagaagatgaaactcagtatttaaatctnnnttgtaaccttaatattgggtttcctttttgtgttttntcttgggctttaanagtggaccatanaggggtttaannnatttgaatttttgtnntttggaaaagtatctatttttgttttacccaaagtttcttcttcaaatagataacctntgttnnntgttaaaaaaaagaacttgaaaatatttctataaaccacacattcaatcttcttcttcttgtgatantttgcatttacaatatatatatatatatatatatatatatatatatatatatatatatatatatatatatatatatatatatattctaacaatcatctaattgtctaaggtctaattaagagtagactgtgcgcacaaagaaaatgcacatatcgccgcacaatctactacaagtcacattattcttaattcg

SEQ ID NO: 21348 - DNA, 406 bp, Glycine max
  unsure at all n locations
ttcttattttctaaaccaagaaggaaacctcaccctgacaagggcatgagagagagagagagagagagagcaaacacaaagcacaaaattcagagttccgaaacaagtacaggaaaatcttaaatattcatatttcataactttttacttttttaggaggcttcacgcaattcaggttgtttttttcagctaatgctgtagggcccttattaattggtttcttacttccagttttaacgatgctttatctcagtgcatcactccctcaacctcaacatatccctgctaggaccactatgatctcaactaattnttttatgtaacatatagttatatttntcaatttataaaaaaaattaatgaaacttgactacatgtgaagaagaaattagtagaaaccagtctc

SEQ ID NO: 21349 - DNA, 410 bp, Glycine max
  unsure at all n locations
cgtaatgagcatgataacttgactgttctcgatacattttattttctaatgtcntatagttatatgaagcattatgtaatgttgttttgacatatctatactactgcacctacattgtactaaccatatatttctttataatgcaagtatactaaactacattttatgaaaatgtgtgaaagtctatgaattcaagtgttggtccctgatatctatataatgacaaatgtatgacattgatttaaccgctcttgtatagtcagattacatcaagaactttgtattgataaggctactgaaatggtctcctaagattataagaatcatgtgatgtttaattcaccacagtcatactgtgttgaccaccgccaaatgtcgatttttacgaatttttctaaggatgaccatgc

SEQ ID NO: 21350 - DNA, 388 bp, Glycine max
ctgcagcttttatttattagatgaagatgaatccgtggccacctcatggactcctctaaggacaatagcatcatttcttgcactgaattgttaggagttggaagccatcttctcaatcaaattcctagcctcagcaggggtcatatcaccaagagctccaccactagcagcattaatcatactcctctccatgttgctaagtccctcatagaaatattgaggaaggagttgctcagaaatctggcggtgagggcagcttgcacacaatttcttgaatctttcccagtactcatacaagctctctccactaagttgcctaatgcctgaaatgtcttttctgatggcagtggtcctagatgcagggaagaatttctccaagaacactctt

SEQ ID NO: 21351 - DNA, 477 bp, Glycine max
  unsure at all n locations
ctcagcttcatataagctngaaccatttatcaataaacacaagttgagttttattcaganaattagagtttatctcttttatcttagtgagagtgattctcctaaattcttgagtgattcaagaacaccctggctgtatcaaaggactttcacaacctttgtgtgttgccctcgcaggaaagagtgattctttccttcctatcatctccacccttgttctttcaaaccacaattccagaaaatccacctctgcccagaattatctcgtggccataactcccattttacacactcaaattaagtgattgttgagcctaaattgactttcaaaacgagacctttcacctcgttttgaaatcacctcatttggagccctgtagctntagttattgtcatttctatatntctgtccagccaccacttaacctacattntaccatcccattcatccattttatgccaagaaccaccttatta

SEQ ID NO: 21352 - DNA, 414 bp, Glycine max
  unsure at all n locations
agcttattagaacaaaattgcctcaatcatatccaaatatgcatgtgaattangaagcatcaacaagaatcaagccaaggctattgtgcaagcaatcaatggggcaaaacacaccaaatgcttatgatgatggatggctcaaattctcacaaaggtaaactcatcactttcaaattgagctttcaaaactatcatgacatgtagaggagaatcaaagattccaagtcacaaaatgtcaaaaacttttattttcaaaacaattacccatttcttgaacatatcctatgattcanagaanagcatgcaaagtcgtacatgcgcacaaaattgacccaaaatattaaactaaaaatccgacgaaactaacannaataacanattaacacaactaacanattaacaaaaccaacaaaa

SEQ ID NO: 21353 - DNA, 395 bp, Glycine max
tgtctcagcgtttatgcgagaccgaggtctatatgttggccatcatcagcatgtaccaagaggaattaaatctagccacggtccacgagcacaaagtggcggacgagtatgcccgagtgtacgcggataaggaggctagaggaagggtgatcgactcgttacatcaagaggcaacaatgtggatggaccgatttgctcttactttgaacgggagtcaagaacttccccgatagctggccaaggccaaagcaatggtgaacacctactccgcccccgaggagatccacggacttcttatttattgtcagcatacgatagacttaatggcccatataattaagaacctctatgaagtttggattgtcactcacatcttgactagttataactttctg

SEQ ID NO: 21354 - DNA, 352 bp, Glycine max
  unsure at all n locations
agctttttgttnttcccctctcaaattgacttctcttgaaagacttgaactttcatagtgtcacagtcttgagagcttcccagaaatattaagaaaaatggaaattataacagaacttgtgttggaggcctctgccataaaagaattgccattttcatttcaaaatctcattcggcttcaaatattacagttgcgttgttgcggaatgtttaggttaccaagtagctttgtcatgatgccaagactggctaagattattgcttgggaattgaaagggtggctatttccagaacaggttgagggtgaagaaagagtagctcaatggtgtcttcaatgtagaatgctttatctc

SEQ ID NO: 21355 - DNA, 454 bp, Glycine max
  unsure at all n locations
ctanaatatgataatgcaatctgggggtgtagtacatgataattatgtttgaaacanaatgatctggtgtgatcgagttacgtgaatccaagtaagactatccatcaatgttctatgtaactttcaaaatgatgtatattacaaacagtatacgaaaagtgcaattgctagagcataaaagtgtttttggaagtacaatttcttaacgaaatcttatcaattttgttgaanagaagtatattggctagcttgtgacaaggagtgttataaagatgacatggcttctaaatgcaactgttaattaaaaagagaattagaaagtgcaaattagaactctcttttaagtggtgcatgcaantttcagtggccagtgctgttaacataggaattaagagacaagaatcgatgcanagcaattacaaatcatgtcttttcaataagaatattaacatat

SEQ ID NO: 21356 - DNA, 377 bp, Glycine max
  unsure at all n locations
tttcttttatatcgtcttcacaacatgagaacaatgtacttactatgagcttcttaattnttttccctttacacccaattattgctggtcttctttattttccctgttttggtcctttaattcagatctgttattctctgaagatgaaggaaaaattattttgatcttatagctttctcaatcgttcatggtttttggtagtgaatctttacttccttgctatagaagccacctttaaccaacaaattaaattcatactgtgctttttgactttttggctaaacagattataagttntaagtatgttgcatgggtcattntattgngtgacaatctctctttgcagttatgccctgccattgcaaaaagctcaagct

SEQ ID NO: 21357 - DNA, 448 bp, Glycine max
  unsure at all n locations
tgcagaatgcatggtttggcactncattacgttgtntcgttcggctccaagtggntagaaagtcttctgtttgccaattgcatttggaatggcctgttcccgaaaatacttccttctcttgagcttcctgatcatcctgatcttcttcagccgtttggggtcaacaactttcttgcttttttccaatatctctttccttccctccttataagcttgaatggttttacttctctgatcatctggtaataaagccaacttggaaaatatcttgggactcactatctcaagtttctcagtaatttccttgaatgctggaacaaggccacgccttatgaagcacccttctataagccgcatcgtatttaactcggggagactatgagcatcttttaactccagatcctagcaaaatggtgagtcatttaaccacatcctgagagagtgagcc

SEQ ID NO: 21358 - DNA, 342 bp, Glycine max
  unsure at all n locations
agcttattgcaatggtttgattagcatgggcagaaatgtgtcagcattaataggtaaatatgttcctcacattcctgagaaatataaggacccaagtactttctgtataccttgcattattgggaacaacaaacttgagagtgccatgctagatctaggagcatcagttagtgtcatgcctctgtccattttcaattctttatcttttggatctttgcaatctacagatgtggtgattcatttagcaaatagaagtgttgcttaccccgtangtttcatagagggtgtgttggttcgggttggtaaacttatttttcctgttaatttttatgttcttgatat

SEQ ID NO: 21359 - DNA, 443 bp, Glycine max
  unsure at all n locations
tcctctctcggtcgacgctcgcctccagccgcttcgtcttgtgaacgagtctgtcacactcctcagtgagagtagtcgtttcattcgcgagatgagtgacgaggtcgctgagctggtgcttgagagcagaaacctcatagtccctatctttgaccagcaagtcgaagtggaggttcatttcctggagcttgttcttgaaaaagacagaaacgacgacgttttggaggtcgaaggtgaggttggtgttgaatgtgacggcggactagagagagtgaatttgttggaggtgttgggtggtctccttgagaaggagggcattgaggtttttgaggttctgaatctgcagttctgaggaggagtcatcaaccatggagatgggttgttgttctgctttggggtccagagattcngacatacatagacattctctgccagagagaggg

SEQ ID NO: 21360 - DNA, 364 bp, Glycine max
  unsure at all n locations
agcttttctcagtcgtttgtaaggatgatngggtgttagaaagcggcgatgcctactgtagactgtttttctcccatgtttcagttgtgtgtaacttgtattttcttcacagatggggcatgcatgatgacccttaacactgtaaccgctgagattcccatatgctgggaagtcattaatggtacaaaaaagcattgcacgcatttcatacgtctccttgcgaaacgcatcanatactacaaccccctcgtcccacaactttctcagatcttcaaccaacggacttagataaacatcaatgtcatttcctggctatcttgggcccgatatcatcatagacaacatcatgtattttcgcttcatg

SEQ ID NO: 21361 - DNA, 444 bp, Glycine max
  unsure at all n locations
tggatattcagcttgacgagggatcgaaggtttagtaatttatgctacttcttagaacacaagagcacgattgattagggaaatatatttccatgcatcagcttgtttgttagaaagatccaacatatctactgtcgcaacgtgcccttttgcgggcgagcgaaggcgaggctcacgggtgcgctttccaaaggaggaaagatgcgcggagtcgccaccaacgtttatttgtggaaaacgtcgggaaaaccgaaggaaatcggtcaaaaatgaaaattctaagttcgggagttgtatttacgtttgaggaaggtattagaacctctcacgtttgtctcanaggacaacaacctattttttagaattgtggaaattgtgttaccttaactntatttctttntattttttgaggtcgacaaaagtggggctcttgctcctacgtac

SEQ ID NO: 21362 - DNA, 412 bp, Glycine max
  unsure at all n locations
agcttgtaggattattgtgtacttatcacatgtggtactaggtggcggtcgggcgatggtgcacaacaagttttccacatccacaatgcgctcataaacccaccatcccctgttgcccacctccatctgagctcacgtactcccacgtagcccatattctcgtttctctcaacaccgggtccccatcaatcctcccaagcttacacaacatccaagcaaaacaacattcaaacagcacaagctatcacagccaagcaaaacagggcaaaggcagaaaactctgctcaacacaccaaccanaatcatagcttttctcacttaaagaccccagtaacaattccctcgatccaattcgttaaccggtggatcgactctaaaattntactggaaggtctatatacataagactaca

SEQ ID NO: 21363 - DNA, 448 bp, Glycine max
  unsure at all n locations
tctcaaggaagttttctcaagaaatcttctcaaggaagctttctagtctataaatagaagcatgtgtaacacttgttgtaactttgatgaacgagactcttgtgagacacaactcaaagttcaactactctccctttttcttccttcaatttcgtgctcccccttctctctttctctacctctttcttttcctccattgaagcatcctctccaagcttcttatccaaggctcatcttggtggtgaagctccttcttccatggcttattccttaatggatggcacctcctctcacctcttttcctttgtcttccgctgcatctccatggtggaaaatcaccattaaaggatcccattgaagctcanagattcagcctccatagaagccccacaagcaagtttccatcacaagtgatttggatcaatggaaaaaataagacaaatcatac

SEQ ID NO: 21364 - DNA, 373 bp, Glycine max
  unsure at all n locations
agcttttacacattattttaagaaatacttagtatctattggtgaaaaatccgttgtgcctgcctaggatttctggccttgccagctttctttgcttagttgttggcatttttatattcaccgcatgctctgcatttctctctgtagtctcccttaccagagtttattttacattcttatggagtattacactactcaagtaagactgtaacacatggcactgcggttgattcaaaataaattattaaattaaatnttaacgggtacaaaactttgtagagtattagctggggattgggagcatattagaatttctcctctctcatagcctgcactctttgctctttcttgctcccacattatctnttcatgt

SEQ ID NO: 21365 - DNA, 451 bp, Glycine max
  unsure at all n locations
actcaagcttatcttttgaaactatcccttatagacttatagtaagtttgtgtgtggtcttattctgctgacaaaaaaaatataattgtcgatgaagacgaagacaggatgcggaggactataaaacaaaacccatagtaaaggtaacgacgcaatgaggagaaaaattcttgtgcagaaaaaacacgacagctaatccaacaattatttaataataaattaagttatcaaatacactaataattaattaatgggcaaattcatatatttcattttcttgtatctcacttttatttatttattgcacaatcatatgtattactaaatccctttgttacaatttactggtattagttaattntttaatacaataaacatctttctgattnttttaatattttttaaaaattattctacttatatattntttataataattaaatcttatata

SEQ ID NO: 21366 - DNA, 380 bp, Glycine max
  unsure at all n locations
agcttatctattgaatgtgtgttttacttgctccgccaagaagcttcacaaggaagttttctttcttcatgtattttggcatgtgggtgaactttggaaaagtgtaacactagtttctcaaagaaactatttacgctataaatagaagcatgtgtaatacttgtgggaactttgatgaataagtcttatgagacacttcaatgttcaacttctctccctatctttccttcattcccacaccattttttntctctctctctctcattctctttctccattgaagtttcttctctaagctacttaatcaaaacactctcttggtggtgaaatttcttcttccatggcttattccctagtggatggtgtctcctctcacctct

SEQ ID NO: 21367 - DNA, 444 bp, Glycine max
  unsure at all n locations
ctgaacctatttggactgtaggcacaaaattcatgttttcccttttattgtgcctggttgactaaaactattatgcttttcctagaatgtaaagtgtaattgcacatattctgataggagttacaaagaattgatggccaattgcactattcttggaagaggtaaggctcgttatagcaaaaagcttgagaaggttaaagagaagatcacaaaactgaaggtaagtatgctccagaaatacattcaaaactgcaacagctcttgaaccaaatacattcaaaacaaaaaggcattatcgaagcaaattcaattgctcagaattcaaattagaaagcttatggcagaggagcatgatttgtctaanactgagccaaaatagaacacgaatatgatgttaatgctagagaatatcaccacaaccacccccttacaagtacactacat

SEQ ID NO: 21368 - DNA, 345 bp, Glycine max
caagtgtctaacagactacatgttatgtgccaaaagttgagctttcacatagaaaatgaaattacagagtcatttacatatactcttagaatgatgtagcaaaaacaaagcctttttgttaatttcacttcaaatcagagaacactcttaacgtagtaagactagttagaacaaccgcattattttttctttaatttacagtagtacaattatgcggaaacctcagttactgcaagagcaagagtctctggcacagtcatggatgggtcagccactactggaggtgcaacacaagactgcaacaactgagtgtaatgaaactcaatttgtagcctatgatgaaat

SEQ ID NO: 21369 - DNA, 389 bp, Glycine max
  unsure at all n locations
agggggagtatgaaatgagtgaacgcaatatatcacgcatatacattacttatatcttgatttcaggaattaaattgtcatcataaaaaagggggagattgtagaaacaaagactttgtctttgatgttttgatgatgatcgtgatgatatgatgaaaacgcgcttctcaagtttaattcaagacaaggatccaagaatacaagatacaacatcaagaagatctctagtattttaggaaggaaattcctaattganatagcaaaaggtttggccaacaaattacagttaanaagtctttttcaagagatctactctctggtaatcgattaccagaggatgtaatcgattaccagtggccaaatggtttacaacaaccattaaaaatttg

SEQ ID NO: 21370 - DNA, 402 bp, Glycine max
  unsure at all n locations
agcttctatttactgtgagtgattcaggcttagtgccactacatgcgctaagcgcacttccaatgatttcaaaacagaacgatgttggcgcttagcgcatcctttcccgctaagcccacttagcgcatcatccacgctaagcccactgcttaaggtgcaacttacaatgaagatgttgggcttagcgcagcgatgtgcgcttagctgaaccattcagccaatcaattangggtctttgtgcttagcgtgagcaagctcggcttagcgcgtgaaaagatggcgcttagcacaaggttngcgcttaacggataagcaatctgaaattnttctaagtcattttctgcttatctcttcacacataatttaaaaaccctntnntgtcattactacataagctgaaat

SEQ ID NO: 21371 - DNA, 436 bp, Glycine max
tgccgcccagctcgcccaggcgagcaaggttgcttcctctatattcaacaaccttctggaggaatcttctggagggcccaagtgggcctggttgttatttgcacccccctttttactaaatgcaccccatctatttttttgataattctttttccgtaacgttacgaaactttgcgactttcgtaacgatacttattttccttccgcaaggttacgaatccttacggatcatgtatttactttcttttagctttcgaagaagttacggaaactcacggattgcacaaaaacacctcttttcgatttccgccacattacggaatttcacggatcgcgcaagcctgcttccttttgatttctgagacgtctcgggactttatttatttcatatcatcaagtaataatccccggacgaaattatggtatgacaagcatg

SEQ ID NO: 21372 - DNA, 288 bp, Glycine max
  unsure at all n locations
agcttcttggntntcgaagctagatttgcgtcaaggctttcaccaaatacgcatggcggaggacgatgttcataagacggctttctgcacgcaccagggacactacgaattcagagtgatgccgttcggcctctgcaacgcgccgtcgacgttccaggcggccatgaacgataccctcaagcctttcttgagaaaatacgtggccattttcttcgatgatattttggtgtttagctccgatttggacacgcacgtcacacaccttgaatccgttctagataccctctc

SEQ ID NO: 21373 - DNA, 440 bp, Glycine max
  unsure at all n locations
ntgacatcaaaatttgttttccctcttggttgttgctctattggaagacaaaaaatgattgtctacaagtacatgccctgnggtgctcttagtcaatatttgttaaattggaaagctgaagggttacaacctctggattggagtggaagacaaggctaagaattgccttggatgttactagaggtgtcaaatattctattgcatgagcaaataaaattttatccatagcaatataaaatcatctaccatttcgttgggagaagatatgcatgccaaagtatcaaactttggattggttcggcttttacgtgaagggaagaattcatgtcaaaccaaactaaaggctggaactattgtatattggcacctaagtatgttatgagggacacattgcaacaaaggtggatgtatttagtttcaatgcaatccttatgtagatg

SEQ ID NO: 21374 - DNA, 400 bp, Glycine max
  unsure at all n locations
tttcaagctttttatccaaggcaattcttggtggtgaagctccttcttccttggcttattccctagtggatggtgcctcccctctcctcttctcctttgccttctgctgcatctccatggtgaaaaatcaccattgaaggacctcattggagctcatagatccagcctccatagaatcttcacaagcaagcttccatcagctgtcttactggtttagcctcaccctctaaatntatccgatgcatacatgtggatgggctaataccaccaatgtccaccanggtccaacctatagccttcttatgcttcttgagaactgataacaacttctcctcttgctcatcaactagggaggcagatataattactgggaaacttttgttatcatccaagcaagcat

SEQ ID NO: 21375 - DNA, 422 bp, Glycine max
  unsure at all n locations
tatagganaaccattcgcattgttgccttttaatttcccttataaacccaaaactgtctcggtaaaactatgatcctggttttgttaaccgttggattttcatgaaatttggatatgttgctcgaaattcaattgggcacaccgttgggatttgcgagataatattcttggagggagaaaaaggaatctcatgaagacaatacaagtggaggtttcaatctcttctccgtctctctgacgtttgggaattctattggagcagtaggaggaataactgaaggaatctcanggaaccgctagagatgctgctatccctggctgaagacacgtgagtccgctcagaggtaagggatgagttattcacaattgggaattagtgagaacatgtgtagggatccttagagatatcaattggaatgagt

SEQ ID NO: 21376 - DNA, 382 bp, Glycine max
  unsure at all n locations
tgctcgcaagcttttgcattgcagngangacctatcatcaaagctggttgtggaggtccttttgagaactcgcaatgattgggaggcggctttcacttttttcttgtgggctggcaagcaaccggggtatgctcattcgattcgcgagtaccattctatgatctccatccttggcaaaatgaggaagtttgatactgcttggaacttaattgaggaaatgagaagaggtataactggtgcatctcttgtcactccccacacactgttgattatgatcaggagatactgtgctgtacatgatgtngcaagggctatcaatactatctatgcttataaacagtataactctcaagtgggctagatgaattcataaccttctttc

SEQ ID NO: 21377 - DNA, 353 bp, Glycine max
  unsure at all n locations
tatntaagcataatcaacgtttactctgttttntctattttatatcacgcatattacaatttcagattgttgttaattcgcgtcacagtagtaatatgttgaataagttattttagttaatccttaattttttattaactgagaaatctgtttagatgcaaaagaataagttttttttagtaattgttaatgtctttttgaaacactttttaaaataatatcttttaaaaccttagtcactaactgtttatattttctctcattcatatatccaatatatttatctaatttattaggtacactttgtaaataaatcattaataatttttttttcattttacattttcagctac

SEQ ID NO: 21378 - DNA, 364 bp, Glycine max
ttagcttttatactttatacaagaatgaagctctgataccacttgttagacaagtggcctcagatatcataagaaggggggttgaattaagatattccaaactacttccccaattataaatctatatcactttttattcaagttataaatgcccttaataatgaacttcttaaatattgattcacataaaacactctgaatatgactatatagcaataatatacaaaggagattaagagaagagaaagtgccaactcagatttatactggttcggccacacccttgtgcctacgtccattccccatgcaacccgcttgagagttccactatcttgtaaatgccttctacaagctctaaacacac

SEQ ID NO: 21379 - DNA, 423 bp, Glycine max
ctgacattagtgttgaatgcattatttgtaaacagtatctttgacagaaattaggtgcatatagagttacagacatcttggaattgatacatacagacatttgtgggtcatttcctacaccttcatggaatggtcaacaatattttatatcattcatagacgattactctagatatgcatacttgtttcttatacatgaaaagtcacaatctttggatgtgttcaaaacatttaaagttgaagttgaaaatcaactcaacaaaagaataaagtgtgtcagatctgaccgcggtggtgaatactatggcatatatgacggttcaggtgaccaacgtctggcgccttttgccaggtacctagaggaatatggaatcgtcccacagtacaccatgccgaggtcacctatcatgaatggtgtggctg

SEQ ID NO: 21380 - DNA, 397 bp, Glycine max
ttgctttttcatttgttggttacaagactactttctctattgttgtttttttcttcggacattgtaatattttcatgtttgactacctttattgatgtttatggttggttttgcagactaagacactccttggatatttgagagaatcaagacatgaagtgtcttcttcaagttacttttatcagccaaaaaaatattattaaaataggtaccggcagtaccatagagacaacaaagcagtgtcacatagttacagaaagagaaaaccccaaaagtagaagatatctcttgcgtaactaagaacaacggataaaagaacaccaaattaaccctcatttctaaagatgtaaagaattgatctccttctaataacttccccacacctcaacatgcacct

SEQ ID NO: 21381 - DNA, 435 bp, Glycine max
  unsure at all n locations
tgtatttaanaatgttttanaaatacttttaattaatatttaaatttttattcctttattaatatatatgtgaagggtagagggtgtcacatcatacctcccccctttcatttttcctcattcttattttcatccttgtatccatttaccaatggtatatgcacaacccagaccagttgattgttcgttgttgcgcttataagacaatcatatttcaaatcaagtgtgggaaggccaagagagaatcatccatccgaggtatacttctgtttgggcttttagccacttggatcaaatagataatcatgtaaaaaaatctaatcaatttagctggtttcggacatattataaatgttggaaaagttgatattaaccaacatttggttagtgcgttggttgaacgttggagaacagagacaggcaaccattacttta

SEQ ID NO: 21382 - DNA, 311 bp, Glycine max
agctttataacagattttagtaatgacccactaacctagaattaaaataacttaatgccattaacctatggaattaaaaaaacttaatggctgagtgtaactgaaattgtggcaaccaaaagtcacccccaacagccaacaagtcagccaccatttggtctcccaaaaggctgatgcctatgttgccaattgggcccttattacaacttgaactaaacctaactaaagcccttttagttgattaacccaaaacatatttttggtcagccaactttacaaggattgggcaattatttagacaaactaaacac

SEQ ID NO: 21383 - DNA, 436 bp, Glycine max
aaagctctagatgagggttcactgtaatcatgcaagtcggagacctagcatgatcccagattcacctccgctccttatgttcccatgaacccgggtatagggccctttttcactcacagtgtgtgcaaatagtgttggtgtttgtgtgcatcaaatgaataaatatttaccctatgcatacattttaaaatgcactaaaagcaacaaagagtttatatacataagaacataatgaagggaaaccaacaaagggataagtcatggtaaaacattgcacaagattaaatggcctaactctctaaaaacaatccccagtggagtcgccaactgtcgcaacctacccttcggcgggagggcgacgcgagactcgcgggatgcgtgttccacgaaaggaatacgcgcggagtcgccaccaacgtttatttgaggaaaacgt

SEQ ID NO: 21384 - DNA, 332 bp, Glycine max
  unsure at all n locations
agcttttatagcatattcatctacaatctcccgcttttttatgatgacaacaatctgaaaacaagataaacgatatacgatttgaaatgcgtgcactcatccttactcccccttaaatttgtaatttatggcctaatttttagataaaatttacctttagtttctctccccctttggcaacatcaaaaagtcaaaacgaccggagaaaacaacaaatccagagaatatccaaagcaagtagcttaactcgtcaaaaaactaaagcaaacacaggctatatatccaaagaanattataagccaagcaaagtctaaatatccaaaccaaagcat

SEQ ID NO: 21385 - DNA, 443 bp, Glycine max
  unsure at all n locations
tgtcaattctcttgtgcagctcgggatcagaagggggagcttccggtgtgttgagcaggagcagaatcataaaacggagatggaacaagaggaggaggataatgcgaagggtatgcaggtggtccttggtgctgctgctgctgctgctgaagtagaagatgaggcgggggaggggcatgagggtgtaattgtggaagtggctgttgctgctgctgcagggcaggatgataagggaattgttgcataggggggtgtgcaggaccaggacctgnggggataaaaggagaaccgtgcattgacgaaggaaactgctgatgctggggatgaaatccaaactgctgctgttgttgcatattagcagcttgtcgttgttgctgagcatatgccatagcagatgcagttgcataatcatgaccctggcgctccataacctcaacagcact

SEQ ID NO: 21386 - DNA, 350 bp, Glycine max
agcttctagagaagtctgcacttcacgtatagatggtcttacgcattggccgatgtctttgtttacttactttttaagctgcagtttttgtactatgatatttgtactcaggcttggtttatgcacttcttatgctaaaactgggttttctttaataaatacatttctttttgcctttttaaaaaaacacgttgatttatggaaattttattgtcgaatgaaattgtttatttaatgtacgaagacaataaatgcacaactttgatttcgaaacaacttttcagaaatcgtcattcatgttgaacttgcagctcttctggaagaacatggagggacttgagatctgatat

SEQ ID NO: 21387 - DNA, 433 bp, Glycine max
  unsure at all n locations
taacacatgtagcatgaaaccttanaatgaccaacatgtgtgttaccctctttgttcagccgctagggtttgggtcccaatgcaattgacttagtcatttatcgtgtatggcaaacaactttgcttgatgagtttaaatatagttacatccaacaccaagatattagattgtgtggcacgcatatttttatttaaaattaattccaaaaaccattggaaaataaaggttcatcaatttatatatagctcgtgtgttaaatgttttttatacttctgctttggtgctgcttttgaaaatcactactagatctnttggactgatctgtgataaacttggttgtcatgttaatttatttaccataatagtataatgttagggaacaagaattcgtgggatacaactttggaaaaaaaaaaaaaaaagcgctgtcat

SEQ ID NO: 21388 - DNA, 406 bp, Glycine max
  unsure at all n locations
agctttgcatacattatatttaaaagaaagtagagtaattatttaatatactttctgtttagttttagattttcccttacaagttctactactaaaattgtgagacgcggccaactaaaccccgaaaagtaataaaatgataaaaagttatttttttggttagataaaaatgttctttgaaaatccaagttgttatttatttgagttcaaaattctaaatgttgtgtgacttaaataaaaatattagcatatcttgagggactaaatgacaataagtattaagtttaggaaataaactgatacagtaaggaatttcattatntacttttagggattaaattaacactatctcacacttttaggaaagaatttgnattattatttatcttanatatttaaattaata

SEQ ID NO: 21389 - DNA, 446 bp, Glycine max
  unsure at all n locations
aactcagcttacactgggcgggacagaaattggtagctggttatagtatatgttgagatcactggaaacacgaataatacctttcttatcattaacaggtgtgaagctcaaaggcagacctaagtcaccatcaacagctacaacatcaagtggacaatctacatcggttcttgccgaagcaaggccaccgatatcggaggaagccggaacgatgtagtaaatcgaatcagctcgaactttcttccccaatgcgtccagcactggctcggatgcaggaccagctagtgcctttgtgatcaaggcaaacacaaggaccaatgttaccaatgtcatcttcatttttatgtatctaattntgtgtttttgtaacttgtaatggatattgaagaagagggatatttatatataggatggngattgctctaatctatgtacccatgtgcacc

SEQ ID NO: 21390 - DNA, 391 bp, Glycine max
  unsure at all n locations
agcttttatgtctgagtgggctcgtccagtgaaacatctgcttaaccctaaagggttttctcaagttttaaatgaccttgggatagattcttgaaatctcttcgtaggtttttataagcttttgagacaatatatgagtaagatagaagctcatgataagcttttctaagagatttaggatcatcaaaatttacctcatctttttggtataactcanacccttcaaaagttatgtccgccatcatccatatgttggcttcttcatcgtcttcctctgacaaagtgtcgtccaggtcttctcatgtactcataagccccttcttttctttagtgctaaagaatntcttcatatcttgatttttctctaaatctggacattcagacttgaaat

SEQ ID NO: 21391 - DNA, 450 bp, Glycine max
  unsure at all n locations
tctcagctntcagattcagaagactagtaggagtaccatgttcccttacttatacttggatataatgatatgtacaatgaaaaattaccaagtaaacttgttggctactacttcagaacctactcgtaaatgatacaaaatctattaaccatagtttctagttctcagttggttgcactaagtatggttgcttcttaatagtaaaattgttttatataaatcccatgatcaaggatcaagtttaaggtcaaaacatgcttttgaagaaacataattaactgcataacaatagtaaaaaagaagcaataaaaaaggacacaacacatcaaggagttatactagttcacccaacttgggctacaccaatccctacaaatgtaggctntccactaaaaccaagcatcttgtggtattctttctttcttgaagccttcaaaggctcctacaact

SEQ ID NO: 21392 - DNA, 310 bp, Glycine max
agcttctcgacatatgatgcgcccgaatcggacatccgtgtgaaaagttatgaccatttaaatttcgcgagagttttcgatgtttaatttcgagcgtatcgatatattataagcctgagtcgtacatccgtgtgaaatgttatgaccatttgaatttctcgagagcttctgttgttcaatttcgagcctctcgacatattatgcgcccgaatcggacatccgtgtgaaaagttatggccatttgaatttctcgagagcttccgatgtttaatttcgagcgtatcgatatattataagcctgaatcggaca

SEQ ID NO: 21393 - DNA, 444 bp, Glycine max
ctcacgcttatgatatattgatacgctcgaagttgatttacacaaactctcgacagattcaaatggtcataactgttcacacggatgagcgatacgagcgcataatatcgcgaggggcttgacattgaacaacggaagctcttgagaaattcaaatggtcataccttttcacaccgatatcctattctagcaaatcacatatcgagacgctcagaattgaacaacggaaggtcttgagaaatacaaatgatcttaacatttaactcgaatgtccaatttaggcgcatcacatatagtgacactcggaattgaacaacggaagctctcgagacatctagatggtcataacttctcacattgatgtgcgattcacgcttataatatattgatatgctcgaaattaaacatcggaagctctcgagatattcaaatggtcataacttt

SEQ ID NO: 21394 - DNA, 373 bp, Glycine max
ggagaaacattatgggatcttaatcttgagctctaataactctaaggctatgtttgagaaacacatgaatataaaaatcagaaccaatgaacgaaaatgcacaacatttaaccaaaaaaatacattcaattacgatgtaatgcatcctaccactctgcataaactatacatttcacgtctcttgatgaagatatcacatcgactagtgttgagaccacaataatatatataaataagagacaatcctcatcttacaaattgatttcataaagttgagttagattaataactcacataatatcctagcgattcgttgtcgagtgttacagatctcacatctattatggtaggttcgaattattgaacctcatct

SEQ ID NO: 21395 - DNA, 414 bp, Glycine max
gacctaacaaactcagcttgaccccttaatcagccttgagactattgtactaataattttagatacataacattatttagattagtggcgttcacgatgatgaatatgcgatagtctgcagccaagtgcttaaagctgctgctggggcatctgatatatattaacttgaattataagggcgtgatgattaacttgtgtgcgcgggcagagctgatgtaacaaagcaacacgagcaaccttatcgttcatatgggggggagataatacaaaacaatgaatgggggtacgtatatctgactagaacatatggaatagaagtggcattgtgtgatattatagatagttgataatggaaccgaaaacatcttttattttattgtgaggaatagggatggaacatactggagtataacg

SEQ ID NO: 21396 - DNA, 349 bp, Glycine max
  unsure at all n locations
tttgcaagcttttatccatttcacacgacagtaacttttttctcggatatctgattgagtcccgtaatataacgagacgctcgaaattgaatattgaagctctgaactagttcaaacgacaataactttttactcggatgtctgattgagtcccgtaatatatcgagacgctcgaaattgaatgttgaacctctgagtaaattcaaacgacaataacttttttctcagatgcttgattgagtcccgtaatatatcgagacgctcgaaattgaatgttgaagctctgatccaattcgaacgacaatacctttntactcggatgtctgattgaagtcccgtatatatcgag

SEQ ID NO: 21397 - DNA, 429 bp, Glycine max
  unsure at all n locations
tcaacattcaatttcgagcgtctcgatnatgacgggactttatcagacatccgagtaaaaagttattgtcgtttgaattggctcagagcttcaacattcaatttcgagggtctcgatatattgcgggactcaatcagacatccgagtaaaaagttattgtcgtttgaattggctcggagcttcaacattcaatttcgagcgtctcgatatatgacgggactcaatcagacatccgagtaaaaagttattgtcttttgaattggctcagagcttcaacattcaatttcgagggtctcgatatattacgggactcaatcagacatccgagtaaaaagttattgtcgtttgaattggctcagaggttcaacattcaatttcgagcgtctcgatatattacgggactcaatcagacatccgagtaaaacgtta

SEQ ID NO: 21398 - DNA, 385 bp, Glycine max
  unsure at all n locations
agctttataaagaccatgataaatagcaatgagttatgcatgcatactagttgtaaaaccacagtaccctagagaaggcagatattcaattactaagatagtgtcgaaggatatcgtcgaagcctaaacgaccaagactgcctttggaactcccatcagtgttgaccttaataaaaaaaaaaaagaccttgtggcggctcccaattgacttgacaagaaggttgaatctaacaggcatgttgaaaggccaccatcatatcgctatagatagtttgaacctgattaataagacgccaaatgtctagattcttatcgtanaaaactgaagcattctttgccttccanagagtccaacatgtcaccacatacaatgaactactatagc

SEQ ID NO: 21399 - DNA, 376 bp, Glycine max
acccctcttgctcgtactaacgatggcagcgttccgatggaagagctttgaggagaacgaggatcaccctgaactgttctttcactttctttgaagttaatgctggaagaagtctatttgtatcatttggaaagaagtaagcttaagctgcctaggatattatttttaatgttgagaagattttcttgggtattgcatgagtgcctcatccacgaatgtaaaattatttgtctggctgaagaccttaacaattattagttgttcgagtgagttcatgcaatacttacactaagacatttattgcgattgatggagctggaaagcgattagctgatgaagtgagtcccgagacatgcatatgtatgtatctcaagtt

SEQ ID NO: 21400 - DNA, 412 bp, Glycine max
  unsure at all n locations
tgtttgcttgcttgttatgcatgaaataggtggactatttcaaaaacactctatcatacactagtgtccattttttgaatgaatgaaggttgaaaatcgaactttatccagtaagagacatccaatgtttctgtggtaatccaaaaaaacttatctgaggcatagctcaatagttcaaataatgattatgttaagattggaagtatgataatattacaatttacaacgaacctttactgtaacagttgttccagcattcccccgaagcctttgtgcagcagtttcactatcaatgccatcaagcctctcacctgtagaatccaattattttcagaaaagaaaatcacacttgtttcacttcagacataaaanaattatttcctactaataattgactgaaacaagctggaaa

SEQ ID NO: 21401 - DNA, 440 bp, Glycine max
  unsure at all n locations
ttaggatcaaactntnttctctctttntctctcaactgttcttcattcttcttcctcttttcactttctttcttcctttctcttgcaaaaattttgtggattttccattgatgatgatcatggaaggctaaacacttaatcaatccaaggatccactccaagcaaggctgaatttgagttctggtttagtatttctaatctttgtgaatgttcatctttttcttcattcctattttcaattttcatgattatgattatgcttaggattcaaaatggattaagttattgattcatttcctaatttcaaaatttaatcccagattgtttggatattttccaacctaatatgcgatctcaaacaatttagggatgtattcgattgaactatctctaatgcattngattgaaatttcacactctgaacatcattcatagtaact

SEQ ID NO: 21402 - DNA, 391 bp, Glycine max
  unsure at all n locations
tcttctttattctttggncctcctcatagttgtggcatgagaaaacatgctctattttcatctcccactccaagtaggcctncggatcattctttcctttaaatggaggaatgttgagtttaataccatcaattcggttttgtctaagaacaccatcattccctcttctcctcctttcttcttcattatgatctctattctccatttgatccaacctctcatggagcgcatcatctcgttgtttcattaacctctccaaatgttgcatcaaagctcgcatttggaattgcgaaagccncactccatcattatgattagtacctgacatctcanacaaacaaatcaaacgtaacaagacaattatagttgctgtttgaatacctcacccact

SEQ ID NO: 21403 - DNA, 420 bp, Glycine max
  unsure at all n locations
ctcagcttgttacctatgatgaattgcttttttagagttgnttatatcaccactaattgttctccttttgaagttgtttatggttttaacccactaactcctcttgatcttttgcctatgcctaatgtttctgtttttaaggataaagaacgtcaagcaaaggcggactatgtgaagaagcttcatgagagagtcaaagatcaaattgagaggaaaaataaaagctatgctaaacaagccaacaaagggagaaagaaggttgtcttcgaacccggagattgggtttgggtgcacatgagaaaagaaaggtttccggaacaaaggaaatcaaagcttcaaccaaggggagatggaccatntcaagtgcttgaaagaatcaatgacaatgcttacaaagttgagctgtccggtgagtataat

SEQ ID NO: 21404 - DNA, 385 bp, Glycine max
  unsure at all n locations
tctgcttatgcgcatatttgcttacaaacgttctcttgcacaagacattctattaaccgaaaaaaatgcacccatatacaatcaaggcagcttcgttacctagattatttacacgtacttccaaggtgtatttgttacttacatcacacacctccttggctaaattcacatacatgcatactcaaagcattttggggtaccaaaaattgcacatgtgcacatcttggtatttcacaaacttcatgatgaatcttgactatctacacaataaggtgctacattgtatgctcttttcaagttattgctacctaaagccgcatgcaaattccagtatattntcctttgttgactaaaattgtattcagattaaaaggtatacattttt

SEQ ID NO: 21405 - DNA, 436 bp, Glycine max
tgcttgtggagcttctatggaggctttatctttgttctttattgaggtcctttaatggtgattttccaccatggagatgcagcggaagacaaaggagaagaggtaagaggcggcgccatccactagggaataagccatggaagaaggagcttcaccaccaagatgagccttggataaaaagcttggagaggatgcttcaatggaggaaaagaaagagggagagaaagagagaggggggagcacgaaattgaaggaagaaaaagggagagaagttgaactttgagttgtgtctcacaagactctcattcatcaaagttacaacaagtgttacacatgcttctatttatagactaggtagcttccttgagaagctttcttaagagaacttccttgagaagcttctttgagaaaacttccttgagaagctagagcttag

SEQ ID NO: 21406 - DNA, 299 bp, Glycine max
  unsure at all n locations
tcaagcttcttcctctntnctcctatatatagggggaggagggaagaacaaaaatgttcaaccctcctggtatctgagaatcacttaaaattagtgagaaaaattgtttccgtgaagaaaatccaagccgaggcgcttccgtaacgcttccgagacgtttccatgggtgatttcaagaagattntctaccgttcttcgtcgttcttcgttcattatttgtcgttccctttggaaagaactacgtaggtttgatttcctcttcgatggagggtacgtaagagcaaaagccccacttttgt

SEQ ID NO: 21407 - DNA, 444 bp, Glycine max
  unsure at all n locations
tgccattcanagcgctgtgggcctgngaaaatgcggtgtatttctaggttaatgtggtagagccctgggtgagacgagtcactgcttcaagttggtcaatggtgggctgacagatattgtgttctggcatggtgaggtagaggaggaggaggctggtcagaccaattgttagtgttgacagttgtatgtctatattaagaattaattagacaactggatgtttatttttgcaattaattttctagaagattgaataattcagatcaagatcatattattccaattttgatatgcttttattattattttgggtcagaatcaaatctctcttatttgatctgatccctttctatttacttttctttctgcatttattatgtaattggtagccttgcctatatatgtaaatcttttattcctaaataatatacaagaattattctt

SEQ ID NO: 21408 - DNA, 408 bp, Glycine max
  unsure at all n locations
agcttcttcacaattttttaattagaaacacaatcaatatattattagttaagaaaaatcatacattttagcaaataacaacacatgtcaatgagtttattaagaaggatctcaatttgattctaacataatatatctttaaagaaaaacaaaattttttaagtttgattaaattttgaacttagaattaattttataatcgatctaaaagattaaaattataaaaatcttacaaaatttcaaaaaagaaaaataaaaaatccttattattaatatggttaaaaaattatatattaaataaaanattgaattcaccttcgttaataaatcttatatgaagttcaatcaataataaagtaatgacaacaaatgtattattagcttttaagggattttattcgatcacat

SEQ ID NO: 21409 - DNA, 438 bp, Glycine max
  unsure at all n locations
tcagattgtcaattacaccatgttccaagaagagtagatgttgctacctttgttgagtggttttattagcattttgttagttgaaataaaggcccaaacttgtgttgaagtggctgtcaattctctttggatttgcaccacctatgggcttgttttaatttgaagaaattaaggtttaataaggtagaaactctaggtttgtggctgcctcttggctgactaggagttgcacatctttccacatgtttttgtgtcttaattctagttttaattaggtataatgacaccatcaattgttgttattggtgataatttgtctgaattctagttctaattaggtataatgacaccatcaattgttgttattggtgatcatttcatcttttcataaccaacttgatgccattcctttntatgggctgcgcattttctaataaa

SEQ ID NO: 21410 - DNA, 448 bp, Glycine max
tggtctctgtagatcttcacagaacaaaatctcttagatttctctggaacttatacctttctctctctagaaaccctagacatgcaaagctctgaatcccactccaaactccccttctaaaatctgatttcatacttaaataggtggccttgttcatactcgtgcgcttagcacacttatggaccgcttagcgcacattagtgaattttggcttagcgcgtgcctttctcgcttagcggatgaactgaagtggtgcgcttagtgagatgaagtggtgtgcttagcaaacctgtacaactcattttcttccagagtcttcctcgcgcttagcccatgagtgttgcgcttagcgaacgctcgctaagccagcagattggcttagcgagaaggtgaaaaacaacactttccaaagcttgcctaatgaacctgaaattgagacaaaatgatt

SEQ ID NO: 21411 - DNA, 341 bp, Glycine max
  unsure at all n locations
agcttgtctttgagatagcatgaaagacatgcgcaaagtgtgactatatgatgtggcaatagggtgtagtaagcaaatgctcacctccccctctaaaatttaattggattgggcttctaccaattcaattaaatttatttcccaacacacatatcaaatattcacttagtgcatgtgaaattacaaaactacccttaatacaaaaactagtctaggtgccctaaaatacaagagctgaaaaatcctatatttctagggtaccctacctacattatggagccctanatacaaggaccaaatataatgacatcctagtctaatatgtataaagataattggac

SEQ ID NO: 21412 - DNA, 451 bp, Glycine max
tccaagagttcggcaagcttctactattactttgattaggttacttttgtttgttgtttcattagtataataaaagcttctatattttgcatctaagatcacacaagattcctgtcggtagtctgaatgagaactttatagaacaccctttttgaattttaagtatgaatttttgtgaattcgagtaagcaagtaatgatattactgtgtaaaaaaagataatgatatatattcctctggacttaaatatatataaaaaaactaactcaatttaatgttgataatctcatgaaaaaagttaattcattttttaaagtaccatttatattaattgcataggacaaaaaaaataaggttattgaaaataaaactctaattaaataaagagtattttggggatattataattaaataggagagaattaattaaaatttacttatattttaattc

SEQ ID NO: 21413 - DNA, 391 bp, Glycine max
  unsure at all n locations
agcttctatgaaggtttgttcctaatttctctacacttgcctcacctttcaatgagttggttgatgtgtcattattttctcctatttcttaactctttttatcaccaatttaatttctgattaactctaattgtcgaatttattatttagttttatcaattgggcccacttgactaatttggtgtttttaattcaatttcaggataattataagcaattgggctgagccaaattggacttgaagagagaagacaattttattagatttcgtctaatttcattntattgcattcagttnttatttagtatttttatttcattntagaccanaataatgtaatcaggcccagtgactntgagtgatccttataaatagcagccttgggattcg

SEQ ID NO: 21414 - DNA, 458 bp, Glycine max
gactcaagcttgtacttgtacttgctattggcagattacatgcattacttcttcctttctctctcatcaacgtgagtgggcattttattctttttctataattacggggttaataagatgaaacaatagggtgatgaaacgaatagggtgtcctctcactgcttgaagcatccaatttttatttttatttttatggtagaacatattatcatatcttggaagcatcagctgtgactcggctaaaggctaccgcggtctttgagccagatgggcgccccaaatgcttgccgatgaactcaccggctaacatgagctttccgagatcaacgttggttttcaccccaagtccattcagcatgtacacaacatcttcggtagctacatttcctgaagctcccttggcataaggacagccacctagaccagcaactgaagaatcaactgcactgatccccatc

SEQ ID NO: 21415 - DNA, 344 bp, Glycine max
  unsure at all n locations
agctntttctttgacttttactgggttatatacgccatgttctaatttttcactatagaatagattggtagtatatataatatatgaatggctatttgatgactgattcagtcacttaaatgaattttgcaaattgacatttgcacagaagttttgaatgttgatgaaataaatttggtgtacttaacttaaccccatgatttgatgtcccgaataaacaatattgtcttgtcaatatgatacgtagtgtttaaggtaatctccacggtattgaagtgtttttaaatgaaagacaagccaatatcttttagtattttttttctcaacaaaggtgtattttcaat

SEQ ID NO: 21416 - DNA, 268 bp, Glycine max
  unsure at all n locations
cttctccacgatgtgagctntgatatgagaggtgtgtgtgtttctaaactctagctactcacagaagtgttctcaaagaagcttctccaggaaggtgtctcaagaaagcttctcaaggaagctacctagtctatacaatagaagcatgtgtaacacttgtagtaacttggatgaatgagagtcttgtgcgacatacttgaaagctccacttctgtccctattttattccttcaattacgtgctcccccctctctctttctctctatct

SEQ ID NO: 21417 - DNA, 366 bp, Glycine max
  unsure at all n locations
agctntttaacattctaaacatgcgaactaaagactgaaattaaaaactgaaacagaaatataaacccaaattataaagtgtactaaaagcaggaaatgataataaaagtgttcaaaagacaggaaaataggataaaagtcctgtcatgggtcctgtcgtgcaaaagggacataatccatagctgctgcatcatcctcctccttagagagctccagtaccagtgttgtcactggggatgcctgcggagtagagagctccagcacaggtgtggtcactggtgatgcctgtggagtcgtctctagagtggcctccgcagtgtcctcctgagtagctgggtcagtctctgggtcaacctctggcatgtc

SEQ ID NO: 21418 - DNA, 440 bp, Glycine max
tgggaagtcttggttcaatggcatggctttttcccagattatatttcttgggaggattggtctgctttgcttaatgactatcaccttgaggacaaggtgatttcccaagggccgcgggatgatatggaaaacacatatcacagagtaggggtacaaagagaacattctgcagaggtgcagaatatggaaaagcccataaggagagtaatgaggccagcttaccttcaagattatgcgtaagggtagaaaagggattagtgggatagtgccgttagagcacgggacaagcttaacggtattgattctgtgatattcctcttgcaccaaaaagataagaattctgctagcataggatagtatgaataacgttgtatataaaatcagaatcataaatgagaatatattttcttgccttattccttctccccttacttctatgg

SEQ ID NO: 21419 - DNA, 404 bp, Glycine max
  unsure at all n locations
cccgggatcctctgaggcgatctgctgctgnctgcttttctgagcactgatagggaagcttgaggcatgctgggtacaatcttttctccacttaagatagactaaatccttaaagcaagttctgtggtaatcagctctcttccatgctgcccaaaactctggaagacaaggaatcatctgtcaaaaaaaccagaataaccaatttgagataactatccactacatgccacattataactttctcttataagaatgcctatacataattatattatcataaagttcccccttttcttacatacacattttcccctgtgcttatcattaacacanatgaatgaggaaaacttacaataagaattctaggctctgacctctcatcattgcctttctttcctttgaat

SEQ ID NO: 21420 - DNA, 358 bp, Glycine max
cccttctacacaaggctctataccggtagcttagtagcttgctcgtgagttgtgctgcgctatattttttgcttaaaaaaaactacttcattggggggtcgaagtggaactttcgactctctttatttgaagactatacataaaaagcggattttgcgtgttataaaatcacacgcacatgtctttttatggaatatgatgatggggtgggtgatctttgcttgcaagattggaaggatcctaacgcgaccgacactaaacatggtatgtgttgtctgacaatatgaaatgaagagtattatgatatcgtttaccgaatgttggtgccaatgcaatggcttactgggggaatatagat

SEQ ID NO: 21421 - DNA, 389 bp, Glycine max
  unsure at all n locations
agctttttgcttcttgtcataacaactttgcactattctttgggattcttctcagtatttgctccaaagctactggatgacttctcaactatatgcttagccagttgacccacctggatctcaagatttttcagggctgactcagtgctcttatgattggatatagtcacttgaatgaattgagccagggtctcctccagcttggtagtcctctgaaaaagagtaggcccttgttgaggtggcctattggaaagttcaccctggtccttattgaattgattgccaaggtgtgatcttcattgaccttgctgattgtanggaccttgctggaaacctgagaatcctcttggntgacccttgccttgctgattcccatgtantaacttcat

SEQ ID NO: 21422 - DNA, 442 bp, Glycine max
  unsure at all n locations
ntggaagaaagtgatgaggtacaagccctataggcaaatcttgtaagagcccgggtagtcaaagagaagttcaagtccatagccatcaaagtctgaagagagtatgatgaactaagggacgttaatatggccaccgatgaagccttggaatgagaaaccaagaaggcccgaaaggaagaacacgaccaaagcaaagttttgaggggctttatagggcagcaatagtgagctcaagctccgaagaggtgaaaggaatcatcatgggtcaaaggcatgatcttgaaggatgagctaaaggttttccttatgtcgaanagaaatttgtcccaacagttaagcgagactgaagggaatatgtgggccatcatcgataagtgcanagagaagctaaatctagcggcgactcacgagcaaaggctagaggatgagtacgccaagatat

SEQ ID NO: 21423 - DNA, 390 bp, Glycine max
  unsure at all n locations
cgttttgtctgcttatttcaaaaggaaaaagtattgacatccaatttcctcaaccaatttataagatttgcggaaaacatgcaaaatatttcaagtctgatgctcaaatgcgtattcgctttacaagttaatggttggattgaaattagtaaagattatctagatgaaatgtgacaacatatgaaggttagtatataattaggtcaattatattcaatttatttatatatttgaatattagttatatcttcaaattagtttgataatgtattttggtagtatataagttttgctttttttgatgaaaacatgtaatataaggatgctnttagtttacttgatgagacgacagaatatgcaatgaagcatattcaatctcaatacaagaat

SEQ ID NO: 21424 - DNA, 445 bp, Glycine max
tactcaagctggactttgttaggcaaaatgtctcgtatgtcatgactattatttgttgcatcaagacgtgactatcatgagactttaagcttaccaacttaagatccttcaactgcacaaggctcttaatatttgaagagtatccttgtggaactttgacatgacacatacactaacaaaaactcatcttctcctttctgggcaaagtatgacaagctgaaggcaagtatattttttaccatcagaccttggatataactgcactcgtatatccatgccaactagatcttgacgagtattcaaaccatctttcatcttgccttgaatgttaaggagcgtcccaataacattatcacatacatttttctctacatgcataacatcaatacaatgtctaacatctagatcagaccagtagggaagatcaaacaaaattgaccttttc

SEQ ID NO: 21425 - DNA, 397 bp, Glycine max
tttcttgttaaaacctaagtaagcctgctgattcctttatggtctccgtaatttactgttgttgctaccttcttccacttgtattatatgcatttggcaaaagatcacctttacttcctttacccaacagattaatcagaaagtgattgtggatcagaaaatcaaatcacttgtattgtgtactgatataaatagcttcctcatcaaaatccggtgcccttcactttggccaaaaggtttcatctgttcaacatctatgctaggcagaattcccttttcagaacaagcattaatagaatggcctcctagaagattaatatcgttctctatgggatatgggctgcctaaacttataactatggttaacctcaatactttgttgttgaaaaagcttctt

SEQ ID NO: 21426 - DNA, 403 bp, Glycine max
  unsure at all n locations
nttaacactttntgaatganaacttatatgatgttaatattccaattattcacataaaaagaaggaaaataagagagaaaaattaacaaatcctacataagtcaatcccaaaatatacctatacataacagttattattgacaggctgcagcaactctagactcttgtaaacttattttaaatgaatccatatttttaatagctctaggatgtattggaatctaatctaatgtaccttaatccaatatgcgctttctataaaacttatggatagacataaaaagtgttacacaaaattccagtttgaatttaatggagtattttcttttgcaagtgcaagttatttgttttgtttgtctctgtttttcttttntgttgtgttttggaagctatattcatgaat

SEQ ID NO: 21427 - DNA, 291 bp, Glycine max
  unsure at all n locations
tttttattgnaatcgtgaaattcaggacagtactctaatttctgaaatttttcggataaaaatggtcattgaccagtcccttttccatgacttaaccaaattacccagtgacggtgtaccatttgaaggttcactgaatgactactggaaatttgatttctctgcccatgatgcccgccagttggtttgcaccaacaatgcggatatgaccggacgtcttcttgccgggtcattggcttttgaaagccgcatccttcactatttaattgagcgtactttgcttgcactgtc

SEQ ID NO: 21428 - DNA, 436 bp, Glycine max
tcctcggggccatttcctgcgagatctaacatttagaagttagttttacaagacaatgcttatcttaacgcaaaaagtgtcatgctaatccctctgattttagaatgaactcatgtaatctatttatgcacacgcgtatttgtggaatatcctactatttatatcaacgtagaggccatccaacacatcctaattctcatacatatatatgcatttgaaaagaacatacattctcacgcctaaggcatcgcgtcaaaactcacacttaattatatcctaaacatttgctaatacaaactacctacacacatttgaaatatgtatcatacaaattttattgtttctgcatattggaaagctaattacatcctgcacacacttgcattcaaaagggaattccatgctatcatacatccatttaggaaaataatcattc

SEQ ID NO: 21429 - DNA, 400 bp, Glycine max
agctttttcattatctatgtttggacatagacggcataatagaaggatattctctaaaagtttcacttttcaaaaatcaactttaaagttcaaataacgagataatttttcatgattgagtctattttacatagtaattctccatcaaacaaaaaccttttttcatccacaaagtattcaaatgatagtcgcccaaaatcttatccattgtcatcaatatgctctaaataattacatctcctattaaatccttgcacggtcattagacccttagagcttatctattgttctcaatatgttataaatactttcattatcgttagctcacatcaagacgacatgccacctaacctctacactaccaagaagactcttaatcttcatatatggatatatcatc

SEQ ID NO: 21430 - DNA, 449 bp, Glycine max
tgtagacctaacattatctatgatttataagcaaaacatttctcaacaaatgataataataacttgcactatattatttttttaattatagctcaaattcaaatggttgtgattttgtatttgaagatactcttcacaaaatatattaaattgcatatataaataatggtgttgacaagaactagtaatacatcccatgaccccaccccttatctacttattccatattgacacatatgcataattaatattaagttataaacttataaaaaacaaatttttatgttggtaaaaaaatgtcaatattaacaattatctatcactaaaaaataattaaattcgactaagaaaatttaaatatttaaataaaatcaataaaagacttataatataaaatattataaaaagtataacatatttaattatatattataataatttattatctt

SEQ ID NO: 21431 - DNA, 398 bp, Glycine max
  unsure at all n locations
agcttatctttgtaagttgtagaagtgacagtgaagaatacttgtaacttttgataagttagtgaaatcttggtaggctgctaagaactgaacgtagtctcggtgtagaaagtataacttcatgtgtgttattctttattgtttttctttgtgtgttgattgacgaaggatttgaatttgctttttatatcttatatttgtttttgatctgttaagaaaattgttttctcattgtctgataaagtctttcttaaatatatcttttcttttattttagttaaatntgcatgagacgataaaagtgtttttagtctaagaaaaattttaaaatttctaaaattacaattaaacccctnttgttgtgtattagcttctcaactattagctaattggttata

SEQ ID NO: 21432 - DNA, 440 bp, Glycine max
tgtgttctcccttgtagaactactaactgcagtaattgttgtagtttaactatccggtagtgatgacaatagaatcaatgccttcacctcatcatcaaatttaatctgcactgattccaactgggcaagaatagtattaaattcattaatatgatcagttacagagataccttctcccatcttgaggttgaacaactggcgcatcaagtatactttgttggctgtcgacggcttctcgtacatatctgataacgccttcattaagcctgtagtagtcttctcgtttacgatgttgaacgcgacgttcttagctaatgtcaatctgatcacgctaagagcttgtcgatccagcaagttccattcttcttgcttcatgtcgtctggcttaacccctgataagggctgatacgacttcttttgatatagataatcctctatct

SEQ ID NO: 21433 - DNA, 392 bp, Glycine max
  unsure at all n locations
agcttcttttggaccttgaacaagccatcaattcctctttcagaaccatgctatgtgctcgcgactggtccctttcttcccttcgcaacttgagttcactattgctaccccatagagctccgcgaaatttgttccggccatactcttccttgcgagccctcttggtctctcgttcaagggctcttgcggtaattgcattctcttcccgtaacccggcacactccttccgaacgtgtgtagcagccaacttgaacttctccttggcgagttttgcctttcctaactcgcttttgagagcttggacttcctcgtcctcttccggtgcttcaaaattctcttcgctgacgactnttaacttggcgagccaatctaaacctcgtatgcgaactttc

SEQ ID NO: 21434 - DNA, 447 bp, Glycine max
  unsure at all n locations
tgagaatggaggatttccttgagggtcctctcttangcatttatggaacacagttccaaactcaaaaatggaggacacatgaatgacaacgcaattcattcatggggctccgaaaaagggtaagaatggaggatttgcttgagggtcctctcttaggcaatcatggaacacaactccatactcgaaagtggaggacccacgaacaggcctaagcaataacattcatgtggctccgaaaaaggatgagaatggaggattgcgttgagggtcctatcttatgcaatcatggaacacagctccaaacttgaaaatggaggtcacatgaatgacaacgcaattcattcacggngcttccgaaaagggtgagaatggaggattgccttgagggtcctctcttangcaatcatggaacacagctccaaactcgaaagtggaggacacatgaac

SEQ ID NO: 21435 - DNA, 403 bp, Glycine max
  unsure at all n locations
agcttgttcttggtttatacatgattgatacatgatttgggacttgtatgatttgatttgggcaagattggatgaggggaagtgtggttttcgaaatctgcattttgtgcagatttttgctgtgaaattgtgcagcaggattttgcacaagtgcagaaaaatactatgcatttgctggttgtggaaagagcagtgcagaatgagttctggatgtttgctagtagatcccaacggtcaaaatgtaggcttatgtactagagacttccagtaaaaatttggagtcgatccaacggttaacgaattggaacgaaggaattgttactggnggtcttaagtgagaaaagctgtgatcttggtggtgtttggcagagttttctgctttgtctgtttcttggctggatag

SEQ ID NO: 21436 - DNA, 438 bp, Glycine max
  unsure at all n locations
tgcacttcttaactntcctcaagaatttcagcctctttcctacttagactttttagctttgggagccaagttatcccttctgttctagacttcaaccacttgtgatagtcgtcgatgacgccattgttacttcccctaagctccttattttttgatgcaatcctaacccgcaagggcattggatagaagactccaagtagattgggccagagatccaagggaaggccctagggttctcatgagccttagggtagatttcgagcccatgggctaagcatgagcccgtttatctttgtaaatattagaataggtttttcattcgtttgggccttgtattttggccattctagtagtataaggttttagccttgtatttcgaggcattntgattagtctttatagtagggaattttttgtattttcatgtattttgtcatg

SEQ ID NO: 21437 - DNA, 379 bp, Glycine max
  unsure at all n locations
agctttatggctgagaacctatataacaacaccaaggttctagttttaggattctttttcgttttanggagaaagaataattttaggttttgcaattccagtttttactattcacgtaacaatcgttttctgcttcaatctgcaatttcgttttctactgattaatggaaggccaagtctccaacgttgttttctcttgaggatcaagcacaactctctttgaggttntgttattactattgaattctgatcagttnttcctcttcaccaattactctatatttgttgtattaatccatgcatgcttagtgcttgattaattgtctctgcgcttaatttacgttcatgcttaatgatcnagtttcgtcatgattaattg

SEQ ID NO: 21438 - DNA, 430 bp, Glycine max
  unsure at all n locations
tgtctcagcgtttatgcgagacagagaccaacatgttagctatcatcgccaagttcgaagaagagttaggtctagccacggcccacgagcatagaatcgcggatgagtatgctcaagtatatgcggaaaaagaggctagaggaagggtgatcgactctttacaccaagaggcaaccatgtggatggatcggtttgctcttaccttgaacgggagtcaagaacttccccgattgttagccaaggccaaggcgatggcagacacctactccgcccccgaagagattcatgggcttctcggctattgtcagcatatgatagacttaatggcccacataattagaaatcgttaggaaacttgtatggtctctcagaccttgactagatacgactntcctttttgaaatanaatgagttggtcccatgtttctac

SEQ ID NO: 21439 - DNA, 384 bp, Glycine max
  unsure at all n locations
agcgatgcttagcattatatttgggatgacccctatttgtggaagttgtgtagtgaccaagttattaggagatgcattttggacaatgagattgactcggtcctgaatttttgtcattcttccgcaccaggcgaccatcttggtatacagaggatagctcgcagggtgcttgactgtggtttctattggcccaccattttcaaggatgcatggagaatttgtagtacttgtgagtcttgtcagagagcaggtggttcactttcttggaaacagcaaatgcctcaacatcctatgttgttctgtgaggtgtttgatgtatacggtatcaattntatgggacctttccatgtatctnttgggtntgtntatattctccttgctgct

SEQ ID NO: 21440 - DNA, 433 bp, Glycine max
  unsure at all n locations
tgttttaaagacccaattntatcaacatctatgtcttcttgttgttttgattctaatccttgtgttgatgaattagccatcaaacacaacttatcttcctcgtcctttgttgaggcttcatcttcagattgatccttagataactcatcaactttcagagctcttggtgcaatcatttgtggtccacactcagtggaaccttcatacaatatagaaagaatgtccaacatttctttggcatttttgatatagcgcacctttgcatgctcttttctgataatgcacagatgatggcgtttcttgcttttgagttcaacaagtatctctgtttttgcttatcaatccatctctgtcttggaagctcattgaggttgttatcataaggattctagtttccattttctattacatccatcgtatcactatggcagta

SEQ ID NO: 21441 - DNA, 365 bp, Glycine max
  unsure at all n locations
ggctttcaaaggctactctttatcctacaaatattgntaatctgctaatggattcaatctcccctcacgatatcactatcacaggtgctattggattttgtctatatagatatctatgtttgtggtatggccttgaactgttattaaatgttattaagttatttgaagcatgcatttactgtatctttttgtgattaaactatcctggattttttcttgtcataggaggacatttcttgagtttattaactttttaaaattagttaatcagatgatgatcattggagaaagttgatggttcttgctttcttgaacattgttacatggtgcatgggaaaagacatggacttatattttcaactatt

SEQ ID NO: 21442 - DNA, 424 bp, Glycine max
tgagtcttagtataattgttgcataatacttatgaattatttattatgaaattggtgaagtgttgtcactgtcacgtcttgagtcgagtgtgtgattcatgtgtaatgtgatcggcgattgaaaaataaattttaaatgataaagtggagaagtgacatggattgcattaagttgaactatgtgatacatattgtcataattgatttctcttatggctttggatatctgcattttatttacaaatgtgacaactcactcctgatgtgtgtttgtgtttgggctaaatgccattttgtttcaggtgagctatcctatgatgatgatcatgctacaaatggaaacgcttagtcttactcatggaaattctctgatagatgtgacattgatgcatggggctgatacttcacatgttataattacatg

SEQ ID NO: 21443 - DNA, 383 bp, Glycine max
agcttttcataatcgattacatagctctttttgagacaatgattgattgtttacgagtctctactttaatcgattacttctctcttaaaatgcgcttcaaaagtgatcacaacttttaataaaaatagaataaggcgtcgtaatgggtgcaagctatgtaattgattacatgaagaatctaatcgattacattgttcttgaaatttttccaggtggtgggaagaacactataattgattgaaatgataatataatcgattacttcttacacataatcgattacattgtatatttaattgattacatgcaggtataactggtttctctataaatagacaccttgtgttctgccatttaataacatctaacaacttgtgaatgtg

SEQ ID NO: 21444 - DNA, 436 bp, Glycine max
  unsure at all n locations
tgcttatggagcttctatggaggatggatttttagctttttgtggtccttcaatggtgatttttcaccatggagatgcagcggaaggcaaaggagaataggagaggggaggcaccatccactatggaataagccaaggaagaaggagcttcaccaccaagaattgccatggataagaagcttgaagaggatgctttaatggaggaaaagaaagagagaaggggggagcacgaaattgaaggaataaaagagggagagaagtggaactttgaagtgtgtctcataagactctcattcatcaaagttacaacaagtgttacacatgcttctatttagagactaggtagcttccttgagaagccttcttaagaaaacttccttgagaagctttcttaagaaaacttccttgagaagtttctntgagaaaacttccttga

SEQ ID NO: 21445 - DNA, 399 bp, Glycine max
agcttgtatggtttttgtctcacgattgtcacatgctcatgcaataattgttagtcgtggctatacgagacatcttgccaaacaaagtcaggttagccataactcgcccgtgcttttccttccatgctatatgtagcaaagtcattgatcctgtcaagtttgatgagctggaaaatgaggccgcaattatactgtgccagttggagatgtattttccccctgctttctttgacattatgattcactctattgtgcatctggtcagagaaatcaaatgttgtggtcctgttcatacacataattcaaattcattaatatgtaatgcatatattggatgaaagctttgaacatggaacttatggcagttcattctatattgttgcaagtactcctacttct

SEQ ID NO: 21446 - DNA, 424 bp, Glycine max
tgctggtgtgggtctcttttgaggaagattttggttgtgtattttaagtgggattaattaccaatatggacatattaaaaaaaattatcataatgggtatttttttttaaaaattacaaaaatgaataaatcatattttgatataccatatcacaatgaaaaaattgtatatcaaaatacgattttacttttgatttgtttaaaatcatttttattaaacaaaagtgaaaatgtatgtcaaaatacgatttcaatttttttttcctaatgaaatcgtgtaatttttttttctgacaaaattgtgttcaaatacatgattcttaaaataattaaaaaaatattgaaattatatgtgcatatatgattttaatgttccaattctttggaaagaaaatcattctttgaagtacgatctcttcataat

SEQ ID NO: 21447 - DNA, 399 bp, Glycine max
agcttttatcaaacaggctgaagaggataatgccattcataattgatgaaagacagaccgctttcatagctggacgacagctgctacacagtgtaatcatcgctaatgaaacagtggacgaagccataaggggtcaaaagacatgcttggtgttcaaagtagattttgaaagggcttacgactctgttttgtggaactttttactatacatgctgcgaaggttagggttctacaataaatggattcagtggattgacggttgcctcaaatctgcctcggtctcggtgttggtaaatggaagccccacctcagaattcatccctcatagaggccttagacaaggtgacccactagcgcccctattattcaacattgtagatgaagccttaatgtgtctca

SEQ ID NO: 21448 - DNA, 397 bp, Glycine max
  unsure at all n locations
taactaacttaaccaacttanaactacctaactgttacatgttataacagaataatagaaaacagaaaaataactaagttggtaaagtctaagagaacctaactaatggttgttaatgaaccaacatacaacactatgggttgctaacactacaatttgttgatttcaaccggtaaagtttgaaaaaacatagagtattttttgaatttcaaaattttcaattgcattgcatgattttgatcattgcatatttgagttttgaggggtcgtgtgtttttctttggaggattttgttctgtgtctgtggtaaatttttctaattgttgttgttcaaggagttcaaaaacttttcgagatggggagtgctctgaagttcgggtgttaaaattttgctatg

SEQ ID NO: 21449 - DNA, 385 bp, Glycine max
  unsure at all n locations
tttcttttggtatcatggtagccatcagagaagacattctatttccactcttatctgtctgcataattaatcctttcgcagaatgatataccctacacttcccatgttgaatcaaaatagtcaagcctttttcttgaagttgtcctatgctcaccagaaattgcctgagtaaatccactcacttgcataagaatgatacctttttccacaacatccattctggtgttattgccaagttttacagtttggctaaagctttcatccagttctgagaaccactccttgtttccaatcatatgattgctgcaaccggagtcaaggaaccacacttcttccattntgtcttgctccaggtcaacataagacattaataaaaaatctttca

SEQ ID NO: 21450 - DNA, 393 bp, Glycine max
ttctaggataacttatgaaaacggtttatggcttatactttaacagcttaaccctattttttccttccattatatgagaggttgacatacataaataaggtctgattcggaggggccataattgaactgtttatgcgaacggtgcaatatttcataactcaggacataactacatcaacaacccagttcagattttcatcccatggtgctacaaaaataataaacaccactttcaatttacattaatgaatgaataatcaaataactaactcctgaccacatcaaattaaacccaattgcttgtttatatcaatttttttttctgtttccatcggtgtgagtgacaaacaaataaaatcaaaaaatgaaactgataatacaaattgaaaacta

SEQ ID NO: 21451 - DNA, 395 bp, Glycine max
  unsure at all n locations
ttgtatactaagtgctcaccaacactagataagaatccctcaggttgtttcatgtaaacctcttcttctagatcaccattcaggaacgccgttttcacatccatttgatgcagctcaagatcaaaatgagctactaatgccagaattactcgaagagagtctttcttagatacaggggaaaaggtctctctgtaatcgattccttctctttgagtgaatcctttagcaacaagtcttgccttatgtctctcaatgttgccttctgagtctttctttgttttgaagacccatctacatccgatggcttttacaccaacatgcaactcaacgagatcccanacctggttagatgccatagaatccatctcatctctcatagcattataccacaaatt

SEQ ID NO: 21452 - DNA, 430 bp, Glycine max
  unsure at all n locations
tctggtgggacatcttgacttgcttttcaatctgacattttccacagattctgccttcttctattttcagattgggaatgcctctaacaacacctttgtcaatgattttcttcatgcctcttaagtgcagatgtccaaatctttgatgccatattctgacttcatcttctttggaggatagacatgtggaggagtagctggtttcttgaggtgtccataggtaacagttgtcctttgatctgctgcccttcattagaacttcactcttctcatttgtcaccaagcattctgactttgtgaagtttacattgaatccttcatcacacaactgactgatgctgatcaggtttgcagtcagtcccttcaccagcagtactttgttcagactaggaagtccatcatgaactagctntcccattccaatgatctt

SEQ ID NO: 21453 - DNA, 397 bp, Glycine max
agctttatctcaaatttctggctaacttatcttttattccactaacgacagagaaaggatttaaatgcttaattaatgtagttttaaaaggatgttgatctctccattgcgtaggcaagagcaagacaacgcttaccaaacaaaaaccgctcttaatttttaaaacatataataaaatgttcccttattataataatcaaattgacttcaattagcataaaaataatagcctttagtgggacaatccatagtaacctaggaaactcagtacaaatacacattaaaaatacaaaagcccaaggatataatatgcttcaaatatttgttttccacactcaaattgccatatcacgggtgaataagtgaattcaaaccaagatctaaacaaaaagctatc

SEQ ID NO: 21454 - DNA, 446 bp, Glycine max
tgagactttgagaaacatgaagaaacaaaacaaacccattgatgtggagggggaaaaaaaggggattttgaggagggaattgtgatgagaggttgacaaaaaagaaaagggtatgttgagagtgatggagaagtgaacaaaaaatgagaatgatttgaagaaaaccacacaaactgaaaccctagagggagagggaaagcttgcttaccccaccaaaaggtggagacatttttggcctttgatcaaaagggtgtggcttggcattgagaacgtgtggagtggggctggcgaaaaggaaaggaagaattatacttttcgtttcgtttgggagcacagcatcgaaggaaaatggtggaagcaagcaagagtccaaagggaatgggtttgtggtttgttctcccgagagaatgacagtgacacacgcacacgcagaaacagtcacaggg

SEQ ID NO: 21455 - DNA, 394 bp, Glycine max
agcttcttattgtaatcttgaaattcaggacagcactctaatttctgaaatttttgggataaaaatggtcattgaccagtcccttttccatgacttaaccaaattacccagtgacggtgtaccatttgaaggttcactgaatgacgactggaaatttgatttctctgcccatgatgcccgccagttggtttgcaccaacaatgcggatatgaccggacgtcttcttgccgggtcattggctattgaaagccgcatccttcactatttaattgtgcgtattttgcttccacggtcttccaaccttgccctggtttctgaggaagatctaattatcatgtgggcctttcatacagggcgtcaacttgactgggcacacttagtcacatatcgcatg

SEQ ID NO: 21456 - DNA, 449 bp, Glycine max
  unsure at all n locations
tcctcggggccatttcctgcgagaacaaacatttagaagttatttttacaagacaatgcttatcttaacgcaaaaagtgtcatgctaatccctctgattttagaatgaactcatgtaatctatttatgcacacgcgtatttgtggaatatcctactatttatatcaacgtagaggccatccaacacatcctaattctcatacatatatatgcatttgaaaagaacatacattctcacgcctaaggcatcgcgtcaaaactcacacttaattatatcctaaacatttgctaatacaaactacctacacacatttgaaatatgtatcatacaaattttattgtttctgcatattggaaagctaattacatcctgcacacacttgcattcaaaagggaattccatgctatcatacatccatttangaaaataatcattcacacttggcaagg

SEQ ID NO: 21457 - DNA, 413 bp, Glycine max
  unsure at all n locations
agcttttcagttgcttatccaaaacttcaagggttgatgagttaacaaggcattgtggaatggttcctgtcaacatgttgtgagataagttgagaatctcaattgcacttgcattgcaaattgaggaagagaagccaccagtgattgagttaaaactaagatcaaggtaagcgagtggtttcttccacgagaattggtccaatgattgcgtcaataggttatgagagaggtccaattccaataacaatgagttcgtttcatgcaaccaatttggcactctacctttaagtttgttattggacaaatggagtgattcanaaatgggactnttcccgataantttggaaattcagttaaatccatagatgaatagtccaatctccatanacgggagaaattatacttgacattgg

SEQ ID NO: 21458 - DNA, 441 bp, Glycine max
  unsure at all n locations
ntatggtttcgcaaataattgaggctttctgcttataaatttagaagatctcataatctgtgaacatgagttgctttggttgcactttacatgagcaatctacaccttttctcactatattggggtatgtaatttatctaaggaaacaattaactaaccaaaacagaataaagcaatccttgaagtctcataatttgaaaggaaatcttgcagaactggagatgtgacgtcatttttctgaaccaaaagcatctgacagttggaaaaagaaaacagattaataactgtttacaaagttgtttgagaccagtgatacccacttaaacaaaattaacaatcttaacaacagcaaattcagcagacaaattataatcaagtggcagaaaacaattatttattattaatgtaatgtcacgtactgctttttgtcattaaaaaaaa

SEQ ID NO: 21459 - DNA, 384 bp, Glycine max
  unsure at all n locations
agcttttggaagtgctttttataattctagntcttgcttgtaggaagaactattgggcatatactgcagtttgtatatcagttgtcacatgcctatgaatatgaggaaaatgtctctcggaaacatgagataactgtattatactttatttaatcgattaccttggctgcctctactatctcaagaggcaagtttttggaaaactcttgccttcgttgacagcaactttcatttgctctgcctttccgtgaaattagaccgaaattatgttgtataaatagtcagtaactgagatatagtttctgatttggtgtcatatccatcaagctttatagtttaacaatcacccgtgcattggtggatctttatcttgatcttaataat

SEQ ID NO: 21460 - DNA, 425 bp, Glycine max
atgtaaccctggaatgaaccaagacaatgttgacaatatttgagacagttgattatgaaacgacgaaatttcctttgaaccggtaagctggggcgtccatacattgccactggaatgcatacaactgaacaacttctctatttaaccatctgaacaaataccaactttagaaggataactgacaaattattacatcctaaaaaggaaggctgtctatgataggattcttaaagcagcattgtggcttatacaaaattagagtctacattaagaattgaagcacaaattataatggaatatctaactaaattgatcttcagaataaaacatcaactctgtaaaaatgaatagttggcatttgcatacagcactatacagtcctgtaaagctgttattgattgaataaaatcatcttgttacataca

SEQ ID NO: 21461 - DNA, 405 bp, Glycine max
agcttgttgaataaccatttaatgaacctatctatgcatgcatagcctatatccattatcacaaagactacctaccagcaaatcattgaaattcactcccagcaccacaggcttgcttgtcattaacaaaataaccgaatattataaatcttatgttcaggatcttttattcattcaacctgctaggataacataaggaagctgtgacattatggcattggactgcaacgacactacatcatgatgctataaccacataacaaacactagagagatcctacagttaagcgcaatttttgattaaagatctagtgatgttattcacaactagcaagtctagtaagagtcaatactcgatataccactactaaccttacatccaagcaatcatgaatcaccactcat

SEQ ID NO: 21462 - DNA, 441 bp, Glycine max
  unsure at all n locations
tccatcaagcagaatcatcagaaaggtcatttgacaaatgttcaaatcattaatccaagagactatcgggacttaaccaccaagcagaaactatacctaaaagtttaaccactcgataaaagcaacgaggcttaaccattaagagcagaaacaaaacaacgattcaatgcttaaccatccatgtcaaaaacttaaacaatgtttaatcaccgcggacagaagcttaccaggacttttcacaaacattgtgtgaatcaacaataatcaaagcttaatcactcatgatagaagctaacaaatgaacaatgcttaaccaccacacatgacagaagctaaaatcatcagaacaagtcgaagaactntagaagtatntaatcaaacaccttgtagacaaacaaaatctgaacactagacatgaagaaacttacacaaactttggag

SEQ ID NO: 21463 - DNA, 400 bp, Glycine max
  unsure at all n locations
gtgtgagactatagggtactcagcatatgtggcactatgtggcgatcgggcgatagtgcttgtcaactgtatccatacgcaaatgacagataaatgcaccatccccaattgcccaccttcgactgagctcacgtacttacacgtagaccttatcctcgttcttattaacaccgggtacccatcaataccttctagcttccgcgacatgcatgcaattctacatacaaacatcatgagctatccttatcgataatatatggcagatgcagataactattgctccaacacatttcggtgccgcaacgtgacgtactcaaataccgcagtcacattttcttcgttgcgatacgacaaccgttggatcactcaaaactctactggaggccctangactaaatgg

SEQ ID NO: 21464 - DNA, 270 bp, Glycine max
tgcagagttagtatgatttggaacaaatattcacttcttcagtttgattgccggtcatcaagcatgttttaaccccttgtggctgttcgaaaggaaaacacctaatagttgctccagtctcctcctttacttttaactcatcttcatcactgctaaattgtgtaaagcttgatattagagttgtgaataaatcatgttccttgtctaaacatgtgttggaaggtacattatcaacatcaaaacatataggcgaaaattgggggggggggg

SEQ ID NO: 21465 - DNA, 317 bp, Glycine max
  unsure at all n locations
agcttgttatgaggaagtgtngaagggtgaaacttcctgcttttatcgttgaccacagagtggtacctggagatatgtcgcaggggtcaagagaccttggggacgtcatgtggggtgctattgcccaaaaccaagcttgaccaatcccgacccaacccgggcatagttggtcagtgagaacctgtgatgtacctaaacaggcgagctcctggcagtcaacagataaaaggaacaaagaccacaaagcaaggaggcttgtggtggctggccaactgtgaattttgtgtgatatgtggattatggcctcttgtaatcga

SEQ ID NO: 21466 - DNA, 410 bp, Glycine max
  unsure at all n locations
ntgcaacatctgaaaacctagctngaaccaacaaagatttatttctaggatctagagaaggcatagcttgagcatatgatcggatcacatcatttgttacctgcatatataaaaataacaacaacatcaatatttttaaatcataacataattaacattcaattaaatagaatgtattacatacttttacagatctacgaaggtgttgtttccaaaaagaggagtagttgtagattccatggtttaggctttggtactaacgttaagaagaagttaaagagggatatatgagaacgagagaaagtgagtctttgagtgagtgtatatgatgacaatacatgcattgtatatatagaaaaaaattaacactatcataatttattcggttggatcttggtcattgattttgt

SEQ ID NO: 21467 - DNA, 232 bp, Glycine max
  unsure at all n locations
cgtttgcaagcttgtatccattttaagagaatgagcatgcgagtagaagtatgactaanaatgtcacttagtttgtcagattgattgtgaaggaatgcattaaccgtatcccggtgagagtgtgatccttaaattctgagagaaatgactatcatttagtactgatttttgcatgaatctctaaagtatggattgaatgcatgaaattaaggatgatgaaagccatggttta

SEQ ID NO: 21468 - DNA, 438 bp, Glycine max
  unsure at all n locations
ntacattatattaaaatcaatgactttgatgtaatactttttatttattctgatataattttatctctcctctttgtaatgagataattcttcaataacagttttttttctccacttttacttagttgattttattcctgaattaataaaaaaaattaccaactaatatccttcccttcaactgttcatgtataattgcaatctgtgtattatttttaaaatttactcttcaacggatggaaggaactacacaaagccgctaagtcaccaagaataactacatccagttnttatccagatttttacataatagctacacgttattnttctgtaagtgtacattatttttctctattattnntttctatctaactcccacgcaaggaagtgcatatccaactgaatcatgtactaattgcatccgttgttcctttatat

SEQ ID NO: 21469 - DNA, 388 bp, Glycine max
  unsure at all n locations
agctttataaaatttcattttgctgaaacaatttccatatataaattagttagatataaaaaattcttctcttaacaattaacctagagcacaaaattcattctaggtactactacatcaattaatgattagtaaaatggcaaagaggaaaacttgtacagagatgaggaaaatgcactaacctgtaacatttctttcatcaccacccctgttgtatgcaagtctttcaaagaaatgacacaataggggatgatacttaataatactaaaaagagtcctcttgcactctgtttgatgattgagccaatatgattcagaatgcttatctttaatcttccttgccatggctgcaaaattcaccttntaaaccagctggatttagaaatgt

SEQ ID NO: 21470 - DNA, 410 bp, Glycine max
  unsure at all n locations
ntgcatgccaccggacttgattgtctctggatggccagatgggtgactaaagtagtctcggccgatagacactgaatctttgacaaggggtgcagatgaccatatttgtttccgtgcgtcaatgggctcgcttaccttgagttagtggaggggagactaaatagtctcagtcgatagacattgagttttcgacaaagggagcaaatgaccatattggtctctacgcgtcatcggacttgctgtctctggatgaggaagggagactaaagtagtctcggtcgatagacatcgagtcttcgacaaagggagcagatgaccatgttggttgctgcatgtcatcggacttgctgtctctatatggcgaagggagactaaagtagtcttggtcgatagacgtcgcgtcttcaaca

SEQ ID NO: 21471 - DNA, 402 bp, Glycine max
tctgcttatccttatggtttgcctccggacttcaccccccgtgccactccagaagatttaagccaagcccctacttttgaggggcaactcccaccttatgaagactatcccggacaagacgatggggaaggagatacccatcttggccccctgctccacctcaaagatccatccccgcatgaactaccccagccgaacatagtccgccatatcccggcctcacccacgcccgtaaaagaatctgttcccttcgcggaagatacgggaaagattgatgcgcttgaagagaggttgagggcagtcgagggcctcgacaattacccattctcggatttggcagatctatgtcttgtgcccaacatcgtcatccctcccaagttcaaagtaccagactttgataag

SEQ ID NO: 21472 - DNA, 427 bp, Glycine max
  unsure at all n locations
tcanattgttaattacaccatgttctctgaagagtagagtgtgccacttttgttgagtagttttattagcattttgttagctgaaaaaaaggcccaaacttgtgttaaagtggctgtcaattctcttgggatttgcacaacctatgggcttgatttaaattaaagaaattaaggtttaataaggtgaaaactctaggattgtggctgcctcttggctgaccaaggagttgcacaattttccatatgtttatgtgtcttaattctaattttaattacgtataatgacaccatcaattgttgttatcaattctagttttacttatgtttaatgacaccatcaattgttgttattggtgatcatttcacttgtgtaaccaacttgatgtcattcctatttataggctgcacattatctaataaaaaaaat

SEQ ID NO: 21473 - DNA, 433 bp, Glycine max
  unsure at all n locations
tgcactagaagctaanaaccgattctctgcgcgtacatgtatcttattcaggtgctttgcgtttacaaattaagcttatatatgtgtctgtaataatgcaatttctattataatgaggctgtaactgattgtctctgttttcccatgtaaatctagttttgtctaataaagggaagagaaggatatatgatgctggcttgtttggtctgatcggagaggatgatgatgaggtgggtgtttttccctagttaagaattgagaaacgttgctctcttatttttttttctgaatttctcctgttgttaattattaattaattatcatgagatttggtggctgaatttagcaactatgaaaattacagggatttcttgatttcatgcaagaaatggccttgatgatgcagaaagtgagacccaaggtattgcatatc

SEQ ID NO: 21474 - DNA, 393 bp, Glycine max
  unsure at all n locations
agcttattagaacaaaattgcctcaatcatttccaaatatgcatgtgaattangaagcatcaacaagaatcaagccaaggctattgtgcaagcaatcaatggggcaaaacacaccaaatgattatgatgatggatggctcaaattctcacaaaggtaaactcatcactttcaaattgagctttcaaaactatcatgacatgtagaggagaatcaaggatttcaagtcacaaaatgtcaagaacttttattttcaaaacaattacccatttcttgaacatatcctataattcaaagaanaacatgcaaagtcgtacatgcacacaaaattgacccanaatattaaactaaaaatccgacgaaactaacaacattaacanattaacacaactaac

SEQ ID NO: 21475 - DNA, 459 bp, Glycine max
  unsure at all n locations
tctatcaaactcagcttgtcataagactcttctcttgatgaagggaaaattatatttccatgtgctacataagaaaggacgatagtttttcgagttgaaattgtgaaacttcacctttacaaagatggattcatgcctaattacatggtttggattgatcatggtgaaaagatgccacatgttgataatcatcacatgggtgttttaagtagtggtgtagatgtggcctaaggtgaaccatttatgttaatgcaggagatgatgtttgatgctcttaggcagcccaaaatatttgaagcaccaaaatcagataacatggaagagcctataaatgaagaagctcaaggattttataatatgttggtagaggcaaataacgtcattgtttgaagggcatcagtctctaagttatcaattntcacttatagcttgcaagtccaattggaatgttcctaagta

SEQ ID NO: 21476 - DNA, 380 bp, Glycine max
agcttgtacttggtttatacatgattgatacatgctttgggacttgtaggattcaatttgggcaaaattggatgaaggtaagagtggttttcgaaatctgcactttatgcagaattttgctgttgaaatgtgcagcagaattttgtatatgtgccgaaaaatgcttgtgtatggctggttgtggaaagcgtagtacatatggggttctggacatttcctagcagatcccaacggtcaaaatgtagacttatgtactagagacttccagtaaaattttcgagtcgatccaacggttaacgaactggaacgaagagaatgttactgtggtttttgaatgtgaaaagctgtgatattgggtttgtgtttgggcagagttttct

SEQ ID NO: 21477 - DNA, 466 bp, Glycine max
  unsure at all n locations
gacacttccaatactcaagcttgagatgaggaagtgttgaagggtgaaacttcctgctntttttgttgacttcagagtggtacctggagatatgtcgcgggggtcaggagaccttggggacgtcaggtggggtgctattgcccaaaaccaagcttgaccaatcccgacccaacccgggcatagtcggtcagtgagaacctgtgatgtacctaagcaggcgagctcctggcagtcaacagataaaaggaaaacaagaccacaaagcaaggaggcttgtggtggctggccagctatgaattttgtgtaatatgtggattgtggcctctggtaatcgattaccaagggtgggtaatcgattacaaggcttaaaattgaggacaggaggctaagatggtctctggtaatcgattaccaaggggtggaatcgattaccaggcttgaaaacgaagtcaggaaacttagggag

SEQ ID NO: 21478 - DNA, 402 bp, Glycine max
  unsure at all n locations
agctttcttgaaacatatatgtttggtcttgttgctgacagatacaacaaactaccaattatacttctataaacagaatcatttgctaaatcaataccatcatttattgataacttttcattcacaacaattggagtgacaacaggcttgcattgctccatgcgaaacttcttcaatatctccaaagcatatttcttttgtgaaatgaagatcccatcattagactgagaaatctccatcctaagaaaatacttcatttcacccaagtcagtcatttcaaattctttttccatgtccttcttaaattggtttaaggaatcagattcatttcctataaccaacaaatcatcaacatacaaggaaacaatgagctgcatttcattnttncacttcttcacatac

SEQ ID NO: 21479 - DNA, 451 bp, Glycine max
  unsure at all n locations
tcaagctntgtgtgtggaacattgtaataccatatctgcaggagattttcttgctattttatgaacgggtaaacggtcagacagagaacgataattgacaagatttgagtcggtttctaccttctctctgcttttaggccactcaattgggcgtttatatccttcaggaacaggaacaaggcaggtaggaggttcttcaggacagtgtctttctcgatgttcatagtgtttagtactccggagactcctaatagctttccagttgtcaaggcatgggataaaatcaggaccagcagtgacattgcaaagcttccacttgtatccagttgcctgcttggaggattcttgagactccttttcattcttagactctgctgcctgagttgaccaagacccagtttctgtagtactttcttcgtgaagctcagactgagccccagaaggatatacc

SEQ ID NO: 21480 - DNA, 404 bp, Glycine max
  unsure at all n locations
agcttctagtcgtccatagacctcctctgtggtacggtctagcaaacgttgcatctgtgcattcatcgcatccactaacagacgttgagcgccgtccaactgatggtactcgtcaccaccaccacctgctccagccataattcaacaggaaaaaaaaaatgtgcaataaaaattattaaggtttcaggacctcacaacactctactcacgtctcttagatggtagtacactcgtgtttaatgctctcaataggcttttgtgtaatgtattccctcttgccttttaccactcgtgtttcctcttaagttcctggatggaccaaattagacacacaaggtaatataaaataaaaggaaagacaatataatgatcacaaacagaattgatntgggataaacaactgg

SEQ ID NO: 21481 - DNA, 445 bp, Glycine max
  unsure at all n locations
catgagagagtcaaagatcaaattgagaganaaaataaatgctatgctatacaagccaacaaagggagaaagaaggttgtcttcgaacccagagattgggtttgggtgcacatgagaaaagaaaggtttcgaaacaaaggaaatcaaagcttcaaccaaggggagatggaccatttcaagtgcttgaaagaatcaatgacaatgcttacaaagttgagctgcccggtgagtataatgttagttcaaccttcaatgtctttgacttatctctttttgatgcagatggagaatccgatttgaggacgaatcattctcaagagggagagaatgatgaggacatgaccaagagcaagggcaaggatccacttggaggacctatgacaagggttagagcaaggaaagccaaggaagctcttcaacaagtgttgcccatattatttgaata

SEQ ID NO: 21482 - DNA, 403 bp, Glycine max
agcttcttcttggtcttcctctccttagccacccgcagctcagactttgactctttcagtcgagcctcaaggtccaccaccaatttggcaagctcatcctgctttgccataatgccttccacttggctatccaagtccttttgctcctactgcaagtccttacaacattcgaacaacttatcaccatccaacctggtgcgcaacaacttggccaaaatgcccctaaccttggaagacagttggtggtttgacttcacaacttcaatgaaggcaatggtggccctagctaccttatggcgctcttgtctccaaaccatgcgagcagtagccatccatttggtgacctttgcctccaaggatgccaccttgcgtagaagcctctggtgtcgctgtgcattctcct

SEQ ID NO: 21483 - DNA, 397 bp, Glycine max
tggaccttgaacaagcaatcaactcctctttcatatccatgctatgtgctcgcgactggtccctttcttcccttcgcaacttgagttcattagtgctaccccatagagctccgcgaaattggttccggccatactcttccttgcgagccctcttggtctcttgttcaagggctcttgcggtaattgcattctcttcccgtaacccggcgcactccttccgaacgtgtgtagcagccaacttgaacttctccttggcgagttttgcctttcctaactcgcttttgagagcttggacttcttcgtcctcttccggtgcttcaaaattctcttcgctgacgacttttgactttgacttggtagaacctcttgtcggattgatttgatcccatgcttacta

SEQ ID NO: 21484 - DNA, 401 bp, Glycine max
cgctgcaagcttctatagaaggttcgttcctaatttctctacaattgcatcacctctcaatgagctggtgaaaaagaatgtggcatttacctgtggtgaaaaacaagagcaagcctttgctttgctcaaagaaaagcttactaaggcacctgttctagctcttcctgacttttctaaaacttttgagctagaatgtgatgcctctggagtgggagttggagctgtattgtacaaggtgggcaccctattgcttattttactgaaaaacttcatagtgccacccttaactaccccacctatgataaagagctttatgccttaataagagccctccaaacttgggaacattaccttgtttccaaggaatttgtcattcatagtgatcatcaatcacttaagta

SEQ ID NO: 21485 - DNA, 429 bp, Glycine max
  unsure at all n locations
cctgactcaccatanaccttgacccatttgagaatgtcaatccttaccctctgaagcaaaaaaagaagagaaggaaaatttccaatcaaaggaaaaaagagaaggacaatttccaatcatagagaaagcaaaaaaaagagagaaggaaaatttccaatcaaaggaaaaaagagaggaaaggaaattgccaatcaaagagtgggagaaagaaaaaagaaaagaaagaaaagtcccaaccaaagaatgggagaaagtaaaaaggaaggaaagaaagttcctcatcaaagaaactagaagaaatgtgcagaaaggtctttttgaccagacaatatctgaacaatacagaattgtcaccaaatgaacaaaagaaagaanaggagaccatgacctatagtggtcttctccctttgattaccaaccaatatcctg

SEQ ID NO: 21486 - DNA, 388 bp, Glycine max
  unsure at all n locations
agcttatagtttatataagaagaaacctttttataatgttgacattccatctagagatcatagttctttttcaacttatcaaactcattattagcatggacacattttttttttgcaaaaaaagcttgtgtttaagcatttccttggactcttcttttgaatcttcaagagttgtggttaaggatttcatcctttcttctgaatcttaaaaatccttaagaagagtctctcgtccactggataccttttaatccggtaatgccttgacctactcacaaacaaaggtgtcttgtacatcacctggggaagtggttctaggacaaaatcaactaaaagagttcgataagttttcttaagatcctgatngctcttttcaagatgttgaaaa

SEQ ID NO: 21487 - DNA, 429 bp, Glycine max
  unsure at all n locations
tctcaaggaagctacctagtctataaatagatgcatgtgttacacttgttgtaactttgatgaatgagagtcttgtgagacacaactcaaagttcaacttctctccctttttcttccttcaatttcgtgctccccctccctctttctctccctctttcttttcctccattgaagcatcctctccaagcttcttatccaaggctcatcttggtggtgaagctccttcttccgtggcttattccttaatggatggcgcctcctctcacctcctttcctttgtcttccgctgcatcttcatcgtggaaaatcaccattaaaggaccccattgaagctcanagatccagcctccatagaagtcccacaagcaagcttccatcaagtggtaatcagagcacaagagcttcaagtaggtgcaccttanaccttca

SEQ ID NO: 21488 - DNA, 334 bp, Glycine max
  unsure at all n locations
tttgcaagcttgttaaaataggttctaagagaatctcaagtggaatttagcatacttctatgaaacaatcatgagaatagaataacaagggacactttgacattcctaaaaacaaaatttaacaggagttctcctcttttgagggaaagagcctattttatttcaatatgatagatataaggcaatttattttgagttgtgtcactagaagcaagcacatacctaattgaataaagatctacttctactcgaagcacatgtagaaatgaaccatcaagagaccatgctaatcttctaaattctanagaaagatggcaccatctcattatggaag

SEQ ID NO: 21489 - DNA, 405 bp, Glycine max
  unsure at all n locations
ctaagctgcccccactcgcaggcgagctcatttgccagtgatctagtgcttctccaaagcaccgctttggaaaacttctggaagcccaaatgggcctggtgctattncatcccccctttttactaaatacacccccttacctttnttgctgattcttttttctaacgttatggaaacttacgaattatgtaacgatacttgttttcctttcgtaatgttacaaaaccttacggattacgtaatcatcccttttttgccttccggaatgttacggaactttacggattgtgcactaacacttccttttaatttccggcatgtcacggaacttcacggattgtgctacaatgctttcttttgatttccggcatgtctcggaacttcacgaattgcctaacgatgggt

SEQ ID NO: 21490 - DNA, 378 bp, Glycine max
agcttgttgttcttcattgcgctaaagatcgtgacaagtacgtttcatttcgtctacctgtgtcgctctattgaatagctaggtttgtttctggaacctttggttaacctaaggaccttttttggtttctggtgcaaggattggggaactcatggtgacctgagacccattgccgctgccattgaatagctgagtctcgctgccattgtcggtgttgagtttgaggtaagcttcatgtcttcattgaaactttgtgcttccgcgtacgtgctctttgtgctcacttctctttgaagcatgtgtatgttcccatcgtaatctgttcttatgaaaactagctggttatagattgtaattagcttgtcattagtactacta

SEQ ID NO: 21491 - DNA, 409 bp, Glycine max
tgattgacgcgggatggctaacattccatttgatggtttttatgtgaagacaaatccgctcgccaatcatgggggaccggtggtaaatgcaatagaggcatgcgggctgtaaaggcctaagcaaatgaaggacggggtaacctcaagaaggtttatctttgaagcattgaaagaggcgggcatcgtttcctttgatgggcacaaaggggactcctgtttgatgcatctgggtgcatcacatgacatggagacatgttcaatggcagaggagctattacagcaaatgatggaccaaggccgatttgagatcagtaaagggaacaagggagaacaacacatgtacatacagttggcgaacaaagaaagccccgctagacctaagcctttggtgatacacttcactagggat

SEQ ID NO: 21492 - DNA, 327 bp, Glycine max
tctagcttttataaatatacttggcctgcgttgaattgtctttgggcttggcgaccatgatcaacaaagtactttcggcacctactatatgttgacttgaccaacgttgatatcggaatgctgcgacaatctttcaacaccttattcacacattctgataggttggatgtcatctgaccatatcttcgtacacatgtatcgtaagccatgctccatttttcctttgaaatgcgatcaatccatcttgctatggctggagtcagttgacaaaatgtttctaaggtatgatcaaacacatgcattgcaggagtgtacgctgcatcaaat

SEQ ID NO: 21493 - DNA, 425 bp, Glycine max
tatgctgcacatattaacagtagacctcctaacctcagtagcttaatcaaccacagcggagcaattatgacctttccagcaacagatacaaccctggatggaggaatcaccctaccctcagatggtccagccctcagcaacaacaacagcagcctgctccttccttccaaaatgctgctggcccaagcagaccatacattcctccaccaatccaacaacagcaacaaccccagaaacagccaacagttgaggcccctccacaaccttccctcgaagaacttgtgaggcaaatgactatgcagaacatgcagtttcagcaagagactagagcctccattcagagcttaaccaatcagatgggacaattagctactcaattgaatcaacaacagtcccagaattctgactagctggcctctcaagct

SEQ ID NO: 21494 - DNA, 387 bp, Glycine max
  unsure at all n locations
tagcttatcatggtatcaaaacgtataaagaaatcgttaataaattctacatcatcaattaattaaatattatttaagatgttacttttagaataattattataaaatttaataatttccaatcatatgataactcgtaatttaattattataaattacaataattttcaattatatgacaactcattattgaataattacattaaaaatatttatgttgtcaatatatttaattaaatttaaaataaaaataaaaaatagatattgaacactaaaatgattattagtgtatttggatntttttttctttttttggacgcttggatcttcgttatttcatagtgcacgtatgtcanaatccgaaaaagacgtaaaagtaaataatat

SEQ ID NO: 21495 - DNA, 433 bp, Glycine max
  unsure at all n locations
ntgaatgctctattcaatggagttgtcaagaatattttctatacttatcaacacatgcacagtggccaaggatgcatgggagatcctgaaaaccactcatgaaggaacctccaaagtgaagatgtccagattgcaactattggctacaaaattcgaaaatctgaagatgaaggaggaagagtgtattcatgacttccacatgaacattcttgaaattgccaatgcttgcactgccttgggagaaaggatgacagacgaaaagctggtgagaaagatcctcagatctttgcctaagagatttgacatgaaagtcactgcaatagaggaggcccaagacattcgcaacatgagagtagatgaactcattggttcccttcaaacctttgagctaggactctcggataggactgagaagaagagcaagaacctggcg

SEQ ID NO: 21496 - DNA, 105 bp, Glycine max
tagctttttcggaaagtttccggataaagacttcttccggaaaaagaatttgggaattccggaagtagtcacaaacttcgtccggaagatcgtcatccggaagtt

SEQ ID NO: 21497 - DNA, 546 bp, Glycine max
  unsure at all n locations
cacgtccacatccaanncgccccacatacagtgcctatgcaaacagactccgtaanacaacaacactncnntcnntnaagcncgccgnncnttgaggcctgtgaatgcgtcgcaanccgcccnncaacnnaacncacgccaccgcgcaccgcgagacaaacaggcacattagccgggtctaaatcaaaaccgacggagacaccgagcagggcggaccagcggctaacgcgaaaaagcaggcggccgggcgccaacaagaagacgggcccgaaacacggaccataacccagagagagcagccccgggccccaaggcccaagcgaccctgaagagcagagggcccacaccagaaaggagacaaggcaccggcaaacgaaccatcaccacaaaggagaggcccaagcccagaccagaaccacagacgggacaagggggaaacacacatgcacagacaaagcgcgaaccgagaaagcaccgcggcaccccaacctcagggagacacctccacaccgcagaggccccaccagaaccacgagggcgacggcc

SEQ ID NO: 21498 - DNA, 410 bp, Glycine max
  unsure at all n locations
agcttgttaaatcaatggaatccatgattctgtttgacacaagtcgtttaattttgttcttagaaatgtgacctaagcgcttatgtcatttccaacaatattttaattaaaagacaacctaaacacattgtttccagatgaacacaaataacccaatttgtccaaataagaaaccaaaaccaaatttcgtctaaatgacggtacaacaaaagtgtctttcaaatccaaataaaaactagtacataataatctaaaatgccatatagcttccacctccacctatttaccatctccaacatatatccatctttcagaattaattggcttccggtagcttaggcaacactgcattgaaacactgatngtagtagtggcaccagactctaaccaccaagtggttctaagtactg

SEQ ID NO: 21499 - DNA, 445 bp, Glycine max
  unsure at all n locations
ntgatgtgccctctagtgatctctcaggaatggcagcagtctctggtctctcctatttttcccctgcttcangatgaaggtggtctcggaggaagcatcctatacctgttagggtacctgggctgtgggaccttcaccttccctatcaagagaaggttgggtcccaggccaggctaccctctctaaaaactgcttcactgataggatgaatcctggaggagctaccacctgtagactctacagcaatataatctgaccctaatggatactttgaggcatagcttcaaagcgctgcgagtcaacatgagctggaactgaaggagctgcagaagtagatgttggagtaggtgctggagctgcagaagaagatggaatatcagctggcctcgccctcgccctcctagccccccggaaagcaactgttagatcatcaatgtttcaatag

SEQ ID NO: 21500 - DNA, 402 bp, Glycine max
  unsure at all n locations
agcttgttcgcacatctttcgcgtgtatgatatccactccacaaggtttgaagtagaggacagcttcaaccctataacgcaacgtggcggacaaaagtgggcagtaaacttgaatggtcgtcattgtcaatgcggaaggtattctgcgcttcactatccatgttcacacattattgcagcttgtggttacgtgagcatcaactactaccaatacatagatgttgtttacacaaacgaacacatcttaaaagcttactccgcacaatggtggcctcttgggaatgaagcggctattcctccttctaatgacgcatggacacttantcctgacccaactacaattcgtgcgaaaggtcggcaaaataacaaggataggaatgagaggattggtcaaccatctga

SEQ ID NO: 21501 - DNA, 439 bp, Glycine max
gactcacgctataatatttgaattacaacgtttagaaactgctggtaatttattaccatttatgtgtaatcgattgcgcagtgcagattctgaattcaaattttaatagctgttgtaaatcagttttggccactggtaatcgattacatcctctggtaatcgattaccagagagtaaatttgttgaaaaagactttttaacttaaatttcttggccaaactttttgctacttcaattggaattcccttcctatttaatataccctttctaagactctagagactgtcttgatcatccatcttgaatatatttaatttctttgtcttgaatagagctttgagacgcatgtgaaactttggcatcatcaaaacattcagcttgatcctttgtctacagtttcgtgatagaatactatataaagttagtggacaaaaactca

SEQ ID NO: 21502 - DNA, 361 bp, Glycine max
  unsure at all n locations
agcttcttgctacaattactcattccagtataaggcaggacataataacgtggtggtggatgctttctcgcgtcttcaagaaccagagcaaacagcagaatacttccaaatcttctccatgcctcacccgaaattccttgatgagctgaaaaaggaattatcgggatcagaggaattcaaaactctcatgcttcaggtccgcaatgaaccttcgaaaaacccatattttgaaataagagacaacctattgctttttcaggggtgaatttggattaatcagggcaatcttttcattcctctnttattggaagaataccacaaatctccacttggtggtcacatggggctagctaagactctc

SEQ ID NO: 21503 - DNA, 451 bp, Glycine max
  unsure at all n locations
taagctctttcaactgcacaaggctcttaatatttgaagattatccttgttgaaccttcacccgacgaaaatactgacaaaaacttatcttctcctttttggacaaagtatggcaagctaggggcaagtaaattttcttcccatcagaccttggatgcaactgtgatcgtatccccatatcagctagatcttgacgggtattcaaaccatccttcgtcttgccttgaatgataaggagcgtcccaatcacactgtcacatacatttttctcgacatgcataacatcaatacaatgtctaacatctagatcagaccagtacgaaagatcaaagaaaatggtcctcttcttccatatgcaattcttacgtttatccttctttngggtctttccaaatacagtattcaggtgttgaacccactgatatacctgctcactagtcaacggtatggg

SEQ ID NO: 21504 - DNA, 386 bp, Glycine max
  unsure at all n locations
agctttttgtttgttcttgaccaaatctttagttaatcgtctttacgtaaagcagtctttgtattcgtttaaaatgcatgaagataaatcagtaggagaacaattggatttgtttaataaactgattcttgatcttgaaaatatcgatgtcactattgatgatgaggatcaagccttgttattgttgtgctctttgcttaagagttactctcatttcaaagagactntattgtttggaagagactctgtttctcttgatgaagtgcaagttgctctgaattcaaaggaattgaatganagaaaggaaaagaagtcttctataagtggtgaagggctgacagcaagagacaagaccttcaagaaagatagtanatttgataagaaga

SEQ ID NO: 21505 - DNA, 450 bp, Glycine max
tgtacactttgtcttccatttcaaaataaagtaattatgataaaattatctattttcaaataaggtattttataaatgaaataaacttaattgttttattcaaatataaaatttaaaaatgaataaattttgttattttatcaaaataagaaattttaaaaataaaaataatattcaatcaagaaattaaaaaaaattgaaggaatttcaattgaaattcttaaagtttaactttttttgtaattctaaaatttttcatccaaataccacgtaaaaggaattcggttcaataaaaaaaattcctaagcgtagctggcattgataacccagtcatcattatcatttgttgtgcacacagtagagaaaaatcatttcttataaaaaataaaagtagagaacaatcaaaaccaaatttaatcaatattcataaggttgtgtgagccaaatact

SEQ ID NO: 21506 - DNA, 417 bp, Glycine max
  unsure at all n locations
agcttatcttgaattattattgtatcctttgcaccctttgtgagctaaattacattntcaaaattgaaccctggacttgaatgaatatctccagataccttgtttagattctaggagagcagatagttcaaggcaaattacctcaaatttgggggagttgattgggatgtaaagtaaaaggtaaagcatcagcacacacaacaaataagttgtgtgttaaaaaaaatgttgttgtaataaggtcaaatgcaaattaaagtgaaaggctggtgagaaagttaattgtattgaaagaaatatttggatgaatctanngattgtgctctcttagaatctaagtctttgaatcctagaanaaccaattaattntgtagccaaacctcactancagcctatgaaagtccttctgattctatt

SEQ ID NO: 21507 - DNA, 444 bp, Glycine max
  unsure at all n locations
taataaggttgtagcccagaaatgtattcaaaatttcaaacgcattcatgactggcactggtggtgctgaagaccctgcttcatcccccttatcaacacgcttttgtgaatcccgtgcaccaaattaggcacactgacatcaaggttagaatgattaatcatatccaaagctctgataagcaatatttaagcaggataaaagttagagcaaaagttcttacatgaccaaaactaaaattttgcctgaaaaatctaggaggctgataattctgcatgaaccattcattctcaaagatctcattcattgtaatccgctgtttcatgcgataagaagaggcgatataataagatatgttaatttcgtgagatgaattanggaaacaaagaatatttgctaaagaccatattactaacatggctcaaccaaattagcaaacaataata

SEQ ID NO: 21508 - DNA, 378 bp, Glycine max
  unsure at all n locations
agcttgtctttgggcaatagcaccccacctgacgtccccaaggtctcctgacccccgcgacatatctccaggtaccactctatggtcaacaaataaaagtaggaagtctcacccttccacacttcctcacttcaagcttgtaggattatggggtacccatcacatgtggtactaggtggcggtcgggcgatggtgcaagacaattctccacatccacaaatcacgtataaacccgccatcccctgttgcccacctccaactgagctcacgtactcccacgtagcccttatcctcgttcctctcaatgccgggtccccatcaatcctcccaagcttncacaacatccaagtaattaacatccaatctcataaactaaca

SEQ ID NO: 21509 - DNA, 431 bp, Glycine max
  unsure at all n locations
ttcacaaattacaatcgagtgaaggtgtgtttctcacgatctttatgcatgtgtttagtattataggagcaaaatagtaaaaataaaaaggttaaattaataccaatttattatctcttcgctataactttctacattcttctaaaaaaatattctctctagggaaacacctgttttttatgggagcaaaatctttttttatcaaatacatataagaaaaaaaaaattattgtggggtaattgcccccttagtccctaacctacatccttccctgctactactactttttctaagccacataatgggagcagagttaatcgtgtctgcaataagtttggcacacatgattcgtgccccatctttagcaagattgttaagagttgaggatattttagtttttatattntatttgtaatatgcgtgtatgtct

SEQ ID NO: 21510 - DNA, 321 bp, Glycine max
  unsure at all n locations
agcttgtctctatgttatggtgagggcattgcgggggggactcttgttgctgctcactcactatgtggagaattatgcactcatttacaacaggactgtatcagcatgcgactcggtctaactgttaacccaagtagccgcaaaagggattgtttaatgtgatgccttggaatcagattctgtcttaacccaaatagattctattactgcagctantgtggaaggggctgagnggatctctgacgaaccagaactaattgaaacctgacgtgtgttcactccaaacattgtgatcaccccagcgatgcaaaaacggcgatc

SEQ ID NO: 21511 - DNA, 266 bp, Glycine max
ctgttttgactatatttccacggcctaaaaacaagattagcccacaaaaatatttgatttcaattgtatctttatgaaaccactattattcattcttgtatttatctttattaaatgatgtgatcgtacctcctcgatacctaccatattttatggtgcttaagagactagaataactcattatattaaatgaggcgaaaaaattaaacaatctgtatggaatcatatgacacactttggattttttttttggaagctttaatata

SEQ ID NO: 21512 - DNA, 393 bp, Glycine max
  unsure at all n locations
agcttattggcgcaacagtactcaggtagtgcaggctagctagactgcgagagtacgcgagggaaagattaaatttaccagcatacaaagatggtcgttataaaacccgtcattgggtaatccagttcaacaatgatgcctattaaacctgtcgttgtaattggaagacgacatcgttttcggtataaacgtcgttgagataaagcgcatatttactaaaatgtcaccggctgttaaacaacgacatttttcggaccaccgtccttgaaagcgggtcctagaatcaagattntgtagtagtgaatattctatattacattctataactattttcttttacattttatgcatcatgcaatattttcatattagtaatgtctaaattctaatata

SEQ ID NO: 21513 - DNA, 430 bp, Glycine max
tccatcatctagtgtcaagggaaattgtcttgtgttaagtgagattgttcggtgtcgagggtggtaacctcgactagtgtaagagttgtaggtatgtgaggcatgtcaagctcccctagcttggacgactattgtttaggcttcttctggcaagttgtctggggtggacatgcttttgatcttgcaagcaaagttagacgtgtcaggtggatgatgtccttatatatgacaattcagcccttttttgatcattggaggatgcattgaagacaaatgtttcgttttgtcttttgctacaggcgagtgcaacacacacatattactcttgcatatgtatcactcatggagtgggtgtgtactgaagatgcaatacatgggtgagtggagctgcatcatggtttaaaaaattaaggcaccattttagcttatg

SEQ ID NO: 21514 - DNA, 392 bp, Glycine max
tagctttatagcacagcaacacagaatctatgtgtccaacacccctcaattcaatgggttttctaggtttgaaaagtgaaatcgagaatgaggtaaatttgaagcaaactctcacctcacaccagtccataacatcaatctaaacttgctcaaactggatttacgcttaaaatctcaccgaatcaaaatttgactcttccacacccaaatttgccctagaaatggctctttgttcactttggtcatttgtttttctctctagcacagcctaatctttctcataagtcctaaatgacatttcaagctaggattaactcactttaacctccatttaccacagaatccagaattaacctttcaactctcaagcctcactctttttcactcataca

SEQ ID NO: 21515 - DNA, 403 bp, Glycine max
tctcttggaccttgaacaagcaatttactcctcttttataaccatgctatgtgctcgtgactggtccatttcttcccttcgcaacttgagttcgctattgctaccccatagagctcggcgaaatttatcccggccatactcttccttgcgagccctcttggtctcttgttcaagggctcttgcggtaattgcattctcttcccgtaacccggcacactccttccaaaatgtgtgttgcggccaacttgaacttttcctcggctaatttcgcctttcctaactcgcttttgagagcttggacttcttcgtcctcttccggtgcttcaaaactgtcttcgctgacgacttttaacttggtgagccaatctaaacctcgtatatgaactttcagccattcatgata

SEQ ID NO: 21516 - DNA, 395 bp, Glycine max
tagctttttaaaggttgcgcttagcggcaccaactcttcaaaacttccactaagtattaggagcttagcgagagaagctcgcttagctcagaggatgccgcaacaaatcgcgcttggcccaggaaagctcggcttagcgcgcgactatcaacaaaaaattgtctaagttacttgggcttagtgattcagcctcgcttagccacatgtagttcagcaagaggatgagtgttcatcctcaaaggttgaactcgcttagcgcggtaggtgcacttagctagttctttagagaacgcctatatacacaatgagtactgatgaactcgcttagcgcagcatgctcgcttagcgagttcatcacgttttccagaaaacgcagaaaacacagttcgttttct

SEQ ID NO: 21517 - DNA, 420 bp, Glycine max
  unsure at all n locations
tcaagaattatggtctcatcaaactatttgtttccttatggaaattctataaacagacctcccatctttaatggagtgggttaccactagtggaaaacccgcatgcaaatcttcatagaggcaatagatttaaatatttgggaagccatagaacaaggaccttatgttccctctataatagccggaagtgcaaccatagaaaaacctagagcagattggactgaggaagaaagaagattagtacaatataatttaaaggccaaaaatattattacatttgccttaggaatagatgaatactttagggttttaaattgtaaaagtgctaaggatatgtgggatacactacaagtaacacatgaaggcacaacagatgttaaaagatctangataaacactntaactcatgaatatgaactt

SEQ ID NO: 21518 - DNA, 330 bp, Glycine max
  unsure at all n locations
ttctgctttgagaacactccagacatcttctgaaagatcccaacggtcagagcatggacaagtgtcgtgtgaagttgcagaccacatttcgagaagatccaatggttaacgaaggctgggcagcgttgttaccgaggcagcttcatgtagctttctctagaagcttcattaagaggctcctccagaagcttcattaagaggcttatagcacactccataaatcttctcaatgatcccaacggtcagatcatggataagtatcttgtgaagttgcagaacanatttcgagaagatccaacggttaacgaatgctgggcatcgttttaccga

SEQ ID NO: 21519 - DNA, 421 bp, Glycine max
taaattacttctgtcagaaaagccttacaaattggaggaggatgacatgggaaatttagaagagaatcaggaatctagaataggactatataactggaattatcttgtagacaatattcaagctagtgacaaggaattattgtcgggactgcaggctctttcagcgctggagattaatgggtattggagactagtagacgagagttacatggacatgattctgggaatgcttttgaaaaatgcagtgttgaatgactggtcacttaatgctttaaatgaagatgaagttgtgagtatactggaatcagatggatttcctagggtgcttgcaaggcattgtttgcacgtatatggcaacaaagtaaatgagtgcatgcctagctttgtttggaagttggatgagaagcgagtatgcatacat

SEQ ID NO: 21520 - DNA, 403 bp, Glycine max
  unsure at all n locations
agcttgttcagaaaatgaatctactgaggaaatgcttaccacctcgaaagactggaaagcggtttctaatgactcctctgcggcctccacataaggcatagaggatgggcagctcaccaagatgtcttcctcgcctgatacgatgacaagatgcccttccactacgaatttcaacttttggtggagtgtagagggaacaacgcccactgagtggatccacggacgccccaacagacagctgtagggggggttaatgtccattatttggaaggtaacttggcatgtgtgagggcctatctgcactgggaggtcgatctctcccctaacctctcggcgggtgccgtcgaaggcacgaaccaccattgaactcngctntatgtgggaggcattgaatggtaatttc

SEQ ID NO: 21521 - DNA, 451 bp, Glycine max
tgtaggattatggggtacccatcacatgtggtactaggtgttggtcgggcgatggtgcacaacaaggtttccacatccacaatgcgcgcataaacccaccatcccctgttgcccacctccatctgagctcacgtactcccacgtagcccatatcctcgtttctctcaacaccgggtccccatcaatcctcccaagcttccacaacatccaagcgaaacaacattcaaacagcacaagctatcacagccaagcaaaacagagcaaaggcagaaaactctgccaaaacaccaaccaaattatagcttttctcacttaaagaccccagtaacaattccttcgatccaattcgttaaccgttggattgactccaaaattttactggaagtctatagtacagaagcctacattgtgaccgttgggatctactagcaaacatccataactcattctg

SEQ ID NO: 21522 - DNA, 403 bp, Glycine max
agctttataaagatatttattttggtggctctaggggaggttatggtagaagtaacggtggtcgtaatacttcatctgatcgcggtggtggtgacggtggttttggcagaggccgcggtggatgcaggtttgccaacttttagtgtcaaatttgccttaagtatggtcacactaccaatgtgtgccattttcaaactcacgagtcactcacttttgttgatccaactacactccaacctatttcgtattcaattggttcgattaggtcctcaaacacttgtgttaatcctaactcccagtctgttgctcagccaactaatcaacctagtgttatgctaacaaactcagcatctcatggaaatggtcaagctagctcgacatggattccagattctggagctag

SEQ ID NO: 21523 - DNA, 437 bp, Glycine max
  unsure at all n locations
ntgccgatttagttnttgtcggtgaaaggattgaaatggttctgagaagatgcaaatttgagtatcctgctttgatgaatgggaagcctagggaaaatggagagaacaagaaggagggaggaacccatgttgtgactgtcgttcctacatgacccaatttcccactagctcaacaatatcaatactcagccaatatcagtctttctcattacccaccaccttatcagccaagaaggccacccctaaatcatccacaaaacccgtctgccgcacatccgatatcaaacaccacccttaacacaaaccaaaacatcaactacggaaggaattttccagaaaagaagcctgtagaattcaccccaattctgttgtcgtatgctaatttgctcccatatctactcaataatgcaatggtagccataataccaacaaagatt

SEQ ID NO: 21524 - DNA, 392 bp, Glycine max
  unsure at all n locations
agctttatttatatactagactatgttttcattatgtatgaattgcatatgcataaatttgatgaagatagccttagtaatgatgatggtgttagatttgatgacaataagagtgaaaatgatagtgatgttggttgtgaagatggagccgaggagcaacatggaagtcttcatgaagagaaaaggatatcttatttgacaggcgatgagataaagggtctccattgggaaagtgaagatagtgtttttcaattctatacaagatatgctagatgccatgggtttgtagttaggaaagatgatgtatttcaagatttgaatgacaatgttataaaacatcaatttgtatgcaattgaaaggtttgagaatangaacacttatgaggtggata

SEQ ID NO: 21525 - DNA, 451 bp, Glycine max
  unsure at all n locations
tgtaagcctaagccaatagtaatgatcacatgcaatgcatttagatatgcaagtaaatgaaaattgttttgtaatcaaacctgacacaaatgagggatgcaaataaatgtcctcttataaacaatgcaactgcttatttttcaccaaaatagccttcaaacatacagctacacaacttaaggcacagtatccccctgtgcaatgacctctctaacctccacacaaattcaacgtgtgactcattaggatacaatacaatttcagcaaacttttgatttaagatccaaaccttaatcctaatcacaacaatcatatgcagtggatacaaatacacgcagttttgtgactctcccgtcatctccttcattcctgcttatttcactaaacttcacagtaaatcttatcaatatggcgttggtttttgtggtatattgngatacatcggaatgat

SEQ ID NO: 21526 - DNA, 411 bp, Glycine max
  unsure at all n locations
agcttattacaatatacttgtccttcatttaactgtctttgggcttggcggccacgatcaacaaagtactttcgacacctactatatgttgatttgaccaacgctgttatcggtatgttacgacaatccttcaataccttatttatacattctgagaggttcgttatcatgtggccatatcgacgtccttctctatcataagccatggtccatttttcctttgaaatgcgatcaatccatgttgctatggctggactcagttgacgaaattnttctaaattttgatcaaaaatatgcttgcaaggagtgtagcctgcatgaaattagttagcaacaataattngaagtatacatganacttanattaacatgaccatgataaatgaaatcttacccaattntttcaacatt

SEQ ID NO: 21527 - DNA, 444 bp, Glycine max
tcagaacataatggcaaccattcctctctcaaaccagatgtggaaacgcccctcaaacaagaagtggaaacacccctcaagggttcgagagatcgccaaagttttgcttgctgcgcgttgatgaccactcatttagggctttttatttaattcaattgagataacgacgggtttttaataaaacccgtcataatttttatgaccaatacacattctaaggtggttttcaataaccatcttagaatgtgcatcgtaaaagacttttatcataaaataattacaaaaatgtcaatgtctcattttctaaagtggttccaaaagaaccgtcgtagaatgtctgtcgtaaaaacacaagtttcttgtagtgattgagtcatctgtgtactctaaaattgaaaattgtatctcatcaactaccttaactccatcaaatagacctgcatc

SEQ ID NO: 21528 - DNA, 397 bp, Glycine max
agcttatacattcaatttcgagcgtctcgatatattacgggactcaattagacatccgagtaaaaatttattgtcgtttgaattggctcacaggctcaacattcaatttcgagcgtctcgatatattacgggactcaatcagacatccgagtaaaaagttaatgtcgtttgaatttgctcatagcttaaacattcaatttcgagcgtctcgatatattacgggactcaatcagacatccgagtaaaaagttattgtcgtttgaattggctcataggttgaacattcaatttcgagcgtctcgatatactacgggactcaatcagacatccgagtaaaaagttattgtcgtttgaattgctcatagcttaacattcaatttcgagcgtctcgatatat

SEQ ID NO: 21529 - DNA, 425 bp, Glycine max
  unsure at all n locations
ttgagcaaattcaaacgacaataaccttttactcggatgtctgattgagtcccgtaatatatcgagacgctcaaaattgaatgttgaacctctgatccaattcaaacgacaataactttttactcggatgtctgattgagtcccgtaatatatcgagacggtcgaaattgaatgttcaacctatgagccaattcaaacgacaataacatttaactcgaatgtctgattgagttccataatatatcgagacgctcgaaattgaatgttcaacctctgagccaattcaaacgacaataacttattactcggatgtccgattcaataccgtaatatatcgagacgctcaaaattgaatgttgaacctctgagcaaattcaaacgacaataactntttactcggatgtcttgattgagtccgtaatata

SEQ ID NO: 21530 - DNA, 390 bp, Glycine max
agcttattcctgaacgttatgcgacatcttattcgtggctaagcgggatctattgtcgccaagcgcaattccttacggccttaattgaggtccatgacgctaagcgccagtcatggcagctaagcgagattctttgcagcaatatgagcgctaagcgagtacctctcagctaagcgcgtgctcctctgtacttaagatgcatcattttagctacattggctagggccaggcttagcgagagttgcagcttttctaatctgcaggtctcgctaagcggacgtactcttgtgctatgccgagtttctgttcaaaaaaaaaattcaaatttgaaacgtcggctaagcgcacgtgttcgctaagtgagcctgggtgagaaaccaaatgtctctc

SEQ ID NO: 21531 - DNA, 396 bp, Glycine max
  unsure at all n locations
ntagtggaataaaatgagaaatctatggtgtctaagatatttacatgaagaggtctggagatagattcaaccttcattcttttgcgtcttcggctagaagcaccagcctatttctcccagaaattctattagaaataacgattgacaataaagaagtagaacaaaatgacaaggtagatattaatacctaagttaaaggaagattagggacaaaggattttttagcagcaacatatttgttagttctcttgaaagttaaagtttgctctggagaagggtcctcttctatattttccaagtcaatcgtctcaactcgatgtttagccatcaaggaaaatgttagtagaataacaacggtgaaaaaagagaccataagataacgctataacgaggaac

SEQ ID NO: 21532 - DNA, 403 bp, Glycine max
  unsure at all n locations
agcttatgatattttttaatgttntcttactaattggggttatttgatttttgtattaatttcttttataataaactcacccctctcaattttttgtaccgtgtggttggtacttgtgatgatcgtgaaccattgttcgtgggagcagaatgacagcagtagtggacgagaagtgagattctttcgtgatgacgttgggattatttggggagagacttgtgttttggtaatcaactcctccatagttagttccataattctttttgttgatttgaagatgtaaatcancaaattaattatatgtatgaacaaatttactttccattatgtgtatgatgagtactgagttactnatcttatatatatatatatatatatatatatatatatatatatattccct

SEQ ID NO: 21533 - DNA, 439 bp, Glycine max
tgctaaagttgagaagaccaagaatttgattcaacccaattatatgcgatagggctcaaaaatgcatcaggaataccaaaggaactgaccaaggcaagtgcgtgtggtcgaagttcagcacagagttttggcacttctttcctcactgcagaagcattctctgttgacaagtatccatatcgaagaaaggcagaatcttcatccacacatatcacagcatacaacgatctcaatagacccaagacattctacagaggagataaataaaagcaaagaaatcaataaatggatctgcttcacattttgaccctacaaggagagtgctaacaacactctttaacatgagaaattattaagtagtctgaaactattatagtccccactaactaatatatttacataaaacaaaattgagtgttattaattcttttcttgtaaa

SEQ ID NO: 21534 - DNA, 436 bp, Glycine max
  unsure at all n locations
ggcaattcagctcgtacccgggatccttaagtcacctgcgtttgcaactttgtggcttantgaagatgaagaggtaaaagtgactcaacaggttgaggtgtgtctcaccattgggagatataatgacaaggtgctgtgtgatgtggtcccaatggaagcgacccatgtgctgttaggaagatcgtggcagtatgataccaaggcagtgcatgatggcttcaccaacaacatctctttcaagcaagctgacaagaagattgttctcaaaccgttatctcctcaagaggtttgtgaggatcagataaaaatgagagaaaagaaaaagagtgagacacttgagaggaaaaagagtgagacacttgagaaggaaaagtgaggaaagactaagagtgatacacttgagagggaaaagagagatnatcaaaagagtgaaaca

SEQ ID NO: 21535 - DNA, 438 bp, Glycine max
tcgtttggaccttgaacaagcaactaacttctctttcagtaccatgctatgtgctcgtgactggtccctctcttcccttcgcagcttgagttcactattgctaccccatagagctccgcgaaatttattccggccatactcttccttgcgagccctcttggtctcttgttcaagggctcttgcggtaattgcattctcttcccgtaacccggcacactccttccgaatgtgtgttgcggccaacttgaacttctccttggcaagtttcgcctttcctaactcgcttttgagagcttggacttcttcgtcctcttccggtgcttcaaaactctcttcgctgacgacttttaacttggcgagccaatctaaaccttgtatatgaactttcagccattcatggcagccaccaatgatgccattacgaatgcctctaagttc

SEQ ID NO: 21536 - DNA, 402 bp, Glycine max
agctttgtgactattaaactatataacagcaccaaggttctagtttagagggctcttcgatttattcgtttttagttttagtctctctctctctctctctcttcttctctctcctattttcgtttttagttttaggcttttcttagacacttttttgttttgcaattccagttttgacttttcattttagcaataaaatttcgttcttcaatctataatttccttctctattgattaatggaaggctagattttctggtgttgttccttttgaggacgaagcccaactctctttgaggtttcgcttgcaatgtggtttcctggcagttttcccttcaccagttatcccaatttcgtgaatattaatcagtgcacgcttcgtgttcgattaattgcctctgag

SEQ ID NO: 21537 - DNA, 412 bp, Glycine max
  unsure at all n locations
tataagaacaaaattgccttaatcatttcttaatatgcatgtgaattanggcgcatcaacaagaatcatgccaaggctattgtgcaagcaatcaatggggcaaaacacaccaaatgattataatgatggatggctcaaattctcacaaaggtaaaatcatcactttcaaattgagctttcaaaactatcatgacatgtagagaagaatcaaggatttcaagtcacaaaatgtcaagaacttttattttcaaaacaattacccatttcttgaacatatcctataattcanagaaaaacatgcaaagtcgtacgtgcacacaaaattgacccaaaatattaaactgaaaatccgacgaaactaacaacattaacaaattaacacaactaacaaattaacaaaaccaacaaaact

SEQ ID NO: 21538 - DNA, 392 bp, Glycine max
  unsure at all n locations
ttcacttgaggagggatgtttngacctttngaagaattntactgatgtaaccactattttcttctaactntttagcgtatttgatcacctatttaagggacgactaccttctatatggggatttatcattgagtattagtaattgggcccacttgacgaattaggtgctctcaagtcaaattcctgataattataaccaattgggctgatcctaagtggacttgggtcgacaagacggcttatatacaatacgcctaatttcatttgatcgcgttcacggtttatgtaagattcttaattcatcttaaacccacactatgttatcctggccagtggacttgagtgaaccttatcaacactcctttgatacatgcaggagtgcatatctctcn

SEQ ID NO: 21539 - DNA, 421 bp, Glycine max
tgttgaaatatctttgacttgatttgttaaatccataactctatattcaatttttggattatgcttaatgagttttgtatatttgacatgtgaatcaagattctaatatatactttagattattattattatatcataccttatataatatatggtgattgcaatgaaagtaaaaataatatatctcgatcatcgtgtgatattggatttggtgtacatgtgaggtattgatatatatatatatatatatatatatatatatatatatatatatatatatatatttgtttattatatattggatatataaatagtagattatttttttcacatattaaaatgttatacacatatagattaaatatgtgaattataagatgttaagggaatatctattagatgtaacatattttgaatagca

SEQ ID NO: 21540 - DNA, 391 bp, Glycine max
  unsure at all n locations
tagcttcttggtgaatcaaaggtgattcaaaggtgttttgatgataacaatgatgataacaaaagatgatgacaaaggtgatgacaaaaagctcaaagaacaactcaagtgactcaaagatcaatcaaagaacaactcaagtgaatcagagatcaatcaaagaacaactcaagtaaatcaaagatcaatcaaagaacaactcaagtaaatcaagaagaattcaagaatcaagattcaaggttcaagatctcaagaatcaagatcaaggttcaagactcatgattcaagaatcagagaatgctcaatcaagataagtatgataagtttgtctcaaaaattgaatagcacgtgatntttctataacatgtntaccaaagagttttactctctg

SEQ ID NO: 21541 - DNA, 435 bp, Glycine max
  unsure at all n locations
ntagtcaaacataataatccaaaaatgtcaaagaattgtgtgttgaaaaagcataacaagactttctgtgattggtttaaagatacaatctttgcatgtgagaatgcttcagaaacattaagaaagctagcagataggcctaaaagaaatgttataacttggcaaggatacgacataaacaagtattcattttacacaaaagcacatgatgagaaaagtacaatgcagaacagcggggtcaccctaagggctgaatctcaacacttcgcaagtgtgaatgacaccaatccctgtgtagcttccatcccttactttgggttcattgatgaaatttgggagcttaactatgtgaaatttactgtatgtattttcaaatgtaaatgggttgatagcaacaccggtgcgcacaccgatgatataggatttacattggta

SEQ ID NO: 21542 - DNA, 336 bp, Glycine max
ttagcttttcttcttacagacagcgaaaaataatggttatacggatcaccactcgagtatttccgccagtcagcgtgactcaaatgtcagtatgacagatcttgtgagcgcggaagatgacgtaaatctacgcgtgtcaacgggcttgtcggccgtgattgacgaagggagcagaagactacggtagtctttgcgtgccatcaagcttttcgtcttacagacagcaaaaaataatgggtatacggatcaccactcgagtatttccgccagtcagcgtgactcaaatgtgagtatgacagatcttgtgagcgcggaagatgacgtaaatctccgcgt

SEQ ID NO: 21543 - DNA, 400 bp, Glycine max
tctacttatgtggcagggcgggctttcttcactttcttgtctccaacgcgagctttgaccactgttcttccttcccgcgatgcttcttttcatatccgcctgagtgggcttatagcctaaaccatacttcccacggtttccttgagtatttatcaggctagttatgccgccgttgtctttgcctaaacccatcccgggttcataaccgttccccaacataactcgggccatcattaccgctgcatcggacagacaaggctgcccaaagagggagtccacggaggaaatgctgaccacctcaaaagactggaaagcggtttctaacgattcttctgcggcttccacataaggcatggaggatgggcagcttaccaagatgtctttctcgcctgacacgatg

SEQ ID NO: 21544 - DNA, 377 bp, Glycine max
  unsure at all n locations
agcttcttgcggatcatctacgtcaactacggatcaaatatagcttttgcagatcaacaaaaacctatgtggatcacgtcatagcatacgcggatcaagctgaatgagctgggtgcacaaaaatattttaaaaatacacggggtatttttgccttttcacgtagggtgctgggtgcacctagcaacacccctcgaccatggaaggccatgaaaggagagatgtacagaaaccttatcagagcttaacttcccatccaaaaaagaagattggttattattacaagggactcacataattagaattaaagtgggtctcaaccaattttcatgctgattttgaggattttttncaattttcggttgttcataaaccacac

SEQ ID NO: 21545 - DNA, 419 bp, Glycine max
tctttgagaaaacttccttgagaagctagagcttagctacattcacccctctcataactaagctcacctccttgagaagcttccttaagaagattcctaaagaagctagagcttagctacacatacctttctaatagctaagctcacctccttgagatgagaagctagaacttagctacacacccctataatagctaagctcacccccatgacaaaatacatgaaaatacaaaaaaaaaatccctactacaaagactactcaaaatgcctcgaaatacaaggctaaaaccctatactactagaatggccaaaatacaaggcccaaaggaaggaaaaatctattctaatatttacaaagataagcgggctcatacttagcccatgggctcgaaatctaccctaaggctcatgagaaccct

SEQ ID NO: 21546 - DNA, 385 bp, Glycine max
agcttggaactaagcttcttttctctaaaacttgtcatccataaactgatggacaaacagaggtagtgaataggtctctatccacccttttaagggctcttttgaaaggcaaccataagtcttgggatgagtatcttcctcatgtagaatttgcctacaataggggggttcatagaaccactaagcaatccccttttgaggttgtctatgggttcaatcctctaacacccttagacctaattcccctcccacttaacacttcttttatacataaagaaggggaatctatgtcaaagtttgtaaagaagtagcatgagagggttaggaaccaaataaagaaccagacaaaggtgtatgcaactaaaggcaatagaggaagaaatga

SEQ ID NO: 21547 - DNA, 431 bp, Glycine max
cgtagaattatggggtacccatcacatgtggtactaggtggtggtcgggcgatggtgcacaacaagctttccacatccacaatgcgcgcataaacccaccatcccctggtgcccacctccaactgagctcacgtactcccacatagcccatctcctcgtttctctcaacaccgggtccccatcaatcctctcaagcttgcacaacatccaagcagaacagcgttcatacagcacatgctataacagccgatcacaacatagcacatgcagagaactctgctgagcacatcaaccacaatcacagctgttctcacgtatagaccacagtaacaattccttcgatccaattcgataaccgttggatcgactccaaaattttactggaagtctatagtgtataagcctgcattgtgaccgttgggatatactag

SEQ ID NO: 21548 - DNA, 371 bp, Glycine max
cgcttgtatgaccaatttggtggcatgatccccttttttacaaacctctctactattcatccttaccctaaatcaaatcctcaaaacatcttatttgttcgttagcaagtataaccaagtgaatctagtgtgagaatcaacaaaggtcacataatacttaaaaattgaactagaagaaaatgttgtaaggccccaaagatcattaaaagaagttcaaaatgtatagaatatatagtaacaaaaggagaaggaagacaatgagacttgccatgatacgatgtgtacataaatcagaaaaaaaaaaattttaccatatgaagattataaagactgaacacaatactcatggcaacactaggatgagcaagtct

SEQ ID NO: 21549 - DNA, 424 bp, Glycine max
tgagccctgtgtgaaattccttccttggttgaatcttggcgtttctcattggttgtagccttagaatccgtgatgattctgagctcccatgtagttcacctgcttagaagaatttacttgggttatgcattgctctggctcgcgtgctccaccgtacatgtggcatccccctatttgcatgattgaagagtgagaggaacttaccgcttatagttttttagggagcttgttgaggatctctgtgagggcctctatctgtcggaccaatagcttgttttgggccaatgttgcatcttgggttgtgagttccagaaggctcctctttgctggcatgtatgctcgaccatgaaggatggcgtgatcattggccaccatgttctctatcagctccattgcctactccagtgtcttcagcttgaatttc

SEQ ID NO: 21550 - DNA, 379 bp, Glycine max
cgcttgtcgaacaatctgttaattaacctatctatgcatgcatagcctatatccattatcacaaagactacctaccagcaaatcattgaaattcactcccagcaccacaggcttgcttgtcattaacaaaataaccgaatattataaatcttatgtacaggatcttttattcattcaacctgctaggataacataaagaagctgtgacattatggcattggactgcaacgacactacatcaagatgctatgaccacataacaaacactagagagatcctacagttaagcgcaattagagattaaagatctagcgatgttatttagaactagcatgtctagtaagagtcaatactgattaaaccaatactaaccttacat

SEQ ID NO: 21551 - DNA, 432 bp, Glycine max
tccatcaagcaaaatcatcaaaaaggtcatttgacattagcgtaaatcattaatccaagaaactatcaaagcttaaccaccaagcagaaactatacctcaaagtttaaccactcgataaaagcaacgaggcttaaccattaagagcagaaacaaaacaacgattcaatgcttaaccatccatgtcaaaaacttaaacaatgtttaatcaccgcggacagaagcttaccaggacttttcacaaacattttgtgaatcaacaataatcaaagcttaatcactcatgatagaagctaacaaatgaacaatgcttaaccaccacacatgacagaagctaaaatcatcagaacaagtcgaaaaactttagaagtatttaatcaaacaccttgtagacaaacaaaatctgaacactagacatgaagaaacttacacaa

SEQ ID NO: 21552 - DNA, 363 bp, Glycine max
agcttgcttctacaccatgaacataaaataaccatcatacggttatggacacaaattcaaacattacattaacttctacataggggaaagaaatataatttgcatgaaatactacaactaagtaatgctaattttgtgacaaggacacgtcgtcttccatttccattaaatgtttactaaaaacaactaagatttctattgacccaaattttttccagtagttagactgcactaacacctttagcacgtcatcgttggttttcagttcaataattctgaatttgataattttatctgaatactcatagtggcttggttgtcgaaaaaacaatcgccttaccgtttgtgtctcatgaataccat

SEQ ID NO: 21553 - DNA, 287 bp, Glycine max
  unsure at all n locations
tgcacttgaggacccanaatatgaagcacagttcgctgatctggccacagagcacaacaagcgggccacatacgcaatgcgcgcataatcccaccatacgctggagctcacctacacataccctactgatctcccacatatcccatctactaggaaatgttaaaactgagcccccacccctataatagctaagctcacccccatgacataatacatgaaaacaccaaaaaaaaatccctactaccaagactactcaaaatgccctcgaatacgaggctcaaacccta

SEQ ID NO: 21554 - DNA, 372 bp, Glycine max
agcttcataagcactatttgagccttatgtgaatctcaacccctaagacccaatgtctcaacagctgcacactacgacttttcacacagctttgctggtcaacgccttcgtcattagcccttttcaagacattggcaaccaactttgataggccgtaattaaagcagggccaaggatgactgcaattaaggtagctttccaacaaacaacatctatatcaaggaatcatgcaccatcacaaattcaaatggctcttaacatactttctgcatcatcataagaaataaactctctaaaagaggtgtaacattcatcataatatcatcccatataaaattcagccacacaaaacacataatagtttcataccat

SEQ ID NO: 21555 - DNA, 425 bp, Glycine max
  unsure at all n locations
ttatggnggcttangtgtcagagactagcggttgatttatgtttcgcttcttgggaaattaatctaggacttgcttcaatcacccctgaagtcgtgggttcaggttatcaaagcaagatacttgaatcacttctccgtcctaatgatacctccaagtaaaggggcctcgtatgtttggcataatatattaaaagctcgggatcatctttgtagtggctttatgcctcatttgggtgatgaaagctcacccctatggaactcaaattgatcaggtttgggtgcactgagccagtttgtgttgtacgtccacatcatggacaaccattgtactgtctttgacttatgacagaatgtaacttggcaatttactaaccgacgcactgaaataccaacgtaaattgttgcttggattagtgagattgatt

SEQ ID NO: 21556 - DNA, 377 bp, Glycine max
  unsure at all n locations
agcttgtaatcgattacacatatactgtaatcgattacctgagcagattttcagaaaatattctcaacagtcacatctttttatgtggttcttgaatggctatcaaaggcctatatatatgtgacttgagacacgaatttgcgaagagtttttcaaaacaaaaaagtcttatcctcttataaagcaaaattgttttatcctcttacaaattccttggccaaattacttgtgattcaataaggaatttttgagtgctcaaattgttcaatctatctctttcaagagagatttcttcttttcttcttcttcattctgaanagggattaagagaccgagggtctcttggtgtgaaagaattctaaacacaaagtgatgtg

SEQ ID NO: 21557 - DNA, 424 bp, Glycine max
  unsure at all n locations
tattgctttagcactaattttcagctcgcctgtgcgtgctgcaactgccccaaagtgaccctttgcctataaatagccatcctacgggtgttttaaggggttccaaggttcagaaggtgagggaattttgaaaagagagaaagaagaggaaacaaagtcgaggcattgccgaattgcaaccgcgatcattccctatttcgttttcttgttctgtgttcttcgtgcaaccgtcagttagtttattttttttgtaattgaatgtgatctatgtacccttaggggtgcccccccccccttgttattttgtgcatattcatttcctccatctatcattgacgatctcattnttctttataaagttcaatcttaaccgatcactagtgttgtaaagttgtctttaaagagattgaaagttaataaacaa

SEQ ID NO: 21558 - DNA, 368 bp, Glycine max
agctttatcttcacataagggtcagatgcaccaagaagatctttcttctttaacttcattgcttgcagaacctttacatgtaaaattccaacaggcctcttcaaggctctaagattcccaaaaacattcacaagaaaaaacagaaaagagtcaaggtaatataccattatattttgacaaacatttatagaaacgaagtaacatactttgacatatctaacacttgaacttccaaggttttgggccatagatacatgtttgcaacctgatctttgataagctcctgaaaacaacactctttaagttagtttaaaagtgatgaatacttcaacaaaccaaaaccaaaaccaatacaagtttggtacaac

SEQ ID NO: 21559 - DNA, 426 bp, Glycine max
  unsure at all n locations
tcataaatgaacaccaacatatgaacgtacattttatttgattaaatcttttcgctgttgccctaatactaatactggtgaccaaatattttggcagtgtgtcacattcacattcacattttgatgatatcctacgttgccataaagatatctttacatgattaccagtcacgtacgtaccgactctgacaaacgtacactgcaatttgtaccgtctagatattgatctttgactgctttctgatgctgattctcttgtcagcctttttctagaacaatcaacaatattttacttctcagatttttaataatcgaatattctttttggactgttaagtgttaaccgatgctcatacatactattgcctctagattaaatattcattntttccaagattacggctgtgttgcatatctccttactag

SEQ ID NO: 21560 - DNA, 393 bp, Glycine max
tgcatgctagctttgagccaaaatcctgactcaccataaaccttgacccagggtgagaatgccaatccttaccctcggaagcaaaaaaaaggagagagagagagagagaagagaaggaaaatttccgatcaaaggaaaaaggagaaggaaaatttccaatcaaaggataaaggaaaggaaattcccaatcaaagagtgggggaaagcaaaaagaaaagaaagaaaattcccaatcaaagaatgggagaaagaaaaaaagagagaagtcaaaaagaagaaatctcctggtcagagaaaccagaagatatgtgccgagaggtccttggaccagacaatatctgaacaatacagaattgtcaccaaatgaataaaatagaatgaaaggaaaccacg

SEQ ID NO: 21561 - DNA, 400 bp, Glycine max
tcaagttgctcattgactccagattgctacaaataattacagagatttgtatggtgatccacagaagaacatagaccacagactcttgcagcaggtgtagatttctgattcatggcaagctgggttactaggttgaccaaggcattaagttttccctcaagctttttatttttagtagatgaagatgaatctgtggccacctcatggactcctctaaggataatagcatcatttcttgcactgaattgttgggagttggaagccatcttctcaatcaaattcctagcttcagcaggggtcatatcaccaagagctccaccattggcagcatcaatcatattcctatccatgttgttaagtccctcatagaaatattgaagaacgagttgctcagaaatct

SEQ ID NO: 21562 - DNA, 356 bp, Glycine max
agctttaacctcatcgtccctcacagtctttagatttgggagccaatccaatccttgtgttcggactctcagccacttatgatagccaccgatgatcccattactgcttcccctaagctctctgtcctttcttcacgccgcatcccatgccttgcaaactccttggagtaccctcgcattgtggtcactaaaaccccgtgcgatgaaaggcgtgatgctgtcgtctaatggcgctcctctcatggggtagccaagctgtcttatggcgagaacgggattataattaatacgaccccttgttcccatcaagggaacatgtggacatccttcgcatgaagatagaatcttgattcttc

SEQ ID NO: 21563 - DNA, 414 bp, Glycine max
gcttatccaaggctcatcttggcggttaagttccttcttccaaggcttattccctagtggatggcgcctcctctctcctcttctcctttgtcttccgcttcatctccatggtgaaaaatcaccatcaaaggacctcattgaagctcaaagatccagcctccatagaagccccacaagcaagcttccatcacaaattccgcaccagcatgattggagtaccgaccttaagtgttaatttgtgattaggtatccctgatgttttcaatgagtttagaaatttaggtgtcagtaatccgaaagtaggattgagtagttcatcttatttatcaatgttatcagtgctacaatactccttttcgtcattgtgtatcaatgataagacaataatctattttgtcaacaatatctttttta

SEQ ID NO: 21564 - DNA, 358 bp, Glycine max
agctttgaaatttggcatctgaagtctgaaagctctaggcagataagtctgcaaaagctggaagtggggctgaagtagaagatgcaaggatgccagctattggtgcaaaggaagagggagcatcagctgctctgatcttggtcttccttgcctctagaaaattaactgtttggtcattcgcattccaacagttccttatgatataagctaagtcaatggctggccttatgttttcataggaggtaagggcatcagatcccactcccctcgatctgcacaaggttgtgattaaagatgggaagcctaagcgagaagagttagattgagccaccatggtcatttgtccagagatcaaacc

SEQ ID NO: 21565 - DNA, 414 bp, Glycine max
  unsure at all n locations
tgagcttggttcaaccccgtaatccatggtttggaaattctgattgccaatacttcaacaacatctcatagggatgaatgactcgggcatactttaagcttatgcacggaaaatgtaattatgaaattgagatgcccgaagaaacaccatttcctagttaaccatgcattaggtaccatgttcaattattttgttttgttgttgtgtgttttttttttagaaatgggtttatgatcccaacatggttggctcatggtgcctaacacatgcaactaagaatgtagtgtgaagtttcacgcttccccttttttgtttttgttttgtagaggaaaacgcaaggatgagcaaacatgaaaacaaatggtatgcaattntgcagatcaaacagtttgttgaacgcatatgcatgatgat

SEQ ID NO: 21566 - DNA, 372 bp, Glycine max
atcttcacaaaatatgttactatcaagcttctaatcaagtatttttttcaagaaccagattcgttttaaactgattcccctctctgaatgtatgctttggctaataaaatcttcttgtactacttcatttcgtggttcgaaagcagacgggccacaagaccttccaacttttggcaattcagattcccttattagctacaacccactaccctgagcaatatataagcatagcaccagctgcatattcttacagaacctttcccttcaactaaaaaaaataactccttgttcttctgtcccttatcattaatctttctcttccttatctagctagcaaagtgcaacattacaatccttcttaagctcttagta

SEQ ID NO: 21567 - DNA, 430 bp, Glycine max
tgaggtaccattgttgaatgttgaaactccgaaactatgtgtcacagggataccaatcttctattcgatcccacagaggttaatggttctgtttctcgaagcccattggatctccttgttgtcctttttgggccatctgtggtatggcccgttttgttgctaaacttaatcaagaagaataaaaaataataaaagaattattttattccttaataactttttggagaaaaaaaaaagcacagttaaaatttttatatatgtaaacctttcattcgatcttacattttttgttttaaaatgagtccatgatattaatttttttttcatttgttttcagtaaatgccacttatatatatatatatatatatatatatatatatatatatatatatatagatatatatatattagtccctctaaaggttggac

SEQ ID NO: 21568 - DNA, 373 bp, Glycine max
  unsure at all n locations
agcttgttgaaattgtcatgttggatgagttaaacatacccattctgttttagggtttttgtgatgatgtttgtgatgtttatatgcggaaattgctgatggaaaactgttagagatgaagggtagaactaacctagggttagaaagtgagaatgtgatgttatgagtggaaaaagagggaggctttgagggttggaaggctaagtctgaattctgtggtaaatggaggttaaagtgagttaatactagcttgaaatgtcatttaggacttgngagaaagcttggactgtgctagagagaaacaaatgaccaaagtgaacaaagagccatttctagggcaatattaggtgttgaagagtcaaattttgattca

SEQ ID NO: 21569 - DNA, 349 bp, Glycine max
  unsure at all n locations
tggagctccaagtgcaaccaacctctagcaagaaacatccttttcacttctttaatataaggagccttaccaggatgtcctttaataaaaaaggatttgaaaatattgaattattggatatttgattacatactttgatgcaatccttccaaggagatccatcaccagagccatgaccaggagacttcaggaagattggtccanagataggcgagaaggttttgtctaatgcaggagctttaatgtggataccgacccggtggattgagaggacgtgatcttatttttgtccatcctttattacgattacaggaacatttggacatgctatatagggatatataatact

SEQ ID NO: 21570 - DNA, 387 bp, Glycine max
agctttgaatctctttgaacttcttcttcttctttgtaccaaaagctttatgaagttttctggttttccaaaccttgaaaacttgtgctattcatcttttcattctcttctccctttgccgaaaagaattcgccaaggactaaccgcctgaattctttttgtgtctctcttctcccttttccaaaagaacaaaggactaaccgcctgaattcttttgtgtctccattctcccttgtcaaagaattcaaaacgacacagtctgagaattcttttgattcttcccattccctaatacaaaagtgttcagaggactaaccgcctaagaattcttttgtatccccaagcatcacctaagttaatttttataatagaagaaacaccccaatt

SEQ ID NO: 21571 - DNA, 424 bp, Glycine max
tgttgacataaatttgacagtatgcctttaatgttgtgtagtgatcttttgtcatgcatttgtactatgttttgatgaatgcttttccaaattcagtgtattgactatcagctacagtgcaaccatacaataaccaaaatttttactatgctatctgataaagatgattccatttttgaatatgtgcagaaattttgaaattttgatatggtttatttcactttgccttgttatcatcaaatggaattttgttgttaacttttgcttgctggacttttttgttgttaattcacctaaatgatttggcttaaaccagagaggaagcatttggacctgttgcacccagagaggaagctatcagaattactaatgacactaatgcaggtagttcatttggttcttctttatacagccttgaagaatg

SEQ ID NO: 21572 - DNA, 385 bp, Glycine max
agcttcgggctgctcaattgctccaggtttctgcatggaagggcaaaggtctgtatggtggtcagcagaggaacacaaaccacagacccttgcgacaggtacaaatttttggttcaaggccagctgggttaccaagttaaccaatgcatccagtttgccttcaagcttcttagtttcagatgatgcagctgagtttgtagttacctcatgcactcctctaatgactatagcatcatttctggcactaaactgctgggagttggaagccatcttcttaattaaatttttggcttcagcaggagtcatgtctccaagggctccaccactggcagcatctatcatacttctctccatattactgagtccttcataaaaatattggaga

SEQ ID NO: 21573 - DNA, 431 bp, Glycine max
  unsure at all n locations
taatacccaaaatcacatctataggaccaaggtcttttatatcaaaattactagacaagaaagacttcatatcatttatgaaatgcatattactaccaaatatcaatatgtcatccacatacaaacataaaatgatgcatccactatcatcaaattgtttcacatacacacatttatcactattattgatttgaaaacaatatgaaagaacaacttgatcaaacttttcgtgccattgctttggaggttgtttcaaaccatataaagatttaacaagtttgcaaaatttcttttctttacccggttctacaaaaccttcaggttggctcatataaatttcttcttttaaatcaccatttaaaaaaagctgtttttacatccatttgatgaattntcaaattaaaaacacaaacaagtttaattaaaactct

SEQ ID NO: 21574 - DNA, 334 bp, Glycine max
agcttagccctagaggagatggaccttttcaggtcgtggagaggatcaatagcgatgcctatagttggacctcccagaagagtatagagtcagcaccactttgaacattgctgatttaattccttttgcaagtggagctaatattgaggaggaggaactaacatattcgaggtcgaatactgttaacgggtggaggtgaagagccctttctccgtgacaagggactagtaactatagctatgatcaggatgcgtggagaggactggtcgaacattgttgaagaatgccctatggttctgatgaacggcacggcacactgttaagcccatgggcc

SEQ ID NO: 21575 - DNA, 432 bp, Glycine max
tcgtctacagatccctcatgtgagactaggcctaaactatactgcattattgtaacaacataattaagaccaaaacttaacccgcagatccctcatgtaaggctaagtttcaatcgtgcttcaatcaagttctaaggcaacagtacatttcccaatgctaaagtcacctaactatgaacacaaatgggtgatcagaccaaaagcatacaaacattagcattgaaggaagcattgaacacagaaaacataatcaattagatattaggtatttacatcagttgttcattagaaatccccaactagggtgtttagccagccattacaaagaaacccaaacaataaatgagattaaaagcagagaatgatagttccttacataagaagggggattcctcctcctcttcttagcatctcacactcactctctaatta

SEQ ID NO: 21576 - DNA, 374 bp, Glycine max
  unsure at all n locations
agctttgcttgtacgatctcccattttttgatgatgacaagtgctgaaatgaagatagtagatacaaatatatacaaatactccccattctttaagctctcttgatttctaagttctttaattcttctccccctttggcaacatcaaaaagccaaagtgcggggaaatttaagacatctaactcaagcaatcagtaaacacgaatgtttcaattagctaatcaatctttatttatccaaatcactaacatctaagagacctaattctctcttaatggcaaagaatgtttccttaaggagaagctntgtaaagatatcagcaagctgatgctttgtatcaacaaattctagaacacaatctcccttcagaacatg

SEQ ID NO: 21577 - DNA, 415 bp, Glycine max
tgaagatgttcattgtacagtctatcaatcattgtatttattttgaagaaaaaaatgaacaagtgttgtaacattgtcagtttactggacaaaggaaacttgagctaattgagtgaatcttaactctactaagttagcaagtttcattatattcgagcttactatgtaaaaactcattgagtgattagaatatattttctatcaaacatatattgtttgtcaaagccaggagtggcttggtgacaaagaatacttgggttttaatctcacggggagattaagtgtagtgctaagagtggcctagagagtacttattgtacgctgtaatggcatagagaatacttcgttgtaatcaaagatttgattaatggaacccttcaaggtttaaaggagaactggatgttgttagagataa

SEQ ID NO: 21578 - DNA, 351 bp, Glycine max
agctttgagcaaatttaaatgacaatcaatttatacacggatgtccgggtgagtaccgtaatatatcgagacgctccaaattgactactgaaactctgataaaattcaaacgacaataactttctactggaatgcccgacagagggtctgaattgatcgagggatgctgcaaattgaaaacggaagctcgtaccaaattcaaacgacggtaactgtttactacgatgtctgattgagacccgtaatatatcgagacgcttaaaatttatatccgaagctgtgataaaatagacttgacaataactttatacatggatgtcctgttgagccctgtaatgtatcgagacgctg

SEQ ID NO: 21579 - DNA, 427 bp, Glycine max
  unsure at all n locations
ntaacctcatcgtctctcacagtctttagatttgggttccaattcaatccttgggtccggactctcagccacttatgatagccgccgatgatcccattactgcttcccctaagctctatgtcctttcttcacaccgcatcacatgccttgcgaactccttggagtacctttgcattggggtcactgaaaccccgtgtaatgaaaggcgtgatgctttcgtctaatggcgctcctctcatggggtagccaagctggcttatggtgaggacaagattataatttatacaaccccttgttcccattaagggaacatttggaaatccttcgcatgaagatagaatcctgattcttccttccttctagtgagggaaccaattaacagacgcccctccatgctagccaagagttggtcccaattcatctttct

SEQ ID NO: 21580 - DNA, 355 bp, Glycine max
agcttgcaacaaagttctacatattttcataatgaatatataaataacaaaggctagtaaaatcttcactatcaatctaaataaatgagctatccgtgggccattaatgctgagcttgtaatgcttgaactcgactcatttaaataattgagcctatttccaagcttcactttgtttatttaattaaacaaatgagcttgattgagcatttaacaagttgagtttgaatagatcaagaatagctaagctcatttacatccctaaatctattctatttcggaatctaaggtgcttatgtggcttagcccaagagcatggtaaatgtacatcatatgtggcactaactttattagtt

SEQ ID NO: 21581 - DNA, 378 bp, Glycine max
attgcaaatactagaaaggcaagactatctcttaccttagaaatgcgtgcatgcatcaagcatgcttgtgtattacacgctctacctgcaagcgatgcgaacgctatcatcaaaccggttcagatccctccgttaatgactactagagagaatggtacgatctcaaacatgcaacccgtcaaaattctcgtgctatcgtttacgaggatgtcacccatgctatactgagatcacatgtaagctctggagcttgtcttaacgcgggagtactaaaacctaatgcagggtaaagcactgctcgtccttcctatcacgacatgctaaaagccgtggttacatccatgcgatgaatgccctatttatcaacacactccagat

SEQ ID NO: 21582 - DNA, 375 bp, Glycine max
  unsure at all n locations
agcttgtagaattcatcccaattccagtgtcctatgctgacttgctcccatatctacttgataattcaatggtagccataaccctagccaaggttcatcaacctccatttctccgagaatacgactcgaacgcaacgtgtgcttgtcacggagaagccccggggcgttccattgagcatggtagggctctgaagcgtaaagcgcaaggtctaattgatgcgggctggctgaaatttgaggagaattgcgtgtaaatcctgacattgacaagagatgccacacatggggcaatcttgaaagctgntgttaagtgtccctaatgactcatcagggtttccaagtttatgccattattgtaaaccacatctacaatgt

SEQ ID NO: 21583 - DNA, 429 bp, Glycine max
tccacaacatccaagcaaagcaacatgcaaacatgtacttgctattacagccaaacaaaacagggcataggcagaaaactgtgccaaaacaccaaccaaatcacagcttttctcacttaaagaccccagtgacaattctttcgatccaattcggtaaccgttggatcgactccaaaatactactggaggtctatagtacattatgctacattgtgaccgatgggatctactagcgaacatgcagaacgcattttacattactctatccacaaccagcaaatacatggatttttctgcactggtgcaaaattctgctgcgcaatcttacagcaaaatctgcacaaagagcatatttcgaaaaccacagcttccctcatctaatcttgcccaaatcaaatcctacaagtcccaaatcatgtatcaatcatg

SEQ ID NO: 21584 - DNA, 379 bp, Glycine max
tagcttcttagtttcatatgatgcagatgagtgtgtagctacctcatgcactcctctaatgactatggcatcatttctggcactaaactgctgggagtcggaagccatcttctcaatcaagtttctggcttcagcaggagtcatgtctctaagggctccaccactggcagcatctatcatacttctctccatattactgagtccttcataaaaatattggagaagaagctactctgaaatctgatggtgagggcaacttgcacatagttttttaaatctctctcagtattcatataggctctctccactgagtagtctaatacctgagatatccttcctgatggtcgcggtcctggaagcacggaaattattttctaag

SEQ ID NO: 21585 - DNA, 426 bp, Glycine max
  unsure at all n locations
ntgatacacatgcagggtaagttataaaagtttttattttgcacctttggtttcttaactattgtatttatgcaattttggcacctcatattcaaattatgtgagttaggtcttcttgtattataagtgtgtgttttttctccttcgattagtcagtcataaatatttaatatattttgtcaacgtgatactagatgatcacatataaatctcatgagaattgatgaattacttgacatgtatattgttgtgacttaattacacttttggtctctttgttgttccaatatgaagtaccaaaagaacaaataagctctgttagtatatattagttattgaccagaggataaaccatttgtttgtgtagttataggatgattgtgcattacataatataattctataacaaacaatattcatattttt

SEQ ID NO: 21586 - DNA, 358 bp, Glycine max
agcttgtatcaaatgtgatatttccaagtctctattcctaaacatcttactcaataccttgaaataaatgcttccacatgactggagaagtcatgtaagacttacttcataggataggatttaatgtacatgtgatatttccaagttcattgacccaagacataaaaaatagctattaaatgcttaattatagaaatcgaaccaatttgatccggaccttgtgtcctaagtgtaggatgagaaatataatcaacctcgtttgatcatactggaatgactattaaatacatagttatacaaatcggatcaatttgtttgggacctagtgtcctaagtgattcgattaatgtgaatgata

SEQ ID NO: 21587 - DNA, 371 bp, Glycine max
tcctttaatgaacgcaagtggtttgggagtgtggtttatgacatgggtgacttgcaagtgaacgtgattggggaacggaagaaggtgcacgtgaacgatgtgggagagtggaaagggtttgtggagacaaagagggaatcgtgggatctgttgatggcacactttgttcaggattatgagtcatcacgagggcagagtagtgatattaagatgttggtttcaacacacaggtctgggactgctgctgatcaagtttctgcttttgctgcgcttgtgggggatcatccaattgccaatttgcgttctcttgatgctctttcgggtgagtatagttctcgtgttactgcgtgcgtgcgttgtttcttcctttc

SEQ ID NO: 21588 - DNA, 365 bp, Glycine max
agcttttgtaggtgaaatcaggtgcagccatttcccttagagtcctctcacggggtggaggttgtgccatgttcttagaatgtgcaaaatcagaatgctcaaaattataatgctcaagatcaggatgttcaaaatcaccaataacagaatacacatattcaccagtaatggaatgctcagaatgatcaaaaggtataaaatgatgcctaactaatatatgaaatgtcctatctatctcaggatcaaagggttgtaagtcagatggattgcctctagtcatacactacattcagcatgcacacaactagttgccttatcatgtaaataaaggtgtaagtttgaactacagctacccttaaatgata

SEQ ID NO: 21589 - DNA, 415 bp, Glycine max
tggaattcgaaaatttgagccacaattaatgagacacttactagaaaattgagttctttggaccaatctcaatgttttaaacctatcacaaaaatatacctttttcattaaattggtcttgttttactctagacaaaatttgcaacaactttttcgttggagtccttgtgaaatgaggtcaaattaaggcatatttgtggcatgcaagacgattgccttattttgcaaattaggtctagcagtgtgttttttccttaattttgagtctttatggtgatcttcctaaaatggtgtttacagtttattaaactagagaaaaaatgatttttaaccatgtatattagtaaaattacagaggttatcttcaaactttaaaggggaaggcaaaacagagtgattgctagaaggagctctt

SEQ ID NO: 21590 - DNA, 387 bp, Glycine max
  unsure at all n locations
agcttagccgaattcttatagaattgaagttggcttagctcatccttggccagcttagcggaatgaatcagcctaagatgaaggggttaggcgctaagcgcttgagactcatggcttagcgcatgaataatgatgcgcttagtgtgagacttgcgcttagcgaaaggagtatttttttataaaatattttctgagttatttttcagtcctttttccaagaaattgaaacccttatgtttaacattcaaagataggctaatatactcctatgtacagattatgcagcaagttcccaatgatctaatgcatgaaaacaaaaactacagaaattaaaactgggttgcctcccangaagcgcttctttaacgtcattagcttggacaattt

SEQ ID NO: 21591 - DNA, 430 bp, Glycine max
tcttattttcagcagatgaagatgaatccgtggccacatcattgacttctctaaggacaataacatcatttcttgcactgaattgttgggagttggaagccatcttctcaattagattcctagcctcagcaggagtcatatcaccaagagctccaccactggcagcatcaatcatactcctctccatgttgctaagtccctcatagaaatattgcagaaggagttgctcagaaatctggtggtgaggacagcttgcacacaatttcttgaatctttcccagtactcatacaagctctttccactaagttgcctgatgcctgaaatgtcttttctgatggcagtggtcctagatgcagggaagaatttctccaagaacacccttttaaggtcatcccaactggtaatggatctgggagcaaggtagtacaa

SEQ ID NO: 21592 - DNA, 381 bp, Glycine max
agctttaggctattctattgcttcagattgttgcacaaaagggcaaaggtctgtgtggtggtcggcagaggagaataaaccacaaagtctggcgacaggtgcagatttttttattcatggctagttgggttaccaggttaaccaagacatctagtttaccttcaagcttcttagtctcacctgatgaatttgtggctacttcatgcattcctctaatgacaatagcatcacttctggcactaaattgttgggagtttgaagccatcttctcgattaaatttctggcttcagcaggggtcatgtctccaagggctccaccactggcagcatctatcatacttctctccatgttgctgagtccttcataaaaatattggagaa

SEQ ID NO: 21593 - DNA, 430 bp, Glycine max
tggcctgaaacttgctaataatatgctgccacacagacctgtttttagagctgacccctacaggaattccaaggtaagaaaagggaaattccagttgactgcagttgagagaaaaagctgcctccctacaccagccttccgatttacccagacacccgaattggctcttattgtagtttatctttagaccagaaaccaattcaaagcatttcaggatacactgtaaaactctaacattatcattagcggcagccccagagaacaaggtggcgaatgcataatactgtatattaacttcctctattttctttcccacttgatagttgctgaagagatcttttgctactgctgatctcatcaacccggtaaggccttccactactatattgaatagcaaaggtgcaaggtgatcaccttgccttaagcctct

SEQ ID NO: 21594 - DNA, 388 bp, Glycine max
agcttctccttcctttttttatacatatttgaaagagggaagaacaaaaatgttcaaccctcctggtatctgagattcacttaaaattagtgagaaaaattgcttccgtgaagaaaatccaagccgaggcgcttccgtaacgatgccgtgggtgatttcgcgaagatttgcaaccgttcttcgtcattcttcgtgcgttcttcatcgttcttcagtcttcaaccggtaagctcctgaaatcgaacttttcaatacatcctatgtacccttagtggtcctcatttgattcacgtgcttttatttccatttcattcactttccgtactcccttgtgacgtgctttagtcattgattgaagtcattttctcgcctaataaaaaataaaata

SEQ ID NO: 21595 - DNA, 426 bp, Glycine max
tccatcagggaaactcgatattagccaagtaattatattggtgcggtggatactgatacatggggttgtaaggggtctgtggggagcttggccatgtgggtactgcagtcccgatgtgggcgtctctctcctttttctttgctccacctgccccaagcctcctattgctagaactcgtcaaagcagcataatcaaattttccccttaggcccacctcgatcctctcgcctgcaaacactagacctgcaaaactcaaaggcatgtatcccaccatcttctcatagtagtacacaggtaatgtgtctactatcattgttaccatttccctttacatgattggggggtactacttaacccaacaaatccctccatctctaggagtattctctgaaagattcctactcccttttacacatgtgtctgcag

SEQ ID NO: 21596 - DNA, 382 bp, Glycine max
agcttgttaaaacatatttaattaagtctcatgatgcacatttataagacactagaagaactattgtaattgaaaactagacatgtattgatgtaaatctaattatgtatgcatgtacatgttatatgatagatgtagcttcataatggaaaaacattttggtggttgatatgttgttcattttcttggtgtaagttgccactattataagaaaaagcggcacaaccactaaacagggaagcatcactttccaatagcatatggcagaaataaaaactccaacaatggaagttgcacaacttgagttgaagtgacctaaatgtgagtacgaaaggtgattgaggaaaggtgaaactcgtagccaaaaaagagattgcatcat

SEQ ID NO: 21597 - DNA, 395 bp, Glycine max
ctaacctcattgtctctcacagtctttagataagggatccttttcaatccttgagtccggactctcagccacttatgatagccgccgatgatcccattactgcttcccctaagctctctgtcctttcttcatgctgcatcccatgccttgcgaactacttggagtacccttgcgtagtagacactgaaaccccgtgcgatgaaaggcgtgatgctttcatctgatggcactcctctcatggggtaaccatgctgtcttatggcgaggacgggattataactaatacaaccgctgtgtcccaacaagggaacattaggacatccttcgcatgaagataaaatcctgattcttgcttccttctagcgagggaaccaattaactgacgcccctccatg

SEQ ID NO: 21598 - DNA, 387 bp, Glycine max
agcttgtttatgaaattgcgcatgcacttattttctgccctgagtcatgaatagttgattggatctaataaaaatatggctgatgacttgctcattcaggttgcagtttatgctttaatgaaagctgcacttgatttggagatattgctttcacatgaacggctaaatgaattttcccctgttaaaaagatgtaagcttttacccttttctcttgcatacttataacataattttgggacattgcttttcttatctatagtaacattgacatatatatgcaagatgtaacgagttaggcttttatcaaccctataattggaagaaatagttgtgcatcatattatattatatttactacttccacttgatccttacaagtaatgact

SEQ ID NO: 21599 - DNA, 398 bp, Glycine max
ttgaattgaaggcaaagaacgatcacacactctccctttctttttcatctattctttccgtgagtttcttcttaaaacccattacaaatttatctacatccaataaattcatagtttactgtcaaaactacttttgtttttatctctagaggatgttttttctctgctgaaatatgtgcatccaaactgttcttcccctttcataatcattgaaagctaaagcatcgtgattcattttatgcttggatttgcgctcttcttgtcctggttttcctatgcagctgttttacaatgctaattgtttgcgtaagtttgaatggcaagtgacgatgatgcagtatacattgcaatgatattacacgctcgggcaagaaacattattcataatgtgaggtgca

SEQ ID NO: 21600 - DNA, 374 bp, Glycine max
ttgcatgcaagctttgatgcaacatatggagaggttaatgaaacaacgagatgatgcgctccatgagaggctggatcaaatggagaatagagatcatactgaagaacaaaggacgagaagagggaatgatggtgttcctagacaaaaccgaattgatggtattaaactcaacattcctccatttaaaggaaagaatgatccggaggcctacttggagtgggagatgaaaatagagcatgttttctcatgccacagctatgacgaggaccagaacgtgaagcttgccgccacggagttttccgactatgctcttgtgtggcggaacaagctacaaatagagagagcaagaatgaagagccttggttgatcatgga

SEQ ID NO: 21601 - DNA, 402 bp, Glycine max
  unsure at all n locations
tttcgattcattctatgtacccgtagtggtccacnatttgtttcgtgcatgactattctcgttttgtttactttttataccccctgttgacgtgcttaagccattttacttaagtcctttctcgcttaacttaaaaataaaataaatttccaccgaacgtttgaattgtattatccattaacttcggttaaaataaattccgaccgttcggtcgtgccgtaaccacgttggaaatcaaaaagaggtaaaaaaaataatataataataatcaaaaaacatcctttagtaaaataaagcggaaaatcaatcggacattttttctttgggatttctcattcttaatcgaattgattaataactaaagtgaaactaaggctaaaatcaactcgcctagtcaagctc

SEQ ID NO: 21602 - DNA, 368 bp, Glycine max
  unsure at all n locations
agctttaacctcattgtctctcacagtctttagattggggagccaatccaatccttgtgtccggactctcatccacttatgatagcgaccgatgatcccattactgcttcccctaagctctctgtcctttcttcatgccgcatcccgtgccttgcgaactccttggagtaccttagcattggggtcactgaaaccccgtgtaatgaaaggcgtgatgctttcgtctaatggcgctcctcgtatggggtagccaagctgtcttatggcgaggacgggattataatgaatacaaccccatgttcccatccagggaacattnggatatccttcgcatgaagatacaatcctgattcttccttcttctagcg

SEQ ID NO: 21603 - DNA, 429 bp, Glycine max
  unsure at all n locations
tgcttgtggagcttctatggaggctggatctttgagtttcaatgaggtcctttaatggtggttttccaccatggagatgcagcggaagacaaaggagaagaggggagaggaggcgccatccactagggaataagccatggaagaaggagcttcaccaccaagatgagccttggataagaagcttggaaggatgcttcaatggaggaaaagaaagagggagagaaagagagaggggggagcacgaaattgaaggaataaaggagggagagaagtggaactttgaaagatgtctcacaagactctcattcatcatagttacaacaagtgttacacatgcttctatttatagactangtagcttccttgagaagctntcttgagaaaacttccttgagaagcttctttgagaaaacttccttaagaagctag

SEQ ID NO: 21604 - DNA, 371 bp, Glycine max
agctatagccaattcaaacgacaataactttttactcggatgtctgattgagactcgtaatataacgagatgctcgaagttaaatgtttaagctctgagccaattcaaacgacaataactttttactcggatgtctgattgagtcctgtcatatatcgagacactcgaaattgaatgttgaagctctgagccaattcaaacgacaataactttttactcggatgtgtgattgagtcccgtcatatatcgagacgctcaaaattgaatgttgaagctctgagccaattcaaacgacaataactttttactcggatgtctgattgagtcttgtaatatatcgagacgctcgaaattgaatgttgaacctctga

SEQ ID NO: 21605 - DNA, 425 bp, Glycine max
taaacattcaacttcgagcgtctcgatatatttcgattctcaatcaaacatccgagaaaaaagttattgtcgtttgaatttgctcagaggttcaacattcaattttgagcgtctcgatatatgacgggactcaatcagacatccgagtagaaagttattgtcgtttgaattagctcagagcttcaacattcaatttcgagcgtctcgatatgtgacgggactgaatcagacatccgagtacaaagttattgtcgtttgaatttgctcagaggttcaacattcaatttcgagcgtctcgttatatcacgggactcaatcagacatccgagtataaagttattgtcgtttgaattgtctcagaccttcaacattcaattttgagcgtctcgatatatgacgggactcaatcttacatccgagtaaaa

SEQ ID NO: 21606 - DNA, 377 bp, Glycine max
  unsure at all n locations
agcttgacaaagaaatataaattgtttgagctagatgtccatctgcgcaaaaattacactatgcattgagtcccaatgtaatttgtctatgtgtgagtgaactctctacaaggttcactcttagtacacatatcccaagggagtttagcacactaatctagaaagttatcatactaatctagaagatcagaataagatttaccagttttagcaaaaacagtttttatcattttttggaaaaatttgactntatccttttatagttagttttggaaaagtgtaagaagtcatataaggcatggctgagcttgtggagagcacctcaagggatatccaagctatcaattagtcatattaatggttattcaaagtgctta

SEQ ID NO: 21607 - DNA, 424 bp, Glycine max
  unsure at all n locations
ttntgatgggtttcaggcctctgttggaggtgtcgtttcgcggatctatgtcaaattcactgcccatgttggcttggtagacgattagggctcggatttgtgacccttcgtccacgtttatgacttgagttccttcaactgctgtggggtgaggcatggcaggctcccggatgggaggatacggtgctaccttcaggctctctatatagaattatcgtgcttgcttttggttagccttgacagttacaatctcccttgtcagtgtagggaatttcattttcaaatggggtgtggagactatggcttcaagcttgtcaagtgtctttctgttgattaaggcaaagtatgatgtgtctgcgttaaccagtagatatctgaagctcctagaaaacttaccctgatcgaaggtggtcatcaagtccac

SEQ ID NO: 21608 - DNA, 376 bp, Glycine max
  unsure at all n locations
ttgcttgtagaatggctagacatgatacatgtcagggtttggtttggctcaaggataaaagggatgccccacattatttccatgacacaaatgcaaaaatgatgatttggaaattttatgcaaaactggtcatgcatgcacctatgtggacactcaagtgtcaaatttttatggtcatgtgatgctagggctcangattcatttcctctattttaaatcaacccaatgtttccaaaatatgttcttttatcaatttgtgcattcatccgagtccatttcgggcgtccggggaaaacttcacagcattcacccttcaggtgtatacacattcttttcaaaaactagttatgatcaatgaattcttttcaaagaaaag

SEQ ID NO: 21609 - DNA, 427 bp, Glycine max
  unsure at all n locations
tctaaactttgtacaagaatgaagctctgatacctcttgttagacaagtggcctcagatatcttaagaagggggggttgaattaagatattccaaactgtttcccctaattaaaaatctatttttctttttacttaagttatgaattcccttaatgacaatcttcttaaatattaattcaaatgaagcaacttgaatatgaatataaagcaataataaataaaggagattaagggaagagaaaatgcaaactcagttttatactggttcggccacacccttgtgcctacgtccagtccccaagcaacccgcttgagagttacactaactngtaaattccttttacaagttctaaacacacaaggacaacccttcctttgtgtttagagatcttttacaacaagagactcacagtctcttaatccctt

SEQ ID NO: 21610 - DNA, 342 bp, Glycine max
agcttgagatgaggaagtgttgaagggtgaaacttcctgcttttattgttgaccacagagtggtacctggagatatgtcgcgggggtcaggagaccttggggacgtcaggtggggtgctattgcccaaaaccaagcttgaccaatcccgacccaacccgggcatagtcggtcagtgagaacctgtgatgtacctaatcatgcgagctcctggcagtcaacagataaaaggaaaacaagaccacaaagcaaggaggcttgtggtggctggccagctgtgaattctgtataatatgtggattgtggcctctggtaatcgattactgagggtgggtaatcgatta

SEQ ID NO: 21611 - DNA, 417 bp, Glycine max
  unsure at all n locations
tgcttctacagccttaattgtcaaattaattatgtatttttatcattagggcctacttgactaattttgtgtttttaatttaattttaggagaattttaagcaattgggcttgaatctggaattgggcttgaacttgaagagagcagacaattttattttatcaaatcttatcttatctagattttatttcatccaatcttatcttatcttgtccagattttatttcatccaatcttatcttatcttgtccagattttattttatttcgtttatgggcttggacttaaaacagatttgtaagctttggggctgagaacctatataacagcaccaaggttntagttttagggagttttcgaagaggagaataattctaggattttagaattccagttgttactgttcatgcgcactgt

SEQ ID NO: 21612 - DNA, 375 bp, Glycine max
ttcatgcaagcttatgcaacctcgataatgaaaaaagtagtgttttttttgtttctatgacaaaagccataaatactacatatgaaatgtggattattatatctatctatcttttaaaaaatttaaattatttaattaaatttgattttagaaggtactatcgaaataaaatagttccgggtagttagcattatcttggcaaatcatcaatgatgatgctttttatgtcactctcataaacgaaccactttggctacttggctacttggccacttagccaatagccatcactgaattcaaaagattgatgtcagcaatcgtacagctttgaaatgcatatgctcgtcttaatcttaaaactgaatacaaagcctc

SEQ ID NO: 21613 - DNA, 394 bp, Glycine max
tcgaggaatcccatgtattttaaccaccatgtcgactatcaaggatgccaccatatgagcagtgtgagacgttggtaacattcccagatgaatccccttcgaaaaacggtccaccaccacgagaattgtggtttttcgtgatacgccggcaggccgacaatgaaatctaacgagaggtcctcccaaggtcgatggggcaccggtaaggggcataatagtcctgcgacgcgttgtgtctggtacttagtgacctgacaatccatgcaatttgccacaaattgcttgacatcttctctgagaccggtccaagtgaagttctctgaaattcgagctaatgtctttgtgattccggcgtgaccccctgttggagtcgtgtggtattcctgaagtaatg

SEQ ID NO: 21614 - DNA, 361 bp, Glycine max
agctttggagaaatttaaatggtcattacttttcactcggacatccgattcaggcgtataatatatcgagacgctcaaaattgaacagtggaagctattgagcaattcaaatggtcataactgttcactcggatgtccgattcaggcacataatatatcgagacgcccgaaattgaacaacggaagcttttgagaaattcaaatggtcatttctttacactcggaggtccgatcaggcgcatcacatatagagacgctcgaaattgaacaacggaagctcttgagaaattcaaatgggcattacttttcacttggaggtgcgaattatgcgtataatatatcgagacgctcgaaattgata

SEQ ID NO: 21615 - DNA, 431 bp, Glycine max
tcaacctagaggagacggaccattccaagtgttggagaagatcaacgacaatgcctacaagattgacttgcctagtgagtataatgtaagtgccactttcaatgtgtctggtctatctctttttgatgcagatggaggagccttggatttgaggacaaatccttttcaagaaggagggagtgatgaggacatttgataaaatttggtgagagtttctctctgggttccttgttgaaccaattatcagacttatcaaggtaatccttgtggcgtctacccagacttatcttccttcattggaagtggcgtctacccggacttatcttccttcaccggaagtggcgtctacccagacttatcttccttcactggaagtggcgtctaccctgacttatcttccttcactggaagtggcgtcatccaaatcttcg

SEQ ID NO: 21616 - DNA, 386 bp, Glycine max
  unsure at all n locations
agcttgaaactggactgcaagtcatgatccagcaagcaaataaatactgcaaaatcattcatatatgcgcagtgataaaaatgaacatcagatacgcttatcacagagtcgttcccaagaagttactggtctgactttatgtttgtgtttttccccggataatttctgattgcagcagaaacacaacaaagataccaacggaattaatcacatcagaatcacctctacacaaatatataatcccagcagaaacaaaatccgtagctgttatattgtttgagcccctaaacaagttagcttaaagtagtttaaatattttgctggctttatttgtgtaattntaatttaattctacatggcactgtggcatttgatttctcccttgc

SEQ ID NO: 21617 - DNA, 430 bp, Glycine max
  unsure at all n locations
ntaacaagcaatagatacataatcaagtcatagcagttgtgtatgatatgacatttaatataaaactgattttgtgtatatgccattatgaataataactttctgaagacaatcaaacaaaaagcaactctgaatgtaaactagagaaactagagagtttaggcattaccatggaaggaagcgcatcatgatgtcaccatccccagttgcacaacatgcaccaacttcatcaatggcatatgctgaggatccagcaatgggaccatctcctactctgtaatcaatgaaaaagattcaaagaaaacctaattataaaatgcatcaatagaacatacaaaggatgattgatagatgctgcattaacaatgtgtggtgtatatctgagcatatgtacttgggaattgataaggcaatttgtgaacggctaaat

SEQ ID NO: 21618 - DNA, 389 bp, Glycine max
agcttttgttttcaatttcgaccatctttatatattaccagactcatccggacttccgtatataaacttattgtcaattaaattttctcagagctttggatcaaaattttgagcgtctcgatatattacgggattcattcagacatccgagtaaaaaattattgtcgttagaatttgatacgagcttccgttttcaatttggagcatctctcgctaaattgcgataggctatcgggcatccgagaaaaaagttattgacgtttcatatttctaagagttgacgctttcaatttggagcgtctcaatatattacgggactcaaccggacatccgagtataaaggtattgtcatttcaatttgctcagagcttctagtctcaaatgtgagc

SEQ ID NO: 21619 - DNA, 403 bp, Glycine max
  unsure at all n locations
ntgagcaaattgaaacgacaataactttatacacggatgtcttgttgatttccgtaatatatcgagatgctcaaaattgagactagaagctctgagcaaatttaaatgacaataactttatacacagatatccggttgagtcccgtaagatatcgagacgctcaaaatttagatccgaagctctgagaaaattgaattgacaataactttatacacggatgtccggatgagtcctgtaatatatcgagacgctgcaaattgaaaacggaagctcgtaggaaattcaaacgacaataactctttactcggatgtgcgattgaatcgggtaatatatcgagacgatctaaattgagactagaagctctgagcacatggagatgacaataactttatacacggatg

SEQ ID NO: 21620 - DNA, 383 bp, Glycine max
  unsure at all n locations
agcttgcttgtggggcttctatggaggctggatctttgaacttgaatggggtcctttaatggtgactttccaccatggagatgcatcggaagacaaaggaaaggacgtgggaggaggcaccatccattaaggaataagccatggaagaaggagcttgaccaccaagataagccttggataacaagcttggagaggatgcttcaatggaggataagaaagagggagagaaagagggaggggggagcacaaaattgaaggaagaaaaagggagagaagttgaactttgagttgtgtctcacaagactctcattcatccaagttacaacaagtgttacacatgcttgtatttatagactangtagcttccttgagaagattcttga

SEQ ID NO: 21621 - DNA, 428 bp, Glycine max
tctaacctgcgaaattcttttcaagcgttgttggctctggattatgaagagacagtgcaaggattcatagataaattcgagaagtgagttgaaatggtgaaggggttggaggagccatttctgatgaaagtgttcctcaaggggttaaaggaagagattagcactgaggtaaagcttcatgaaccaaagaacttgattaaagcaatggttaaggctcatagagtggaggataagaacagagttttagggaagttacccttgagtaatagccaggggtataatctgcagaaacctagttattccggtcaaaaatttgtaagggagtgacgaccaacaaatagtaaggtagttgatcctactaatgctgctaaaacaagatccgatggatggcaaggtagaagaaccttccataatttgtcacccgcgga

SEQ ID NO: 21622 - DNA, 386 bp, Glycine max
agcttctacttatgtggtagggcgggcttccttcactttcttgtctccaacgcgagctctaaccactgttcttccttcccacgatgcttcttttcatgtccgcctgagtgggcttatagcctaagccatacttcccacgatttccttgggtttttatcaagctagttatgtcgccgttgtctttgcctaaacccatcccgggttcataaccgttccccaacataactcgggccatcattaccgctgcatcggacagacaaggctgcccaaagagggagtccacggaggaaatgctgaccacctcaaaagactggaaagcagtttctaacgattcttctgtggcttccacataaggcatggaggatgggcagcttaccaagatatct

SEQ ID NO: 21623 - DNA, 360 bp, Glycine max
  unsure at all n locations
ttctcattacatcttgggacaccttacctaaacaagaccaacatgctcttgattcctaacgtgtagatgaaacaatcattcagatgcttcctccccgacagagaatggtttatccttggggcataatcatttggaaaagtagagaaactgtatatgctcatacacctttctctactcccttagatttactatagttgatgggtcttctatgtacatccaatgttgttcttcattgngatcactctaagtctgacgtgtgaaaatgcaagtaacccactaaaagggggagaggggttgaataatgtgtatatcanagataacaactttttgcgatacaagaatagtatggataatacaaag

SEQ ID NO: 21624 - DNA, 326 bp, Glycine max
agcttgtgcaaatcaaatcactcctacattttatctctagcatgcattgtatgttagtctcgtcctttgtcacgggaagccggaaggtccatatcaccttcttaattgtacacatggggcactgcgcccccaaatgcgcgagtaagaagagataattttccgggctctcgtgtccgtaaaatgcattcatatcatgcatcgcataagcatctcttcataacatcataatggacatatcctgcatttgtccgttatcatattccagcctcaccttttgcatgagtcatggcatcatcatgcatatgcgtccaacaaactttttgatc

SEQ ID NO: 21625 - DNA, 427 bp, Glycine max
tgtctcagcgtctatgcgagacagagaccaacatgtttgctatcatcgccaagtacgaagaagagttaggtctagccacggcccacgagcatagaatcgcggatgagtatgctcaagtatatgcggaaaaagaggctagaggaagggtgatcgactctttacaccaagaggcaaccatgtggatggagcggtttgctcttaccttgaacgggagtcaagaacttccccgattgttagccaaggccaaggcgatggcagacacctactccacccccgaagagattcacgggcttctcggctattgtcagcatatgatagacttaatggcccacataattagaaatcgttaggaaacttgtatggtctctcagaccttgactagatatgacttcctttctgaaataaaatgagttggtcccaggtttct

SEQ ID NO: 21626 - DNA, 195 bp, Glycine max
  unsure at all n locations
acctgtttgcatgcatgcttgcatggaagtttgcgatcccnggggatatgacagtggggatcgttgtaggcagaagcaccaaccgcggcgttgactacttgacgcaaatgagacgacgcgttacctgagggatgcacgttcactttaggccacgcacaagcagaagctagaatagggcaaatgcgcctcattatc

SEQ ID NO: 21627 - DNA, 394 bp, Glycine max
  unsure at all n locations
tgtaagttaggtttcaaggctgggtgtagaccattcttttggttttttatggnncgattttaaagggttattatgggggacaactactagctgcagttggacaagatgcaaacaaccataactactgtattgcttatgcaattgtggatgctgagaataaagacaactggagatgatttctcacactactgaggcaagatttgggagactgtaggcagcatgggtggaatcttatgagtgacatgcagaaggcacgtgccctagttcattgtactattatgagtctttatatgttctttgaaggaccatactgacagtaagtgaaatctttcaaggactaatcgttgctgttcatgaagtattcccaaatgcacctcatacgtactgagctatg

SEQ ID NO: 21628 - DNA, 373 bp, Glycine max
  unsure at all n locations
agcttctcggctcatgctgggaacgcctctagttcaacacccgtgcagcctanagcacccacccagagggaagctccccaagttccaactccgaacatgactcgaccggccggtaattccaacacgacaaggaacttccctccgaggccattgccggaattcaccccgctcccaatgacgtacgaagatcttctaccatccctcatcgccaatcatttggccgtggtaactcccggaagggtcctcgaaccccctttcccgaagtggtatgaccctaatgcaacttgcaagtaccatgggggtgtcccggngcattctgtcgaanaatgcttggcccttaaatacaagggtccaacattaatggatgccggat

SEQ ID NO: 21629 - DNA, 419 bp, Glycine max
ttgacttgagtcatcaagagattataaatatgtgactttggcatgaatttaattaataatttatctttcaatcttttttcatcatctctcaacatctttgaactctttctacagaattttctgattcatttctcttcatctttcttaaagtttttgttcaatactttttctttgaagaaaagttctttgatcaaaaacttgtgttattcatctttttcattctcttctccctttgccaaaagaacagaaggactaaccgcctaaattcttttgtgtctctcttctcccttttccaaaagaatagaaggactaaccacctgaattcttttgtgtctctcttctcccttacaaaagattcacaggactaaccgcctaagaattcttttgattcttccctttcccttaagcaaaagatttca

SEQ ID NO: 21630 - DNA, 334 bp, Glycine max
agctttgctgatttttttttcatccgcgacagaatcgaactgggtataagaagaggcaaatttgataatgctgattgcatgaatgggaagcctgtggcatatggagagaatgagaagaaggaggaacccatgctatgactatcattcccacatggccaaatttcccaccatatcagcaataccgatactcagccaatattaacccttctcattacccaccaccctatcagccaagaacacccaatcgtccacaaaggccacccctaaatcagccactaagcctgcctgacacacatctaataccaaacgccacctttaacacaaaccataacac

SEQ ID NO: 21631 - DNA, 423 bp, Glycine max
  unsure at all n locations
tttcgcaaagcttacggtaaaatctgggatctagccttggtattagtcttcacataggccattgcctccctcacccagtattatgatcagccgtagaggtgcttcacctttggggacttctagctatcacccatggaggaagaatttgaagagatcctaggatgccctctaggggggaggaaaccatacctcttcacagggttctatcccttattagctagaatttccaagatagtccaaatctcagcgcaggaattagagcacaggaagcaagtcgaaaatggggtggttggaataccgagaaaatatttggaggcaaaagcaagaatcttggcaggtaaaggcgagtgggccccgttcatagatattctcgcactgttgattntcggaggagtcctctntctgaatgtggatgggttggtg

SEQ ID NO: 21632 - DNA, 228 bp, Glycine max
tatcttgcatgtggaatttctaaagccccactccatcataaagagtagtacctgacatcttgcacaaacgaatttaacgttacttgacaattatagctgctgtgtgaataccttacccactcaagagtatgacacaatgatggctgctctctaatgaaacactcttgccttttaccactctaattgcccttgagttcttatgcaattcacgagagtatggacacatca

SEQ ID NO: 21633 - DNA, 425 bp, Glycine max
  unsure at all n locations
ntacagcagattntagtaatgacccactaacctagttttaaaataacttaatgccattaacctagggaattaaaaaaaacttaatggctgagtgtaactgaaattgtggcaaccaaaagtcacccccaacagccaacaagtcagccaccatttggtctcccaaaaggctgatgcctaggttgccaattgggcccttattacaacttgaactaaacctaactaaagcccttttagttgattaacccaaaacatatttttggtcagccaactttacaaggattgggccattatttagacaaactaaacactctaaaattgagacaaagtggtgtcatttagtcctcctccatttgggccatgatacaactcacaaccttggactcttctccttgaaacttgggcttgtattcaaatagtatggacag

SEQ ID NO: 21634 - DNA, 366 bp, Glycine max
  unsure at all n locations
agtctttccaaccaaatttattaatacattctcaattgataaaagcttattgaacaagtgctgagttaaactattttacccaaatgtgcttagtcttttagttgtggttttcactttcactttagcacacacacaaaaagaagcaagaataggccaataatgtctcattatcttgttcaattcgtgcaataagaggttaaattcatcttaagatgcaaatctaacctcaggtagcatgactttgtcgacatatatcatatatcaacagattcaattacagtggaaattttcaggcaatattntatgatattaaatntatggtcttgcctgaactacaaatattgtcccatctttaaccactctttc

SEQ ID NO: 21635 - DNA, 422 bp, Glycine max
taaaatttgatatctaacaagcttcatacttaaaactttttttatctattaaaccaacatttaatcatttccttagaattacaagtaaaaaccctaatagaaaaactctgtaacacactatattccaccaggactcaattatcgaataataattaaataatatctgcaaaataagtttaaaattataaaaataattattaacaaaaagcatctaaagttaatacaaataaaataattataattgaccaatgccagtgttctttgttttcttgtttagcaagaaaaaatgataggatgggttatttttcaggaagcatagtccaacttacgttaagccagtccctgatatatcaaattccaaatgtatgcaagaacggtcagactcgggtttgtgaagctccctttgtacagcaacattcacc

SEQ ID NO: 21636 - DNA, 363 bp, Glycine max
  unsure at all n locations
agcttgcttaagcatggcatcgcttaaacgagctaagtcaatgagtagctatgggattattggaggtactcgcttaagcgtcatattttgtgcgcttaagtgaggagagtccgcaactgagaaatttaggactagtggacctcgcttaagtgagcttttactcatgcttaagcgagctaggtagtcacgttaggcccaagcccacatcaaaatataaaaactagggcgccataaatgaggggattcagagcgttttggaaaacaactttctctgtgagagagaaccatttttagggctcttagctntaaatctttatatacnttttatgtttgggtttgattattataatcaagcaactaatc

SEQ ID NO: 21637 - DNA, 418 bp, Glycine max
ttgttgaatctccatgggatggttcaggttatgcctctctctcacactgttgaatgtgagagagttaattgaagggtgtcatcggagttctaataacattatattgggggtttgtgaatttgagttgatggggttacgaaaatttggtgatagtattttgggattttaggtgtgactgaaatgatgatttggtgttgcagttgcagggaagggtgtgggagtgagtgtgtgagagagaggtttgattcctttgcttttagaaaatctgcccaattggaaaggggttaaagggaaagttgaggactacattgagcactacattagcctgtcaatataactaatgatggttaagaataatgtttgtttgtttttttttttaacttataaaattaaactacattagcctgacaatagacaa

SEQ ID NO: 21638 - DNA, 283 bp, Glycine max
ctctttaaccaacggttgatggaccatttcaagaccttgaaagaatcacatgacgatgcttacaaagctgatcggaccgggctgaataatgctattttcacctaaagtgcctatgatttaactgtggttgatacatacggtgtatcccactcgcggacagatccttattaagagggagagagtgaagaatacttgttcatgagcgcgggcagagagccacttgatcgactgatgcgaaccatgactcaggctacatcaatgtgtgcccatgtatcttatatac

SEQ ID NO: 21639 - DNA, 388 bp, Glycine max
tctggaggaagcctcttaatgaagcttctcgagaattctacttgcagcttttctcagcaaaatcgctgcccatccttcgtttaccgagggatcttctcgaaatccggatagcaacttcacaatacactcgatcatgatctgaccgttgggatctttgagaagatgtctggagtgtgctaaatgcttccgataccgagagcatctcttattcaagcatgcctactctgtgctttcgagtagcttaagaataacggaactacgccttcgttctttgttgccatgccattcctgaagtaacgataagatggtccattatccacgaacgccattacacctcacgaaccgtcggtgcttgacacatcgaaaggaacccgtctgccgtagcgga

SEQ ID NO: 21640 - DNA, 384 bp, Glycine max
agcttttcttggtgggttgatgtactctatcacataggatagcatgatcactaacagacatattttcaatcaattcagtttcctcttcaggggttttcagctttatcttccctcctgctgaagcatctaacaactgcttggtttgcggtctcagcccatctataaacatgttcaattgaattggctcaaagaatccatgagtgggagtctttcttaacaaaccccgaaatctctccaatgcttcactcaatgactcatcagggaactggtggaatgatgaaataacaacattcccttctgcagtctttgactcgaggaagtatttcttcataaatttctcaacaacttcctcccatgtcttaagactgttgcctttgaatgaat

SEQ ID NO: 21641 - DNA, 426 bp, Glycine max
ttgtgtaaccgattacattgatttggtaatcgattattagtgattgtttctgaataaaatcaaaagatgtaactcttcaaatagtttttgactttttcaaattggtttttaagtttttctaaaagtcataactcttctaatggttgtcttgaccagacatgaagagtctataaaagcaaggctttgtttttcatttcaagtatcttgaacacttattcatacaatcctttacaagccttgaatctctttgaacttcttcttcttctttgtaccaaaagctttccaaagttttctggttttctaaaccttgaaaacttgtgctattcatcttttcattcccttctccctctgccaaaaagaattcgctaaggactaaccgcctgaattctttctgtgtctctcttatcccttttccaaaagaacaaa

SEQ ID NO: 21642 - DNA, 368 bp, Glycine max
cagcatcttttgtttcacttagcatcgccatcctagctatatgcttgtgtcgctgcatatcatcggatgccttatcacaagcgccaaattagtgccctcaggtttcgagagttcaagcctgttaaatctttggacttgccatcactatcaagctgacatttacttatgctgacacaagctgagccttcttgcttagacgaatccgacgaagagttatcactattagggggccgcaatggatgggaaacagaacgttctacataacacctttccctatgagagaaaaccgtgacctgcctcttatattataattctgatatacattctacgttaggctaagatcttctaattaatgcactattatcctt

SEQ ID NO: 21643 - DNA, 329 bp, Glycine max
ctgtgcctaaactacatgtgagaactcctcttgagtgcatgccttggatttgagtaacataatatgcttaggattatattacaagcagaactgaatggatgatatattgaaccactgacaagtcttttacactgatctaatcatgcgttagacacatattgtaaaatgagatcgactatgataacaactactggaatactgtgataagaacatgatgtaatgggtagatagaaaagccgtagactgacaaatgatcaacattgaactgaacttaattcctggcttagagggcatgtggtgatgattcattcatctatgcaagggccata

SEQ ID NO: 21644 - DNA, 367 bp, Glycine max
agcttaagcctgaacgttatgcgacatcttattcgtggctaagcgggatctattgtcgccaagcgcaattccttacggccttaattgaggtccatgacgctaagcgccagtcatggcagctaagcgagattctttgcagcaatatgagcgctaagcgagtacctctcagctaagcgcgtgctcctctgtacttaagatgcatcattttagctacattggctagggccaggcttagcgagagttgcagcttttctaatctgcaagtctcgctaagcggacgtactcttgtgctatgccgagtttctgttcaaaaaaaaaattcaaatttgaaacgtcggctaagcgcacgtgttcgctaagtgagcct

SEQ ID NO: 21645 - DNA, 428 bp, Glycine max
  unsure at all n locations
ntagtggaataaaatgagaaatctatggtgtctaagatactttcatgaagaggtctggaaatagatgcaaccttcatttttttgcgtcttcggctagaagcaccagcctatttctcccagaaattctattagaaataaagattgacaataaagaagtagaacaaaatgacaaggtagatattaatacctaagttaaaggaagattatggacaaaggattttttagcagccacatatttgttagctctcttgaaagttaaagtttgctctggagaagggtcctcttctatattttccaagtcaatcgtctcaactcgatgtttagccatcaaggaaaatgttagtagaataacaacgggtaaataagataccaaaagataaagctctacagaggaacttgtttgaggagttggagaattactggtgatt

SEQ ID NO: 21646 - DNA, 371 bp, Glycine max
agcttatttttgacaaaattgaatttctttttcttatctttgtagggactactcacaaaatccatttacatttctttagtgtcctataggccatgcacaaggtagataagtcaaggaaacacataaatccaaaaataagccacaattgtcaattaagctcaatcatttgcctaagaccaaaactaaattaaagtgagaaaataagagacaaaaagaggtctaatcagataagaagaatagaaaaatactaaactacagatgctcaatctctcccttcctttccctctcaaatcgttcgatatccaccgagttaacttagtttgttaaggtactctccctctatacctcgattacacattttcttttgtctg

SEQ ID NO: 21647 - DNA, 393 bp, Glycine max
  unsure at all n locations
tgggtgatgttgcgcgtactgatgggtaccatgaggtgttttctggggtttgacccatgcgggtgttgaagagatggcatgggcatctccttccttcctttttgcccctgttgccccgattcttttggcgtttacgtttgtggaggaaacgtaatcaaactttcctctcttcaatccaacctcgattctttccctggcaaacaccagatccgcaaagctggacggcatgtaacccactagcttctcatagtagaacactggcagagtgtctaccatcatggtgatcatctctctctcaaccatgggaggagctacttgtgccgccaaatccctccatcgctgcgcatattctttaaagggttcaccctctntcttgaacatattctgcagctg

SEQ ID NO: 21648 - DNA, 320 bp, Glycine max
agcttattactcctccatttggatgtatcttgctgctcatgctcgaagctcgtccaagtccttgggttgcttctggcaaaggttgtcggcgaatggccccattttgagtgctatgatcatagaatgcaatccaacactagggtcaaggtctttcattttaagagagatggtgacgtacctctccgtgaaggatgataatgactaatcattagcttggtgtaggttgaccaaagcagtggatgttgtgtggtgagggctgctggttgcatattgcgcttcaaaatgttagactaatgaggagaaggagttgtcgcaacatg

SEQ ID NO: 21649 - DNA, 426 bp, Glycine max
taccatgtgtatgaatgaattattatttgcatttaatttgagctgaaagtatgtatgattgattgaaccttgagcctgcacaatttatctcctactaccttatcttaggttgtaggagagcgtcattcatagaaagaatcttggttcaaggcaaatttgtcccaaatttgggggagttactgggtgaaagtgtgaaatggtaagaaaatatcagcacacagttcaaaaaaaactaattataaaataaaagtgtgtgtgtgtgctgccatttaataaaaagaaagttgagtgtaaaaagggggcaagtaatacggttgggaataaaaataaaaaggttgatctatggatgaatgctctcctagaatctaagctactgcgtcctagaaaagccatgaattatttgcagcctagcctcattacaagcct

SEQ ID NO: 21650 - DNA, 324 bp, Glycine max
agctttaacctcattgtctctcacagtctttagattcgggagccaatccaatccttgtgtccggactctcatccacttatgatagcgaccgatgatcccattactgcttcccctaagctctctgtcctttcttcatgccgcatcccgtgccttgcgaactccttggagtacctttgcattggggtcactgaaaccccgtgtaatgaaaggcgtgatgctttcgtctaatggcgctcctctcatggggtagccaagctgtcttatggcgaggacgggattataattaatacaaccccatgttcccatccagggaacatttggata

SEQ ID NO: 21651 - DNA, 422 bp, Glycine max
tgcttgtggagcttctatggaggctggatctttgagcttcaatgaggtcctttaatggtggttttccaccatggagatgcaacggaagacaaaggagaagaggggagaggaggcgccatccactacggaataagccatggaagaaggagcttcaccaccaagatgagccttggataagaagcttggaaggatgcttcaatggaggaaaagaaagagggagagaaagagagaggggggagcacgaaattgaaggaataaaggagggagagaagtggaactttgaaagatgtctcacaagactctcattcatcaaagtgacaacaagtgttacacatgcttctatttatagactatgtagcttccttgagaagctatcttgagaaaacttccttgagaagcttctttgagaaaacttccttaag

SEQ ID NO: 21652 - DNA, 67 bp, Glycine max
  unsure at all n locations
tttgtcatgcaagcttttctaacactttctctcaatatgaaatccacatnngaaccnnnactcatcc

SEQ ID NO: 21653 - DNA, 438 bp, Glycine max
  unsure at all n locations
gacctatgaaactcagcttatatttgggaaaccaaggtggtaggctaatgcttttcacacttgttctttgtgcttcttgataagtcctatttctttacaagcaaaccattagtagaaaaagtctaatagactaaaaatctacttcttaaaaatttgttgtcattaaaacattaatttcataaatattattatgttgagatcatgagatttacattcatatgagtttttggtgagttgtttacaagaattcaaggtgttggaatatcttgctatgcatattgaattatctgtgggttcatgagtgtgatgaacgtataaatggtgaatctatgatgttataacctctgttgagattagtgaatgaatntgtgatgacatatggtattaatttgaatgatcataacatacatgcattgatgaatgacattatatgtgagt

SEQ ID NO: 21654 - DNA, 376 bp, Glycine max
agctttgcagatttggtcttcgccagtgaaaggatcaatgtgggtccgaaaagaggcaaatttgatcatcctactaggacgactgagaaaactggggcaaataaagagggtgaggatgaaggagaaacccatgctgtgattgccattcctgtacggccaagtttcccaccaaacccaacaatgtcattactcagtcaataacaaacctcctccttacccaccacccagttatgcacaaaggccatccctaaatcaaccactaagcctgtctatcgcacttccaatgacgaacaccacctttagcacataccaaaatcaccaaccaagaagtgaatcttgcagcgagaaagcctgtagaattcaccccaattccagt

SEQ ID NO: 21655 - DNA, 426 bp, Glycine max
ttgagccaaaatcctgactcaccataaaccttgacctgtgtgataatgccaatccttaccctcggaagcaaaaaaaggaaagaaggaaaggaaatttccaatcaaagagaaagcaaaaaaggaaggaaaggaaattcccaatcaaagagaaagcaaaaaaggaaggaaaggaaattcccaatcaaagagtgggagaaagagaaaaaagaaaagaaaggaaattcccaatcaaagagtgggagaaagaaaaaagaaaagaaagaaaattcccaaccaaagaatgggagaaagtaaaaaagaaggaagctcctggtcaaagaaaccagaagaaatgtgccgagaggtccttggaccagacgatatctgaacaatacagaattgcaccaaatgaacaaaagaaagataaggaaaccatgacctataagt

SEQ ID NO: 21656 - DNA, 381 bp, Glycine max
tagcttgattaagaggtcttctctaaaagcttcctcgtggcttctttgagaagcttcctcgtggcttctttgagaagctgtctcaacaggcttctttgagaagctagatccttatctatccacacccctttattaactaaattaactcccttaaaaataattacggatgaaaataacgcaactaataatcaaacatcatacataattactaataatatatagatatatatatcagggtgttacactaaccctttttgaaaccctacaagatatcccttatataggcccaaagagagagagaacccacaaaatcgcacaacatctctcttttgtccttcctttgtaaaacatgacttgttaggtgagcacagctcactagga

SEQ ID NO: 21657 - DNA, 421 bp, Glycine max
  unsure at all n locations
tcttcttccatggcttattccctagtggatggcacctcctctcacctcttctcctttatcttccgctgcaactccatggctgaaaatcaccattgaaagacctcattgaagcttaaagattcagcttccacaaaagtttcttaagcaagcttccatcaagtagtaatcaaagcacaagagcttcaagtaggtgctccttaaacctccattaatttttagctttaccttctcctccattgttgtttcttcatttttatccatgtatctccttacatgtcttgtgctaaatgttgttaacatgattttttagaatttccacaaattaaacttgctatagaagctagatttgattttctatggttcanatctcttgttcttgttcttgaaccatgaattgtgttgagtttaagttcctttgagt

SEQ ID NO: 21658 - DNA, 363 bp, Glycine max
  unsure at all n locations
agcttcaataaatggaccattttaactttggcaacttctttcataattaaaagaccagaaaaatacataataaagaaggggagatggctctaatacaaagccataattatgactatgtgctgtttctttttcatcctttatttttctttcttttttctataataaaatgtgttattggcattgattaaaaaaaaaagaaaaagaatatccacttgaactgttcacaattatttctataaaaaaggagttgaaataagataatagattgttcatcatcctctgggcattctcacacgtttcgagtgtgaattaataactctctgaattttgaaatactaaatcnaatttgatactattgatatt

SEQ ID NO: 21659 - DNA, 416 bp, Glycine max
  unsure at all n locations
ntaagcacccatgagtgtttcagcaccctagtaccattagtgtatgtagggttctcttcgagccacacttccaagagcagtgtagggggttttgtgggttcgagcgaggggtttccggcactattgaaaataatgtgggacaatgtggatgtcgagggagcggttttcggaagatttcaggcgggaggaaaaagacaagagcgatttcaagaaggaggacaaagagaagagggagggcaaggttttcgagcgcgcgggttgtgaaatgtcaagttttaacttataaacataacaacatcgtttttttaaggataaccgatgttaactgaatatagttaacatcggttttggaaaagccgatgttaacatcaaatagattacatcggttntttaaaaaaaccgatgttaagatcaac

SEQ ID NO: 21660 - DNA, 365 bp, Glycine max
agcttgccacccagctcgcccaggcgagcagggttgcttcctccagaagcaacagccttctggaggaatcttctggagggcccaagtgggcctggttgctatttgcacccccatttttactaaatacacccccctgctttttttttgtgattcttttttggtaaagttatggaaacatacgaattttgtaacgatacttgttttctttccgtaatgttacggaaccttgcggatcacataatcatcccctttctgacttacggaatgttacggaacctcactaattgtgcaacgatgcttgcatttgatctccggtgtgtcacggaaccttacgaattgtgcatcaatattgtcttttgttttcc

SEQ ID NO: 21661 - DNA, 421 bp, Glycine max
  unsure at all n locations
ttgagccaaaatcttgactcaccataaaccttaccctctgaagcaaaaaaggaaggaaggaaaggaaattcccaatcaaagagaaagaaaaaaaggaaggaaaggaaattcccaatcaaagagaaagcaaaaaaggaaggaaaggaaattcccaatcaaagagtgggagaaagagaaaaaaaagaaacgaaaggaaattcccaatcaaagaagtgggagaaagaaaaaagaaaagaaagaaaattcccaaccaaagaatgggagaaagtaaaaaagaaggaaaccatgacctanaagtggtcttctccctttgattaccaaccaaaatcctgtgcgctagcgactntntcgccccgcgctaaacaaaaacagaaaaggaaaaaagccaaccaaaaatcaaaagccaaaaacacacaaaagc

SEQ ID NO: 21662 - DNA, 382 bp, Glycine max
  unsure at all n locations
agcttcctttacccctttttcttccccaagctattctaagcacaccaagctacgggatccatgagtctagcagcccccaagcctccattgttggatttttgctctcccttttgcgtttttgttcacttcctacaagtaagtgcactatcccttgattctttggctctccatcgatgtattttagtgctctaattatctatgtttggcaaatttcgtgaggcaattcatgtttgatttgttgaattanggggttgtagggatggccatgagcctatctttgattctgagatgaatgggcatgacacattatccctattccccattttttttcatgtctaaacatgcgcccaccaagtgttcagtgaaatgcctcaattcaaga

SEQ ID NO: 21663 - DNA, 424 bp, Glycine max
agtcctaaatgacatttcaagctaggattatctttctttaacctccatttaccacagaattcagacttaaccttccaactctcaaagcctcattctttttccactcataacatcacattctcactttctaaccctaggttaaactctaccattcatctctaacagttttccataagcaatttcaacatataaacatcacaaacatcatcacaaaaaccctaaaacagagtgggtatgtctaactcatccaaacatggcaatttcaacaagctttcaacaaatgtcttcacaaataatcatcacacagcagaaacctagcaagactacccatcatatctcccaaaaccccatacccacgaaatttaagagagaaagaagtccacccaaacctgaattttcgaagacccactcgtagccacgcact

SEQ ID NO: 21664 - DNA, 389 bp, Glycine max
agcttcaagagaaagatgtcctcagcaaattccttatttccagaagggaattctatcaatagacctccaatctttaatggagagggttaccactactggaaaacccgaatgcaaattttcatcgaggcaatagatctaaatatctgggaagccatagaaatagggccttatatacccaccacagtagaaagagtttcaatagatggtagttcatcaagtgaaagcataaccatagaaaaacctagagatagatggtctgaagaggatagaaaacgagtacaatacaacttataagccaaaaacataataacatctgccctaagaatggatgagtatttcagggcttcaaattgtaagagtgctaaggaaatgtgggacactcttcgatt

SEQ ID NO: 21665 - DNA, 419 bp, Glycine max
tgcttgagaagcttctatggaggttggatctttgagcttcattggggttcttcaatggtgatttttagccatggagttgtagtggaagataaaaggagaagaagtgagaagaggcaccatccactacggaataagccatggaagaagaaacttcaccaccaagagagtgtcttggataagaagcttaaagaggaagcttcaatggaggaagagaatgagagagaaagagaaagagaaaaagtggcatgggaatgaaggaaaaacagggagagaagttgaactttgaagtttgtctctcaagattctcattcatcaaagttgccacaagtgttacacgtgcttctatttatagcctatgtagcttccttgagaagcttccttgagaagctagtgttacacccctccaatagctaagctca

SEQ ID NO: 21666 - DNA, 354 bp, Glycine max
cgcttcgatggcaagctagtaacacggcatgcaaggtacaaaggcggagatgatgatgttaatggtattaacggcaaccacaaatgtatattatgactcaatgactgttatatagatttatatgaaatacctatacaaggactagtatccactttgttaaaatctcaagtgataatatattatggtctagtgatgcttcggcactagattaaaattcttataattaaagcgaccgatcgtttacaacatatgctcctgtatcagactcgcatttatcctgaggcattacatgcgacttggagacatgtgtcaaccctccacgttgagacaccctgtaccccccacatatatgta

SEQ ID NO: 21667 - DNA, 208 bp, Glycine max
gctatcagagatacagtctgagctgatgagcactctgctagcatgaggccatatgcgaggagggtgctaatttgatagaaagatctcagactagctccccacagcttgtgcaccggaacgagtggcttacttgactgaaactgagatacctgcacaacgtatgaacttgtagagccaatgatgctaattgcatttactgtgactacca

SEQ ID NO: 21668 - DNA, 378 bp, Glycine max
  unsure at all n locations
agcttgtctctggaaactctgctggcaccgacactgcctattatgtaagttcttcctttaactttattactattatattattgtagaataataaaaatactaataacccattaatggggtttactttcttttatccctttattataaacactgtcattcaaagttaataatagaaaacatgccttttgtttgcatttgcatttgcagttatcttcaaaaggatcaacttgggatgaaatagactatgaatttcttggaaatctgagtggtgatccatacatccttcacacaaacgttttcagccaaggcaaggaggacagggaacaacaattctatctatggttngacccaactgctgatttccacacttactccatc

SEQ ID NO: 21669 - DNA, 407 bp, Glycine max
ggaacctgaatgtcacaaaacacgtccttaatatggataagaaattttaaatgtaactaaatttcagattaagtaataatctcgcaaccaactcaaaagattgaaatttattaaaatacataatgatcttgtcatagatacaaactctaactacattgattaaaggaatactttaatattgctgtaaaaaaaaactttaatatatcgttgttaacttaaaataataaacatcatcatggtgatttttttggttattgggatccaaaaatatcatggtgcttgaaaggtttttcgacccatcctgatatgctgagtggttgtctttagattcagccgggtaatgggccttggtagcaaactccatatttttatttggcaaataaaatgcagcaaccctcatgtccacc

SEQ ID NO: 21670 - DNA, 368 bp, Glycine max
agcttgcttctacaattactagtatgggactcatgcgtatgcacgagtcgctccgctatatttttttgttttggtattaaaattgtgcctacacacgggtaagccgtgagaattgacaatataattatatttgtgtcattataacactagacaatattatgatgtataactaattgagaacaaaaatgaatatggttaaaaaaattatgattaacacatagtaaaataactattatataagaaactgttaattaacaaagtcataatgttcaagagattgtttttagcaaaaacatgcccacaaaataaagtgttaatttacaaatattaacaaaagtcagaataatattaaacttaattcattaaca

SEQ ID NO: 21671 - DNA, 416 bp, Glycine max
  unsure at all n locations
gcatccaataccctgatgaggatgtcccatatgttcttaagactggactgattcatttgcttgcaaagtttcatggccttgcaggtgaagacccgcacaaacatttgaaagaatttcacattgtctgctctaccatgaaacccccagatgtccaagaggatcacatatttctgaaggcttttcctcattcattacagggagtggcaaaggactggctgtattaccttgctccaaggtccatcacgagctgggatgaccttaagagagtattcttagaaaaaattttccctgcttccaggaccacagccatcaggaaggatatctcaggtattagacaactcagtggagagagcctgtatgagtactgngagagatataagaaactatgtgccagttgcccncaccatcagatttca

SEQ ID NO: 21672 - DNA, 378 bp, Glycine max
agcttataagaacaaaattgcctcaatcatttccaaatatgcatgtgaattaggaagcatcaacaagaatcaagccaaggctattgtgcaagcaatcaatggggcaaaacacaccaaatgattatgatgatggatggctcaaattctcacaaaggtaaactcatcactttcaaattgagctttcaaaaatatcatgacatgtagagaagaatcaagaatttcaagtcacaaaatgtcaagaacttttattttcaaaacaattacccatttcttgaacatatcctataattcaaagaaaaacatgcaaagtcgtacatgcacacaaaattaacccataatattaaactaacaaaccgacgaaactaccaacattaacaa

SEQ ID NO: 21673 - DNA, 429 bp, Glycine max
cccttatgctgcaaatatttacaatagacctcctcaacctttcagctaaatcaaccacagcagaacaattatgacctttccagcaacagatacaaccctggatggaggaatcaccctaacctcagatggtctagccctcagcaacaacagcagcctgctccttccttccaaaatgctgctggcccaagcagaccatacattcctccaccaatccaacaacagcaacaaccccagaaacagccaacagttgaggcccctccacaaccttccctcgaagaacttgtgaggcaaatgactatgcagaacatgcagtttcagcaagagaccagagcctccattcagagcttaaccaatcagatgggacaattggctacccaattgaatcaacaacagtcccagaattctgacaagctgccttctcaagctgtc

SEQ ID NO: 21674 - DNA, 372 bp, Glycine max
  unsure at all n locations
agcttgtcaaangtcattctatgcttgaaactttatattttagttcattntggtagtaaatacatttaccaatggaaaatattacggatattgtgttttttgcattcttatggtggtattcatgatgcagaccttccaggagtcaatagttgcagccggtgctggattagccttagttgactcagtggtgatctcttaacctggcatgtccatctcttggtaataatctgtgtgtgtgttttggggaggggtaagtgagtggatatggatatgtacatatctacttcttctggtgacttcatactgganaggactatttgtgtgtgtgtaccttntttgtatctttaagcttgtagttggtagagggggtta

SEQ ID NO: 21675 - DNA, 382 bp, Glycine max
  unsure at all n locations
cagcacccttttgaaggtggaatccttgttggcagtgccaagcaactgagaagacaaatagagagaagtggaggtgccattggccattccaatcccaaccatgaccacagccatgcgtttgcactgcttggattggatttcagggaggagaagcacagattgtagtacttggtgttcttgcaggttttttctatcaaactgtcatctcctttcacaaaagcgtgtggttgaaagagtgatattgctagcaagaggagagatagatagaagatcttagaagccattgagatagcaaaagaagaataaccaacaccgataatttaagggactgcgtatntcanaaaggtttttagagatttcctatttctgtttttgacgtgga

SEQ ID NO: 21676 - DNA, 367 bp, Glycine max
  unsure at all n locations
agcttgtagaatggctagacatgatacatgtcagggtttggtttggttcaaggataaaagggatgccccacattatttccatgacacaaatgcaaagatgatgatttggaaattttatgcaaaactggtcatgcatgcacctatgtggacgctcaagtgtcaaatttttatggtcatgtgatgctagggctcangattcatttcctctattttaaatcaacccaatgtttccaaaatatgctcttttatcaatttatgcatttatcctagttcatttcgtgcgtccggngaaattttcacagcattcacccttcaggtgtagacacgttttttcttcaaaaatcggttatgatctatgaattgtttt

SEQ ID NO: 21677 - DNA, 420 bp, Glycine max
  unsure at all n locations
taatctgcagaaaaatattntctatttctgcattgctttcctaagtctgctgcacttagctcctgagtaaaattttataaggtgcgctaaacgcccagtcaaaatttagtgttattttttctgtttttgttgaaaataacctatgctaatctcttgtgttttatcttatattttgcaaatggcatctaagaaaaggaaggctccttctacacctttccaagtcagatatgatcggtctcggttcacatctcaagaagcttaagagaggtacaccgatattgtggtgcctaggaaactactaccagagaggaatgtggtagtttatttcactgagttcgatgagttcaaggaggaactcaagagaagacactgggatgaagagttgacttattntactgatggcagcatagatgtcaccat

SEQ ID NO: 21678 - DNA, 346 bp, Glycine max
ggaaaactccctgaataaaccctacctctaatagtgaaaatcacgacaaattgaaagacatacaacactcctgcgaccaccggaaagatatcgataaaatactctggctccgaacccagactgttcagaaccatcctttacacatgtgcgaagaacaatacaatcgagctcataatgtgcgaaccaacataataatcccacatatagttcttctctacctacccactatagcaatctacgtccattcagacaccatacgcacacctcacttcatcatatgagcaaccattccacccttctcaaaagactccaacactatctccttcacacctttataaacaccata

SEQ ID NO: 21679 - DNA, 402 bp, Glycine max
  unsure at all n locations
tgacttanacctagtatttttttgtcctaccattaatancaacttgatttgttggaagatcgcacactaactaaaatatgtgattgtcttacaaatagatatatcactcaaaactttttagttttttctctcaaggtatacaaggtattttcagagcttagtatctttacaagaatttatagaaatctttacaagaaataatgaaagaataattcatctaaatgatatgtgtcttgtttcttccaagtattaggggtggataaacggacccaggtccatggactggcccgcggttcgcgcgggtaacataccaattntttaatacagttcatggttatgtcatatttttgggcctgccccgcttaacccgcagattatgtgggtttggcccacgggatccgc

SEQ ID NO: 21680 - DNA, 360 bp, Glycine max
  unsure at all n locations
agcttggaacatatgacatttatgctccagcttgagagggagtgttaaagatgagatttaattcattgtatataggggaagttagaaactgtatagcagatccgtatggatctgattttgattcttattctgtatctgtaattactttctctaaaaataaataaatccatcatgtgtgttcttagacacggactctctaaatcttatagctatatcataattgaaacacttaatagaagtgccaaaataagaagtggtgcatggaggtcacctanggctagtggctgccttggatggtggctgcacaacaggatgactggattcttgactcttgatcatgcccactggacatacgctcct

SEQ ID NO: 21681 - DNA, 402 bp, Glycine max
  unsure at all n locations
ntgaatgctctattcaatggagttgacagtttatcttcagactgatcaacacttgcacagtggccaaggctgcatgggagatcctgaaaaccactcatgaaggaacctctaaagtgaagatgtccagattgcaactattggccacaaaattcgaaaatctgaagatgaaggaggaagagtgtattcatgacttccacatgaacattcttgaaattgccaatgcttgcactgccttgggagaaagaatgacagatgaaaagctggtgagaaagatcctcagatccttgcctaagagatttgacatgaaagtcactgcaatagaggaggcccaagacatttgcaacatgagagtggatgaactcattggttcccttcacacctttgagctaggactctcggata

SEQ ID NO: 21682 - DNA, 365 bp, Glycine max
  unsure at all n locations
tgtcgaggctatggcctgagcaaatgccatattggcggcacggaattctctcacatgacctacacgctataatggtgaggggtacctcttctgcaaaacccgtcagccaatcttcattgatgcacgctatcgagatatatgggaatccacatgtatagggccgtatatacactccttagtacaattagtcttcatcccagtgagtccatacaatgaacgcatatccatatgagcacctctagaatacatgccgacgaggatagaacacgagatcaatactactcattaggcaaacacatagtaacatctgtcctangaatggaagaatacttcaaggtttcatattgttagagagctaaagaaag

SEQ ID NO: 21683 - DNA, 397 bp, Glycine max
tcattaagaggcttcctccagatgcttccttttggcttcattgagaagctttctcacgaggcttctttgtgaatctagagccttatctatccacacccctctattaactaaattaacctccttaaaaataattacgaatgaaaataacgcagcaaataatcaaacatcagacataggtagtaataatatatagagatatatatcagggtgttacagctgctactaagactgcgacgccttttgaaaactgatattggaaaagtggagatataaaaacttcagcactgtagatggaacagataaaataataaaaaatacactgacactccatattggatcgaatggccacggactaattaagaaaggcggttgagatgattatgaacgtgtcttgact

SEQ ID NO: 21684 - DNA, 384 bp, Glycine max
agctttacaagctctatatccagtaggatggtaaaacttttcattttaagaaaaggaaagaagttgatatttaaattattttgagcttcttttcatttttcaatattattgattgaagtttgagagtttattttgcataactttagtctacaactttgactggttacattacctataacttgctttttgttctttttaggtttaaagttaaactctagatctatgaacttagtttatggtgtaaaccaaggctagtacactacactttgaggaagttcaaagccagctaaaagtcaattcaaactttgatacaaatgtacccagaataaggactgaaactccttctgtaactgcctatatcagtaaatattacaaacatcaact

SEQ ID NO: 21685 - DNA, 410 bp, Glycine max
tagcttcgaaccaaaaaaacaacacatttctattttgtgagtgtatgaattacatactgaaaattttacaaggataaattccgaacattttgatatttataagaacaaaaaatatattttagccttgtttttattgttaaaaaaaaaaaagagagaaatgctactaacattttctttaacacactccttcatacacactttctcttatgtgttaaaatgtatttagttgaagaacaagttccacaaaatcttgaacctaccaagtgtgatggttgggattggtatgagcgcgaacatttgccttacacatttgacgtgactgtcactgcaatggaagatgcccaacacattcgcaatatgaaagtggatgaactcattgggtcccttcatacctttgagctacgactctc

SEQ ID NO: 21686 - DNA, 379 bp, Glycine max
  unsure at all n locations
agcttgtagaatggctatacatgatacatgtcagggcttggtttggttcaaggataaaagggatgccccacattatttccatgacacaaatgcaaaaatgatgatttggaaattttatgcaaaactggtcatgcatgcacctatgcggacgctcaagtgtcaaatttttatggtcatgtgatgctagggctcaagattcatttcctctattttaaatcaacccaatgtttccaaaatatgttcttttatcaatttgtgcattcctccaagtccatttcgggcgtccggagaaattntcacagcattcacccttcaggtgtagacacgttttttttcttcaaaaatcggttatgatcaatgaatttttttttttttttaa

SEQ ID NO: 21687 - DNA, 418 bp, Glycine max
  unsure at all n locations
ntggaaagtgttatttttcaccttctcgctaagccaatatgctggcttagcgagcatccgctaagcgcaacactcctggctaagcgcgaggaagaatccagaagaagatgagttgtacagattcgctaaccgcaccacttcatctctctaagtgcaccgctttagttcattcgctaagtgagaaaggcgccctaagccaaaaatcactaacatgcgctaagcggtccatacgtgcgctaagtgcacgagcacaaacaaggccacctatttaagccttaaattagattttgtgaggggagtgtggactgggattcagagctttacatgtctagggtttctagagagagaaagatccaagttccagagagttntgagagattntgttgtgtgaagatntgcagagaccggagctcgaagc

SEQ ID NO: 21688 - DNA, 386 bp, Glycine max
  unsure at all n locations
agctttgagccaaaattctgactcaccataaaccttgacccagggtgagaatgtcaatccttaccctcggaagcaaaaaagaaaagaaggaaaatttccaatcaaagagaaagcaaaaagaaaagaaggaaaatttccaatcaaagagaaagcaaaaagaaaagaaagaaaattcccaatcaaagaatgggagaaagtaaaaaaggaagaagaagaaggaaagaaagctcctgatcaaggatcgaaagaaaacagaagaaatgtgcagaaaggtctttggaccggacaatatatgaacaatacagaattgtcaccaaatgaacgaatagaaggaaatgaaaccatgacctanagtggtcttctccctttaattgccaaccaaaatc

SEQ ID NO: 21689 - DNA, 425 bp, Glycine max
tagccatggaactaaggcagaaggaatgtaccgagccattcaagctgattaaagttatatggagtccacccttgtccctcccaccatcgaagccatcggacctcaatttgcatgcatcggacctcagttgagttttaagaggagtgtattgttaggatataaggagaagaagagttagttaatatagttaaactactaatgagttagttagttagagagatttattagatataaatagaggaagaaggataggagagaaggggatcttatcatttgtagattgagcattagctctttgtgaaaggagaaatcctttgtgaaagggaaacccttggaggagagttttctctcctattttctgttcttttcttactagtcaataaaatcttttattttctttctcatttcaattcttggttcttaac

SEQ ID NO: 21690 - DNA, 378 bp, Glycine max
agctttatgttagttaaaggaacttctatacgtcatggttcgagcacagaaggagcactttaattttaagcatggtctttcacgatggaaaggcaattcagatttccaaatattataatttgtagtattaaatatgcatggtgaattgtcatgtttatatatgaaactcattttttgacttttgaagagcttacattcaactttagatgaattgacactcgactaaattgcctacttaatgtttttatgttatagaatgattattataatataaaataaataaatgatgcaaaataaaaaattcaaatatatataagtttaattttgatgtaccataagtgtaaaaaaaattatattattaaccaaattatatattat

SEQ ID NO: 21691 - DNA, 333 bp, Glycine max
aaactctgccgtgaccgcagtttcggcccccatagtcatggccctccctcttccttcatcccttatgcggtgcctgaagatgaggtaaaccaatcgcatctctctctttcactcctcgtttcacttatcaaaggaaatccgaatctaatgatgcgtctgctctaagctgagacagccagagatttggatgagatatttccgattattgatccgaaagcttaggcgaccagcaagcacaatatctttgtcagtgtcttgaggaagcggctccaccatcctgggtagacatttcaatctggaagattctgggacattgcattaatacttatctct

SEQ ID NO: 21692 - DNA, 121 bp, Glycine max
accgggcaggcctataggagtcgaatatgaataccgtgacgctttgcagatctgtcacgtgaccttacaagattccatctcctaataccgaggccaaaatgaactcctgcttacatcatgt

SEQ ID NO: 21693 - DNA, 422 bp, Glycine max
tttggttcatatttcgacgaccaatccttcctattgtacttctttgttgaagaaattttttctgtgattctttacataaagattcataaaatactggatctccaccaacacaagcaaatggtcgataaaactccaaaatggcattttctttcgaccctattatttttttatccttatcatttaggaaagaaacgaaaatatcaggataacaaacattctctagaatttcgcttaaattcgaacccatagctgatgataaaactagaatagatattttctgtttcctactcacacgagcccatatccttgcttttctatcaatctctaattctaatctacccccccagtctgatattatggtgccagtatagaccgaaattccgctaaggtccaattctgaacggtaataaataccaaggctt

SEQ ID NO: 21694 - DNA, 374 bp, Glycine max
  unsure at all n locations
agcttgcgtgtctgaattcgtagcaaagcacgtttaattttgagaaaatgagaaattttttccaaaaacagttgaaaaccgctaaaccatcagttttcacggttttacaccggtttaacggtttcctgtccggattgttaattgccagtttcagagattatccggaccaaatgacaggccgattttcggttcaaccgatagaactcggttctgtccaattttcaaaactttgatgaaatgttaatacattataaaatgaactangcatgcactntaaacggacatccatttatgatctattatcatatatgtttgtgaaattctataataattattntaaaaagagatattaaggatgatttatgaatgtaagt

SEQ ID NO: 21695 - DNA, 427 bp, Glycine max
  unsure at all n locations
tttgccatagtgaaacaagacccttgattaatttgaatttntgaagatttgctagggaactagtcatgaccccttaagtgataaaatcacttgtcacacaaaataattagacagcataacgaatgcaattatagctatctaaataaacataacaaacaatttgctaggggtcaaacacccccaaacccaaaccacaacgcgtatagataaaaatggcaatatgcagagatatatataatagaaaataaattttcatgccacaaatataatttccagagttcacactctgtctgtcttatcattcaacaacaataaaaataaatatgtgtataaaattatatgtgcgtgcatgcatatcaataattntatcatgagagaatcatcacaatttcaaaacatgcagctcaacaatataataacaaataaa

SEQ ID NO: 21696 - DNA, 377 bp, Glycine max
  unsure at all n locations
agcttgccgccacggagttttccgactatgctcttgtgtggtggaacaagctacaaaaggagagagcaagatatgaagagccaatggttgatacatggacggagatgaaaaagatcatgaggaagcggtatgtgccggctagttactcaagggacttgaaattcaagctccaaaaactaacccaaggcaacaagggggttgaggagtatttcaaggaaatggatgtgctcatgattcaagcaaatattgaagaagatgaggaggtaactatggctcgatttcttaatggtttgactaatgatatccgtgatattgttgagctgcangacgttgttgaaatggatgatttgcttcacaaagcaatccaagtggagcaa

SEQ ID NO: 21697 - DNA, 426 bp, Glycine max
taggctaaattaagctaaactttcgtaagctacttgtgctgagtctagtcttacatgagggatctgcagacaaatagctgttatttttgttttggtagctatagttgttatttttggctgaatgtttttgtggtcactttttttgatccatattttgtgggaaaaatagttggagcccttagtttggtcagatttgaaagttccaaaaaagtagcaaatttgatttttgtcaaaacttcaaacgaccataacttttgctccggttatcagaatcacaattattatatatgtatttggggtaaaaaaaaatttcccatgccgtggcagcctgccataggctggctgaggtctccttcttccaaaaattgcgattctgtcaaaaattatttattttccaagtattattctcttatttttcttaactta

SEQ ID NO: 21698 - DNA, 272 bp, Glycine max
  unsure at all n locations
agctttctcaatatttgtggatngatgctcttaagacgactgcgtatatatggcaccgagttccaaccaacgctgacgcatagacacctcttgagttatgcaaaggatggaaaccaagtgtgctacatatactcgttaggggatgcccgactgaagcaagaatccataatgcacgcgatatgagactagaccctaatactatgactaggcatttcatcggatatgcggaaaggtctaatgggtatatggtctattggccatcccacaacact

SEQ ID NO: 21699 - DNA, 391 bp, Glycine max
  unsure at all n locations
tatatataagagttttctaataaatctcatttgctataatgatgtaaataataatttctagtattttaaatcatgatccagttatagaagcagttactagaaggtagatcagttacaattttcaccggtcaggcaaatttccattacattttgtgtgactccagatgatattgattgtccctatgctcgatccttgatcagcttacaggttatgactcataacctgattttagtggtcatactcatatcattatcattacatgctaattcctcatggttcatgatgaagtctgtatataaaaatactacatgcatgtatgtgtacattgtggaaaaatactgccaacaccttatngtgggggaaaagtcttgaaaattatgaccaggcctt

SEQ ID NO: 21700 - DNA, 360 bp, Glycine max
  unsure at all n locations
agctttataagcgcgggttcgggagacaaaggtcaagcgttcgcgatatgcgaagatgatattccgagtactttggatttggtacgaccatgccctcctgatttccagctgggaaattggcgagtggaggaacgccccggcatttacgcaacaagcataatgtaaacctttacggttttaaaagctctatagttgggcctaggctttagagtttttccttttgttaaggctttgtgtcttttgtttttgaatttataatacaaggatctttcttcatctgttcctggtctctacccattctcattcacttgcatgtttacttctttntctgaaacggcagatccgatgacgagtcccccg

SEQ ID NO: 21701 - DNA, 408 bp, Glycine max
  unsure at all n locations
tgcatttggagaggttccatcaaccgccctaattccttgatgctggtggtatctaggcctttaaccttgacttggtaaaacctcttgccggtttgattagtccccatgcttactaaagtgagacaaaaagctggtgcaaatcaaaactccgatatctcatgggtgggatggatgaatgcatgaaggaatgcatatgacacagctgtattttaagaatgcgggtgcccgggacattgtctcctttttagacacaacgtctaggggtagcaaagtgccccaatgtatgtatttaaaacggtgacccggaccctccattgattntgtctatagaggggatcaagacagaacccctatgcaatgcatatgcaaaaggcgcaatagcatgaaaatattcactgaacataagca

SEQ ID NO: 21702 - DNA, 368 bp, Glycine max
  unsure at all n locations
agctttactagctagatagatatttgtcaaattcctaatggtcaaacatcattctttagcacgaatgcatattcaattcttgtgttcgtgttcatatatatattacactggcatacaatgcatgtttattttctttaagatgctgccatctgtccaatttgtttgctatatatgagattcattaaatgtttgggtaaggcaattataccgttcccgcgagtcataccatttgtcattggtcatatgcatagattaattcataaagttttttttagccaaatcattntatagtttgtgttgcagattatataatgttttagaaaaaaagtaaatattntaaaatatatattattttactaaattaatat

SEQ ID NO: 21703 - DNA, 345 bp, Glycine max
  unsure at all n locations
ntgggccattaaccaaaaaaatgtatgtttgaagtattatttgattgcctttctaaacacaatatgtttgaactttgaagtacacaaaaggatgtgaaagtgatgcaaacatatagcattgaagcataccaagtaagtaaaaacgtactccaatatgaccagctccagaagaaagaaatagctccattaacttggttagaagacattgtctgcatgtgtcatagaaacactgttattaatgaaaccattgcacatatagttcttcaattaaccacaattcttttcaacttttaataatataaagttccaaaaaccttcctttcaaaggaaaaggggggggggggg

SEQ ID NO: 21704 - DNA, 388 bp, Glycine max
agcttaatgtcatagttttcatggtgctagtgataacaataatgataatattagtaatgatgatagtatagtgacaataatgataagatgatcatgatataatagtgataatggtgacaaaaatagcaatagtaatagagatgatgataataatgataatagtaataatgatgacaataacgatgataatcgcgaaagtattaagtatacctttattttattttaggtttcattacttatttgatgtcactatttattattgcattcaatttggtctttacttatttaaaaaacaagtaattcattaggtcttttttgttcaaaactatttatttatttatactggtttaagttaaatcaacattattttttttataattaatgcttg

SEQ ID NO: 21705 - DNA, 421 bp, Glycine max
tcaccaccaagaaagtgccttggataagaagcttagataggaagcttcaatggaggaacaaaatgagagagagtgacatggaaattgaaggagaatagggagagaagttgaactttgaagtgtgtctcacaaatttcttattcttcaaagttgtgacaagtgttacacatgtttctatttatagcctacgtcactaactaaatgaaattcacttaatttcatgtgaatctaaaagaaatattccaagaatatgtcaaaggaatcttagcatattccctttagatgccacaagcatgggaggtgtgactctagcacatgggaaacttcattgagaagcaaggaagaaagcttccttgagaagctagaggttagctactgacacccctcttatagctaagctcactcccttgccaaaatggac

SEQ ID NO: 21706 - DNA, 385 bp, Glycine max
  unsure at all n locations
agcttctcctgcaattctgcaaatgatcaactgggatcccaatcgctctctcgccctcgccaggtctttgattcttctttccttatttcatgccaccacaccaatcctattctgttcttttccttcatatatcttattttcttttgctttctctgttattctacttgctcaatcctctttgcgtctttaatttatgttttacaactttttcatgccattccccgtagacggtgaaaaccatgccattcgttacaacgatagaggaggatgtcaacctccaattggactgaagggactctaaccaaaccgtaatattccgaggtgataaagntctcattctatatattatatgacattcttgttatataattganataatagaaca

SEQ ID NO: 21707 - DNA, 428 bp, Glycine max
tgcatgatttacatctccccctttctcaagcaaattcttcttgatatcatcaaaatcttcatgatttacattctcccccattttgatgatgacaaccacctgtaggttagtagcaacaacaaagaaaatatctatttgcatatagtttactcccccttggttttacaatgattgcttatatgagacaattgaagatttcatatttttcatatataaaaagttgtctcataaaacaatagataatttttcttactattttatcttttatctttctctccccctttgtcaacatcaaaaacaaatcatgaatagcgaggagaaagatgtttgttgcaatgtatgagaatcaagtgataccaaaaggtattaaatcaatcattcaatattaatcaagcaaaaacaagtgcaataacacatcaatcacacac

SEQ ID NO: 21708 - DNA, 371 bp, Glycine max
cgctttgcacgcacgtttactagcattttctagcacgaaaccgtgatacctcatgccgtactggaggcctctgactccttacacaagcggtggggggggtctaagttcagagacctatgatgctcgcagtgtgtcataaagaattctactaaactagtcatgagggacaactgtgcacataactgggactttatatgatgctctattcaagacatttaagaacgttatctttgttgatgagagatactacttcgcattgcacctgtccacttgcatgcatctactttggctccatgacgagatcacgcgtcatgagtgggaggctacagactatgatgaatgatattaagtgatagcttaacctaaccact

SEQ ID NO: 21709 - DNA, 414 bp, Glycine max
tgtatgctatgcaatgattggatgtgcaccaaagactctattatatgatattaatgctacccttagctatgttggaggtggaacaagaaatgggatgaaatatatatgcaaatgacaatattaccctgatgctagatactaattatcatatatattccatcacttagatgatctacttattatactaatttatagactgaagaagcacacgatattatggagatttccatatatagtgagatgctctctggatgcttccgctatacatcaccactttgtgaaaatgtgatactggacgtcagtgacatgaccaaggaaataatatgctgtaaccttactacatctcttgagagtacaatcattctatgagttgtcatagcactatgtgcgagactctgagcatatcatacccat

SEQ ID NO: 21710 - DNA, 389 bp, Glycine max
agcttgtgctcccatgttacgggctagtagtttgcttttatcagttcttgggccaccccctgatattggagggcgaccaactgtgcaagtacaaccagaggaggaggcaggtctccagcttcgacgaggaggctatcgcatagctactatgcataccagggcaagatttcgctcagaccgctgcaaggagacgagtacggatctgcataccaccacaactctgatctcctcctgccgaagagttagctggtttatgccatcatgacataggtaagtatgcacgtggctcaattgatttctaatgtcatttattgtttgcagggattgcacccacaagacactcagtgggcccggagaagtccaacagggtcctggggtttccagctctg

SEQ ID NO: 21711 - DNA, 400 bp, Glycine max
tctcccccaatttcctataaatagggggagaagtgaagtggtttagggttcagccccttatgcacttctttctctttcgaatttgctttgaaaaattgtttccgtgaagaaaatccaagccgaggcgctttcgtaacgtttccgtgaggaatttcgcgaaggttttcgaccgttcttcgacgttcttcattcgttcttcagcgatcttcagtcttcaacgagtaagtacctcaaaccaagcttttcaattcattctatgtacccgtggtggtccacattgggttgcatgtattcttattctcgtttcatttactttctatacccccttttgacgtgcttaagccattttatttaagtcatttctcgcttaacctcaaactaaaataaatctccaccgatc

SEQ ID NO: 21712 - DNA, 373 bp, Glycine max
agctttcaaaaccggtcgattgaatcctccctccccaacactctcgccatcgcattgtaagttgccccatcttgcttaaacatcccactctcctccaaccaccggaaaaatatcaatgccttcgctggctccgaagccaaactctccaaaaccatcttaacgacatcaccggagaaccctacattcaagtccttaatctgcctctcaacatcatcatcccacacattgttcctcacaatcctacacactatagcaatattcttctcattcaagttatcatacaaacccttcaacttcgccacatcagcaaccattccacccttctcaaaagactccaacactatctccttcacacctttagaaacaccatacc

SEQ ID NO: 21713 - DNA, 412 bp, Glycine max
  unsure at all n locations
tgngaatggcttataccactaaggtgcccctgcacacaaaataactttggccttgaaggttggacagagctaacctttaattagtagaatagacatgggtaggatgaaactccttcctaccagaggagcagcccatgagctaaaaaactaggtagaacaaagagctgaaaaatatctttcaggaattggcaaaaatgatgcatcaatattacattcacccatattagtgtttaagtgaagaatgatagcaggggggaaagatagtaagaagtgtactagtcagataaagcaaggagagaagtagtagatttcatactagagcactagtgtaaaagccacgatccccacataattaggtatagagatactttggatttgaaaactttacacgtatgcatatatgccaagttga

SEQ ID NO: 21714 - DNA, 370 bp, Glycine max
  unsure at all n locations
agcttaacaattccaactacctcctttggtgtcaacaggctgaacctgttctcaaaggacatcacctttttcatcttctcactaaactgcagattccgactcgatatctcaccattgctgattgtgatgctggtgttacttcgcctgagttcttgctttgggagcaacaggatcagctccttctattgtggcttcaatctactgtttccggcgaggtgcttccgcggcttgttggttacaaaactgtgtggcatctttgggacaagctccacacacactnttactccattgttcgtgtganaaaacggcaactccacaatgatttacgtaacattntttctaaacaatagttcaatttctggctatttgt

SEQ ID NO: 21715 - DNA, 414 bp, Glycine max
  unsure at all n locations
tgactaggcgagttgattttagccttagtttcactttagttattaatcaattcgattaagaatgagaaatcccaaagagaaaacgtccgattgattttccgctttattttactaaaagatgtttttcgattatttatattattttttacctctttttgatttccatcgtggttacggcacgaccgaacggtcggaatttattttaaccgaagttaatggataatacaattcaaacgttcggtggaaatttattttatttttaagttaagcgagaaatgacttaagtaaaatggcttaagcacgtcaacagggggtataaaaagtaaacaaaacgagaataaaaatgcacgaaacacaatgtggaccactacgggtacatagaatgaatcgaanagcttggttcgaggtacttac

SEQ ID NO: 21716 - DNA, 379 bp, Glycine max
agcttggagaggatgcttcaatggaggaaaagaaagagggagagaaagagaaagggggggagcacgaaattgaaggaagaaaaagggagagaagttgaactttgagttgtgtctcacaagactctcattcatcaaagttacaacaagtgttacacatgcttctatttatagactaggtagcttcattgagaagctttcttgagaaaacttccttgagaagcttctttgagaaaacttccttgagaagctagagcttagctacacacacccctctcataactaagctcacctccttgaaaagcttccttaagaagattcctaaagaagccagagcttagctacgcatacctctctaatagctaagctcacctccttgaga

SEQ ID NO: 21717 - DNA, 421 bp, Glycine max
tcaagaattaatggcctcatcaaactacttgttcccttaggcaattcaattaataggcctcctatttttaatggagtgggttaccactattggaaaacccgcacgcaaatcttcatagaggctatagatttaaacatttgggaagccatagaaatagggctttatattcccaccatggttgctggaaatacaacaatagaaaagcctagggaagattggagtgaggaagaaagaagactagtacaatataacttaaaagccaaaaacataattacatctgccctaggaatggatgaatactttagggtatcaaactgtaaaagtgcaaaggatatgtgggataccctcaagtaacacatgaaggcacaacaaatgttaaaagatctaggataaacacacattaactcatgaatatgaacta

SEQ ID NO: 21718 - DNA, 88 bp, Glycine max
agcttctaaactttatacaagaatgaagctctgataccacttgttggacaagtggcctcagatatcttaagaaagggggggggggggg

SEQ ID NO: 21719 - DNA, 428 bp, Glycine max
gcttctcaaggaagttttcttaagaaatcttctcaaggattctacctagtctataaatagaagcatgtgtaacacttgttgtaactttgatgaatgagagtcttgtgagacacaactcaaagttcaacttctctccctttttctccttcaatttcgtgctcccccctctctctttctctccctctttcttttcctccattgaagcatcctctccaagcttcttatccaaggctcatcttggtggtgaagctccttcttccatggcttattccctagtggatggcgcctccactcacctcttctcctttgtcttccgctacatctccatggtggaaaatcaccattaaaggacctcattgaagctcaaagatccagcctccatagaagccgcacaagcaaccttccatcaagacttacaactcttctag

SEQ ID NO: 21720 - DNA, 331 bp, Glycine max
cgcttgtcgaggatgttttcatggttgaaaagaaattgagaacgggggatcactatattgggagaatacacgagcgcattatatgcaactctgaatggtatctcatagcactttccttgatcacaggtacagcattggcatcacatgcttcgatgtatatactaaggaactttcctgagaagctttcataataatacttacttgacaagcttctttgagcaaaagtccttgagaagactgagtttagctacactcactcatgtatacactacgctcacctccttgagacacttgcttgttaagctagagcttagctacacacacccctcta

SEQ ID NO: 21721 - DNA, 421 bp, Glycine max
tctcaaagggtatgcaaaaaaaaataatccaagcagttgccaaattactacaagagtctcttagaagccctccaaaacctaacaaatcaagatttctaagtcattaaaatttcgagtaaataagcaatttagtccctgactttgtacccctgttgcatattagtccctaacttaatgaaaaatccaaaatagtccctatctttgcataagtgttgcaaaatagtcattgtcgttacattcaaaggtaacgtcgttaatgaggtgtccacgtaatgctaggtagactaatatgcatctcatgctgcttacacttctctctctctctccgctgctcattctcagcctcttatcaccaatcatgccgcttccacatggaagaaccccaacccaagccaattctacagaaaccccctagttaccg

SEQ ID NO: 21722 - DNA, 357 bp, Glycine max
agctttgagcaaattcaaacgacaataaatttttactcagatgtccgattgtgtcctgtagtttatcgagacgctcgtgattgaaaatggaagttcgtcgcaaattcaaaagacaataaatatttacttggatgtccgcctgagtcccataatatatcgaggcactcgcaattgaaaacggaagctcgttggaaattcaaaagacaatatatttttactcggatgtgctattgagtcccattatatatcgcgacgctcataattgattacggaagctcgctggagattcaaccataataactttttactcggatgctcgattcattccttaagtatatcgagacgctcggaaatcac

SEQ ID NO: 21723 - DNA, 392 bp, Glycine max
  unsure at all n locations
ttgagcaaattcaaacgaaaataaattntaactcggtatgtccgattgtgtgttgtactatatcgagacgctcgtaattgaaaacggaagctcgtcgcaaattcaaacaacaataaatttttacacggatgtcggattgagtcccataatatatcgagatgctcgtaattgaaaacggaagctcattataaattcgaaccgtaataactttttactcggatgttcgattgtgtcccgaagtatatcgagacgctcaaaattctgaatagaggctcttagtaaattcaaatgacactaactntttactcggatgtccgaatgaatcccgtaatatatcgagatgctcgaaattgaaaacacaagctcgtagcaaatgcaaaccacaataacct

SEQ ID NO: 21724 - DNA, 365 bp, Glycine max
tttcatgcaagctttagctttaaaagattctacatgtttttattatttctctttttactacattttattatttttttatatgactattattatagtaatattatattgttgatagtgcaataggcatgataatagctactagctagaaatagtgccgaaaataggtatggggaagcatgttacaataacatcaatacaaaaggcaagtacgaagaagtgggtggcaacaatgccagtccaaaaaaaacacaaataaactacgggttatcaattttgttaaaaaccatttgaacaactttcataagtttaaatgaataattgatccaattacaggcttataatgacaagttatcgatttctaattc

SEQ ID NO: 21725 - DNA, 416 bp, Glycine max
  unsure at all n locations
ttgagccacaatcctgactcaccataaaccttgacccatggtgagaatgtcaatccttaccctcggaagcaaaaaagaatacaagggaaatttccaatcacagaaaagagatagaagatttccaatgaaagatgaaaaagaacagaaaggaaattcccaatcaaagagcgggagaaggaaaaaagaacaggaataaaattccctaccaaagaatgggagaaagtaaaaaaggaaagaagctcctggtcacagaaaccacaagaaatgtgcagagaggtctttggaccagacgatatctgaacagtacagaattgtcactaaatgaacagataggaaggataggaaaccacgacctcaaatggtcctctccctttaattaccaaccangatcccgtgcgctagcgacccttttttct

SEQ ID NO: 21726 - DNA, 343 bp, Glycine max
agcttatcaaacttagaaatcaagtgatcatgtattccgaaatatagggggagtaaacgcatgcacattttatcaatatacaattgtttgttgcttgcttgaatcttgatttcaggtattgtattgtcatcatcaaaaagggggagattgtagatgcaattggctttgatgttttgatgatgatcatgatgatgtgttgcaattgatgcaaatgggcttttcaagattaaaattcaagacaatacttcaagattacaagtcacaacatcaagatgatcactagaatattaggaagggaattcctaattgaattagcaaaggtttggccaagtgatttaaaatg

SEQ ID NO: 21727 - DNA, 419 bp, Glycine max
  unsure at all n locations
tcaacatcagaccacttccagggtgctggatctacttcacatggatttgatggggcctatgcaagttgaaagccttggaggaaagaggtatgcctatgttgttgtggatgatttctccagatttacctgngtcaactttatcagagagaaatcagaaacctttgaagtattcaaggagttgagtctaagacttcaaagagaaaaagactgtgtaatcaagagaatcaggagtgaccatggcagagaatttgaaaacagcaggttcactgaattctgcacatctgaaggcatcactcatgagttctctgcagccattacaccacaacagaatggcatagttgagaggaaaaacaggaccttgcaagaagctgctagggtcatgctccatgccaaagaacttccctataatctctgggctg

SEQ ID NO: 21728 - DNA, 325 bp, Glycine max
  unsure at all n locations
ccccacccccacaatagaggcgcaaccaaannnnnnnaagagggatgatctcagcacagnaangccgcgggaccaaccacgacatttttacaacagaaggggggggccacccacgcaccgcagagacacacacacacaccgacaaaanagaaaaagaacaaaaaagccccccccaccaacccccacacacagaccaagcaccaacacaaccccacccacccagcccaacgccacaccccccgcgagcccacacacccccgaaaacacacccccagacaccaaccccacccaacagcaaaaccccaacccgcccccacgccagcgc

SEQ ID NO: 21729 - DNA, 392 bp, Glycine max
  unsure at all n locations
gcaaccgaaaagaagaacgaagcagaaccgacacaccanccacccgcgagcnatgaccctgaacccgaaacccaaccccagacgggcgaaaaccgccgcgcaaaatatcgaggccccggaggccgagcaggaagngcgcaccgcgccaaaccaagcaaagaaaggcgaccgcgcgggcggaccagcccccgccgacgctcaaacgcggacaaccaaaagcacaacagacggaacagggcacgaacacgaaaaccccccagaacacggaaaaacaaacacacaaccgccgcccaagcggacacaaaacaagcgacaaaaaagacccacccaaacccccaaaacaaaaccccgaaaaaagcagcaggcgaaaaccagaccaacaacccgcaacg

SEQ ID NO: 21730 - DNA, 407 bp, Glycine max
  unsure at all n locations
agcttccttattanagaacctcctgtgctgagatcttcacattagcaacccagataacatcttttccagtaggccaccttaagggaattttgtaattcactggtggcagaactaaacaattctgcctaagctcacggccgcattgccggtcaacttcattgccatcggaaactcccaattccacattctcagaaacattgtagcaaggaacaaagttttcaaactcctcagaacagaattccgactccttcaacctcaacggaccacgagaaaactcgccaatatccaaaaggtctgagacaagcttctcttgaagccttctataaccatggtaaatgtgacctcttgatgaggatgaaatcgacaaagtccaccataaagatccagtaagagccataacaactata

SEQ ID NO: 21731 - DNA, 179 bp, Glycine max
ggaatggtgatgcaaaaatcaactgagcttggaatgaaaatgcaaaaatgatatttggttgggattttttgttataccgtgcagaagctttctagcctcgtggacgtgacctcataagtctggagatgtagagctaggtaccgaatgagtggtttttaaattggaattaaaaaaaaaag

SEQ ID NO: 21732 - DNA, 404 bp, Glycine max
agcttgcattttatatgtttcgaacaaatctgataggtgaaataaatatttttttttaagttcgtatcttgctcaccaaatctactaaaaaacacactcgtccccgtacctaaataatgatgtgaaaaaatattttttgaagaataaaaaatgtataaaattagaagattttttctttcatattttaagctaaaatatatcacactaaaatatatcaacttttataatagtattaaacaataaatattaaagtgttaatactaaaatatactaacatttataatagtctcaatattaaaagcatcaaaatgtcttacatactggtttatatcggtaatccgcaagtcggtagataaagtccactaggctaaactaaaaaatttaatatagttatccagattttt

SEQ ID NO: 21733 - DNA, 278 bp, Glycine max
atgaatcgatacaaaacaatcgcatgttaagaagatcaatcctcactcgtaaaacagctggttgagtcctatcatcatgagccttacagaaaaatgctgtgaggcataattttgctaattgtatcacaaagtcaaatatctactctcaagctggcgacctccttgatcattacttgatatacatagcctctcatcttgagcccaaaataagtgcctgaggtaagactggttcttgtgacacagccacaattagatcatttataaactatacaccctgt

SEQ ID NO: 21734 - DNA, 409 bp, Glycine max
agcttgtctatagaggtccaggaaggacaaggcggccgaaggaactagttccgctccggagtacgacagtcaccgctttaggagcgctgtacaccagcagcgcttcgaagccattaagggatggtcgtttctccgggagcgacgcgtccagctcagggacgacgagtatactgattttcaggaggaaatagggcgccggcggtgggcaccactggttactcctatggccaagtttgatccagaaatagtccttgaattttatgccaatgcttggccaacagaggagggcgtgcgtgatatgagatcctgtgttaggggtcagtggatcccgttcgatgccgacgctatcagccagctcctgagatatccgatggtgatggaagagggccaggaatgcgagtatggccag

SEQ ID NO: 21735 - DNA, 386 bp, Glycine max
tcctcggggccattcctgcgaaggcaaacatttggattgtagttttttagaaatataacaatcattacaaacaagggccaaacaacacttctcatggcacgagtgtcaacatgcactttataaaataatcatattggggtcgtgctattttatgacacatacgtatttgcacacataaaaattttgtgtgaaacattttacaacacctatccatgtacatatttttttgacaaaccttttcaatgctacatcctatatatatacacacattttttggaaggcttcttttgttacctactcacaaatacacatattttgaaaaacacttttacgctacccatccaacactgtgtaaggcacttcatgctatatatattcatattatg

SEQ ID NO: 21736 - DNA, 407 bp, Glycine max
agcttttctactaagttgcctgatgcctgaaatgtcttttctgatggcagtggtcctagatgcagggaagattttctccaagaacaccctcttaaggtcatcccagctgaaaacggacctgtgagcaaggtagtatagccaatcttttgtcactccctccagagaatgaggaaaagcctttagaaagatatgatcttcttggacatcagggggcttcatggtggaacaaaaaatatggaactccttaagatgcttatgaggatcttcacctgcaagaccatgaaactttggcagcaaatgtattagtccagtcttgagaacatatgaaacaccctcatcaggatattgaatgcacaagctttcataagtgaaatcaggtgtagccatctccctaagagtcctcttac

SEQ ID NO: 21737 - DNA, 434 bp, Glycine max
  unsure at all n locations
aactttagcttgcctcacagatgtccaggaaggacaaggcggccgatttaactagttttcttccggagtactacagttaccgctttaggagcgctgtacaccaacagcgcttctaagccatcaagggatggtcgtttctccgggagcgacgcgtccagctcatggacgacgagtatactgatttccaagaggaaataaggcgccggcggtgggcatcactggttactcccatggccaagttcgacccagaaatagtccttgagttttatgccaatgctntgccaacagaggagggcgtgcgtgacatgagatcctgtgtaaggggtcagtggatccccgttgatgccgacgctatcggccaactcctgggatatccgttggtgttggaagaaggccaggaatgtgagtatggtcagaggaggaaccggtctgat

SEQ ID NO: 21738 - DNA, 403 bp, Glycine max
ttgctatctcaatccaagaatcatatatcttgatttcaatttgtgcccaatattctgaccgttagattgtacaattagaagaaagaattagtgaaaatttagctatagggtggtccaatttcagtttggtcccaaaacccttcttagggtaagagctactatagagttgcaacccttgtgcctgtactaagggggaaacttttggggccagggccatgtgaattccaaatggttctgccgaaaaaagtttcaatccaaagacttttgataattattttttaaaaaaataatataacgtgcctatcggaggaagattattgtagcaaacaagttctacatcatcaaatggggttcctttcattaattttaggttgactaccaatagtgtgcgtataatatatga

SEQ ID NO: 21739 - DNA, 528 bp, Glycine max
  unsure at all n locations
tgagcatcnctttgatccatgataccttgcantacgaacctatgaaactcaactaaacggaatgcgcacctgaggggattttcgctactttattgcgactnnggcagagagtgactgctgaaatatgatcacttgagacactagtagatcgacaaccatgcgatacatttggataatctctcggtggggtcatgctatatcttgcaatcaccgtggccaagtatacttcctcactttatgagtacgttagcataatagcgtcgtagacgaagaaataggctagagttgactctactgaatcaggattctaaacttgctttggacctactcacttggagaaatatcaacatgtttcatcaatatttccctaccatcatgctgatccattcattgaagctaagattgattgtgaggcgacctctttgcacgtgatccgtgaagggaacaaatgtgcaaaatgccttgaaatacaagaaactcttcttcacaggatttgatattctcgagctatatcctctgcctataccg

SEQ ID NO: 21740 - DNA, 397 bp, Glycine max
  unsure at all n locations
tagcttttctttaacaatgggcgntgtctctaaatggacatatatttattcacatgcgtatgaattntatagccattggacgtttaatatttgcattcaatgcagatacttcttcatgttagaaaattactcttgttaactttcatgtagaacacttcaacagaaaatcacttcctttgcgtcagagcaggtttgtcatagtagggcgtgtcttttgatacttttgatcttcaaagtgttgaacattcctttgtgcttcttacgattcaacaaaccctangagaatactatactgtctaagaaagttcctgcaaaacaaatttcaaacacacaatattaaatgaagctcttacatgcactttttaatgctatatcagatcatggagtgtctctgcta

SEQ ID NO: 21741 - DNA, 337 bp, Glycine max
  unsure at all n locations
cgtggctatacgagacatctttccaaacaaagtcaggttagcgataactcgcctgtgctttttcttccatgctatatgtagcaaagtcattgatccagtcaagtttgatgagttggaaaatgaggccgcaattatactgtgccagttggagatgtattttcaccctgctttctttgacatcatgattcacttgattgtgcatctggtcagagaaatcaaatgttgtggtcctgtntatctacggtggatgtacccggttgagcgatacatgaagatcttaanagggtatacaaagaatctatatagtctggaagcatctattgttgagaggtacatt

SEQ ID NO: 21742 - DNA, 406 bp, Glycine max
  unsure at all n locations
tactttgcatggaatgncaagcttaagcctcgaaaaagtcatgctcaagccccacgtgatgtgtagttcttcaagattttcttgctttggtcccaccattagctattgcttaagttctcttgcttctttattcgaaataaacaaaaaattaagatgagaaattaccaaaacatgcatgttaaggctattctaatttatttacatcataaatgttaaaaagggcaaataaagtttagaagccctaaaatactaagataattgcctcaaaatcactcaaacaaggttcactaggtaattatcaattgtttaagatggaagaagccaaatctattaatgagatgttcagtaaacttacaatgatcataatatatgtattactccctcagataaattttttgtctagtca

SEQ ID NO: 21743 - DNA, 296 bp, Glycine max
gggaagctgtatagttgcatgcttattaatgcaatgtggatgcaacattttggagtcaaggttactcagttggttgggggatatgtattacagatcataaaggtcaatttgtgccaactaagactatattttccgtcgttggtcttgatcttatctacggtgaagctttgggccttctacaatgctttatcgtgggtagtacaattaagccttccttccgtcatctttgaaatggattgcaaatccatatataatcggtgcttaatgaagtagcaatgtattgagtgggcttattc

SEQ ID NO: 21744 - DNA, 407 bp, Glycine max
  unsure at all n locations
ttgctttacatggagctacgttaagactgaagagggaagagagccttctagtagcaacccttgactcgttcatgggggatccgcagctacgacaacaaatttgtgtcagttggtgtcgtggatgagagagattgaaaactgcaccattgccacgaatgagagagatcgacaaccgctacatcatcacgaacgaggttttttcaatcctgaactctttcgctcaattgtcgtcaacacaccacatcaaatcctagccaccaccatcaaaagcctactatgaacgagggagactgcaactgctccatgaccacaatctacggagaagggttntgaactttgattattataaaatcaaattaaaaattattggtgttttaaaaccatcagtatgtgacaactagtaaaag

SEQ ID NO: 21745 - DNA, 381 bp, Glycine max
  unsure at all n locations
ntggcactagagtcactcaaagaagaagagatcattgtatggatttcagacacaattttaggcttcctatcacattcacttgagtttttcaacgacaatgtgaattctgagaagtactctcaagaatacaaggtgaaattcaataaagtgttgaagagccagtggggaatagatccattatttttaggctcatatagtcatatggcagttggatcaagtggtgatgatttaaatacaatggcatcatatatgagggttaacattntgttgtttgtgtatcccaaagcacaaaggaggttaacatagttctgagaggtggcatcatatatgagaccaggatcaagtgttctattatgttcaatctcaccagctcccatagca

SEQ ID NO: 21746 - DNA, 410 bp, Glycine max
tatctttctaaggctatgagaggctaaaccccttttgttgggagcctgtcatgccgaactttttaatgtaatttttttccattatctatttaatgcaatgttgtttttgatcattcatataatgtttatagggtaatgcattgaaaaatggttattttctaaaaaattatggaaaggtatctaaataaattcattggtagaaatagatagatatttgttttgccaatttttgcatctttaatcttaatgcggtttataatttctatctctacaaacaatattgggagaaaggaataaataatttacgttattcgtgtggtataccaaagatccacgtctttatatatgtgggtggatatagggatgtcatgagatagagaatatattcaccattgcattacaagtaattt

SEQ ID NO: 21747 - DNA, 302 bp, Glycine max
  unsure at all n locations
ctccgctgcttcctcgcaaagaatnctagtttttcctgtttggacccaaccgccaatcctaaaggaagactgcttgtggctatacaccctgaaaataggaccgatggactgagtactgcacatggcgctgctatcactagaagatatgaccttctgtttattccccagtaatacgtaatatctttctgcgcatacacttccttttactactaatattggagcatatactgcttatattctagaatcattatctgactatccttaagcataaatgcatgactgattatcatatgcaggccctg

SEQ ID NO: 21748 - DNA, 406 bp, Glycine max
tctgtttgcaagttttgcatcatcttggggtaacttcttaatgctcttaaatcaaacaactatcatttggaaagtagaaagtatggcatgagaaaagctaagggcatagtgtgatacgtttgtcaccctgctaatcgttcctaagccactaaagacaccagtgactttattttgttctcacgctatggttgaaaatgttttggacaacaaaagtgttaattaacttgaattctatatcgtcaaggttgtaagcattttttttttaacttctaaaccttatctttggattttattttgacgggtctgagatcgatgggctctgctaacacaacggagcgattgcggataaaggggccgaaaagatgacaggaaatgccattgcttcgtgtacctcatatattgctta

SEQ ID NO: 21749 - DNA, 287 bp, Glycine max
aattctagtcaacaaagcaaaaattcttgtgtttaacacttttattttacctaattgacattattattgtatacagctagacttgtgatggttttaagcttgcttttctttttgattaatgacagattactgcactggtcacaacaaacctgaacaaagtaattgatgttaattactacccagttgaaaatgcaaaacggtctaacttgcggcacagaccaattggtattggagtacagggtcttgctgatactttcatacctccttgcatggcatttgattcacca

SEQ ID NO: 21750 - DNA, 394 bp, Glycine max
agctttctctaccggtgaaaaaacattgtcggccagcgcttgtaaaaaaattgcgcaatgtcggctgaaaaacatcagttggggctgtttaactaccgatgctggctactgttttttctattccacccctgaataatacttggacgatgtcgatttggaaatgttcgatcggagtcatccggtcatgcttctttttaagacctcgatctgtcatcttttcctggccgacgtcagctagcatttttttcgatcaatatcggtgaatcatgctttttgccaaggtgggctaacgttttcgtggctcatgaaatgagagcatgccagtgtctgccgaaacacaatctcgcacgaaaaaccctagccgacctacattgtacattttgtaggcaatacc

SEQ ID NO: 21751 - DNA, 346 bp, Glycine max
ttgcagcagattttattaatgtttcactaacctagaattaaaataacttaatgccattaacctagggaattaaaaaaaacttaatggctgagtgtaactgacattgtggcaaccaaaaatcacccccaacagccaacaagtcagccaccatttggtctcccaaaaggctgatgcctacgttgccaattgggcccttattacaacttgaactaaacctaactaaagcccttttagttgattaacccaaaacatatttttggtcagtcaactttacaacgattgggccattatttaaacaaacactctataattgatacaggtggtgtcattaatcctcctcattggg

SEQ ID NO: 21752 - DNA, 411 bp, Glycine max
  unsure at all n locations
agcttatgttcgttggctgcatgaggtagatgatattgggagtacatcancattctttgcttgaggttgccctgccactcgcaacctaataaagcctcatgcagttccttctcacttttgggatgtaaatttgaaccctggaaagtgttttttttgtgtgtgtgtaattgtgaaagaagaaaggatgataataggtatcatagcctacctagtttttgtttaatgatatttatatctgtgtggttgtgcaagaagaaaaaatgagaatagattgagctttctatcaggaaaaagtaaccgtttgtattgagacaaatattggaatggcatcaattccgtagcctgaaagactgcattttatcttccccggaacataatacatttggagacataaactatccaggctcaatc

SEQ ID NO: 21753 - DNA, 418 bp, Glycine max
  unsure at all n locations
tgtaacctattatgactntgatgaagagcaacgcatatttcttggcctctgaanttttttccttatcttccagtgctgcctttactcttaggccttggccaaaagaatgagtatcatatttatatgtttgataataataataatatttttattttttttcttgatacatgtaaaagacaacaacataacataagttaaaaagatttaatttcagttgattgagttggatatatgagttattataagttttttaattttcacggataaaaaaaaaaaagagaactaacacaaacttttatatatgcatatcaaattgaaacggtaacataatgactccttttcctttaatttgcttctttcaggagagatcatcatcaattgacatggaatcatgtgtgcctccaggatttagatttca

SEQ ID NO: 21754 - DNA, 410 bp, Glycine max
agcattgattgaggattgtattgttcatccggtgtctgaaaatcccacccaaggttatcaaattcgagagtttacaaaaactcgtaagagtttcatagactcgactcgtaaactcaactcatagactcgtaagagtctacttcatataaaaataataacaaaatatctataaataacatactaattaaacatttcaaccatataataaagcaaaatagtaaatcataaagttcagaatatttaaataatcaagtctagtaataatacatgactactaaacaataacttgtaaaggttatagtagtggtagatcattctcattgagggtttgatgttattagagaacaagagtttgatattattagaggtaagaattttatatttgagaataacacgctacatgaaggtat

SEQ ID NO: 21755 - DNA, 434 bp, Glycine max
  unsure at all n locations
tctatgtggttntaagaatgatgaagatgagaagagttttgagaatgtatcgaaagctctcttttgtgcgattattttggatcctctttagaaatgtacaaccatctttttctttcttgtcagttggcataggatctttggaattgggtcagtaacttgttgcaatgtcgcataaacctcacgtcccagttatccatcctgcatggtcatcagaataatagcaagcaagttcaagatgtttatgttgcaactattttaaatgttgtttggtatatctagatcaatagaaataactctagattcaaattaaacatggcgtttaaagaacaagattattgcggatgttgctcgcgcangtaattatagtttggaataaatatctacgcccaagatccaatccatcatgttatcaattntaataaagaaattgtctt

SEQ ID NO: 21756 - DNA, 406 bp, Glycine max
  unsure at all n locations
agcatgatgtttttgccatgttaggatgagttagacatacccattctgntttagggtttttgtgatgatgtttgtgatgtttatatgctgaaattgcttatggaaaactgttagagatgaatggttgagttaacctagggttagaaagtgagaatgtgatgttatgagtggaaaaagagtgaggctttgagagttggaaggttaagtctgaattctgtggtaaatggaggttaaagtgagttaatcctagcttgaaatgtcatttaggacttatgagaaagcttggactgtgctagagagataaacatatgaccaaagtgaacatagagtcatttctagggcaaatttgggtgttgaagagtcaaattttgattcggtgagattttacgtgtaaatccatttgaac

SEQ ID NO: 21757 - DNA, 418 bp, Glycine max
  unsure at all n locations
ggcaacaatggtggatgagaganaagaagattttgctgcgtgttagagagggagagcttctgaattttcttttggctgagtgaggagagagaacagcttttggctttaaaaagggttttctcttttcctattattttatttaagctatgccacatgtccccatttgagtggagcaaaaagggcccactttctcttttgattgtgacccatacttagtcacaaaaagtgagaaaaatctgacctttgaaacgctaaaatcctgcctcggtttgcgtgtcgtttctctggttccagttcctcgcgtttctctgcgtccgtcggggccagttttcgaaagtaggcaatatatatatcaaaacgctcaaaataaaaccccaagcgttgttcagaagttggtttcgttaaattttaagtcgca

SEQ ID NO: 21758 - DNA, 410 bp, Glycine max
agctttcctttggtttcttaccttcccagaaatagcgtcccccaatagaaaccaaagcattgtgccatacatacgtaactctctctctctctctctctctctctcactctttatattaaagctttccatttcttagtttcaaaaaattttctttttctctccacagacccctctcatggcatcttcttctggtagtttagacacctctgcaagtgcaaactccttcaccaacttcaccttctccacacaccctttcatgaccacttctttctctgacctccttgcttctcccttggacaacaacaagccaccacagggtggtttgtctgagagaactggctctggtgttcccaaattcaagtccacaccaccaccttctctgcctctctctccccctcccatttctcctt

SEQ ID NO: 21759 - DNA, 422 bp, Glycine max
  unsure at all n locations
ctttgcttccaagcagctgatgggggagagtgtgcttgcgcctttgaagttttgcaccggcgagaggggggatggatttaatgaggctgttcaaagagttgaggcagtctgtggccaatgattggggaggttacacgccttccgttgtggaggaggataaggagtttttggagaagaaggaaaagattcaggagcttgagcagcagatcactggtgcatctcaacaggtgctatttggtttttatgttttcggtgaatcacagttggattctatttcagatcattagtctgtgtgtatgtagctgtttaacttgtgttacattcttttactgagcttatgaccaatgttntaaatngtgatcatggttgcattatttgtgcaatgtaatattgtcacaatactttacattgcgtgcaaatgt

SEQ ID NO: 21760 - DNA, 420 bp, Glycine max
  unsure at all n locations
agcttttgtgtacaaagaataagaagtttcaaagagattcaaggcttgtaaaggatttttttagattgattggattgatttaaaatgcaaaacaaagccttgctttcatagactctccatgtctggtcaagaggaccatttagaagagttatgacttttagaaaaacttaaaaccaatctgaaaaagtcaaaaaccatttgaagggttacatcttttgatttattcagaaataatcactggtaatcgattaccaaatcagtgtaatcgattacacaaagcttnttgtaaaaagaatgtgactcttcacatttgaatttgaatttcaacgttcaagtacactagtaatcgattaccanaacattgtaatcgattacaactttttgaaatcaattggaacgttgtaaattcagttgaaagct

SEQ ID NO: 21761 - DNA, 420 bp, Glycine max
tctatggaggctggatctttgagcttcaatgatgtcctttaatggtcattttccaccatggagatgcagcggaagacaaaggagaagaggtgagaggaggcgccatccactaaggaataagccatggaagaaggagcttcaccaccaagatgagccttggataagaagcttggagacgatgcttcaatggaggaaaagaaaaaagggagagaaagagagataggggagcacgaaattgaaggaagaaaaagggagagaagttgaactttgagttgtgtctcacaagactctcattcatcaaagttacaataagtgttacacatgcttctatttatagacttggtagcttccttgagaagctttcttaagaaaacttccttgagaagcttctttgagaaaacttccttgagaagctagagc

SEQ ID NO: 21762 - DNA, 400 bp, Glycine max
ttacttacgttgttcattctgaacgtacatcttcttgtattgtttaacaagggcatttttaggttcaacaaggacctgtgtctcacacggtattgtaaaaaacagtggagttcagagagctggtagaaggataaaaataaaaaatgatgaactttacatctcattttcagaaacatttggatgtgcaaccccaaactaacagaaatggaaaaaaaaaaagaaaaaataagaggaacgtgataaaaaaggcacggtaggcttgaaacatctaatgcatgtcataatcctccagaaataagattgaattttcatctttcatttcacccgtagtgagggttgaacgtttgttcaaactaacagaaataacatagcagaatgttatcaccagaatgatgcttgt

SEQ ID NO: 21763 - DNA, 358 bp, Glycine max
agctggcgtgaaatggctttatgtgattctggcacaatctaacgttaaccatgttcaatgaaagtaaaatacttaaattattactctaaacatacttttttttttacagataatctaaagatacttggggtattgaacgggtctaaaaaatctagacatcaatattaaatggatcctttaaagagatgccaacaaggtgagtctagactgagttatggagaaagattgagtcggatgtccttttaaaggatctggctatgtcgttctaacttctttgcctttgttcgagtttcccatgtactcaaccaaaaaaaaaacagttcttgacatcaattctatttcttatatatataataag

SEQ ID NO: 21764 - DNA, 387 bp, Glycine max
ttagctttgtctcattgaggtccaggaaggacaaggcggtcgaaggaactagttccgctccggagtacgacagtcaccgctttaggagcgctgtacaccagcagcgctttgaagccatcaagggatggtcgtttctccgggagcgacgcgtccagctcagggacgacgagtatactgattttcatgaggaaatagggcgccggcggtgggcaccactggttactcctatggtcaagtttgatccagaaatagtccttgagttttatgccaatgcttggccaacagaggagggcgtgcgtgacatgaggtcctgcgttaggggtcagtggatcccgttcgatgccgacgctatcagccagctcctgtgatatccgatggtgttggaag

SEQ ID NO: 21765 - DNA, 413 bp, Glycine max
  unsure at all n locations
gtgaagatttggtctttgccagtgaattgatcgatgttggtatgaaaaaaggcaaatttagncatgctgcttggacgaatgagaaaactggggcaaatgaagagggtgagaaagagggagaaacccatgctgtgactgccattcctatacggccaagtttcccaccaaacccaacaatgtcattactcaatcaataacaaacctcctccttacccaccacccagttatccacaaaggccatccctaaatcaaccacaaagcctgtctaccgcacttccaatgacgaagaccacctttagcacaaaccaaaaaaaacaccaaccaagaaatgaattntgcagcgaaaagccctgaggattcaccccaaattccggtgtcatatgctaacttgctcccatatctacttgataacg

SEQ ID NO: 21766 - DNA, 406 bp, Glycine max
tcttctttgttctttttataaaatgagaaattctgaactcatcacgttatctaaaaaaccttggggtggatccaagtgctccgatcattcattttcatattcatgttttggtggcatgctcaccgttgtttgtttctttagggaattcaccataactaagaaagcacaaaggcacccctataacactcgatccagaaaaatggataatgaagagggcgtgcaagagcagatgaaggccgatctattggccttaaaagatcaaatggcttctatcacggaggccatgctaaaactgcagaaaactctagaggataatgccatggcaaccgcctccaatgcagttagggaagcggaaccagtgctacagcccacgataaacttgggccgagatagaaacccgacggtg

SEQ ID NO: 21767 - DNA, 398 bp, Glycine max
tctaaacggatctcatctagctcattttgttgcaactttctttcctctccagcctgatcaatagagaagttgcaggtctttacagcccagtaggctttgtgctctatctctacaggaagatgacatgccttgccaaagacaacccgataaggagacattcctatgggtgctttgtaggcagtcctatgcgcccaaagagcatcatctagcctggtgctccaatcctttctgttcggctgcacaatcttctcctagatcctttttatctccctgcttgaaatctcagtctgcccattggtttgggggtggtatggtgtgtgtcgcaacctaccctttggcgggcgagcgaggtgagggctcacgggtgcgtcttccataggaggaaaatgcgcggagtc

SEQ ID NO: 21768 - DNA, 409 bp, Glycine max
tagcattatactatatatatatagtatttttttataaaatattaatgttcgagggtatagttatcgtccttcgtccttaattaataaaagcgaattagttaagagaattagagaaacacatggaggttgaattgataggaaaaagacaaataatttgcaaattaacatggtgcgaactgggaataacaaaaaaaacacatcacctatatcattatctctgtaaaaataagataattattcatttattgggattggggatgagaccggatatttatatctaattttttgttaaaataaatgtaagtatgaatactataatatccatatggtcccacacatgtatatcatatatattaaatattaatgtaattaaaatatttttcttaagtaaataattatattatacata

SEQ ID NO: 21769 - DNA, 381 bp, Glycine max
  unsure at all n locations
accttagaaactccgcttcaatattaggggcataattgattttaatntaattctcttattncttttgtatttgactaaatagtaaataccaacatcatacgataattgttagccttatcttgatttcaaactactaacgtccgtagtcttctcgtccattttattgatacttgattcaaggaattggtttattcttttgcatgcgattaaagatctcccggacgcccagaaagtcactgacagaagtggcgaagttgatggtgtacctcaagaatgactacatccttagtgtgtattgaatttcatttttattaaatattaattatttataatgaactaattatctgttgtgatatttttcttttggctgctggataccca

SEQ ID NO: 21770 - DNA, 408 bp, Glycine max
  unsure at all n locations
ttgcttctaatttatntattnttaaattgtattctcattatcttattgaaatttctcatttatcttttaaaagtctcactctctttcgcttgtaattatttctaactcaaacaaaattatctttgtgagactcatccattcattttgttaaatacaccctcacaagaagttttattattttgaatttttttacacaatttcattactacaactatgcgtgcgtgaatgtatcaatttttagtcctcgggtttgatcttcttttcactaatttcaaaaatctaataaaacccttttaattaagtataattttatttgaagtagacattatcgtattgtgactaacaattggtttaaataatttactctacatataaatacaaataggtatcttaaacagaacatttcta

SEQ ID NO: 21771 - DNA, 394 bp, Glycine max
  unsure at all n locations
cttcagattagttgtttatttttaaatgaattatctgatcagtaaaaaaggagtcgaatagtagtatttataagcctaatatcaattgtttaaaatttataagttaatataacactaatgtatctaaaggaaaattaaaaaaaagaaccaaaataatataatacattttaaaaatataaaaaatcagaatgaaaattttaaaatttaatgtatatataaagtgaaaaattgcataacataagtgccattaagtcttttttattatatatgagaagagtgaaaaaaaaaagaatgggatattttcatgcttcgatttaatacataacaaatcttttgaaaaattaggatntgtgttgttgaatattttactacaaaagatctaaatcttcctact

SEQ ID NO: 21772 - DNA, 388 bp, Glycine max
tggcttgcaagctttgaccatttgaatggctcaagcgcttccattgttcaatatcgagcgtctcgatctattatgcgcttgaatcggacctccgagtgaaaagttaagaccatttgaattgctcaagagcttccattaaccaatttcgagggtctcgatattttatgttcctaaatcagacctccgagttaaaagttatgtccatttgaatatctcgagagcttccgttgcttaatttcgagcgtctctatatgtgatgctcctgaatcggacctccgagtgaaaagatatgaccatttgaatatctcgagagcatccgcttttcaatttcgagcgttcctatatgtgatgcgcttggatccgacctccgagttagaagtaatgacca

SEQ ID NO: 21773 - DNA, 264 bp, Glycine max
aggcttgcctgagctgaatgactcaaccagttgaaaccggaagaatttgattttaaaaattgggaaggggttggggaaacccccataacaaaaaggggcaaggacacctggaaatagagaagggcgtcccaaaatagacatgaaaaaggaaaagaaaacgaggataaaagcgcaacaaaaagggaaagcaaaacgattgaagggaaaagaaaagggaccacatgaaatggagcagacaagagacaaaggcactagacgagcacc

SEQ ID NO: 21774 - DNA, 406 bp, Glycine max
tggcttgcaagcttggttcgaggtacttacccgttgaagatcgaagaacgatgaagaacgaatgaagaacgtcgaagaacggttgaaatctttgcgaaattcctcacggaaaacgttacggaaacgtttcggaagcgcctcggcttagattttcttcacggaaacaatttttccaagcaaattcgaaagagagagaagtgccaaaggggctgaaccccttccttcttcacttcctcccctatttatagcaaaataggggaggtggttgccgcccagctcgcccaggcgagctcagctcgcctaggcgagccaggttgcttcctccagaagcaacagccttctggaggaatcttctggagggccaagtgggcctgggtgctatttgcacccccatttctactaagta

SEQ ID NO: 21775 - DNA, 402 bp, Glycine max
gcttgaggattatggggtacccattacatgtggtactatgtggcggtcgggcgatggtgcacaacaagttttccacatccacaatgcgcgcataaacccaccatcccctgttgcccacctccaactgagctcacgtactcccacgtagcccatatcctcgtttctctcaacaccgggtccccatcaatcctcccaagcttccacaacatccaagcaaaacaacattcacacagcacaagctatcacagccaagcaaaacaaagcaaaggcagaaaactctgccaaaacaccaaccaaaaatcacagcttttcccactcaaagaccccagtaacaattccttcgattccaattgttaaccgttggatcgactccaaaattttactggaagtctatagtgcata

SEQ ID NO: 21776 - DNA, 412 bp, Glycine max
  unsure at all n locations
agcttcggtagaaagtgatgaggtacaagccctaaaggcagagcttgaaagagcccgggtagtcgaagagaagttcaagtccatagccatcaaagtctgaaaagagtatgatgaactaagggacgtcaatatggccaccgctgaagctttggaacgagaaaccaagaaggcctgaaaggaagaacacgaccaaagcaaagttttgaggggctttatatggcagaaatagtgagctcaagctccgaagaggtgagaggaatcatcatgggtcaaaggcatgatcttgaaggacgagctaaaggcttgccttangtcgaaaagaaatttgtcccaacagttaagcgagactgaagggaatatgtgggccgtcatcgatgagtgcaaagagaaactaaatctagcggcgactcac

SEQ ID NO: 21777 - DNA, 443 bp, Glycine max
  unsure at all n locations
actcacgcttcaatatgttctcagtttaaacttgataatgcaggaggcttgaatgtgtaangagaagcagacagctgggaccttggagtaggtatgtcacatgagaccaatatatttgggccttaaataaggctgggtcttaattgaaccctgngcgcgactttgtggggctcggggatggggccttagttttagtcttgcagattgtttgccttatgaggatgttgaatttcttgaaattgtcatttagatatggtatattagaatcataatggatgttctgttttatcttctacccttgtttttgtgactcagtggctaaactttcattntatatactgcttatacacttagtaatgaaaatttgtgcatatatttgcttaanaaaatatttgtgcatatagaagtacaattntcattacccaattctatatttgtgtaag

SEQ ID NO: 21778 - DNA, 405 bp, Glycine max
  unsure at all n locations
agctttagttactacgtgaccacaaaattttatattgagtgtccacgtggatatgttctacgattggttttgcatgaatttctaattgtcataacatatgattcatggatgtgatctgggcattctttatttctaagccattggccaaacagctgtcccaatgtacattattttctgccatttgcaatccttttgagccaaacatttgatttttaccagaatcctgacctangatgaaagtttcctaccttactctaggataggagagcaggggtgtttttcaagggagatttctatcatcttttggctagacatggatttttaaagggagttaaatattcatcaaacaaaaacaaaagagaagataacaagaaaggaaaagaaaatcaatcaaagatggaaaat

SEQ ID NO: 21779 - DNA, 404 bp, Glycine max
  unsure at all n locations
tgcttgtggggcttctatggaggctggatctttgagtttcaatgatgttctttaatggngattttgcaccatggagatgcagcggaagacaaaggagaagaggtgagaggaggcgccatccactagggaataagccatggaagaaggagcttcaccaccaagatgagccttggataagaagcttggaaggatgcttcaatggaggaaaagaaagagggagagaaagagaaaggggggagcacgaaattgaaggaataaaaaagggagagaagttgaactttgagttgtgtctcacaagactctcattcatcaaagttacaacaagtgttacacatgtttctatttatagactacgtagcttccttgagaagatttcttgagaaaacttccttgagaagcttctt

SEQ ID NO: 21780 - DNA, 412 bp, Glycine max
agcttcttattttcagataatgcagttgagtttgtagctacctcatgcactcctctaatgactatagcatcatttctggcgctaaactgctgggagttggaagccatcttctcaattaaatttctggcttcagcaggagtcatgtctccaagggctccaccactggcagcatctatcatacttctctccatatttcggagtccttcataaaaatattggagaagcagctgctctgaaatctgatggtgagggcaactggcacatagttttttaaatctctcccagtattcatacaggctctctccactgagttgtctaatacctgagatatccttcctgatggttgtggtcctagaagcagggaaaaaattttctaagaatactctcttaaggtcatcccagctcgtgatgg

SEQ ID NO: 21781 - DNA, 408 bp, Glycine max
ctgggcccatgataaataaaagtatgtgttagacatttttattaagataacttgagagagttgactgttagcaaatcacacgtgatggttgtgtaacttatgtgtgaacttgtgcaagaattttgtttggatattttggaatggattgttggacctttaggtcatatttgtttgctagttcatgcgggagaatagagactcacctatacacccaacatttttcaaataaacttatagatgtagttcgtttatcaaagaagaaatggatttcactacatcaatcactaccagtgtagatggacttgttcgtgaaagaaagacctttcaaggataccgttagacattggatgacccaaccatcttttagagttttgatgaaaacaaagatataaatatgtgttaatcaat

SEQ ID NO: 21782 - DNA, 411 bp, Glycine max
agcttatcttccataaattcctattttacatttaacaacaatcaaaatttgactatggttcaattatacattttatacgcgtctttatttcacttttacaaattgagctcagatccattatgataactattacataggcccagaaaaaatggggatcatttaagaaaaagggagataaaagaaaataatagcaaatcgtgtatggtacctaatagagcttcttccttcatcaaactcttcttccatatacaaattattctcaaaattatgtcaccaaaaaattcatttccttcttttctctttcaaatcaatttttaaaagtatataatgtaaagaaaaaatgggcactcatttggaaaaaagggtgagcaaagaaaataataacaaggaaattcatgttatgaacatgta

SEQ ID NO: 21783 - DNA, 361 bp, Glycine max
  unsure at all n locations
acttaaccctggcatttatcaagaaatttagggtctattatatttatactgaagacagttgcaagtctgtactttgttcacatttcaaactcagtagatcttcacttcanaagactttggttagagatataaaactatttttgtacatttcatttatccagaaatttagggtaatattatactaaagacagtcgcaagccagtaggttcatatttcaaactcagcagatcgtaattntttagaagttcacactgagaaaacaaaatgaacaaggccgcctaacttaaggatattttcctcaagataaaatccatcacatcttgtaagaactcagcccaactaggtggaaatgcaagctcac

SEQ ID NO: 21784 - DNA, 392 bp, Glycine max
agcttgcttgtacaatctatggcttggtgatgatgacaacgtctgatgtcatgaatcacacacacacacacgctgtttgatagtcgagcactcgcatatatgtccattctcccacttagtctttgaatttatgctcctcttaagagtaagttgattactcatgtgagttatggagttaatccctatatctatccccctttggcatcaacacaaaaccaaagtgcatgactagtacgaagcattcaaagacgactaatcatccacacaacatgcatggaacaatataaaccaaatcatgaggcatgaaccatgaatagatcatatatatagcagccacatatgtaaataacataattaattttggttcacacataccatgccaataaagaaat

SEQ ID NO: 21785 - DNA, 304 bp, Glycine max
tagccctagaggtgatggacctcgacaagatctggagtggatcaataacaatgcctataggtcggacctcccatataagtgtggagtcagccccactcttaacattactgagatacttacttatgcacgtgtacatgatctggatgaggaggaactaacagatttgacgtcccatcctctgccatgagcaaggcatgatgcaatccttcctatgacgggaccagccactatagccatgagccatacgctccaagaggattgggctagagcacctgatgacagccctaaggatctcatgaacctc

SEQ ID NO: 21786 - DNA, 406 bp, Glycine max
agctttgcagatttggccttcgccagtgaaaggatcaatgtgggtccgaaaagaggcaaatttgatcatcctactaggacgactgagaaaactggggcaaataaagagggtgaggatgaaggagaaacccatgctgtgattgccattcctgtacggccaagtttcccaccaaacccaacaatgtcattactcagtcaataacaaacctcctccttacccaccacccagttatccacaaaggccatccctaaatcaaccacaaagcctgtctatcgcacttccaatgacgaacaccacctttagcacaaaccataaacaccaaccaagaagtgaattttgcagcgagaaagcctgtagaattcaccccaattccagtatcctatgctgacttgctcccatatctact

SEQ ID NO: 21787 - DNA, 403 bp, Glycine max
  unsure at all n locations
ntgagccaaaatcctgactcaccatatatctcttgacctttgtgagaatgccaatccttaccctcggaagcaaaaaaaggaaagaaggaaaggaaatttccaatcaaagagaaagcaaaaaaggaaggaaaggaaattcccaatcaaagagaaagcaaaaaaggaaggaaaggaaattcccaatcaaagagtgggagaaagagaaaaaagaaaagaaaggaaattcccaatcaaagagtgggagaaagaaaaaagaaaagaaagaaaattcccaaccaaagaatgggagaaagtaaaaaagaaggaagctcctggtcaaagaaaccagaagaaatgtgccgagaggtccttggaccagacgatatctgaacaatacagaattgtcaccaaatgaacaaaagaa

SEQ ID NO: 21788 - DNA, 124 bp, Glycine max
gataaaggcctgcatgggtcctgcaagcaaaaggacatatcctaactgtgatcatctctcttaagactcagaccatgtgcactgggagctgggataagactcacaaggagggcctgtgagcctg

SEQ ID NO: 21789 - DNA, 265 bp, Glycine max
gactatcaccttgaggaccatgtgatttcccaacggccgcgggaagatagggactacaccatatgacattaattagacgcacataagagatcattcagcataggtgcataatatggaaaagccccaaacgagagtaatgaggccagcttaccttccagactatgcgtaaggagagaaaatggattagagggatactgccgatataacatgggacaagcttaacggtattgattctgtgatattcctgttgcaccacatagataat

SEQ ID NO: 21790 - DNA, 407 bp, Glycine max
tagcttctcaaagtataaacctttgcagtatagttagcaagtttttcacctagatgataagaaactacctagatgaaactctctttacataaccagctaactgagatcacaaatagatcaagaagaatgagatagaagaatgaagatgatgagagagatctagaaatctagattgagggataaactttctttggaagagagtggttgaagaggaagatgtgaatgatttcctttgaccaataaagaatattccaaaggtgtggttttggtagattttatgatcatgctcttggatttgaggtgaacaagtggttcaagttgcttgctggctttttgttgagagtgatgctggaccgatttgagacgcgtacctccgtagggtgccatcacatggaaagtaaataaaa

SEQ ID NO: 21791 - DNA, 412 bp, Glycine max
  unsure at all n locations
ttataagaacaaaattgccttaatcattttcaaatatgtttgtgaattangacgcatcaacaagaatcaagccaaggctattgtgcaagcaatcaatggggcaaaacacaccaaatgattataatgatggatggctcaaattctcacaaaggtaaaatcatcactttcaaattgagctttcaaaactatcatgacatgtagagaagaatcaaggatttcaagtcacaaaatgtcaagaacttttattttcaaaacaattacccatttcttgaacatatcctataattcanagaaaaacatgcaaagtcgtacgtgcacacgaaaaatgacccaaatattaaactgaaaatccgacgaaactaacaacattaacaaattaacacaactaacaaattacaaaaccaacaaaact

SEQ ID NO: 21792 - DNA, 393 bp, Glycine max
tatcttgaaccataaccggtgagagtgtgatcttaaacggtgagtgaacgactagctttgagtaatagtctttgcatcaatctctgaaatttagaatggaatgtatgaatgaggacatgatgaaggccataattgtgtatatacaagccaagtgaccaaaaagcttaccttgaatgataattgtatcctttgcaccctttgtgagctgaatgacattttcaaaattgaaccctgaacataaatgattatctccagatagcttgtttagattctagcagagcagatagctcaaggaaaattaccccaaatttgggggagttgattgggatgtaaagtaaaaggtaaagcatcggcacacataacatataagttgtgtgttaaaaaaaagaggag

SEQ ID NO: 21793 - DNA, 407 bp, Glycine max
tccatcacattgataccttcctaaagaggtataacatgtaaacttagaagtgactatttgccaataggaattggagtcactctaaatatggaggattttcgtaaaactcatgaagtgagagagtacataactagagtatcatatgctagcatagtaggagctattgtatatgacacgattttcacatgttctaatatcatttatgcactaggtgtaacaagttgatatcaagaaagtcttggaggagggcattgaaagtgggtaagactattcttaatacttaagaagaactaaagactatgcctcatttatggagacacaaaattaaaaactaaaagtagtttgatgagcataagttggaattagtaatggaatacatgagtgatgggctctagcgcaagtggaag

SEQ ID NO: 21794 - DNA, 323 bp, Glycine max
ttgcttttttcaactttctatcacctggcttcacccatgttggaaacccttctttgtaacttggttcttggtatggaaccttgttaagggccaaggtgtagctcagcaacttagtaacattgttggacatcaaagggagaacgtagtcttgaacaccaagctcatacaacccggctttgcatgtctcaaggttagtgagagctgcgctgagccatgtttgggcatcaacttgtgagagcttggtgttatgctttatggtttggctgagattgcgaatagtttgctcataaagctcaacacaatcagcccatgcaactctttac

SEQ ID NO: 21795 - DNA, 391 bp, Glycine max
  unsure at all n locations
ttatatcaacgcaagngaatnttgntccccttacatatattcaaggggttcacctctcaaaaaaataaaaatattcaaggggttcaagacccattacatcttgataacttctaattaacaaagcccattgacacaagcttctcttataagaattagggtatattttaagtcatctgcaaactcatccaatacacaatattttataatttataattattttaacagttaattatgagtaataattcttttaagttaatacattttgcataatgcaccctcttgctttgatagctgaccttgaactttcagtctagccttatcctcttaaggacagtattctcatttaggccatctgtattatgagccacttaagtcatatacgcctcgggta

SEQ ID NO: 21796 - DNA, 387 bp, Glycine max
  unsure at all n locations
gaagaggnatgatgctcatgacgcctgagacccggcattngaaccgccaggggacctcagancaactttgttgcagctatataaccagcggccttgaggggctacaaccatagatgacagccaccctgaggcctaccaaagagatgaatggagaggtagtgtagaaacaggcgtgagcccatgcggggacacacacctagctatcgccctagataccctgagactaaatataacccactacagcaaacggcttgtgaaatatcccagacccagttacgaagcttctgatggacaacaacccagagaacaatggaaaccagctaggttgtcatgaccagaacgggacgtgcggcaaaacatctaggtcctaacaggagaaaagccgct

SEQ ID NO: 21797 - DNA, 296 bp, Glycine max
ccatagctgaactgactgaactgaaaccccaagatatacgcgaagaatactcttttagaacctttggagcgaggagtccaccagagcaaccaagccgtcacacaaagcaacgcaaacaggggaaaaaattagcggccaggggcacgggaaagcaaacagcatatgagctaggaatggagagaccaaaggacactaacagacacgccggaagcaaaccttggggaggagcttcacaaaagacaaaatgccaagaaagcgcgaaaaggcgctagcgaactatgacaaatggcaaggag

SEQ ID NO: 21798 - DNA, 395 bp, Glycine max
agctttggccagaggtaaacctttcatcaggtcttcttatggaattaaagtcccccaaaatacaccacaaccccccaaccattgactgtctcaaatgctttactgtatcccacaggattcttttactatttatatcacatggtgagtaaatagtaacaattgtgactatttgtgcttcctggacccattccccaaccattaaaataaagccagtaccactgattttcctctgcaatctaaaagaattatcaccccacaaacaaagaatgccacctgctgaatttatagctggcagcatttcccaatttatctctacatgtccccataaagcctgacacatggctttgtccaccaactctatctttgtctcttgaagacaaatcatgtccacaccc

SEQ ID NO: 21799 - DNA, 396 bp, Glycine max
  unsure at all n locations
tcacttggttcaggcctaatgtgtttcgtcaagagcagacttgacagattcctagtgtcagatcaatggctagtcatatggcctgacacatcccaacatgttcttcacagagattactctgaccattgcccggtaattttgaaaactaaactggttgattggggtcctaagccctttagggtgctggacttatggctcaatcaaaaaggatatcaaaagctggtgcaagagtcttggtctaaggaccagcagggtggatggnggggcattgtccttaaaaacaagctgagaaatcttaaaaataccatcaaacaatggagtaaagctaatgctgatatcaatgctaatagaatccagaagttgagacagaagcttaatgacttggaaactacagct

SEQ ID NO: 21800 - DNA, 411 bp, Glycine max
  unsure at all n locations
agcttgcataatagactccctccacaaattgtttgaaaagagaccgtttagagaataagtttgtaaaaataaccctacctggtcattttgccaaaaaaaaacttttatcaacaatatatttgtgattcagtggaaagcaagatctaaggttgtatatatcctaaactcattgttgtgataatattgatgttaatattcattttgatttcacttactattagcatctttcattgaagaagtatgcttatacacgaatgaatttggagcatatacaaatcaaatgatcgaactatacacaaatgaatttgggatgtcactcggtttcttgaaacatgtgcaggagcgtcgtgaaaaacattctggcatcttgtgcatgcacttcttcctttcaatntgccaacgatcaacaaa

SEQ ID NO: 21801 - DNA, 431 bp, Glycine max
  unsure at all n locations
ccggtcggaactgctctgccgacgctggagagaggttcttcgctgctcatcactacctccggcagaggagagaccttggcgccgatgaggattaactacgttagggttaaggtcgcggatgtgattcgcaacgtgaagatcgtggtgcatagtgtgtatttgccgtttccacatattaatcctgtggctgcggcttatgacagtatcttangcggtggtgaaggagcgtcggaaggagcggggaatattgcagattctgcagatcagacgacgcaagggacgtgttctgtcgttgacgggcgtggaagttgcgtcttgcctacgatgcctgatcaggttcaggtcaagccaatggtggagatcgaagaccaccatggcctgtgaataatgccatatattcatccacgattatcttttctgaagtgaaactt

SEQ ID NO: 21802 - DNA, 409 bp, Glycine max
agcttcccatatatggagagctaaatcctctattggttcttccttataggtacttgatgtaaatacctatatatctatttaatgatgttttatgtgttctctgtgctatcagtacatcatttcagtgtgcttttgccttgatcacgtagatgcatgctttgttaggatcattcaacagttgaaactggtctgattcttagaatttgataggatagggctagtttatcgtattatcacgagggatcagggtatggtaacctagttgtttgtatgtttgtcttaatgcagttctagtcgagtttagtccaacaagaggaatttgaggataatgcttgatcaggattaggctagactatcacgagggatcgaggtttagcattttaggagacaccatagaacacatgagcat

SEQ ID NO: 21803 - DNA, 424 bp, Glycine max
  unsure at all n locations
tcattcttgtacaaagatgttgttaaatttgtcccttttccctcctttatcctcccaagccaaccctaatctatcacatgatcttctaacactgttaaaatcacttatcacacaccatacttttgtattacttgtcttatttctcctcctaagctccccccacactcttcttttttgtccattgccgaaaggaatatagacattgccaatggtaatagccaccccattctctttccaacatcccttaaaagcaatgcattcttgtcccataagtgatatgaaatttccaagaaggccggaccccataaacacaagagagctattgcttaatttaaagccggagaagccaaactatgtttaagcataaaactgaaccccttccttcgtcactatgtttcagatagatntccacttcaccctacta

SEQ ID NO: 21804 - DNA, 409 bp, Glycine max
  unsure at all n locations
agcttcctctaccggtgataaaacattgtcggccagcgcttgtaaaaaaattgcgcaatgtcggctgaaaaacatcagttggggctgtttaactaccgatgctggctactgttttttctattccacccctgaataatacttggacgatgtcgatttggaaatgttcgatcggagtcatccggtcatgcttctttttaagacctcgatctgtcatcttttcctggccgacgtcggctagcatttttttcgatcaatatcggtgaatcatgctttttgccaaggtgggctaacgttttcgtggctcatgaaatgagagcatgccagtgtcggccganacacaatctcgcacgaaaaaccctagccgacctacattgtaatttttgtaggcaataccgaacagcaaaacttc

SEQ ID NO: 21805 - DNA, 428 bp, Glycine max
  unsure at all n locations
ntgcagcagaatttagtaatgacccactaacctagaattaaaataatttattgccattaacctagggaattaaaaaaaacttaatggctgagtgtaactgaaattgtggcaaccaaaaatcacccccaacagccaacaagtcagccaccatttggtctcccaaaaggctgatgcctaggttgccaattgggcccttattacaacttgaactaaacctaactaaagcccttttagttgattaacccaaaacatatttttggtcagccaactttacaaggattgggccattatttagacaaacactctaaaattgagacaaggtggtgtcatttagtcctcctccatttgggccatgatacaactcacaaccttggactnttctccttgaaacttgggcttgtattcaaatagtatggacaacacttgtt

SEQ ID NO: 21806 - DNA, 412 bp, Glycine max
agcttgtatgattatggggtacccatcacatgtggtactaggtggcggtcgggcaatggtgcacaacaagttttccacatccacaaatcgcgcataaacccaccatcccctgttgcccacctccaactgagctcacgtactcccacgtagcccatatcctcgtttctctcaacaccgggtccccatcaatcctcccaatctttccccaacatccaagtaactcaacattcaaacaacacaaaccatcacagccaagaaaacagggcaaaggcagaaaattctgcccaaaacaccaaccaaaatcacagcttttctcacttaaaggccccagtaacaattccttcgttccaattctttaaccgttggatcgactccaaacttttactggaagtctctagtacataagcctaca

SEQ ID NO: 21807 - DNA, 425 bp, Glycine max
  unsure at all n locations
ntntggagtagaaacatgggaccaactcattttatttcaaaaaggaattcgtatctagtcaaggtctgagagaccatacaagtttcctaacgatttctaattatgtgggccattaagtctatcatatgctgacaatagccgagaagcccatgaatctcttcgggggcggagtaagtgtccgccactgctttggccttggctagcaatcggggaagttcttgactcctgttcaaagtaagagcaaatcggtccgtccacattgttgcctcttggtgccatgaatcaattaccctctcccttgcttcgctttctgctgatatcttggcgtactcatcctctagcctttgctcgtgagtcgccgctagatatagcttctctttgcactcatcgatgacggcccacatattcccttcagtctcgcttaa

SEQ ID NO: 21808 - DNA, 387 bp, Glycine max
tagcttgctacattgccatttctgtaagttggtatctgtctttatttcgcacatgcttatgtgtgtatgtgaatgatcaaacatttttactttatgtatcagcatcatgcataattcttatttacatggttatttcattttagttaacatggctaatggctaagatagcatattactaattaagaattacagggtgtttaaaaaaaactcttggctaaatgagacagttttgttgtcatcatgacttctattatctttcatatcagagggctttttttaatggtataaaacagtgtctattgcttaacatagagattcttattggaaccaggttgcaagtgttttgaacattttggatgatgagttgatcaagaatgttggagacta

SEQ ID NO: 21809 - DNA, 392 bp, Glycine max
  unsure at all n locations
tgttagaattgttggtcaataccatcatttacgcttttattaaccaatgacatacttacaaagaagtgaaagaactatagctagttcagagatggtgaagatcgaactaaacaagttttgattaacagtggctgtttttgttttaatagtattagagatatagattagttcagttaattacaagttaattattaagttagttaattagttacaaattagttatttttgtaaccaattatgtaacattactagcattagttatataaggatgaatgtattcatataaaaactgatttactcatttntagcattatccaaattaatattcangttttcttttctcttttcatctttctatcttaactttatcaaatagtgattggaacacatgc

SEQ ID NO: 21810 - DNA, 406 bp, Glycine max
agcttatctaaacctagaattagctaatccaaaagatattgttaaagtgaaataggtattgtatattattaaactatctgtagcattgcatccattaatttttaattgtacaaaaaataagatgaaaagattataaaatagaaaaagaaattgctttgtatttgttttaaattattaaaaaaatagaactattttttcgtacaagtttgaaagcaaagaagaggtattccccacagtactcacaattgaagtggctgcattctaataatttcatacagatgttccttaaatattgtgtatcatttataggaatcttcaccactcatatgttatttatggacttataaattaacataatagagttaatggactatgtctaacaaacttttgttcagagactaaaatc

SEQ ID NO: 21811 - DNA, 343 bp, Glycine max
tagggattacggatactttactaagtatgatctactattatttgacaacttaatgtttagggtttaggggtatttgacaaatgacgatttttatgtagtttagcacttagggtttagttttacctgactaattcgggttaaaggttatttgacctattaaggtcacttgcctaattacggattaggtatattcgaaaaattaaggttacttgactaattatgatttatatgtgtctaactgattaaggatatgaatacatgactgagtagggtttatatgtacttgaccaactatgggtgagggttatattacctatttgtttacagatacatgactaattat

SEQ ID NO: 21812 - DNA, 396 bp, Glycine max
  unsure at all n locations
tagcttgttatcctaggctcatcttggtggtgaagctccttcttccatggcttattccctagtggatgacgcctcctttcacctcttctcctttgtcttccactgcatctccatggtggaaaatcaccattaaaggacctaattgaagctcaaagatccagcctccatagaagccccacaagcaagcttccatcaagtggtaatcagagcacaagagcttcaagtaggtgcttcttaaacctccattaattttttgctttaccttctcttccattgttgtttcttcatttttctccatgtatctcctcacatttcttgtcctaaatgttgttaacatgattctttagagtttccaccgattaaacttgctataaaagctagatntgattttctatg

SEQ ID NO: 21813 - DNA, 403 bp, Glycine max
tagctacacacacctctctaatagctaagttcacctctttgagatgagaagctagagcttagctacacaccccctataatagctaagctcacccccatgagaaaaaacatgaaaatacaaaaaaaaaagtcgttactacaaagactactcaaaatgccccgaaatacaaggctaaaaccctatactactagaatttccaaaatacaaggcccaaacgaagaaaaaacctattctaatatttacaaagaagagtggatccaaccttgaaccatggactcaaaaatctaccctaaggttcatgagaaccctagggccttctttagtagctctagcccaagcctcttggagtcttctatctaataccccttgggggtaggattgcatcatcccctccacctggaaa

SEQ ID NO: 21814 - DNA, 408 bp, Glycine max
  unsure at all n locations
tttgcttgtgcttttatgaaaaggttcatcgagtcaagttgaagtatggaagtaaccatcttgcaaaanattggggcaaaagatggatcgtgtgacatcgctccttcgtctacggccaaacacatttagggctgttgatatccctgttacttccagtttcaccttgacggagatgtcatggaccatgttgaaaatctaaattgattcaaccccatatactgtgtaaaaattcacaatacttcaattgtgcatcattcgcatacatccatgttgttcattggttgcattgctcattgcattctttccttgaaaagaaaaagagaacctaatcattgttataaanaagaaaaaaaaaggcatgctttacggtgccctcaccgaacctatgctagagctagagtaatgggt

SEQ ID NO: 21815 - DNA, 379 bp, Glycine max
  unsure at all n locations
tagccctagaagggatggacctttccatgttttggagatgatcaataacaatgcctataggttggacctcccagaagagtatggagtcagcatcacttttaacatttctgattcaattccttttgtaggtggagctgatattgaggaggaagaactaacagatttgaggtcaaatcctcttcaaggggaaagggatgatgcaatcctccttaggaagggaccattcactagaaccatgagcaagaggctccaaaaagattgggctaaagctgctgaagaaagccctanggttctcatgaacctcaaggtagaattttgagcccatgggccaaggttgggtccaattatcttttgacatattagactangatgtcattat

SEQ ID NO: 21816 - DNA, 410 bp, Glycine max
tagcttatgggtgcttcaggtgagggacattttcatcgatttgaatttttatattgtcaaacagtagctttttgtgcatgcttttgcttcatcaccatcgacttgcccgtaaattattttataatgcgtgtttaacattattgcttcatgattgtttccttttcttttgtgtgtgcagaaaatatacatgtacttccgggggcataagtgagactgttctcttctggattttgatccgacggcttttataatgtcaatcacttcacaatgtggcttagcatattctttttgtctatcctcattttctcatacaatatcttggtgtgatattggtcttgttctttgtagttaccagggtttagtttgtatcagggtttacgttgtttgtaccatactgtgtaatgaattct

SEQ ID NO: 21817 - DNA, 427 bp, Glycine max
  unsure at all n locations
actcagcttaaccccttcttctcctatctcaaaatttgtgaggctattcttcaaagcaattatgataataatgtcccattcccacttgctgctcatatggttgtcctgtgttattttgcaaattaaagtattattatatttttaaaaagaataaaatgtcgagaaattagatcatattatgtatgttacaaagttacgtaagtgaatattatatgatcaatgatattggtttcaccttccatggaactcagaaactgttgtgctgaaattgaagatttgtgcaactctttaccaatcagtttctcccacatttgcacaacctctctctgggataatatgttttcaggtggccttatgtaaactgtcttgttccgtgttctngggtcatctatggttttgatagtggacatagctatatcatcttcat

SEQ ID NO: 21818 - DNA, 362 bp, Glycine max
  unsure at all n locations
agcttaggcccagccataggattcttanaactcatggtttacattatgtttgccgaggaaacctcgggccattccatgacttgccagtttcccagctggaaacctcgggacancctttgagggggattcnatcgtgcaccacagtcacttcctcttcgaacctaaagcttgcgctaacaaagctctcgatgaggtgacagggaggggcctccttcacatgtgcccttagctgtgggccagtgccccgatttctcttttcctagctgtttttccttatgttggcctgcgtaggcttatatcctaaaccaaacctttcggagttctctttgacatccaccaagtcggacctgccgtcattgttc

SEQ ID NO: 21819 - DNA, 348 bp, Glycine max
tattgtggagttctaaacggattatacaacaacaacttggctccagatgtgggccgagtaagcatatgcaaagtggccaggaaactcttcaacttagaacaaatcgctttgcactgttgatcctaatgaaattcggttggctgtttcagcagttggaaaaatgatttcgccttcttggccattctcagtagaaatcaagatagagccaccagtctatcgatcaacttctatacttccttcatgttttgtgggctgcacatggcagttcctacttcgtacttgtttgggttggcctcgatccccctgcaggtgattcatgaaccaaggaacttaccccctccaaccctg

SEQ ID NO: 21820 - DNA, 401 bp, Glycine max
agcttctcatttgatccagcagaggagaagcatacaacctatttcactcaagtcacacccacggaactctagcacaagagacttggtcatcgtcatcttgaaagaatgctaaacatgaaaaaaatgaaatatgcaaaagaaaatttgaagaagtttcaaacggaggaatgcaaatctgttagtacacaaatgaatcaaaaggagaagttcagcaaggaagaaggcgttgataacattgatgaaggatattatgggaacttgattggatgtctaatgtatctcactacaacgagaccaaacattctattttctcaaaagaacaaaactggaatttttgtgacaatcaagtagtcattgctattgcaaacaatcccgtgtgtcatggaaagactaaacatttc

SEQ ID NO: 21821 - DNA, 383 bp, Glycine max
  unsure at all n locations
tcaccctcgttgtaaggcaacgacaaagggatctcatatagtttcaggcaagcttgccaagcggttctatggacccttccaagtcatagaatgcattgggctcgttgcatataagttacaattgccagaggaagttaaaatacaccccgtattccactgttccaagatgaagtcttttcgcggttcaccgaanaatatggcgggaattacctggcacaaggagttactcaacgaccaacccctcgtgtttccattagctatcttggattaccgtagagcatccaccgaggatccctgngaggtgttcatgcaatggaatggtatctcacctgatgatacctcgtgggaagactggaatcagctgtgtgaaaactaccaccttg

SEQ ID NO: 21822 - DNA, 402 bp, Glycine max
  unsure at all n locations
agcttgcttctacagcttgnggattggatgtaggcacgggttgttgccgaaccagtataaaattcttgtgtttgtcttcttcttccctacactctttattttccgctgtgcacttttaattatcgcttttacttttggttaagtttcaattactgttctttactttcttaacttagtagtaaaagcctaattaaatctagtaacattaaaaaggataagttttaattattcaaggtacaataataattaattcaacccccccttcttaattattctgaggccacttgatccaacacctctggcatcaactgaagtttctactcctatcgttgctgcagatgttgtccgtcctactgatgatgttgtattacttctgctcctccacctccttctactatgcct

SEQ ID NO: 21823 - DNA, 430 bp, Glycine max
  unsure at all n locations
tgtggtggtcattctctacgccattttcatcgctgccgcatgtaaattgacggtcaaggctcttaagacagcaatgtaaagatgtagggtatgataatagcaaggcaaattgaaatagaatatgtatattgttatttcattgatcctttgcatgatatatataatacatgtacaagaatgttctataccaattctaaggcatgacagacgtgatccataatcagtggcatctgatttattctatgcattataaggtaaataaatatagaatcaaggtaacataggaaagtaaatatatacacagcatatttgcaatcatgtagaagatatttcctaatactccccctcaagttggtgagtgaatatcgtgaagtcccaacttgttgcgcaatgtcacaaattgatctntttccaaagcttttgtaaacac

SEQ ID NO: 21824 - DNA, 405 bp, Glycine max
  unsure at all n locations
agcttgntattttaaaaaaaccaaaaagcaattatagttaatttgtcaaaatgagagtagttttcttttcaaacacagagctatataattacagctgatgaatagaagttcaatagacatgcttaatttggcaacctcagcaagtgattttattctccttttggaaacatactatatgatggtttataggtcaaatgagttatttgatctttcattttatttgttaggtttattttgattttttatcttttaaaaaattcattttaatcttttatatatttatttaaattgatttaaaatgatcttttcatctatataaaattgatgacgctaatgaaataaaaatattaataactaaaaattatcacaaaatgtaattttcttctttatcttgtgcttggtgtg

SEQ ID NO: 21825 - DNA, 423 bp, Glycine max
tcttccggtttcatcctctatgcaactcgcagatatcttcaccaatgttttatctccttctatttttcaacacctttgtaccaagctgggaatgatgaatatccattcccagcttgagggggggatcttaacagcatcttgttagagttagttatgatagttatttctgttgtaaccactctcgtgcttgtacatatataagccctcacgtgcatttaataagatgagttgcagttttgatcatcaagagccaagcgtagcttttcactgcaccacctgatatttttcttctcagaaacatgagtttcacgtttttcttccagcttagttcaatatttgttttcaacagtaagttagcatcaacaaatatataaaatgcttggcagagtgtacattactatactacctacgtgcttatctatt

SEQ ID NO: 21826 - DNA, 372 bp, Glycine max
agcttggaacaccaaattgtagaatgcataaaaataatggcacagccataggcaagctgaaaatcaaaagatcctagccagacgtatatgcttccccattacatcaaccaactggtggggcaggactacattaaatatctcatagccttgggaaaaaggaaactgtccatcagctcaccctttttagcaatttcagctaacttgtcctatgatcctatccaattctcgtatacaaagattgatcaagcttatatttctggattttatttcttcatttcaatgcccaatcagtgtaacagaccttaccacaaacattctaggtgtcccatatttgtaaaaaaaaaaataaaaaaaaaaaaacttcgtacccca

SEQ ID NO: 21827 - DNA, 375 bp, Glycine max
  unsure at all n locations
gtggatcccgatagtattattgctgcagctctaatggatatgtatcaaagtatgggagatgctcttgcccagcaatacggtggctctgctgctcacaatactgtatgacattttgggggaatctaaatntatgtaatctgccgacaaatatctaactgcttatttgcatcttcttctgcagctgttgtgatatatgtaacatatattttggtgaatgacaggtgtttccagagaggcatggaaagtggaaagcaacaacacaatccagagagtttttaaaatccataaaacgatactatagcaatgcttacacagatggtgaanaacaagatgcaatanacttgtattattccttccacctcatttatctcaata

SEQ ID NO: 21828 - DNA, 394 bp, Glycine max
  unsure at all n locations
agctttatattgaatcttctaaaccttttcccttgataaaaacatcagggactaaattatgccaattcctctttcaaggacacattgtcatccctctgatctatatgctccaatgctcctctatccacaaaatttaccattctgtgaggcacaaaagccttaagtaaaatgagttgcttcttaattaaaactcctattcttctcgtagtgcttcttctggggaaagtactccagacttatctatacatgtggcatgacaagtaccaatgatcaatgagagtaagttattccaagattttttcaccagttgaaaaaagattaaataccacagttccaaccaaatacaacccaactgaaaccttgaaaacatcatcccaggagcctgaanatagtc

SEQ ID NO: 21829 - DNA, 382 bp, Glycine max
  unsure at all n locations
tgtatactgaattgagtatggcacacacattgcatgtctgatatgccttttagaggctngaaaagtgcgagaaaacgagttttgttttctgcattctctggaaaacgtgatgaactcgctaaccgagaatactgcgctaagcgagttcatcaatactcattgtatataagatttatctgaagaaccagctaagcacacttattgcgctaagcgagttcatcctttgagaatgaacattcatcctcttgctgaactacctgtggctaagcgaggctaaatcgctaagcctaggtaacttaaccattntttttttgtgatagccacgcgctaagctgagcattcttgagccaagcacaggttgtggcatccgctgtgagttcac

SEQ ID NO: 21830 - DNA, 397 bp, Glycine max
agcttgttctaaatttacattgatgtttgtatgggaggaggttacatgccatttttgctttaagagtaatgtcccactaaaactaactttccaaatgtttgccttcgcaggaatggcaccgaggaagcttgcctcaaagaggtccaggaaagacaaggcggccgaaggaactagttccgccccggagtacgacagtcaccgctttaggagcgttgtacaccagcagcgtttcgaagccatcaagggatggtcgtttctccgagagcgacgcgtccagctcagggaggacgagtatactgatttccaggaggaaatagggcgccggcggtgggcaccactggttactcccatggccaagtttgatccagaaatagtccttgagttttacgccaatgct

SEQ ID NO: 21831 - DNA, 236 bp, Glycine max
atatcaccttcttaattgtacacatggagcactgcgcccccaaatgcgcgagttagaaaagaaaatatttcgggctctcgtgtccgtataatgcattcatatcatgcatcgcataagcatctcttcataacatcataatggacatatcctgcatttgtccgttatatatttcagcctcaccttttgcatgagtcatggcatcatcatgcatatgcgttcaacaaactctttgatct

SEQ ID NO: 21832 - DNA, 409 bp, Glycine max
  unsure at all n locations
ttagtttaatcttaaacttaaaaggaattgaaacgtatatcaattgaattattctcgattatttaacaactttggatggagaaaacctactaaaatgatcaatcagattnttggatggaaaatagctgaataaacttcaacaaaattgattaatactttacacttttaataagaaaaaaataattgtacaactatgtgatttaaaatgaagataagcatctgtatacctttcacaatttggtttatatattttgttcgcacaacttgcatgaattacattaacaaaaagttaacagacaattaattaatttattattatacattaaatgagtttttattttgaaaaacacaataatttctttacattctttatttatattttttgcatgcacatctcttctttattttt

SEQ ID NO: 21833 - DNA, 398 bp, Glycine max
ctccgctataccttctagtgatcttgagcgcttttgcattttctctagaagctatcggacttgttactttccctgtatatgatgagagattgcttaagaactgttctatttgctgtgatgacaagccagtgccaattatgattaccttaaaatgttctcacacattcttgtcacattgcttgagggcctatgctgatggtaaagtacaatcttgtcaagtccctataagatgccctcaaccaggatgcaagtattgcacatctgtaactgagtgcaagtcttttcttccattcacctcctttgaatctctggagaaatccctgtctgaagcgaatatatgctgtccacatagaatttatctgccatatccaaatcgctctggtctccttgatcctcat

SEQ ID NO: 21834 - DNA, 387 bp, Glycine max
ttagcttcttaagttccttaagcaatgtcttttcagtaaccacaaaatcctcaggatctgggagtttcttcaccatcatatatggtttcaattggataaagccaaattcacaagagaaaagttgaggctgataaggataaaagctacatctttgatattgagactgtcgcaacgtgcccttcgcaggcgagcgagggcgaggctcacgggtgcgctttccaaaggaggaaagatgcgcggagtcgccaccaacgtttattcgtggaaaacgtcgggaaaaccgaacgaaagcggtcaaaatgaaaattctaagtccgggagttgtatttacgctcgaggaaggtattatcacctctcacgtttgtctcagaggacaacagcctattt

SEQ ID NO: 21835 - DNA, 419 bp, Glycine max
tctccttccttttcctataaataggggtttgagggattatcaaaaatattcattcctcttggtatctgagaatcacttaaaattagtgagaaaaattgtttccatgaagaaaatccaagccgaggcgcttccgtaacgcttccgagacgtttccgtgggtgatttcgcgaagatttcaaccgttcttcgccgttctttgtttgttcttcgtcgttcttcggtcttcaaccggtaagttcccaaaatcgaacttttcaatccattctatgtacccttagtggtccccacttgtttcgcatgcttttattttcatttcatttactttccgtacccccttttgatgtgcttcagtcatttatttaagtcattttctcgcctaatccaaaataagataaatttccaccgatcattcgtattat

SEQ ID NO: 21836 - DNA, 396 bp, Glycine max
  unsure at all n locations
ttagctttgaccaccgctcttccttcccgcaatgcttctcttcatatctgcctgagtgggcttatagcctaaaccatacttcccacgatttcctttggcatttatcaggctagttatgnccgccgttgtctttgcccaaacccattccgggttcgtaaccgttccccaacataactcgggccatcattactgctgcatcggacaggcaagcttgcccagagaaggagtccacggaggaaatgcttaccacctcaaaagactggaaaaaggtctctaatgactcctctacggcttcgacataaggcatagaggatgggcagctcaccaagatgtcctcctcgcctgatacgataaccagatgcccttccactacgaatntcaacttttggtggagtg

SEQ ID NO: 21837 - DNA, 353 bp, Glycine max
  unsure at all n locations
tgactcacaccaaacatgacaaggtgatcatgctntttcaaataccttcacaaataacttccataaggcataaacctagtaaaactacccatcatatctcccaaacatccaatacccacgaaattatgtgagaaagaagtctacccaaacctggaatttgaagtcccacaacgtagatatgcgcttcccgactccgaaaatggcttcctttcacgatttggagcagaaatggtgtgcaaaggttggagctttgatggagcttcaatggtgaggaaaaagaagagaatagcaacgtgagggagagagggagaaaagcttctgaacttttgggctgagtgaggagagagaaacat

SEQ ID NO: 21838 - DNA, 407 bp, Glycine max
tctgcttcatgatgatgaatcaagttgattcaagtagttttgatgatgacaaagatgatgacaaaaagcccaagataatgatttcaagattgagtcaacaagttcaagatcaagattaatttcaagtttcatgagaagaaatcaagaagattcaagaatcaagagaagttgatttcaagattcaagagaagatgaattcaagattcaagagaagaaatcaagaagacttcacaagggaagtattgaaaagatttttcaaaaaacaaacatagcacaattttgtttttcagaagagtttttctcaaaattttccaagttaccagagttttttttactctctggtaatcgattaccaattacttgtaatcgataccagtggcaaagtttaatttcaaagcttctaactg

SEQ ID NO: 21839 - DNA, 380 bp, Glycine max
tgttgtgcaccatcgcccgaccgccacttagtaccacttgtgatgggtaccttataatcctacaagcttgagatgaggaagtgttgaagggtgaaacttcctgcttttattgttgaccacagagtggtacctggagatatgtcgcaggggtcaggagaccttggggacgtcaggtggggtgctattgcccaaaaccaagcttgaccaatcccgacccaacccgggcatagtcggtcagtgagaacctgtgatgtacctaagcaggcgagctcctggcagtcaacagataaaaggaaaacaagaccacaaagcaaggaggcttgtggtggctggccagctgtgaattttgtgtaatatgtggattgtggcctctggtaatc

SEQ ID NO: 21840 - DNA, 407 bp, Glycine max
  unsure at all n locations
aaacaatggatttgtcttcaacttcaaatcctagaggttgcaccatgtaaactatttcatctaanaggccattgaggaaagcattattcacatccaactgaaataactctcaattattagtaagggcaagagtaatgataagcctaatagtgataggtttaacaacaagagaaaacgtctcatgaaagtcaaaaccatggacttggtgaaagcctttggccactaatcgagttttgtacttgttgatggacccattcgcattttcttttattcgaaaaacccatttacaccctactgcctttctattggagggcaagggaactaaatcccaggtgtgattctttagtaaggcagcatattcaagtntcatagcagaaagccaatttgaatcagtgagagcctgttag

SEQ ID NO: 21841 - DNA, 390 bp, Glycine max
ctttttaaatatacttggccttcatttaactggctttgggcttggcggccacgctcaacaaagtactttcgacacctactgtacgttgatttcaccaatgctgttatgggaatgttgcgacaatcctttaaaaccttattgatacattctgagaggtttgttgtcatgtggtcatatcgacgtccttctctatcgtaagccatcgtccatttttcctttgagatgcgatcaatccatgttgctatggctggactcagttcacgaaatttttctaaattttgatcaaaaatgtgcttgcaaggagtgtaggctgcataaaattagttatgaataacaattttaagtataaatgaaagtaaaataaatgtgaccatcaaatatgacatctta

SEQ ID NO: 21842 - DNA, 388 bp, Glycine max
  unsure at all n locations
agcttctatgtttccattctatcatggttagttaaagttaagtgaaggagaagccaaaagaaggttatttcttttaagtttgactgctttcaagtcacattggtctataccaaacaattaaatccctaaggttttgatgtcaacaaagtataaattttatgtattaaaatttcatgcttaagctacatgttcatatatatatatatatatatatatatatatatatatatatatatgttggacaagtggcctcaataacttaagagagaggtgaattaagtttcaaaatttttccactaacaaattttaaacccctcttanatgcaaactcaatctatactggtttggccactttctgtgcctacattcagtcctcangcaacccact

SEQ ID NO: 21843 - DNA, 375 bp, Glycine max
  unsure at all n locations
ttttttccttccatttatatccttactattttaatatacttttaccctctgctcttcaaattgttcatatgtaactattttttaattacttttttctttttattaatttttgggttatttatttcataatattataatatttactttaacaacactatttaattagtttttaattaaatatgtttttgtctacaaaacaagaatagaattcacataaaacagttatacaatatgtttattattntatatttaccaactatttcaataattttacaaaacgctttaatttaataagcaagcttataaactnttaagctttagctggtagcttataaactttagagcatcttattagtcagttttggcgaaaacata

SEQ ID NO: 21844 - DNA, 396 bp, Glycine max
  unsure at all n locations
agctttatgcatggtttagacattganaacattgaaacgcaatatttacgtactgaaatggatgtcacaaaatgttgggagaaatatttatgttccaatactgtatgagagacctatatgttaacggtaatgtgaatgtaattttattttttttgttataatgtgaatgaacgaatattattttaatggcctggaacgagattaataaaacaattatgaattattaatagtaataagtatgtataggtcgaatatttatttaaaattaagtatatgatagatttgttagtcattaaagtgaccaaatttataacgttatctaatntaaaattaatgattatgttaattactcatttgataatagatgctcaattatatgattattgggttatggat

SEQ ID NO: 21845 - DNA, 389 bp, Glycine max
  unsure at all n locations
tagcattnttttttctgaaatgatagatgtaatttcttaaatagtcacagaaagtacaagtccagggaagtactgaattataacatgtatagggaggaagttactaatgattaatatgagaaataagaacaataattatttactattaaatcatatttgaatgtttgagattgaaagataaatgcacaatacctttttaagtagtcatgtgactactaactaacttttaatcttgatatgatcgaaatttataatgctcacattcttaaaatgagattgttctagttatatatatccctcggattgggatgggaaggagtaaaagcatttttcaccacaatcaaagtctttaacagggataacctgtctttttttttatatcaattaat

SEQ ID NO: 21846 - DNA, 412 bp, Glycine max
  unsure at all n locations
agctttataattntcatatgataataagcttcacatagaaggtaataagaggtataatatttcacaatgcaaagaatctaagaataaaacttgttaagttctttaataaagaatctcacacaaaaatatatatactaaaagaaatcatcattgaaaagaaaaatccaaaataataacttgctaatattaatttatttaagtccttccccttcctttttggtcatcatcattaactctagttcatcaagaataaattaacaattttaagaattttattctcatcaagtgatccaaattcatctcctacaatgtcctacattttagtttcctcttgatggtattgtaggaaatttcttgaaaggagacgaagattgttataaacaaatactagatcctttgtccaatgaggtgt

SEQ ID NO: 21847 - DNA, 428 bp, Glycine max
  unsure at all n locations
tgaagaggatgctttaatggaggaaaagaaagagagattggggcagtatgaaattgaaggaataaaagagggagagaagttgaactttgaagtgtgtctcataagactttcattcatcaaagttaaaacaattgttacacatgcttctatttatagactaggtagcttcctcgagaagctttcttgagaaaacttccttgagaagcttctttgagaaaacttcctggggaagctagagcttagctatacacacccctctaataactaagctcacctccttgagaagtttccttgagaagattcctaaagaagttagagcttagctacacacacctctctaatagctaagctcacctccttgagatgagaagctagagcttagctacaccccctataatagctaagctcaccccatgccanaatacatg

SEQ ID NO: 21848 - DNA, 406 bp, Glycine max
agcttgccttttagagatccaagaaggataaagcagctgaaggaaccagttccgctcctgaatatgacagccatcgttttaggagtgctgagcaccagcagcgcttcgaggccattaagggatggtcatttctccgggagcgacgcgtccagatcagggacgacgagtataccgacttccaggaggagatagttcgccggcggtgggcatcgctggttacccccatggccaagttcgacccagacatagtccttgagttttatgccaatgcttggcctacagtggagggtgtatgagatatgcgatcctgggtgagggggttagtggatcccattcgatgcggatgctctcagccagttcttgggatatcctttagtgctggaggagggccaggagtgcaagtatg

SEQ ID NO: 21849 - DNA, 430 bp, Glycine max
  unsure at all n locations
tcatgacgatgaatcaagtatgattcaagtagttttcatgatgacattatgcccaaaagaatgatgtcaatattgagtcaacaagttcaagaaatcaagaagattcaagattcaagagaagttgatttcaagattcaagattcaagagaagttgatttcaagattcaagaaaagacatcaagaagaatcaagattcaagagaagatgaattcacaagggaagtattgaaaaggatttttcaaaaaccaaacatagcatagttttgttttacaaaaagagttttcttaaatttttctaagttaccagagtatttactctctcgtaatcgattaccagtttcctgtaatcgattactagtgataaaatntgatttcaaaaagctttaactgaatttgcaacattccaaatgattnttaaatggtgtaatcga

SEQ ID NO: 21850 - DNA, 406 bp, Glycine max
  unsure at all n locations
agcttgtgataaattacaaacaccatatatactagattcgtttattctcttttccaccattgttaatgctagagtatactattgacctctatacattaatagttgcgcatggccaaaaaccaagaacctacagtaaatagttgctagcaagctgtttggcattcattgttttggatgttgtttttgtataggctgtctttgattctttattcttattaattgctactcccactttgctggaaatacatgcgcgttaatggttcaatgaaccaacgtgtgattaatcaatattgagtggccttacctttttttttcttgaattactcattttacctaacgcttggacggttttatttggacaaacattntcaataactttatcgaatgttgatcaaaattcccatac

SEQ ID NO: 21851 - DNA, 392 bp, Glycine max
  unsure at all n locations
gtgagcatgaactactaccaatatatagtatgttgtttacacaaatgagcacatcttanaagcatactccgcacaatggtggcctcttgggaatgaagtggcaattcctccttctgatgatgcatggacacttatccctgacccaactacaattcgtgcgaaaggtcggccaaaatcaacaaggataaggaatgagatggattggctcaaaccatctaaccaccgacaaaaatgtagtagatgcggagcagaagggcacaataggcgccaatgtccaatgcaatctgaccgtgggagtaattcatttaattgatttatgtatgttagatgagtgacttgtattggttgaggttctattcaatgtatttactntgtggtgttcaatgaaatcg

SEQ ID NO: 21852 - DNA, 413 bp, Glycine max
  unsure at all n locations
agcttgagttcatgattcanaagaaaacacctcgtaataaagccaatttagttcgacaattggtgaagttggagtataaggatggtcatagtatgattgagcacttgaataattttaaagggctcgtaaatcaattaaccaaaattgagatgaagattgatgatgagttgcaagcccttctactccttagttccttgctggaaagttgggacacactcgtggttacacttagtaactcagctccagaaggaaagctcaccatggatacagtcagtgacagccctctcggtgaagaagcaagaagaatggaacgaggtgagtctatccatcccgaggctaatgttattgagaatcggngtaggaatgagactcgtggatgtaataagagccgagatctgagttttcccaacact

SEQ ID NO: 21853 - DNA, 414 bp, Glycine max
  unsure at all n locations
acgtgcatttgtgtgcaatacacaatttcttgtacactacaacaaaatggtgtatcagaaatgcgtaatagaactttaatggatatggttagaagtatgttaatcaattagactttacccgtatctttgtggatgtatgccttgaaaactgtcatgtatttgttgaacagggttcctagtaaggcagttccaaagacaccttttgaactatggacaaataggatacctagtataaggcacctgcatgtttagggttgccagacagaaataaggatttataatccgcaagaaagaaaattggatgcaagaacaatcagtgaatatttcattggttatccagaanagtcaaaggggtatatgttntattgtcctaatcatagtatgagaaatgtcgaaactgaaatgcaggttcat

SEQ ID NO: 21854 - DNA, 414 bp, Glycine max
  unsure at all n locations
agctttcatcaagtggtaatcagagcacaagagcttcaagtaggtgctccttaaacctccattaattttttgctttaccttctattccattgttgtttcttcattttttctccatgtatctcctcacatgtcttgtgataaatgtttttaatatgattctttagagtttccaccaattaaacttgctatagaagctagatttgattttctatggttcaaatttcttgttcttgttcttgaaccatgaattgtgttgagtttaggttcctttgagttntgtcttgttatttttttgtggatgaaacctataccataaaattcttacaaaaatattaaagtagaagaaaacctcaaaaatctagagtgacttgttcacctattgtagttntgtcatagaagtcatgtctagttatg

SEQ ID NO: 21855 - DNA, 394 bp, Glycine max
  unsure at all n locations
cgctcaaaaactgctggttataattatctccatgtgtaatcaattacacattataaattttgaattcaaatttctagtaactgttataaacattttcagctactggtaatcgattaccagaaagtaaatctcaattttaaatgatttagatagaattttttggccaaaccttttgttttttcaatttggaaacttcttcctaagattctagagatcaacttaatcatatatcttgattttcttggattcttggattcttctcttanacttagaagcacttgatcctttggcatcatcaaaacatcaaaacatcttgcttctacataggattcatttgacttaatccatcaactgaataaatccttcaactatntctcatccttggaaaattctt

SEQ ID NO: 21856 - DNA, 405 bp, Glycine max
  unsure at all n locations
tagcttttagcaaaggaagaagaagaaagataagtagcanaggtttcaagatttctcanaagttgttcaagaaattctaaaaaattgttctaaaaagttattaaaatgcaagtcaaggtcttgcttttatagactcttcatgtctggtcaagaaaaccattggaagagttataaccttgagaaaaacctgaaaaccattggaagagttacatctcttgactttttattcaaaacttgtcactggtaattgattaccaaaaccatataatcgattacacaaaacattttatgaaaggatgtgactcttcacaattgattttgaatttcaacgttcagatacactggtaatcgattaccaatatattataatcgattacaccatttanaaatcaattggaacgttgc

SEQ ID NO: 21857 - DNA, 380 bp, Glycine max
  unsure at all n locations
tcttatccaaggctcatcttggtggtgttgctccttcttccatggcttattccttaatggatggcgccttctctcacctcttttccttttcttccgctgcatctccatggtggaaaatcaccattaaaggaccccattgaagctcaaagatccagcctccatagaagcccccacaagcaagtttccatcaatatggataacatatagatatgacaataatcactgaaataaacttcatgaaacaggacctcaacatcgggcaacatgtcgagcacaatgttgatgaaacttaagtcacttgagcatttcagaaccaactgaattttatactttggttggaccttgattntaaaggcaagcacattacccaggaacttatc

SEQ ID NO: 21858 - DNA, 407 bp, Glycine max
  unsure at all n locations
agctatgtggatttggtcttcgccggcaaaaggatcgaagcgggtctgaaaataggcaaatttgatcatcctactttgatgagtgagaaagctggggcaaatgaagaggatgagaatgagggagaaacccttgatatgactgccattcctacacggtcaaatttcccatcagcccaacaatgtcattactcagccaataacagtctctcacccaatcatccacaaaggccatccctaaatcaaccacaaagtctgtctaccgcacttccaatgatgagcaccacctttagcacaaaccaaaacaccaaccaaaaaggaattntgcagcaaaaagcctgtaggattcaccccaaattccggtatcatatgctaaacttgctcccatatctactcaataattcaatggt

SEQ ID NO: 21859 - DNA, 417 bp, Glycine max
tgaactaaaatcggtaagagtgtgaccttaaactgtgtgtgaacgactagctgtgagtgataatctttgcatgaatctttgaattttagaatgaaatgtataaatgaggacataatgaaggccatgattgtacatacacaagctccctttttgagctgaatgatattgtcaaaaaatttgaaccctgaacttaaataattatctcctgataccttgtttagattttagaagagcatatggttcaaggcaaatttactctaaatttgggggaggaaagtcaattagaatgaaaagaaaaaggttaagcatcagcacacacaacaaataagtgtttgtaaaaaaaaaaattgtgttgttacaataaggtcaaaagcaacttgagaggaaaagatagtgagaaaactacttgtataatac

SEQ ID NO: 21860 - DNA, 403 bp, Glycine max
tttgctatgagcaaattcaaacgacaataaccttttactcggatgtctgattgagtcccgtaatatatcgagacgctcgaaattgaatgttgaagctcagagcaaattcaaacgacaataactattttctcgtatgtttgattgagtcccgtaatatatcgagacgctggaaattgaatgtttaagctttgagcaaattcaaacgacaataactttttactcggatgtctgattgagtccagtaatatatcgagacgctcgaaattgaatgttgaaactctgagccaattcaaacgacaataactttttactcggatgtccgatttagtgacgtaatatatctgggtcgctcgaaattgaatgttgaacctctgagccaatccacacgacaataactttttac

SEQ ID NO: 21861 - DNA, 346 bp, Glycine max
ccgcttaaacattcaatttcgagcgtttcgttatattacggttctccaatcagacatccgagtaaaaagtgattgtcgtatgaattggcttatagcttaaacattcaactttgagcgtctcgatatattacgggactcaatcagacatccgagtaaaaagttattgccgtttgaattggctcaaaggttccaaattcaatttcgagcgtctcgatatattacgggactcaatcagacatccgagtaaaaaagtattgtcgtttgaattggctcacaggttcaacattcatatttgagcgcccccatatattacggcactgaatcggacatccgagtaaaaagttat

SEQ ID NO: 21862 - DNA, 409 bp, Glycine max
  unsure at all n locations
tagctttactagctagatagatattngtcaaattcctaatggtcaaacatcattctttagcacgaatgcatattcaattcttgtgttcgtgttcatatatatattacactggcatacaatgcatgtttattttctttaagatgctgccatctgtccaatttgtttgctatatatgagattcattaaatgtttgggtaaggcaattataccgttcccgcgagtcataccatttgtcattggtcatatgcatagattaattcataaagttntttttagccaaatcattttatagtttgtgttgcagattatataatgtcttagaaaaaaagtaaatattttaaaatatatattagtttactaaattaatattatcctttacatatttttttagactatctttaattaatac

SEQ ID NO: 21863 - DNA, 346 bp, Glycine max
ttgggccattaaccaaaaaaatgtatgtttgaagtaatatttgattgcctttctaaacacaatatgtttgaactttgaagtacacaaaaggatgtgaaagtgatgcaaacatatagcattgaagcataccaagtaagtaaaaacgtactccaatatgaccagctccagaagaaagaaatagctccattaacttggttagaagacattgtctgcatgtgtcatagaaacactgttattaatgaaaccattgcacatatagttcttcaattaaccacaattcttttcaacttttaataatataaagttccaaaaaccttcctttcaaaggaaaagggggggggggggg

SEQ ID NO: 21864 - DNA, 414 bp, Glycine max
tatcttctaaacacagcaacacagaatctaggtgtccaaaacccctcaattcaatgggttttctaggtttgaaaagtgaaatttagaatgaggtaaatttgaggcaaactctcacctcacaccagtccataacatccatttagacttgttcaaactggatttacacctaaaatctcaccgaatcaaaatttgactcttcaacacccaaatttgccctagcaatggctctttgttcactttggtcatttgtttttctctctagctcagcctaacctttctcacatgtcctaagtgacatttcaagctagtattaactcactttaacctccatttaccacagaattcagacttagcctccaactctcaaagtctcactctttttccactcataacatcacattctgactttataac

SEQ ID NO: 21865 - DNA, 421 bp, Glycine max
  unsure at all n locations
gactcacgctttgagggtgcgcagcccaccatcttttatattggagtaccgataatgtgtttaccatcacgattatcgtctccctttccattattgggggtaccacctgngccgccagatccctccaccttttgggcatgtttttgaaagatccgtccccctttttgcacatgttctgtagttgcatcctattcagaaccatatcaaaattgtactgatactgcctaacaaaggcaaccattangtccttccaagaatggactcangaaggttccaagttagtgtaccaggtaacagctaccccagtaagactttcttggaaggaatgtatcagcaattcctcatcttttgcgtattcccccatcttctaacaatacacctttagatggttcttgagacaagtagtccccttgtacttgtc

SEQ ID NO: 21866 - DNA, 357 bp, Glycine max
tatgctatgcaagtcttgaaaacgaagtcaggaaactaagggagcctctggtaatcgattaccagcctgtgtaatcgattacatagagggatgggtcactggtaatcgattaccaggtatgtgtaatcgattacacagtgcatttttccatatttcatgtcctgaggctgtgtaattcaagtttagcctctggtaatcgattaccaaggctgtgtaatcgattaccagagatgaaaagccttaagatacccctcttacttgcatgtaatggtttgtagaagtattgtgtgcagcgcagttagattcttgtgaaagagtctacccctctctcttctttcttgtagatcgtgatggcgg

SEQ ID NO: 21867 - DNA, 325 bp, Glycine max
  unsure at all n locations
ctataaaactccgctntaacctcatcttctctcacattctntagatnngggagccaatccagtccttgtgttcgaactctcagccacttatgatagccgccgatgatcccattactgcttcccctaagctctctgtcctttcttcatgccgcatcccatgccttgcgaactccttggagtaccctcgcgttgtggacactgaaacctcgtgcgacgaaaggcgtgatgctttcatctgatggcactcctctcatgggacatccttctcatgaagataaaatcctgattcttccttccttctagcgagggaaccatttaacagacg

SEQ ID NO: 21868 - DNA, 394 bp, Glycine max
  unsure at all n locations
agctttgatggttntgagaagaaatcacatgtttgtcatcatcaaaaagggggagaatgtgaatgtatgtatacatgattttgatgatgtcaaaagaagaatcaaacaaggctcattttgcttcaagattaatacaagattgtttcaacaaacaaagccttgattcaagatttcttcaagatcaagccttgcttcacaatgaaaggtttcaagtcattcaaggcacatgtaatcgattaccaatacatgtaatcgattaccaatggtttgaaagtgtgtaatcgattacacatcatatgtaatcgattaccagagactctgaacgttgagaattcanattttaaatgaagggtcacaactgttcaagcanaataattgtgtaatcgattacact

SEQ ID NO: 21869 - DNA, 340 bp, Glycine max
  unsure at all n locations
tctagtgactgtgaagcacgttattctgttgttttccagatcggttccttcgccaagtatgtgtatatgtgtataactgtattatattcgttgttctggttgttgtttgtattttgttttgtgcagaagaaaaaagaagaagtagagatgagagtcgtcatcgcgaaaagggcaggacggacgaaatcagtgtcctatctttgctttcctcttatctctgatgagaggtaagtaaagaggggcaactgtcataccctaatttcgtccggggattattacttgatgacatgcaatctttggttagccgctttgagatacttggcgtncttngttgcacaat

SEQ ID NO: 21870 - DNA, 411 bp, Glycine max
  unsure at all n locations
agctttcatcactcattgttagttgaaaatgagtgaatctaagcttcatttatcttgtcatccacttgtatagttataggatgattatattaagcggaatatcatagtcaagttaggagttgagagaatataaatttgaatattcagaataaaagaaaatataattgttgattccagaaaatgtgctgccccttttaagctgtaaagcatgcacaatttttaggtgttggagtgtcacacaacccactccaacaatgacacttccttaaaaattcaattaaaaattattttttactgtgatggatatacttatattaagtagacacgtaagtgattggatattcaacgacccctagctagtattataaaaaaatcacatttctagtattatanaaaaatcacatttttaaa

SEQ ID NO: 21871 - DNA, 429 bp, Glycine max
tgaaggtaaactagatgccttggttaacctggtaacttatctggccatgaataaaaaatatgcacctgtcgccagactctgtggtttatgctcctctgccgaccaccacacggacctttgcccttctgtgcaacaatctgaagcaattgaacagcctgaagcttatgctgcaaacatctacaacaaacatcctcaacctcaacagcaaaatccgccacaacaaaatagttatgacctctccagcaacaggtacaatcccggatggaggaatcatcccaaccttagatggtcaaatccttcacaacagcagcagcaacaacaacaaccttattttcaaaatgttgctggcccaagcagaccatacattccaccaccaatccagcaacaacaacagcaacagccccagaaacaacaaacagttgaggcccc

SEQ ID NO: 21872 - DNA, 409 bp, Glycine max
  unsure at all n locations
agcttctttgaganaacttccttgagaagctggaccttagctacacacacccctctcataactaagctcacctccttgagaagtttccttaagaagattcctaaagaagctagagattagctacacatacctctctaatagctaagctcacctccttgagatgaaaagctagagcttagctacacacctcctataatagctaagctcacccccatgacaaaaaaaacatgaaaatacaaaaaaaaagtccttactacaaagactactcaaaatgccccgaaatacaaggctaaaaccctatactactagaatggccaaaatacaaggcccaaacgaagganaaacctattctaatatttacaaagataagcgggctcatacttagcccatgggctcaaaatatacccta

SEQ ID NO: 21873 - DNA, 417 bp, Glycine max
tcatgatgaatcaagattgattcaaagagttttgatgtatacaaagatgacgacaaaaagctcaaaagtcaagaacacttaatgataacaaagatgatgatctcaagaataaaagaatgagttcaagattgaatcacatacacttcaaggatcaagaggaaagttgaattcaagaatcaagtttcaagattcaagttccaagaatcaagatcaagattcaagaatcaagagaagactcaatcaagataagtattaaaaagtttttttaaaaattgagtagcacatgaattttttctcaaaaccttttaccaaagagtttttactctctggtaatcgattaccagattattgtaatcgattaccagtagcaaaatggttttcaaaaaaaaaaaaaaactttcaaactgaatttataac

SEQ ID NO: 21874 - DNA, 412 bp, Glycine max
agcatacatatatattttttgacaacatccgtcatgcctgcattaaacatgattcttcttttgtaggaattggccaaaatggtgatagttcaacaacttttcctataataatcagcgttggtgacaccagctgagcagatgtaattttctcgtgaaggtcctttagttcagcaaacacctgcatcatagcaaaataatcagctattggacctagcatccggaaaagttgaattaagaaccagctatatatagattcacacacaattgtatttatttatcagtttttaatatcaaccatgcagaagtacaaaataaaatgtctcatattcacaactacctcctataacaaaacattattaagatcactatattctattagcctcgactttagtgtcaggtacactctcttcac

SEQ ID NO: 21875 - DNA, 329 bp, Glycine max
gaatgaaagtcaaagtctttgaaagggacccaagtaaagttaagaagtatgaatggcaacaaacacatatacgtcatatttgggtctaaatttttcaaatccttaaagaaaaattggcagataacgtcggccatgggaacaacaactacattggctaagttgatatgactaatatgaatgggcaaaataaactgtttacttattgagtataccaacaaattttgaaaaattgacctacgcgcattttttgtattaaagaaacgacattttcttttatatcaaattaactagtatattttcatttttttcttaccatttcattatgaata

SEQ ID NO: 21876 - DNA, 412 bp, Glycine max
agcttgattatggtgctttaatggaggaaaagaaagagggagagaaagagagaggggggagcacaaaattgaaggaaaaaaagggagagaagttgaactttgagttatgtctcacaagactctcattcatcaaagttacaacaagtgttacacatgcttctatttatagactaggtagcttccttgagaagctttcttgagaaaacttcctagagaaacttctttgagaaaacttccttgaaaagctagagcttagctacacacacccatctaaaaactaagctcacctccttgagaagctagagcttagctacacacccctataatagctaagcttacccccatgacaaaatacatgaaaatacaaaaaaaaatcctgctacaaagactactcaaaatgccctgaaataca

SEQ ID NO: 21877 - DNA, 394 bp, Glycine max
  unsure at all n locations
gcttgcagcttcaatggagaatgaagaagaagattatggcaacgttatggagagagagagctgtctgaaattttgtggggctgagtgaagagagagagagttgttttttggttttaaataaaagggttttctcttttttatgttattttattcaagctctgccacatgtccctatttgagtggagcaagaagggcccactttctctttttgactgtgacccatactcagccacaaaagtgagaaaaatctgacctttgaaacgctaaaatcctgcctcggtttgcgtgtcgtttctctggtttccagangatggaatattttgtgttcgtcggtgccagtttttgaaagtaaccaatatatatatcaaaacgctcagaataaaaccccgagcgt

SEQ ID NO: 21878 - DNA, 358 bp, Glycine max
agcttgctctatatttacattgatgtttgtatttatgggaggaggttatatgccatttttgctttaagagtaacgtcccactggtaaaactaactttccaaatgtttgccttcgcaggaatggccccgaggaagcttgcctcaaagaggtccaggaaggacaaggcggccgaaggaactagttccgccccggagtacgacagtcaccgctttaggagcgttgtacaccagcagcgcttcgaagccatcaagggatggtcgtttctccgggagcgacgcgtccagctcagggacgacgagtatactgatttccaggaggaaatatggcgccggcggtgggcaccattggttactcccat

SEQ ID NO: 21879 - DNA, 416 bp, Glycine max
  unsure at all n locations
cttgccacccagctcacccaggcgagcagggttgcttcctttataagcttcagccttctggaggaatcttctggagggcccaagtgggcctggttgctatttgcacccccatttttactaaatacaccccccttttctatttttttgtaactatttttctgtaacgttacaaaactttacgaacttcgtaacgatacttattttttcttctgcaaggttacgaacccttacgacttatgtatttactcttttttagctttcaaagaagttacagaaacttacggattgcgcanaaacacctctttttgacttccgccacattacggaagttcacggatcgcacaagcctgcttccttttgatttctgagacatctcgaaacttcatttattgcatgtcatcaagtaataatccccg

SEQ ID NO: 21880 - DNA, 241 bp, Glycine max
  unsure at all n locations
ttaactgcatcttaatttagaatcctctataataaagtctattacatcaatccttntcattttttggtggcaaggacgagctttagcccatcaatcctttttctatatctatcatattaatgatccggcctcctttgatattttaccagaaaaaatcttattcacctggtattccaattcctaatcccgtgatgtgaccgttttatttcatataaattaaatccttcttttatatgggcac

SEQ ID NO: 21881 - DNA, 339 bp, Glycine max
  unsure at all n locations
cggaccttgaaactagctgatttgtgccatagagccagatttgatattgttgggcnggaagcagatatatgaagatctaggacttctcatatggctgcagaaagagaattttgagatatgtgaaagcacacttganatggcttcttattctccaaagcaaatcataatcaaggaataacgtaattggttttctaatgcagactnagtgggatgtnaggacacaaagcccctaatatgtttcaatactggatcacaatctgcttgattctaaaacaagaaatgtagatttcacttggagtaaagacatggctatgttcacagctgcaatcacctggtgga

SEQ ID NO: 21882 - DNA, 408 bp, Glycine max
  unsure at all n locations
tctgcttcttcatcgacattntttctctctcttcatcttttctttacttcatcgacacatgatatgtcttctaaagcgtaggaaggttccaaatgcgttgtggtgggcattgtgttgtgcagtatatgattgcagcgtctgccatccttttccctggacatgtaggcagagttactccacagagtgtaacttatagctttgcaacccttttgcttgacctcctcagtggcaatcatattcctccaagccatgtaagtttctttacttaataaaaagttatgcaaacaacacttattgtgttgtgtcctataatgttgtctatcttagtctaattgagttcttccttttgatcaatttcttcttctgattgttctacctanaatcaagtaagaagtacctgtcaaaaaa

SEQ ID NO: 21883 - DNA, 415 bp, Glycine max
  unsure at all n locations
actccgcttatattatactttattagtaaaaatgttgcaactttatattggtttggatagattgnttaggagacagagaaatgaaagagtgattaaggatgaaaggttgaatttcactaacttggataaaaggcaaatagtagagaggaagaccaaaaattcatataggctccactttcctctctgttgtgtcgcaaaacagatgagactttgcgcaacactattatttctgtgtgaaaccacaattagttgttgcttactatcttgctaagtatttttttaggcatttatcttcttcttatttaatatggtacagtaatagaaagttgctaaaataaatgaanatgcatataaaataatatgcatctcttacgnaatatatatatatatatatatatatatatatatatatata

SEQ ID NO: 21884 - DNA, 402 bp, Glycine max
  unsure at all n locations
tctgctttaacctcatcgtccctcacagtctttagatttgggagccaatccaatccttgtgttcggactctcagccacttatgatagccaccgatgatcccattactgcttcccctaagctctctgtcctttcttcacgccgcatcccatgccttgcaaactccttggagtaccctcgcattgtggtcactaaaaccccgtgcgatgaaaggcgtgatgctttcgtctaatggcgctcctctcatggggtagccaagctgtcttatggcgagaacgggattataattaatacaaccccttgttcccatcaagggaacatttggacatccttcgcatgaagatagaatcttgattcttccttccttctagcgagggaaccaattaacagacgcccncccatgc

SEQ ID NO: 21885 - DNA, 405 bp, Glycine max
  unsure at all n locations
tcttatccaaggctcatcttggtggtgaagctccttcttccaagcttattccctagtggatggcgcctcctctctcctcttctcctttgtcttccgcttcatctccatggtgaaaaatcaccatcaaaggacctcattgaagctcaaagatccagcctccatagaagccccacaagcaagcttccatcacaaattccgcaccagcatgattggagtaccgaccttaagtgttaatttgtgattaggtatccctgatgttttcaatgagtttagaaatttaggtgtcagtaatccgaaagtaggattgagtagttcatcttatttatcaatgttatcagtgctacaatactccttttcgtcattgggtatcaatgataagacnaataatnntatttgtcaacaata

SEQ ID NO: 21886 - DNA, 402 bp, Glycine max
  unsure at all n locations
agcttgccacccagctcgcccaggcgagcagggttgcttcctccagaagcaacagccttctggaggaatcttctggagggcccaagtgggcctggttgctatttgcacccccatttttactaaatacacccccctgctttttttttgtgattcttttttggtaaagttatggaaacatacgaattttgtaacgatacttgttttctttccgtaatgttacggaaccttgcggatcacataatcatcccctttttgacttacggaatgttacggaacctcactaattgtgcaacgatgcttccatttgatctccggtgtgtcacggaaccttacgaattgtgcatcaatattttctttngttttccggcacgttccggaatttcacaaattgcctaatgatgg

SEQ ID NO: 21887 - DNA, 413 bp, Glycine max
  unsure at all n locations
ttgagccaaaatcttgactcaccataaaccttacccttgtaagcaaaaaaggaaggaaggaaaggaaattcccaatcaaagagaaagaaaaaaaggaaggaaaggaaattcccaatcaaagagaaagcaaaaaaggaaggaaaggaaattcccaatcaaagagtgggagaaagagaaaaaaaagaaacgaaaggaaattcccaatcaaagaagtgggagaaagaaaaaagaaaagaaagaaaattcccaaccaaagaatgggagaaagtaaaaaagaaggaaaccatgacctanaagtggtcttctccctttgattaccaaccaaaatcctgtgcgctagcgactttttcgccccgcgctaaacaaaaacagaaaaggaaaaagccaaccaaaaatcaaagccaaaacacaca

SEQ ID NO: 21888 - DNA, 398 bp, Glycine max
ttgcttgcaagcttgagctacaattactctgatagagtaggtcttcttcatatcattaataatgccattcaaccatacttttttagttgtcaataacttgccatcaacttttttagtcaatcattttgaatttgtagtcttgttattgaagaccctcccacacgtgtgcttccgttcaaatgtcttcattatgaatgttgtgttgttttccacttggcttaccaaaactttaaatgaacaaccttttgacttacacataactctaactctaattttgtcattttttgggaacctaacctccattctaataagaatcaaatactctctcattgcatccttatagtcaactaaagagttaaacttcatttccaactgaaatttgaagttctttctaattc

SEQ ID NO: 21889 - DNA, 395 bp, Glycine max
  unsure at all n locations
tccttcagtctatctacaatgtttatgaagccatcagagtcaaaataacaaagatctcccgtcttcagccacccttctgaatccaatgtttcagctgtcgccttctcatctcctacataacctgcaccggcaccataatcaccattcatggaacatattacataagcaagaccataaaaaattaagtatatttcgctagtgatatgaagtacgtttggtaaaaaacacgaatcatattcatcttgtatggcttaacctgaaattggtatcatttattangaatcatgatgataacagatcttagaattttatgcactnntttaatcgatggttggtttataagcttttcttcactacctaaatcctcctcttgtctcagttataaggaaaaaaca

SEQ ID NO: 21890 - DNA, 387 bp, Glycine max
agcttataaaagtcttgtgaaaaagttgtttgattaacgtgtgctgttgtcttgaagattcatgattgactgcaaacccaccgcgcatatacttatatgatatatcctctagcaagcaaaaggcagtgactaaataatactactatctatggaacacacaatgctgactttttacagttatacgagactactattatctgatatctgaaattacttttaaccagctttctcatttgattgcgtcaccttgtgctcgggactttggcatctacacactccatctcagaaggacaggaccccatatagtatcagaactattagacgaaaacatgacagaatcctctgcgtgctatatccctcattatagtacaagactgtgacgagtct

SEQ ID NO: 21891 - DNA, 337 bp, Glycine max
  unsure at all n locations
tgttacaaactacaanttnctanttttnagcnttttttccactgcttcaactcgatctgaggctgaaactatcatatatataaataaccaattaactaatatctctccacaaagaaacattattcgacatggggcactgcttcagcaaacccagcacaaacgaaataccattcaactatgattattcaccaccccctcatcattatcagccacgcccgcactcacactcagactcaaggagaacacaacaacctcaacttcaacctcaacctgtgtaccccaatcgaactccaaaatcagacccatctccatcatcatcatcatttggtgatcaaga

SEQ ID NO: 21892 - DNA, 379 bp, Glycine max
  unsure at all n locations
agcttaagctccttcaactgcacaaggttcttaatatttgaagagtatccttgtggaaccttcacccgacgaagacactgacaaaaacttatcttttccttcttggacaaagcatggcaggctgggggcaagtaaattttcttcccatcagaccttggatgcaactgtgatcgtatacccatatcaactagatcttgacgggtattcaagccatccttcgtcttgccttgaatgttaaggagtgtgccaatcacactgtcacaaacattnttctccacatgcataacatcaatacaatgtctaacgtcaagatcacaccagtacggaagatcaaagaaatggatctcttctttcatatgccactctgacttttatcctt

SEQ ID NO: 21893 - DNA, 366 bp, Glycine max
  unsure at all n locations
tggttcgaggttcttacccgttgtttatcgaagaacgttgaagaacgaatgaagaacgtcgaagaacggttcaaacctttgcgagattcctcacggaaaacgttacggaaacgtttcggaagcgcctcggcttaaattttcttcacggaaacaatttttccaagcaaattcgaaagagagagaagtgcctaacgggctggaccccttccttcttcatttcctcccctatntatagcagaataggggaagtggttgtcgcccagctcgcccaggcgagctcaactcgcccaggcgagcagggttgctttctccagaagcacccgccttctgaggaatcttctggagggccaaatgggcctggtgcta

SEQ ID NO: 21894 - DNA, 412 bp, Glycine max
agcttagcccacactactggcttaggatgcaaaaagcccacggcgaagcccaaatgtgtgcttaacggcttacgctaagagcgaatttagtgtgaaaattaagttacctgaaggctatataaggaggaagaagtagaagggaaagacacacggagtcttagagctatccaaagcctcagtctatcccttaggggaaacccctctctgtttttttatccatttccctttttcttgctattagtcatccagccctttctttcattagctcccgaagtgtaaagcctctaatgactatgagaggccaaacccctttttgttgggagccaggaggccgaactcttgtaatgtaattcttccctactatctatttaatgcaattatgtttctattattcttctttgtgcttttatgt

SEQ ID NO: 21895 - DNA, 425 bp, Glycine max
  unsure at all n locations
tgccgttggagttgacccatcaactgtcctaattctctcagactagctactcataggctcttgatcttgacttgatagaacctctttttaagcaaaggcatctaacttgatcccatgttttactagagtgggaaaaaaagtcttgtttgaatcaatacttcgacatctaccatgggtgaaatggatgaatgcatgaagaaatgcttatgtgatgcatgatacagacgcattttacagacatgagagcccggaagattatctcttcttaattacaacatttggcagcacagtgccccacgcatgtacttaagaaggtgacacgaaccttccggcttctcgtgataaatgaacggaccanaatacaatgcaagtgcgatgacgtgacgcagacgcgcgaaagcacaacaaggtgatgtacacagtat

SEQ ID NO: 21896 - DNA, 394 bp, Glycine max
  unsure at all n locations
agcttggcctttatataaatagtttacacttatagattcaagtaaaacatttttattctactcaataaaggcttctttttactattttaaaaggtgaaatatattagttttatgatttggcatcaaatatgttcgtgacattgtgaaccaaaaactacattaaggaatgagcttagactttgttgttgcttgtaatttatcttgacacaggtaaagttagaggaaaattgtgaaggggtttggatgagaaattttattcgaggggggaaagttcaaaatttaaagagttttaaaaatttggggagggaatgacccctgaggcatccaaaagagccacctttttccccgagagaagctcgatttgtatatttgtttggttttccttanattcttt

SEQ ID NO: 21897 - DNA, 427 bp, Glycine max
tactatatttaacagctagcagacccgacatcacctatgcagtaggtgtttgtgcaagatatcaagccaatcccaagataagtcacttgaatcaagtaaagagaattctgaaatatgtaaatggcaccagtgactatgggattatgtactgtcattgttcaaattcaatgctggttgggtcttgtgatgctgattgggctggaagtgcagatgacagaaaaagcacttctggtggatgcttctatctgggcaacaatcttatttcatggttcagcaagaagcagaactgtgtgtccctatctactgcagaagccgagtatattgtagcaggaagcagctgttcacaactagtttggatgaagcagatgctcaaggagtacaatgtcgaacaagatgtcatgacattatactgtgacaacctgagtgc

SEQ ID NO: 21898 - DNA, 416 bp, Glycine max
agcttgggaaaggttgcaagagattattaagagctatccacataatggcattactcaacaaaagctagctcgtattttttatgttggagtgtcctcaattaatagggtgagtttggatgttgcttgtaggggcaacctcatgttaaaaccccatgttggtgaaatcaaaatcattgaagacatgtgttctatgaaataacaacaatcacactagaagaggggttgaatagtgtgtcaatcaaagatcaaatatattttttgttcaactgtaatatcatagattcatatatatatatatacatatatatacacacacacactagaattgtaaaaaaaaaaaacaagtttaatagtccaataaatatatgaagtaagaagtttaaaagggttttcaaatagacaccaaacacgctaaa

SEQ ID NO: 21899 - DNA, 427 bp, Glycine max
tatttcgaggatagtttattatcatgcatagcttgcattagttggctcataacagaccaatcatacctatggagcattttcttgagcaagtagcctggcctgaagctcaacttccattggtgagacccaacgaagttgctccgcctgagcccacacctgtgcaggtttatctaaagccaactgacccataatctcaagtggtgaatccaccttcttctcttgagcttaaattagtgtccccatctccacctctgattgtcatcttcgacgcatcatcagatgaagcggctacccctcctgattaaccagttggagaaacaattgatccccttgcttccccggttggaggaattgccgatctttctgtttcgtcatctggagaaagctgtgctctcactgattccccagtttagacactggtgacatt

SEQ ID NO: 21900 - DNA, 409 bp, Glycine max
  unsure at all n locations
agcttgtgttcacaatcgtgctaagccatattctgcccctcccgggaaatatggaaaccattctggaggacagaggaccagtggaggacttcaaccagttggtgggagttctcagccaattaacagggtgtctcagtctgcgggtagaggtagtggtggtagtggtgctcctgctattgctactacaccactcaggtgtgggaagtgtggtcggcttgggcatattgcacgtgagtgcacagatagagaggtgacttgttttaactgccaatgtaagggccacctcagtaccagttgcacatatacgaggagggagaataggagtggaagtctgaataatcagagtggacgaccaatgaccacagggagagtgtttctcttatgntgctgatgcccacagtctgatgaa

SEQ ID NO: 21901 - DNA, 389 bp, Glycine max
  unsure at all n locations
cttgagatcaggaagtgtanaagggtgaacttcctgtttattcgttttctacagagcggtacctggagatatgtcgcangggtcaagagaccttggggacgtcaagtggggtgctattgcccanaaccaagcttgaccaatcccgacccaacccgggcatagtcggtcagtgagaacctgtgatgtacctaagcaagcgagctcctggcagtcaacagataaaaggaacaaagaccacaaagcatggaggcttgtggtggctggccagctgtgaatcttgtgtgatatgtggattatggcctctggtaatcgattaccaagggtgggtaatcgattacaaggcttaaaaatgaagacaagaggctaagatggtctctggtaatggatta

SEQ ID NO: 21902 - DNA, 393 bp, Glycine max
agcttccaaattagtgtaccacactaccgcaactccggccaagctatcctgaaagaagtgtattaatagcttttcatctttagagtgggcgcccatcttacggcagtacatcttgagatggtttttgggacaagtcgtccctttatacttgtcgaagtccggtactttgaacttcgggggaataacaacatcgggtactaagcaaagattcgtcatgtctgcgaacggataatccccaaatccttcgacggccctcagtctttcctcaaggagatcgagcttcctcctttcttcagttgctggaggcggcccttccgtggacaaaactattggtggtgctgcgatgttgggttgaggcaacgtgcctggtgccggcccttcgggatcggggat

SEQ ID NO: 21903 - DNA, 408 bp, Glycine max
  unsure at all n locations
tcttttggaccttgaacaagcatttaactcctcttttataaccatgctatgtgctcgcgactggtctctttcttcccttcgcaacttgagttcactattgctaccccatagagctccgcgaaatttgttccggccatactcttccttgcgagccctcttggtctcttgttcaagggctcttgcagtaattgcattctcttcccgtaacccggcacactccttccgaacgtgtgtagcggccaacttgaacttctccttggcaagttttgcctttcctaactcgcttttgagagtttggacttcttcgtcctcttccggtgcttcaaaactctcttcgctgacgactnttaacttggcgagccaatctaaacctcgtatatgaactntcatccattcgtggtacccaca

SEQ ID NO: 21904 - DNA, 403 bp, Glycine max
ttcctctagctgttctgataaggtttccaaacgttagagaaggagaagagattgaagccttcattctactgcctgcatgcaatgaatatttctccctaacaagatcaattttcaaatcgcaacggtgaaaatatgcagaaatgaatttcgaaccaggtgtcccaatttcacaatgatccaacggttaatgagtctgggattatagttttactaggacaggttttgggtctctgcaagaaaagaaaaagttaagatgagaagggaatttctctcacctccaactctgattcgcaatttccatcggtgagaatacttgaatatgagctgcaaacttggtgctcaaatttcacaacaatccaacgattaacgagtccaagatcattgttttactgagacagatttg

SEQ ID NO: 21905 - DNA, 356 bp, Glycine max
ttagattagtgatcacatgaaagagtgtataatatagtatatgcattgagtttgaaatgcgatagatatcaaagtgtgaatacatcctaaaatacatataatggaaattgatgattgaatgttcaagcaaaatgtctaaaaactaagcctacccatacatatacgaaagagagagaacacactagtctcaaagcagtcaccactaaacccaaacccatggcaaggaactacacaaacgtgttgagataagagctcaacaattagaagagcccccataatgggactcctgcgaggaaacatcacacatgacctcatcaagatcctctacaggaccctcatcattgctctccttaatg

SEQ ID NO: 21906 - DNA, 409 bp, Glycine max
  unsure at all n locations
tttcttccatatgataagagcttatcaaataagcatgatttagctgtttacacaaacacaccatttatgtattaaatctaacttgatagcttaagattaaaaaaaggaaaaaaaggtttgtcatgcctcaaataaaactggctttttcttttacactggcatcgtgggtgggtacacattctggtaacaaataattacaattattcctacaaaataatccagaccaccccatttgtgtgcagcactagcgctactagatggatgataaaatgggaggctttaatagatgtatgtttcttgtggattgttataagaaccaactntgttcacccaaaggttaactagttcatcacgttgatactacaacaaaatagaatacatccttttaaaaacaaaagttgttcaccac

SEQ ID NO: 21907 - DNA, 378 bp, Glycine max
  unsure at all n locations
tgcaccaacttctcattntatgcataatatacaagtttatattttaatttaatgtttagtaacacgactaaaatccgtagtaagatgaaaaataaattttcaatttaatacttattagcgtatatttaaaagaaagctgttagaaattagtaattattgattatttttgggacatgtaagaaagacattatgtgtgctttttttagcgagacaatgttatttggtttaatagactaataatgtaatttaacatattgaaacatcaaattataaatattctgtacaaaattaatggtatatagatgctggatgtatttattcagcataaaaaggttcctggatgtattttattttttgagactggccgtctctatcttc

SEQ ID NO: 21908 - DNA, 409 bp, Glycine max
tagcttcttttggaccttgaacaagcaactaactcctctttcagaaccatgctatgtgctcgtgactggtccctctcttcccttcgcagcttgagttcactattgctaccccatagagctccgcgaaatttattccggccatactcttccttgcgagccctcttggtctcttgttcaagggctcttgcggtaattgcattctcttcccgtaacccggcacactccttccgaatgtgtgttgcggccaacttgaacttctccttggcaagtttcgcctttcctaactcgcttttgagagcttggacttcttcgtcctcttccggtgcttcaaaactctcttcgctgacgacttttaacttggcgagccaatctaaaccttgtatatgaactttcagccattcatggtagc

SEQ ID NO: 21909 - DNA, 377 bp, Glycine max
  unsure at all n locations
tgcattnggaattgcgaaagccccactctatcattattattagtacctgacatctcaaacaaacaaatcaaacgtaacaagacaattatagttgctgtttgaatacctcacccactcaagtgtatcacacaattatggcttttctctaatgaaacactcttgccttttaccactctaattccccttgagttcttaggcaattcaagagattatggccacaacaaagaacaattcaccaatatgtgtaaggtaaggctagagagacaaggaaaaggttaaccaagaaaaaggctaacaatgtttttaggcacaaatgaaggaaataaaattcagaatttatgaattcaagtaacaatccttcatgcaaccaatatatt

SEQ ID NO: 21910 - DNA, 408 bp, Glycine max
  unsure at all n locations
agcttgcatacatggctaaccaattgtcattgtgttaccttggtaggaagtgtttgggttcgtaagcattgttggattaggagaacctttgtctaaggcctatagacttgtgagtgcctttttccttatccacttgatttctggattaaaccttcatgttttttttttgcacagcaaaaatcagataatattataaatgattcagtactaagtgtactgaagataagctgaaatagataccaaggcagagaactgccgaacccaactacataggataaaagcacagtagttggagggttaagtcgatagaataattctgctgagtactcacttggttnttntttttgctcatcaaanatagataatatatattgatagagtaccagtggtacgaanatacaaggtact

SEQ ID NO: 21911 - DNA, 403 bp, Glycine max
tgaaggtgtgtagtccaccatcttttatattagaatattggtaatgtgtctactattattgtcatcattttttttccgtcattgaggtgccacttgagctgccaggttctccacctttgggcgtattctttgaaagatccgtgccccctttttgcacatgttctgtagttacatcctatccgaagccattatactgacacagcctaacgaaggcaaccattatgtccttccaagaatggactcgggaaggttccaagttagtgtaccaggtaacagctaccccagtaagactttcttggaaggaatgtatcagcaattcctcatcttttccgtatgcccccatcctccgacaatacatctttagatggttcttggggcaagtagtccccttgtactcgtaaaa

SEQ ID NO: 21912 - DNA, 412 bp, Glycine max
  unsure at all n locations
ttgcttgcaagcttgaggatgttggattgcactaactcacgaatgaagtgataatcaatatcaatgtattttggtcgttcatggtgagctggattggatgctagatctatgacagatttgctatcacagaaaaacatgatagaaggaatagtaatctcaaagtgcagtaaaagtcttcttagccaaatcacttcactagatattgaggagagtgcccgatattctgcctcaacagaagacttagacagaatgggttgttttttttatttccatgatattaaggtatctcctaaaacacacaagaaccagatgttgatctgcgtgtgtccaagcactttcccaatcagcatctgcttatgcagacaaattgcatgaattgtttgatgaatatgacaccctgacctgcagaccn

SEQ ID NO: 21913 - DNA, 377 bp, Glycine max
  unsure at all n locations
tcctactcttagtttgctttactctttgnntctttgtgccttttgttgctgttaactcggtatagttatgccttagattaacagtggtcatgccgttaagctatgacttcagtgttattgataaaactgagttaagttttgagtactttttcactattagtagaagtacgcaaaaaaaaaaaaaacttttattttttgtgctatgtccaaggttaattacagtcgtggttgtggtttgttgcgatccttgacattgccggaaattgtgggcaaatgcaattgcaattgtggtcgcgatgtggttgtggcaagcctcaaaaccttgatattgcagctgaagctgtgtactcttatatagtgcacttagctttataatt

SEQ ID NO: 21914 - DNA, 372 bp, Glycine max
agcttgttacagaacttaggaaaaatcaagaacaagcttgttcgcacatcgttcgcgtgtatgatatccactcgacaaggtttgaagtagaggagaccttcaatcctataatgcaacgtggcggacaaaagtgggcagttaacttgaatggccattattgtcaatgcggaaggtattctgcgcttcactatccatgttcacacattattgcagcttgtgattacgtgagcatgaactactatcaatatatagatgttgtttacaccaatgagcacatcttaaaagcatactccgcacagtggtggcctcttgggaatgaagcggcaattcctccttctgatgaggcatgggcactaatccctgacccaacta

SEQ ID NO: 21915 - DNA, 381 bp, Glycine max
tgtaggattatggggtacccatcacatgtggtactatgtggcggtcgggcgatggtgcacaacaagtttttccacatccacaatgcgcgcataaacccaccatcccctgtagcccacctccaactgagctcacgtactcccatgtagcccatatcctcgtttctctcaacaccgggtccccatcaatcctcccaagcttccccaacatcaaagtaatacaacattcaaacagcacaaactatcacagccaagaaaacagagcagaggcagaaaactctgccaaaacaccaaccaaaatcacagcttttctcacttaaagaccccagtaacaattccttcgttccaattcgttaaccgttggatcgactccaaatttttact

SEQ ID NO: 21916 - DNA, 389 bp, Glycine max
  unsure at all n locations
agcttttagaanaagaaatcaattgaaaatgatgagcaatttatgaaaagtgacatttatttttttgcaagcttaattaataatgaaaggaatggagagaaaaaatggaaaaggttaaatccgtgcacaaattataatcgtcgttaaaaatttaatataactgtcgttaaaaaagtattttctagtagtggtaaagttcactttattgattgagtcataacttaataattcaatcttatgcagtcacaaagaaagttgaaatttgaacacaaaanagaaataaagatgaagatttactagattgtcatatttttttttaaanaaaaacattattatacatgtatatattattataatcatgttaatggtacatatatcatcatatttaa

SEQ ID NO: 21917 - DNA, 409 bp, Glycine max
  unsure at all n locations
tgcatgtaagatactgcaacttcttgctgatcacgaatatcttgcagtatttcccttggtttgtattgtggattatctcgaatgcgtgcttcaacagatcttgcaacccaacctactgatgcctgctgatgatgaaggttctgaactccctcgcaagtatgctctccgtgtagagttcttacagtaaaagttggaacaccgggacactttgctacatggacccgccatgggcacccttctttggagcattntgctataaaacgactgcgatctgacttaactatcctaagatcaaaatgcatagcaatggcaatatctttcagtgttcttcggcagggtttcacatctgcaaactcttgcccaatgactaacggctgctctgctacagtaacagtactaacagatgtgt

SEQ ID NO: 21918 - DNA, 379 bp, Glycine max
gttctgtgccatcattggaccactttgtacacgactttctatcggctccaccttctatgtcctgatccctctgctcttataatcaaccctctaagatatagccaatgtaagaatctaaatggaaaaatgtctaagaagttatgggaatacacatatatacaatatgtaaagcatagtacacttaattaaaatataaaaacataaatttacatgtgtatcgcagagatatgattgctatgactttatctgtgatcatatcccagtttagacacgtagcgtacgtggtacaaaaatttgcaagtgtatatgcacagcagtgcttgatgacaattaacaaaaggttaattgacatgataaaaagggtatcaaaaaatataaa

SEQ ID NO: 21919 - DNA, 377 bp, Glycine max
agcttgctgtgattttattctgtgaaggactcaatttcagcaatgctggctatagagttggtgggcctcaaaagaattattgatggcattgaggaatgactctatttcctcatgaagctcatcaactactatatcattgaatctaaaagcctcaatgatttcttgctgaagctttcctttgtagtatggattcgaaagagtgtcttcaaggttctgatcaaaaacaagtttttcgaaaggagccacaacctcattgaaatgggtaaaaggcatgttgttactcgatgtggaggcttttgaaggcatagaatctgaagaccaagcatcaatgaaagtgaaagggtatgcatccattggattcacatctacctgaggag

SEQ ID NO: 21920 - DNA, 467 bp, Glycine max
  unsure at all n locations
agaatgtttagtgagtcttgactgaanccttgaanacagtgaagtcttataanacccatttgaccagatagatcatgttgtctaccactaaatttctctatttgtagcgacatagatcgcgaacctactggacatcttctggctcacccttcatgattaattggaaactcgtcaaggagttatattactgtgtggcttgaaaagtcttattggaaaatctgatatccctcctaataggccacacatgaatcttactgttaatatttaaattaagatatatgagcaggggtgctcctataccttgacgactcaaaacgggcagcgcggctatggtctttttgaaagttacgaaggcttgcacataagtcttgttccatgagaatggctgacccttttgtagcactctgttaatgcttcatctttctcgcgatctatggcacgtacctggacaacgatgctatcctacc

SEQ ID NO: 21921 - DNA, 383 bp, Glycine max
agcttgtaataatcttatatagaagtatgagattaagttcctgagtggaattttgatgcaatcctcccatggagggggcccatcaccagagtcatggttaagagactccaggaagattgggccagggatgcaagagaatgccttagggttctcatgagccttagggtagcttttgggcccatgggttaagtatgtgcccacttatctttgttcatattagattatggtttcattatttttttgggccttgatttagggcaccacagtgtagggagggtaccccataagtttagggtaccctagtaatgtaggatttttcagcccttgtattttagggctcacagactagtttttgtatcagggatagttttgtaatttcacat

SEQ ID NO: 21922 - DNA, 407 bp, Glycine max
  unsure at all n locations
acatttgctactggaatcgatacaataatctggtaatctattaccttagagtaaaatctcttttgtaaaaggttttgagaaaaattcatgtgctactcagtttttgaaaaaactttttaatacttatcttgattgagtcttctcttgattcttgaatcttgatcttgattcttggaacttgaatcttgaaacttgattcttgattcttgaaatcatcatctttgttaacatgaagtgttcttgagttttgagctttttgtcatcatccttgttatcataaaaaatccttgaatcaatcttgattcatcatgaagcttgcttctacatgaaagcatttgaaaataaagcaacaattaggcaatatatgtatatacatcaagcatggccaanatacatcatcaagcatg

SEQ ID NO: 21923 - DNA, 377 bp, Glycine max
agcttcaagagatcatcctctctacaacattattggtgatatctcaaaaggggtaacaactagacattctcttaaagatttatgcaataatatggcttttgtatctatgattgaacctaaaaatataaaagaagtcatattagatgataactggatcattgccatgcaataagaactgaaccaatttgaaagaaacaatgcgtggaaattagtagaaaaacctgaaaattatcctgtcataggaacaaaatgggcctttagaaataaattatatgaacatggtataattattagaaataaagccaggttagtagcaatagggtataatcaagaagaaggactagactatgaagaaacatatgctcctgttgcaagat

SEQ ID NO: 21924 - DNA, 481 bp, Glycine max
  unsure at all n locations
agagagtgganatttgatacgtagcattggacgcactcgatataactactaagcttatcaattggattacgcttatatatatatatatatatatatatatatatatatatatatatatatatatatatatatatatatatatatatatatataggtggaagcccacgctcgacattccaatttttattcccattacattatattggaaaattctgtaatatctgaatccggtacgattttcaaccaacaattaaaaaggagtcaaagtgtttcttctgtataaagaaaggacacatatagaaggactgccccatatttaaaagttggtgtgtgaagataggtacaccatatactatcgtttgttatgaatctaatatgattaatgtacatcataatacatggtggatagactctggctctacaatccatgtggctaataactcgcagggtatggaaagtctatagaagccagctggttgtg

SEQ ID NO: 21925 - DNA, 297 bp, Glycine max
ccaaactgaaatgagatgccatgatgccatataccccctaaggatttttatttaaaaagggatcgaagcaataatcagtatgctgctgaagaatgcaaacaccaaataaggggaagatttgttgaaatgagagacgtgtaacatccaaagtgtgggctacgttaacatgccgtttgttggagttaaacacaatggttgaggatgaaacctttgacataaatctgttagaaataccccatatcctcgttagaccacttttcataaattcgtctatactgtacaagtcaatatgatctt

SEQ ID NO: 21926 - DNA, 374 bp, Glycine max
agtttttacacttagggactaatgtgaatgaaagaaggggttggatgactagaagaaagaaataggggaatgactaaaaaggaaggtttcccctaagggatagactcaggctttagatttcttcactagagagctttgagactcggtgtgttttttccttcaacttcctattccttttataagcctaaggtagcttacttttcacgctgacaacatgcacttctagtagcaagaatggcggtttaatcacgcgcttagcgcagtgttcgcactaagcgcgaccctatgccttctttgcactaagcgcgagctggccgctgagcgagcatgcatgctgggctcgtctcgtgtgctaagcaagctgtccacttctt

SEQ ID NO: 21927 - DNA, 399 bp, Glycine max
ctccgcttgaccttcttagttgttctttgctaaaattttcttattgtttgcaaataaattgtcaaaatactgaacatctttagggtgagtatcacatgtaaaattaaaaatatgttaaagatttttattattgtttttagtgataaatcttattttaaaatcttagatcattcttaataggtctcacatgaatcttatcttttaatatttaaatatttttttctttttattttctttcttttacttctcatttctcagccgtcatgctctctcaatccttcttttttttttcccaatgttcacactttcttatttttcttttccttccctgccactcccgttcccctccacttcatgctgactcacccttaccctccccctcccctctgtaacttcctc

SEQ ID NO: 21928 - DNA, 283 bp, Glycine max
aatcttattgcaaccacgagattcagctcctgagaggaatgtacgtgctataactaccatggatggggcgccatcaccaaagtcatggttgacagactccaggaagatcgagccaaggatgcaagagaatgccataaggccctcatgagccatatggtatcgtatagtgcccatgggttaaacatgcgcccactgatcattgtgcatattatatcatggtaacactatttggtggagcctcgactcatggcacgacattgtatgcagggatccacataatgtt

SEQ ID NO: 21929 - DNA, 408 bp, Glycine max
  unsure at all n locations
aactaagcnttaagaattagaattatgatttttgaggcatgttttataaatgttgattctgatagcgcgtatttgaaatttcattgatttgtttgcacatcctatgtataacactataaaatgggataaatacattggtctttagatttcaccttaataaacaaagctgatgcttcacatggatattgatatttgaaccatctctgcagctacttcctacaacaaacaacacaaattaataaacattacaaaaaacaattgtatggcttatgtaaatgaatgtatcaaaatcaaatatataaatacaaaattacatctgacaatgttaattaattctccttcatcatgatcattacgattagcatgaacgtcgaaggcttttttttcttcgacaacattatgagtgat

SEQ ID NO: 21930 - DNA, 264 bp, Glycine max
tgtctgcaagcttgtggcttgttcacccatttgtgtgtaaggttaggagatttatcataggaaaatgtactgcatcattagaactggataggacaaggctcggttatcgaactaccagacatggagagcggtattttaatttttatcatgctgtaattgtaatgctaggcggataggctaatttcaacaagagacatctggatgcaaagtttaatttgaattatgccaaactcgccagacatcggtgttaggtatctgtgcctt

SEQ ID NO: 21931 - DNA, 414 bp, Glycine max
tcgagccaaaatcccaagtcactataaaccttgacttatagtgagaatgcccatccttgccctcagaagaaaacaaaacaaaaaaagaaagttcccgatcaaggattggaagaaagcaaaagaagaaaattcccaatcaaagattgggagaaagcaaaaagaaagaaattcctgatcaaagatcataagaaaacagaagaaatatgcagaaaggtctttggactagacaatatatgaacaatacagaattgtcaccaccaaataaggaaagaaaggaaaccacgatatgaagtggtcctctccctttgataagaaaggtgacttttctgtctcgcactaaacaaaaacagaaaatgaaaaggccaaaacactcagagccaaatttcccaccaaaaacaccattcccgataaagt

SEQ ID NO: 21932 - DNA, 356 bp, Glycine max
atctgtatatgtatcatataactattagcattatgcttctaagtttcttggaaaacatagaaggtatagagttaggtcttcattaagaactgtctgaccgacaaaacaaacagctagttcatcagcatgtaacttgatgccatgcaagtgtattcagtaaaaggctttgtacttttgactctttgatggccgtgatgcgagattgtgacttgttggcatagaatctctaagatataccaaacagtgaggttttggctcttgaaatggtggtttgaatgccggaaggatcttgtggtgctagaaagaatgcttgagcagctgatcttgccaatgccaaaaggagaatctagacttgt

SEQ ID NO: 21933 - DNA, 308 bp, Glycine max
tggtgatagcttgtgatgttgcttgagcattgagttttatttatttttctgtggagattcacgtcacattggaaagttgaatcaaaacccaatcgaaaggactcacgattcatattaaaacactaagaaatgagtgagttatatcctatgctagttggccttgttgcttataaaaagttgaataaattatgttgcatgatttgcattctcaaaattttatggacatgggatctgaatgagttcgattatatataaaattaacacattctgagctttctttaaatgtaaaaatatgctcattttcataa

SEQ ID NO: 21934 - DNA, 417 bp, Glycine max
ctataaaactcagcttctaaacttgtacttaatgaagctcttataccatttgttaaacaagtggcctcagatatcttaagaaggggggttgaattaagatatcacagactattccccaactaaatattctacttttaatttgatccaacaacccaaaattccctttaaaaatgaactcctaaataataatgcaaattaattcttactgaatagaaataataagcaataaacaataaaggagtttaagggaagagaaaatgcaaactcagatttatactggttcggccacacccttgtgcctacgttcagtccccaagcaacccgcttgagagttccactatcttgcaaaatccctttacaagttctgaaccacacaaggacaacccttcctttgtgttcaaatttctttacaacaag

SEQ ID NO: 21935 - DNA, 323 bp, Glycine max
agtttttatgatgtcattatatacactctgacaattaatagcattttaggttaaattcctataaataaaagcaacaatgatgcgcatacgataactctaattctaaaacatatcatgacctatatttattacaagaatttaatttatagaaatttaaagccttttcttctattttccattatataaataataccatcataggaatcttttttatattattatctaatgatgtggaaaaacatatcaatatccatatgcacatgtgcatggaggacaaaaagcaaatatgcatatttgaatcatccagccatagatgacatgga

SEQ ID NO: 21936 - DNA, 236 bp, Glycine max
cccatgcgggcacatataatggcgtaacatatggggcgagaaccttggatgctcttccaatcatttgctacatgatcaatatcgttttgcaagataacaaagcatactcttatgtttcagcccctatctctatccgtaactacgattgaatgcgtctcgctttcatgatgacgtaccgggtcactgacggacttagagtgcttgccttgccgccatgctaacttattatacgtgat

SEQ ID NO: 21937 - DNA, 373 bp, Glycine max
agctttgacttgagtcatcaagagattataaatatgtgaccatggcatgagtttcaaaaatgatcaatcatctttgaatcatctatctttcaatctttcttcaatatcatatctcaaacatctttcaatcaatctttcaatatcattctacaaaattttctgattcatttctcttcatctttctaaaagttttttatcaacactttctcttccaagaaaagttctttgttcaaaaacttgtgctattcatctttttcattctcctcttcctttgccaaaagaacaaaggactaaccgcctgaattcttttgtgtctctcttctcccttacaaaagattcaaaggactaaccgcctgagaattcttttgattct

SEQ ID NO: 21938 - DNA, 424 bp, Glycine max
agctacaagagcgtgggaaagttagatagaaagtatgttctactgatatgtatagcattgtagattgttttcattgctgaaaaagttgcatctttatttatccaagatgtgtataattttaggttttgtcatttttttatgggtacagcttctttctttaaattcttctgccaattatcttcacttgcttgtattaatttgtttagaagctatactaaaaattagttatggacttgcgggagttggttcatgagtcctaaaactcttgccacgaaactaatattacttggctagagcaaaactaatattactcttgacaaattttcctactgggtagacaagtatccagaggttataagtagtatatactggtttaagttcgacaaatttccttataatatgtcttcaaaattccaaattaact

SEQ ID NO: 21939 - DNA, 383 bp, Glycine max
agcttgtatataattatcatttgttttggctaataacaaactgaacgttacattgttaacattagatagtgaatatctatcgactagtgaatagaatgaaatcttattttagttcgttatctaattttacctttctcaataattaaagcttataatcttctaactcccgtttcgtctttaaaatgtatctttaaaatttatgagtttaataaccattttagtatataaaaatttacatggtcaattatcaatcaattaaaagtcataaaatcattctcattataatttttaaaatagttatattataaaaataataaatttatcatatgagatgctttgtcattgatctgtgattgaataattaggtgtgttatacttattct

SEQ ID NO: 21940 - DNA, 345 bp, Glycine max
agcttgtgtctctagttcctcccgaataaatctttgtgttttagtgttaaattatctatttaatcaatcgtttaaaaaaatattgttagaatataaaatcaattagacattttgctttgtgttaataaaaacacggaaaaaataaaatatgacagatagaaaaggccgaagaaattaaaaaaagaacaaaaaatggaaaagaagtgaactcaatcctatcttactctttttagtgtggcatggtgtgatgaccttgctctctgccatttaccattttcatcatagcaattcatctttacagcacatcatgtacgtaccttatggctctatgcgaatggattaatt

SEQ ID NO: 21941 - DNA, 373 bp, Glycine max
agctttataagtgcgggttctgttgacaaaggtcaagcgttcgcgatatgcgaagatgatattccgagtactttggatttggtacgaccatgctctcctgatttccagctgggaaattggcgagtggaggaacgccccggcatttacgcaacaagcataatgtaaacctttacggttttaaaagctctatagttgggcctaggctttagagctttcattttgttaaggctttgtgtcttttgtttttgaatttataatacaaggatctttcttcatctgttcctggtctctacccattctcattcatttgcatgtttacttctttttctaaaacggcagattcgatgacgagtcccccgaaggtactaatacc

SEQ ID NO: 21942 - DNA, 409 bp, Glycine max
  unsure at all n locations
tagaatggctagacatgatacatgtcanggtttggtttggttcaaagctctgagaatggctagacatgatacatgtcagggtttggtttggttcaaggataaaagggatgccccacattatttccatgacacaaatgcaaaaatgatgatttggaaacttcatgcaaaactggtcatgcatgcacctatgtggacactcaagtgtcaaatttttatggtcatgtgatgctaggactcaagattcatttcctctattttaaatcaacccaatgtttccaaaatatgttcttttatcaatttgtgcattcatccaagtccatttcgggcgtccggtgaaatttcacagcattcacccttcaggtgtagacacatttttcaaaaattggttatgatcaatgaattctttttc

SEQ ID NO: 21943 - DNA, 364 bp, Glycine max
agcttttctaatttattcaataagatgcatgaataatttaatcataaatcataaattccatacatgatgtaattattcatgtatcttattgaatatatagatcttatggttatttcatataattagttaattaactggtgattattttctgaccaagcctggtgattatttcatacgtttagttaattaattgattttgttttatattttatttattaatttttcataatggagatgaattctagacaattcatgtttgaaacacaggatgcattgtttagtagcatttactttgtgatctgtgtctcagtttgtgttggaaagactagctgtactcagtctactgtgatttgttttacttcat

SEQ ID NO: 21944 - DNA, 404 bp, Glycine max
ctcttcacatttgaatttgaatttcaacgttcaaaggcactggtaatcgattaccaaaacattgtaatcgattacaactttttgaaatcagttggaacgttgtaaattcatttgaaaactttttcaaatccattttgctactggtaatcgattacaacaatctggtaatcgattaccagagagtaaaaactctttggtaaacatgttttgagaaaaatccatgtgctactcaatttttgagaaaaaccttttcatacttatcttgattaagccttctcttgattcttgaatctcgagtcttgaatcttgatctcttgaatcttgattcttgaaatcttggtctcttgactcttgattcttgaaatcaaacttccttttgaatcttgaagagttcttgaatctat

SEQ ID NO: 21945 - DNA, 382 bp, Glycine max
agcttgcttgtggagcttttatggaggctggatctttgaggtgagaggaggcgccatccactatggaataagccatggaagaaggagcttcgccaccaagagagtgccttggataaaaagcttggagagggtgcttcaatggaggaaaagaaagagagagagaaagagagaggggggagcatgaaattgaaggaagaaaagaggaagagaagttgaactttgaagtttgtctcacaagactctcatgcatcaaagttacaacaagtgttacacatgcttctatttatagcctaggtagcttccttgagaagcttctttgagaagcttccttgagaagctagagcttagctacacacaccattctaataactaagctcacctc

SEQ ID NO: 21946 - DNA, 424 bp, Glycine max
aaccgatacactaagtaagttaccaactcaattgtatgctagtcaaccgttaccttcatttgttttgcaggttacaggttgcacactttgtggtggagctcatgggccaggcttgtgtattcccactgaagaaacatctcatgaagttaattacatgggaaaccagcctagacaaaactttaatgtagttggattttctggatttcaacatggccaaccttaccagcagcataatcaatggagaactcaccctagtaatcagttcaataaagaccagggtgggccacctaataggccacaacaacaagggcctagcttatatgagagaacaaaaaagctggaagaaactcttgctcagtttatgcaggtgtcattgactaatcataagagcacatagtcagccataaaaaatctagaggtccag

SEQ ID NO: 21947 - DNA, 371 bp, Glycine max
  unsure at all n locations
ttatgcaagcttactctcacataaagctatatcagaaccagacattactaatgaaaattaccaatcatcctttcctttgtggaactttaaatcattcaaaatctcaatggaagcataacaattattcacagaaaagttcattgctaagtcaaaacaagaattcatcaggataaatttaggacaagatatagctaaaaattaaacaagctatcaaaatgaggctagtactatagcacatgcctctttgngtagaatgtacaaactaaggttacaaccaaagtcactacctcaaatgggttaatccatgtgcatacacaaaattaagaagatagtcccctttaggtagacatatccttaacttagtatgttcc

SEQ ID NO: 21948 - DNA, 409 bp, Glycine max
  unsure at all n locations
tattagaaatttcatgtggtcatgtgataaagaccttaggaagctaattattgtctcccggaagaagatttacagacttcttcaggaagggggttgggttgtagatcaatcaaatcgattaaccgagcatccattcttgcacatacttgaagcatgatgaccaatgatcttgggctaagcaaataaaagccagccagagttttcaacgataactaccgcatgcggggttatattaagtcttttatatggttggtttgaagcttttttggaactcggttagccaaaacaccttttggatgcttggcaatggcaaaagaatcaattntttatgcgataattggattcaacaaaatattgcttcaaccttgaatattctagaatcttatcaacaacatcttcaagccttagt

SEQ ID NO: 21949 - DNA, 375 bp, Glycine max
  unsure at all n locations
agctttggtcctattcaaatagccataacttttgacatgggggtacgattgaggcccatgatatatcgagaggctcgaaattgaaaaatggaagttctcgagaaattcaaatggtcataacttttaacttggatgtccgattcacgcacataatatatcgagacacacaaaattgaaaaatggaattctcgagaaattcaaatgttcataacttttgcctcgaatgtcagatttaggcacataatatatcgagacgctcgaaattaaacaagaaagctctggtccaattcaaacggccataacttttgacatgagtgtatgattgacgcccatgatatatagagacgctcgaaatngaataatggaagttctcga

SEQ ID NO: 21950 - DNA, 412 bp, Glycine max
tcattgcctaacaagccaacttacaacagcaagccttatgagactcatcataaggatgcacaggtcaaagttgagtatgtgaaaagattgtatgaccaagtgaaggtgcaaattgcaaagaagaatgaaagttatactaagcaagccaacaagaaaaggaaggaagtggtacttgaacccggtgatgatcctggacatttgaggacaaatgttttccaagaaggagggaatgatgagaatcatgaaacaggccaaatacagtctaaaggcccaagtggagaaggacaaagcccccgagtggagaaggatgaatgcccaagtggagaaggatgaaggcccagaggcagagacactatcaagactattaattgttgctgaaggcccaaactaatttgaaggcccaagttaaata

SEQ ID NO: 21951 - DNA, 540 bp, Glycine max
  unsure at all n locations
gagatgcatccacacgaatcgaggaatgtaatgacacgaaccgcatctnttaaatataaagagcagtaagatgaacccctgactgacgcgctcgatacactgggaagctcagaanacacaagccactcaccgcggggagcggaatatgtaaatggaagtgttttgcgaaacgctaggcactcaacgaagaattggaaaagaatcacaacaaggaaaaagcggtaggaacagctaacaacgaagccaccacagctataaagacgatctggggacaccaatgcaagacacgccgagcaagcaacagacgtgggagacacaacgccaagattagccgaccacgctatgaacagacacaagagcgagcacccctatgtgaaaataaccgccccgcgcataaggcccatcgcagcagacgctgcaagcaacttaaacaatgaacaccgtggaggagaaactcgagattccatggcccagcacctagaacacggcgccaccaatcccctttgcaccgaagaataccgatggatgaacacggggacg

SEQ ID NO: 21952 - DNA, 542 bp, Glycine max
  unsure at all n locations
aaagaatggnnnaccagcccaccacnccgacgcgnnangangnggaagagggagaaacaagacgcaacanaacagcacccgagnnaantttgagccctgtgaagccctgacaactcnaggcgaacccagcgcagccccggagaccctctgcaggcaagcaggctgtctgcaatcatgcccaaaagatgcatgaaggacttcaataacagatcaagacgtgcatacaggacggaacgactcacgtacatcaagaagcaacagaacacatggggagaaaacagaaagcgaaaaagaacaggtgaccatgaggtgaccgagccaggtgaacatagacaacgacggagacaacaacctgaaccagataagtacctgcactagccaatgcgcgagacggagacgaatgagcaacaataccaggatgggccgcaggagacacggcctaccagcgaagcacgggcgagcagagcaaaaacagagcaataaaacaaccggacagaacgataggcgggaacaggataagcaatgcgcagatagacggtcgg

SEQ ID NO: 21953 - DNA, 126 bp, Glycine max
tgttcagaattctaaagtaatctctaatcactaatgtcacgtgacattctaagttgagtagtgattaacactttgatttattggattgattatagaactaatttcttttaatctcagattcaatca

SEQ ID NO: 21954 - DNA, 374 bp, Glycine max
agcttgttgagaaaaggttcaagaagaattaccatcctgcttgggctgctgcttacattcttgacccgctttacttagtgagggacactagtgggaagtaccttccgccgtttaagtacttgacaccagaacaggagaaggatgtcgataggctcataactagactcgttgcaagagatgaagcgcatattgctctgatggagctcatgaagtggaggacagaagggcttgacccggtttacgctcaagctgttcagatgaaggagagggatccggtcaccgggaagatgaggattgtcaatccacagagcagtaggcttgtgtgggaaacttatttgactgaattcaagtccttggggaaagttgcagtgagg

SEQ ID NO: 21955 - DNA, 411 bp, Glycine max
tagaagacacattcatgaataatgaccaattggtgtttaagttccaagacttggtggaaaataaaagtcatacattcactagattttgtgatgtgttattgcattagaatcatttttttcacaagatgcttatggactatatagtcttttgaaaattttgaaagtacctgtaagagaaccaaacaatgataagttagtacttttctaatcaaattggacatatcactcttgtaagcatatactgataaattgagaggaggtccaattatttttaaatagtcttaatggtggcataaggtgagttgatgatgatagtagacacttataaacattaatgtttaagtgaattataactcaagtagagttttaatacttagtgacaaatgtgttcttgtgggaggtgcttacttc

SEQ ID NO: 21956 - DNA, 403 bp, Glycine max
ttagacaaaatggatgagttggagagatgttcatgttatgttgattgaagagtttcaatgttgtttatatttacatattcatctgattcaaagtctgatccttttgatgtagtgtttgccattagaaaaaggttggctttttcttcttcttcttcgatttcctcatcgaatgatgtgtcatcttggtcttcccaagtgctcattagtactttgttgtcctttggcttgaagtaccttttcttgtggtatgtcttttcaagatctggatattctgacttgaagtgtcctggtttcttacacttatagcatatgatggaacttttatccctatctttcctttctttatatggattcttggatcccttccactttgattcgttccctttcttccacatgttcctta

SEQ ID NO: 21957 - DNA, 361 bp, Glycine max
agcttgtataatggctagacatgatacatgtcatggtctggtattggtcaaggataaaagggataccccacattatttccatgacacaaatgcagaaatgaagatttggaaattttatgcaaaactggtcatgcatgcacctacatggtcgctcaagtgtcaaatttttatggtcatgtgatgctagggcttatgattcattttctctatattaaatcaacccatatgttccaaaatatgttcctttatcaatttgtgcattcatcctagtccattttcggcgcccggggaaatttcacagcattcacccttcaagtgtagacacattgttcagaaattgcgtatgatcaatgaaattttc

SEQ ID NO: 21958 - DNA, 386 bp, Glycine max
gtgctttatgcttaaaagccacacactgttcaatggagtgtcatgggacaccaccatgataggcgaatgtaatgataggcgcatgtaatgttgggattataccatcggggaactagaggttcatagatctttcctgggcttactattgctatttggttatcaagaaagtatggtagtaggttaatgtatgacattggaattggggcaaataggactggtttcttttctgggaaatctcttctgggttagtgtttaggataggattgggagtagtgtttggtctatgttgtataaggggtggattctgtgggtgattttggggtggtctatgagggtgattgggaactcttggtccaacgtggactgggcatggggagggttaatat

SEQ ID NO: 21959 - DNA, 384 bp, Glycine max
agcttttaccttttttattgcctgactgttacaacttacaagttgcaacccatttcttatagttgttccccctcttattatgttgtttgttttgagaatgtttcttggtttggctccttagaattaattctctctctctctctctcaatcttggatcacttatctactttgaactatttttcttgtatgcactgagacagcataacttatgcttgtatctcatgcttcagtctgagttcagtacaagttccatatctttttcattttataattcgcttttgggatgtgcactacagggctctcagtctcagagctaaatgtagcacaggcaaattttgataaagatgagcgtgtgtactgtgtgcgatgtttctcacttttttt

SEQ ID NO: 21960 - DNA, 425 bp, Glycine max
agctgtaagagtttaacagattgaaaagcccccaagttatttctagttagagtgtatttgttttaaatagtttagtagcttacaagccagttaacatttgaccaaaaataagttattaaaagtgtttggttagaaagtttttcttgaaaaaactacaccaagttaaaaattttaatttgataagttaataaagtagcgtatgacttataagagtgctatattttactcttgttaacttctttttttaaaaaaatgacaacttatttactaaatattttcatttcatgcagtctgtactctgtacattcatgggcaacctcgtagtacagttgagacgcgtgttgtaagatattaaaactctgtgaaagtggcttgccatatttcatttttaagcatatatatgtggatgaagcttgatatcttta

SEQ ID NO: 21961 - DNA, 290 bp, Glycine max
ggtaatgactgtgcctgaaaccagctatgcctctgcgatgaaatttaagctttctcctgtggcacttgttattttactaggtaactattcacctttacttggagtgtcccaacatagtgccttcaacgccgggcgctccatgacctctacccgcctagtttccgtcagacaaaagggggtgtattctgcagaggagtcctgcaaacccgcggacgtgcaacccatcgaataatgcccttgagtgcctcttacatgcgtccaatacttctcactgattcacattgacatcc

SEQ ID NO: 21962 - DNA, 380 bp, Glycine max
agcttggaagattccactacgattaaagggttcctctcggtgtggggtttcaacggagagctacggcggcttatggcggccaccggtggttgtgggtggtggagaagaagcttgggacgttggaaatggttttggggaagaggaagagaaaggaaagactgtttttccaaggctacacgaaaaataaggcttgcaacactcaagtgtttctgctctcgggaaaggaagcgtcttgaacacaccagaattcatatcgcaaatcgcaacagtcagatcgtggaaagctgtcctatgaacctccagaccaagtttggagatgatccaactggtaacaaatgcagaacggtgtttttaccgagagagcttcacacagcttcctt

SEQ ID NO: 21963 - DNA, 179 bp, Glycine max
tatggacttaccttgaattaattcctttgttaacccttttgagccttgtttccctttccttgatttgaagctcactacaagccttaagtgaaaaaccatgatatcaccatatccttaaggaattttggagctttggaattgttttgggaataagtgtgtgtgtgtgtgggggggggggg

SEQ ID NO: 21964 - DNA, 382 bp, Glycine max
agcttaaacaggtttagcttgatggatagtattagaagatatgaaaatatctaattatattttaaagtattttctattatgctttggtattaagtggtatcctatttccccgttttctcttaggattggttacatttccttatcccatgatttagtacctagtagcccattcttgaccacaagggatgactccaaatactctttaatacttaagcaaactccaaaataaatattagacaaacaaataagaacaaacaagtcttaatcaaaggagtatacttccatcatccttaacatcatagccttaaaagcctattaccccaaccacaaaggaacatagagacaaactaactagacctctccattcccgtttacattatca

SEQ ID NO: 21965 - DNA, 380 bp, Glycine max
ttataagcgcgggtctgggaaattggtacgaccatgccctcctgattttcagcttggatttggtacgaccatgccctcctgatttccagctgggaaattggcgagtggaggaacgctccggcatttacgcgacgagcataatgtaaacctttacggttttaaaagctctatagttgggcctaggctttagagtttttccttttgttaaggctttgtgtcttttgtttttgaatttataatacaaggatctttcttcatctgttcctggtctctacccattctcattcatttgcatgtttacttctttttctgaaacggcagattcgatgacgagtcccccgaaggtactaatacctgggacccgcttatcgacttcgagc

SEQ ID NO: 21966 - DNA, 366 bp, Glycine max
agctttaacctcatcgtctctcacagtctttagatttgggagccaatccaatccttgtgtccggactctcagccacttatgatagccgccgatgctcccattactgcttcccctaagctctttgtcctttcttcacaccgcatcacatgccttgtgaattccttagagtaccctcgcattggggtcactgaaaccccgtgtgatgaaaggcgtgatgctttcgtctgatgtcactcctctcatggggtagccaagctgtcttatggcgaggacgggattataattaatacaaccccttgttcccatcaagggaacatttggacatccttcgcatgaagatagaatcctgattcttccttcgttcta

SEQ ID NO: 21967 - DNA, 424 bp, Glycine max
  unsure at all n locations
catctccagcataatggttaattgtgaaaaagtctcatgagttgagggaaaatgctgtagaaaacaagaatataattacaatttcaactattatataatcaattaaaaatgcgacccacaaaagcatatggattatggtaaacagaagatttcaaaaataactaaagaagtaagaagataatacacaatgctatattaactgtaattgtcaatcatattatattcggaataaaagccattaaccacaggaatgcttttcaaaacaaaaaataaaacaaaagaatgtttggaggtcacagtcacagtaatgtagaacctgcacagatcgaaccaagcatacgaattctaaatctaagaacaaaaaggaagaaaactacacattctcaagcttacatctncagcataatggttaattgtgaaaaag

SEQ ID NO: 21968 - DNA, 380 bp, Glycine max
agcttattaaaatgaacttacaaacttataaaaatattacaaaccgcttttataagttaaaataaactctaccaagatttttatatatttcaagccaaaagaaagtataatttgcaaaagcattttcccttattaaggggccatgctaaagagtcaatttatataatactggaagcatagaagcagtaccacataaacaaaccctatacaagtttgctttcataattgacttaatctgtcatgcggctgagtggtcgccgtttagcataagattttgacagaatcaacatcatccaaacctaataaggtagggttagttacatagattcaattccattttgtgttatactcttatattccaattatatgtatgaaaaaga

SEQ ID NO: 21969 - DNA, 409 bp, Glycine max
tgtccatatatagagtcattacttgcatgactttgtattacgttcacgaaatatttaagcatgtataattaagtatctccttgaaaagtattgaagatttggtccaaaataataagaacgcatgttttggcgtatgcatgatattcttaatggtacaaggtttgtaaaagtggcacttatgtggtcaaaataaacttgtagaagaagaaagttacgaccagtgatgattggcatctttaatcaagtgtgcacaataggtttatttcaattagtgctgctttttgtgtatcaattatgcacttaattggctttaagattctccgtccaaggaaatattgtgggcgcgtcattgtgcaagtgaatgagacagaaaatgattggagagcaagaatgaataacacatgcaata

SEQ ID NO: 21970 - DNA, 320 bp, Glycine max
agcttgaataaaataatggaaaaaagggaaaaccctttgtatttttaaaaccaaaaagcttttctctctcctcactcagccaaagcagaaattcagaagccttttctctccctctctcacgtagctttcttcttcttcattctccattgaagcttcaagcaaagcttcaacctttggccaccatttctgccccaaatcgtgaaaggagagcatatttggagtcgtgaagtgcgtggctacgagtgggacttcgaaatttcagggttgggtggacttctatcccttttgattttcgtgggtatgggggtttgcgagatatg

SEQ ID NO: 21971 - DNA, 402 bp, Glycine max
  unsure at all n locations
ngagcgtagtggaagaaaagttcttgatatagatttttcctccttctagatatatcagtgcaaagtcagatgtttccactttcaagttaaaaccagatgaacccatctgtgaagtctggaagtgattcaaatcattgttgagaaaatgtcccaatcatggttttgatgatgttacccatctaagcatattttgcaatggtctaaggcctaaaactaagatgattctggatgcagtcgctagtggaacaattatgtttgtagatgttgaacaagccacaaggataattgatgcctttgcttcaactgatcaccaatctcagcataacagacaatcgatacataaaagaggagtgttggatctcattctcaagggtctttcaatggaagtgtataaacattttg

SEQ ID NO: 21972 - DNA, 331 bp, Glycine max
atgataacgaagaatatgacgaatagctcataagtcacgaacacttcatgataacaaaagctgacaatctcaagaatcaaagaatgagcttaaaattgaatcatgtacacttcaacgatcaagaggaaagctgaattcaagaatcatgtttcaagatccaagttccaagatccaagatcaagactcaagactcacgattcaggaattaagagaagactccatcgagataagttctaaaagttttttttaaaaaaaaaactctgaatagcacatgaatctttctcaaaccttttaccaaaagttctactctctggaatcgataccagatatt

SEQ ID NO: 21973 - DNA, 716 bp, Glycine max
  unsure at all n locations
ggagactggacctgagactgtacctttgantcccntnaantctanatactcagctaaatgcgctagtgatgatcgtttcgtacacanattttacctaggtggagctggatttgttccagaggctaagtgcaaagcctttagatgcaataaacccggtcgatactatactaggcctgtacgcattatctcgctgcgggagaccaatggtaatcgggatcaagagtggctcattcgatgagtgaggtggagcctgaactatgcatcattctgtctacttggttcacatgtcaattatagcaattctgtgattcatacactcacatagtgcgttcccacactagcatagtcggtcgtcgatgtgatctcttacacgacagtgacagctgcctctctacgttatgtactctgtcattctcttgtgatcaatatgcatagatatctgcagacgtaatacctgttcngctatgtatcatcacacagatgcatgccggtagncgtatcgtaacgactctactcatcgcgcttagactcgacacatcatgcatgtataggcgatacatcatcagctctacatgtctgagtaaaatcacccatacaccgcttaatgttgacgcaagatgacgtcataactgctcctaacccgtacagcatgcgacagtagcagtcgtcgtacggttgaacgggtcatctacttgacgtggcgtacgtaatctcgc

SEQ ID NO: 21974 - DNA, 321 bp, Glycine max
agcttgccgccatggaagtttccgactatgctcttgtgtggtggaacaagctacaaaaggagagagcaagaaatgaagagccaatggttgatacatggacggagatgaaaaagatcatgaagaagcggtatgttccggctagttactcaagggacttgaaattcaagctccaaaaactaacccaaggcaacaagggggttgatgagtatttaaggaaaaggatgtgctcatgatttaagcaaatattgatgaatatgaggagggaactatggctcgacttcttaatggtctgactaatgatatccgtgatcttgttgagct

SEQ ID NO: 21975 - DNA, 310 bp, Glycine max
atttctcatgagtttccgttgttcttttcgagcgtgtagatgacgtatgtccccgaatcggacatctgtgtgaaaagttatgaccattcgatcttctcgagagcttccgttgttcaatttctagcgtctcgatatattatgtccccgaatcggacatccgtgtgaaaacgtatgaccattccattttctcgagagcttctcgtgttcaatttcgagcgtctagatgagttatgtccccgaatcgaacattcgagtgaaaacttatgaccatgcgaatctctcgagagcttgcgttgtttaatttcgagcg

SEQ ID NO: 21976 - DNA, 360 bp, Glycine max
tttttgcaagcttaatgataccaaaacaagatgattattatacacccatctcactacattaatattaacgatgacataatataattctaagcatgtacatagaacacactgtaacatgaatctatctttacgtcaataccacaacaatctataactggaagtcctagtgctgcttatgatagattaacacttatcatcacaactacatagcaataagggcactatcaaccacattcacaactgacctgtaatgaaggtcctgctccctgtgcttacacaaataaatgggacagaattatccactgcagctgcaataagccttaccagcacagtcgaatctaatctgagaacaccaccctg

SEQ ID NO: 21977 - DNA, 402 bp, Glycine max
atgaccgatcgtttacaaaatatcttttcaacgtgttattctccttgctaaggaccaatgcataggagttgggattggcttggagaagatctttatcaagatcaattgagatcagccctgcactgtggcccatcccaccaaggttgtagctctttatatctccccgcagcttgcaatgattgacaatcattgccgaaagtgatggagtatggttgaacagactacactttacaatcagaattccaatgtctttatgctttacagacggtttagctaatagtgcatcaatggcaccaaacatcacagcctcggcttcttttctaacttctttcattgaatggttgggaggaatgttgaggacatcctcatgatggtaagtgctctccccaatgtcagatctct

SEQ ID NO: 21978 - DNA, 298 bp, Glycine max
atgccaatctccccctgcaaaagtatcggttggtctgtgacgttccgacatgggtaagtatgcatatagttcaactgatttctgataccatctattgtttgcagggatcgcacccacaagacacccagtggacccgataaagttcaacagggccctgaggtttccagctctggttacgggcctctatcagtcctacaaggtgcccgtacccccccggcaaggtcacgtcatcatatgtaagtatgcacatcgctcaactgatttctgatttcatctaattgttgcagggatcgcgcct

SEQ ID NO: 21979 - DNA, 404 bp, Glycine max
tctacttatgtggcatggcaggcttccttcactttcttgtctccaacgcgagctttgaccactgttcttccttcccgcgatgcttcttttcatgtccgcctgagtgggcttatagcctaaaccatacttcccacgatttccttgggtatctatcaggctagttatgccgccgttgtttttgcctaaacccatcccgggttcataaccgttccccaacataactcgggccatcattaccgctgcatcggacagacaaggctgcccaaagagggagtccacggaggaaatgctgaccacctcaaaagactggaaagcagtttctaacgattcttctgcggcttccacataaggcatggaagatgggcagcttaccaagatatcttcctcgcctgacacgatgacta

SEQ ID NO: 21980 - DNA, 532 bp, Glycine max
  unsure at all n locations
gattgtatgcgnnnnacatcgtccncctcncgcactcaanannananttgnagagtaaagtatcatatgtaataacntancagtacacaacagacattggagcctattgaagccttggatgccatcgaacactcaaggcgaattcgactcgcacccgagatcctataagtcttctgcagcatgcagcttttatattataaacagaaacttctaagaaataagaaaaataaaggggaaataagtaccgggacaccccattaaggctaaagataaaaggagcttataacgcctgcccatatattgcaatacctataaagacttgaacgcttatatcctacactaataattaaattatctacatttacaatataattgaaacctaagacgctaagctccctctatgatgaaaagactaaactaaagccatatacacaattctcttaatccgtgattaaacagcaacgctttactttcacgccacaacgaaaacaacaaactctggcaataacgagcatatatcgcaggaccagag

SEQ ID NO: 21981 - DNA, 266 bp, Glycine max
accaacactactaatcgcgatcatatatatcacactttacccacactttagtggaatttagtgaacataaagtttattaagataatctatgagaatgtgaaactaaaagggtgtcaagaatacatcatccaataatttataataaaacacgcatccttggctattttctccaatacactatgcaaataaaagtggcggaaaaatgtacaaggtgagaatgccaaagcttctcttttactatgtttaacctaattacacatgacttg

SEQ ID NO: 21982 - DNA, 386 bp, Glycine max
  unsure at all n locations
agcttgactttggtttagacatgattgatacatgatttgggacttgtagaaattgatttgggcaagattggatgaggggaagtgtggttttcgaaatatgctctttgtgcagattttgctgtaaaattgtgcagcagaattttgcacaagtgcagaaaaatctatgtatttgctggttgtggaaagagtaatgtaaaatgagttctggatgttttctagtagatcccaacggtcacaatgtaggcgtatgcactatagacttccagtaaaattttggagtcgatccaacggttaacgaattggatcgaaggaattgttactggngtctttgagtgagaaaagctgtaattttggttggtgtgttgagcagagttttctgcctttgc

SEQ ID NO: 21983 - DNA, 412 bp, Glycine max
gagagcctaattggaaaatcatatgcacaaaactatgtgaatttcgctcacgtttagatccgcacggtcttgcaattcgtcatgcttttccttcggtggctttggcttctccatctgtgcaattggtggattctccgctctctggcggtggccgcgctattttcgccggagcctcttctttcgtttcatcttattcttcaggtttattctcatcttctgtaattatattttttgtaagagatgtaaataagttgaaatgataatacaattttcttccatttttgctttattatggattcctcactgataagtatctaatggctgcattacaaatacactttgaatcctcagccacgaacattatgacaatgaaaatgcaacaaacgtttccacaatctaaagggcaggacaa

SEQ ID NO: 21984 - DNA, 71 bp, Glycine max
  unsure at all n locations
agcttgcacttgaggtncganncaagctcccgagacatgaatgcaacaaagatcggaatgatcttaccatc

SEQ ID NO: 21985 - DNA, 419 bp, Glycine max
tgtggtggtcattctctacgccattttcatcgctgtctgcatgtaaaatgacggtcaaggctcttaagacagcaatgtaaagatgtagggtatgataatagcaaggcaaattgaaatagaatatgtatattgttatttcattgatcctttgcatgatatatataatacatgtacaagaatgtactataccaattctaaggcatgacagacgtgatccataatcagtggcatctgatttattctatgcattataaggtaaataaatatagaatcaaggtaacataggaaagtaaatatatacacagcatatttgcaatcatgtagaagatatttcctaatactccccctcaagttggtgagtgaatatcgtgaagtcccaacttgttgcgcaatgtcacaaatagatcttttcccatagc

SEQ ID NO: 21986 - DNA, 387 bp, Glycine max
agctttcagccaaaatcctaactcaccataaaaaagagaatgaaatttccaatcaaagagaatgcaaaaaaaaaaaaaagagaaggaaaatttccaatcaaaggaaaaaggagaggaaaggaaattcccaatcaaagagtgggagaaagaaaaaaaaaagaaagaatattcccaaccaaagaatgggagaaagtaaaaaaaaaagaaagctcctggtcaaagaaaccagaagaaatgtgcagagaggtctttggaccagacaatatctgaacaatacagaattgtcaccaaatgaacaaaagaaagaaaaggaaaccataacctacaagtggtcttctccctttgattaccagccaaaatcctgtgcgtcggtgacttgctcgcctc

SEQ ID NO: 21987 - DNA, 431 bp, Glycine max
  unsure at all n locations
tcaagcttgaagaaagagtcatagatgctngtataaaatctattttttatagtttgttatcgcaatatgtattattgagctcatcacctcacgaacgaattctattaattattttaatacggttaattctttggacataaaacataataacttgcattttacatgcatttgaaggatcaaatcagtataaagtaaaataaaggaggtaaataaggagaaattgtttatctttgaaggacataatgagaaattgttaagaaaataatcaaatactactgcccagttagatactttgacttggtgcccaacagcaattagagtgcatcaacaatttctattttgacttagtgtgcatgtgcaacagcaattatagctttcaacggtcaaagttctcactgccacattaactattgttgcccaagtggcactta

SEQ ID NO: 21988 - DNA, 312 bp, Glycine max
agctttgttcaggatttagaaatttccaccatgtttactcatcaccagaaaattgtagtcgtggatggtgaattgccgagtggagattctaataagagaagaattgtgagttttgtggggggtattgatctctgtgatggaagatatgacactcaattccattcacttttcagaaccctggacacagcacatcatgatgactttcatcagcctaactttggtggttcttcaataaaaaaaggtggtccaagggaaccttggcacgacatccattctcgacttgaaggccctattgcttgggatgttttgttc

SEQ ID NO: 21989 - DNA, 414 bp, Glycine max
tgaattgaacatcggattgaagaagagcgcgagtgatgtcgttgaggcaatcgatgagcaccttctcgtcgattactgtcgcattgctcatcagctggagagcacgcgaaatgctcccacctaactccgccagaaccatcttgatcttcttcccttcaacaattcaatttccaaattaaggtttggatatgcaacaccaacacggaggtttcagattcagattattggtctatctctcttccaccgccggtaaaatgagcggtgcattattgggagggaaaaaaagttaaactgtaaccactacatactaatgggccttggctcggattgagccttcatattgtaacccatgtcatgtgttgatccgtacgtaactgtattacatgaagaagcttgttatgtggtgatggaaaa

SEQ ID NO: 21990 - DNA, 384 bp, Glycine max
  unsure at all n locations
agcttataagaacaaaattgccttaatcatttccaaatatgcatgtgaattacgacgcatcaacaagaatcaagccaaggctattgtgcaagcaatcaatggggcaaaacacaccaaatgattataatgatggatggctcaaattctcacaaaggtaaaatcatcactttcaaattgagctttcaaaactatcatgacatgtagagaagaatcaaggatttcaagtcacaaaatgtcaagaacttttattttcaaaacaattacccatttcttgaacatatcctataattcatagaaaaacatgcaaagtcgtacgtgcacacgatattgacccanaatattaaactgaaaattcgatgaaactaacaacattaacaaattaac

SEQ ID NO: 21991 - DNA, 417 bp, Glycine max
atttaaattcaaatttccaaaagctgttacatacaattttaacttctagtaatcgattacatactgtgtgtaattgattacaacattttaaaatcaaattcaaaatttgtaaaagtgttccagaaatcaatttagccactggtaatcgattacatcctttggtaatcgattaccagagagaaaatatcatatttttgaaatttcaaaaagcttttgtaaaatatcctttacccaaacctatgcagcatcaattaaggaattctttctaagatcctaggaactaagtacatcattcttcttgaatttctggattcttgacttgaatcgcgctcatatttggcatcatcaaaactttatatcatatatgcttctacaatctcccccttttttatgatgacaataatttgaaatcaagat

SEQ ID NO: 21992 - DNA, 380 bp, Glycine max
  unsure at all n locations
tttatgcaagcttatactcagagcatcctttgctatacacaaaaaagggggaaaaagtatcctcttgcctaacccctcatttgcaaagaaaaaacccatgtgcctagaaattaacaacaagtgaaagaagattagatcttacaccgaaagcatgcaacaccttaaaaaggaactaccaatccaacgtgtcgaaggcttttttgatatctgactttactgccattttacctcaaattcttgtaatgcaacatatttatagcttctaatgtagtgcanatgtagttggttatacttttgcccttaataaaccctagttgttcctctaaaatcttaggggttatagaagaaagcttgaaggagatttggtgatgattttgaat

SEQ ID NO: 21993 - DNA, 408 bp, Glycine max
tgcaaagttatgtctcgtatcgttttaatcaatttctaccttctcataatcgattacataattttttttgagtcaatgactgattcattcaggagtctctgctttaatcgattaccatgtgatataatcaattacttctttttctataagtagttcagaagtgaacaagaacactttaattgattactttgagtatctaatcgattacattgttcttgagttgttttcaggttttaggaagaacactttgatcgattaacaagataatctaatcgattatttcattgaattaatcaattatcttgtagatttaatcaattacaagtggttataattattttctctataaataactagtttgtgttctcttcaaaatactacacaattaacactataagcctctgaatg

SEQ ID NO: 21994 - DNA, 369 bp, Glycine max
  unsure at all n locations
agctttttgatttatgtgatactttcttgatttttcaattggccttggtgaataatatttccagaattttataagtagaagctctatgcacaatcattttcagtttctaatttggacaatctcaacttttgagtcaagatgggcaagtacagtgctttatttcttctgtcaattgtttcctatttggtcacatttatcaccaggagaatacctgtgcagacatcttagcgtctcgtgctacctcatgattntttgtggagtatgatttttttgtggtgggactcataccccagttntattcagaggaatgttgtaaatgataganatgctagacctaactntagaattaggtagagttttttcttggat

SEQ ID NO: 21995 - DNA, 389 bp, Glycine max
gggaaattgtctcccaaattgtattagatgtatatatgtagtataattggtgctttgattataattcacttgtaagcatcaatattttaaaaggtccctcatttcgttaaatttcttacatggggttgatggcgatgttattaatcattttacctatctaacataccaattttaagtatttttttatcacactggttgtctggctaagttctttgttttgctacacttatctcttgtgtattcatacatagataatatgtcatttgatagtatggttttggtgtggttggggtagaaatacttgcagctgactaaagagtattggagttactatatccattggctaaaatcaaggttatcaaactagacagcttacgtaaactcgtgag

SEQ ID NO: 21996 - DNA, 346 bp, Glycine max
ggtacccggcatatgtggtactaagtggcgaacgggcgatggtgcaagtcgactcttcacatccacaaatcacacattaatccaccatgcccagttgcccaccttcaactgagctcacgtacttccacgtagcctctatactcgttcctttcaacaccgggtgcccaatcattccttcaagcttccacaacattcaagcaattccacattcaaacattatgaactatcaaaaccaagatacagggcatatgcataaaactctcctctaacacaaaccaaaccacagctttcttactcaataccccagtacattcttttcgttccaatcgttcaccgtggatcactc

SEQ ID NO: 21997 - DNA, 402 bp, Glycine max
gctgctctaattacattgatgtttttatttatgggatgagattgtatgtcatttttgttttaagaatagtatcccactggtaaaactaactttccaaatgtttgccttcgcaggaaatggccccgaggaagcttgcctcaaagaggtccaagaaggacaaggcatcagaaggaactagttccgctccggagtatgatagtcaccgctttaggagcgcggtacaccagcaacgcttcgaaaccatcaaggggtggtcgtttctccgggagcgacgcgtccagctcagggacgacgagtatactgatttccaggaggaaatagggcgccggcggtgggcaccactggttactcccatggccaagtttgatctagaaatagtccttgagttttatgccaatgctt

SEQ ID NO: 21998 - DNA, 377 bp, Glycine max
  unsure at all n locations
tgttgcaagcttctcccccaattttctataaatagggggagaagtgaagtagaaatgggttcagcccctttggcacttctctctctttcgaatttgcttaggaaaattatttccgtgaagaaaatccaagccgaggtgcttccgtaacccttccgagatgtntccgtaagcaaatccgtgaaggttttcgtccgttctttaccgttcttcatctgttcttcgttcttcaatgggtaagttttcgaatccgagactttcaattcatttcttgtttttttaagctttcatctttatttcgttcattttctatttcttttctttcatctgtaacgcgcttttaccgtttatttaagccattntctcacctaataaatgat

SEQ ID NO: 21999 - DNA, 410 bp, Glycine max
tgcctaattaacctgaaattgagagaaaatgattattaaacactcttaataaaaatactaagtatttattacctatacttaacagaaaatacttataaccttacaaaataaccataaattgggagagtttgatacaatttatataagttttatacacaaaagttagtcattttcaccaactaacagttgccccaaatttacagttttgcttgtcctcaagcaaaaagagaacaactcacttgtcctcaagtgacaatgacatgcagtgattatgtacgaaggtgtatgctacaaagtgactaattgcatgataagagaatggagtaaaatgccctcaacacttgtctttacaacagttatctaaagacaagaataaaatgtaacctgaacagatagatgaagttaggcat

SEQ ID NO: 22000 - DNA, 374 bp, Glycine max
agcttgaccaatcccgacccaacccgggcatagtcggtcagtgagaacctgtgatgtacctaagcaggcgagctcctggcagtcaacagataaaaggaaaacaagaccacaaagcaaggaggcttgtggtggctggccagctatgaattttgtgtaatatgtggattgtggcctctggtaatcgattaccaagggtgggtaatcgattacaaggcttaaaattgaggacaggaggctaagatggtctctggtaatcgattaccaaggggtggaatcgattaccaggcttgaaaacgaagtcaggaaacttagggagcctctggtaatcgattaccagcctgtgtaatcgattacacagaggaatgggtcactgg

SEQ ID NO: 22001 - DNA, 414 bp, Glycine max
taatgcggatcaagttgattcgcaagttttgtgcgtatcaacttgatctgcagttggtagggttctctgaggctgaatgtggatcaagttgatctgagagattcatggtttagcatatggatcaagtacaaggtatatgattcacaggagtattttcgatgaagttccttcatgcggatcaagttgatccgcatgaatgtatttaaatttttaaaaataaaaattagtttattatttattaaaatgctattaaattaaggtttagggttaattatgaggctgccttgtcatgtgcctaaaaaggattataaccacaagaataattatttccttggaaaagataaattttagtgacccctatataacactcctcccatgagttagaatcagaaccacaagatcgtgggcttatgt

SEQ ID NO: 22002 - DNA, 385 bp, Glycine max
gcttagagctaggtttgccccatgttaaattcttactattcgcttgttcttgcctaagtgattggctatatgttggcacaaattctggcaaaaaattgacttgttggtctttactgtataatgcctatggcttttcctccatgccaagatatcaccatgtgccatgtgacggagctaggtttgctccatgctaagtcattgagaggttgtccttcagtggcgttattggcaagacatttcacatttgtgctaaaaaattgacaccttggtattggttgattttgtccatggcttggttccccatgctgagatatcatcaacccatgccaagtttagaagcttggttttccctgtgccatggctttgacttgttcccattttccgc

SEQ ID NO: 22003 - DNA, 777 bp, Glycine max
  unsure at all n locations
gatgctactgcnananacctangatgancgtttangcannnttgacgnngatttcttgatgnnaaccttttgcannnanancnannannnnnannaannnnnanannnntnancnacnagngcgacacnacgnanacatttgtgttatgtatnacncgaagntgtctatgccacgcctgcacaacgngagacgaaacnaactgccgatgacagacgcgcgcgncatatattctacgaccagcanacacattaactanacttcnatcctctctagcaatagaattagacgacattatatactgcngtgcgttgattcgatgtacatgcgaatgtatatgtatcgtgtcgtcacgatcactagcctacgatctgtacggtatcttctcctgtaccaatcatatagcattgtgattgttactcgtaaggatcacgtatgctccgtggncgctatctgttctctacatctcatcaccatgtgatctactcatacgtgcacgtctacgtgcatcnataagtgtagtacaatcgtactcgccgctcgtatgtagntagtatgtactaatctgagtgcatctgactctctaagtaatatggttgtactcatgcatctcatggtaacataatatatgatactcggctctcactcgcgttacttgctgttatgatactgtgctgcatcataatgtatcgagtgactctgtcgcgtagantatgtgttatggacgtctctgttatcgtcactgctntatgtgaatacaagntntatatatctcgccg

SEQ ID NO: 22004 - DNA, 382 bp, Glycine max
agcttgcatgcctaattaaatggatggtctcaaacttttgaataatattagaaaggtccagttacttcatttaattatttattgttcaaacaacttaattttagtggttaataaaatttctttaatgggcagataaaagactaatttccacattttattagtggataaatcagaatactaatgcaaaactaaagaaagaacataaattaatagaaaaagataaatccattatacattttcaaatatttcaatcattttcatcctttatcacacaacttcaaacgtgtgcctagttgaatatcactcaaccacttaacatgtaacattctaattaaaattgtttttagacaacctttaccgtgggaaagtaaagttttttttc

SEQ ID NO: 22005 - DNA, 477 bp, Glycine max
  unsure at all n locations
gagtgtggancctgacacgtagctatgtccgcgctctatacaatactcaagcttagaattatacaataacattttttgcccaaccatgatgtccttcttaattatcatgctatcatggaacttcttggtcttttctttgtagaacttggcattctcgtaggcttctaggcggatctcatctaactcactcagttgcaactttccttcctcaccagcttgatccatagagaagttgcaggtcttcactgcctagtatgctttgtgctcaatctccactggaagatgacatgcctttccaaagacaacccgataaggtgacattcctatgggtgctttgtaggcagtcctatgtgcccaaagagcatcatctagcctagtactccaatctttcctgcttggctacacaatcttctctaaaattctcttgatctccctgttagaaatctctgcatgtccattggtttgaggatggtatgg

SEQ ID NO: 22006 - DNA, 386 bp, Glycine max
agcttgaacctacttagtactttgaaagaagacaaaatatgtgttttttttaacccttttttcgcttctcaagtattcaatttattttggttgatatatgttcattcaaaatagtcaaatactcatgtttacaaataagttgttagtttcaatgatattgattttgattttttcaagaggtctccgttcaaatttcataaatgaaaaaaatatgattaaaaaaaaattttcattaaaaatgatccgttaagttcaaaaaagtaattaaaatttatgtgaatgtataaaaaaaatattgtaccaaacaaaaactaatcatggtcaaatagcttgtaaattgtaatatagccaaattgattatacattaggtttctatcttcacaaaa

SEQ ID NO: 22007 - DNA, 426 bp, Glycine max
ctaagcttatctttttaataagtcatattttctttatgaatgtgcaaaaaatttaacttatgcttaaaaaatttaattatttatcaactttattggaccttatttgttatgtaaacacttgttgtttcatgattgttctaccaaaaacatactccaatgaccatttcttaataagaatcaatgtttaataagttttcaccatatgaacaccttgtttgagatgccattagacacaaataaataattcgtcccacatagctcatctttaataataaaaaaagtctaatgccgatatttattgttcagtgaagtgatataattaagttagttattttaatgattaatatatttcgataattcaaagaatttattgtcaattaaccaagttaataaccatcactcccgtcatgggaaaaaaaataaagt

SEQ ID NO: 22008 - DNA, 361 bp, Glycine max
agcttgcattaggaattgcgtattccccactccatcattaggatcacttcctgacatctcaaacaaaccaatcaaacgtatcaagaccgaaatagtggctgatagaatacctcacacacataagtgcattacacaattatggcttaactataatgaaacactctagcctttgaccactctaattacccttgagctcttacgcaattcaagagattatggccacaacaaagaacaattcaccaacaagtgtaaggtaaggctagacaaggaaaaggtgaaccaagaaaaaggctaacaatggttttacgcacaaatgaaggaaataaaattcagaatctaacgacatcaagaaacaatccat

SEQ ID NO: 22009 - DNA, 488 bp, Glycine max
  unsure at all n locations
gcgcatgaaacctgatactttgaattgacgccctcgatagactacgtaagctcgngaggatngatggggactcggtgtatanaagaacttctgttacgggccttatggattctcgcaggcaccaactggaggtgggcgacaggacgatcgcgggcttatgcgctcattagtggatgtggcaaaacttgtcgacacccattgatccaccggcaacgaatactacaagatgatggggccccccatgatcctacaagctcgacatgacgaaaacgtcgaagggtgaaactctactgcttttatcgttgaccacagtgtggatcccggagagatgttgccggggccaagaaatctttgggacatcatgggggggcgacactgccccaaactcatgtagtataattctcaactcatcactggcatataccgttcgtgacaacccgtgacgaccaccatcggccagctcctgggctgctacaattataaggacg

SEQ ID NO: 22010 - DNA, 382 bp, Glycine max
  unsure at all n locations
atcccaccnnnacatcccccccgccccccgatangtatatgatgaataaaaaaagagaggaagctgagcttgaacttgaacaccggaccggacccagaagaccgagctcagcttgtgggttcaccatcatgacgggcaaacacacactacttctctcatacaataaaccagagaagggcataaaggagcgaacaaaaggcatgcatgctaatgataaagtgtaacaaccaaaataacgctacaaattatgattacctactcagacgtatgcacaccatataccccaaggtctattcaacagtcaactataactttaacttaaggatacgagactaggagacatatacaagatccctttaaaatcagaaaaacaggtgaaacg

SEQ ID NO: 22011 - DNA, 338 bp, Glycine max
ctaagctataagtgacagagtgactctcacctagaattttatttaacgttttaggcactggggagcgatatcaaacaatttatctgttcagcctctgaaaaaagtggaacgttgtaattcatgttgaattcatttctaactcatttgctctggtattgattccacaatgtggtattgtttacatataaaataaactttggaaaatgtttcgtcaaactcacgtatattcaagtttgaaaaacttatatacttatcttgatggagtctggtctacattctcgaatctagtgtcttgaatcttgatactgattcatgggatatttgaaacttgtatcctg

SEQ ID NO: 22012 - DNA, 334 bp, Glycine max
acccacgaacctaacgaggccgaatggcgcaccgacatcggaaaaggaccccaggccgacaagaacctcgaccaaatcggcaccctctacggacccaagagccacgcagaaagcctccctgcgcacctcgggatcaacaagcactaccacgctgcctactccgacgcgccgcgggcctccacgcactcaaagtaggagacaacggatcgacgcgaccacggtcagcagcggggacagagcaaccgcaacgacaaagcggacaacgacaccacgcggaacccggcgaaagaccacagaggacacaagaccggactaacggcgtacgggcgcaccg

SEQ ID NO: 22013 - DNA, 378 bp, Glycine max
taagcttctacatgatggttgtgaagagtaaatattacttttatctaattaaagttcttgtcaaccattgcggtggtagtttgtcttgtggaaactagacctttgactgaggtcatcgtggttcttaaagagtgagctgaccataggggtgcgttgggttttgtaagagtatgtaccaaggatggaccttgggttttcataccaaaggaggaccttgggttttttatgtacctaatgacttgtattccttcatatatagaagttaaggattagaaatattgtctaaggtttaccttgcgtaccttgagttcttgtgagcgaatcttacctaaatagtgggctactaaaggcagaacttgggtttaacgtatcttgtac

SEQ ID NO: 22014 - DNA, 523 bp, Glycine max
  unsure at all n locations
aaagatagcnnnacgagccacccgcaccnccccnncgccgggangganggaaagagagngaanacacagccagagtnagtttgagcctgtgaagcatggaaatcaaggcgaacccgcgatccccggagacctcgagagcaaccagcattttagccagctattaacatcgcgagaggacgaagttgcgaatgcaagaaagcggaggggacctctcaaaggacataagcccgtgacatccgcgaagaactaggcctaataaatgccaagcccatgggaccaacaatggagccaagtgccaagatatcgacagagaacggggaaccaggctaacacccagaaagaaaaaagaacagaacgtgaataagaactaactcacagtaaaaatgaccggaaaagcccatagaaggatcacagaatacggaatcgaacacaacatgccgtatcaacggaaagcagacatgcccaaacagaaagcaataggaatatacccgaaagagacacattaggaagaaacggacaaccg

SEQ ID NO: 22015 - DNA, 393 bp, Glycine max
ttgcgaaagcttttctccatcatttttactagtgcctgatgtctctaactagctattcattcgtatcgtgacacatttgtttggtgatcgtaagccgttcccactcaagtgcattcaactacaatcgcttttctctattgaaaacactcaagccttgtaccactctaattactgatgagtactacaagtgagctccatagattctggccacatgtaaagtaacatctcaccacatatgctgaatgcgtaatgcatagagagactacggattgccgttaactcattaaacaaggctaacagatgtatttaagcacaatagacggatgtataatatatatcttaagatttcaggtctcattgcttactaccaccgataattaaccttactgagat

SEQ ID NO: 22016 - DNA, 362 bp, Glycine max
  unsure at all n locations
tttcttgcaagttttntagagtatcttaccacactctttacttctgattcttgcgatatttgagttgaggaaacaatgcttagtgtcccagtcccactatatgtgtgggttttatgttttaattcgaactttgtcttcaaatctttcaaacatttaaaaaattaagaatcaatatctactcagatttctaaatttaacaatcctacttgagagaccatttgtttgtgacaatttggctttttttttttttaatctttttctgatcttattattctgcagtcagttgcaactttcttcagtcaagttatggctaataatggtggaaacactgctggcccaggtacataataaacttcaatgaa

SEQ ID NO: 22017 - DNA, 395 bp, Glycine max
  unsure at all n locations
tccaggatntgaagaggtcatctttgngctatgtcctgtatctctaaacaggttggatgatgctgcatgacttgtgaagaacgggattctcaagcctcatgacttcagattctttgttggatatgctggatggcaactggatcacctgagagatgagattgagccagattattggtatgtagctgcatgtagctcatgtttgcttatgggggctttatcagattcttcatacagcttgagggacgagattttgcagctaatgggtggtcattactcagaattgtgccggatgccaaggcatgacatgtagctactcatgtatggcttcaaattcagagtcaaatgaatgaacaacctgtattcacggtgctacaaagtcaacctgtctgatggtc

SEQ ID NO: 22018 - DNA, 565 bp, Glycine max
  unsure at all n locations
atcacgcnnnnccatgccccccccccaccaanngtngaaaantaataacattgatgatcanaaccagcgcgatcagacttgatcctgtgatgccttgataaccacaggcgaatccgagctcagnacccggagatcacctagagacgaccagcctttatgcaagcttgcatgcacaacgcacgcgcagatgaagtccactccacaacgcttgaagtacaggagaacttctaccctataacgcaacatggcggacaaaagagggcagcaaacttgaatggtcgtccatggccatgcgaaaggtatacgcgctacctatacatgttcacacatgattgcaactttgtggttacattgagcatagaaccacctaccagcaatatagcaagctggtggactacaaatcgagacacatactgtacaagctatacgtccgcacaaatggtaggccctcttcaggcatacgaaacaggctattcccatcattctgatgacgacacggacaccttataccctgaacccaactcacaatatagtgcgaaaatgcccgcccataatctaaccaggg

SEQ ID NO: 22019 - DNA, 352 bp, Glycine max
tacaagaacactatctaatctttcctaaaaaagatatctatgtctatgctaaaaattctatctatgtaaatcatcattactgatacacatgtaattcaatcactcatgcttgatttccacattaacacactaatcagacacaatcaaaagtctatgatcaaataaaatctatcaatcattaaccataaatattttcatcaaccatccaatccttatgtatccaaattcactaatatctaagaggcctaattctcttataaaggtaaagaatgtttctttggggagatgattcgtgaagatatcatcaacctgactctttgtatcaacaaattctagcatgcattctcccttc

SEQ ID NO: 22020 - DNA, 368 bp, Glycine max
agcttgtattgtcgctcagatcttgactagttataactttctgaataaaatgagtatttcctatgtttttactccaaaagttagtgcgaatcaaatcactcccacattttatctctagcatgcattcattattctttacctacacctcacgtttggttctttaggaaatacaccataactaaacgcgccccaaggcatccctatcgcaccagatccaaatctataacgatgggtgatcaagaggagacacaggaacagatgatagccgacatgtcggctttgaaagaacatatggtttccatgatggatgccatgttaagaatgagacaactcatggagaaaaatgtggccaccgctgttgctgttag

SEQ ID NO: 22021 - DNA, 406 bp, Glycine max
tttgtttatttattaaatcatatattacatgaagttgttgggtgcaaataagtctttctaaattacaatttctattattttatatacttaataattgactgattatagtaaaaaaaacaataataattgactcataatcatacctccctagccggcttgtgtgcaatcaacaaaagctatctttcgttttatagactctataatctctttttgtctttgagagtgactctatataatttcataattgcatattaggtattaatatatttaaagaggcttgctagctagcgtacattcgtttattttataattggaatacgttagtaagttttaactaaatattatcttcaaatatattcacaatgtagctggctaatatacaccaattgaacaacaagttaatgta

SEQ ID NO: 22022 - DNA, 372 bp, Glycine max
agcttgctctatatttacattgatgtttgtatttatgggaggaggttgtatgccatttttgttttaagagtagtgtcccactggtaaaactaactttccaaatttttgccttcgcaggaaatggccccgaggaagcttgcctcaaagaggtccaggaaggacaaggcagccgaaggaactagttccgctccggagtatgacagtcaccgctttaggagcgctgtacaccagcagcgcttcgaggccatcaagggatggtcgtttctccgggagcgacgcgtccagctcatggacgacgagtatactgatttccaggatgaaatatggcgccggcggtggacatcactggttactcccatggccaagtttgat

SEQ ID NO: 22023 - DNA, 346 bp, Glycine max
  unsure at all n locations
ntgaaaaacactttttattttatatcacttggccattctctttgcttattcaattaggaattcccttcctaatattctagtgatcatcttgatgttgtgacttgtaatcttgaagtattgtcttgaattttaatcttgaaaagcccatttgcatcaattgcaacacatcatcatgatcatcatcaaaacatcaaagccaattgcatctacacatgtgtcctccaccttcgagattggagctatgtttcacgattgcctaagtgcggaccctcaaggcaatccgccattcttcctttttttatcggaaacccatgaatgttattgcctagcgctattcatgtgccct

SEQ ID NO: 22024 - DNA, 423 bp, Glycine max
ctgatcctttgaaccttgaaccctgaaatcccggcgattcagctcgcacccgggagcctcacagtcttccgcagctgccagctttactatgcgcgaaatatagtgtgcgaggaacataggctttttgcgacttgtacatcgcttattcatgctcattaatcgaaaagaaaagaatatgaacttttgaaaaaatatagtagttagatgatgcgtggtctatattcttcccttctttctaagagaaaactgatctaattaccacaacccgtatatagaaaaggctttgtctatatcaagaatacaataaagagcttgaaaggtgagtttctatctatatcgctgctttttggcgccatctccgatgtgctgtggatctacctcctttaaggaccaaaactttattttaataaacaggtgccgaac

SEQ ID NO: 22025 - DNA, 408 bp, Glycine max
ctatgaaactccgcttgatgcagatagttgtcgctgcgacttatgcttcttatacaaacaaagaacaagctgatcaccgaaattaatcccagtaacagattgaatagaccgcataactgactcaacaagtgtgttctcattgcaatccaactcaaaagagtgtccattctcagcaatatgaacaagcaactggccctgatggactatacttccagtcacgctggaactcatcttattcaccaatcaatacatgaatcacaacctcttcttccacccaaaaagggaaccaatcaaatagcaaacatagagttcaaaacaaaccctaaccaatagctgaaacacaaaacaccaccaaagcaaatccaacaccctttttttcaccacacaatatattacttcaccccaaaa

SEQ ID NO: 22026 - DNA, 364 bp, Glycine max
agcttatcatctcagttcttcttatcaagtagatagatcatttttaaggtccaacgccttaaaatgatcacctttcaagtaaaaaagaattgcttgattcactcttataaaagaactacgtatgtttgatttcctcttcgatggagggtacgtaagagcaaaagccccgcttttgtcgacctcaaataataaaaaagaaataaagttaaaggtaacccaattttcacatttctaaaaaataggttgctgtcttttgagacaaacgtgagaggtgctaataccttcctcaaacgtaaatacaacttccgaacttagaattttcgtttcgaccggtttccttcggtttttccgacgttttccacaa

SEQ ID NO: 22027 - DNA, 407 bp, Glycine max
tgtaggattatggggttcccgtcatatgtggtactatgtgcaagtcgactctccacatccacaaatcccacgtaaatccaccatccccagttgcccaccttcaactgagctcacgtactcccacgtagcccatatgcttattcctctcaacaccgggtccccatcaatccctccaagcttccacatacattcaagaaattcaacatccaacatcatgaactatcaaaaaccaagaaaacagggcagaggcagaaaactctgcccaaaacacaaaccaataccacaaccttccttactcaaataccccaataacattctcttcgttccaatctaatcaccgttggatcgactcaaaaaatttactggaggtccctaatcataaatctacattttgaccattgtgatct

SEQ ID NO: 22028 - DNA, 446 bp, Glycine max
  unsure at all n locations
ggtaatctgacctgattgcnacctagaacnctgngacccaataatntntnncnnccctcgaggggacggctctactgccgaagtttgaacgttaaccccgggaacttgcctttgtcgagcccaaatactcatttgttgggctgaggtacatgtcatatctgcttagctctttgaagacttattcattgactgtcgcgtgttgaggtatgccctgaaacatgaagaccatgttattaaaatagaccacaatgtctcgcccccttgacacttgcaatacaggtacaccaaaacatggtctgtcccaccgccctccttatggcgcacgcatgaacctccccataatgtagcctcccccccgtgatcgttttcctccctatttccacccggcgccggaacaaacgtcaagatactccactaacaccccgacgccggatcccctgacaacc

SEQ ID NO: 22029 - DNA, 383 bp, Glycine max
ggaagagaaactgaggcctgaactgaaacctcgaaaatcagtgacaccatagacactgaagctgcgaaaaaacagagaggacatttagtagcgaattttgacgataaggcgcgaacgggatggaaaaaaccacaaaagtcaagccatagggaagggcaagccaaacgaaagagaaagcaaacaacttgaagaaacgggaacagaaaagaaagcaactgtgaccaggaagacaaaacgaagataggacaagaaaaagacagaggcctaataacggagagaaaacaccacggaaaggaggagaaaacagacagggaaccagagaagtgcacaacaacaaaggggaccacaacaaggaaggaaaacaaacacatggaaaccaatcg

SEQ ID NO: 22030 - DNA, 439 bp, Glycine max
cgtagtgtctgatctctgacctgaaacctaaatacaccgaagaaacgttttcacaatttcgcttgacgggcgactcctacatgtataaataatcaccacccaatgccttctcacagagcgccggtcgacattatcccatgcgcctgcaggagacggggctcatcacttcgttgagattccgaagcttgaaacaacccgttccaccagtggaacgtcgctccaacccgtgcaatcatgtctaagcattgactctctctcgcccaatcatacacatatgcacacgtcattcataggctgtgactaacaccatatagattgatctaccagtcgcactgtatatcatttcattgcgaaacgtcttacaaagtacatacttctggtgaggtgcacaaccaatatatgtacgcgacagtcatcgtcgtgacacgacgtgatgacc

SEQ ID NO: 22031 - DNA, 384 bp, Glycine max
agcttatggttgagactgagcatccctagaaatatattctattttctactactaaagtaaaaatggttaaaataaattaaaatatgattgttaaggtaaaaaaaaaaaaaaggatataacaaaaattattaacaaccaaaactattgcccgcattagaagtgaactatattttattttctaccttcatgcacttttttcaatctaagcaaggattaaaaaaagggtttgacaccatgatttcggccacaatatcaaggtttctggagtgtccctaacaagagtggccaacgcattggtcacacttgtctgcaattttctacatatcactattacataatgtcctagtttcaatatattagagttaaccatgtttactaaatatt

SEQ ID NO: 22032 - DNA, 421 bp, Glycine max
tgacggactataccaagctctaggaaccagggacgtagaaagatcttatataggcttactaagggtagagagaggaagactacagatttggatcacgtaaagtgtgttaaggatgaagaaggcaaagtcttaatgcatgaaaaagatatcaaggaaaggtggaaggtgtatttccacaacttatttaatgatggatatggatatgactctagcagtctagacacaagagaagaggaccggaactataagtattatcgtcggattcagaaacaggaagtaaaggaagcgttgaaaagaatgagtaacggtaatgcggtggggccagactacatacctattgaagtgtggaaaactcttggagatataagtcttgagtggctcaccaaactctttaatgaaattatgatgtcaaaacgcatgc

SEQ ID NO: 22033 - DNA, 381 bp, Glycine max
agcttgtacctatattacaatgattgtagataatggtattgtaataatgttatccaaaactaacttttattctggagaaacaaaaaattcttaaagcacaaacactacaacttgaataccatccccatcacctattcattatttaatttccatgctattttttcccaatgcaggtgacactatcattgtgaaggaaagacaagtagatcatggaaaaggaattaagacaggaatatgtactctggaatttcctcagctgttgttgttgcaacaatagcagcactgatgtttttgctaaatttcacatgctttttcttcccaaggtaacttcttggtgacaaaacattgagaaaaggactagctgcatgagaaatgataagt

SEQ ID NO: 22034 - DNA, 418 bp, Glycine max
ctgaaattcttcactggttatcgattacaggtttctggtaatcggttacatagttatattttgaagggtcatgacttttcaaattgaatttcaggagttccattactagtaatcgattacacatcaatggtaatcgattacaacttttaaattcaaatttcaaaacccttcttaaagctgattttcaaaattgtcttctggtaatcgattacactgcctagtaatcaattaccagagccttggatgttggaaacaaagtgttttgaggaaaaagcttgatcgaccaatgagattgtttgaggccttatctttttcttgatcttgaattaatcttgaagcaatgcttaacctcaaaatgtttgttgaagcaaccttgtttgattctactttggcatcatcaaaaccctatattcataca

SEQ ID NO: 22035 - DNA, 374 bp, Glycine max
agcttgatccttgaatcttgattcttgatccttgaaattaactttcctcttgaatcttgaagtgttcttcaactttcctcttgaatcttgaactcattctttgattgacctttgagctttttgtcatcacctttgtcatcatcttctgttatcatcaaaacatctttgaatcactcttgattcaccatgaagctttgcttctacaatgttgacacaaacagataaagtcaaacataaaccaaaacacaacaatacttttacaaaaacaacagcctgaatcataaaatctttaatcactctatgaaattggaaacccttgtaaccaactggcaatcctactttcctgccaataaaatcaaatcattacaggtatt

SEQ ID NO: 22036 - DNA, 409 bp, Glycine max
  unsure at all n locations
tgcatttgtggngattggcttttattccctaatgtatgatcataaagcccaggaacttgcctttgtcgaccccaaaagttcattttttcggttgaggcacatgtcgtatttgcaaagctctttgaagacttcttctaggtctgccacgtgttgagttatgctctgaaacttgatgaccatgtcatcgacatagacctcaatgttttgtccaatctactacttgaaaatctggtccatcaatctatggtatgtagcacctgcattttttagggcaaagggcatgaccctatagcagaagttggcatcctcagtgatgaatgtcattttctcctcatttggagcgtgcatccggagtagatgtctaggaagcttagtacttcgaacctggacgctcgatcaaatagcttat

SEQ ID NO: 22037 - DNA, 372 bp, Glycine max
  unsure at all n locations
agcttctcccccaattntctataaatagggggagaagtgaagtgaaaaagggttgagccccttangcacttctctctctttcgaatttgcttagaaaaattgtttccgtgaagaaaattcaagccgaggcgcttccgtaacgtttccgtaacgtttccgtgagtgatttcgcgaaggttttcgaccgttcttcaacgttcttcattcgttcttcatcgttcttcggtcttcaacgggtaagtacctcgaaccaagcttttcgattcattctatgtacccgtggtggtccacattgtgtttcgtgcattattcttctcgttatcatttactttccgtaccccttttgacgtgcttaagccattttatttaagt

SEQ ID NO: 22038 - DNA, 415 bp, Glycine max
ctaagcttctagataacatagtgcatagtctgtttgtgcatttatctgttagtggatttagttggtttgacaaaatctacttaatgtcatgtttatattgtaaatggagtttagaaacgatgaatgaagatcaacagaacttgaagaaaatggctaacataataatgaagattaacaaaaaagcagaggaaatgttcaacactgtttatattatggattaggttagaaatttcaggactgttctaaaataaacatgacatgatataacacatttacttatattattttgcttgttaaatatagccttatggtgaactcagtaggtcatttgcttatattacaaccaagatttggtgagcccagctttactagttggatggatagaactcaaagatttctatgggatcaccggaaa

SEQ ID NO: 22039 - DNA, 352 bp, Glycine max
cacataagtcgcggccgggacggggagaacaaaaccatagccggcactgatgaatggcgagaagcccaaatgcaggtacgcggaaaccaagtttgtcccttcgctatccaagcgactccgacccactagccgataatcaaccaaagtccgtcgcagccaacagacatgcgtggaggcccagccacgaaataacgcgaagggcgggatcatacccacaagcctctatccgccgccatcgactgaacatatcagaaggccccaataccgacaacaacgaggctggactcctcatacatcaaccaataacagaagcctatcctccctaaggaccaagagggcggaaagaaacccc

SEQ ID NO: 22040 - DNA, 412 bp, Glycine max
taactaaattgtttccattgactttatgagaatgtctctctgaacaaactaagtagtgagaccacattggccctagttttggttgattccaccccaaaattttaatcactaaaaacaaattgcatgagttgaagtctaactatccgaagccaatgatgtcgtgtaccttatggcgtcgggagcgatacacaacttttggtcataagtcttgactattgttcgttcaagcattacacgtgccgttacgataaaaaaataaatagcaatgatgtcaataactctatctaaactagattccagttgtgacaaaaccaagatttcagtttaatggagaaaaatagttattgtatgaaaatatgaatctcgatatggctcaacaaatatatcatacgttgttatttgaatcaatgaa

SEQ ID NO: 22041 - DNA, 371 bp, Glycine max
agcttgtagattttataggtgggcgaatccctagataggttatggtctttgcaagcctaaccaaggtaagccattattcacacttatccattttttataaaattgcactttcttcgcaagattaatttgagactccccaaatggtcaaagaagtgaccatgttaaggaatgtacttgggtatgtaattgggttaatagctcaaaaagtgaaatccccttgagtaaagtgtcaacatggcatatcatgatacttagatatgtgcactcacatttatgactagagaataatgtgttacttgatgagtttgtgttagtacattgatattgaaagtgtgaattttatatatatatatatacatatatatatatat

SEQ ID NO: 22042 - DNA, 409 bp, Glycine max
tactcagctactccgcaaatggtggcctctagggaatgaagctgttattctttcttctgaggacccatggacactaatccctgacccaacaaaaattcgtgcaaagggtaggccaaatccaccagggttatggatggaataaaatggcttggaacatctgagcaccgccaaaaatgtggttgatgtggagcaaaatgggtataaggcgttgatgcccacagcgatttgagcgcgggagttgttcatttaattgatttatgtatgctacacgagtgacttgtattggtttaagctgtcttgaatgtatatactttgtggtcttcaatgaaatcgctagttagaaatattacttattttggtttgtgcagtttagttattctctttaacattacttattttggaatgtact

SEQ ID NO: 22043 - DNA, 310 bp, Glycine max
tttcttgcaagcttgtctactactgaccgacatgcgtcaagcaaggctgatcagcactgctaattcctacttcaccctcaaacatactctctgaggtaagctggttacgctattcttctcttgagcttgtgttctttatgcaccttagctactgcttgctcccatgagtctgctgtgtgaaccgctcccttatcactcaccttctcattattttagttacaatcacaccaacagatcatatatcatgcaacaaataccacttccagactaagataaaagaactaatagagagatcttctatgatgccata

SEQ ID NO: 22044 - DNA, 413 bp, Glycine max
tttgtgttattctaggatgtgttgtccgttgaaaatttggtaattttaggaaagtcaaaccaaaaaaaaaaactataaatgatatgaaagacatcaaagaaaagtcgcaacagaaagctgagagtgctgaaaagtagaagaacgcaaatcaacttgtctctgatgattgataaaatgccttacaatttgttgatacataagtttaaattaaaagataattcccatttaggccttgaaacaaagataccaaacctgcacgattttttacaaccaaagaacatatgaacaagcgtctcagcaccatttttgacatgctctacattaaattattaaaaaaatgacattaaaatttttaatataaacaatattaaaattatattaaaaaaatataaataatactcattaaattaaaa

SEQ ID NO: 22045 - DNA, 327 bp, Glycine max
agctttcttttatcagagaagaggctattctcttggtccaagcccttggagcttgctttaagccatacaatgccttaagcaattagaacactctatcttccttgccttagatctccaaactacgaggttgttcaacaaaccacctcggttgccaaggtaccacttcaggtaaagctgacatttacattaatctgggtataaagaccaatctctattatgggcttgcgcaattaccaaccttatgggttcaagcctagctactggaccataacttcagaatgatccaaaccagatttttggaggacatcctttgcaactaaccttgct

SEQ ID NO: 22046 - DNA, 406 bp, Glycine max
tgtaaagcattgatttgatactgcttctttcatcatgtggctcatgatgtttacaatttaatgatcctttgctaccctgcaatgagacacacacagatacacaatcacacacacatagagacaaactcacgcagacacaaacacaatcacacattcacacataatgatacacacacacacactcacatacagagtctcgcacacataaagacacagactaagacgcaaacacactgtgccacaaacacacagagagacccacacacaaagacacacacactgagtcatatacacacacatacacaaacacactcacacacatggacagacacacacacacttattgagacaaacactcacacactacatagatatagagacaacttcttacactcacacccacaca

SEQ ID NO: 22047 - DNA, 361 bp, Glycine max
  unsure at all n locations
atttctaggctcctctactttgcactatatgacatactgttggtttaaggccaagcatttntttttcacaagctgctccctttaagatgttaatgttgctgagaattgattgcccccttattaagtcatttcactacggattattctgacttctgggcatctaattgtaagaatggagtcatggagaaaatgctatcaacgtgttgtggtatgggttaatctttgacgggagcattcatgtgtttaacctattgagtatcttatctccttatttagcagatcaaaattgagactttaaaacttttatgtgtgggatgcttttagttaataattactttggacattcgaatatgttgccgtg

SEQ ID NO: 22048 - DNA, 312 bp, Glycine max
agcaacgtttattctcagcattatttaattttttgcttcggaatggaggcttccattcaaactagtattactgatcttaatgcttgaatttactttgcagattctacttcgattatagtacaacctttgtgggagcacgaaagatttgcttccatcctgtgaactgttctttgctccttgtgactgtgctcctttatggggttatgtatccgctcattgatcggcttaaaggaaactggtctccagaccactttgaataaacttacttgatgggcttatacggatataaggtatttggttcaattgctctaa

SEQ ID NO: 22049 - DNA, 777 bp, Glycine max
  unsure at all n locations
gacgggggannangctggatacnctcgtactngcanancnttngtaancnactttganaacaacnanagtatannaanaangaataacttatcacgagagtangcgggcacgatttcgtntcacagnatatttctncgcgctcttactcgcagggcgngatatcacacagtgtatagcatagatcgacctatcttactcgacattaatatacgtacagataaaaatgtatccggaggtgcntacccgcgtcagatcgtcgatcttacgtaacacgctggtgaaaatgcacctgactatacggtanctgatcgcaagtgttgacacaggcgaacagcaacgttacaaaataccangagtcatcgtctcgaggtatacatggagcgacgtacgtacngtcgaggactacggaaccgcataggagttctaccgtacacgcacacagtgtgcggatccaggtctcatcgacgaagtagatcgtgtcgactacgagagagtggacacggtctcgcgcgagatatacaacgtggaggtacaagtnacagatgagagcagatagagataatgacgatatagagaaagngatagcgcgatgatgagtcgcggtatgacgagatcgntaggtatcgtcgctcacatatcaacncgntatatgcgagtacgcatgtcgatgatcgntantatggacgagatactgtgctcatngttcantatacgatatcctatactatgtatgnangtatactatgagactgagcgtcatgcactatgtcgcgcgg

SEQ ID NO: 22050 - DNA, 693 bp, Glycine max
  unsure at all n locations
actacctgannaaactgatgccgtcgaatttgacnnaatttagnaaatnccnagnngacactaatatatatacataagctgtctctatccaaggacttagtcttgattgttgaagacgatatttttgcatggctctacagccctaatagggatgggagcgctatctgtacacacactctctatgtttcattatagatctcttactcgcttaggaaatcatcgacacgagggtgcgtataatcgctctcaccactatctaagaggacatctctatatctgatacatcttcgatacacgaattcacatcgcatctcacgaatanacatacatctctcgagcggaggcgcttagaactatacaatngatataataacgtactnccgtcatctatatactcgatctcacgctacattggactatgactgcacgctcccggactactcaataagtgatatatcggtttgtgagagtggtcaactactgngctggcctcactccatagttaccctgcgtgtctccattagctctatatactgtcacgactcatacaccaataaacgtggacaataacatacataaggacgacgcgcaccgaaccatgtgttctgaacagaacaatacgatcgacacaaccgcagtcagagcgtacgacacctaatataaggcctgaactggttctggtacccacgttcg

SEQ ID NO: 22051 - DNA, 960 bp, Glycine max
  unsure at all n locations
ctgaggagctgtacttgaataccctttgttccttggaanccnntnaactanaaactaaagctagtgaaccaactttttggatnanactcttcagcttttgtcgcggnacacggtgcctacactacatgatctcttatcattataattatatcacgtgacacataattaacagttgtgcagtgaagatagcatgttgcagcgattagtgtgtctgagactcctctggagcgtaatgcgatagggatangaagaactgtggtcacctactctacatgcgcagtcacacttggntatagatattgtgtgtatacatgatgtgcgtaggacatgagcagctcgatcattataacgtatatcgatgacgaccgngcacgcntgatantgacgagcgcatgacggatacactgtcgtgcacatcgagngcctntgatacgtgcatattncaacgcaatcaagtcgactgctggtatgncanactcantggactangagattgcgtcgtaatcatcgantgcntaacgtcgtcntgctagntgcactagttcgcgtaattacgacgctgactcgtactcagtttgtacgatgcgtntganctacttacanatnacgagcagtattctgaactantgcagctantgactgacngtaatcaatcgataatcgancgagttctaatgagtnnggtaccngacgtctgctagtcgacngtcggtcaggctgatcgtcgaaagtacgcagtacntantcgaatatacgatgaggccatggcgaacaccatngntcgagantaagtcccccgtcgtagtactgatcgtctgacaatctgaccatcactgcgactgcgagtgcaattgttcattgtggtcgtacggcgtgancgagtagcatgtcgacgacgaccctgacngcagcactagntcgtntattacgcagcnatcactaaccaccagtcgctccacg

SEQ ID NO: 22052 - DNA, 381 bp, Glycine max
agctttaccgagtgtctgaaagcctcatcaatggtagagaaccactccctatttccacacatgtgattgctacaaccggagtcgagaaaccaagtctcttcttgttgcaagttgtcagcttcgacaagagacatgagcagcatctcttcttcttcataaatctcagcatagtttgcactctccttccatcttgggcattcgtattggaagtgtcctagtttgtggcacttaaagcactccactgtggctttgtttggagactgccttcctctgcctctgcctcgaccccgaccaaagcctctacctctgcctctacctccattctgttcttcatgtgagaccttcaatgcttgctcatcccttgtgtcactaccatgagaa

SEQ ID NO: 22053 - DNA, 424 bp, Glycine max
ctaagcttaaccccgctggatgcgcgtgagcacagggagtctagcgagggaaagtttggacgcaaaaatgaagagtcaagcgagggagaaatgaacagtcaaggataaggccaaatttaaaattaaaatacacacacacaaaaacaacaacattttcatataaaaaattggcgccgatttgtgttccactaggacattctaaggcggtttcaagaaactgtcttagaatgtgtgtcataaaaaaataattattcttaattacagaactgccaccgcataacattctaaggcggttatgtataatcgtcttagaatgcgcgtcgtaaaaaaatgattttttagtagcggggtttgcaagttttgtatcgggtatgttctttgtgcttctttgttttcagttgatgatgtgggatataaagtctct

SEQ ID NO: 22054 - DNA, 385 bp, Glycine max
  unsure at all n locations
agcttatgctgcaaacatttataatagacctcctcagtagcaaaaccaacaacaacaaaataattatgaccttttaagcaataaatacaatccaagttggaggaatcatctaaatctgagatggacaagtcctccacaacaacaacaacctatccctccttttcagaatgctgctggtccaagcaagccatatgttcctcctccaatatagcagcagcaacaatagcagccacaataaagacaacaagcagctgaggctcctcctcaaccttccttagaagagttagtgaggcaaatgaccatccagaatatgcaatttcagcaagacacaagagcctccattcagagtctgacaaattagatggngcagatggctactcagttg

SEQ ID NO: 22055 - DNA, 416 bp, Glycine max
  unsure at all n locations
accatgatctcaccttaaccttaatgtattttggagttttggaattgttttgggaataagtctggggggttttgttggataacatatttcgttggctatgtttcatgatgtattttgggccatacttgatgtacattgtatactggttaaatgttggacatgctgaatgatatgctatttctcaaatgctacagttcaaaaaaaaattagttgaatcaattcgaaaaaaaaagaaaaagaaaagaaataaagttgagtgaataagatcttaaatggaaaaagaatgatgagactcttggctntactctntgcgtttaaattttatctttaggttttcttattttttcttaatatgcacttattccccattactcctctattcctttgggatttagctatttattccatatttttcc

SEQ ID NO: 22056 - DNA, 377 bp, Glycine max
tttatgcaagcttctgcgtagaattgaattggaaggagaggggagaatgtggaattggaacttacatgggacgaaggcgattatgagagagacgacgactgcgtcggcaatagagaagatcacgggctaagggtgctttggggttttcgagcaaggtgattctccctcttgatctcggaggaggtgctgactgcgtcaccgattcacagggcatcgtttctctgcttatcagttgtctgcctccgggttccattatgtcgtccacgaacacgatcaattcacattctcacttggattgcttggttaaaacatcaatctcctctgtcactttcacattaattattgttctgggctcgatcccctgtgccacctgaatt

SEQ ID NO: 22057 - DNA, 409 bp, Glycine max
tcttgaaatgaacaaggtatgagtattagttgatattatgcctgaatagaatattaattcatttaaggaagatcccaaaacttgcattacttctacctaaaagtaataatgggttcccgccaaacacactacataagctgaaatagcacttttatgattctagcaatatatatggaggtagacaaaccatatatgtcccaactagagtgatgccttcaatttaccccagtttaattttaacttttaagtgccatacaatgtttccttgtgtgcctgttggagtctaagaataaaatttgcattgattacatctttaaaggtctgtgtactgattcttcttctcaacccatgttttttatgcaatatggcatggaattatttttgaattgctgtttctcaattgttttat

SEQ ID NO: 22058 - DNA, 373 bp, Glycine max
agcttataataagaaagtgaagtcaaaaacttttaatgttggagatttagtttggaaggttatcctgcccatagatagtaaggatcgagccttgggcaaatggtccccaaattgggaaggaccgtataaaataattcagatctattcgaatggtgcttatgagttagaggagctaacccctcagaaacgtactttgagcataaatggtaagtatttgaaaaaatataaaccaacactgctcgaagttaaaataagcatagaataagagaaatacgggaaacataaaaatggcgataacagtaaattgccacgaaagggcatgtgtcaatattacatcgaaaagtagaatcgaaatacagaattcgaaataaag

SEQ ID NO: 22059 - DNA, 407 bp, Glycine max
tcttatccaaggctcatcttggtggtgaagctccttcttccatggcttattccctagtgggtggcgcctcctctcacctcttctcatttgtcttccgctgcatctccatggtggaaaatcaccattaaaggacctcattgaagctcaaagatccagcctccatagaatccccacaagcaagcttccatcaaaactatcatataaattttagtcatgatagtcaccaagaattaaaggattggttgggatgtcaagcggttcaatcatgtactggttcacatacgtaaatgcagaatccacaaaactgcaagaacaacaaagtgagcaatgaacatggtttgaaatcaaattttgacaaaagtatcagaggtacaacattaataatggcagaactggtactggtttgc

SEQ ID NO: 22060 - DNA, 370 bp, Glycine max
gcaagcttactatacataacaattaagatttattatcaaataatagtgtaaaaataatttatactatctatatatgtataaactatttgctcttaaaatttaaaacaaaagaaggaagattaaactcttgtgagagcacaggaaataaaagtatataactgagtcaaagattaacaataaatgctaagtacacatttgatctttaacacactttttttaatatctactggattttttgttattaaaagttagtaattttttttaaaacattgtgaatttcacatcatatttaactaattcttcttgattttataattttgaacgaattttaataaatgagagtatgtgtcaaataattaatcaattaaac

SEQ ID NO: 22061 - DNA, 393 bp, Glycine max
ctcagctatgctttccagtaggatatttctgattagcctgcctgtcgcgatgtgacttcatttgtatgacgatttctggtctatgaagcttgttgttaaaaaattgcggtccatgaagtgaagttcatttgtcctatttttgtgaccatggaagtttaaagcataactatgactcaaatatcattttcttcatctgtgaatctctatcctttttttccccttttctcatgggaggttagctctgcttctgaattgcgtgctttgagtatggcatctgtgctactaaagtgaaaggggatttcatggattttgtcatactatctttgtactttggtgttgtatatttcttcacggcaagaagataatattgctgagtactatcagcagcaggtg

SEQ ID NO: 22062 - DNA, 360 bp, Glycine max
caatctaggatatgagaagcgtagctgacactcaatctctggaacgttataaccagaatatagaaaccatatctctgtacgtagaccagataatcccaacaaaagaaccgagatcaagatcaataaagcatataagaatgaaaaaagtaccgaagcctccaaaagtatagggcaaacaaaataaacaagttcttattcgtggataatctaacacaagccatgggcgtcgataaagaggacactaaaactgtcggcgcaggaaaccataccgataccaaataccgatgcgctaagctccagaatgtagccattaaacaagcatttaggagtaatgagatcaaggggaaataaaagataacc

SEQ ID NO: 22063 - DNA, 396 bp, Glycine max
tgagatgttcacatatccctttcatgatctttgcctcggagatgatttttccttggtttgggttgtttattctacatctgcttttctcacggaaaccttttgggaagtttatattctttaacttgttggttgaaatttattaggacctaccaaattttgagtaccaccccatgtttattaatagtgtttaggaattggttttagaagggaagggagagtaaaattttcatttcaaataaatatgttctaaattgatttttctataataaaagtaataaaatgacaaattgacaaaaattaatgtcttaaccttttatttctataaattggaattctcttaatgtaaaaattaaaattgttttttgtttaaaaaaacatgaatttcacactttaaca

SEQ ID NO: 22064 - DNA, 354 bp, Glycine max
  unsure at all n locations
agcttgttcttgattntttcaaagttctttaacaaccttagaacaatatactcgtccttcatttaattatctttgggcttgtcgaccacgatcaacaaagtactttcgacagctactatatgttgatttcaccaacgctgttatcggtatgctgcgacaatccttcaataccttatttacacattcggacaagttggttgtcatgtggtcatatctacgtccttctttatcataagtcacagtccatttttcctttgaaatgcgatcaatccatgttgctactggactcaatggacgaaatttttctaaattttcatcaaatatatgcttgcaaggagtggagcctgcataaaa

SEQ ID NO: 22065 - DNA, 415 bp, Glycine max
ctaagcttatacaaccaatattctttgtcctaccatgcgactgttgactctaacacaaatcaacacttagtcttttcttaaaatgaatactacggataacattaaataatgattttagattttcaaggattacaaatatttataggtactaaaattaaacttcactcattttacaagggctataaatagtgatttcaaaatttaaattgatgaaaaataaataaatatttttaaagggaccaaaataaaaaaaactcaaaagtcactcattttataataactaaatacatatttaatccaataatttatactaatattcacattacacatgtatgaataatttcaatggttgtaatggaaaaacaatcttaaccgcatgcaggaaccaagctcttttatttcttattttttatac

SEQ ID NO: 22066 - DNA, 300 bp, Glycine max
cggagaagtaactttgtgatcagtatcatctctccattatgttatgaaccatatgtggaaccggaacaggactaggtgatctatctctcttcctagcagacctcaagttgttctttaacggaatagggggaagtgaacttagccttcttaccgtgctacaagcttgaccattttctccattttgttgttgatcatttctactcaacaacaggtcctcatcgaattcaaaatcacttgcattgaaatcagaccccaacgtgagaagtttgtttttattagccaggacttgatactcaagag

SEQ ID NO: 22067 - DNA, 393 bp, Glycine max
  unsure at all n locations
cgattnagtgaacttgactgngcatgaaaacttgcatnccgtgaacttagatagtcagcgtggacgccccttcttaggagcgttgtcgattccaggcgccatgatggtatttgaaccctgataaccctcgaagactaggaaaatggtcaaagggtgcaccctcggatcgaattatcccgcgagccgagcttaagaccatacgagcctgtataacagcttggaaacaggttactggggagcagatgagagtacaaccccaggggggcccaattatagatgaaaaggattcacggaccatgatcagagtaagacttcatcttcatgttcacggagttctatgctccatttaactggctcttcttagagcgctctaaagttattcaaatctcctcg

SEQ ID NO: 22068 - DNA, 383 bp, Glycine max
  unsure at all n locations
agcttatgactccgtatctatgttgtatggtatgaatactattatttgaaatgatatcatacatacattttttcttttaaaaaaatttagatgcaggtatgcattgtgttaaataaaattgatatttaaatgtaaagaaatataaaatttatccacttgtgaccaacttaagtatgggtgttcgcgggtcggttctggctggttttagtcaaattcgggatccaacccaatcaaatttagtcggtttggtttggttttcataattttttttaaacccaacccaacctaacccattcatgaatggtttggttcgatttataccaatggattacccatttaaatttgatctttttcttaanactactattgtatatcatgattct

SEQ ID NO: 22069 - DNA, 425 bp, Glycine max
tgccaaaatttcaaatctaatacatttaatttgcgatttaatcaagtctttgcttgttattggtagcaacattgtgataagcaatattcttggagtaatattatgcttctattcttaccatagttgtttactttcaaaaccagattgagttatatgaatgagggtctttatcacatgtctaaggattttctagcaaagtcataattatattaagtagtgtatgaataaaacccttatgagcataattggaatatatatatatatatatatatatatatatatatttctaactctccgagaggaaggtttctttcatcatgttctgaaccttgatatcaagtgaatatattttgcgatagtctgttgaccttttcttcattgtctaattatttaaacaatctatgtgttcgttcaatcaattcaaa

SEQ ID NO: 22070 - DNA, 376 bp, Glycine max
agcttgaaggacattcacgaagtgtgactatatgatgtggcaatggggtgtagcaagaaaatgctcacctccccctctaaaatttaattgtattgggcttcttccaattcaattaaatttagttcccaacacccacatcaaatattcacttaattcatgtgaaattacaaaactacccctaatacaaaaactagtctaggtgccctaaaatacaatggctgaaaaatcgggctcatacttagcccatgggcccaaaatctaccctaaggctcatgagaaccctagggccttctcttgcatctttggcccaatcttcttggagtcttctatccaatgcccttaggggtaggattgcatcattccctcccccttgaaa

SEQ ID NO: 22071 - DNA, 399 bp, Glycine max
agcttccatcaagaagtgtggtgagtaggtgcataaaaaatgagatgatcttcttgtatggattgctaaggaagattatcaccgatgatgccaccaatctgaacaacaggatgatgaaagaaatgtgtgaggatttcaagacccaacaccacagttctatgccttacaggcccaagatgaatggggcagttgaggctgctaataagaatatcaagaagatagttcataagatgtctatgtcatacaaggaccggcacgagatgctaacctttgagtcgcatggttatcgaacttcagtgtgctcattgactggggcaacccctttctctttagtgtacgggatggaggctatgctcctgtttgaggtagaggatccttctttgagaatgctagccgaat

SEQ ID NO: 22072 - DNA, 383 bp, Glycine max
agcttccaaaagtatcaagttaacccttagcacatctttgtagtgggttcttctcacatgttcctatgtcgaagagttgttcttcaaaagaactcccacaagaacaaacaagacgttctccacggtggaagatccttactttcataataaccttaaagaacctttattgtagatccaaattgatgaagatgaaaaaaataatatattatagcaactcaaaatcaagaggcaccatctcaaagcatctaaatcaaagaaaaactcaaaaaatacaatagattgtgcatactaccaacttttatgattgaaaaaaattaccagatcagcgaacgaggagaagaaaatcagcaaaagagacttcatttaactaaatagtcaattaa

SEQ ID NO: 22073 - DNA, 429 bp, Glycine max
taagcttgtcgctgttgatgaagattgtcgcaccaccgcacataggtttgtgacttgtcggctgccgtcgcacttggggcccatttcttggtgagttttcttaccctgacgtggtgtgcataaagcaactaaaggtcttttgtagggattcaatcaatcaacctaattttattctaacagacaatcatcaatcctaaccacatgttttctatccatgtagagaaaaattattgcataaagatgaataaaaccctattgtgtttccatactcaaaatcatgcatacctggattagccataatggaattatgaaaggttgatgaggatcaagattggttttatgatcttctaaatgtagagagtccttttttttctcttaatctttcttttctgataggcataaaaagaaaacaagagcgaaattgtacgt

SEQ ID NO: 22074 - DNA, 384 bp, Glycine max
agctttatgatgatgaatcaagttgattcaagtagttttgatgatgacaaagatgatgacaaaaagcccaagagaatgatttcaagattgagtcaactagtttcaagaatcaagagaagtttgatttcaagattcaagagaagatgaattcaagattcaagagaagaaatcaagaagacttcactagggaagtattgaaaagatttttcaaaaaacaaacatagcacagttttgtttttcaaaagagtttttctcaaaattttctaagttaccagagtttttactctttggtaatcgattactagtttcctgtaattgattaccaatggcaaagtttgatttcaaaagttttcaactgaatttgtaacgtttcaattgatttca

SEQ ID NO: 22075 - DNA, 428 bp, Glycine max
ctaagcttgttcatcttgagataataggtggtcatcctcatttgtagatgatggtgttacatacttctttggcctaacaggaactccaatatttttacagcttctaatgttatgattggtttggccacaccttccacatgtaaactcagccaatttcctctttagcttgtcctgtgacattgtcctcatctacagatctacttctatttttctttggccttcctctttggacctttttatgtggtggaacagggtgtgtatactgtgtctgggcccaatattgtggtccttggactggctcaataaaatgctggcatgtcttattataagcttctattgacagccactcatgacacatgttctcaggcttccctcctttgagagttattgttgcaatggcatgtccgcatgacatccctacatcaaag

SEQ ID NO: 22076 - DNA, 356 bp, Glycine max
agctttccaaagttttctggttttccaaaccttgaaaactgtgctattcatcttttcatttccttctccatttgccaaaaagaattcgccaaggactaaccgcctgaattctttttgtgtctctcttctcccttttccaaaagagcaaaggactaaccgcctgaattcttttgtttctcccttctccctagtcaaaaattcaataagacacactctgagaattcttttgattcttctctttctcatatacaaaagatttcaaaggactaaccgcttgagaattcttttgtatcctcattcacaaagattcaaagggttaaccgcctgagaactctgtcttaacacattggaggatg

SEQ ID NO: 22077 - DNA, 405 bp, Glycine max
tcacgaccaatcggttttcgattccttcaccatctgttcccctggcgttgttaactacaacgagttccccaccattaccagcatttcccaagttttcggtcaaatgcctagctgttgaagaattgacaaaccgtagggacagaggcatgtgttaccactgcaacgagaaatgggtcactggccaccaatgtaagccccgattacacttgtttatcgcatatgacaagtcagagctatcattgtctccctcagcaacagactcctcgatcaacttgccggaacctttggtcgttgactcccctcacccgagcctcaacgtaatgtcgggcatgcctccccaactactttttgcatttatgggattctaagtcatcaccaagctacaatactggtggatggtgggag

SEQ ID NO: 22078 - DNA, 305 bp, Glycine max
tttatgcaagcttttatgattatggagtacccatcacatatggtactagggggcggacgggcgatggtgcacaacaagttttccacatccacaatgcgcgtatagacccaccatcccctgttgcccacctccatctgagcttacgtactcccacgtagcccatatcctcgtttatctcaacaccgggtccccatcaatcctgccaaacttccacaacatccaagcaaaacaacatttcaacagcacaagctatcacagccaagcaaaacagggcaaaggcagaaaactctgctcaacacaccaac

SEQ ID NO: 22079 - DNA, 413 bp, Glycine max
  unsure at all n locations
tttgtaggtgaaattaggtgctttcatttcccttattgtcctctcacggngtggaggttgtgccatgttctcagaatgtgcaaaatcaaatgctcaaaattataatgttccaaatcaggatgttcaaaatcaccaataacagaatgcacagattcaccagtaatggaatgctcaggatgatcaaaaggtataaaatgatgcctaactaatctatgaaatgtcctatctatctcagggtcaaagggttgtaagtcaatggattgcctctagtcatacattacattcagcatgcacaactagttgccttgtcatgtaaataaaggtgtaggtttgaactacatctaccctcaaatgatatccaaatgtcttgaaattttgtgagctaccttataaaatgatgagaagatagcaca

SEQ ID NO: 22080 - DNA, 374 bp, Glycine max
  unsure at all n locations
agcttaacaaaatgcatgcgaagtgggtggaattcctagagcaattcccttatgttatcaaacataaaaagggaaaaggtaatattgtagccgatgctctttctcggcgtcatgcattactttctatgcttgaaacaaaattgattggtcttaaatgtttgaaaagcatgtatgaaaatgatgaaacttttggagaaatttttaaaaattgtgaaaatttttcagaaaatggtttctttagacatgaaggctttcttttcaaagaaaacaaattgtgtgtgcctaaatgttctactagaaatttgcttgtttgtgaagcacatgaaggaggtttaatggngcattttggggtccaaaagactctagaaacatta

SEQ ID NO: 22081 - DNA, 406 bp, Glycine max
actaagcttgcgattggtctcgcgtgaagatcaagttttcttttagaggccaatttaatcatcctgcttagacgaatgaaaaaactggggcaaataaaaaaggtgaggatgagggaaaaacccatgatgtgactgccattcctatacgggcaagtttcccaccaaacccaacaatgtcattactcagtcaataacaaaccaccttcttacccaccacccagttatccacaaaggccatccctaaatcaaccacaaagcctgtctaccgcacttccaatgacgaagaccacctttagcacaaaccaaaaaaaacaccaaccaagaaatgaattttgcagcgaaaagcctgtaggattcaccccaaattccggtgtcatatgctaacttgctcccatatctacttgat

SEQ ID NO: 22082 - DNA, 376 bp, Glycine max
aagcttctcaagcattccactcattaacaaacaagagacgatggcctacaaatgtatcatatatagcctcattagttattcatctgtagtgtcaaattataaagatttcatgtctaagaagctccttctacttcaatcaattcttagactttagtctccaaatgggatgttataacttgtacgaattccagatgagcttatcaagaatgccaagtacatagccacaccatggaaggggatcctggcagcagatgagagcacgggcaccatcgggaagcgcctagcgagcattaacgttgagaacattgaggccaaccgccaagcccttcgcgagcttctcttcaccgctacatatgccctccaatacctctctggg

SEQ ID NO: 22083 - DNA, 412 bp, Glycine max
  unsure at all n locations
taagtttgcatttcatcaaacattaaagggttacactatcacacatcacacatgttgcaagtttgatgcaagttatgggatatagtggtaagttaaaaaaaaaaaaaacttatattcaattcattttttttaaaatgaggccaaaatccaacaaaagcatatacgcatgactttttttttagattgagtcatgaccagattaatgtaaaaagttccaaatttaattcatactaaaaaatttaagttcgattcctatatacatcgggcatctttgggtcaagttagttgctaactggactgggttggtggaagcattgtttgcataagctttttgctggctaattaagactagattatgttaaaacaacctaaattaatttgtactcaaaatntaagtatcaatctacacatt

SEQ ID NO: 22084 - DNA, 363 bp, Glycine max
  unsure at all n locations
agcttacacaaccactaagatcatcttagtaccgtttcaagtttttctgctttagataagtctgggatctcaatcaaatctggggagtatttaaggtcaattttctttaaattcacaagattctgtaacaagaaaaaaccatcacaatgttcagaaattattaaattcataatcacggccttaactaaaagagaaatctaatcattcagatgagaaagtggtgaatagttaaacatagaagaatcgtatatcgttcattagtttacacattgttagttgaattatacatttcctagggtactatttgatatagaccagaactccagaagggaacctgatggaggttntcccgaacagttctgg

SEQ ID NO: 22085 - DNA, 412 bp, Glycine max
acactataaaactaagcttggtataatgaatcttgctaacttaacaaagctattattcactcatttctcgcaagtttccttcatccattaaagttgatagcgttacacatggccgttactgtgaaaagagagatagtgggaactctaaacactttttgtagcatatcttcatagaactacaacttgccagtgtcgtcttgcgctcaaagttgacttttagtgtacaaatcaaatataacattaacagcataagacaaaaggaattaagaatattaagacaagacaatttaaatcttcccttttgtgcgttgtggcacgagttgcttattgaacctatggacgctactttctgatgattgctttttgtacttaaggatagagtaattgtttcattgcctttgtactatgagcg

SEQ ID NO: 22086 - DNA, 365 bp, Glycine max
  unsure at all n locations
agctttattagtaattgagccatatatattcttattctctttattattttatacaaactcacgaaacatattctttccttcgcttatactcattctcactgtctcagcaccttgccaaattaacatagctttaatttctctccctgctttttatgtatcacctatgcatatctctttaatttattcatctgcgtaacttgccaaattaacatagctntaattagtctttcattttgatccctttcatttcatgcatggatgattcctttaatatggaagatagacaaatcacgtacatgcactgtacttaactacacacagcaggcaaagtggtggtggccaatatctgcatgtatcgaaagact

SEQ ID NO: 22087 - DNA, 388 bp, Glycine max
  unsure at all n locations
gagattgagtttcccattcttgctgttattgtcagtaatcaattgccactgtttggaaactttatctgctggtaccatagatgcagataagttgtatggagttaagtttcagaagaaatcagaagctatcacattggatattgatctcaattctaccattcggaatgcatttcaggcaacggtatgtgtttaattttttttatttgaacattttgtcaatgatgtgtgtcagttagagaaccttttggatggaaagtgcatggtatttgttagcaatcatcacatttataacctttcgactaagagagttcattcacaataggattttgggaaatattcatggacgcttttagagacaaggcttatctttttttctttnttttttttg

SEQ ID NO: 22088 - DNA, 392 bp, Glycine max
  unsure at all n locations
agcttggttaggatgcttcaatggaggaaaagaatgagagagagaaagagagaggggggagcacgaaattgaaggaagaaaaagagagagaagttgaactttgagttgtgatgcaatcctccctaggaagggaccagtcactagaaccataagcaagagactccaagaagattgggctagagctgctgaagaaggccctagggttctcatgaacctcagggtagatttctgagcccatgggcctgtgtccaattatctttgtacatattagactaggatgtcattatatttggtccttgtatttagggctccatattgtaggtagggtaccctagacatataggattttttcagcccttgtattttagggcacctagactagttnttgtatt

SEQ ID NO: 22089 - DNA, 458 bp, Glycine max
  unsure at all n locations
tgccgcccagctcgcccaggcgagcaaggttgcttcctccagaagctttatccttctggaggaatcttctggagggcccaagtgggcctggttgctatttacacccccctttttactaaatgcaccccccttttctatttgtttgtaattctttgtccgtaacgttacgtaactttacgaatttcgaaatgatacttattttccttccgcaaggttacgaatccttacggattatgtatttactctttcttggctttcaaagaagttactgaaactcacggattgctcaaaaacacgtcttttcgattttcgccacattacggaatttcacggattacgcaagcctgcttccttatggatttctgagacgtctcgggacttcatttattgcatgtcatcaagtaataatccccggacgaaattanggtatgacaatcgctagcggtatagtacatatt

SEQ ID NO: 22090 - DNA, 386 bp, Glycine max
agcttcattgtgagatatgtggttaaattaaataagataccttttttgagcaggatgagtttcttcaaaaattagttcaaaatgctagtatggcagtatctagtaaaagtttgaatccatgcacttagtcttgaagatttaaatctatgaactaacaggattttccatgaaaaagaggctatactgatgttgttgaaacaacaaaaaatgcatatttggactaacattaccgtagaatgctcttcaagaaaatatcatgaataaaatattgaatggagttatacctagcttggattgaaaatgaacaaacgaagagtaaaaacaaaatatgactatagaacatagacacagaatgaggtccacaaggccaaacattcatatgaaaa

SEQ ID NO: 22091 - DNA, 468 bp, Glycine max
aagcttcaaacacttgtgtaatcaattacaatcagcctgtaatcgattaaaatagagagttttaactatagaagaaatattctatccttagaacttttcttctaactcctacatgatgatgcatgatgcacatatgaaaagatagagactaagatgcaacacaaaatataacaatcaatacaaatgtcactcaagagagttgaacatgtaaaacacaaaacttcatcaagttgttcttggttctttttcaagcttcaaggctaagtcttcatgttgttccccgtatctctaacatatattatgcacttattatatgattccttccttttcccatgttgttaattacttcctgggttcaaagatacacctcttggaacaataactatgtttaatactctatgcaggttgttcgccttcctacacagttcctttttcttaaatttacaaacacttatatcaaaggggaag

SEQ ID NO: 22092 - DNA, 388 bp, Glycine max
agcttgctctaaatttacattgatgtttgtatttatgggaggaggttgtatgccatttttttttagtagtgtcccactggtaaaactaactttccaaatgtttgccttcgcaggaaatggccccgaggaagcttgcctcaaagaggtccaggaaggacaaggcagccgaaggaactagttccgctccggagtatgacagtcaccgctttaggagcgctgtacaccagcagcgcttcgaggccatcaagggatggttgtttctccgggagcgacgggtccagctcagggacgacgagtatactgatttccaggaggaaatagggcgccgacggtggacatcactggttactcccatggccaagtttgatccagaaatagtccttgagtt

SEQ ID NO: 22093 - DNA, 457 bp, Glycine max
  unsure at all n locations
gcttctatataagctgaaccattttatcaataaacacatgttgagttttattcagaaaattagagtttatctcttttatcttagtgagagtgattctcctaaattcttgagtgattcaagaacaccctggctgtatcaaaggactttcacaacctttgtgtgttgccctcgctggaaagagtgattctttccttcctatcatctccacccttgttctttcaaaccacaattccagaaaatccacctctgcccaaaattatctcgtgaccataactcccatttcacacactcaaattaagtgattcttgagcctaaattgaatttcaaaacgagacctttcacctcgttttggaatcacctcatttggagccctgtagcttccgttattgccatttctatatttctgtccagccaccacttaacctacgttntaccatcccattcatccattttatgc

SEQ ID NO: 22094 - DNA, 295 bp, Glycine max
agctttgtcttattggcttgtaccccatcactggctagcgaagctataacctcattgtctctcacagacaataaattggggagccaatccaatccttgtgaccggactctcaaccacttatgatagccgccgatgatcgcattactgtctatcctaagccattatgacctttcttcacaccgcatcccatgccaagcgaactccttggagcaccctcacattgagggcactgaaacaacacgcgaagaaaggcgagatgctttgatctgatggcactcctctcatggggcagccc

SEQ ID NO: 22095 - DNA, 472 bp, Glycine max
  unsure at all n locations
cgtcgtgcaaccgacatttttatgagttatattatgccactatctatcttccgctctcattagcatcaggtgtgtgtcactacaatatgtgcacactatctttacatatgtatcttctaaggacaacgagatatctttcacaaacatgcttagaactgaactcttttgccacgattataccaaacaaacaagatcctttcttttttaataagagctcccagctatacatattacacttgtattgcccatccatgtgcaaaattactaagggtgagtcacccaaattgtgagcttaccatactcatcgtacctatagcatattcaaacccaaaatcaatgcgtcttatcttgcctgactatttcaataatcgacaccgtgtggagtggaatcctataccatgcctatggggatgattcttagtgtgccaactgtataaacctcnttgtgtatccgatatgtaaacccctaacn

SEQ ID NO: 22096 - DNA, 391 bp, Glycine max
ttgctttgcggatttggtcttcgctggcgaaatgatcgaagtgggtttaaaatgaggcaaatctgatcatcatgctttgataaatgcaaaaaaaactggggcaagtgaagagggtgaaaatgagggagaaacccatgctatgactaccattcctatatagccaagtttcccaccaacccaacaatgtcattactcagccaataacaaaccttctccttacccaccacccagttatccacaaaggccatccctaaatcaaccacaaagcctgtctaccgcacttccaatgacgaacaccacctttagcacaaaccaaaacaccaaccaagaaatgaatattgcagcgaaaaagcctgtagaattcaccccaattccggtgtcctatgctgac

SEQ ID NO: 22097 - DNA, 406 bp, Glycine max
tcgtcaactggtttgggagtggaatttgcatcggatttggtggagaatattggaagctatgaagatatatagcagtgtcctttttctctgttaaatcaacttataacttagtgatgaaccatatagctaggttagcgtgtaaataatattgaacagaggtttttaatcatctttggaattgtaaagtccctctgaaaatcgcttggcttttttatggcgctgcttatgagaatgtaaatcatttgttttcctccggcctgttcggtacgtttctcaacaaaattggttttatgtctatatactttattggaaatgtctacgattcttcatattatttatagcatatggctctatccttaattaggcaagatgttctagaacttctaccatattatctggcactcag

SEQ ID NO: 22098 - DNA, 383 bp, Glycine max
agcttacattatatatcaaattaaattcgttgtctctagatacgtaattgcttactgtgtaactttctaagatactattagatttgtaacttctgttatttaaaaggacttagcacaaggaattgtgctccttgaaagtgagcaactcagtttaaaggaaagataaagtaaaagtttttctggtcattgatgttaaaatcggcggtcaacgtcatcctaatattaattgtttttttgtaacctaaaggttctaacgagcaactcatttttaattattagattatgaaaaaaaaatcactcatattttgtttatttagtttccttgtactagagacatgatagtaattatgggttattattttttttgaacaatacaaaatatt

SEQ ID NO: 22099 - DNA, 422 bp, Glycine max
  unsure at all n locations
aaactcaagcttaggttaaattagtctaaacttacgatggatcgaggtttattattttatgctacagcatagaacaccaaagcgtgattgattagagaaatatcttcatatgcatcagcttgtttgttagaaagacccaacgctttctacttattgctgtcaacttttacttacttgcatttattgtttttaccatagaagtagtttatttctgttttaaccatccattattaatgttattccaacaaagccttatttatgattaaaactatgtctaataagcaagttccctgagtttgatactcggatcactccgttntaatgttaaatacttgacgactcaatgcgtttctcgatgtttcatttcccttgaatataattgntgaaaattggataaacagtaactgcangggaaaacgaac

SEQ ID NO: 22100 - DNA, 392 bp, Glycine max
  unsure at all n locations
ccaccccatagacaaaagagaagagaaacgggggccaagaaaccncnatnnnaggagagttgagctcaaaccagcaanaanaaccggggacaaggaacacgagcagccactattaagaagagacgcggggcgggcgcgacgcaaccaaccccgcgaaaacaagcagaaaggacggaccgaaagcgggacacgaacggccgagaaagggccaaaagctcacagcggagggccgagaacagcgaacggcgggaaaacaacacacacgaccggacaacacacgcaagagcacaagaaagagcaaacaaccaagggacgacagcccgacagaacgaagcgaacaaacgaggaggggaaaacggacacaacggcacagggcaaacgaagcagaaggc

SEQ ID NO: 22101 - DNA, 400 bp, Glycine max
  unsure at all n locations
agaggtcgcttgatcctttgatactttgaaacacanncancnaaatacgcgtggttttgggacagacaagttttccccttgttaacataacggggcgctatggggattgagaccactcactccatttatagtgttaacgaaccacgggatgtataaaggcgtttacacctctagagtgccactcgcagctaagcggctctgaatggtagcacaccccgtgccttcgtatatagatgggaagatgacctggcaacagacgtgacggtatgccattacaccccacatttgattttgtccaattgatttatctaactatcaagggtggatgaattatgagctgggggccgttcgcatatgtagggggatacttaagcactggttgcgctattcttaaccgagc

SEQ ID NO: 22102 - DNA, 383 bp, Glycine max
tttcttgtgttactcttaaaggaaaaaagatttcaagttatgtcttgaggctgagacaaatgccagcaaaaatgctacccttctttagaacttttaggagttggaaaacaaagggaaatatcttcaaatggatctaaaggagcttaatgaacttcataatcatcagaaagaagaaaaatatgatctttggagagatcgttcaaaagcacacaaagattatgaagacctcaatatgagtaaacataatctgtgtggaaggtgaagaacataagaaatatgtgagtttcttgaataatgagcttctgaagtatcaagaacttaagggtcaaccttcagatgtttgtaaacttcatgaggaaataataaccttaaagactatatta

SEQ ID NO: 22103 - DNA, 463 bp, Glycine max
  unsure at all n locations
acactctcgnnaaactccgcttgccaagagaaggagtccacggaggttatgcttaccatctcaaaagactggaaagcggtttctaatgactcctctgcggcctccacataaggcatagaagatgggcagctcacctagatgtcttcctcgcctgatacgatgaccagatgcccttccactatgaatttcaacttttggtggagtgtacagggaacaactcccattgagtggatccatggccgccccaacagacagctgtacgggggggttaatatccattatttggaaggtaactcgacaggtgtgagggcctatctgtaccatgagatcgatcctccctctaacctctcggcgagggccgtcgaatgcacgaaccaccattgaactcggctttatgtgggaagcattgaatggtaattctccagagtgctttaggcatcacgtctaactggaccattatcga

SEQ ID NO: 22104 - DNA, 390 bp, Glycine max
ttgcttgcatgatttacattctccccctttctcaagcaaattcttaattcttcttgacatcatcaaaatcttcatgatttacattctccccctttttgatgaggacaaccacctgtaggttagaagcaacaacaaagaaaaaatatttatttgcatatagtttactcctccttggttttgcaatgattgcttatatgagacagttgaagatttcatatttttcatatgtaaacaaattgtctcataaacaatagataattattcttactattttatcttttatctttctctccccctttgtcaacatcaaaaacaaatcatgaatagagaggagaaagatgttaccactttttgcaatgtatgagaatcaagtgataccaaaaggcatta

SEQ ID NO: 22105 - DNA, 397 bp, Glycine max
atactctgctcgaatgggaagtgtgaacggttttttcctgcttttattcgttgaccacagagaggttcctgtagatatgtctcagaggtcaggacaccttttagacgtcaggtggggtgctattgcccaaaaccaagcttgaccaatcccgacccatcccgggcatagtcggtcagtgagaacctgtgatgtacctaaacaggcgagctcctgacagtcaacagctaagaggaacacatactacaaagcaaggaggcttggggtggctggccagctgtgaattgtgtgtgatatgtggatcatggcctctggtaatcgattaccaagggtggcttatctatcacgatgcttaaaatagaagacacgaggctaagatggtctctggttatcgattacc

SEQ ID NO: 22106 - DNA, 384 bp, Glycine max
agcttgtggcaggcgctaagcgcacgatctgaacgcgctaagcgtgcctttgaaggcccaaagctcatttctgcgcctataaatagagatccaagccaagggagaacgtacacctcgcctcatagcacttctctcagcattccaagcctgagctctccattttctctctatattctttgcttttattacccattctttctttcacccctatttgtaaagccctcaatggccatgagcggctaatcccctagctagggcctgacaggcctaaaaagccaacgatgtatggtgtacttcaggagttatcaatgcaaagaggattcattccaggttttaggttctaattcttttctttttatcttgcatttatgtcttgaatatctt

SEQ ID NO: 22107 - DNA, 411 bp, Glycine max
  unsure at all n locations
ntatcgtcagtctcaaacttggcctagtctctatttttcaaaacctatcatttactttatctattgtatttttattattttataaaaagaaactctattttattgtctatcaaatgaataaataaaacattcttttattttctctcaaatcattattttaattaataaaggcatttctccttatttatttaattataaaaacctcatcattttttctaaaaactatttatttataaataataatcccttataaattagtttacaaaaaatgaaatgttacaactgagtaatccaaatgacaaaattaaggttgacaatcacgaaaatattgcgttgagtaggtgatgtacataatcattataagaaaaatatgattaaccttaatatataagataaatattaagttaattt

SEQ ID NO: 22108 - DNA, 384 bp, Glycine max
agcttagcatcaaccccaaactcttcaatttccaacaacacatatttattgcattgaaaaattagcaattgcaatgggtgattccttctataaatggaagaagagaaccaacagagagtgcatgaaaagtgagaaacaaatcttcacatttagatggaaatgtgagagtgagagagagacacacacacaaagagcatgatagaaagaaaattgttttcccattattgttacaatagaagtttgagagactaaggggttccatagtttttctcttgctaatactgagaagattttccatgtaaaaaaaattatgcttattattctacatttcttcttagtgtccattttgacttcacatagaagagaaacaaaaatgtttcttgg

SEQ ID NO: 22109 - DNA, 493 bp, Glycine max
  unsure at all n locations
agagcggtagctttgatccttggataacntttgatacctctgcatccgngccttanaaatctaacttgcataaacgggcgttcctaattctctacnactgctttacccgtgaggaggcagtgaagaagaatgttgcatttacctgaggtgaaaaacaagaacgagcctatggtttagtcaagaaaagctaactagagcacctttataacccttccttgactttctaaaacgtttgagctacaatgtgatgcctccggagtgtgagtcggagctgttttgttgcatagtgggcaccctattgctattttaatgaaatacttcatggtgcccccttaactaccccagctatgataaagagctttatggccttataagagcacttccgaacttgggaacatatccttgctgcaaggaaattgcattcttagcgatcatcatcacttaggttcattagaggcaaaccagttaacaaagcatgcaaatgggataagct

SEQ ID NO: 22110 - DNA, 387 bp, Glycine max
agcttatatgtttgggttgccatggcttatctcttgcaattgattgacactataatatttgacgacaagtcctcgactcatgtccatgtcacataccactagtacctaagcaacctaaatgcttgccatgagtacgtatggggagtcattgcactagcgtgcctctacgaccatctctcctatgcgagccaatataccagcaagcagtatggaggttatatgatgttactcatgctaagtaaattattatagtattgtaattattttttattattgaaattaatattttttttacagtcatgtgtgtttgcacatctacctagtgttgactacttagagtcggaggattgtgtggtgaaggacccaatagccaccagatagaagcca

SEQ ID NO: 22111 - DNA, 259 bp, Glycine max
ggactttaagatcgaaggtcatgcactgtcccatttatggccccggagtaccctcgtgatacgcgcaagtcgcgttcgggttgaaccaccttattaaatagtgacaggctcattttttcatgggtcaccaccgacaactagttggcgattcatgaggcaacaagtcctcgtatgacatcaaaattaaagcgaactctataacttcttattagagcgcatccctgaattggaacttatgctaggatttgaattacctaca

SEQ ID NO: 22112 - DNA, 390 bp, Glycine max
  unsure at all n locations
agcttgatagtgtgtaaccaaccattttctcattgtagaacaccggtaacgtgtatactatcattgtgatcatctttttctctgtcattgaaggtgccacttgagctgtcaagtccctccacctctgggcgtattccttgaatgactcatgctcttttttacacatgttttgtagttgcgttctatccggagccgtatcataattgtactgatattgcctaacgaaggcaaccattaggtccttccaagaatagactcgggaaggttccaagttagtgtcataccctaatttcgtccggngattattacttgacgacatgcaacctttgattggccgtttcaagatacttggcaccctttgttgcacaatatgtaagtcttgagacgcac

SEQ ID NO: 22113 - DNA, 460 bp, Glycine max
  unsure at all n locations
nttcgattcattctatgtacccgtagtggtccacattgtgtttcgtgcattnttattctcgttntgtttactttttatacccccctcttgacgtgcttaagccattttacttaagtcatttctcgcttaacttaaaaataaaataaatttccaccgaatgtttgaattgtattatccattaacttcggttaaaatcaattccgaccgttcggtcatgccgtaaccacgttggaaatcaaaaagaggtaaaaaataatataataatcaaaaaaatatctttttagtgaaataaagcggaaaatcaatcggacgttttctctttgggatttctcattcttaatcgaattaattaataactaaagtgaaactaaggctaaaatcaactcgcctagtcaagctcgtccacaaaaataggctnttgaagtttgtcatttcaattcctcactaagaaaaatggatc

SEQ ID NO: 22114 - DNA, 385 bp, Glycine max
agcttcaatgccactaccttatagggattatgcctttatttatagtgtctacttgataaatcgacttccatcctcatctattcaatatgaattgacttactaaaaactatttccgaaattaccagattatagcttcttaaggatctttggttgtgcatgttttcctctattttgactatatagctcctctctcactaagacttgctcataatgactccaaagtttctcttgaagattatccaaaaaaatctattatgaccctgaagcaactatctagcaatgccattaagccttcttatcaatcttcttttttctttgaaaatattgccaaaagagttaacattccaatctttcaaagcatgttggatatgtttgaccctttgac

SEQ ID NO: 22115 - DNA, 462 bp, Glycine max
  unsure at all n locations
tgcaagtgtaatcaaattacttgacttaagcatgctttatcaaagaataagttacactagaatcagaaggtatgctcaaaagaatattctttattaaatatatctcaatatgagtcatcgaactatagagtatcagcatcgctaagaacaagaaatcacaaacaaccatactatctatgctattaaggcaaaacaccatactacaagcatacatagaattataaggttcctataacaagtatatagcatacatataagaataaaggattgaacagtcactaagggtgtatttaaggaatcacaagtttcaacaatcacgcttatggtcacacataaagaaaaaaagaatagtcaacacatgttaacacattgattaaacacactcattcacaacacacctgcaagttcaaggttnttgacaacattaatacacacatcaagttttcaagaccacttgtatca

SEQ ID NO: 22116 - DNA, 387 bp, Glycine max
agcttcatattatcaattgcaccatgttccaagaagagtagagggtaccacctttgttgagtggttttattaacattattttagttgaaataaaggccccaacttgttttaatttgaagaaattaaggtttaataaggtggaaactctaggcttgtggctgcctcttggctgaccaaggagttgcacaattttccacatgtttttgtgtcttattctagttttaattaggtataatgacaccatcaattattgttattgtcttaattctagttttaattaggtataatggcatcatcaattgttgttattggtgatcatttcatcttctcactgttgtaaccaactcgatgtcattcctatttatgggctgcacattttctaataaa

SEQ ID NO: 22117 - DNA, 467 bp, Glycine max
  unsure at all n locations
tatacaatactcntgcttataacctaattattgttttccataaatcattaccggctctggaacatttcaaaatatttgtttgaggttggatgcatatagaaaaagttatcgttctacaaagaaatttacaaaataaacttttttttttctctctctcaagatttataagatgtttggagagttttacaacttaaaaaaaattaaatgcaaagagaatgaaggcgaagatagttcattacaaattttgtaatttcaacactttcaatagacttcaacaatcaatgtgagtaaatcacatcctttttgcatctggagcaagtatcaattggagcattaaatgctgcattctattctattaagtgaagatttgaaataaaacatatcggttgcttaactatagacatgtttcaagtaacccanagggttgaggcagtggtaaaatgaatggaaatgatatatctaatata

SEQ ID NO: 22118 - DNA, 394 bp, Glycine max
agcttgttcatgttatttaaaagatgcagtgacatatggtttcaacataatttataataaaaattggtcatgctcataatcacccaattgctgacagatgacctgaaaattacatagttaagataaggaagcacacttgtgcaccatatataagagaaggttgtagcttgcataatgcggaaattggcaataaattaggaccacagataaggagattttttccttctaaaataacattacaattgatcagattaaaggatgtaagaataactatgaccatatgtaaaaaattctgacatatcaatgtaaaattctaaatgtacatatgacaaataaggcagcttcaagtttggaccaatattgtgcttacaaggctagaatactcttatcaatt

SEQ ID NO: 22119 - DNA, 493 bp, Glycine max
  unsure at all n locations
ggagggccttgancctttganccttgagaccctcgaaccaccacacnaancnactactgtcactgccacacgcgtcttcgtgcaatttactgcattcaatccagcggcactgagggatattcacgaaatcctcgcaacctcgatatatactttcgcccgaggggattgctcctctgaggaaaacagactataccaacgaccgagataatatgctcctgacaccaaagaacagtctattcgtggagaagcggatcatactgagttccggatcgattcgctcgcgaatgcgacaaacccaagcttcgcgacagtgtgtgcgaggaacaacagtcatgcatcatagactcagatgttcgccacgagtatgtcgctcgagaggactctctttctatcaagccatcggacaagtcatgcgtcattcctgagccggtgactcacggatccttaaactggatgccggcctcggaagcatccaccccacctttccatatcg

SEQ ID NO: 22120 - DNA, 387 bp, Glycine max
tcttcttgaaccaaaaccggcgagagtgtgatcttaaactgtgatcgaacgacttgctatgagtaataatctttgcatcaatctcttaattttagaatgaaatgtataaatgaggacatgatggaggccatgattgtgcatacacaagccttttgaccaaaaagcttaccttgaatgataactgtaccatttgcaccctttgtgagctgaatgatgttgtcaataattgaaccctgaacctaaatgattatctccagataccttgcttagattctaggagagcatatggttcaaggcaaattcaccccaaatttgggggagtggaactaattgggatgcaaagaaagagataaagcatcaacacacacaacatataagttgtgtgtt

SEQ ID NO: 22121 - DNA, 421 bp, Glycine max
  unsure at all n locations
tcggggaatctttggacaacgttgttttgagtangtatgccattattggccattgaacttgcaaatttgtagctcctttttcatttcagcccaacaatagtttggttcgcctgggccaaagtgtggtaaggtgaagcattaagctcgagggttatttcgaaccagctagaattgtgttctggctgggccagagcttgacagaaaggagaattctctccaggggttatggcctgaccaaagttgtgttttagttgggctagactgtgacaaaatagagcattaaactccaagagtgttttagcccatcaagaggttgtgtgattgggacataaaagtgatagaatggttttagccagactagaatttggtcaatcgggccaaaaatgtgatagaatgggtaacttatgtctacaggagttat

SEQ ID NO: 22122 - DNA, 352 bp, Glycine max
ttgcttcctttattttcaccttttccccagcttataaattcttttaactcaaaagctaaaggcctaaatccttccaccaaagatttataacttaagatgttacattggactataaagtgtatgtgtggattaatgcttggataatatatcgcacgtttaaagaacagttttgcgagaaacaacaaaatatcgcattactcaattgttgtccctgaagtggaacaatgaacacactagtgacactacaagaaattacattagaccacctgtacaagtttatatagataaagcatgtgtatgataatagggctgattatgttgtgtgatacattgtccggcgtgatatatatga

SEQ ID NO: 22123 - DNA, 290 bp, Glycine max
gttgtgcagagacactctatgttctcataccaaaagcttaattatacatactgctatgaatttttaaaaaaaataatattcttaataaaggatattttcatgattatgatctctaatccatttttcacacgtatgtttatggtaatgcgatcattcttgtttaactatttggatacagttaaaaatcttttatattatattaactcatatatgtattaaatattaaaatatcaataaaaatatgattactctttgattttaaaaaatatctaaaattctcatgactacca

SEQ ID NO: 22124 - DNA, 383 bp, Glycine max
tgctttacaccaagcttgaacaatctaatattctttttcctatcaagccattactaactctaacacaaataaaaaaatttgttgtttgattggctcactaactaattcttaattgtcttacaaactaattttcaatctaagcaattagagaatccttagtgctagaacccaatttgggttcttaaccacttttaaatgggtcctttagtgacatgtaggttttaagaactctttgattttatgtctgtactggtagaaccaattttcaagttcttaagttaatctaagcggccccacagtatattttactttccttttctgtttctacattttgtagtgcccaccccaccccatgagaccccttcacttccttttctctttac

SEQ ID NO: 22125 - DNA, 442 bp, Glycine max
  unsure at all n locations
tcttacaagagactaaganacttttgtctaanaattttgagacgaaagatcttggggaagactcttttgtattaggaatcaagatactaagagatcgctttcaaggtatcctaaggttatcacaagagagttatatcgataaggtcctagatagattcaacatgaaagatagtaaaccaggagataccccaatagctaaaggagataaatttagtctcaaacaatgccccaataatgaccttgaaagaatagagatgtaaaagattccttatgcatcaacagtaggaagtttaaagtatgctaaagtttgcacttgtcccgatatagcatntgtagtaggagttctgggcagatatttgagtaatcctggaatacaacattggaaagcagtaaaacgtgtgatgcgttacctaaagagaacaanaggatacatgctcacata

SEQ ID NO: 22126 - DNA, 379 bp, Glycine max
tatctttcatcttccataagctgttccacctgaagttttgagaacaatctgttaatattaggactgaataaagggatgcttactaaagatacattattagttagataggagtgaaagaagtacaataatgaagagttaagttactaaattagaatatccaatcaatgattcgtattgtcatgtttatggcatacagaatttcatagttcaggcgaaatttagttcaaacagtaataaattttagttctctgtcttctgaaattttatacctagtacgacatctttactgtattactattcgctaactagaacatgatgggtgttcttaattgttcatacggtgacgaactacatgattaagacttcttatctttaaatt

SEQ ID NO: 22127 - DNA, 349 bp, Glycine max
tgagaagtactgctgaacacaacattttaaataaatttatgtttgtgttgcagagggcgtaaataaacttaacggccaatattctgagcttattcagaagtccgagtggcgaacgtaagcacacactgcaatgctaagctttggcatataatataataataacgaaagtgattaaaaattctggcaaaaatcactacgctttataaaaggctgagaacacgagcattgccaaggggatgatgataagctgatctgaaggaaattctgttctgaaacccacactcattctctatctctaaaaaataaacactctctttctctctctagacaatagagagaagtgaaatga

SEQ ID NO: 22128 - DNA, 392 bp, Glycine max
  unsure at all n locations
agcttgtaggattatggggtactcatcacatgtggtactaggtggcggtcgggcgatggtgcaagacaattctccacatccacaaatcacgtataaacccaccatcccctgttgcccacctccaactgagctcacgtactcccacgtagcccatattctcgtttctctcaacaccgggtccccatcaatcctcccaagcttccccaacatccaggtaaatcaacattcaaacagcacaaactatcacagccaagaaaacagggcaaaggcagaaaactctgcccaaaacaccaaccaaaatcacagcttttttctcacttagagaccccagtaacatttccttcgttccaattctttaaccgttggatcgactcgaaaantttactggaagt

SEQ ID NO: 22129 - DNA, 459 bp, Glycine max
  unsure at all n locations
tcttccatgtctctaccaactgcattatcatgaatattactgcaaacatttaacatgcattaattattagtcagaagaaacaaaagtcatagtgctttttctttttcaagaaagaaatttaattttgaaggaaaaaagactataagaatgacggagataatattctccttaaaccaaagaacaaaataaaaatggagaaacaaaaaatacagaataccaaacagaatccctaaagaatgctaaaaacccatgtattgtgacagtgtatgtgaggaagaattgtagtggatcatagccccaagtgggcaagaaaattggcttgacttggggtaactaactgccagcacggccagtggggaaattctgttgtaagctacagagaagagatataagtggttatggtgaaatgtgatctgatgctgttcctatctatcanaatccttgagttanacaccaagg

SEQ ID NO: 22130 - DNA, 357 bp, Glycine max
  unsure at all n locations
cgcttgtcaactttgtacctgaaaccctctgtctaaatcaaagctttgaccctgaaaccctctatgtaaatttgacagcctcgtatctcccttcctgaaaacccactaaaaactgtctaaccccccctgctgatactctataattcattntgcaataactgcttaaggcagctacatatagtcctaaatcactacagattcagttacgactaaccctgtgtgcctaactagggtttcaaaacatcacaacagagaccgaccattgaacaatggattgtcatcattatacatacaacagagacataccttcgatggaagcgcatacactaactacacaaacgctaactcgacaatgcg

SEQ ID NO: 22131 - DNA, 347 bp, Glycine max
tatgtgataaatcatgttctatgtgatagttgtatgacgttttggagacattttacagaacctattaattctgaagggaaaagaatatatagtcttcaaatgtttctctacacacacacttagagcagtactcatctcgatggatctaacataaggcggacaaccttaagtaacatcattttagaggcacagcttaagtgagttgtatttttagaatctttctaaattactttctaggaggaatccattaaaatacacccctaatttatgagctttcacaaatgggtttaagtagttttgtatcgacattatgtaatgtatagctaaatgaggattttctcttgttt

SEQ ID NO: 22132 - DNA, 380 bp, Glycine max
  unsure at all n locations
agcttgccgcgtcaaatgattgtttctggagaacaggatggatatatacaagagtgcagcattctgtagcttttctgtataatggtttgctctctatctcggcatgttgtctgcattattctcaattgattatatttcaattagcactaaaatcttctattatcttatttagagtatattgcatttcataaatctctcctgcaggtcaggtggtcttagatgcaccattgcgcctcaaaagtccgcaaagttgtcaaattttatgcgttaaaccacttgctgtttctgctagttcttgtgctcaatttgttttgaaaggattcaattttttgctgtctaactcgaggtaaatctctatacgctngatgatttgaatttgt

SEQ ID NO: 22133 - DNA, 437 bp, Glycine max
  unsure at all n locations
tcagtgcaagcgcatatctaacaacaacaaagaaggggaaccaaagcctaacaacaacaacaatgttctcaaagacaatgttgaatctaatgcacggagaacctctagaatcatgaagaagaagcacatgctttaacaacaacaacaatgttctcaaagacaatgttgaatctaacgcacggagaacctctagaatcatgaagaagaagcacatgcttttcgaggattccgatgatgcttctccagcgtggaagaaggcgctgaagcagggcgatatgctggagctcttgaagatggtgctaaagacagaggctgagaagaagaagagcaagaaaaagaaaactgataactantttttntaaattggaacaggtgttactaattttaagttagagttgtaatatttattataacttnntttntttttactttatcac

SEQ ID NO: 22134 - DNA, 392 bp, Glycine max
agcttgtggatccagggatggttctaggaaatcattaaaggagggttggacaaaattgtactttaattatttaaatatctaaattctaataaataattatttaataaataattatttattagttctacaggtaaaactaaaattgatttttatttcaaataatacatatttcttatttcaagttttgaaagatttgttgatctcacaaagacgatcaaatagacaataatatggctttaaaaaagaggaataaactcatcaaatataataatagttgaaataaaatatgtttttagtccattatacttacgttaattatttttggtctggaaactttcatattgtaaatttaatccttgaaatttatataaaaaaatgattatagtctctag

SEQ ID NO: 22135 - DNA, 464 bp, Glycine max
aaaacacctgtagatagttctttctttcttatgatgaaaatgattcctatcgatcaaatttggtgcctattgtagtaatgacgtggctaggtcataaattattgctgttacgtggaattattccaatttctgcctcacatttattttgatgataacaatgcgcaaaacttggtcctgtaagactagtcaactgccatgcaatgtgccaatgggggggccctcggtttatgcttgcaattgtttttatctaacaaaaaattgacggaattttgatggttttatctctccaatacacatgaattttacaacttgccacgtggtcctgatcttcaaattggacggtgagatgagtattgtttatggcattgagtttgttttccctcattggaaccaagctaattggaatagaatccaataagctcaccatttttacttgtgacttctcagaacaacctaaattctcg

SEQ ID NO: 22136 - DNA, 386 bp, Glycine max
agcttggtaagatcctccttggtggggatgtgacgtgcaccgcacacactcacgagctcctcacgtgcccgtatctgccactgcggatgcatcgcgagcaggatcgtggtccacgttagcaaattcgaagtggtgtgtttgcctgcgaagaaaaaggttttgcactcttccactatgtcatccaccgttacgttcacattggaggtggtgttgttgttgttgttggaagcccaaatcatgagccccagcaaatccgttggcctttttgtttcttctttcccacacgcattctcttttcttcgtcgttcgatgatcttcaccaacgatttcttgatttccttgtccagtttccaagaatatatattcctcctcgtggggaagaatct

SEQ ID NO: 22137 - DNA, 445 bp, Glycine max
  unsure at all n locations
tgcttctacaccaaacctgaagcatccacctccaccataaagaattttgttaagtcaggtaaagccaaaactggagcctcagtagcttcttctttaattgttgaaaagccagttttgttgcatcagaccagataaagttatcttttttaagcatgttagttaagggtttagcaatgccaccatatcccttgacaaaccttatgtaatatccaattaaccccaggaagcctctaagttgtttcaaagtttgaggtaatggccactggtctattgtgtgcactttagctggatcagttgataccccctccttagaaatgaagtggccaaggtactctaccatagacaccccaaaatagcacttactcttcttagcagacaaggaattcgccttcatagttatcacaactttgtgtanatgtagcaaatggtcttccaatgaacaatt

SEQ ID NO: 22138 - DNA, 388 bp, Glycine max
  unsure at all n locations
atcttacttacataaaataaaatccatctgatatggaacacatgagatacacaaaaaataccaattgataatgaacacagggcaaaaagaaagcgtagttacactctacagattatgcaatttaatacatacttattttctttaccctaacaacaaattttcttacaattgaaattaacccacaataagtattcagtaaaaagcttaaaactcaaatcagacaatgttaaattgccacacccttcttccttaccttggaatgaaaatccatcaaattttctttccattgtcaacagagccgtacaagagaaagagtctgacttgtccccttgaagaatgcctggtnagacactctgtaagagaatatacaatttgaaatcaaaataac

SEQ ID NO: 22139 - DNA, 452 bp, Glycine max
taaatagactgttccatgctattacctattattactgtttttttttataaaaaaattacttttcaattacattaatgatatagcacttatctatctatctatatatatgagtataaaattaattaatttactataaaatcaataatttactatcatgttataaaattagtatactcttttattactataatatagttaccgatgtttcttttttttttttaaacagcaaaatatattattaatgaagaaaccatgtgattacccacaaggagtgacaaccaacatgcatagagtcaccgatttttgataatcaatataattataacctgatataggttatacttaaacattttatttattagtttctaacacgaagatttttctattattaaatctactctaaataaacaaaactggcaaatttaaagcttttaaattgtacaaaatataat

SEQ ID NO: 22140 - DNA, 389 bp, Glycine max
agcttgccacccagctcgctcaggcgagcagggttgcttcctccagaagcaacagccttctggagggcccaagtgggcctggttgctatttgcacccctatttttactaaatacaccccctgcctttttttggtgattcttttttcgtaaagttacggaaacttacgaatttcgtaacgatacttgttttctttccgtaatattatggaaccttgcggattacataatcatcccctttttttacttacggaatgttacggaacctcactaattgtgcaacgatgcttccttttgatttccggtgtgtcacggaaccttacggattgtgcatcaataccttcttttcatttccggcatgtcccggaacttcacaaattgcctaatgatgg

SEQ ID NO: 22141 - DNA, 459 bp, Glycine max
tgacagtattacaaatctgaatatatgttgccaagtgtgagtatggatcttcatttggtaacccatgaaacaaattgctttgtattagctgtatcaatgaaggtgggtaagttaagttttgtgcttgaacctctggccgcgcaacacttgagaaatattgtggcaccatagtacttgagtaatcttccaaggtcactcgtcgaggttgctcttcagccatgacttcggcttcaagttctgctgtttgagattccttggatgtaggtgaactagaagatgatgactcagaaaagtgagcctcttcaaggattgatgctactgtcctgtcgtgcaaaagctttctttttctctttgcgttgtttcttctaaaggtggcttcaatttctaaatccaatggaaccaattcacctgcagaagatctacgcatacaaacactaacaggaacagcagttaaccaat

SEQ ID NO: 22142 - DNA, 392 bp, Glycine max
agcttatgcaattgtgttatatccagagcaaaacatatttaagcctattccagtcaaacagaaatacttcttataatagacatcggtggcgttaaaaaaaaaatataaagtgtaatacaaaactttccaacagataattcattcaatgtggtccaaaggttgtttagaggttaattttaaattgaaacattaaaattgaagtccaatgcaatttcaattattgagataaacatgataaatggtactttagctcttttattcagagatccttgcatacataatgcacaccaggaaatttagcagcaaattagatttcagtcatttgcatcagtaatgtggacttggatcaacgctgctacataccaatgtaatttgtaagcataagctaaatg

SEQ ID NO: 22143 - DNA, 427 bp, Glycine max
ttttctctggctgttttgttaggattctcaagcgttatatagagaaagaaaggattattagtctcaattttattgtctccgtgcgacggatatttctctctttacaaacattatttcaaaaatcccaacggtgaagatgtgagaatttgaggaccatacgcggagtctaaatttcaggatgatccaacagttaacgaatccaagatcatagttgtactgtaataaatttacgtgtatgcgaaaaaaaaaggaattttgagagaggaaggaagacgaacgaatttatgaggaagtgagagcgtagatcaatatcaaaattgacctaatatgtttctatctatagttagagtattctaaacttattatctactctattattttatcttatcactttataaaaaaaagaactctctattactatgtcatt

SEQ ID NO: 22144 - DNA, 212 bp, Glycine max
tagcttgagtaagcctctcccagagacaagcaaaatagcttgggaagtctctatcctcaagcttgagtgaaccaccataaagcgactcaattatgtaaatacctccttgtaaccctactatcactatgtatagtggaagaatctccatattggagaattataatcgtgcgctcctactactacctgtaattactatgtgactatcttaactt

SEQ ID NO: 22145 - DNA, 510 bp, Glycine max
  unsure at all n locations
ggtgcgagtcgcnttgatacctngtagatacctagatacnccgagacactatcnaagactcacacttgattatacatggttcgcgtctactatatccacactttactggtcgaacgtgaggagaccttcgagcctatatcgctcacgtggtggacaaacaaatggcctgtaccgtgcatagccaaccaatggtcattgcgcaattgttttattgccgtaaactatatcgcgcacacaaagttcttgccgactcgtatgctacgcggaccgtgatctactactcatagcagacatgctgcttacaccatcgaacatctgttattagcaaactctcgacagaggcggcccgttgagaatgaaacatgcaagaccccttttgagaagcaaggcgcttattcttgaccctactcccataatgcaaaggtcgccacatcacaagttacgactgtagggttgcacgaccattgaccccgcaaaggttttatgtgatctgaggcacattgtaccacn

SEQ ID NO: 22146 - DNA, 353 bp, Glycine max
agtttgcttttggagattgtaactatgctcttgtgtggtggaacaagctacaaaaggtgagagcatgaaatgaagagccactggttgatacatgggcggagatgaaaaggatcatgatgaagctgtatgtgccggctagatactcaagggattagaaatttaatcttcaaaaactaacccaaggcaacaagggggttgaggagtatttcaaggaaatggatgtgctcatgattcaagctaagattgaagaaaatgaggacgtaactatggctcaatttcataatggtctgactaaagatatccgtgatattgttcagtcgcatgagattgttgaaatggattatttgcttcac

SEQ ID NO: 22147 - DNA, 474 bp, Glycine max
  unsure at all n locations
gaggcgcggtggtccttttgaacttgagacctggancaccaaactcaaatcccagagtgagacgtcagctttaggacattttgtccaatattgncgggggcgacagccgacagagacgnttggcttcgcctaactaaaactggggcctcctcgatcttcttttacaagtggcgactgtggtcccctgtttagttctggggacaccatatgggaagtcttcttggggagcgtaggaacaaaccccctgaaagctccaagggggatcccaccccctcttgttgcaatgtaacccccgcgacctcgtgcttgaatattccacgtctactctcttgaacagaaagaggggtgtctcctccacagacactagaaaatacgtccttgacaatgtcaggaggcgcactccctccttattatgtcaactctgcccatgctcattacgggatctctaaatagtgtgccccacgtccatgctct

SEQ ID NO: 22148 - DNA, 385 bp, Glycine max
ttgctttggcatcatcaaaacatcttggtgaatcatcatggtaactttgcttccataatctccccctttttgatgatgacaaacctgaaatcaagagatgcatacaaattattttctagtcgttcactcactttattctccccctttctttttaagtttaagattcattttaagttaagctaataattgtatgaattcttgatttatatgaccccacatttttctccccctctggcatcaacaaaaaggccaaagtacgttgtaacataaaatcatacgcaaatggattaacatacaagagatgtattcatacaagaaaaaaggagaaacttataaaaatcaagcaagataataaattatccacacatcataataaaaacatatg

SEQ ID NO: 22149 - DNA, 447 bp, Glycine max
tggagaggatgcttcaatggaggatattaaagagggtgagaaagagagaggggggagcacgaaattgaaggaagaaaatgggagagaagttgaactttgagttgtgtctcacaagactctcattcatcaaagttacaacaagtgttacacatgcttctatttatagactaggtagcttccttgagaagctctcttaagaaaacttccttgagaagcttctttgagaaaacttccttgagaagctagagtttagctacacacacccatctaaaaaataagctcacctccttgagaagcttccttgagaagctataacttagctacacacccctataatagctaagctcacccccatgacaaaaaaaacatgagaatacaaaaaaaaaatcctactacaaagactactcagaatgccctgaaatacaaggataacaccctatactacta

SEQ ID NO: 22150 - DNA, 385 bp, Glycine max
agcttgtaggattatggggtacccatcatatgtggtactaggtggcaatcaggcgatggtgcaagtcgactctccacatccacaaatcacacataaatccaccatccccagttgtccaccttcaactgagctcacgtgctcccacgtagcccttatcctcgttcctctcaacaccgggtccccatcaatccctccaagcttccacaacatccaagaaattcagcatccaaacatcatgaactatccaaaaccaagaaaacagggcataggcagaaaactcttcccaaaacacattccaataccacagttttcctcactcaaataccccagtaacattctctatgtttcgattcgttaaccgttggatcaactcaaaattcttact

SEQ ID NO: 22151 - DNA, 441 bp, Glycine max
tattgcatgagctatatcaggttgagtacatgccatagcatacattattgaacctataatgttagcatatgtgatactctccatataagtatactcttcagctctctttggggattgacttacacttagtttgaattgatcatatataggtgtcacaataggccaacttcgaatttgacattccaaacctttcaataaatttattgaggtatgtctcttgagatagatacaaaatcttcttctttctatcccttttgatttccattcccaatattctccttgttgtcccaagtccttcatttcaaattccctttctaactcagctgtgaccttggtaatttcggccttaccgttacttggtattaacatgtcatcaacatatagcagtacgattacagaggtacctttattccttttgaatagccattttcaattgactac

SEQ ID NO: 22152 - DNA, 393 bp, Glycine max
tatcttactataaataacaattaatatttattatcaaataatagtgtaaaaataatttatactatctatatatgtataaactatttgctcttaaaatttaaaacaaaagaaggaagattaaactcttgtgagagcacgggaaataaaagtatataactgagtcaaaggatgtatgcttagagacaaaggatgcatgcttagagagttattatgaaaatttaaatgtccaacataggtatattaaactaataattaatctacacattaaggaaattactatgggaaattactatggtatattggtagtgacatgaagataatatgtaataatacggtgagttattaactatttgttaaataatgattctatactaaatgttcgaaattataata

SEQ ID NO: 22153 - DNA, 455 bp, Glycine max
  unsure at all n locations
tcctaaaatgaaaacatctggaggctttaaaggatatctagaattaacttaaatagaaggcattaataatgtgaactattcatacatcatataacttaacagtcatgttaagctgcatcatattgtacaatgatgaagaggatatagcacatgattttcttatcggggatcagttctattcccctagtttgcaattttttttggcatctatactttttccttttgcaaaatagaaataaaatttaagctaatctgtcaaatacaaaaattaaacatttataatatatccaatgttcaaagtcaaataagtaaataagaaaaagaccatgtagttgaaaaaatgttcataaaacacacaaagatagaaaaatcaaagcacataaactaaatctagtggtcccaattctttctccggcagatgacaatctcccatattntgtcaatgctcctgtaat

SEQ ID NO: 22154 - DNA, 379 bp, Glycine max
agtttctagatctcttggagacaacaaggtgtgttttcatataattacttctattttaaacaaagcaatagaaaatgccaagcagatttatgcttgataatatctacataaagcagaaaattacgatattggaaaagacagccaagatggtgggctaaacgtacagtattatcatctagcaatgagaaattctttttccctgctttctaatggcaataattgtagtaataaatacaggttatatagaagaacattgactctatggacttactacgataagacaaaggaaagagaaaaagtggctttgtggcgcataatgagcaatacaatgttagagagggataaacaagtggtatatattttagtagaactgatcatg

SEQ ID NO: 22155 - DNA, 548 bp, Glycine max
  unsure at all n locations
agacgagtgtcnagcttttgatacccctgttgaaaacccttagattaccntcgacatncacgngacactatagacatactcaagtctatantgagcagttcatctactagtgactatttattgcactatataattgatgcgtcatgatgcgagagcatacaagttcgagtatcttaggcataatattactattatctgacgatcactacaatnatgattcttaaaatgatatcttctacaatattcgcttattttaatattttggtgcagctattttagaactatcattggaatataatcattattatgtccatgtaatatgtgcatacatttgctttttcttcctaacattttttagagggacttcctcttaccgcacaaaatactatctactctacgattacctgtggactaaaaagatttcttctggagataatgatgctaatagtgttaacagcaaaaagagttccacttattacaaaatatgtatcaacttcaaacatatttattgaaaccacacatagttaattcccacatatcatttttcn

SEQ ID NO: 22156 - DNA, 378 bp, Glycine max
agcttggtgccactcttgaaacaaaacaccaaggttcgacatatcgtgttcatcatctgggaactcccaatctaaatcgagaccattgaacccgtattggcgcgccacgtggatggtggagtttatgaacacttgtcgtgtgtgtttgttgctagccatgagggagaatgcggttgagttgctaccacctcctccaattgacaagagagttttcaccggcgggtaacggtagcggagtccattgatgaattttggtatccatttttcatcaaattcggtgacactaaggtgaaaaagttgagggtcttgttggataaaggcatagtagatatgagtgaagtattttgtgtcaatggaagagggtgaaaggtcatcacc

SEQ ID NO: 22157 - DNA, 439 bp, Glycine max
  unsure at all n locations
tgaagtgttttcaacatatttcagtttgcgggggatattagagatatagatgagtttaattagttacaaattagttattaatttagtttattacaagttagtttagttaattacaaatttagttacaagtgtaattatataagatttcaagtaaaatctgatttgctcgttttaagcattattcaaagtaatattcaggttttcttttctcttattttcatctctctaccttgaacttttatcataaaatgtaattgaactaatcaagatcactagttaattcagctcacagttttaaaaatgatacacgatcgactgcaatttcagctgtgatactgtgacgccaagattnttgaaacatgcaagactgtattaacactacgattgacgttgcattgttcatatttgtatgcactatgatagaaattggtatatatgt

SEQ ID NO: 22158 - DNA, 389 bp, Glycine max
  unsure at all n locations
gcttctacaatctccccctttttgatgatgacaacttctgaaatcaagaaacacacacacacacacacacacacacacacacacacacacacacacactttttcctagtcgatcactcacataaattctgcccctttgtttttgaatttatgcttctcttaaaattaagtagattactcatgtgagttcttgatttaatccctatttctctccccctttggcatcaacaaaaagccaaagtgcatatctaatttgaagtattcaaatataactaaacattcatacaacattcatggaaaaaactatcaaccaaatcatgaagcaagaaccatgaagcaataatcatgaatagattaactataaaatccacatagtcaaataacatactn

SEQ ID NO: 22159 - DNA, 459 bp, Glycine max
  unsure at all n locations
tcatgatgatgaatcaagtataaatcaagtagttntgatgatgacaactagcccaaaagaatgatttcaagtttgagtcaacaagttcaagatcaagattaatttcaagattcaagaaaagacatcaagatttaagagaagatgaattcaagattcaagagaagaaatcaagaagcaacaagtcaagacttcacaagggaagtattgacaaagaatttttcaaaaaccaaacatagcacagttttgttttacaaaagagttttctcaaatttttctaagttaccagagtatttactctctggtaatcgattaccagtttactgtaatcgattactagtgataaaatttgatttcaaaaagtttttaactgaatttgcaacgttccaaaagaattttaaatggtgtaatcgattacaatatattggtaatcgattaccagtgtatctgaatgttgaattc

SEQ ID NO: 22160 - DNA, 393 bp, Glycine max
agctttacagcagattttagtaatgacccactaacctagaattaaaataacttaatgccattaacctagggaattaaaacaaactaaatggctgagtgtaactgaaattgttggcaaccaaaagtcacccccaacagccaacaagtcagccaccatttggtctcccaaaaggctgatgcctaggttgccaattgggcccttattacaacttgaactaaagcccttttagttgattaacccaaaacatatttttggtcagccaactctacaaggattgggccattatttagacaaactaaacactctaaaattgaaataaagtggtgtcatttagtcctccatttgcgccatgatacaactcacaaccttggacttttctccttgagacttggg

SEQ ID NO: 22161 - DNA, 451 bp, Glycine max
  unsure at all n locations
actcagcttcttacatagtccgcctttgcttgaccttctttatgtttaanaacattaacattaggcataggcgaaagatcacgacgagtctgtgggttaaaaccataaacaacttcgaaaggagaacaattagtggtgctaaaatccttcacaaatcatctataaaaacttgctaagccatgaaaactcctcacctcggtcacggacttaggtgtaggccattcttgaatagccctcaacatttcctcatcaacttgcactccttttgaactcacaacaaaaccaagaaacacaacatggttagtacaaaagatgcacttttcaagattggcatacaattgttcttctctaagcacaatcaagacagattctacatgatcaatatgcaaatcaagtgaagtgcttagataaaatatcatcaagtcacaccacacnaactttctataactct

SEQ ID NO: 22162 - DNA, 366 bp, Glycine max
  unsure at all n locations
agttactccataancgaagacacaccgacaaacaacacgaaacacaaacatggccacgcaacagccacgcgcggaccggacaaacaaacggggacaagacacgccgcgcaagcggccacgaaacgaggtacgagcacatgccacgcaaacgcagggaagagcagacgccagaaaacgaaacagggctacaaaaccggaaaaaagacacgaaggacgcaacccaagcaccgcgacccccacacatgaacaaaagcaatgctcgccaagggccaaccctgaacaacgacaacgagggtcggccaacacgaacatgcatgcagacccagcaagacacgagcccaccgtcaacttccaacgaaccacccg

SEQ ID NO: 22163 - DNA, 183 bp, Glycine max
tgcttctatacaagcactcataactatggtccttcccttgacaccatcgctgccgtcgttctcggcccggctcacttggtggcagcacttgctgattatgattatgatgatgacgatatactctcagatctcaccacaaaccaatggagacatacagaccgactgcatggggagcatgatatg

SEQ ID NO: 22164 - DNA, 343 bp, Glycine max
agcttatttaaatctaattaagaagctaacataacaatatctgtgtgtgtctttgtatccgtgtgtttatatttttaactatcagatggtgtagttgttttcaagaagcttaataaagttacagaatcaaattataatggatgtgacattcatatatgaagcaagaataaccaacaaaaaagttaaaggactatagtggggtaaagaagccaaactggtgttctatgttttaagatttgtatctattttattctctaggtcttccttatttatttgaaagaaaaagattgcaaaacatcatgcaggcatattatacctttttttttgggggggggggagggat

SEQ ID NO: 22165 - DNA, 456 bp, Glycine max
  unsure at all n locations
tatgatcttctaataattaataattcacgcacacaatttaacaaactatcaaacaaaaaacacttcataacaacaacaacaacccttctgaaattctcaacacaagtttcaaaaaacagagtaaaagaaacagagcaaaaacacacacacaaaaacacaaacacagacaccttttaagtattaaggtgtctctttctctccccggaaagtttctccgtcggcggtggtgattgaccggagtgccatggagtctggacggattttctttggtgcctctgcttcaagcggcaacaacatgctctttctcggcaacactgaacttgcttttcgaggtcattctctntctatctctctntctgatgatttttatttaatcttattacgttttctcttaccctttntgtggattgaaaanttgaaactggatatgttgtggagtagttgttgttgttattg

SEQ ID NO: 22166 - DNA, 338 bp, Glycine max
agtgtctccggaacgatgagctcttgaagccgaagcggaggcggatgaacccttacgtttctttgacgatttttccatttgaaggagtttttgcagatttcaatcggtgaaatcaaaagaaaaatgaaaaagaagaagattgcaatttacgggagttgatttgatgatgaaatgagtgagataggaaggtttggaggtttgggaatggaggaacgtcgcaaggaggaaggggctgcgcaggggtttctaaaaacgagatatttatagagcaggacgcatggtaatcgattacaagtaatggtaatcgattacaagaggaggcagcctactggtaatcg

SEQ ID NO: 22167 - DNA, 430 bp, Glycine max
  unsure at all n locations
tgtaatggcctccaaaattttagacaagtggcctctgtatcttaagaaggggggttgaattaagataaaaaactttccctaattaaaattttaactatgttttggattaacaatgcaccccagttgcccaatcaaatagctaggtcactcgaatgaaactagtgtccttatctttacttcccttttatttccaataaaagataagtaaagaagggcaactgtcataccctaatttcgtccagggactatcattcatggatattttgattttcgctagccgaattgagttgttcgacgcctattaccacccaagacgaaagatcattcgacgttntggtgaagaatgcgaanaatacccaaaagggagggcaaaagggtcattnntaatcctttttttgaaccctagctcgcccaggctagcctctagctc

SEQ ID NO: 22168 - DNA, 522 bp, Glycine max
  unsure at all n locations
gccacaacgacgacaaacaacaaagcgatagaaagagacgcgacgaataccaaaacatactnaanannnaagaggggnnnaatgagcatcnaagaacaccnnanagaannnnncgcgccgcaaacanacaccaggacacgcacgcnncgcaacgctaaacaagaagagnanacacaaagagaccagcggacccgcgggaaacacaaccacccacccaacacacancggaaataacgacaaaccaaccggaacagcgcacagacagagcgccagacaagagagagcacaaaagggcaacaaccaaacacaaaccgaccggaagcgagggagcaaagcaaccaagaggacccaacccacaccgaccaaagcacacgagaagaacaaaaagaacagcaagacaagggccaacccggaggagaccaaaccaacacaaagggcggcgacaaccaacaaccaaggcaggacaaccaacccggaaaacggcacggaacaccaaacacacagccacccaccagaagtacg

SEQ ID NO: 22169 - DNA, 452 bp, Glycine max
  unsure at all n locations
tgtacgaatatggcgtacccatcacatgtggtactatttggcggtcgggcgatggtgcacaacaagttgtccacatccacaaatcacgtataaacccaccatcccctgttgtccacctgcaactgagctcacgtactcccacgtagcccatatcctcgtttctctcaacaacgggtccccatcaatcctcccaagcttccccacattcaggtaattcaacatccaaatcatcacagactaacaaaccaagcaaaaccgggcaaaggcagaaaactctgcccaaaattcaaaccataatcacagctttttctcacttaaagaccccagtgacatttccttcgttccaatccgttaaccgtgggatcgactcgaaaatattactgggagtctctagaacatatgtatacattgttaccggtgggatctactagatnacatccagaactcattct

SEQ ID NO: 22170 - DNA, 386 bp, Glycine max
ttgcttgcattcagcaaattccacaacccgtaaaatccatccagtgaagcgtgcattctaaacgtatctaggacgaaaactgaatttttctaattttatagataagaaacatcttttaatattttttttttcaattggatgttttcatctaacttcttttgaccattaattgttagacttggagctgacattcctattagatgcctatagatgtttggaagagttttgttgctgttatgtagttcaatgttttttctaggtagcagtcatgtcgggttatgatagcaatcatttcttatctaaagtgtatgtttagatggatagcatattctctgaaagctttaacaactattctatcaccatagaacttcctcattgattgtcct

SEQ ID NO: 22171 - DNA, 317 bp, Glycine max
tcttagtttcagatgatgcagatggttttgtaactatctcatgcactcctctaatgactatggcatcatttctggcgctaaactgctgggagttggaggccatcttctcaattaaatgtctggcttcaacaggggtcatgtctccaaaggctccaccactggcagcatctatcatacttctgtccatattactgagtccttcataaaaatattggacaagaagctgttctgaaatctgatggtgggggcaactggcacataaaatcttaaatctctcccagtactcatacaggcatctctcactgagatgtctaata

SEQ ID NO: 22172 - DNA, 139 bp, Glycine max
aaaacagccggacaaagcacgcgcgccttagaacgcagccgggctggaaggcacaaaccaccacagaacaaagcaaagaggacacgacagcgacccgaccgaaaacaaagccaaagaccacacccaaagaaggcagaca

SEQ ID NO: 22173 - DNA, 499 bp, Glycine max
  unsure at all n locations
gtgaggtcccttttgattcccattgatanctttgnactnncncngacactctcnaanactccatctctaacgttctcgggacgatatggcttgtatgtatatctttttttacgagtgcagcgggcggtgtaatggtgcactactatccattgggttgcatctaattaccttagtccgtcgtcagactcaccctctatagcattgcgttattcgctcatgaatattatctattccaacgtgtttgaacctgctaggtaatgtttatatgctcctcattatctgctgaatttctagcatgttttgctctcatctcgatttgatgacgaatatattgtttgctagctatatccacgtgtgaatgtagattggcttgcgggttatcctattatttttttaacaagttttattctctcttcttgtgtgtgagtcctctgcttagctttgtctatcactgtgttttcctttgtcctattccctctcctccttcagtcgattttcg

SEQ ID NO: 22174 - DNA, 385 bp, Glycine max
ttgctttctctttatgaataatgtggtatccactttacctctggagaattctttttcaagaagaaaattacttaatcgttcataccatgccctaggggcttgtttcaaaccataaagagccttttgtaatttataaacatgatttggtttattagaaatttcaaaaccagggggttgttcaacatatacctcttcttgaattaagccatttagaaaggcactcttaacatccatttgataaagtttaaagttcattatggatgcatatgccaaaagcattctaatggcttctaatcttgcaacaggagcatatgtttcttcatagtctatcatgtaaacattattgactctatgtcctacatgctttatattaatgtcatgctta

SEQ ID NO: 22175 - DNA, 443 bp, Glycine max
tggacttgcgagttgattctagccttagtttcactttatttatttttcaattcaattaagaaagagaaattccaaagagaaacgtccgattgattttttgctctattttactataagatatttttttattattatattattattttacctctctttggcttccaacgtaattacggtgtgaccgaatgatcggatttcattttaacagaaattaacagatattacaaatcacacgatccgtggaaatatattttattgtttgtgattaggagagagaatgacttaagtcaatgactgaagcacgtcaaaagggggtatggaaagtaaatgaaacgagaataaaagtacacgatacaaatggtgaccaccactggtacatagaatgaatagaagagttcgattcgggtacttaccggttgaagactgaagaacaatgaagaacg

SEQ ID NO: 22176 - DNA, 389 bp, Glycine max
agcttaataaatcaatctatggcttgaagcaagcctcctgccaatggtatttgaagtttcatgatgtcgtcacttcatttggctttgaaaagaacatcatggatcaatgtatataccaaaaggtcagtgggagtaagatttttttcttgtgttatacgtggatgacattttgcttgcaactaatgataagggtttgctatatgaggtgaaataatttctctcaaagaactttgatatgaaggatatgggaaatgcattttatgtcattggcattaagatccatagggaaagatctcgaggaattttgggtttgtctcaagagacttatattaacaaatttttagagagatttaacatgaaagattgttcaccaagtgtagctcccattg

SEQ ID NO: 22177 - DNA, 417 bp, Glycine max
gtgcttagtgctccttcttatctttatagtcatagttgctctctatgccgcatggtgctcctctcctagggaggttgctcgagaactaacactcaatcactcgcctgagtgtatcatcaagacccatgacaactgcactcacgctcttgagaagaatgaagaatctggctgaatatcgttgttacttgtggacgggggacatcaacataggagtatgttcaatcggctatcgatgatgaatcataaggcgtagggtgtgagggttgattgattctttattccttcctacttaacataaagattagcgagtgccaggtgtgcaggttgaatacttaaaaatattcatattctaaattctaaacattaaaacactatcacctttcgacaaatgtaaaagataacacgaaatcacaatgt

SEQ ID NO: 22178 - DNA, 383 bp, Glycine max
agctttagtcaaggaaagtaacccaaaaatgacaaagaataggttgttgaaaaagcataacaatactttcctaaattggttcaaagatacaatattgagtgatgataacgcttctaaaatgttaaggaagctagtagatgggcctaaaagaaatgttataacatggcaaggatacaatatcagcaagtattcattctacatgaaatcacaagatgacaatagtataatgaaaaataatggggttagtctaagggcttaatcccaacactttgctactaatcttgataacaatccccgtgtagttttcatgccttactttggaatcattaaagaaatctaggagcttaattatgcaaaattcattgtctgtgtttataagtata

SEQ ID NO: 22179 - DNA, 355 bp, Glycine max
  unsure at all n locations
ctattcatctttttcattctcttctccctttgccaaaaagaattcaccaaggactaaccgcctaaattctttntgtgtctctcttctcccttttccaaaagaacaaaggactaaccgcctgaattcttttgtgtctgccttctcccttgtcaaagaattcaaaatgacacagtctgagaattctcttgattcttgcctttcccttacacaaaagatttcaaagaactaaccgcctgagatatctttggtttccccttcacaaaggttcaaaggactaaccgcttgagaactttgtcttaacacattggagggtacatccttagctggacaagtagagggtacatctacttgggtt

SEQ ID NO: 22180 - DNA, 379 bp, Glycine max
agcttattctatcataacccctttctggaaatacatttccggtggtgtgaacgccttgctcctgcccctctcctttgtgtgtgctcaccccatgaataagcttgttcttgacctttcaccaaagctctataaatatcacccttgaaagttgcattcagtgcaattcatagttcatgcctcttatgcaaacaagcatgaggaaactacatagttcaacataaactcaggctcagctacttggagattctattataattgcaaatttatttctagttcaataaaattttctaatttaaataaataaaatcatccactgaagttaaatatatggatatcgattacaagtatagctctctttcaggagtacatttgctgataa

SEQ ID NO: 22181 - DNA, 448 bp, Glycine max
  unsure at all n locations
ctataaaactcagcttatctccaggcatataatgatcgctcttctggctctatcaatcatctctgatgtctcctttgagcttagagattcacacatccttttttgtcctttaagagcttctacacagccatgttgaatcaagattgcttccatcttgattctccataacccgaagtcattttcccctgaaaacttctcaatattggactttgttgatcctattattcttgatcttgattccccacagatggcgccacttgttggtggttgtataagttctggttctcttagaacctgcacaagataaaagaaaaaaagaatacacagcatacacgcacagcagagcaagaacccaaagatntacgtggttcgacaatgtgcctacatccacgggaaagagcagctcatcatcatcacattgatcatgaaattacaagttcatacaagc

SEQ ID NO: 22182 - DNA, 389 bp, Glycine max
agcttaagcgtcttgttcaatcaccaaattcgttcttcatggtataaaaacgttcttctaattgttattatttgaaatagaagttcttatttgaagcatttcgtatgttttaattatttgttgtaggatgtcaagtgccagggctgcttcaacatgtaagtaggatctttctttttatttgttttaatgtgattataatgataatttatgtaagtgacgttaatttggttatgtgcctttttttttaatttggatgcagaacaactgtgtttagccactcccagacagttgtagtatgtggtaactgccagactgtgttgtgccaaccaacgggtggacgggcgagggtaaccgaaaggtgctcttttatgaagaatggagattgaatg

SEQ ID NO: 22183 - DNA, 368 bp, Glycine max
actaagctcatatcctattttatacactaccataaagtttatctactttttcatgaagccaccctaatgctgatacaaaattcaattgggtttattgcttgtattgtgatattatatcatcatttattgctgctgctaatgctatggatgtatacctgtctgactatgtacaaaagaatggcaatggccttaattttatttgaattaatcaaaatataccatgtactagcagtatatgtgtatgtattatgtatcttggctatatattgcttggctatatggggctttctggtatgaatgatgctttgatatattcgattcggtttatctgaagaaaaaccgcaaggttaatgataaatatgaaaagg

SEQ ID NO: 22184 - DNA, 259 bp, Glycine max
  unsure at all n locations
agcgccgattttttgggtcagataccgtgaattgagacatagccctttgattttcacaacgaacctngttacgcttgcttagatattggggctgcccatttgcttgtcacgactaaccaaggcagaacgaaaacattgaaggaggtgtaatcagcccgttggtgtgaatgcgacggctacttgtgtggacgatgaagcaccctgaagcttacctagtagggatccctgactgagcccgggaagttgtgcgtgtgtaaag

SEQ ID NO: 22185 - DNA, 283 bp, Glycine max
tgtgatgactcatagagaatcagactcacttcgtatgagactgctcttggacaatcctaaaaagttattggcacacctgtcttcaattagaactatggttagctttaggtgacagtaaagtgtgtctattcagaaagaacttgtttgcagacttgaattatagattcactctgaatttcatgcacacaacgggtaaaaagtgtatgatttactccatttatgcacttgactcgatcatggtacgttttaggcctataatacaaagttacccaactcgataaca

SEQ ID NO: 22186 - DNA, 388 bp, Glycine max
agctttcatatgactgcaaattacaagttgcccccttaaatataaaagggtaataaatcatctactacagtagtagccatctaacctcaaaattttagaactcaaccagcaaatgttgcctcaactctattctcctgctcgccgagaaccgacactgcctccttttcacctattaattctaccattaccagtctacatctctgactataaaaacgttgcaggtagatgattcaaaccggcctaacatgtatgccaggttaatcatagctcatcatgaccttcagtttgctcagttaccgtctcttcgcttgtgccttctgaactgttaacggatgaatcacttgaagaggaactatcagctgagttagaatcagaattctctgtattc

SEQ ID NO: 22187 - DNA, 467 bp, Glycine max
caatactcaagcttatcatattccctttcaaccaagttgaattctcaaaatgagttttgtttatcaaaatatagagtaccctgaagtaaagtcggtctcactatacaaaatcattgccaaaagtctaaaactttacaaacttatagaacataagatttagaaaaagaacattgaaaattcacaacagcttcagatggttttaccacggcaagcgggtccttaaagaactagccttggtcattacttgaataatgaaagacaactaaggaatgatttttgtaactcaattaggcaactcgaatggcaaaacttgagaaattgtaataaaaccaaattcctgaaggattctctaatcctctaaaacaggagttgcaattgttcgggtgttccttcggctgctccacttctcctgacccatacacagaatcacaattctattgttgctcataattctcatttcttcacaa

SEQ ID NO: 22188 - DNA, 374 bp, Glycine max
agcttctagccaaatggacttaccttgaattaattcctttgatagcccttttgagccttgtttccctttccttgttttgaagctcactacaagccttaagtgaaaaaccatgatattaccatatccttaaggaattttggagctttggaattgttttgggaataagtgtggggggtttttgtttcattggacaacttgttttgttggctatgcttcatgatgtattttgggccatacttgatgtacattgtatattggttaaatgttggacatgctgaatgaaatgttgtttctcaaaggctaaagagtaaaaaaaaaaaaaaaaaattcgaaaaaaaaaaaaattcgaacaaaaaaattcgaaaaaagaaaga

SEQ ID NO: 22189 - DNA, 361 bp, Glycine max
  unsure at all n locations
ngcaattgcatgcggttatcgatgaagaatccgctatactgngcctacatataaaacacattgccactcttcccattttacaaaattatatccttacttattagcggcctctacgcgaccctgggtggccgcacgcatatacataaattgcacgagaatggggaccatgtcccatgccacattgcttcagaaacaacatacgcctaacgccttctccttcagatcctctactcactacaacatgcgtgaatccccacccaaactgccacccccatataagcgcactctcacaatatggagcaccttgcgatgaacatacacatcctgcgggaaactaaaaacatcaggagcgaatacttac

SEQ ID NO: 22190 - DNA, 374 bp, Glycine max
ttgctttagtcaagaagaagatcaataatgagcaattaatatggaccttaccagcgacaatggaagggaaagaagggacgataaataaaaagaagaaaaagacctttccatagataaagctttggtgcttcgatattgtcctggcatcacattgacatgggccgtaaaacaaggatatccgatgaaatgtggagttcagcccttcacatatacattcctagctaatggttaatgtgaacctgccaccaccactacagataatgctaacctgtctatcttttgcataaatcagaaatctccaccttttgatgattcctggaggaaattaaggtgatttcaaatatagggatctttatcttttaatgagtgaagtc

SEQ ID NO: 22191 - DNA, 315 bp, Glycine max
tcattcagtaataaaatagttacttttgtagaactatcttccctgaaagttactgatgcatagaggaatttcgaacttgaaaacctgctaacacatgtttaaagagtttacataaactctagatatatgccactatggccagatcaattatcttctgatccacggataggagaaaaattcattaccgttctccacgactaatcgacgcatgttaagtgtgggtcaagatctctgcatatttggtcatctttattcgattaaacgcgtacatttactacatggatggtaccacaactctcacacacttacaaaaat

SEQ ID NO: 22192 - DNA, 574 bp, Glycine max
  unsure at all n locations
gccgaccacactctaagtccntatatgatgagttgatagtatacaggtactaccgagacgtatacatccnnntcttattnnnaagcgcggacanncttgatggcgatcgaacgccctncgcaaacaannannaaacggggctggcggacccttacaggcaccaccgcgcgcacgttttcttgtctttgccacaaaacacaatcaggacgaaagaaagaaatggacaaccgccgatcggcgcgaaaaacactgactgaaaacgatattggataccacagacgtagaaagcaggcgaaaccaaaggcgcaaaaggcgccggtgggtgcgcaacaagctacgcgtgggtcagggatggcacatcacacaatgcgaggcgcagacgacgcgcgtatcgcacccagctggagcacacacaaaacgaggcgagcggagccaacaacgaatgccggcgccacagagcagaaacccacgcccatgaggatagggaacaaggagacagaccacggaagccccaccgggcaaagataaccccgcagggagacacaccgcgaccacgagtccatggcaacaaccg

SEQ ID NO: 22193 - DNA, 405 bp, Glycine max
  unsure at all n locations
tgtgaatcgatagaccatcacgagtgttcattgacatgtacncttgtgtcaatggcacgtattggcgcttggcatccattacattcagatctagctccatgtgcataaagtataaatgtttgatcaagtgaaagagtccgaatcaacacaaatctataaagaaactgaagactctacactataccatggccaaagtattttaccacaatcatggtgaccacaatgcccataataagatcaccactaccctaaagatcaatgcctaccagncgatcacagtcgtgataattcgataacggctgtgatcaattcatgaggaccgtgacagatccataacaccctatagcactcaacgtcaatgtgtctgatcccgatcaccgtagatctaccaccgttccctatgcg

SEQ ID NO: 22194 - DNA, 359 bp, Glycine max
ttgtatgtaagtaccctacggaggggggggacgacttggggaagaacatgagtggagactatgggctttgcatctccatttccaaatccaccaagaggtcgtgacaaacccattgcttgatgagagggaagaagaactactgttgggcaaggaaacccaaatgagtccaaatctctctggcatgcgaacaatcacgaagacaatgaagagtgtctttctgcgggtgggagcaatcatggcatgccgcccaagtagctaactagtgacgatagcgaacatcattggttggcaaggagaataagccaacagaaggtgctaattttctatggaatgagaggctgccaaagccatttgaagtt

SEQ ID NO: 22195 - DNA, 444 bp, Glycine max
gtgacttttacaataaaacgttatatgtatatgttcataatttatgattcaatgtcaatgtgaattttttttacaatgtcattacatgatcgatcattaaactcttcttataacaacatggtgttatctttgtttaagaaaatttctccaagttacaagttaattaaaatatcgatgactaagctttcgacaagattaaagtgacgttgtttctatcaaaatattgtctttcgataaaagatggtttcttgacaaaattattatgcacatggaagaatagagtgctcgcaggaggagtttgaatttgaatttgaaataaaagttacaaaagttagcgaatagggttacttgaagacattagacgtcgttagatctaaataattaggaacttgctgtactcgtgtcaaaaatctataattcgaacatctagtggtgaaagtttat

SEQ ID NO: 22196 - DNA, 384 bp, Glycine max
tgcttcttttggaccttgaacaagcaattaactcctctttcagaaccatgctatgtgctcgcgactggaccctttcttcccttcgcaacttgagttcactattgctaccccatagagctccgcaaaatttattccggccatactcttccttgcgagccctcttggtttcttgttcaagggctcttgcggtaatcgcattctcttcccgtaacccggcacactcttttcgaacgtgtgtagcggccaacttgaacttctctttggcaagtttcgcctttcctaactcgcttttgagagcttggacttcttcgtcctcttccggtgctacaaaactctcttcgctgacgacttttaacttggcgagcgcatctaaacttcgtatat

SEQ ID NO: 22197 - DNA, 451 bp, Glycine max
tgcttaagaagattgctaaagaagctagagcttatctactacatacttctctaatagctaagctcacctccttgagatgagaagctagaacttagctacacaccccctataatagctaagctcacccccatgacaaaaaacatgaaaatacacaaaaaagtccttactacaaagacaactcataatgccccgaaatacaaggctaaaaccctatactactagaatgaccaaaatacaaggcccaaacgaaggaaaaacctattctaatatttacaaagataagcgggatcatacttagcccatgggctcgaaatctaccctaaggctcatgagaaccctagggcctacccttggatctccagcccaatctacttggagtcttctacccaatgcccttgcacgataggattgcatcagatgattaggatattttatgcaaaacagggcatgc

SEQ ID NO: 22198 - DNA, 248 bp, Glycine max
ctgtgcgccacctgcactaatgactcggcctacgcgactcactgaccgcagtaccgattccttcgatccaattcggtaaccgagggatcgactccaatatttgactggacgtgtatagtgtataagcctacattgtgaccgtcgggatctactagcaaacatctagagctcatgatgtactactccctgcccagccaaccacacacgtgcattttctgcaccaagctaataccctgctgcacctattc

SEQ ID NO: 22199 - DNA, 321 bp, Glycine max
ggatattggctgagcgatgacattgttgagctgccgggaacttaggccatgtacgaatggcagccacaacatgggttccttcctcattctcatcctcttcatttgccccagttctctcattcatcaaagtaggatgctcaaatttgcctcttttcacacccacttcgatcctttcgctggcgaagacaaaattcgcgaagcttgaaggtgcgtaacccaccattttttcatagtacaacactgcgaatgtgtctactattattatgatcatatacttctccatcattggaggtgccactcgaactgccaagactctccatc

SEQ ID NO: 22200 - DNA, 382 bp, Glycine max
tagcttcaatggctcaatgagcaatgggaaatgatagtcaatcaacaaataaagatacccttttctataagaggctattgtgataaagatttatatgatatgatccctatggaagcagggcacattttgtttggtagaccatggaaatttgacaagaaagcaatccataatggtctcaccaatgaaataaccctcacctatggaagcaaaaagttcaaacttgttccctttacaccttcacaactggccagggatcaagtacaaataaaattcaaaagggatgagcaaaagaatagaaaaagataagaagaacaacctttaatggttaaggaggagtgtaaggaggtaagtgtctactctaagagattagctaagaaggaaa

SEQ ID NO: 22201 - DNA, 260 bp, Glycine max
atgggcagctcaccaacatgtctttctcgcctgacacgatgaccaaatgccccttcactacgaattttaacttttggtggagtgtagagggcacaacttccactgagtggatccacgggtgccacaacagacagctgtagggggggttaatatccattatttggaaggtgacatgacacgtgtgatggcctatttgtactgggagatcgatctctcccctaagctcttggcgagtgttgttgaatgcacgaaccaccatt

SEQ ID NO: 22202 - DNA, 381 bp, Glycine max
agctttgaataattgtcgttcataattgggtaagtgtttgtttgagtttaaggaatcaagaagtatttgcaacacaccaaaaatctcttggattaattgaattaaggaatgtattttgaaaagttttcatgtggggtcatatatcattttgaaatcaattctctctctttcttggtttatgataatttttgccattattttttacatataaggcacttagagaagttatttgcatctaacatattaataaaatgcatattttttagtttcttaatggaatccacattcacatgtcccaacctataatgccaaagattaacagattcaacaatataagcacaaccagtagagaaattattattagatgcaaaagcaatagtg

SEQ ID NO: 22203 - DNA, 440 bp, Glycine max
  unsure at all n locations
ttgtggcaaacttcactgcagaattcataagcttggtatgtgctaaattccctgtcaaggtacctcaaatagtggacagaaaatttttcttcactgtggggctagggactaatccttgccccanaaacacaacatgccaagggccaagtaataacaccaaatttgcagcctcagtgaacaacatttcttttgcacttccatcatctgtttccatcatgcaggcatactattctagccaggccaatggggttttcaagactgattttcctgccacccctttgaaccctttcaactacacaggaacacctccaaacaacacaatggtcaccaatgacacanagctggtggtgctcaagtttaacaccagtgtggagttggtgctgcaggacactagtattcttggagctgagagccatcccttgcatcttcatggttatgac

SEQ ID NO: 22204 - DNA, 309 bp, Glycine max
  unsure at all n locations
ccaccacacatgggaggaaaagaagacaagaccaatnngggggttgactcagcacaacnnaaaaggaagcaaacgaaacaacgactattacagagcacaagggcagaacgcacaacccaaaaccaccccacccacgcaccaacagccaaccgacgacataaaggggcggacccaaagaccacccaggccgccacacaacacgacacgaccaacacccgcgaccaacacaacaccgggaacaaggaagacacagacggacgaacgacacgaaccagaagcagagccaggagacggaaacaaccccaacac

SEQ ID NO: 22205 - DNA, 450 bp, Glycine max
  unsure at all n locations
agggtcacgtgatccctgatccntgaatgcaaacccccnnnnannaggtgttagaganagacatgtttttgactttaattaaataacaaggggaggtacggaaaatgtatcccatcactgcatcatgctattaagataatgattgactgcgacggtttcacttctgacatatgtcgtgtggctcgtgaactattagggaattgtgagtgatgatacctgtacgagagacgtctagaagacttcaagagtccattactattcactgatggggacagatattgattatgcctcgttgttagatgaattctgacatcaagtatagcgtgaacattgcggatgacatctgagaacgtcgtttagaggcgatgcgcaggcgacagtaaattagcgagtcgcgagttacatataacgcgggggccttcgatcacaagtctattatggtaattgccg

SEQ ID NO: 22206 - DNA, 383 bp, Glycine max
agcttattttagagataataatcaccctctagtaagtgaaatcagtttcagtctgcctcatttctaacatacttctatggagaccatgttttcacaaaactgatttattgtcttcccagagaacgagagtaataatgcctttgtaatttaaactctagaaacacatgcacgcttgatccaagtctaaaaccgactcttcaaaacaagaaaatcttcaggcaacttaattggtaacccatgatggtttgaattctctttaccaatataagctgtattaaatacacaattaattttacaattactagtacaataatatattttgaacctacttttcacacaattaggagtgaagaaaccagctcgtgtcatactctgtttacgta

SEQ ID NO: 22207 - DNA, 575 bp, Glycine max
  unsure at all n locations
agagagtcgtcccnttttgatccncatangannacgtagactatacccacacncacgctcatgcatanggtaagtgtacatacataccaagctcgtctcaccacnctcataactagtatttttgctgattgcgatgacaccggacatttattgacgttctcttgcgcgtgcgaatattctagtcctactccaaagcctccnctaactgtgctgttatgtgatatcactcatccgataganctagacctgttcaggaactggtgatcacttacataccactactggattatcggagttcaattaatcatctgcattctcaacatcgtcattgnactctcaactttttacagggtttgatattatatgctcatattttcgatagggatatcaaactatctaaaggaatctgagttggcatcaaaatcgtgaagaaacgaatccattatttgcttacttgagatatttacgtaaggaatttaagtcctgaatttatactcatgaactttcttcttacatatattttcgtgattctcaggatctcatactgtgaagaaactttcttgtgcctctccacg

SEQ ID NO: 22208 - DNA, 382 bp, Glycine max
agcttcattcaaaaactgctttcaaagcttcttggtggggaagcataagatcctagtgaacatcctcgaatttgctgataatactattttttttggagaagcttctatggataatgtcaaagctgtgaaggccattcttagaagctatgagatggtctcaggcttgagaattaacttttccaagagccactttggagcaattggccaatctgaagaatggtgttgttttgctgctgattaccttaattttgccatgcttcaattccccttttgctacctagggttgcctataggcattaatccgagaagaaaggtggtgtgggagcctatcatttgaaagtttgaggctaggttgaactagtggaatcaaaggagcatctca

SEQ ID NO: 22209 - DNA, 427 bp, Glycine max
  unsure at all n locations
ntngtggacatttctgactttcgccagtaattggtgtttattaagatccaaaagccttggtcaagactcattcatatttgttcctaatgaggaaaacttgttgtcacattcccaggtgtgctcttcaattctgcaagtccccgtccctgcaaagatgctatgatttgaattttaacatcaatgggtatcatcattcagttgctgttgccgttgttgctgtttttcttttcagagaaagatggttcagtgatgcatggactggaaagtctatcttgaacagccaacctttgtatctgctatcaaatctttcttttataataaggatggagggaatcgtaaatgacactcttcaatccttattttgttaccttaaataaatgaataactaaatgttagatgctagtcacagtagtgtaccttctatcat

SEQ ID NO: 22210 - DNA, 390 bp, Glycine max
agcttccatcaagtgatatcagagcattagagcttcaagtaggtgctccttaaacctccattaattttcagctttaccttctcctctattcttgtttcttcatttttctccatgtacctcctcacatgtcttatgctaaatgttgttcacatgattctttagaatttccactgattaaacttgctatatgtcttaccctaatttcgtctgggaaccatccgttgttgggatgcgaccctcgtttgaccacttcgaggtatttggcacccatcgttaggcaatttgtgaagttctgagacatgccggaagtcaaaagaaaagcgtcgtaacacaatccgtgaagttccgtgacatgtcggaaattaaaaggaagtgttagtgcgaaatccg

SEQ ID NO: 22211 - DNA, 436 bp, Glycine max
  unsure at all n locations
gaaattaaagatattcaacatggatgatcaagattgtttctagagtcttaggaagggtatattacataggaagggaattcctatttgaagtatcaaaaggtttggccaagaaatttaagttaaaaagctttattcaagagatttactctctggtcatcaattaccagaggatgtaatcgattaccactggccaaagatgatttacaacagctattaaaatttgaattcaaaatttgcactgtgtaatcgattacacatatatggtaatcgattaccagcagtttctgaacattgtaattcaaatgttagagcttgtaatcgattacacacatactgtgatcgattaccagaggagtttttcagagaacattctcaacagtcacatcttgttatctatttcttaaatggccatcanaggcctatatatatgtgtgac

SEQ ID NO: 22212 - DNA, 393 bp, Glycine max
agcttgttcaggaattatttgtatgggttggatgttgaattctggttgttcctggtgtggagatgatggtacatgtttgtgaaccagaagcggaagtttcttttggtgaggaagccatggaaaaacagagcgtttggaatgatttcgtaaatctcagaaaactattgggaaatgctggtgaaaacacgaatgccacgaaaatataaatttgaatgaggaatgtagagggccgtgtgaagcaacggtcgaatttgccttggttcagtagtgaacgtgctattaatgttaagtgattcgtttgggcacgttcagatatcagtagttgctacaattcctctagcagacaaatgcccagcttgcccctcagtttttcaaactgatttgcatccaaag

SEQ ID NO: 22213 - DNA, 120 bp, Glycine max
ggggcttgccaaccactgacatccacacccggctaaagcaggaactgttgtcctacagcactctgcttacactaagacaacacccaacagtccgggtgcgccctgaattgtgcaatgcga

SEQ ID NO: 22214 - DNA, 381 bp, Glycine max
ttgttttacaaaagcagattgtaacaatgatggaaaactgtgtagttaaatgaagatgagatgaaacatgcacaacaccttgacttatatagacacaaaaaacacgagactagagatagaaacttaaaaataccagtgatccaacagcaactaaagcacgaaatttggggtcgacttcaacattgtcatcctcaccaatctgcacaaaaacaaaatacatatcagtatagtctacaaataataatatctaaaagtaggaaatgtgattttaaataatctagacacgtacaaatgtaaagcaaatgcagctttagtatgacaaaagctagcattatttaggagtgaaaatttgcactgattagataacatattgacatggat

SEQ ID NO: 22215 - DNA, 356 bp, Glycine max
tctcagcttggcctttgctgatgtcatgttttcaattttaagttgtggatatcaggtcgattttgtgtgttcgtcgtgccataattagtcgaggtaatagaaccactatcggtctgagagaccaggcgtaatagttgataaataacgcactaatgaagaaaacagagctttcataatcgtagaaaaatgtataagtataatgaacgttatattaacggccaatttttaactttcaatttgcttctttggtattagcgtttgtccgtttccaccatatatgatctattacttaagcataacaaaactatcataaattggattaattgaccacacattatgaagcaggccaatgagaa

SEQ ID NO: 22216 - DNA, 385 bp, Glycine max
tgctttgaacatgttgcaagcaaacttgaacagcatcatgtactctcacaaagtaccattctttgcctatcaactccaccagaccggatctagacaaggtaagcagaacttctggacttggattggatattgcaatctgcaagaagaataagctcaagttggttggtggagacattgcaaacctgtggcgattatttcaagaattctaacagtagttgaaactttggtatcttattctacctgaatgtcccgtaatttgtactcctgatacaagtctttcaaagcctgaacagcactagaatctatgtaggtcacagctgcagtcatcacaagtcataaccacatgattagaagaaagtagaattatcatcattatccctttcat

SEQ ID NO: 22217 - DNA, 373 bp, Glycine max
  unsure at all n locations
tgcatgtgcacacattaagcgtcatgtacattacatctgactacaatgaccactagatgcttgacacatgttcttccaagttggacttctcgcgctgagcgcgcacaggcacaccaagtgaacggcttaagttctaacatttttcagtccattgttgttgtactaaaactctatagaacaagctaaaactataaaattcattaacattaactttctgaaggcaaaaaaaacaatcgaaatttttatcgaaaaccgagcattaaaagagaanaaaaatgagataattgctatttaatttaagtgcaaaaaccaagtatacataacaattttcatatagtgtagatggaactttattgcttatattacacgtata

SEQ ID NO: 22218 - DNA, 387 bp, Glycine max
tgcttttaggttgactagttcattgacattcagcaattgaaggagatatacatctatttcaagaaaagaaaaatcataaaagacagtgtgcattaaaaaaaatcaccttcattggctgcatcaacttgaacaaccatgcatgttctgaagaaggaagaactggcggaatcttcattttcttccagtccatgctaactaaatcagttgatgctgaataatccctgataagcacatcaatattttgtactctattcttaacattccttttcttctgagtttgatcaatcacctcctcctttgcattatttttcaatgcaatcctcttatcaagactcaatcgtttggccttcttattctggtttctaaccacattatcacaatttccat

SEQ ID NO: 22219 - DNA, 448 bp, Glycine max
  unsure at all n locations
ntaattganattaagttatctaattatgtaagttcttgatttaatccctattttctctccccctttggcatcaacaaaaagccaaagtgcataacacatataaaacatacataaatgactaatcatacaagacatttattgaaaaatctaaaccgatcatgaagcaaaaaacatgaaatatccaaattaaaatataaaccacataatcatataacataatttatagatgttcagttatagtaagcaaatagtaaaagaaatactaaatgttcaaatgtcataatattacagatcatttggataagtcactagcatctagcagtcctaattctcttctaatgttgaagaaggaatctttatttagtgtctatgagaagatgtctgcaagttgatttttagtatctacaaattcataacaacatcacctgttagaatatgatctctaata

SEQ ID NO: 22220 - DNA, 377 bp, Glycine max
tagcttcagaccaaagcaactcaaaatctaggtatccaaaacccctcaatttaatggattttcaaggtttgagaagtgaaattgagaatgaggtaaatttggagcaaactctcacctcacacaagtctataacatcaatttaaacttgctcaaactggatttacacctaaaattccaccgaatcaaaatttgactcctcaacacccaattttaccctagaaatggctctttgttcactttggtcatttgtttttctctctagcacagcccaaactttctcataagtcctaaatgacatttcaagctaggattaactcactttaacctccaaatgccactaaatccagatttggccttccaactctcaaaactcactc

SEQ ID NO: 22221 - DNA, 170 bp, Glycine max
gaacgctcgattgacttttatgattattgtagccaaagatatttcgattacttcattattatttttcccgatattttgaatattctattaactttccgcttgttgtggtttaactcgccatgaccgcgctgaatgatcggctcgattttgttgttgcagcgattaatcga

SEQ ID NO: 22222 - DNA, 393 bp, Glycine max
  unsure at all n locations
agctttgatggtgttgagaagaaatcacatgtttgtcatcatcaaaaagggggagaatgtgaatgtatgtatacatgattttgatgatgtcaaaagaagaatcaaacaaggctcattttgcttcaagattaatacaagattgtttcaacaaacaaagccttgattcaagatttcttcaagatcaagccttgcctcacaatgaaaggtttcaagtcattcaaggcacatgtaatcaattaccaatacatgtaatcgattaccaatggtttgaaagtgtgtaattgattacacatcatatgtaatcgattaccagagactctgaacgttgagaatttaaattntaaatgaagggtcacaactgttcaagaaaaacaactgtgtaatcaattacac

SEQ ID NO: 22223 - DNA, 278 bp, Glycine max
agactcagctgcttctatgtgctttgattgctgtattcgatgattaatccctgtacaataggctcgtttaaaatccattggctcagctctcatttcacttaatttggtcttacgttattacttgtctctatcggtccttgggtgggggctgccatatacggaattggaaggaggattggagccatcccttgaccaatttgagttaagaagaaaggtgccaaccacgttatgagctattggactaagactcactacaacttgagtgaatcaccaccgag

SEQ ID NO: 22224 - DNA, 384 bp, Glycine max
  unsure at all n locations
agcttggtgctaaaacatgtccaagggttctaaaaaattttaactttgaggtttaacaacgtaatccgctacaacccagaaaaacataatacccagaaagagggagcgcaaggcagcaaaaaattggaattcgtgaggagataattcacgtatgttgagatagagagagagtcaaagaagcataccatggcgaattgggtcatactcatgtcgaaggattgaacaaagtcaaaggctttgggggtttagggttcccgatcacataaatttgaaagaagtatcctactctgcacttcagcttcagacttgttcaatcgacgggagttgcccccttctttttcttttcatttatttatgacaactntttnttttatttctttttta

SEQ ID NO: 22225 - DNA, 393 bp, Glycine max
  unsure at all n locations
cttattaaattagcgtgttaaatattntttaaaaaaggtggcgctcatgcagtttaagttcctctgtaaacttggtggaaaagtggagaaattattgttgtgtaagtttgccagacttaccctcatgaatcaatggttaaaacttagaaaacccaaacgtactgaattagtaagggtaaaaaggtatttttattaaaaatctatttcttttttttcttctttctttcaaaacaaactttataatattattttcatttctcttaaaccaaacaattcatattttcatctcttttctttctctcacctacttattttcactccaactatttcttatctctagtaaacaaagtggtcatcttgtatagagaaacttcgttggtccataatttcaat

SEQ ID NO: 22226 - DNA, 380 bp, Glycine max
ttctattattaacagcttagatctagtgcactgaactatgtttaatagcagtttgattaataaaacttagaacagcttatgtttagttttttataaaataattcagtttgtaatagtttaattcattttggtattaaagtagttcacagatcacattaattttttggacacccctaaatactttccatttgataatggcataatatatgggagaatttacataactcatgaatgatacttactaggcctactgcaatgtcaaggtgatacttgcgtcctgtagtgtgcactggtgcaccacgactagaagtccggttaaaattatcatttatcacatcacctactatgaatttagaagaaactcagtataaatgctaaag

SEQ ID NO: 22227 - DNA, 440 bp, Glycine max
  unsure at all n locations
tgtttgactaggctattatgctagagagttggagttttctaagtttgacaaatgagaagtgtagtttctaaattattttgatatgttgaaatgaaccatattttgtagtatgtgcttctccacaaccatatcctatattagcaatgtccttgagactagcattagctgctgcttctaataccaaatccacacttaaaaatattgacaatacagttgatgatcccttgaataaataatgaacatagatagtacatatagaatcttggtccttggaccattttttggtgctgccgatgtttcatagaatcatgcaggatggaagcagganagggaaaaggttacttagctagctagatattatgccagacaacctaganatctgctagtaaagttccacaattaaagaaaaataaatattagtattcaagtgatgaataggg

SEQ ID NO: 22228 - DNA, 526 bp, Glycine max
  unsure at all n locations
ccccaccgcgagacacaagtagagaagaaggaagaggagagacaacaatactaaatantnancaggcgtnncctgagcatcgagacatccaancnagnnaaaacctaggaaacgcatccaaagcacaacactattttacttctaacgcacacaaaccgagaggaggagaagaatggcagcaccgagcgacaacacaaatacaaacagcaccacccgagagaaagcgcacagaaaacagagaaggcccgacgaaagataacaacaacgcagagtggcaacaccagaacaaaaaaaaacaacgaaaacaagcggcaagaaggggccaccgaagaaacgcgcaccagagcagcaatagaaccgagcgaaccaagccaaccagggcgcacagggcggccaaaccggaaagagcgcaaaaacggcagcagcccgacaatgcagcggacaaacacgaccaggacgacccgacaagtccaccacagagaggcgacacccgacgcgaaacaacaccaaaacgcgacgcgaagac

SEQ ID NO: 22229 - DNA, 734 bp, Glycine max
  unsure at all n locations
gctgcgacgtacacnttttgatccttcgtatgaccccttcgaatacctcacaanaatcgcggagatactcacgagagtngcctactgaaactagnaaacagcggtttgttgaatatctttcacacattgaacacaagggcgngatctggagggtactctcgttacaacaaatcagcggcgtggtcatctagctatgtaatntntctatctcactggcagtgatcgtgctagtgtacgtantgtantagtactaatcgcgggtgtagacgtgatcgtagatatatgagcatagaacgactatgcccacggctctcgaganattgcgtatntgtagcacgcgcttgtcgagtatacagcggtgctctgataanctatgattgtcgtangcgctgcgccattntnatcgagactaanactcgtctcngccggcacgcnggagtgagagtatatagtcacaccgcgcgatacacgcgcgactacggctctgtatatatatggtagtgatgcgttattctgcgcgctacagtatnttaccttgtacgactcggcgtgcttgcgcgctgtctactcgtnagagtctcaacgatcgttctgcgacagtctatctcctacgagtcacacatcatncgatgagtgcgaccgcatgacgctgatcatgtatactacgcatatcgnanctgctgccatgtgacacgcnctcgtgncttccgcatgctcgcgcataccgcgcgcgn

SEQ ID NO: 22230 - DNA, 384 bp, Glycine max
tatcttgtagaatggctagacatgatacatgtcagggtttggtttggttcaaggataaaagggataccccacattatttccatgacacaaatgcaaaaatgatgatttggaaattttatgcaaaactggtcatgcatgcacctacgtggtcgctcaagtgtcaaatttttatggtcatgtgatgctagggctcaggattcatttcctctattttaaatcaacccaatgtttccaaaatatgttcttttatcaatttgtgcattcatcctagtccatttcgggcgtccggggaaatttcacagcattcacccttcaggtgtagacacatttttcaaaaattggttatgatcaatgaaatcttttttttcacagaaaagttggaaa

SEQ ID NO: 22231 - DNA, 462 bp, Glycine max
  unsure at all n locations
cgggtacgattgatcccttatacnttggaancacnacccttcaaactcacgcattggcttatgccgaaaaccacttttgtacattttttgncacggccccgccccttataggggattgtcactatacgcgcctccactgtcaagattatacncctagcggaacaacagaccataaatatttcctgagcttacctatagcatttggatatcaagacaagaacgcagtaagttcattgtatgacattagcaattgtgcctatacgactgggttattcgtaggaaaatcttctcgctagagactagaatcgatgccagtactttcggccacgtattaagggggggttaccgagagactcacggtggctctgacgcgatgggacctttggccaatggtctagcccggcgagggattcttgcacaccctggatggcgcgggtaacaacatggggtacggcgcttacg

SEQ ID NO: 22232 - DNA, 391 bp, Glycine max
agctttcttaagaagattcctaaaaaagctagagcttagctacacatacctttctaatagctaagctcacctccttgagatgagaagctagatcttagctacacaccccctataatggctaagctcacccccatgacaaaaaacatgaaaatacaaaaaaaattccttactacaaagactactcaaaatgccccgaaatacaaggctaaaaccctatactactagaatgaccaaaatacaaggcccagacgaaggaaaaacctattctaatatttacaaagataagcgggctcatacttagcccatgggctcgaaatctaccctaaggctcatgagaaccctagggccttcccttggatctctagcccaatctacttggagtcttctaccc

SEQ ID NO: 22233 - DNA, 467 bp, Glycine max
  unsure at all n locations
actcaagctntcatatgactgcaaattacaagttgcccccttaaatataaaagggtaataaatcatctactacagtagtagccatctaacctcaaaattttagaactcaaccagcaaatgttgcctcaactctattctcctgctcgccgagaaccgacactgcctccttttcacctattaattctaccattaccagtctacatctctgactataaaaacgttgcaggtagatgattcaaaccggcctaacatgtatgccaggttaatcatagctcatcatgaccttcagtttgctcagttaccgtctcttcgcttgtgccttctgaactgttaacggatgaatcacttgaagaggaactatcagctgagttagaatcagaattctctgtattctgctcactgctttcggtttcattttttacgggcttctgaaccttaggtttgtgctngngaattctattaatact

SEQ ID NO: 22234 - DNA, 390 bp, Glycine max
agcttttttttattagaaatttttctaaaatgtttatggggtaaaaaattctctattgtattatttaaattataaattaccttgtgccagaaatgtaaattataccttacctataagactatagcatttaatattttatttaaagaaatacagtaacaaacacctatatttttttattgagaaaataaaataaaaatataaaaaaggaccctaaacacgtgcaaattgaacacctatagtattaacttggaaggtggacatgaatgtttaaagtacgaaagtctagcagataaattcattatcctaagaaatagcctacaaataccctagcttcttaattagctaaaagatcaatacaaaaattctcttttctaacaaggtaattaagat

SEQ ID NO: 22235 - DNA, 468 bp, Glycine max
  unsure at all n locations
atacaaactcaagcttaacgatctacagacaatgcactccanagtgtcatatttaatngagttctcatatatataaacccatcaataaaagtaataggatcagtagttactggttgaatattgggtatgttgcataaaatttcaaagaaggaacaggttaaaaagcaggactgttagaagcatacagggaaacatcagctaaaatcatgggaagatttttaaacacaaggttttcttgttatgaagatgaccactgaactgataatttgtgaaaaccagtaaaagaagcaatgctgagctctgagtcatcatgtaagtagtttacagacgcattgtgctccatgggctctaggaggatacagatagagtgaagaaagtatcaatgtttaagacgtgcagagaactgatgagactcaagtagcatgtcaagaatcgaggtatcgtgaaacacagcaagatggtcttatt

SEQ ID NO: 22236 - DNA, 337 bp, Glycine max
agcttgttcttgaacggtacatgtatcatttcaacgagttgtgcgtaccattaactctcgagacatcactatatatctctgcacctggctcactatacaaagggatgatcatcggggatatgatcctatctcggactactgggaaactcatcgttggccaaacatcgagagagtcagcgctgatacgacactggcttgcgaagtgaaacagattcattccgccattcttcaacggctacgtaacgatcaatttctgtctttgaattatattagggatgagatggacgctgcttacactcctgatcttccactgtgtaagaatgtaggtcagctaagg

SEQ ID NO: 22237 - DNA, 437 bp, Glycine max
  unsure at all n locations
ctcacgcttgtctccctaggcaggaccatcaaccatctagcaattcttcattccttgtcagcttcctttctccctttctttcttatacgtagtcttatggtgtacccctggcttctgtatttggacctctggtttgtgttctctgttaactgccccttgttcctcagcttttgtatcagtattccgtatggtggtataaaaattagaacaaagggagcataatgctgtttgtgcttattatgttgtagttatgaattgtataatggttttttttaagagtgtctattatgctaatgaaaaaggatacgttcactgcacattcaaaattcatttatgttaatcactaaatatgcattataatattcataattaaattcctatgctgtcatatagtgctcatccanagtgatggatgatgctttatttctagcttggtc

SEQ ID NO: 22238 - DNA, 385 bp, Glycine max
  unsure at all n locations
tagcttgagcatatatgtcatatgaaccaagcttgttaaaaatgtggtaaacccaacaaaaacaaaaatgaagatggttctagttgtgtggttgcgcaaaaaacctcggcgacagccaatgaaggctcacagttgcgacggtgttcacccgtgaataaagcaaagcacgccctcaggtggaaggaggtgattccaatgtaacgctcaccagagatgcatcacgcatcgtgtgcgtcaacttctcttgccgttgcgtggggtcactgtggcggtgtgttgagttggctgcccatgtggatggcgtggcattcttganaggtcgttgatgcaaaccgataagagggtggcacactggttgccaaacaagcccaatagtgggcacgag

SEQ ID NO: 22239 - DNA, 424 bp, Glycine max
tgttgaaggagaatagataaggagtttatgaagaggttgtggtcacggcagtgtttgggaaggaagaactccaagacaaaatcaaaatggggataagaagaagtccttagaggaatagcgacggcagaatgcaagtcaaagatgttggcgtggtgagagagaggatattcggccttggtgaaggcggttatgtccatagcaaaacagggcttggcagttgtgaaggccgtaccgacaattccttgtccgcggaaaaggtggtgctgagagcatgcctcctggaaccccaatagctggggctgaccatcccccacaaaacacgctctgtccacaatcgacacatagttgttctcatcccttgaatgcccacaatccacacatagttgttggacgcaaggagcccatgtcagatgccaaggcacat

SEQ ID NO: 22240 - DNA, 352 bp, Glycine max
  unsure at all n locations
ctagacatgatacatgtcaggttgggttggttcaaggataaagggataccccacattatttccatgacacaaatgcaaaaatgatgattggaaatttatgcaaactggtcatgcatgcacctacgtggtcgctcaagtgtcaaatttttatggtcatgtgatgctagggctcaggattcatttcctctaatttaaatcaacccaatgtttccaaaatatgttcttttatcaatttgtgcattcatcctagtccatttcgggcgtccggngaaattacacagcattcacccttcaggtgtagacacatttttcacaaattggttatgatcaaatgaaattcttttttcaaaga

SEQ ID NO: 22241 - DNA, 429 bp, Glycine max
  unsure at all n locations
ttgtgctttatgcttaanagccacacactgttcaatttagtgtcatgggacaccaccatgataggcgaatgtaatgataggcgcatgtaatgttgggattataccatcggggaactagaggttcatagatctttcctgggcttactattgctatttggttatcaagaaagtatggtagtaggttaatgtatgacattggaattggggcaaataggactggtttcttttctgggaaatctcttctgggttagtgtttaggttaggattgggagtagtgtttggtctaggttgtataaggggtggattttgtgggtgattttggggtggtctctgtggttgattgggagctcttggtcgaaggggtattgngcagggggagggttaatattggtcgagcagtggtattggtgtaggggatactaatacatg

SEQ ID NO: 22242 - DNA, 386 bp, Glycine max
ttgcttgagatgaggaagtgttgaagggtgaaacttcctgcttttattgttgaccacagagtggtacctggagatatgtcgcgggggtcaggagaccttggggacgtcaggtggggtgctattgcccaaaaccaagcttgaccaatcccgacccaacccgggcatagtcagttagtgagaacctgtgatgtacctaaacaggcgagctcctggcagtcaacagataaaaggaacaaagaccacatagcaaggaggcttgtggtggctggccagctgtgaactttgattgatatgtgggttatggcctctggtaatcgattaccaatggtgggtaatcgattacaaggctaagaaaatgaagacaggaggctaagatggtctctggt

SEQ ID NO: 22243 - DNA, 453 bp, Glycine max
  unsure at all n locations
tctttgagaaaacttccttgagatgttagagcttatctacacacacccctctcatgactaagctgacctccttgagaagctctcttaagaagattcctaaagaagctagagcttagctacacacacctttctaatagctaagctcacctccttgagatgagaagctagagcttagctacacaccccctataatagctaagctcacccctatgccaaaaaaacatgaaaaaaacaaaaaaagtcgttgctacaaagactactcaaaatgccccgaaatacaaggctaaaaccctatactactagaatggccaaaatacaaggcccaaacgaaggagaaacctattctaatatttacaaagataagcgggctcatacttggtccatgggcttgaaatctaccctaaagctcatgagatccctanggccttcccttggatctttgcgccaatctac

SEQ ID NO: 22244 - DNA, 384 bp, Glycine max
tagcttctatctaaatggacttaccttgaattaattcctttgatagcccttttgagccttgtttccctttccttgttttgaagctcactacaagccttaagtgaaaaaccatgatattaccatatccttaaggaattttggagctttggaattgttttgggaataagtgtggggggtttttgtttcattggacaacttgttttgttggctatgcttcatgatgtattttgggccatacttgatgtacattgtatattggttaaatgttggacatgctgaatgaaatgttgtttctcataggctaaagagttctaaaaaaaaaattcgaaaaaaagaaaaagaacagcaataaagttgagtgaataagatcttaaatggcacaag

SEQ ID NO: 22245 - DNA, 446 bp, Glycine max
gacctataaaactcagctcacatatcagcattaattttaaatatcatatctaccctaaaccaagaaaacagggcagaggcagaaaactctgcccaaaacacactcacatattacaactttccttactcaaataccccagtaacattctcttcattccgattcgttaacagttggatcgacttgaaaattttactggaggttcctagtacataagtctacattttgaccgttgggatctgctagaaaaatgtccagaacctaatatgtactacctttcccataaccagcaatgcacaagcattttctgcacatgttgagcaattctgctgcacaaatttgacagctttttgctgcacaatttggcagatttcgaaattcatcttacccacatccaattttgctcagattggatcctacaagtgctaaatcatgtataaatcatattt

SEQ ID NO: 22246 - DNA, 380 bp, Glycine max
agcttaataaatcaatctatggcttgaagcaagcctcctgccaatggtatttgaagtttcatgatgtcgtcacttcatttggctttgaaaagaacatcatggatcaatgtatataccaaaaggtcagtgggagtaagatttttttcttgtgttatacgtggatgacattttgcttgcaactaatgataagggtttgctatatgaggtgaaataatttctctcaaagaactttgatatgaaggatatgggaaatgcattttatgtcattggcattaagatccatagggaaagatctcgaggaattttgggtttgtctcaagagacttatattaacaaatttttagagagaattaacatgaaagatgttcaccaagtgtagc

SEQ ID NO: 22247 - DNA, 508 bp, Glycine max
  unsure at all n locations
cgacgagggtnccnnttttgaaccttagttagatacgtttgactacgctagacatacccgngacactctagaatactgcatcttagtgctacttcttatcttttaatcatatgtgctctatatgctgcatgagctacgttactggtgacttcgtagataactaacactcaatctcttccctgagtgtattactaaactccaggacaaccgcaatcacgcacttggaagaaacgaagaatatggcgtagcattgttgttacttgtgaacatgggacatgcacatattagtatgtctaatacgcaggaatgataaatgaaaatacttaaggtgagaggttagattgatcctttatgcttaatactaaataaagaataacgagtgaatgcgtaaggatcgaagattttaatgattaccattcaaaagctaatcatgaaacattaaacctttaacatttatcatatgcatctgaacccatgtaagatgtgactctcgattttcaccattcan

SEQ ID NO: 22248 - DNA, 380 bp, Glycine max
tatgcttgagatgaagatgtgtcgtagggtgaaacttcctgcttttattgatgaccacagagtggtacctgtagatatgtaccgggggtcaggataccttggggacgtcttgtggcgtgctattgcccacatgcacgcttgaccaatcccgacccaacccgggcatagtccgtcagagagaacctgtgatgtacctatgcatgctagctcctggcagtcaacggatacaaggaatgcacgaccaccaagcagggcggcttgtggtggctgtccagctgtgaattgtgagtaatatgtggatcgcggcctctggtaatcgactaccaacggagggtgatcgattacaaggcttataaatgaatacaggaggctatgatggt

SEQ ID NO: 22249 - DNA, 444 bp, Glycine max
  unsure at all n locations
tgcttgtggagcttctatggaggctgtatctttgagcttcaatggcgtcctttaatggtgattttccaccatggagatgcagcggaagacaaaggacaataggtgagaggaggcgccatccattaaggaataagccatggaagaatgagcttcaccaccaagatgagccttggataagaagcttggagaagatgcttcaatggaggaaaagaaagagggagagaaagagagaggggggagcacgaaattgaaggaataaaagaggtatagaagtggaactttgaagtatgtctcacaagactctcattcatcanagttacaacaagtgttacacatgcttctatntatagactangtagcttccttgagaagctgtcttgagaaagcttctttgagaaaacttccttgagaagctagagcttatctacacacacccctctcata

SEQ ID NO: 22250 - DNA, 384 bp, Glycine max
agtttttggttatgaaatctagcagaacgttaattaataatgtaactgaatacacttgcttatgttggacaggtgacaaacaagctctttcagcttagttacatatcaggagatgttgaaaagtttgcaacaaaaatgctgctttctgctgtagaccatgaagtttcagatacaggtcttttgcaatctggacatactgaacaaatagctgaggcagaggtgttgtactatttttctcgtgtcatttctctaattaatgttccttgtgataattgatgtgcagagttctaatatattggattgagttatttgattctgatcttgttgctaccgtgtcccagaataatcttgtttctcataaattctaattgactcttgtcagat

SEQ ID NO: 22251 - DNA, 273 bp, Glycine max
  unsure at all n locations
actagttgatatggatcttgagtgccaaattaacaaagaaaacgaaatcatatttgagataagatctagcctgcttcattcattctacttactacatatttataccgaatattcactatattttgactacagatctttagtacaaaatgggtgttggcgcctaaatgaattacntacatagcggagtggctacttagctgaatctgttccacgagctagcggctcctaactaccttgttgatagctttggagctcttcagacgaagacctgca

SEQ ID NO: 22252 - DNA, 306 bp, Glycine max
  unsure at all n locations
cccacacaagccgcaaggaaaaaaaaaggcacgacaaccccnnggagggttgagctcagaccanaanagcggcgcaggcccgaccacattaatacaaaaacaaggggcgacttcgcaaacaccaaggaccagaaaggggcaacgacccaggcacacggggcgcaaccaaaaaaccggccaaccgcacgcagccaaaaacgaagccacaaaacccaaaccgcgaagaccgaccaccacggccgccgacacgagaaagacgggaggaaagaccccccgccggggaagaaccaacacaagaccaccccg

SEQ ID NO: 22253 - DNA, 352 bp, Glycine max
  unsure at all n locations
ggggtcaatgatctgtgaccgtgaacccganccccgaacaaccgcttaggccgacaccttatggctttgtccttaagagggccttgggggacaatgccacatcgccgcgcctttctcaatagggctcgcgtcgatttaaaaacgcccgcagacagtcacaccggcgggcgcttgaaactaccggctgtcccgagaatagcgtggcccacagaatgggatcgacttccgaaaaaagcggccgggcttcatctgaactgagagtcttacaacacaaccgggggctgtagataaacgacggagagcaaaaggttaggcccgcggaaccccgcacccgtggtctcgcgaactctcg

SEQ ID NO: 22254 - DNA, 388 bp, Glycine max
agctttcatctcccataagctgttccacctgaaattttgagaacaattagttaatattaggactgaagaaagggatgcttactaaagatacattattagtaagataggagtaaaagaaatacaataatgatgagttaagttactaaattagaatatccaatcaatgattcgtattttcatgtctatagcatacagaatttcatagttcagccgaaatttagttcaaacagtaataaattttagttctctgtcttctgaaattttatacctagtacgtcatctttactgtattactatttgctaactagaacatgaagggtgttcttaattgtccatacggtaacaaactacatgattaagacttcttatctttaaattatagacgctc

SEQ ID NO: 22255 - DNA, 445 bp, Glycine max
  unsure at all n locations
tgggaagtaatgctganaacaatataaaaaataaattttggttngtgttgtagagtgtgtaaataaacttaacggccaagattctgagcttattcagaagtttgagtggtgaacgtaagcacacactgcaatgctaagttttggcatataatataataataacgaaagtgattaaaaattctggtaaaaatcctaagctntagaaaaggctgagaacaagagaaaagccaaagggatgaggaaaagctgatctgaaggaaattctgttctgaaacccacactcagtctctctctctaaaaaataaacactctctttctctctctagaaaatagagagaagtgaaatgagtgtgttgtttaacgagtgtcttattggaatggtaaattaccgttgcacgctccctggtggacgcggttactactctaccatgacatgctgcccatg

SEQ ID NO: 22256 - DNA, 390 bp, Glycine max
agcttggacatgtttagaagaaatgtaccaaatatcatgcttagcgtgcaaagaagggtatgtttcttactttggtctgttctgagaggtcaatttagcttcagtacctggaaacacttggtggttagattctggtgccactaataacatcagtgtttcaatgtagggttgtctaagctaccagaaaccaattgattctgaaagatggatctatgttggagatggtaaatcggtggaagtggaagctatagagcactttagattatttctatgtactagtttttatttggatttgaaagacacttttgttgtaccgtcatttagacggaatttggtttcagattcttatttggacaaattgtgttatttgtgttcatttggaaacaatgt

SEQ ID NO: 22257 - DNA, 464 bp, Glycine max
  unsure at all n locations
tggatntgcaaagaaggagtgttgtagatttcgcagttttggctaagctaaaacttttagctttaaataattttcgtcaaacttgggtctgcatgaattagctcaagctaaacaaaattacaacaagctttctgaagcttaaagagttaagtctcatattggtttaatcaattatagttctactttaatcgatttgagacaatgactgatttttcaagagtctctggtttaattgattaccaggtggatcaatcgattacttctttcttgttaaattgttcaaagccgaacaaagaacactntaattgataacttaggtcatctaatcgattacattgttcttgagtggttntctagatgttggatgaacactntaattgataacttaggatatgtgggacactctacaagttacacatgagggaacaactgatgtcaaaagatctaggataaatactctaact

SEQ ID NO: 22258 - DNA, 392 bp, Glycine max
agcttattatgagcacatgtgcatgaagcaaagcttggtcgaagccagccaccactagtaggatcatgagttcctgcagggctctcggttctagatcttgggacaatttgatgtattgaatgaaaacatggacaatacttaacttgtttcagcttcttacttacagaatcaattgaaacagattggctttccatatcattaaatttagcaagaaaacccaagtcactgccattgtgccctggaaaatgaagagttccctatattagaaaaggtatgctagtacaagacatgtattataataactacaatgcaactttggagacaagctctcaccagcacaagtgcccgagggcagccatccatgtttctgcccgtgatttgatagtgggaga

SEQ ID NO: 22259 - DNA, 433 bp, Glycine max
  unsure at all n locations
nttgctagagtggtatgtataattntgactaatcttattatgatgttcttgttcttatggaatgtttcaggtcatgtatgttgatatggaggttaatggtgtcccattaaaggttagtgctttctcacgataagtgcattttttttagtttaggttctaagtataaagaatataacttgctttcttttagctctgttgcttccatctatgactggttatgaaatggaacatgcacaaattccattctcactttttttcaggcttttgttgatagtggagctcagtctaccattatatcaaaaagttgtgctgagcgtctcgggtatgataaagttgttagactggaataggctttcaagacatttataataccatataacgattaaatttattaggtggctcatttgctcgcctatgaatntactcgtacatg

SEQ ID NO: 22260 - DNA, 396 bp, Glycine max
tgtctatgcaagcttataatatatcgatacgctcgaaattaaacattggaaactctcgggaaattcaaatagtcataacttttcacacggatgtccgattcgggcgcataatatgtcgagaggctcgaaattgaacaacgcaagctcttgagaaattagactggtataacttttcacacggaagctctcgtgaagtccatatggtcataacttttcacactgaggtccgattgatgtttataatatatcgatacactcgaaattaaacatcggaaactctgtagaaattcaaatggtcatagcgtttcacacggatgtgcgactcgggcgcatgatatgtcgagaggctcgaaattgacaaacggaagctctcgagaaattcaaatggccataact

SEQ ID NO: 22261 - DNA, 467 bp, Glycine max
tgaatcggacatccgtgtgaaaagttatgaccatttttatttctcaagagcttccgttgttcagtttcgatcctctcgacatattatgcacccgaatcggacatctgtgtgaaaagtcatgatcatttgaatttctcgagagtttgcgatgtttaatttcgagcgtatcgatatattataaccctgaatcggacctcagtctgaaaagttatgaccatttgaatttgacgagagcttccgttgttcaatttcgaatatcactgtatgtgatgcgcctaaattggacattcgagttaaatgttatgaccatttgaatttctcaagagcttccgctgttcaattctgagcgtctcgatatgtgatttgcctgaatcggacatccgtgtgaaaagtatgtccatttgaatctctcaagtgcttccgttgatcaatttcgagcgtctcgacatattatgcgcccgaatcgg

SEQ ID NO: 22262 - DNA, 380 bp, Glycine max
tttcttacactttttcactttcctcaagaatttcaacctctttctcacttagacttttcagatttgggagccaagttatcccttgcgttctagacttcaaccacttgtgatagccatcgatgacgccattgctacttcccctaagctccttatcttttcttcccactctattccatgctttacggattttctgaagtatcttcgcattagcttcattaagacctcgcgcgatgaaaggcgtgatgatttcctccgacggtgcacctctcatagggtagcctaactgtcttatggccagcatgggattataattaatacaacctctcgtccccatcaaggggacatttgggaatccctcacacgagcataacactcctacc

SEQ ID NO: 22263 - DNA, 425 bp, Glycine max
  unsure at all n locations
tcaacttatgtgcatgaattatgtgttattacgattgttgttaagaagtggagacaatatctgctcggtcaacagttcaccatttttaaccgatcattagaaccttaaggagctcttgactcaggtcattcaaaccccagagcaacatatgtatttagccagactcatgggttatgattattgcatccaatatcggtctggtaacactaatttagtggctgatgctttatctcgaagatctgagaaaacagaaggtaccatgttattattgtcggtgccatgcttggcatttttggaagaaccgaagaaacaattaactcaggaagcaactttcattgaattcagacagaacataagggcccatcccgaaacattccatggatattctgtttcanataggataattttgcatggaaattgcattt

SEQ ID NO: 22264 - DNA, 382 bp, Glycine max
ttgctttctatttcatttcatgagttctatttatgttcatcaacactttataatgattgatgccactggcttgaatttgtattcatttagaaaaactaaattgcaactttcgtatttgaaaaattaagttgcaccatttatatccatgtctgctctgaaacatattggctttcattcttacatgtgcaatgatgagtgttgcttatctaaatgatatagtttctaaacatataatgtatccatttgcaccatctagattctgttgtttagttaattgtatttatattttggtatatcctaactgacattggtttgtaattttgaccgagaccactagactacactaataatagtgtctggcattacaagtatacgtttgtcg

SEQ ID NO: 22265 - DNA, 482 bp, Glycine max
  unsure at all n locations
gcagaccgggtgatccctgtgataccatganncccttgaaccccaanactcagcggtgcaagcgctcataataacgtttatgtcgagttttacaattgtttaagaccaaaccgcgggtaaggggttcttaaacgacactagcgaaaacgagcaacagctccaaccttgatgccctcaaatgctctagatgtggttcagctaacactccagcaaccncacttacagtgcacagacctaaaatttcgacatggctgcgtctaatgtacaattccgaatggatactatacacatagtagaagagcatgctaggtgtaccttaaaaatcatgatggttctgctaccgaataccttcttggaaatagttacaaaatgaaaatttatcgatggcgatagacaatattgatgaggagttttcacaataagaatcattatgcggatcacattcaacacctagtggctgcttcacaaaaatcgaactaccn

SEQ ID NO: 22266 - DNA, 242 bp, Glycine max
  unsure at all n locations
caccaccaaaaaaaaacaaagacaaaaannnggagggatgcctgaacaaaagaccggctaacacggacccttagagagagccaggacaggaaaagagccaaaccgagagaaaaggaaaggacgcgaacgacacgccggagaaaacgcgcacaggccgacaaaaacagacaacaagcagaacaaaccgaaaacggcagcaaggaaaccaggaggcaacagggaggagacaagaagcaggaggg

SEQ ID NO: 22267 - DNA, 449 bp, Glycine max
  unsure at all n locations
cgctgaacgcctggggtcgataccttccattatcgatacttttagacccttcacagcgcagaactgagcgagatgatacacatactgatgacttgtcaacgccacctttatgggcagcaaccccgatcaccggtggaaatacgtcttcagcacgtcggcaatagcgtaccaaacacatcacgcatatgattaatgacgacgactgaatattcaacacgatgctcaacacgtcgctaacaatgcatatccgggagcgaggatcgccctgctaactcagcatctctgatcacctgagaagataccccaactcaatcggctgcttaacctattctccagcgccgagtgattttcctcacgttcggctagctcattaaactgcccatgaggatagccatcctctcacataccacgttgagcaccggtgacagtgactgagatcattctcaccn

SEQ ID NO: 22268 - DNA, 391 bp, Glycine max
agctttttggagtagaaacatgggaccaactcattttatttcaaaaaggaagtcgtatccagtcaaggtctgagagaccatacaagtttcctaacgatttctaattatgtgggccattaagtctatcatatgctgacaatagccgagaagcccatgaatctcttcgggggtggagtaggtgtctgccatcgccttggccttggctaacaagcggggaagttcttgacttccgttcaaggtaagagcaaaccggtccatccacatggttgcctcttggtgtaaagagtcgatcacccttcctctagcctctttttccgcatatacttgagcatactcatccgcgattctatgctcgtgggccgtggctagacctaactcttcttggtacttg

SEQ ID NO: 22269 - DNA, 412 bp, Glycine max
tttcggttcattctatgtacccatggtggtccacattgtgtctcgtgtatttctattctcgttgcatttacttgttatcccccctcttgacgtgcttaagccattttacttaagtcatttctcgcttaaactaaaaataaaaataaatttccaccgaacgtttgaattgcattatccgttaacttcgtttaaaaggaattccgaccgttcggtcgtgccgtagccacgttggaaatcgaaaagagatactataatagtataaataacaaaaatataccttttagtaaaataaagcggaaaatcaatcggacgctatctctttgggatatctcattcttaatcgaattgactaataactaacgtgagactaaggctaaaatcaactcgcctagtcgagctcgtccacaaaaat

SEQ ID NO: 22270 - DNA, 517 bp, Glycine max
  unsure at all n locations
aggtagagacccgttgacgcgtgttgcnccttatataccttgtacaccncnnnctntggnngntnngctgagatcatcaagcggttttatagagacattataggatttgattctcagangtatntggtccgcgcgagggatattattctctttaccaacattatttcagaaatcccaaccgtgaaaacgtgaaaatttgagatccataagtggagtctaaattccaggatgatccaacatgtaacgaatccgagatcatagttggactgaaacacattcatgtgtatgcaaaaaaataatgaatcttgagagaggaaggaagaagaaccacttcatgaggaagcgagactgtagatccaatacaaactgacctatatgcctctactcatagttacacgattctaaactcaatacttactctatcattgaatcatatcacttgataaaaaacagaactctctcttactatgtcctgactaaacagaccatcaaaacatctgtctacttctgtatcaac

SEQ ID NO: 22271 - DNA, 366 bp, Glycine max
agttattaaagagcaaggaagccaatcaaattaatatttggtaaccacgcacataggcaataagacatataaatttatataaatgttggctagctaggttttggagataataggatccataagcttgtgagacagcatacgataaatccaacatcagaaactgaatcatgtttaggaaaattgtataaaggttttaaagtgtggttgtgattcctgacattgtggaaaaatatgaccgatgatgtcaccacaagatgctgtcgcccacaaagcttgatattgtgattgaaattcctgttactgatatttttgaacaccttggtatgaattacaatttttcaagctagcccaaccaccgtccaacac

SEQ ID NO: 22272 - DNA, 365 bp, Glycine max
  unsure at all n locations
ggcgccagggtgagcggtgaaccatgaacctgaanaccgacacaaaaccagcgggattgaattttaaaaaatttgaaatatttgggaaaacggcttggggtattgatataataaaatatgacgatatttaagacaaaatctttaggatataagtaaatgaagagttatgctaatatatgtaaatgtcatggactatgtatgttaatatttagtctttgcggattacgtacataatacgcgtagaggagaaaaaatcctgatgtttttataacaaagtaataagagctataaatggaaatgctcaaaaaacctctaacattcgacttgatgcatataaaaacccaaggataatttgctgtaaggtc

SEQ ID NO: 22273 - DNA, 386 bp, Glycine max
agcttggcttcaaacttccttataataggctgccaaacactccagctcttagaagacacccctaccttgcaagtattttgttaaataatgtgattgaagtaaattttttattagatttaattaaataaatgtttagtattttgttctttcctattagtatgttgatagctaactggaataaaagaaaagctaaggtcggaccagttgatagctaactggaataaaagaaaagctaaattgcagggaataattctgatatctttttatttcatcattacccctttttatagccatttcatacaagatattttgctaagttgttataacagaattttgaaattgcataaccacacaggtatcaagtaaaacgtggaaaaagctttaag

SEQ ID NO: 22274 - DNA, 442 bp, Glycine max
  unsure at all n locations
tggagtgaaccaatataaaacaataaattatgcactactatcttccctctctttgcattggttgtgttataaatatgttaactattttcattgatctttaagacaagaaaatctttcacaaatatacttaaaactgaactcttttgtcaagattttttcaaacaaacaaatccttttttttttaaatagagctctcaactaacaatattacacttgtattccccattcatgtgcaaaattactaagtgtgaatcaccataattatgagcttactatactcatcttcccaataaaatatttaaacccaaaatcaatgcttcatattttgcttgactatttcagaaatctagatctattggattagaatctcaaaccatgctagtggggataattcttactatcccaatcctaataacttcttgtgttnttgatatgtcatacc

SEQ ID NO: 22275 - DNA, 380 bp, Glycine max
agctttcaaacccatgtaatctcctaatatctcccacactttgtgggttgggccattcttggatggccttgattttctcagggtccacttggaccccatttctaccaactacaaaacctaagaaaactatattatctacacaaaaggtacacttctctatatttgcatagaaggtgtttttcctaagaacagaaagaacttgtctgagatgtactaagtgatcatctaggctcctactatacactaaaatatcatcaaaataaacaactacaaatctacctatgaaatcccttaagacatgatgcataagcctcataaaggtgcttggtgcattagtgagccctaaaagcatcactatccattcatataaaccaaacttg

SEQ ID NO: 22276 - DNA, 669 bp, Glycine max
  unsure at all n locations
ggggaccaatgtgnnnnntttttttattcngactagctagnngcntgcantcaanatttcnncaaaanananactgngcnananantgntatnananaganagaactngagtagagtgcgccatgtctgtagattagttanagtngctttcgtctgcnnacanaatgatncgatgcgagtgcgcgctacatggtgattgactattaagaacacaatacttcatccacgtcgtgtgctatanaggaataaattactagaggggtaaagttgtggcgcactgtaaacgtattcgaatgcggcgcctatacatctggcctgatataggcgctctctctgtctgcagagcgaggtctcctgcgttgccttactcagagcatagtatgtggcgcagagagtctagctcttgttctcctgtagaatcgttcatagtgattgtctaaacaatttacctattgctctatgtatccatggcgccaatcagttggaaaatctctcgtcatgttccttaatactagtaaatcgtgtgtgttctatggtctcgtcctcaaggagtctcctcggacacgtgaaacacttcctgccaccacgtcgttcataaaaatggagaaacataacgattgatggcttctactccctcactataccgccatctaatacatgtgtccgtgg

SEQ ID NO: 22277 - DNA, 440 bp, Glycine max
  unsure at all n locations
natgaaccctgattactgctcganancaggcaannaaccgcaccgggacctcagagccacacttggccngcgattccgtgaacagaccgaccacagcacggggcacgaccaccaggccagcgccgaaagccggagaaagaggcaaccaagggaaacgagacacagctggcggcgggaagctaaagagagtaatgctgaggaacatatagactgtacacgtcatagacatgtgacataaagtcaaagcacaggaacaccaacggagacctggcaaggccgcagcagacacgaaaggccgacaccagaaacacgtgcgccagcaaggaaccgactccaaccaaatcggacacaaccttcgaatatgatacggaacgcaaacacgtcgaatagaccccacatggctgatcacgcgatgtangcaagcactaccaatatgcacg

SEQ ID NO: 22278 - DNA, 156 bp, Glycine max
agtcattgaagatcggcggcaatatcgtaaccaacatggcaaacctcaccaaatatccaccttcatttcagagttcatagcaatagaagaaacctcattaccaatactatcagctctgacaacaatttagaaaatattctctcttccatgacttcc

SEQ ID NO: 22279 - DNA, 462 bp, Glycine max
  unsure at all n locations
gactctcgnnnnnttggangcattaaatgaggtcttgcatgcacggccccgggatccttagaggcgcctgcaagctgcaagctttctaaacagatctgatctgaagtctcggattcgaaaacttacccgttgtagaaccgaaatcggctgatgaacgatgaggatcgatgaataacggacgaatacctttacggatttgcttacggaagcatctcggaagcgttacggaagcacctcggctatgatggtcttcacggaaaaatttttttcacccataacagctggaatacatagccagggggctgacggatccttagaacagcccccttcagcctttctataagactaaggaggaggaggatgccgccagctcgtccagtcgaacttagctcgactatgcgagctcngctggttaatttatatgacgctaagcgcagtttgtgtgtaacaacactaacctcn

SEQ ID NO: 22280 - DNA, 427 bp, Glycine max
caagctccaaatacggaaaattagattacaaatgcagcagagtttaagctctttattaaaatgctggtcccacaactatgttagagaggttttgtagccatactgtgacactttcttaaaagtagcccatatgagatcgatgtatagtggaaactaacacatccatagatattaatttaatagttactatatcgaatttgagactacaaaatagcataattactcaagttttcgtctttgatttctcttgtgttctcatattttaatgtgattgctaatgttaaaagtgaaattgttttcatgcatacaacttatcatttttcattaactttccaaaactaacggtcatacttaattcttattaatttcaactttcttagatgtgagattgtgtgcatatggtgatgtttacattaagaatttttta

SEQ ID NO: 22281 - DNA, 258 bp, Glycine max
tatgaaagagcatgctatgtgctcgagacaggcccctctataccatccacaacgagagctcataaaagcgaccccacagaactccgcaaaaattagggcgaccatactcttcctagcgagcactcttgacctctagttcaaaggctctcacagcagttgcattctctacccgaaaaccagcacactccttacggatgtgcgtaacggccaacaagaacttctccatggcaagatacgcccttcctaactcactttcga

SEQ ID NO: 22282 - DNA, 419 bp, Glycine max
  unsure at all n locations
cattcagatgtagtaatgaaccactaacctagtttaaaagaactaagttgccctagcccagggaatnaagggaacttaatggatgagtgtaactaaaattgtggcaaccaaaagtcacccctaacagccatcaagccagccaccatttggtctcccaaaaggctgatgcctaggttgccaattgggcccttattacaactagaactaaaccaaactaaagcccttatagttgattaacccaaaacatatttttggtcagccaactttacaaggattgggccattatttagacaaactaaacactctataactgatacaaagtggtgtcatttagtcctcctccatttgggccatgatacaactcacaaccttggacttttctccttgagacttgggcttgtattctaatagcatggaca

SEQ ID NO: 22283 - DNA, 392 bp, Glycine max
agcatatacttaagtgtttagtattagaggctaaaatatattctgtacaatgaatttaaaaaaaaaataaaagtagtgagaacactaaaaataatcaaaaggaagaacaaacataatgaatggattaagccaggacccattaaccaagatagctaattctataattaggtcaagattgcctatgtgaaatgtatccaggtactcatgactaacaaatagagggatgacgccccaccaagtgaaactagattgataatatgctcagcacaaaagctacattatctatatatgtgcaacaatatcaaaataatatcttttctaaaaataacgaaactctccaaggaacaagacaagcattattgaacgcctccacaacaacagaccaatcactt

SEQ ID NO: 22284 - DNA, 316 bp, Glycine max
tttatatatgcataaggaccgattgatatataattacaaaatgaagatgccagttaggtggtagatctattgcactaatcttactaaggagcgcatccaacgtaatgtatattggaaagaccgaaagactgagaaaggtgtgtactactaataatactatgggaatcacaacatatggtgtaaagcattcgtgacatggaggctccaatatattcgaaatagatagaagtgccagcttatctacgcgtggaatctataattaggcatttattacttgaccgtggtgaagacaggatatgagagatcattgacattg

SEQ ID NO: 22285 - DNA, 372 bp, Glycine max
  unsure at all n locations
agctcgnngtttgctgcagtctactaatatatggaattacccattgctttgcctgagaataacaattggttgaccacaacagcgctggaggcggcaacggacaatggtctttcaaataaacctgttgtacatgaacaaacattatatcatgcgctgaccgtgccaaacgaaccagcgaagtcattgcataattgttacactaactatattcaatgtacctgaacaaaatgatttccaaacacgtgaccgacacatatgatgcggtggccagaagagtcaggtggtggttgacttctaagaaggaaaaatgtcatgctttgttgttgggacaacgatacaaggattacgttataccgcgaagcaatcacatat

SEQ ID NO: 22286 - DNA, 289 bp, Glycine max
cacaaaataaagccggacgacagagcccactaaagaaataattccatctttgttcttttcttgtttcaatgcatgcaagcagatttgtgcattaaattggccagtcttttgtgcccaattgaatacatgcatggcttttggaccacactgtcaatcccttgcacttgcaggcatgtaaaactggtgcgtataattcatgtgtttgtcgctttgcagtgactggataatcgaataagaacattattaatttagttgatggcactgatcatacagttcttatttattcatg

SEQ ID NO: 22287 - DNA, 396 bp, Glycine max
actccgctggatgcaacatgggagagggaatttatcacgagttgatgcgctccatgaaaggcaggatcggatggataatagagaacacactgaagataacaggaggagaagagggaatgatggtgttcctaaacaaaaccgaattgatggtattaaactcaacattcctccatttaaaggaaagaatgatccggaggcctacttggagtgggagatgaaaatagagcatgttttctcatgcaacaactatgatgaggaccagaatgtgaatcttgccgccacggatttttccgactatgctcttgtgtggtggaacaagctaccaaacgagagagcaagaaatgaagagccaatggttgatacatggacggagatgataaatatcatgacgaagcg

SEQ ID NO: 22288 - DNA, 366 bp, Glycine max
  unsure at all n locations
agctttgtttatttggtcttcgccagtgaaaggatcgatgtgggtctgaaaaaaggcaaatttgatcatcctactaggacgactgagaaaactggggcaaataaagagggtgaggatgagggagaaacccatgctgtgactgccattcctgtacggccaagtttcccaccaaacccaacaatgtcattactcagtcaataacaaacctcctccttacccaccacccagttatccacaaaggccatccctaaatcaaccacaaagcctatctatcgcacttccaatgacgaacaccacctttggcacaaaccanaaaaacaccaacaaaaaggaattttgcagcanaaagcctgtagggttcacccc

SEQ ID NO: 22289 - DNA, 417 bp, Glycine max
tcttgttttcacgacctcgtagtgaggattaatgaaagttgcagttgattcttgcaaaaagaattttccaaggacgagaaatagttgaaggatctttcagttgatggattaagtcaaatgactcctatgtagaagcaagatgttttgatgttttgatgatgccaaaggatcaagtgcttccaagttttattcaaggcaagaatccaagaatccaagaaaatcaagatatatgatcaagttgatctctagaatcttagggagaagtttccaaattgaagaagcaaaaggtttgaccaaggaattctatcctttcaaattgagatttgctctctggtaatcgattaccagcagtttgaaaatgttttaattcaaatttttaaaacctgtaatcgattacataagtcttgtaattgatta

SEQ ID NO: 22290 - DNA, 372 bp, Glycine max
  unsure at all n locations
agcttaatggtcaagnacatggcccattcctgtgggctaagctctttaagtgagtccatgctgaattcccttttattgagcatgtgatcaattcctctaagtcaaactatttgacctggccattagtaaatttaattgttgaagcttagactatgatgatgtctatatctccaacgacacagaattaagatacttaccaccactttcttccaacaatataaggaacctcctcccactatatgaggaacttaccttaaaataataggaacctctcattactatgagtagataactagaataccccctatgaaccctaaaagggaacaacacacttttgaatgtcctaggcataagtcatcttcatattgtcat

SEQ ID NO: 22291 - DNA, 338 bp, Glycine max
  unsure at all n locations
aataataaaattaaattgaaggaaattaatatactaagattnaacgataaaaattgtgaatgcatttttagtttaattatttattaactctttttaattgaaaataatataatttgatttaatacatacatgttttgttccatgtaaatattaatattgngtgatgtttatatgattcatgaggtgtgataacatgtcgcattatgattataacattgtgattgagattgggtgaatgtaataaattgagtatgtgttgaattgtaagatacatgtgtaatgagatcttgtacgcattgagttatgagctatgaactgtacaatcacacaactttaat

SEQ ID NO: 22292 - DNA, 299 bp, Glycine max
ttagttttgtatgaggaagcgttgaaaggtgaaacttcctgctgttattgctgaccacagagtggtacctggagatatgtcacgggggccacgagaccttggggacgtcaggtggggtgctattgcccaaaaccaaacttgaccaatcccgacccatccctggcatagtcggtcagtgcgaacctgtgatgtacctaaacaggcgagctcctggctgtcaacagatacaaggaacaaagaccacagagcaacgaggcttgtggtggctggccagctgtgaattttgtgtaatatgtgga

SEQ ID NO: 22293 - DNA, 405 bp, Glycine max
gtgtaatcgattaatttcatacaagttataactctgtgtgcttaaaacaatctgtgtgatcgattacgattatgctattcatgattaaaacagaaagtgttgacttctgaaaaaattttattttcactcacacatgatgatgcatgatgcacaaatgatatgatatagactaagatgcaccattcaatataacaaccaatacaaaagccactctagatagttggacatgtaaaagacaaaacttcttcaagctcttcttcaagctgtaagattaagtcttcatgttgctcatgttgctccccctatatctaacacctccaaagtcgcactcttgtttaatagcttcacatctcatcgctgctttctctaatttccttctcataggcctaattcggtgcagctctc

SEQ ID NO: 22294 - DNA, 358 bp, Glycine max
  unsure at all n locations
caactctcccatttagaggaagcttttggagaaagaggagaccatatttttcttcttcttccaagttttaccaagttttcttgagcccttcttccatcaagcttaagtaagtgacctccattttcaactctaaacttgattttcacttcattntcttgctctattctcacttgtagtttcaaaatcttatttttcactcttgaaggttggaaacttgaatctgaactcccactcttttccttctaaattttgttgagtctacaagggataaggggagtctctccaattattgaaccatatgcttgttgttgaacttgcttgaacatgttgatttgaaattttcgagcttgctgtcatg

SEQ ID NO: 22295 - DNA, 402 bp, Glycine max
tgaaggtgcgtaccctcaccattttatatagaaatctctggtaatgtgtctactattattatgatcatctctttatccgtcattggaggtgccacttgagcttgctaggtctctccacctttgggcttattatttgaaagattcgtgcccctttttgtacatgttctgtagttgtatcctatccagagccatatcagaattgtactgatattgcctaacgatggcaaacattaggtctttccaagaatggattcaggaaggttccaagttagtttaccaggtaccccagtaagactttcttggaagaaatgtatcagcagttcctcatcttttgcgtatgcccccatcttccaacaatacacctttagatggttcttggggcaagtagtccccttgtacttg

SEQ ID NO: 22296 - DNA, 374 bp, Glycine max
agcttgaagtgagaatgtgtgttaagtcagtcttcctacttttatttgttgaccatagagtggtacctggagatatgtcgcgggagtcaggagaccttggggacgtcaggtggggtgctattgcccaaaaccaagcttgatcaatcctgacccaacccgggcatagtcagtcagtgagaacctgtgacgtacctaaacaggcgagctcctggtagtcaaccaataaaagaacaaagaccacaaagcaaggaggcttgtgtggtggctggccagctatggatcttgagtgatatctagaatatggcctctggtaatcgattaccaagggtgtgtaatcgattacaaggcttaaaaatgaagacagaaagttaata

SEQ ID NO: 22297 - DNA, 418 bp, Glycine max
agctcgaatcggacatccgtgtgaaaagttatgagcatttgtttttctcaagagcttccattgttcaatttcgagcatctcgatatattataagcctgaatcggacattcgtgtgaaaagttatgaccatttgaatttctcaagaggttccgttgttcaatttcgagcctctcgacatcttatacgcccgaatcgaacatccgtgtgaaaagttatgaccatttgaatttgcaagagtttccgatgtttaatttcgagcgtatcgatatattataagcctgaaacggacattcgtataaaaagttatgaccatttgaatttctcaagagcttccgctgttcatttcgagccttcgacatattatgcgcccgaatcggacatccgtgtgaaaagatatgaccatttgaatttcgcgaga

SEQ ID NO: 22298 - DNA, 383 bp, Glycine max
  unsure at all n locations
atcttcaacttcaattatgagttgagcaggtaaaaaagattcgtcttcaaactcttagaggtgactctgagtgtttgtttatggaggagtccgagtcaatttatgattatttttctcgagtattggccgtagtcaatcaacttaaaagaaatggtgaagatgttgatgaggtgaaggttatggaaaaaatacttcgaactttaaatccaagttttgacttcattgttaccaacattgaagaaaacaaggatttaaagaccatgactattgagcaactcatgggttccttacaagcacacgaagaanaacaaaagagaaaaattaaacaaaaggaggctacggagcaactactacaactcaacgtanaggaagcaaactatgcc

SEQ ID NO: 22299 - DNA, 388 bp, Glycine max
acatgaacacactttacatgactctggaacttattgattgcatggatgcttctaaccagattataacaagggtacaagggtgaagagagcaacagccattattcactagatttgtaccaacttgggaatcaaaataaattctgatccgtctatgtcttctatcccaaaccatttgaagaacaagcaaatatggcccattactctgctgccaaattcgtacatataccaagctttgccgcaaatccacaaataaagcacttattagtgtgtttgttgacgtttaaactgttttcctttaaaagaaagtaattttctgttttaatttgagaaaaaaaatatctgcttataaataaaacattttttaagaagtatttttctaacattactt

SEQ ID NO: 22300 - DNA, 383 bp, Glycine max
  unsure at all n locations
agctttggttaaagttttcagttctcctgagcgagctaggttacttttggaggaagcaagtagcttacctgggcaagctactatgcaacctcctcccctcatttcctatatataggcgtgagggggcgactgaggagaagggtccaacacctaaaataaagagattttgagtgaaattagtgagaagaaggagaaagaagaagaaaaaacaaggccgagacgctttcgtaacgtttctgtgattgttctccatcgttcttcgtctgttcttcgttcgttctttattcatcgaccggttagtctttatttttgaagctntgaattcattctatgcacccttaggggtccatccttgctttgatatcttcatcttcattcttcta

SEQ ID NO: 22301 - DNA, 422 bp, Glycine max
  unsure at all n locations
caagcttgcctcanagaggtccaggaaggacaaggcggccgaatgaactagtttcgccccggagttcgacagtcaccgctttaggagcattgtgcaccagcagcgcttcgaagccatcaagggatggtcgtttctccgggagcgacgcgtccagctcagggacgacgagtatactgatttccaggaggaaatagggcgccggcggtggccaccactggttacccccatggccaagttcgatccagaaatagtccttgagttttatgccaatgcttggccaacagaggagggcgtgcgtgacatgagatcctaggttaggggtcagtggatcccgttcgatgccgacgctatcagccagctcctgggatatccgatggtattggaagagggccaggaatgcgagtatggccagaggaggaacc

SEQ ID NO: 22302 - DNA, 383 bp, Glycine max
  unsure at all n locations
tagctttatnaggcatagttgttatcctccgactgatccctagagtgtatcccgtatcatcatttttagcactttataactttatgtttcttagcatttcagacttcatgcctatggttatttaggctttggtacattttaatttttgttacattacctttaaactattctgtttgaatgtttaggacttggtactttcaattattattaatctttttatggcactactatattatttgtttaggacttggaactttaaattatttgaagtcttgtgtatggtttttctactccttccttgtttttgatgttgccaaagggggagaaatagctaaaaggtaaggcgatttttttgttggaattatttgaacatatattctgaa

SEQ ID NO: 22303 - DNA, 398 bp, Glycine max
tgaaccaaaactggtgagagtgtgatcttacactgtgtgtgaacgtttatctatgagtaataatctttgcatgaatctctgaattttagaatgaaatgtataaatgaggacatgatgaaggctatgattgtgcatatacaagccttttgaacaaaaagcttaccttgaattataattgtatcctctgcaccctttatgagctgaatgatattgtcaaaaatttgaaccctgaacttaaataattatctctagataccttgtttagattctaggagagcatatggttcaaggaaaatttactccaactttgggggagtggaactaatttggatgcaaagaaagagataaagcatcagcacacacaacacataagttgtgtgttaaaaaaagaagaaaag

SEQ ID NO: 22304 - DNA, 386 bp, Glycine max
agcttcttgcgtagcctctctttgtgctcagaaaatcccaaaaacaaatccctcttattactagctattttgaattctttagttcctgaatgtacaaccttcaaattgttgctcgttcccctctttcttttttgcaaaaaagaaaatcaatatcaaagaaaacatggatgaagtcataaggatgccatgtacatgtgtatttctgaagatatagtatttatattccatcaagcatacattgactgttgattacatgtaatagactttttataacatggttgccccaagtcacaattaaaaagcacaactaccaatctttcggagtcctttggttaatttgtcttgtctccttatgtggtggggatgtgtataataatattatactt

SEQ ID NO: 22305 - DNA, 427 bp, Glycine max
  unsure at all n locations
agctcncaacttacttccaatgaacaaccttcttgttacattatttgaaatctttgaaggtaatttaattgtcaattacaaaagtacataaaggtcctcaattttggtggttgctctctctttgatgattcactcaatttggagtgcttcttagttcaatagcttttaaggtggttggcccctcgcttcttgattgaaattcttcaatggatgacatcaatcctcctttccaattccctatatggaaactcacaaacaagaaaacaaagagacaaacaataaccaaagaccaaaaaattaaatgaaagctaaaccaataaatttttaacaagaaaaattttcaaggattattcgacaattaaagcaatgaaaaggacatagaagcaagctaggactcaaagagaaacttagaatgactctagagtag

SEQ ID NO: 22306 - DNA, 351 bp, Glycine max
  unsure at all n locations
agttcntgttgtcnncaagcaaatgttggaagagggtgtaacgcctagtgctccaacttttgtgagtgttatagatgcctgtgcacaggatgcgcttatacgaagaggtaaacaggtgcatggtcaaattattaaaggtgacaaaagtggtaacttgtttaatgtgtatgtgtgtaatgctttgattgacatgtatgctaagtgtggagatatgaaatcagctgaaaatttgttcgagatggctcctatgagggatgtggtaacttggaacacattgattactgggtttgcacaaaatggccatggagaggagtcactggctgttttcacaaagatgatagaagccaaagt

SEQ ID NO: 22307 - DNA, 521 bp, Glycine max
  unsure at all n locations
accccacccctccccgccccggggaacgggcaataaactgtcgcatccncccnncccacncccggcgcgttgaccttgagcctggcataccggaccnacaccaccggccacgagagaaaagaaagagcacacttctcnacatctttgcnancatagcttagccagagacgatgctatctaaatgttagcctaggcagatcgtattctatatagattctaatcgtccagatttatgcatgctagcggatcatatccagactttattcgatttcatttacgggctctgacttataatagaactggaagctttggggctgaggatctatataacagcacccatgttctagtgtagagagtttcttctttcggagagaagaactattgtaggaattgacgaattcaatgtttatcactgcgcatgcccactattcacgtagaatacaagtcactttctgggaagcatcttttatccatacattttttaatactatgctctttgtaatctcctgtggagtactggn

SEQ ID NO: 22308 - DNA, 371 bp, Glycine max
agctttgttcctcatcgggctttgctattaaaggtcttgaacgaagctcatgtagctcgagacatctccgtagaaggctttgggggactcgtcaataacatcaccgccaacgactatctcgcctttgctgaagaagaaatccccgccgaggggagagggcataacagggctttccatgtgtcagtcaaatgcatggaccacgtcgtggccaaggtactcatcgataacggttccaatttaaacgtgatgcccaaaagcacgttggagaaatttccgtttaacgcttcccatcaaaggccaagttccatggtggtccgtgccttcaacggaagccgccgagaggtgaggggagagattgacctccctgtgca

SEQ ID NO: 22309 - DNA, 359 bp, Glycine max
  unsure at all n locations
aatcattacaaacaaaggccatacaggacttntgatggcacgagtgtcaacatgcactttattaaataatcatattggagtcgagctattttatgacacatacgtatttgcacacattacaaaatcatgtgtgaagcattctacgacacctatccatgtacatattttattgacaaacctttccatgctacatcctatatatatacacacattttttttggaaggcttgttttggtacctactcgacaatacacatattttgaaaaaaaacgtttacgctacccattcaacactntgtgaggcacttcatgctatatatattcatagtatgcanggcattttcatgctatatatataca

SEQ ID NO: 22310 - DNA, 366 bp, Glycine max
  unsure at all n locations
agctcgngtgaagaganagagagacaaagactcagaaattgttttgcaattgtctatccactaagcacagaccttgcgctaagtgctcagacttcacgttctaagccgagcttgctggcgctaagcgcacaaacccctgattggttggctgaatagttcagctaagcgcacatcactgcgcgaagccctacatcttcacgataattgaaccttaaccagtgggcttagcgtggatgatgtgctcagtgccacttcttctctggaaaatttttattggagcagcgctaagcgcgctatcctgcactaagccctagatccattctgtaacttgagtttgtaagctgggcttaatggggcaagaagtgc

SEQ ID NO: 22311 - DNA, 406 bp, Glycine max
gaaactcagcttacaaatgtttgaatccagcccatttgtacattattcaaatctagataagataagataggagctatattaaataatatctagatgagaaatgcaaatctagataagataagataagatctagatcaaataatatctagatgagaaattcaaatctagataagatatgataaagataagatatgataagatctaattttgtagaataaaatagtctgccctcttcaagtccaagctcaattctggattcaagcccaagcccaattctggattcaaacctgtcataccctaattacgtccggggacctttgcttgatgacatgcgacctttctttggtccttgagaggcgcttgacatccatcattgggcaatttgtgaaattccaggacatgccga

SEQ ID NO: 22312 - DNA, 379 bp, Glycine max
  unsure at all n locations
tctgcangcaagcttggataactnnnnnnangggagatngatgcatattttactaattatgttaaaattttgttttctcttcttctgcattgtagttaaattaaactattatgtgaaagtttggtccatctgtgtttcagccctgcttcaattactttctgggtgtagagctatcaaggtcaatggaatctatttaggaatattgtttaacttctacatgattaagttattacaaatttgcactgtttgattgtttaaagaagggatatatatggtgcttgngagcaatatcttggactggaacacgatgacagtgctccaaaaaagtcctatgcagtcaaccaggtaaatattgaggattagtttctttctttccttt

SEQ ID NO: 22313 - DNA, 414 bp, Glycine max
  unsure at all n locations
ctaagcttgtggaagccttgagcaacaaactgttgggtttttggcaagctttgaagacccagccatcgtaaaaaaaaaaggtatgatttatcattgttttgtttgcagtagtggccatgctctaacgagtgcgtaccaaagttatcttcagttgatctaacatgttttgtctgtggagcattgattcttcaagggaatgaatggtggtggacccttgaacgtagtcaagaagggaaggttgatctcgacaatacaaagcacgaaagggctaatgttgatggccgaatggtaggaagaattgtaccaatatttgacgaggtgaaggtacttgtaccaagatcatggatgttctccaacaaaacatctcaattaaacctcanaactgcgattagtgacttcagtttggttgtctaa

SEQ ID NO: 22314 - DNA, 387 bp, Glycine max
tttgcatgcaagtttgtgaggatgctttaatggaggaaaagaaagagagaaggggggagcacgaaattgaaggaataaaagagggaaagaagtggaactttgaagtgtatctcataagactttcattcatcaaagttaaaacaagtgttacacatgcttctatttatagactaggtagcttccttgagaagctttcttgagaaaacttccttgagaagcttctttgagaagctagagcttagctacacacacccctctcataactaagctcacctccttgagaagcttccttaagaagattcctaaagaagctagagctacacacctttctaatagttaagctcacctccttgagatgagaagctagagcttagctacacaccccta

SEQ ID NO: 22315 - DNA, 406 bp, Glycine max
tcttttctggaaaattccttccctgattggtgttctttatggtattatgtgttggagtttgatattggatgtgttgtgggtggatgttgtggccgatttaagggtggcctttgttgttgactgggtgttcttggttggtgggtggtgggtaatgggcaggactgacattggcagagtattgatattgcttggaagaatattgcgtcatatgattataatgggctagtggaaagttttgccacttgggaactgcaaccactacatgaggttctccctttttcttcctttcgcaattcctcccaactgtcgcattgtcatgaattacttgaatatggttatttatgttgatactagcttatttattgttgaagcatgtatgtctctgcattagtttatggatatcttg

SEQ ID NO: 22316 - DNA, 336 bp, Glycine max
  unsure at all n locations
ggaaaccaagggggatgaaaantatatnancaattnngccagncgttaatgttgaatcatagntttgctctctcatctgccctttgtctcatctctttaccttacaacttagtcaattctatcattaccctttttcaatatgcagaatcagcaacatgcaaacatatctaatccagcaaatgccaccatcaatagccacgctatggtccagaaccaacaaaatgcctcatgtcccatttctttcatcttctaaatttattgtagcttctgcagatttaaaagaagcatccggttcttcatttcaacatgaatctactgtttagttcataattcact

SEQ ID NO: 22317 - DNA, 235 bp, Glycine max
  unsure at all n locations
tggcnttgaaataaaaatntgtaggtgtngcaagggtttgtggttagtgcttatntgntgagaaanatatagaactttgntnttatatgcagcaacctgcagcaattgaccagcctgaagcttactgctgccatatttacaatagacctcctcaacctcagcagcaaaatcaaccacagcagaaccattgtgacctttcccgcgacagatacaaccctggatggacgaatcaccc

SEQ ID NO: 22318 - DNA, 392 bp, Glycine max
taatctgatcatttttatatcatttttacaggcctattcttgttaaccatggcgagattatgatgacgcttacgagcgcacggtgcctaactcatgaactaggtccagagaactagagggcacacttgatactaccatgcttccactcaatgacgttaactgttcacacacatgaacgatacaggtgaaagactgggacacattcggaaagcaaccaagagcagtagctactggtcatgggagacttaagaaccacttggaacatgtttctgaggagacatcaggggccagtactaaagcagaaggactgaagaaagacatgataaagatcattgaccttcctcaaacagacacgggaaattccttggcatagatgatatacaaggtccaca

SEQ ID NO: 22319 - DNA, 387 bp, Glycine max
agcttctatcttcattattagttatgaatacaagcatcttgctctttcctatttttttttaatcctaaattagattagagaccacgaccgtccatcaatctatttggtcaaaaattaatttcactcaagttaatagttcaatatgttttttatgctaactctttttggttctcaaacttagtaatgacttaaggaaaaaaagttgaccattgttataagatgattttaagtagccaaatttaggcaccccatccatgtgctggggtttagccttctgttccttaataaaattattttctcattaaaataaataaagtcatgtgaatgttagttaataaattgagataatatttttagagaattataatatttaatattattaatata

SEQ ID NO: 22320 - DNA, 403 bp, Glycine max
tatcagaaaccttttggagatttgaccaatccattgatcccttggtatatgattcggtctgtgtttcaataaggtatgtttagtcttatactttgtgaaatacatactccttaaatcacatttgtagtctttccatttctttccaagtgattttttgacaaattccacaccacgttccgggatcgagaacttcttctacaaaaacacaacaagctgtaacaatgtcataccatgcatgataaaaataaatgaaaattaccacattaagaaaagttatttcataccctcacaagatccaccaatttatttttttcttctttgtcaaaacatctccaatcgtctatgtttaaaggtgctaactctggatttctagctataatgcctagaaagctagcaagctttc

SEQ ID NO: 22321 - DNA, 385 bp, Glycine max
agcttggaacgtgcaattcggtggctgacaccctttctcacatccttgacccttagatttcaccatatgtcactttatccatgttgaacttcacattcttagatcagttgcaacagactttgctagctagttctaagttttgtttcttctccaacaaatttaggtaaacctcacttcccataagaatatcagcattagttgcaaactcattttttaaaggcaaaatatggttgaactctaacaacccattttagaccattttgttggaaaagttccataaaactccattgggtgggcacttgggtgtagctaagacatcccataagctgcaacaaaagttcttttggaccaacatgcgtcatgatgttaaactctatgttacaaa

SEQ ID NO: 22322 - DNA, 472 bp, Glycine max
  unsure at all n locations
cttccccatgaacccttcgatnctgtggactatcgaatactcaagctagtcttgcgcagaattagggtagaggatttagcatgtttacagaattccagagcaagtataccatagtgctaattttgagataaaagctctggaggcagcaagaggagcaattttgcggagaagcctagggttcttcaattagagagagattagtgagctatagagtgattgtgaggtgctgagaagaggagggatcccccttcttgtgtaaggaacaattattttgtactgttaatctcatttgtgttagggtttttctgtaatggctggctaaacacccttgttggggatttctaaggaacaactgatgtaattattttaatatctaattaattgtgtttgatgtgtttagtgcttctttcaatgcttaatttcgtcatgctcttagtttgatcacccatttgtgtgtacagttaggtgactt

SEQ ID NO: 22323 - DNA, 240 bp, Glycine max
  unsure at all n locations
aacgggaagaagagggcggggaaaaagcacaacaaaaccccccgccaacgagagaaagaaacaaacccagcacaggagcaaggcgccacaaaccaaacagaaaacgaacagaagggccaaaaaaaaagcaccaccaggcaaggacacgacaaaaacaggcagacacngcacacaaaagcacaagaagacaaaaggacaaagcagaacagcggaggcaccccaaaggcggaaccgcaacac

SEQ ID NO: 22324 - DNA, 410 bp, Glycine max
  unsure at all n locations
agcaattcttagagaatcggcatgatatgcgctctaaatacaatatccgngcnattttagacgcngcatgtaacttgatggctaaggtgccaatgacaagaaataaaatgattttgctcaacattcaaaatgatgtggcacaatatctcgagatgtgctacaaggatgcatctcggctttggcatattcaatttgggcatcttaattttggaggattatagtttctctccaagatagaaatagtgagaggattgtcttgcaatagtcaccttgatcaagtgtgtgaaggatgtctacttggcaagcaatttaagaaaaacatttcaaaggagtctaactcaagagctaaaaaattgttggaacttatgcatatagatgtgtgcagttctatccagccgtagtcacatgga

SEQ ID NO: 22325 - DNA, 383 bp, Glycine max
  unsure at all n locations
agtttctaatgngnncataatgattgcagaagcatacttagttctcccgaaatcctcctgcaaaaactgcagcataatgtcttgtgggtctgtggttctgaagaagcttggtaaatctcaacaaaatttctttgacgccaggtaaccaatcgatggcagtctccaaatagccatttgttatatcagtcgactctgcaagcataggcatgcaataaattgagtgcatttatgaattcatgttatatggaaaatcacgttgcaacatcagttagtataatatttatagatatcgtctttaatttcatgttaagaaattgattttgaatacacggtcaattttgagttcaacaaaaaaaaaacatcaaaaaataaattactttact

SEQ ID NO: 22326 - DNA, 376 bp, Glycine max
  unsure at all n locations
aacaggatcagtatattcattgacttagattgtatgatgaattcgttgtacgtgacatattatggagtgatcctgatgcagtcaaattaagcaatgcctataatttggtatttttgatagacaatacctacaaaacaaacaggcacatgtcaccattacttgatattgttggtgtgacaccaacaaggatgacatcatctgttgcttttacctatttggagggagaacatctgaataatgttgttagggctctacaacggtttcaaggtctttntcttagacgtgatgcagtcctttgagttattgttaccaacaaagatctaacattgatgaatgtatcgaaaaatgcattccctaaggttaccaattagttgtg

SEQ ID NO: 22327 - DNA, 378 bp, Glycine max
  unsure at all n locations
agcttgtgggatngagtttagtttcaaaatccgtgcctcctccaaagcgaacagggtggattggaagaggaaattgtcacatggaaaaggccaccatagatctgaagcgcgatggaaaggatctgaacggtcgcgttcatcaactcccctgctgcgtcaagcacgactgtcccgcctccgtttcccactatttcaaaccctaacacaaatgtgttggggaagacgagggtttaccgttacaagaggctcattttagaggcaggttactccaaggaacaacactccctcttccgcacggttactctggtacgctatgcctctctcaacacacgcatgtcagtgaatgttatctgctcctatgtatatgtgtgtgtatgc

SEQ ID NO: 22328 - DNA, 428 bp, Glycine max
  unsure at all n locations
catctaagcttcaacgatgaaacaaggctcacttacagtgactgagtttttcactcgtctacgtgtaatttgggatgagattgagaactttagacccgatcccatctgttcctgtaatatcaggtgttcctgcaacgcattcaccattatcgcgcaacggaagctcgaggatagagccatgcagttcctacgaggcctgaaggaacaatatgctaatattcgttctcatgttctcctcgtggatcccatacccgctatctccaaaatattctcctatgtagctcaacaggaaaggcaactactgggtaacaccgaaccaggtattaacttcgaacccaaagatatctccattaacgctgctaagaccgtntgcgatttctgtggacgcattggtcatgtggaaagcgcgtgttataagaagcatggag

SEQ ID NO: 22329 - DNA, 375 bp, Glycine max
agcttgcacttctcaaagaagtcaacaaggagatcagcagcacggtcaccatggtaagggtcaatgtggaagccagacttgccatgcacaatgatctcagcaggaccaccattgcatgtggcgaatgttggcaacccacaagtcatggcctcaaccactgtcaaaccaaaagcctcgtatatagccggctgcacgaaagctcccttggtgtcgcagatcacacggtacagctctccgttcctcacacggttcatctgagatgaaatccatctgaattgcccgttcaacttgtaggtctcgatcaggccgtacatcttcttcatctcggccttctcttccaagtccttcgactccttcctcctgtctccggcaaca

SEQ ID NO: 22330 - DNA, 346 bp, Glycine max
  unsure at all n locations
aactaacgctgctctaatccccgcaaaaagacgatcattccagctctaccagcgaattcttcaaatgcaagtaaccttttcccagtgtcccccacaattaattcatagtcatataacgatgccctctcagctagaatctaagattatggaaaataccaaaagcgagttagaagttgcaagaaaccaccacaaaatcgaagtcacatttcaagcatttaagtattatatatacaagtatgtaacattaacacaccttatccagcaaaggcatgttatctttctgtgctntatgtgtatgtgagaggaaagcataagctctatctggtaatatcatctacagctgcac

SEQ ID NO: 22331 - DNA, 376 bp, Glycine max
agctcccttcttgtgagtgctttgtcatcaaagcccaaggtagccaacccaatcttcttctcttcactatattcatgacatgcaaagatttggtcaactttcatctcccacacaagatatgcctctgggtcatgcttcatttgaaaattaggaattttatgcttttccccttccatattatcctctttattattattttttctctctatctcttcctctttaactccctatcccatgtcgcctaagcctcatttctccttcaaataagatgaataatgcattcttgcacaaaatggttagcacaaataatataaatatggaccttaccattcaacttagtgtttcaatcaaagtccacttgtgtctctctctctct

SEQ ID NO: 22332 - DNA, 406 bp, Glycine max
  unsure at all n locations
ttctcaaggaagcatctcaaggaggtgatcgtagctatttaggggtgtgtgtagttaggctctagcttctcaaggaagtttctcaaggaagctttcatttagttagtgacgtatgctataaatagaagcatgtgtaacacttgtcataattttcatgaatgtgaaacttatgagatgcacttcaaagttcaacttctctcccttttattctccttcaatttcatgcccccccccctctctctcattattttcctccatttaagtttcctctctaagcttcttatccaaggtactctcttggcggtgaagctcctccttccctggcttattccctagtggatggcgcctactctcacctattctcctttatcttcagctgcatctccatggntgaaaatcaccattg

SEQ ID NO: 22333 - DNA, 419 bp, Glycine max
tgggaccgtggtcccagtctgattatcattctcgacgattttagtgggaccgtggtcccagactaataatcagaccgacgatacgagtgggaccgtggtcccagactaataatcagaccgacgatacgagtgggaccgtggtcccagtctgattatcagaccgacgatacaagtggaacagtgggcccagagagaatattcaggccagttatgctttctggcctgtaacaaaggacattaagtaaagacagataaacgtagactaaaacgtggtcgcatcagggtgctggcttttcaagttccttaagaatggcctcaattttctctatacactcagttggaacacgagacctgtccaggttaagcaccattttatcgcccttatacaatactgtcgctccaggagcaaactgatgtcg

SEQ ID NO: 22334 - DNA, 377 bp, Glycine max
  unsure at all n locations
ctcgacccgggatccttagagncacctttagcatgcaagctangttctatgaacggaacaaacccggagagatgacggaaacatgaaccgcacaccaaaaagaagagcgagtccaaagacttcacagatcgaaataagggtaaattaaacaactgagttagcggcttaacttataaaaatcattggctgatgtacgaaaataatactaagtattgacatgtaagaagaagagtgctatgagtacactatagactggaactagtctctttaaccatgatgctccactgcgtctcagtgatatcttaatgatacttatgacaatacaaatttgaagcgagagtatgaagtatagttaaagatggggtagtatctggcta

SEQ ID NO: 22335 - DNA, 298 bp, Glycine max
ctactatctgtattgcgttactactaaattgacctagactattggtataaaatataaatgaccattaggtatgtgctatgttggacatatcaatatcaacctcctgtcatgttgacctacgggtctcaattcctcctttctcagcctctaactatatcacctactataagcgtatgaggccaaaactgcttattaaacatgggctacaataccatttgcatcaggaactggttaggcctgttaattctgcaatcatttccaatacagaagatatacccaaatgctaacatgatttgat

SEQ ID NO: 22336 - DNA, 378 bp, Glycine max
  unsure at all n locations
agcttgtatatgaagcttgcagaggaagttagagaaagaaagagatgaaggaagcaatgaattgcatagaatgaatcaacttacaaagttagtcatattagtttgttatatagttagttacaagagtaactaagttataactaactcattaactcttgttacatagagattagccaactaaaataactctagttacataataatctatgctaagaacacctcatttgggttttgtatttactcatggctacggttagcatgggaaaggtaaacaggtctcctatcatgaaaaaaagttgttggactatcggattttttttttttacttttgaattanaggctaggattttttttctcttttatctttgtattttctat

SEQ ID NO: 22337 - DNA, 424 bp, Glycine max
gacctataaaactcaagcttatataatcattgaaatcaagctttgtgccaatctcttattaaccaatgtgagattcttttaacacataaactaaatctttatctaactcttgatcttagtttcttgatcttgagttaaagcttgaagcaaccttggtttttgacatcatcaagacctgtatacatacattcacaatagtgttgtttggtgtttccacttccttttgtgttgcatgtgtgttgtctaatagcttttgtgattcatgagttctttgggaagcttttcgagggagtttaaggggccaggttctaaacttgtagtcgtgttggttgacaacttagagtttattgaccttttttcaacatatactgattcggccttcttatctagtgtcgagaaggggtccgatgatgactgagtgttg

SEQ ID NO: 22338 - DNA, 375 bp, Glycine max
tctagtcttcttcacatagtccgcctttgcttgaccttctttatgcttaaaaacagaaacattaggcataggcaaaagatcaagaggagttagtgggttaaaaccataaacaacttcaaaaggagaacaattagtggtgctatgaacagctctattgtaagcaaattcaacatggggtaaacaagcttcccaagtttttaagttcttcctcaaaactgtcctaagcaaagttcccaaagtcctattaacaacttccgtttgcccatcggtttgtgggtgacaagtggttgaaaataacaatttagtgcccaacttgctccacaaagtcctccaaaaatggcttaagaacttagagtccctatcactaacaatgct

SEQ ID NO: 22339 - DNA, 478 bp, Glycine max
  unsure at all n locations
natgaccccctactgagacctcagattantccctcngaccnccaangaccctatngaatactccagcttataagaacaaaattgtctaaatcttattcaaagatgcgtgagaatgctgaagcatcctctaggaaaaatcccaaggaatcgtgcattcaattaatggcgtaaagcacaccataagagcatgtgtaacgatggccctaattctcacgaatgtgaacacataagttatgcacttctaaggacacctacaggaccaattgttgatccacagaacaaagacgccagacatttctattattaaatgaatcacacaatatctgaacactaacccttatatccaaagtactctcttggcggtgaagctcctccttgcctggcttattccctagtggatggcgcctactctcacctattctgctttatcttcagctgcatatccatggttgaagatcaccattgagagacctcattn

SEQ ID NO: 22340 - DNA, 416 bp, Glycine max
  unsure at all n locations
gcaattcagctcgtacccgggatccttagagttttctgcggcatgttatttgctgcactntgaaatgccatgcaatatcttgagagctgtagctggtatatcaaatcctgatcgacttccaacaaagattaatttaattttatggtgggttaattgtggctgccaatagttggattaatttgatccatctctttatatactatctgaaatgtaggtgtgaattcaagaataaccatggtaattgggttcgtgaagtcaaacctaatttatgtcctgaaattgcattaagtgtggaaaaagccttagagacaaacaaatgaagagaaagttaattggtatttgtcattctataaataagaaactgcgagattcttttactgatcttcttgnggtgttatttctctctgtcatacaca

SEQ ID NO: 22341 - DNA, 403 bp, Glycine max
tactaccacattcattggactaaatccatttcaagattacattgttgtgtcctgagacaaaaagcatgggaaagctatattcaggaaaaaaaaattctttccaaaaaagttatagaaaaagaaaaaatcaagttccacaatatgctaatctggacatgtaagtgaagaccaatgcctagtttggattaacttgtgggaattttttaattaagaaaccctactattattatttttcaaaggcaataatgccaagttttgataaatttactggtgcttatgaacaatttggacaagggagcttctgaaaaattatagttgcataagttttttttttaggtttaattacacatttagtttctatagtttttaaacttgtcccttttagtccctatagataataagt

SEQ ID NO: 22342 - DNA, 414 bp, Glycine max
  unsure at all n locations
gcccataattgtcatcccttcttcaagaatcccttttatttctgaattgcnngnattcatatatcaaatttgttgtcttattgaacttttctgcaacacttgcccaactaagcttagtgaaatggctgtgaggtttatatccaacattcacctcttctatgcacactntcaacataatctcaatatttatatcataccatcttgctttctttcttttcacaggaacttgattgagagacatttctcanacttaatgaagcacacaaaagcataaccctaatccataacaattcaaaatttaatgagaagaaaaagacattaatgaaaaattggttaacccgtgatgttaataaaggaagacgaacagatgctgaaggatgatctgaagagaaattgaaaatggaagagagactg

SEQ ID NO: 22343 - DNA, 430 bp, Glycine max
tcaagaacatgaaatggaactcatgagactccatcaatatgaatagtttgataaaaaagaggaaaggaatagcactcagagcctcatcaacttttattcaagaagaaagtgacaaagaggacttgaatgaaatagaagaaggtgatgatttcataccttttgtgaagagattcaataagtttctgagaaacaaaagaaatcaaagaaaatcaaacatcaattcaaagaagaaaggagaagattcctccttagccccaaaatgctatgaatgcaatcaacctgagcacttgagatttgattgtcttgtccttaaaagaagaatggaaaaattcgacaagagagatttcatagaaaagacagcatacgtcacttgagaagacaatgacatggatccttcaggtgattcagaaaataaaatcataaatctggg

SEQ ID NO: 22344 - DNA, 343 bp, Glycine max
actttgccgacattttgttttttgcccctgtagagataaggagtagggccgatcatttgtgttggaatctcatatggtcactggtggagctttatctagccgatcgtacacgttgatacctcggatatacaacaagtggcacacaagcttttatatatatcacaatgtctctaacttgagaagttatattgagtctatcagactgagaagcttggatgagaactcgaacgagttgactaataagctaagtgaaactgacattctgataccaatgccagatgtcgtacaagatgtcacgacataacacttcagaacatgctagatctattctacagtttgctct

SEQ ID NO: 22345 - DNA, 365 bp, Glycine max
gtctcacgattgtcatgtgctcatgcaacaattgatatccttggctttacgagacatcctgccgatacaaagacaggttaaccatatctcgcctgcgctaattgttccatgctatatgtagcacactcattgatcctgtgaagtctgatgacctgtacaatgaggccgcagccatactgggccagttggacatgatattcacccctatgctttctttgacatcatgattaactcgatagagcatctgtgcagagaaaccaaacgatgagggcctgtttatctacagaggatgtacccggtagaacgatacatgaagagcgtaaaagggtacaccattaatctatatcgactacacacatccattg

SEQ ID NO: 22346 - DNA, 384 bp, Glycine max
agctttacacgtatcatttaagtgtatggaccatatcgtagccaaggtgctcatcgataatggttccagtttaaacgtgatgcctaagagcactttggagaaattaccattcaatgcctcccacctaaagccgagttcaatggtggttcgtgccttcgacggcacccgccgagaggttaggggacagatcgacctcccagtacagataggccctcacagatgccaagttaccttccaaataatggacattaaccccccctacagctgtctgttggggtgtccgtggatccactcagtgggagttgttccctctacacaccaccaaaagttgaaattcgtagtggaagggcatctggtcatcgtatcaggcgaggaagacatctt

SEQ ID NO: 22347 - DNA, 420 bp, Glycine max
ttgacttgagtcatcaagaaattataaatatgtgaccatggcatgagtttcattaatcatccttcaataagttttcacaacaagtttttacaaaactttctacctcgtttctcttcatctttcaatagaaatatttgattcatttctcaacttctttctaagagtttttgttcaaaactttctcttccaagaaaagttctttgctaaaaaacttgtgctattttttcttcttcattctcttctcccttttccaaaagaacgaagcactaaccgcctgaatgcttttgtgtctctcttctccctttgtcaaaagaacgaaggactaaccgcctcaattcttttgtgtctctcgtctgccttacaaaagattcaaaggactaaccgcctgagaattcttttgattcttcccttccccttaag

SEQ ID NO: 22348 - DNA, 386 bp, Glycine max
  unsure at all n locations
agctttgtgaagctcctgttttatctttacccgattttactcaaccatttgaagttgaatgtgatgctagtggagttggcattggggctgttttgatacaaaacaaaaggcctatagcttatttctcggagaaattgggaggagccagattgaactattgcacctatgacaaagagttctatgccattgtgagagctcttgatcattggaatcattatttgcgttctaatcactttatattgcattcagatcatgagtcattgaagtatatcaatgggcagcagaagttgagtccaaggcatgctaaatgggttgaatttcttcaatcttttaatttctcttcanaatacaaggatggtaagagtaatgtggtggctgatgcactt

SEQ ID NO: 22349 - DNA, 419 bp, Glycine max
tcgaccaaaatcaaatgataataactttttactcggttgtccgaatgaataccgtattatatcgagaggttcgaaattgacaacggaggctctgagaaaatccaaacgacaataactttttactcggatgtcagattgtgtcccatagtatatcgagatgctcgtaattgaaaccggatgctcgtagcaaattcaaacgacaataactttttactcggatgtccgaatgaatcccataatatatcgagacgctcgtaattgaaaacagaagctctgagcatattctaatgacaataactttttactcggatgtcagattgagtcccgtaatatatcgagacactcgtaattgaaaacagaagctctgagaaatatctaacgacaattactttttactcggatgtctgaatgaatcccgt

SEQ ID NO: 22350 - DNA, 375 bp, Glycine max
agcttgtgttataagaagcttatggtgtatttaatccaagtcagaaaataaaaaatattaattatttttcaacagtatttttctcattgaatattgttgctcctaaatattaattaattcgaaactataatataatgttttataatgaggacattttaataaatagaggggctcactaattaatttgatcttcaaacttcaagttcttgaagacgggcaacaagatcgagcaaataaagataatgttcagacaatagaatagcgccccaagcaattgcaagtaaatttggaggaaaccaacaaattcaattcatactttttttttattatttatttttatatgtataaattaaaatagttatgtacttatgttga

SEQ ID NO: 22351 - DNA, 325 bp, Glycine max
atcaagcatgaagaattcgatccaagattcgagattcaagagaagaaatcgtgaagatacaagtcgcgacttcatatagaataagttttaaaagaattcttcaaaaaccaaatagcacagttgcgttttacaaaagaacttgctcaaattttctaaagttacatagtgattactctctggtaatcaattaccagctggtagtcatcaattaccagtgaccagattggttttcaaaatgttatcaaatgatgtgtaacgttccataatgatctttagatagtgtaatcagttgcactatattaggaatcgattacgagtgaagctg

SEQ ID NO: 22352 - DNA, 376 bp, Glycine max
agcttgttatcaaagtacatgaactatgctagtagaattcattttcaggcagcaaaaagagctcttagatatgttaaaggcacaattgattttggaataagataccattatgttaaaaacttcagacttcatggttattctgatagtgattgggctggatgtgctgatgatatgagaagtacttcaggttatctttttagctttggttctggaattttctcattgtattcaaagaaacaggaagtaatagctcaatccatagcagaagcagaatatgttgttgcaactgctgcttgtaatcaagctctctagatcagaaagcttatgacagaattgcatatggaacaacaagacaatacgcaaatatttgtcgata

SEQ ID NO: 22353 - DNA, 414 bp, Glycine max
  unsure at all n locations
tccgcttattagtgaacaattccttctttaatttagtatatcttggaattcgctntattgcatccagcagaggtatgtttacctctacttttctaaatgtttcaaagatctctttctatgcctcttccatttttttgttggaaattgctcttggagggaatggaagagggatatgctgcttctctttagattcacctggatagaaattgttaggtaacttactctttaaatttttgtcatcatctttttctggagtagagtgaggttgggcaggttcattggtggatgaggaagatgctactggttgaggtccttgacactgctttcctgacctcaatgtaatgacactcacattnttgggattctggacagattgagaacgtaatctatcagaattctgggactgttgttgat

SEQ ID NO: 22354 - DNA, 372 bp, Glycine max
agcttgaatatgatgctctaatggaggaaagaaaagagaagggggagcacgaaattgaaggaataaaagagggagagaagtggaactttgaagtgtgtctcataagactcttcttcatcaaagttacaacaagtgttacacatgcttctatttatagactaggtagccttcttgaaaagctttcttgagaaaacttccttgagaagcttctttgagaaaacttccttgagaagctagagcttagctacacacacccctctcataactaagctcacctccttgagaagcatccttaagaagattcgtaaagaagctagagcttagctacacatacctctctaatagctaagctcacctccttgagatgagaag

SEQ ID NO: 22355 - DNA, 416 bp, Glycine max
  unsure at all n locations
ntacagcagattttagtaatgacccactaacctagaatttaaataacttaatgccattaacctagggaattaaaacaaactaaatggctgagtgtaactgaaattgttggcaaccaaaagtcacccccaacagccaacaagtcagccaccatttggtctcccaaaaggctgatgcctaggttgccaattgggcccttattacaacttgaactaaagcccttttagttgattaacccaaaacatatttttggtcagccaactttacaaggattgggccattatttagacaaactaaacactctaaaattgaaataaagtggtgtcatttagtcctccatttgggccatgatacaactcacaaccttggacttttctccttgaaacttgggcttgtattcaaatagtatggacagcac

SEQ ID NO: 22356 - DNA, 376 bp, Glycine max
agcttcaactattcctgtgcatttctgatggttacattatctactgacagaataacatcaccaggagctaaataaccgaacaaaggtgaggttgggggtacattcaaaacctgcctcccatgtagccaccaacatgcaataagaaagtgcatgatatacaaaatccaaacaaaatgacaagcatacaatgatttaggaaaagtaccatgggactactatcactgctgtaaaagggaaacaagatcatgggcaagaggaataatgccattccgcaagctgcacaacactagaaaatggtcgaaggtgtagaaatgcaattagcaatctagatcatttaaaaatcaaattaaaaacatacatatgcatataaatgcat

SEQ ID NO: 22357 - DNA, 180 bp, Glycine max
cctcttatatgcgtagtgatgagtgactaatctcaaagtgctttgtagtgagtgcaatgaacagccctggtctgtatcgccatgcactttcaacacccttatgtgtgctgcccaatactggcaagagtgactcgtttacttcctttaaacaccacccttggtctttcgagccactattcc

SEQ ID NO: 22358 - DNA, 377 bp, Glycine max
agcttattggattatggggcacccgtcatatgtggtactaggaggcgatcgggcgatgacacaaatcaactatcccatttccaaaagccaggcagaagctttcacaatatccaaacaattcaattccatttgtcatgaaactaccttaaacaaagaaaaacagagtggaggcataaatctttgcacaagattcattcaaattccatagagtttttcctaccctcataccttagcaaaatcctcttcgttccgattcgttaacctttggatctccttgaaaatttaactgggggttcctaatacagaaatctaaattttgaccattgggatctgctaaagaacatacaaaacacgaaatatactacctttcccgtgac

SEQ ID NO: 22359 - DNA, 420 bp, Glycine max
accgcttgagatgaggaagtgtggaagggtgagacttcctacttttatttgttgttcacagagtggtacctggagatatgtcgcgggggtcaggagaccttggggacgtcaggtggggtgctattgcccaaaaccaagcttgaccaatcctgacccaacccgggcataatcagtcagtgagaacctgtgatgtacctaaacaggcgagctcctggcagtcaaccgataaaagaacaaagaccacaaagcagggaggcttgtgtggtggctggccaactatgaatcttgagtgatatctgtgatatggcctctagtaatcgattaccaagggtgggtaatcgattacaaggcttaaaggtgaaggtaggaagctaagatggcctctggtaatcgattaccaaagggtgtaatcgattacca

SEQ ID NO: 22360 - DNA, 376 bp, Glycine max
ttctgctttatatggttacaaaccaatcaacaacaatcccttgatggcaggtgatacaacagttgaagcagtagactacaccatcaggactcgagaggaaattgcaacaattttacacaagaatctcaggaaagcacaggagaggatgcagttgtatgctaacaagaataggacaaacaaagaatttgcagtgggagattgggtatatttgaagttacatccatttaaacaacagtcaatacctaactcagcgtttcacaaattagttgcacgattttatggtccttacagaattgtagagagagtggggaaggtggcatacaagctagacttaccagctcaagctcgcatacataatgtattccacatttccttg

SEQ ID NO: 22361 - DNA, 407 bp, Glycine max
  unsure at all n locations
ntccaaatatgtagcaattgatctgcaaacaagtggtaaaacttcaaacagcttgctagaatctttgtcaaaacacaaaggtaacaatattactaaaataaattctttgaaaaatggtacaattgatattcaatcaagcaaagaaaagtcaggtagtttgtctacacggtcaaaagtcaaggaaagtgataacattaatccctcttctatcaaagatggaaaacttgaaagtatttccagcagtttcagcaacatggttgtcaatataagatctggaaattctgaatacactaatgctaagggaacttgctcacatgtttcttataagccagaaatatggattctccctcaacaagttgaagatacattgactcagctgaatctttcaattgtatgcaaatggacta

SEQ ID NO: 22362 - DNA, 373 bp, Glycine max
  unsure at all n locations
ttagctatgtgcacctgnngagcaacccctttaccatgagtagcattgctgttctcatgcgtgcaaggcaccttccttctgtcaaacttcggtctattaacgaaaaccttctagccacctataaaaatattgttatctaggcatctttccaacccctgctcatccatcacctctttgaacctaacaaaaccgaacctatggccaagtttgtttttggttcgggggatgaagacctcccatacctttccccatttctggaaaatctgccacatatcttgctccattatcccttcagggaatctagagaaatagaaggtcgtaacatcatccttatttctctatgtcatctgctnttctttcctttggtagctgt

SEQ ID NO: 22363 - DNA, 396 bp, Glycine max
  unsure at all n locations
tgttggactatattttacattactgctggaaataaataacagatacaggtaagccagcaaatcccaattgtcactatatgtttttataggttttgtttttggtagttttgttgtcttgaatgtgcatacatgtnaaactgaaattatttgttgagaacattcggttgtggcttgttattgtatatttgcttatgcttttgccattatggacaataaatagttaaggtgaatatatggtggaatcgtaacaagatttagtttgtcctttgatatgccaacagtagagaccgaatgattgatttagttctactattgagcctgcagctccaatctttgaagctggatctacttctgtgcaagctaattctcctcagtcattagattagtctccttctg

SEQ ID NO: 22364 - DNA, 382 bp, Glycine max
agcttgaaggtgtgtaccccaccatttttcatagtaaaacactggtaatgtgtctactattattgtgatcatctctttctccgtcattgtaggtgccacttgagttgccaagtctctccatctttgggcatattctttgaaagatccgtgccccctttttgcacatgttctgtagttgtatcctatccggaatcatatcaaaattgtactgatactgcctaacgaaggcaaccattaggtccttccaagaatggactcgggaaggttccaagttagtgtaccaagtagcagctactccagtaagactttcttggaagaaatgtatcaacagttcctcatcttttgcgtatgcccccatcttttgacaacacatctttagatg

SEQ ID NO: 22365 - DNA, 424 bp, Glycine max
  unsure at all n locations
ntntgaaaagacacatttcttcaaaccattttgaaaaggcacaaaggacctatatatatgtgtgtttgacttcgaaaagcaagaaagagatattctaagagaacttcattgtcaaatgctctctcaacaactcttgggcaaacacttgcaaatctattgagagttcatctaggaacatcaaattgtattatccactctaaaggagagaaatctttttgttcatctcagaaaatcaattgtaatcaatagactggttgtctcttgaattgtgagtttcctgaacacaagggaaagggattccttaggtgttcagatgttgtaaaaaggtttttacaaagttagtgaaaatctcaagtgggttgcttgaggactggacgtangcacgggaagtaaccgaaccagtataaattgagtttgcatttct

SEQ ID NO: 22366 - DNA, 335 bp, Glycine max
agtttgtcctaactgtttgtatgatctttagagatgtcactgacctaccgtcacattattgtagatgctttctctctatattctcttgctcttatatatgaaaggtgcattcacagcccgtaacttcttttgttttctattattaagaacaaaatttgtgatgaattctttgacccttgctaccttaaataatggctaaaattaagatgatgttattctttccctttttgtatattgctattttgatatttataacagaaagaacaggccaaagttaacatggagggcgctcttgatgtcattattttgcggcatatatgggtatggataaactc

SEQ ID NO: 22367 - DNA, 401 bp, Glycine max
  unsure at all n locations
ttggactccttgcanagcagttccgtaaggtgtcttttatataccatttctcactagtctctttatttgcttcttatttgcttcttattcttttaataaacaagagttataataatatttgtacgtaacttattcataaccgttatccttgctgaatcatattctatcaacattatagtgtcattttgagtttgccattcacgatattgggaattggatgcaattttggttctagaattttttttatcctagcatttatctctttttttttcaatgaaaatcattgtaattttgaagtctgtcttgagaacaaatcaaattggagattaaaaaaagtcctttttttgtgttataggtattggaattattttttacctatgaattatggactaaatatgtat

SEQ ID NO: 22368 - DNA, 427 bp, Glycine max
agctctctaatccatataaaccataccatgctcttaacatgtaatattgtcttcagccatcatttggagagctagtgcaaatctttctctatttactaaatcatctatgtaacatctgtaacaatttacggacgtataatgctgccacttaacatgacatctgatgatgaaccaatttacgtaaatgctaagcagtaccatggaatcattagacgtcggcagtcccgtgccaaagctgtacttgatcacaaattgactaaacgtcgcaaggtatgattcctcatatgggggtatcccacatattttttcactcatattaatgaacattatagtctcagcttcactggccttgaaaaaaagtaggtatgatagggtggtctggcctaactcttgtagaaagtgatagattatctctttcaagcaacgc

SEQ ID NO: 22369 - DNA, 385 bp, Glycine max
  unsure at all n locations
agcttttgagggcacctcaaattctgangncatacgctaaactggatcccatatctacttgataattcaatggtagccataaccctagccaaggttcatcaacctccatttcttcgagaatacgactcgaacgcaacgtgtgcttgtcacggagaagccccggggcgttccattgagcatggtagggctctgaagcgtaaggtgcaaggtctaattgatgcgggctggctgaaatttgaggagaattgcgtgtaaatcctgacattgacaagagatgccacacatggggcaattttgacagttgttgttatgtgtccctaatgactcatcagggtttccaagtttatgccattattgtaaaccacagctacaatgttaaatgaaa

SEQ ID NO: 22370 - DNA, 418 bp, Glycine max
  unsure at all n locations
ctaagctcggtgcgttgcgcgtactcgagggaccatgaggtttntgctgtttcttgacccactcgggtgttgaagagacggcatgggcatctccttctttcctttttgcccctgtcgccccgattcttttggcattcacgtttgtggaggaaacgtaatcaaactttcctctcttcaatccaacctcgattctttccccggcaaacaccagatccgcaaagctggacggcatgtaacccactagcttctcatagtagaacactggcagagtgtctaccatcatggtgatcatctctctctcaaccatgggaggagctacttgtgccgccaaatcccttcatcgctgcgcatattctttaaaggtttcaccctctatcttgaacatattctgcaattgagtaccgtcaagagccatatc

SEQ ID NO: 22371 - DNA, 274 bp, Glycine max
  unsure at all n locations
gcacgcaagctcattggaataaggcgcgcccgngaaggaggaactacgaggccaacagaccatgacccaaatcaactatgccaatgacacaagccaagcagaagcgttcacaatatccaaacaaatcaatttcatccgcacagacactaccctaaactaatatgaacagagtggaggcccaaaaccatgcacaagatatattccacatccatacagtgtccactaccctcatacatgaacaaaaatctctccggtgcgacacgaataccaccgg

SEQ ID NO: 22372 - DNA, 673 bp, Glycine max
  unsure at all n locations
ggggaggggagcnnnnnnnnnatttgatnaccccanatttgatnnnccgatcacgctangnnnttcatnncancannatangngcnnnanngnagnntcgnagcnccangtatntcanggnngngaggangagtatacngnantngtttttgtatnnannagagatananaatanggngnngnagtatcanacaagaagnnngaganntgaggggnngaagatctntaggaggnnatggcgagacncccagagaactaacgntcgtgaggatccgtctacaccacgtgatgagcgatntcncgacntcaagtacgcgaagcaactcgttgatgtgtagttactttactcttcgcgacgatgctttctgataaggcgtccatagcccgagngtattcgctttcacaaagagcacattctgtatggcgtttcaccgctctgattacgcactactatcgacatgggactactacgacagtaacgcactagttgttggtgttctcgcaaagacctatggaagctccgaatgaccgtgatgtgcatctgctacgtttatcttctatgagcaataaggcgagtggacatttacgacattcgttcagtaggtgatcgcaaagacttcaaagaacagtatctgagatgactattgctctaaaggtgtaatctatacgaccg

SEQ ID NO: 22373 - DNA, 493 bp, Glycine max
  unsure at all n locations
cgcnnaacggagtnnnncattgaaccccatagcatatcctcgacactatcagaaacccacggaatactcaagctaaaggtcgctccttccactacgcgcgttttaacaattgtgtcacgaacngagtccggcgggctcgacccacatcccgttgcatcattcaagtgagggttttatggagatgacaactcacctcacctggtcgccctaggaagaacatataatggggtgaccaccatgcccaatagccctctgggcaatgatatgatgaaggcaggtgataaggaagttcaagacgttgatgctcacgacccttgtcccactgaacaggctaggctaatggggtaagcccctaacacctgccttacccatcctgcacaacctttttgaaataaaagattagctctttgtagaatcaatgactattactaaaaaaaggacccgctacaaataaagattcgactattatgaaactcacggtattatctggatc

SEQ ID NO: 22374 - DNA, 374 bp, Glycine max
agctattttattgataggcccaccagtaattgctgcaccagctagtaaataactggcacttgaagcatcaccttcaacaaaagcattgccaggagacctaataggaaacatgagtcttaatttcattgcattttggatactaaaagtgatgtaacactaaaacatagaaacctacttgtacttttgacctccatggaccaagaacctatcccaattaccactgtgttccacagaaactccaaaacgctccatcaacttcagagtcatttcaacatatggaacagaaatcagtttatcaacaatctcaatttccacatcaccaagagctaaaggagctgccataagcaaagcagtcaagtattgactgctaactg

SEQ ID NO: 22375 - DNA, 364 bp, Glycine max
  unsure at all n locations
ctaagctgttatgtcctcagggcttgagctttgacttctanctaantgattcttaaaaaaatcatatctttggcacttgggtatatgccttacttgggagcagccacatttttctttaaaatatgtttttctattttaaagccttataatagcatgaaattgtcagaaaatgacaatttgtggtggctttaaaaatcttaagagatcaattacaaatattttacaagatcaacgacacgattactatttttttagtttagagacctaaataaaaactcctaaatagttgagggaattaaattaaccttgaatgaacataaacaaacaacttttcacatggatatgtaaataaaaacaccaatat

SEQ ID NO: 22376 - DNA, 337 bp, Glycine max
  unsure at all n locations
cagggcccatgagcttgagcctgatacgcccnaaaaacncgcggaccagaaagccccgattttaaaattactgccctttggggaccaggggacttcagctcagctccccgaaagagccaaacgaacgggtacaagagagaggaatccgcgagctacagaggacagagcacattcacgaacggggccgcctccggaccagaggaatacaaaacaagcggcacgcaccggggacgagacagatggggtaggaaagccaacgggaaaacgtgcaatgtacacgcagggagggaggacggaaccgagcaaacgacagtacaggggggatccatgggagagg

SEQ ID NO: 22377 - DNA, 389 bp, Glycine max
tttgcatgcaagtttgttttgtgaggaggtgaatagcagtaaggaaatgcatctattcatcaatgtaggtcattcaaatgaaaggtctgtgggtagaaaggattgaggttgaggctgctcccacgtatgatatctaaaatggactagcataacatattcctgtgtcagagctacttatgtaaaggattattttacaaaactcaaatggtaaaaacaacattcagggggcaaatagacaaagctgatacaactggtatccacaaatagaagaattcacacaacagtacacagagacgcagagagagaaaaaggaaccagctattatctattgattactgaaaatagtgtctcagcactctcctctacaatgagtttccccaataaatacc

SEQ ID NO: 22378 - DNA, 407 bp, Glycine max
gcccttctgatccgaagaggctgacttttgcggatttcgtcgagagcttatttgacctcatcaacgtgctccatcatctcttcgaactcctgcgcctccatcagcgtccacgtagtcggaatccccttcggcggcgctcgcttcgccctcttcgactcccttgctacgcctgcgccggagccgtatccgaagtcgccgatctccgaatcgaataatgaccaatgctgcgaggaccattcctgggatgagaacgctaatccgcagaaagggtcgtcaatctcctgagataacgaatccctgactggcttcgaaacgtcgtcgattatagaggacgatcccgattacgtacccgagaggggtcctttgctgctggcgtaggcgcggacgatcattttacatggagatcg

SEQ ID NO: 22379 - DNA, 367 bp, Glycine max
agctaccctcctgtgttccccttttttggcttcccaagaagtaagaggaatgacttgactttctacattgaaagaaatgactggccaaagaactcaatttttcttcaaaagcataccccacttgatagattgtgaaggaaattacaagatcagaaacagtcaaagaagtttacctactaaagttacaataatgtgaaaaataaaaaaaatctcctcaattaccttcagatcctaagcaaaaaccaaaaagcaggtgttccaaacataacaattatcatcaagaagaaaacaaaactggtttggaagcacattccagacccgcaatgttgagaagcattcactacgaagaaaaacaaaaactcaaaga

SEQ ID NO: 22380 - DNA, 406 bp, Glycine max
tgggtctagacatgtctatagcattctcatgagctagtttatataaggagttagaaattttgtttgtctctctataaatatgagaaccttgttggattaaaataaaattggaaaataaataaagaactttaacctatatactatgtgatcaatctataaaatgataatcataacatttcaattatataatcattaagaaataagggtggacatgggttaggttgctcgggtttaaaaaatatttagatttaaccaaattaatattaatcagaaaaaaattatatagaattaaacaaacaaattatatattatagaatcatacaacataaaaaagtatattttttctaaaatggtataggcttatgttggtttgggtctccgtacctagatctgataattgaattga

SEQ ID NO: 22381 - DNA, 379 bp, Glycine max
  unsure at all n locations
taagagcaatntctttttttnttttatcattnnctttgtgtngatnnaatctcaacagttccatttcgtattcctgtaactttccaaatagtgtagcaagagacatgttagttaaatctcgtgactcagtaatggttgttaccttaggttgccattctctacttaaacatcttaatactttatttatgatatcttcatttggaaaaattttccctaaagatgcaagatgatttattatatgtgtaaacctcttttgcatgtcttgtatactttcatttgaattcattctaaataattcatacttatgagttaatggatttatcctagatattttcacatctgttgtgccctcatgtgttacttgtagggtatcccacat

SEQ ID NO: 22382 - DNA, 386 bp, Glycine max
  unsure at all n locations
agcttgttatactattatgtattatgatatgaacaaatatgttaatgttatctcattaagagataatatatataattgaactattttttttgttggaaaaataaactattttaggaaaacaaaatataacatatggtctcaaatatactatgttgtacaatagtttttcttatgtgaaggtctcattgaaaaataaatagacttcagttgaaaataactataaagtcagaaacaatcattattgaataatgtttaattgtattagatcaagaacaattgcttaaatatgcttaatttgtttaaaaaatttcaaaatttgagtctaatttgttatttgttataagttntatttttaggttaaatttaatctatctgaaagtctaact

SEQ ID NO: 22383 - DNA, 426 bp, Glycine max
  unsure at all n locations
ctccaaaaagaattgcaagagtcatgttagcgagatctttcgattatgcaatngtagttacctttggttgtcattgcctgcttaaacatctcaacactttgttaatgaaatcttcattatgaaatattttttctaatgatgcaagatgattaactatatgtgtaaatctcttttggatatcttgtatggtctcattttgattcattctaaacagttcatatttatgtgtgagagtatttattctagatctcttgacatcaattatgccttcatgggttacttgtagtgtatcccacatttcttttgcatttttacaatttgaaactctaaaatattcatccatgcctaatgcagaggtaattatatttttgacctttanattatattgaacccttcttctttcatcttcatcccattgttctctag

SEQ ID NO: 22384 - DNA, 386 bp, Glycine max
agcttgtatttgaatgttgatgtttattcacaaaaccaaaatcgaaattcatcttttgaagcaataatacagccaacagaatccagctaatggcataacatgcaggacggctgttaaataccattatttgcccactctgaaccagagagaactcctgctttgattttttgtatggattttgagatacacggggagagacacctctttgtgcagcctcagttgatgccatagtcacaacatgtgcagcttcgtcatcattagcatcaaacattgactttgggtttctcttattaggcaaaacataattttccctatcatcaggcttagagtcgttaactgggaaacgaggcgtccttttcgcaactggccaaggtgggatacctgat

SEQ ID NO: 22385 - DNA, 425 bp, Glycine max
tctaaacacgttaaggattgtgagtacttattcaaatttttatctattagtgcatgaggtgcacaagtgctagttgaaagttcaatgaggaaacttcttgatttgttttattcttatctcctgtaagtgttttgttaagatataggaacataagcatggttagaacacctccaagtgacagtggagacttatttttgaaggatactctacgcattcccgcaatgtcattctatttcaaatagtagtatatgtttccctactccctgttgctcaacatgattttatagcttttaagtatctttaatatagttttcaatctcagtttcttgtatcccttccttgacttgctttaatcagtgctatcaggcaccgttgttgacaaagtagttgctgaactggagtcatgcgggttccaatgtttcatt

SEQ ID NO: 22386 - DNA, 333 bp, Glycine max
gcctttgcaggataacgcaaggccttaacgcacctattcaagcgccatattgcgttctgaaaacctacattattccaataacagcaaatggagagcaacacgatatccataacaaggaaaagcactggacttgatctcaaggtcaaaaatctgaacaatcagcaatgcgtgaggagtattgcagtgagagagagagacctcgtttccaatggagtgtgtgcaatacacgtgggcacggcgggaagtatgtgagagtgaggaaagaagagtctcagcaaccaccaaaacaacaagcaaatatgattaacataacattgatgaagagcatttatt

SEQ ID NO: 22387 - DNA, 398 bp, Glycine max
atgagattctttcttggcattgtatttttgcagattccagaagggattttcttgtgtcaaagaaaatatgccactgatatcttgaagaagtttgcaatgtctgagagcaaacatgtgaaaagtccaattgttccaggttttaaaattaatagagatgttgatggtgcagctgtggatgacacttatttcaagcaaattgttggaagcttaatgtatcttacaactacaaggccagatataatgtatagtgtgagcttaattagcagatataggtcaaaaccaatagagttgcatttacaagctgctaaaagaatattaaggtatttaaacggaaccactagctacgggatattctacaagaagggaggggcagaagacttgtttgctttcacggattc

SEQ ID NO: 22388 - DNA, 385 bp, Glycine max
agcttgcaacatcagttacatgaaaaactgtctttgcagagacagagagggaaagatgtgaaaacacagttacctaggggaattttgcggtctgctccgagtcaactacactagtttggcactaggtttgatgacatgtcaacgagttacttacagaaatgatccaacaattgaatcagctcggctaagggtctggtttccgattcaaccagccgagccgagccgagtttaataacactgattgggagggttccttacttagtattgaaaatcttgctttcaatttgatagtaggtagtaaagttcttcttcatggagtatgtctcattaatattctcccgcatttcacaaatggaggtagaaaacatacaattacagcttattt

SEQ ID NO: 22389 - DNA, 424 bp, Glycine max
tgtcgggttcaacttcaattaagtgctcggggcatcctatggactgtgcgaaaaggctcaggtcatcaaatactacgcatcttttaaagcacaaagcgaggatcagaacctcaaccctacgttcttttaaaagactgcgatgggaaaattacagaggacaggaatccctgggggaaaccaagaagaacacacaaaaataaaaacatgcagcgacttccttaattgccccagatctcaagcatagtatcgcttgacaacgtcagagtttacgggtgaaggtagctccttgtcatccatgttggcgagcaccagggcccctccggagaaagccctttttacaacgaaaggcccttcgtagttcgggacccactttcctttgttgtctttcagagcttgggagactttcttcagcaccaagtcccct

SEQ ID NO: 22390 - DNA, 387 bp, Glycine max
  unsure at all n locations
agtatatggntaaaagctttttttttttcctcctgttatgttatgtttaaacacccagtgcactaaaatatgatttttgcgggccgagtaattggaaccacaaccttggcccaaaactaactgtatctatgaattaggggagtgcatttagcaactgcaatgttgtgaaggcttttttgagttttcttccactgcaatctgaaaacatttttcatcttgcaacgcttctctttatctcgagctcttctccacctttattttgcaatgcattagccgcattctttatgtaggagaatgtctatggagaaaatgagattacaataatgaaaaataacagttttatttgtgcctcagtacactcacaacagtaaaagagccactagctag

SEQ ID NO: 22391 - DNA, 423 bp, Glycine max
tcaggcttctgacctagccttcctcatgaaataaagtatataatatttaactgttgccggtcaccttgaaaataacagagattttcttctctttgtcctttcaaatacctgtttccaaatattaaaaccagtagaaatgtagaatccagattttttttttttggtgacgtagaatccagattataatcaaactgtgtttgtagcctgctgtaaaacttgcttggagtagccacattcaaaatagaagtgatcatttgtttcaactgctccatcacgggttacatgttgaatccatcaggcatgtaactgaactgtgggattgtttttgatgacttgaatatggttttttatgttgatacaagtttatttattgttgaagcatgtatgtctctgcattagtttacgtatatcttgtatgattac

SEQ ID NO: 22392 - DNA, 372 bp, Glycine max
  unsure at all n locations
agtttcttattctcagctgatgaagatgaattcgtggctacttcatgcactcctctaatgacaatagcatcatttctggcactaaattgctgggagttggaagccatcttctcaattaaatttttggctttagcaggggtcatgtctccaagggctccaccactggcagcatctatcatacttctctccatgttactgagtccttcataaaaatattggaggagaagctgctcagaaatctggtggtgaaggcaactggcacatagtttttaaatctctcccaatattcatattggctctctccactgagttgcctaatgcctganatatcatttctaatggccgtggtcctggaagcagggaaaatttttt

SEQ ID NO: 22393 - DNA, 397 bp, Glycine max
ggacctatcaatctcagctagagatgcccgagtcttcatcccttgagatgatttgaagtattggccatcagaattgccattccttggattatagggttgaaccgagctcatgctattacaataaggttcatcaagtcaggttgaaatatggaagtaaccattctgcaaacttggggcaaaagatgaatcgagtcacatcactgcttggtctactgcccaacatatttatgattatcgatgtccttgttacttacagtttcaccttgacaaagatgtcatggaccatgttgaaaatctaaattgattcaaccccatatcctgcgtaaaaattctcaatactattacatcattcgcatgcatccatgcttttcattggtggcattgatcatatgattct

SEQ ID NO: 22394 - DNA, 373 bp, Glycine max
agcttccttagaggccaacttcaggctcacgaattgcaagtccaccctcgcaaagcctccaccctacaccctcgcaaatctggttgtcgatgtagaggcatccatcggaggaagagacagtggtgcacagtgtcagggttgagccaacagaggaggtggaaggaccgacttgatgaggaggaagtcattgttggagtcctagatttggagggagagagaaagaggggaaggcgaaccacttgtcatcgaggttgtcatggaggtgagaggagggggcaagggcaagaagggttcggagtagaaatagagactgcgaagggtagagaaagagaaggaagagaggctaggatcgttggatttgagagagagagag

SEQ ID NO: 22395 - DNA, 415 bp, Glycine max
  unsure at all n locations
gacactatagacaactcccgcttggacgaatccgaacctaagttnctgatgtgtgtccataaaaaaccagacactatcctacttttgcgttcccttgctgtctctctctctctctctctctctctctctaatccaacgatcctagcctatcttccttcgctctctctaccgttcaccgcctctatatctactcggaacccttcatgccctagcgctacctcctctcacctccatgacaacctcgatgacaagttgtacgacttgccctctttctttctgcctccaaatctaagactccgacaatgacttcctcctcatcaagtcgggccttccacctcctctattggctcaaccctgacactgtgcaccactgtctcttgcatcgatggatgcctctacatcgacgaccagattt

SEQ ID NO: 22396 - DNA, 230 bp, Glycine max
gggtatgatgtttaattaagacctctagagcctcaaaacttgttcctggcccgaaagattatcatttgaggtaatataactactgaccataaacttatactacgagaaataagtgataccaccttcaaaagtcgaatctgatgttggaaagcaaatacatccccaatagaatcgtccgttaccacagcctaccagaacaatatatggaatgtatagcgataggatcatga

SEQ ID NO: 22397 - DNA, 196 bp, Glycine max
tacctcgtgcttcatagccttcaaaaatgcctcttaacgctcccaaaaatatcattgggtgtgaactccactcaactagcacactgctggagcaagaatgttcactttctagccatcacgatgggataacacacaaattcattgcgaggatccattatgaggagctcattttgaagaacctcatggatgaacacta

SEQ ID NO: 22398 - DNA, 375 bp, Glycine max
agcttatatgaacaaaattgcctcaatcatttccaaatatgcatgtgaattaccaagaatcaacaagaatcaagccaaggctattgtgcaagcaatcaatggggcaaaacacaccaaatgattatgatgatggatggctcaaattctcacaaaggtaaactcatcactttcaaattgagctttcaaaactatcatgacatgtagaggagaatcaaggatttcaagtcacaaaatgtcaagaacttttattttcaaaacaattacccatttcttgaacatatcctataattcaaagaaaaacatgcaaagtcgttcatgcacacaaaattgacccaaaatattaaactaaaaatccgacgaaactaacaacattaa

SEQ ID NO: 22399 - DNA, 414 bp, Glycine max
tctaaatctcagatagaagagagataattatttatgtttaattctaaatcccccataaccagctttccactaatttcctacttatcatatgaagtagaagatagttaaacattttacgtttcacaaatattaaattaaatgcatcttttaaatattttgttacaagtataaggaggattaatatgatattgttttagataatttatacacctcctagtgaagaaaatttaagtaccttgatttctattttctttattctattttcatagacggcgttgtacttatggctggagggaaattgtgatggtgaaatgtggaagagggagtgtggtttaaaattaagattcttttcgcatataattacatagagaaagttatgatatatcatgataaaatataattatattttaaact

SEQ ID NO: 22400 - DNA, 380 bp, Glycine max
  unsure at all n locations
agcttggacgatgtattcgatgtagatccgcgtgatgacactgctaatagaggcccaaagcctattgaagaacttttcaaactataactcagacccaaaccggggtagtatacacagctcagccgacacctcaccagccatgaacatagacacatagtcgataccttacataggaacacaaacctatttgcatggcagacatctgacatatcgggtatccaccccagcattatatgccacaagctcgccatctgtctccaggccaaattagtgtcataggagaagaggaagatgggagaagaaagacgtagattggtcagagaggaagtagataagctccttatagccaattntatccgagaagttaggtactccacttg

SEQ ID NO: 22401 - DNA, 409 bp, Glycine max
ttagacttatatctattctcaatatactacttttaatgtttcctagcatttatgtaggtttttgatttctggtgtctatagattttgtgtgaatgaatggtaaagcttaaaattttgagactagctttacatagcataataacaagctccacacttcaagcatgtacacaattcaacttatgagtagtttagttgacggtgtctagggtgcaaaagtgaaactactttcgcaccctatgaaagtttgtgcaaaaaaaaaaaagcaattggaaccgtccgattagttttaaccatatcgaatagtggagatgtgttcattgctaccggtagtaaatggatccctcgagttctatgtcagctttcctcgaaccgcgattgaaggtatggagccctcgagtttctgttctgc

SEQ ID NO: 22402 - DNA, 351 bp, Glycine max
tattttgatgagatatgcagcttcattcgggcaatgataaatcatgtgtttatgactttatgcatgtattcataagtaaagaatctagttgaatgcaatttcctcttatagcttattagttgtgagaattagtcccttgctctgattagtttggactactggatatactggttcttttaccctgcatgttgtagcaacatgcaaagctctatctggtagaaagcctctaatggctatgacacttttctatatatttgtattaaatctttttagggttattgtggtggcagaggaggcctacggtcattaattaagtctactctttaactataattagtggttcttggggga

SEQ ID NO: 22403 - DNA, 390 bp, Glycine max
  unsure at all n locations
agctcggccccgggatgcttagagtttatcgcagcaatatgtctttgggcncgaaacttttctgagtgatttcaatatggagcagaatgatcgcccaaatatgtacgttgacaacaaagctttcatagctatttcccataatcctgtctttcatgggaaaactaagcattctaatatcaagttgtcctttgttagagaagtacacaaaagtggacttgttaatcttgtctactgcaaaacagataaccatgctgcagatctgttaccaagccattgccagctatcaagtttgagattctcatacagaagttaggacattggaaatcttaaagcactgagaagtgttaagaaactgcttttggactgcacgtggatcattattgtccacct

SEQ ID NO: 22404 - DNA, 311 bp, Glycine max
gacctatagaatactacagcttgagggatcatatttttccactatttacactgctctttttattgcactacatatgtgagcccactcacgggtaaaggttaagtttatcataatagcggttataaagaacatgtgtagggatccttagaggattaacttgcgatcaattttgaaatgttcattgaattataactcttctcttatgattctaaatatgatattattgtgtttgatataccaattgatgtcctgatgtgaattagataattcaattgagtgatctcggtagttctgcattttgacctatgatt

SEQ ID NO: 22405 - DNA, 388 bp, Glycine max
agctttagctctcagcttaaactcccttcacaaaatctgatttcaggcttaaataggtggccttgttcgtgctcgtgcgcttagcgcaattctgaaccgcttagcacacattagtgaatttcgacttagcgcgtgcttttctcgctcaacggatggactgaagcggtgcgcttagtgagatgaagtggtgggcgcagcgaacctgtacaactcatccttttccagattcttcctcgcgcttagccaatgagtgttgcgcttagcggatgctagctaagccagcagattggcttagcgagaaggtgaaaaatagcacttttcagagttgcataattaacctgaaattgagagaaaatgattattaaacacacaaaatggaagtactaag

SEQ ID NO: 22406 - DNA, 425 bp, Glycine max
  unsure at all n locations
ntgaaaaattcggctttggtcagagtctctgaagatgtgttagttacttgtgttacaagcatttacgtttagttttatgagaaatgcagtttcattcgggcaatgataaattatgtgtttatgactttatgcatgtattcataagtaaagaatctagtttaatgcaatttcctcttatagcttattagttgtgtgaattagtccctttttctgattagtttggacttttggatatagtggttcttttaccctgcatgttgtagcaacatgcaaagctctatttggttgaaaacttctaatggttatgacacttttttatttattgttattaaatttttttagggttattgtggtggcagaggaggcctatggtcattaattaagtttactttttaactntaattagtgtttcttgggggtgagac

SEQ ID NO: 22407 - DNA, 304 bp, Glycine max
agctttaaccaaaacctgtgagagtgtgatcttaaactgtgatcgaacgacttgctatgagtaataatctttgcatcaatctcttaattttagaatgaaatgtataaatgaggacatgatggaggccatgattgtgcatacacaagccttttgaccaaaaagcttaccttgaatgataactgtaccatttgcaccctttgtgagctgaatgatgttgtcaataattgaaccctgaacctaaatgattatctccagataccttgcttagattctaggagagcatatggttcaaggcaaattcacc

SEQ ID NO: 22408 - DNA, 421 bp, Glycine max
  unsure at all n locations
tcggtgaatctttggacaatgttgggctgagtaggtatgccattaatggccattgaacttgcaaatttgtagctcctttttcatttcagcccaacaatagtttggttcgcctgngccaaagtgtggtagggtgaagcattaagctcgagggttatttcgaaccagctagaattgtgttctggctgggccagagcttgacagaaaggagaattctctccaggggttttggcctgaccaaagttgtgttttagttgggctagactgtgacaaaatagagcattaaactccaagagtgttttagcccatcaagaggttgtgtgattgggacataaaagtgatagaagggttttagccagactagaatttgttcaattgggccaaaaatgtgatagaatgggtaacttaagtttacaggagttat

SEQ ID NO: 22409 - DNA, 388 bp, Glycine max
agctttgcctttagggcttgtacctcatcactttcttccgaagctttaacctcatcgtctctcacagtctttagatttgggagccaatccaatccttgtgttcggactctcagccacttatgatagccgccgatgatcccattactgcttcccctaagctctctgtcctttcttcacgccgcatcccatgccttgcgaactcctttgagtaccctcgcgttgtggtcaccgaaaccccgtgcgatgaaaggcgtgatgctttcgtctgatggcactcctctcatggggtagccaagctgtcttatggcgaggacgagattataattaatacaaccccttgttccatcaagggaacatttggacatccttcgcatgaagatagaatcct

SEQ ID NO: 22410 - DNA, 423 bp, Glycine max
  unsure at all n locations
tgtgcaaatcaaatcactcctacatctcatctctagcttgcattttctttctttacccactcctcacgtttggttttttagggaaaacaccataactaaacgcgccgcaagggatccctatcgcaccagatccaaatctagaacgatgggtgatcaagaggagacacaggaacagatgaaagccgacatgtcggctctgaaagaacaaatggcctccatgatggaggccatgttaggtatgaagcagctcatggagaaaaacgcggccactgccgccgctgtcagttcggctgccgaagcagacccgactctcttggcaactacgcaccatcctcccccaagcatagtaggacggggaagggacgcactggggcacgatggcagccctcacctgngatacaaccgagcggcttacccttatgg

SEQ ID NO: 22411 - DNA, 376 bp, Glycine max
agctttggtctttgcagatcttcacacagcaaaatctctcaaaactctttggaacttagacctttctctctctagaatcactagacatgcaaagcttcagctctcagcccaaactcccttcacaaaatctgatttcaggcttaaataggtggccttgttcgtgctcgtgcgcttagcgcaattctgaaccgcttagcgcacattagtgaatttcggcttagcgcgtgcttttctcgcttaacggatggactgaagcggtgcgcttagtgagatgaagtggtacgctcagtgaacctgtacagttcatcttcttccaaattcttcttcgcgcttagccaatcagtgttgcgcttagcggacgctcgctaagccagta

SEQ ID NO: 22412 - DNA, 425 bp, Glycine max
tgcccaatgcctcgtgttggcttccatctgttggttatttgtcatttataagcactgatctcaggctcgaaatagccaatagtgggcagatgtgcaaacacccaaaactataaaaaaaaaacatggtcaaaaaaattaattacggtaataaagaaaaaacatagataatcacaattaacaattatttacttaccatgactaatgacatgtaacctccaaatgtcatgtaacctccaacatgtttgctggtgtactagctcgcatatgagagatggtcgtatgggtatgccaatgcagagactccccaagcataccaatgacaaccatccaagttgttgaggtagtggaggtaggcaacatggatgtgagtcgaggacttgttggcaaatatcatattaccaaccaagtggaaaagataagttgtg

SEQ ID NO: 22413 - DNA, 381 bp, Glycine max
  unsure at all n locations
agcttttgtggccatgtatacactaaggcttagtgtttgtttcccccattcaatcaacccagtgtttccaaaagaatgctcctttatcatgtcacgcatacatccaagtctatttaggcattcgggaaaatctttcattgcgttcacccttcaggcgcacacattttgtttttcaaaaaccttttttatgtcatgatccgtgaatttcccaaagaaaacagaaagtcattctttttcaaaagtgtgttggctttttagntttcttttttgttttcttttttaatttttagaaagagtttgtaatctgaggaaaaaaaggcgtgtaaatgaaaacaatacacaaggccctattntttttctacttaagtttttttttattca

SEQ ID NO: 22414 - DNA, 417 bp, Glycine max
taacaataataacaaaacaatttatatgcagtttttataacttgttactgaaattttagttacataagtaatagtgacgaaaattactattagtaactaaaaaaattaatgcattaatatctcgtagtgatcctaagatttatttttattttgtaattagttttattaatctagtaaaattatatttttatccttaataaatatctaatttttatatttttttccttaataaatttttattttatattgaatttctgataaaaaattttttttatcctagacactttttttaactctaataaattagttaattgtatatttattttctaataaaaaatttcatttgttattagtcgaaagtaaaataaaattctctaatttatcaaaaactaaaacaaaatattaaagacaaaaata

SEQ ID NO: 22415 - DNA, 379 bp, Glycine max
agctcgatagtttacttatagtcatccccgaaactccccaaccttcggaaggaacatcgagaatggtgacaagaagtacctccaaattaattaatgttattaatgaaaatagtgaccaaaactcaaaaaacgctgtagaagcaaagcttcatgatgaatcaagaatgattcaaagatgtcttgatgataacaaaggtgatgacaaaaagctcaaaggtcaatcaaagaatgagttcaagaaagatagaatcaagaaagaatgagttcaagatgttcaagatagaatcaagaacacttcaagattcaaggatcaagcatccaagaatcaagatcaagattcaagactcaagattcaagattcaagaatcaagagaagact

SEQ ID NO: 22416 - DNA, 415 bp, Glycine max
tataagaacaaaattgcctcaatcatgttcaaatatttatgtgaataacgacgcatcaacaagaatcaagccaaggctattgcgctagcactcaatggggcaaaacacaccaaattattatgaatatggatggctcaaattctcacaaaggtaagatcatcactttcaaatcgagctatcaaaactatcatgacatgtagagaagaatcaaggatttcaagtcacataatgtcaagaacttttattttcaaaacaattacccatttcttgaacatatcctataattcaaagaagaacatgcaaagtcgtacgtgcacacaatattgacccaaaatattaaactaaaaatccgacgaagctaacaacattaacaaatcatcacatctaacacattaacaaaaccaacatgactatc

SEQ ID NO: 22417 - DNA, 376 bp, Glycine max
agctttcctgttggatcaagtggcctcagaataattaagaagggggggttgaattaattattaacgtgtcttgactaattaaaaatctatcattcttaatgttactagattcaattaggcttttactactaagtcaagaaagtaaagaacagaaatagaaacttaaccaaaagtaaaagcgataattaaaagtacgcagtggaaattaaagagtgtagggaagaagaagacaaacacaagatttatactagtttgaccacaaaccgtgcctacatccagtccccaagcaacctgcggttcttgagatttctttcaaccttgtaaaatcctttacaagccaaagatccacatgggatgtaccctcccttgttgatgc

SEQ ID NO: 22418 - DNA, 401 bp, Glycine max
tgtcaagccctttagcctggataagtgttgtccaggctacttttgccgtgttgtcccgagtggacatgcttttggttttgtaggggaggtgtgatgtgcaagttgagggacgtccatgtttctaatgattatgcccttttctgattgttggaggatgcattaaagacaaacattacattttgtcttttgctataggtgtgtgcagcgcacacacaatactcttgtatatgtgtcactcatggagtgggcacgtactgaagacatggtgcatgggtgagtaggggtgtgtcatggcgcgaagaattatagcatcatttttgctactaccagttactgaagagtccgcctccactttatatggaggggatgcttgtattgcaatcactgtcacttctaaattt

SEQ ID NO: 22419 - DNA, 374 bp, Glycine max
agctttatttgtcattgctgtgatcctccgactgatccctagagtttatcccgtatcatcattattagcactttataactttatgtttcttagcatttcagacttcatgcctatggttatttaagctctggtacattttagtttttgttacattacctttaaactattctgtttgaatgtttaggacttggtactttcaattattattaatctttctatggtactactatattatttgtttaggacttggaactttaaattatttgaagtcttgtgtatggtttttctactccttccttgtctttgatgttgccaaagggggagaaatagctaaaaggtaacgtgatctctttgttggaattatttgaatatat

SEQ ID NO: 22420 - DNA, 410 bp, Glycine max
tgaaccaaaactggtgagagtgtgatcttacactgtgtgtgaacgactagctatgagtaataatctttgcatgaatctctgaattttagaatgaaatgtataaatgaggacatgatgaaggctatgattgtgcatatacaagccttttgaacaaaaagcttaccttgaattataattgtatcctctgcaccctttatgagctgaatgatattgtcaaaaatttgaaccctgaacttaaataattatctctagataccttgtttagattctaggagagcatatggttcaaggaaaatttactccaactttgggggagtggaactaatttggatgcaaagaaagagataaagcatcagcacacacaacacataagttgtgtgttaaaaaaagaagaaaagaaagcaaaaaag

SEQ ID NO: 22421 - DNA, 426 bp, Glycine max
  unsure at all n locations
gcgaactatgaaactcaagctgagtctgcatgcatcttatngattgttaatgtattcctgttngttatttctacttaattctgcttaacaaaattaagtgtttgttagcatgacgaatagtagatcgagtcaaaagtcatacactaacatcatctaattacacatgtaattagttattgttgttgaagtcacttcttttatataaagtgtctgtgtctatatttttattacacaaacttcagtatttagtttttttaattttaaatgttatttgaatttctttacttttacttaatctcctattaaactccattatttttaaaattatttaaatatctaaacaaaaattagcctaaaacactaaattcttctcccagaattatcatccaaataaaactctcattattttaaaaaaaaatacccact

SEQ ID NO: 22422 - DNA, 466 bp, Glycine max
  unsure at all n locations
aggtccgagnacgtgaccctggaatgaatgatgcatnganangccggngaannnagcccgcgcgccggatacgtagagctgttcgcnggcatttcactgnattgtgggaacccgnccaggaggcactaagacgggaccgggcgaacacacacataaccnaccccattgacaaaagccaggcaaaagcatccaccatatcccaacaaaccaataccattaggcgagaaactacctcccgcaaagagagaacaagaggcgcataaatctttgcaccaaaatgagtgagggtccaatcaggtgttacgaccctcatacaatagctaacaacgtcaacggcatgggcgaccaaccatggagcgtcctgccaacctaagtgcgggatcccaatacagaaatttcagtttgacccaagggagcacggtacgaacactcggagcacgacaaatacctccccttgcgcgacacg

SEQ ID NO: 22423 - DNA, 464 bp, Glycine max
  unsure at all n locations
agaagaccnnnggtganccnttgaacctttgatgatctatttgannncgngaccttagaaacacagcnggggcaacncttattctcaattttaacagngttcttgcagggggcgcggagatccggaggaagtttgaggacaactaacagaaaaacacgccgctgagtgtatcagtaagccccaggacaactgaaagcacgcactcgaaggctaagaagaatctgacgaacatatggatgttactgagcaacggaggacatgaacatccgacgatgtcaaatcagcaaccgcaaatgactgaagatactgagggggtccggccacaatgaatcttgagtgatatctagcgaaatgccacacatcagagaatacacggggtggatcgacttctcaacgtattttgagccagaaggctcatatatagccactgagaacttatgacaaatgaggatctaaaatgcacg

SEQ ID NO: 22424 - DNA, 371 bp, Glycine max
agcttcttggaagaatcctttcccactttttccttccccttggcctttgaagacaaggccttaccatccttctttttcttttggttttctagtttttcttcctcatccctcttatctttcatagttatttgatctttggctacctgtgaaggtgtttaaagatgcaaaacaaactctgttccaagatgggtgagggttatctcattagttaggccattatagattattttcctatgatattgccatggcctacctaagagaaggtgtcctgcctccataagaactacatcacaaatcacttcatccttatatgttccaatggagaacggcactttcactctgtgattgactatcatctccccttgctcatt

SEQ ID NO: 22425 - DNA, 469 bp, Glycine max
  unsure at all n locations
ctcncgattgaacctttganntcgtgcattgagcccttgaagnccgcgangtttngaaactacccctggggtcactgggttttgttgcgtctcattaaaagatatatttaaaacaaatgaccggccgaaacttattttcttgatgattaactgaggttacaacacatatgatctattgaattttattttaatggcgattaaacgagattaccacacaaactatcgggtgaatttcaatctaacattgatttaacgtgaataacacttacatgatccatcaaaactcgcttaaaacacaaaaaaaaatcacttatgggtgaagaactaacatgaagacatgcctagccagggagggcaccctaaggtgcatacaatgaaatcaaggtgtcaaaataaaacttacccggcaaagatccaagaacgataaagaacggaccaagaatggtcacccaattgtcgccaaaacatt

SEQ ID NO: 22426 - DNA, 143 bp, Glycine max
agggggtgatgcttctatgttggcttttggggcttggatggtgtggatgatgtacaactattgtacgactgagggaaagcttgcatcttggaccccaagtctcctcatttccttactttcttcatcccatagcaagttcattg

SEQ ID NO: 22427 - DNA, 402 bp, Glycine max
tgcactcgggagtgttaggatatatttccaccctattaacttcagctacgaaaggttttattgacaacgactattcgggatagtgctcgtgttttttgtcctagacaaaatggtcactaagatttaatttttagaaaatatgcatgtgtcctatatggtccatgtcttttctggtggagattagatatatggtatttgcttttttcttttaaagagagacgatataataatatattttttaatacatttatttctaatacaatttttattatttattaaaatttattacaaattataaaactttgaacattttacttcttatttaataaacaatactcatgattctgtaatctgtaataaattttaattgataataaaaatctgttttaaaagacacatgta

SEQ ID NO: 22428 - DNA, 385 bp, Glycine max
agctttataagcgcggtttctgtagacaaaggtcaagcgttcgcgatatgcgaagatgatatttcgagtactttggatttggtacgactatgccctcctgatttccagctgggaaattggcgagtggaggaacgccccggcatttacgcaactagcataatgtaaacctttacggttttaaaagctctatagttgggcctaggctttagagtttttccttttgttaaggctttgtgtcttttgtttttgaatttataatacaaggatcttgcttcatctgttcctggtctctacccattctcattcatttgcatgtttacttctttttctgaaacggcagatccgatgacgagtcccccgaaggtactaatacctgggacccgtc

SEQ ID NO: 22429 - DNA, 421 bp, Glycine max
  unsure at all n locations
tgattatgatttgattntagttntggtttcacttggttattttccatctcattaaaagagaactttcaaagtaaatgaccggttgaaacttatttttttgatgattaactgaggttacaacacatatgatctattgaattttattttaatggcgattaaacgagattacaacacaaacgatcggttgaatttcattttaacattgattaagtgtgattacaacttaaatgatcgatcaaaactcgcttaaaacaaagaaaaagatcactgatggtagaagaatgaagatgaagacatgcaaagcaaggatggacccctaagggtgcatagaatgaattcaaagcttcaaaatagaaaactaaccggtcaaagatcgaagaacgataaagaacggacgaagaatggtcacagaattgatcac

SEQ ID NO: 22430 - DNA, 389 bp, Glycine max
  unsure at all n locations
agcttctgcgaaacgattcatgcaacttcagaattctactttcctcctctacagaaaatgtttgtatattgagatcagctctaacatagttttaaactagtgaacaccaatttcatgaaaaccattttcagaatgctagtgttcatttcaatttgtactttgaaatagtgaacaccataattgtgtcgtacttgatcatttacctcaccaacaaccaaggcctctcacaagctaaggttgctccgcacattaaggcccttctcagattaatttctaccatggctcttcctctcttccacctctttcttcaatcatcaacacctctttctcagattaattntagcctttntctttgttgtttttcaagttggtttgttggtgattntatt

SEQ ID NO: 22431 - DNA, 418 bp, Glycine max
  unsure at all n locations
agtctccttgcaaggaacttcctatggnggggtgtttttggcattttaaaatcccttgggtgaaatgggaagtagtttgtctctctaagaggatgggggtctaggaatcaaagatatttctaaattcaatacagctctgatgggtagatggatatgggctttatcttctaatcataatcagctgtgggttagaatcttattgtctaaatatggtggatggtcagatcttagcagtgggagggataaatcctggcagtctcattggtggagggaccttcgaaagttatatcaacagcctgagttcagaattatccagcagcagatggtatggaaggtgggaggaggggaaaaaataaaattctggacagataattggttgggggaagaatataaacttgaacagcaattcaatcagcta

SEQ ID NO: 22432 - DNA, 388 bp, Glycine max
agctttcttcactctctcctcatttatgtctaagtgtgcataaaaaaactatgtctaagtgtaaatacaaggtggggttgtatcctaacctttgtattttaagttatctacaacactatttgccacacattatagcgtaatatgtcttccttgccaaacatcttggcatggtgttagtcgagtccgtgtttgagtatgacaacatatgatgataacatcgttgagcctctttgacatttcaagaagggtatgcctcttgacatatctacatgtctgtgtgatttattgccaacctatcttgttaggtattagaggtaggtatacttggatgagaatgaatgggcaatctctatagaggtcatacattgtacttgtagacttgtcattg

SEQ ID NO: 22433 - DNA, 423 bp, Glycine max
cgaagattagtaggagtgtcaaccactggtatcgatgtgctttattattcatttgtcattggttgaatattcaccactcaaattagtatttagtttggtggattggtcatattgagagggtttatccatatttgtggtcaattcacaaaatccttatcctagttgtgatgacctctaaaacttattttttgattttcttatcgaggattttaaatcctaagcaaaggtgatcatcatcgaggacggtgtttgacgaaaaattgtctgtgttttaaagttaagaagttccagaagaacaacttagttgaatggaattgattattctctagcaatgaattaagacacggaaatacaatcatgcaagctaataatcaacaatgtaatttttcaaaacttcatgtgcattgctcatggaaagaaaat

SEQ ID NO: 22434 - DNA, 391 bp, Glycine max
agtctataagaacaaaattgccttaatcatttccaaatatgcatgtgaattaggacgcatcaacaagaatcaagccaaggctattgtgcaagcaatcaatggggcaaaacacaccaaatgattataatgatggatggctcaaattctcacaaaggtaaaatcatcactttcaaattgagctttcaaaactatcatgacatgtagagaagaatcaaggatttcaagtcacaaaatgtcaagaacttttattttcaaaacaattacccatttcttgaacatatcctataattcaaagaaaaacatgcaaagtcgtacgtgcacacgaaattgacccaaaatattaaactgaaaatccgacgaaactaacaacattaacaaattaacacaacta

SEQ ID NO: 22435 - DNA, 402 bp, Glycine max
tgatttgtgacatattgcttgacttgttttatgattttacttctttctgtgtggaggttaaacattgttcatttgttagcttctgtcataagtggttaagccttagttattgctgattcactaagtgtttgtgaaaagtccttatagaagacaaattttgtgattcttctattttgttgatgtaagctcatgtctgagatgattaagcattgtttaagcttttgccatagatggttagcattgaatcgttgttttgcttttgctcttgatggttaagcatcattgcttctcccaagtggttaaactttgaagtctcgtttctgcttggtggctaaggtttgatagcttcttggattgatgattagagctcttgtcaaatgaccttgttgctgattcgcttga

SEQ ID NO: 22436 - DNA, 372 bp, Glycine max
  unsure at all n locations
ttctgtttgaaaganaattagtaattaattaatataattaaagttagaaattaagtgggggataattaaggttgattaatgatgatttagatttcatagaattataaaggggtaattaaggagtgaataaacattttaattcctgtctttgtacccattttgcaaatcaatctttatctttttgaaatgtaaaaaatagttcatatctttacatccgatatacaaataagtccctactgttaaaattcaatttccactgttagtcatatatctatgtgataagtcttagttcatgtaagcaaacccatgtaacaagtatttggactgaattgaaaaattatgatacgttaagataaacaaatggacattgcg

SEQ ID NO: 22437 - DNA, 371 bp, Glycine max
tgtgcattgcaaattctgaccattgcccaccatgactcgcaagggaatagaggtggtccggcatggaaggcgcaattgattgacgagatcctgttggatgaagttgtgggtattgccactgtccaccagtaccacgacagggtggccagcgagcaggcccaataaacgcaaagtctctgggggcaagatgacccgctaaggagtttagacttatttgggtcgggcccgggtcaagaggctccacaggatcaagcgggtcaggaggcgggttagttggcactatatgaggagggggttctcgtcttcgtccatgattagcagaaaaaccctagaggcacaatggtggcctctatggtatttctcgttgcagc

SEQ ID NO: 22438 - DNA, 361 bp, Glycine max
agttttgcagatttggtcgtcgccagtgaaaggatcgatgtgggtctgaaaaaaaaaaaaaaaaaaatagaacgcaaatttgatcatcctactaggacgactgataaaactggggcaaataaagagggtgaggataaaggagaaacccatgctgtgactgccattcctgtacgaccaagtttcccaccaacccaacaatgtcattactcagccaataacaaaccttgtccttacccaccacccaagtatccacaaaggccatccctaaatctaccaaaaagtctgtctaccgcactttcaatgacgaacaccacctttagcacaaaccaaaaacaccaactgtcgcaacctacccttcggc

SEQ ID NO: 22439 - DNA, 382 bp, Glycine max
  unsure at all n locations
acctagcaagactcacgctggaatcatctacccgatttctgacggttattgggcgattccagaccaaatggctcctaagatgataggactgacagagaccaagaatgaagaggatgaactgatgcccacaacagagcagaacaattggcgagtatgcattgggcataggaggctgaattcagcaaccacaatagatcattttcccttgccttccatggatcaaaggctngaccgcttggcaggtcaatctcattactgctttctcgatggattttatggctgttggcaaattcatattgctcttgacgatctnagaaagaccacattcacctgtcccttaggcactattgcctatatgaggatgccctacaacctatgcaat

SEQ ID NO: 22440 - DNA, 422 bp, Glycine max
gacctataaaactcagctggaattttttgaaagaaactttttaaagccttcaaggcttatataatacttgggaggaagcctaaagaggccttaagaaagaatacttgaagggaagcctggagaggctttgtgaaagaatacttggaggaagcctagagaggctttagaaaagaatactctagtgaagcctaaaaaggctttttgaaagtaatcttctagtggagcctatagaggcttagagaatattggttgtaggagcttgtgtagactttaggaaagaaagaataccacaattgggtgcttggtttttgtggaaaaagcctataggtgtaggaactagatgtagctcaggttggggtgaaccatgtataattccttggtgtgattgttcccttctttattgcttcttggttatatttatt

SEQ ID NO: 22441 - DNA, 376 bp, Glycine max
  unsure at all n locations
agctttacattatagcttggnggataatggatgctaataggcctaattttgatgtcaattttaacactattttggatttcttttcattatgtttcacctgtctactaactaaaatagcataccccaatcatacttttctttgataccctttgaaattaccaacttctaattttatggtttgcagcatttgtagattgtaaaattgcaatgatttcctacttctaatttctgtcatgcccctttggagatactcaagcaaaaagtgatattaccttgtaaaactatacaagttcataatttaatagccctaatacatttcattctggactcttaaatctcanaacatagagattccctggttctgtattaagtccat

SEQ ID NO: 22442 - DNA, 416 bp, Glycine max
tataagaacgaaattgcctaaatcatttccaaatatgtatgtgaattatgaagtatcaacaagaatcaagccaaggctattgtgcaagcaatcaatggggcaaaacacaccaaaagattatgatgatggatggcttgaattctcacaaaggtaaacttatcactttcaaattgagctttcgaaactatcatgacatgtaaaggaaaaacaaggatttcaagtcacaaaatgtcaagagacttttattttcagaacaattacccattacttgaacatatcctataattcaaagacaaacatgcaaatttaacacaacaaaactaacaaaattaaactaaaacccaacaaaactaacaaaattaaactaatttaacacaactaacaaaatcaaaaccaaagaacacactcccccccat

SEQ ID NO: 22443 - DNA, 412 bp, Glycine max
tctcaaccgccttgctcctgtgccttcctccaccactcccaaccccactctagtccctcgccactccacctctgttcctgcacaaatccgatatgccccatcaccgtatgaggatcctgtcggtgccttgttcaaactcactcacacgggttcagtgctaacatacctgaaggagttcgaagacttggctaatagaattatcggcttgccgacccccttcctgttgccttgcttcatctcgggtttgacatcggagatgcgccgcacagtccaggtccaccagcctatgactgtggacaaggccgccggccttgcgaagatctaggagcagaagctatcgaaccttcgtctgcctccaccgcggctgcgaccccaccgttggtagctccaccgccagcccctttggttcccc

SEQ ID NO: 22444 - DNA, 371 bp, Glycine max
  unsure at all n locations
tatgtcttctaatacggatccataagaccggcttagagtgacatgcttttaagacacgacttgcttaaatggaactcgacttgcatgttgctaagatggtattgcggacagcatgatagaaggacgaccgttctagcattggttgcgcaaaatcggcggagaatagtgatatttatttaccgacatctcatcatagttctttctaacactattatttatcaatcgactgggaagcgacctcgtaaataacactgatctagcagagagtaaagggaatagctacacataactctgaatcatagagtccctcccatagctcgtatgaactagttatatgacgctaaagccgngatggaccttactacagtatc

SEQ ID NO: 22445 - DNA, 402 bp, Glycine max
  unsure at all n locations
ttattatgccctctctccctcggcggggatttcttcttctgcgaaggcgagatagttgttggcagtgatattattgaccagccctccgaaaccttctaccgagatatcttgggccacgtgggcctcgttcaaaaccttcactagcagagcccgatgaggctcggagctcatgagtaactccaacagcgagaccctggccggggttttgttgagctgttcgataaccttgaattcgctctgctgaattatacggaggaactcgctggcttcctctagtgatacctcctttntaccatcctttttctccggaagaccttttgccggaatatctttattcgaagcatggggtgcttcgccatcttgttcctccaccactttcccttttcccttgacgttcgcggg

SEQ ID NO: 22446 - DNA, 369 bp, Glycine max
  unsure at all n locations
ttgctttagttnttaaccaagttgaacggcatcaagtcatatgatctatgtagccgacttcgcttaatggaacaagactttgctgttgttattgtcttaataattactccatgattggcggccgattgctaatgctattgttggttaagatttgtggaagtggaggaatctttagctcgtcaactaccaaaggtaaataacaactttgttatataccagtcctctgggaagtgaacttaaatctagcactgattcttcttatagttcatgatctatttactttctcctctgatactttgcttcactcttttgtaacgtttgtttaatttatatgatgctaagtgcagtttgtgtgtaacaacactaacc

SEQ ID NO: 22447 - DNA, 403 bp, Glycine max
tgtacgcacatcgttcacgtgtattatatccactccttatggtttgaagtagaggagagcttcaaccctataatgcaacgtggcggacaaaagtgggcagtaaacttgaatggtcgtcattgtcaatgcggaaggtattctgcgcttcactatccatgttcacacattattgcagcttgtggttacgtgagcatgaactactaccaatatatagatgttgtttatacaaacgagcacatcttaaaagcttactccgcacaatggtggcctcttgggaatgaagcggctattcctccttctgatgacgcatggacacttatccctgacccaactacaattcgtgcgaaaggtcgcccaaaatcaacaaggataagaaatgagatggattgtgtcgaaccatctg

SEQ ID NO: 22448 - DNA, 293 bp, Glycine max
gagggaccttcacactgcctatactctgacgtacacggacctactcctgcctggacacaggctggttagctgagggcttatggatctattttccatcatagcttggatgctactgtgatgtgatgcccggagtgagcactatctggacgggtgtcttagcgatcacttcgatttgccttgaatgcagaggaccgttccacaccactgtcagaaacattattctgacatgcaaacataagacaatgtgcacgtcagaaacactagacagtagacacagaactggacctttatta

SEQ ID NO: 22449 - DNA, 403 bp, Glycine max
tttgatcttgcaagctaaattagacgtgtcaggtggtatatgtccttatatatgacgattctgcccttttctgatcgttggaggatgcattgaagacaaatgtttcattttgtcttttgctacaggcgagtgcaacacacacgtattactcttgcatatgtgtcactcatggagtgggcgtgtactgaagattcaatacgtgggtgagtggagttgcatcatggtttaaaaaattaaggcaccatttcagcttatgcaagttaccgaaaagtcacgcctctactttaaatggagtgaaagtttgattttttatcgtcaccattttcgaatttctgctttctctggatacaagtgtagcaacatttaaaatgtttgatcgatatgttcatcaacttctaaatag

SEQ ID NO: 22450 - DNA, 478 bp, Glycine max
  unsure at all n locations
aggtgtatgatgatcntagacgncaccacatatactaagcgccgtccgcagatccctcaagtgagactagactcagctttagtttctcaccaacgcttagcctaatagagggtaggcttcatccgcagatgcctcctgtccgactaggcctatactcaatagccctattggaactacgataagtctaccaaaacttaacccgcagattcctcatgtaagattaagcttagatactggttcggtcaagatctaaggctacagtacatttcccaatgctaaagtcacctaactgtgcatacaaatgagtgatcagaccaaaagcatactaacactaaacattgaaggaagcattgaacactcaacacacgatcaattagatattaagtatttacatcaactgctcataagaaatacccaactagggtggttagctagggattacaaagagaccctaaacacatgagatttaaagcacgct

SEQ ID NO: 22451 - DNA, 475 bp, Glycine max
  unsure at all n locations
gggcgcttgatagtcgttgacggcgcacaattacaaaccnccgcgggggatcgaaaaacaggatgcccaagcgccattangttgttggtttatcaattggacgccaggagggggtatatgaccatacctcaactgcttcagtatggactcatccatattctcacattacaatgcatggaggcgcccacatggcataaatagaggaaatactntattaggagccaatttgatagaaaatatttggccctttcttttatgaatgatattacatttatcataatcaaagatgactatataatttttatgaataagctgaccaacacttaaaagattttgagtaagacctgacacataaaaaacatactggatatattgcttgctaccattttgagttataacagcaatggtgcctcttccttcaactgtttgaacatttgcatcaccgagtgtaacttcgaatttattgtcgcattcc

SEQ ID NO: 22452 - DNA, 337 bp, Glycine max
  unsure at all n locations
agcttgtagattctaagcaccttgtgagcatgggaacttatacggcttgactggctcaaagccaatgatcatactaccaacgacactatggatacatcgcatcaaatggcttcccataggtcttgcagtggataatgacagggtttacaagcataacctttgctaatcctatagccttctgcaatgcataatcacttggtgcactgaatacatgttctatgtcagtgccaataccaagggcagggtggtcaccaacactggggactgcatggctcaccatggtcagcatttctggagcgttttactgtatgcaagtgancttgcatgttctctcatc

SEQ ID NO: 22453 - DNA, 481 bp, Glycine max
  unsure at all n locations
aagagcgatgttcatgattcactgtacancnnctnaattagtaaacancccgccgaannanggnacacaccttntgagacttgtttttttattttcacacgcatttactgcacagtatgttggtatatttctatttngggaaaacaaacacctanaatcatactaaacatgaaacaaacttgtgcattctaatcctatgttcttgtcatttgagaagatattattgatgtaaagaatgagtgtgaaatcgctgataagagaaggaattcccctttttgtgtaagaaactatcattctttgcttttaatcacatttatagttaaggtttcttatgcatggctgtctaaacaccctagttggggatttctaatgaacaattgatgtaaattcatatatctattgaatgtgtttatgtgttcaagctgattcanagcttatgttagttgctttggttggatagccattggtgcacattagggag

SEQ ID NO: 22454 - DNA, 399 bp, Glycine max
  unsure at all n locations
agcttttgaaatttatctttatcactggtaatcaattacagganactggtaattgattaccagagagtaaatactctggtaacttaaaaaattttgagataactcttttgaaaaacaaaactgtgctatgtttggtttttgaaaaatccttttcaatacttaccttgtgaagtcttcttgatttcttctcttgaatcttgaattcatcttctcttgaatcttgaaatcaacttctcttgaattcttgaatcttcttgatntcttctcatgaatcttgaaattaatcttgatcttcaacttgttgactcaatcttgaaatcattcttttgggcttttttcatcatcaaaactacttgattcatacttgaatcatcatcatgaaacttgcttctacacgat

SEQ ID NO: 22455 - DNA, 461 bp, Glycine max
  unsure at all n locations
aggggatgtctagacatgacaccattattaacacggcccctgcactgtgaactaataatagttgttgattctgttgtgctcaaagtctgtggatgagagcaacaacttgaagactttggagtaaaccttgatcacattcctctaaaatgtgacaacacaagtgcgatcaacctaaaaaaaaaccttgtcatgcattctaggactaaacacatagagataaggcattattttcttagaaatcatgtgttaaaaggtgattgttgtattgagttcattgatagtgagcatcaactagcagatattttcactaaacctcttgctagagataggttctttttcattagaaatgaactacgcatattacatgcatctagcatagaatgatattctgtttgcacagtgtgtgtgattgacattgctactcatataatatctttttgtttagtctgtgtcacaagttn

SEQ ID NO: 22456 - DNA, 472 bp, Glycine max
  unsure at all n locations
cggcgctttatgagtcgttgactccggacctatgaaactccgctgatgaccctggacggcaatcaatgttattagtgngtggatatacaatgctaacaagaagtaggatttaatagttaaaggaaaatggcacgaaatgtaatttcaccattattcaatttataattctgaaaggccaaccattagttcattacaaagtaattacatgtttttccgtaacaagaaagttgcttggctccaacagattttgtggtagagtcattccatcatacagcttgcgggctacaaaaataaaacaaaagctttcaacccacaaacatcatcaatcacaacaatctaacaatttagtgtcattcattgaacatcaaacgaatacattcctcagaccaacaccaactatgccaaccgtaaacgcaaaggtcaaaaagggaggcaaatggtactataaacacatatctcattgaggagagtg

SEQ ID NO: 22457 - DNA, 385 bp, Glycine max
agcttcttataagctgttccattttatcaatagacacatgttgagttttattcagaaaattagagtttatctcttttatcttagtgagagtgattctcctaaattcttgagtgattcaagaacaccttggctgtatcaaaggactttcacaacctttgtgtgttgccctcgctggaaagagtgattctttccttcctttcatcatcacccttgttctttcaaaccacaattccagataatccacctctgcccagaattatctcgtggccataacttccattttacgcactctaattaagtgattcttgagcctaaattgaacttcaaacgagacctttcacctcgttctggaatcacctcatttggagccctgtagcttcagtta

SEQ ID NO: 22458 - DNA, 410 bp, Glycine max
  unsure at all n locations
acacatagaatactaagcttctattaagctgaaccattgatcaataatttcaagttgagttttattcaaagagtagagaatatctcttttgtcttagagacagtgatactactaaattctggagcgattcaaaaacaccctggctgataagaagacttaccaatctttgtgtgtagccctcgctggaaagagtgattcattacttcctttcatctataccctggttctttctaaccacaattccagagaatccacctctgcccagaattatctcgtggccataactcccgttttacgcactcaaattaagtgattcttgagccttaattgaatttcanaacgaaacacttcacctcgtttaggaatcacctcatttggagccctggagctcaagtattgccatctctata

SEQ ID NO: 22459 - DNA, 538 bp, Glycine max
  unsure at all n locations
aaaggggccgacaagcacggaacgagaaacaacaggagggagaaaaacaccaaaaaaaaaaaggagaattgagcgctgagccctgacaccnaggcgaancnnacgcgcacccgggaaccacagagccgccggcaggcttgcaagcttgtcaggggcagagagaagggacaccgggacacaacagaacacacacccggaacaaggccacgccaaagaaaaacacaggagccaaaaggcccagcacgggaaaaaaggccgagaagcaccgaagaggagcaaccngnagcagagacaccaaccgcgacggaagccaaggaccgcgagcggccccaccaaaaaggcaggcngaacacccgagngggggagccccaaagaacaaccgacggaaacacaaaacaaccaagagaaagcgcaggacgcaancaaagccgcaaacaaagcgcgaagagcgacagcccagggccgaacaccccagacgggggcacacgaggcgacgaagcanggagaaaggaacggaagccaagacaacgaacaaacc

SEQ ID NO: 22460 - DNA, 330 bp, Glycine max
gctcaagatcacaatattcaaaatcaccctcaacagaatgctcaaaatgcacagaatgaccaggatgcacactacgcctaactaatctatgaaaggttctatctatttcaggatcaaagggttcgaaatcacctggattgcccctagtcatgcactatacgcagcaaaaaatgtgtgtctcagcaaacacctaacagggggtaaaactacagctatactcaaacgatatcaaaatgagctgatatattgtgaggaacaccctaaaatcatgacaagatagcccataaattttcatacaaaaattcaaaatctaactatgagaactaccta

SEQ ID NO: 22461 - DNA, 350 bp, Glycine max
tttgcaagcttctttcgaatttcattagtgactgattgctacatcgttcttcattcatcgaccaattagtttttattttaaagttttgaatttgctctatgcacctttaggggtcccttttgttgatttgtacatcatcatctatattcttctaccattagtggtctcatttctttgtgtaaagcgagttttgaccgatcgtttgtgccataatctcactttatcattgtaaaataaaaattcgaccgatcgtttgtgccgtaatctcggtatgtcaatgtaaaataaaatttaaccggtcatttactttgcagttgtcttttgtgagattgaagtatataagtgaaacc

SEQ ID NO: 22462 - DNA, 410 bp, Glycine max
  unsure at all n locations
taaagtatgcctgagtaattcatccctatgatatgctttctatgtattggcgancanaatcgccatgccttggattatagggatgaaccaagctcacgcttttacaaaaaggttcatcaagtcaagttgaaatatgcgtagtaaccgtcttgcaaaattgcggcaaaagatgaatcgagtcacatcactgcttcgtctactggccaacatatttacgattactgatgtgcttgttacttacagcttcaccttgacaaagatgtgatggaccactgggaaaaactatatagattcaaccccatatcttgcggacagatgcccagtactataactgcacatcattcgcatgcgttcatgctcttcattggttgcaatgctcgtgcattcttccttgaaaaaagataaatgac

SEQ ID NO: 22463 - DNA, 366 bp, Glycine max
agctttatacacacaaaataggagaaagctttatacggaaaaaaaagaagctttaatggtaattagagttcaactcttaaaataagataacgcacctaaattttatcctttctaaacagttgcaggtcggagtagataaattggacaaaaatttagacattggctcaatggctccatttacccattaatgatgctaataatacaagttgcttcttgaagccttgttttctatgaattcgtgggcatatctataatctatatgcacattaatcgaagcatatacaagaattctaaatagagtaaactactattccctgaatgtagcaagtggaactggtagctcctgaatgtactaaagaaagtacg

SEQ ID NO: 22464 - DNA, 426 bp, Glycine max
  unsure at all n locations
cttgctgctgatagtggtgtttcaccactagattatcnataagtggattnagannctatgaagaagagattgcatgaagagagggtcacgcataaagaagccattaaacttgttcgtgatgcagctaataatagtttacaagctggtttaattcctatttttaagacattggagagtttcacttcagaggtggtgaaagctcatgaacaagtcaggcttcaaagtgctggggactcgtagagattccagctatttggtttcttttgaggtcatagtgattgcatttactagtgtggattgattgggggagtttagagagtacatggaagatttagaactaacccaccagttttgcagctagagttagtcttattatgtaggaaaggacctcttgaattaccctaaagaggttttcttggaacatgt

SEQ ID NO: 22465 - DNA, 394 bp, Glycine max
  unsure at all n locations
agcttgctgagattaagaaccattttcttcaactntgacaaatgtggatgaccctagcgatcatgcacaagtttatgagacagcgatgcaaaacaagacatagactggctggtttcaagatagtagaggcctctagattcatgtcctatgccaatcaactgaccacgttcttgtacaacaaaggaatcaacatcaaatgttatagaacaatttaatgattttgttagttgactaagagaaactaagttgaaaggacaattangaacaaaaagaactggatccaagtttaaagaagaagaatgaagactttgccgactcctttagaggtgactttggtgccatttgctanggtgatcagatgaaagaaatttggaggagacagaggtgagtacag

SEQ ID NO: 22466 - DNA, 399 bp, Glycine max
  unsure at all n locations
tcatgatgaatcaagattgattcatataagttttgatgtttacaaaggtgatgaanaaaagctcagaggtcaagaacacttcatgataacaaagatgatgatctcaagaatcaaagatgagttcaagattgaatcaagaacacttcaaagttcaaagaggaagtttgatttcaagaatcaagaatcaagtttcaagattcaagttccaagaatcaagatcaagattcaagactcaagaatcaagaaaagacttaatcaagataagtattaaaaaggtttttcaaaaactgagtagcacatgaatntttctcanaaccttttaccaaagagtntttactctntggtaatcgattaccagtagcaaaatggttttcaaaagctttcactgaattacaacgt

SEQ ID NO: 22467 - DNA, 389 bp, Glycine max
agtttactgcttgcatgcaagcttgtcgcgtcaaatgattgtttctggagaacaggatggatatatacaagagtgcagcattctgtagcttttctgtataatggtttgctctctatctcggcatgttgtctgcattattctcaattgattatatttcaattagcactaaaatcttctattatcttatttagagtatattgcatttcataaatctctcctgcaggtcaggtggtcttagatgcaccattgcgcctcagaagtccgcaaagttgtcaaattttatgcgttaaaccacttgctgtttctgctagatcttgtgctcaatttgttatgaaaggattcaattttttgctgtctaactcgacgtaaatctctatacgcttgatgat

SEQ ID NO: 22468 - DNA, 429 bp, Glycine max
  unsure at all n locations
tggctctgccttatgcttctgctctcattctctattctattctgaaatcctccaatgtacaaggattgggggacatatacacccaatgcttgatgcaagatctttatcatggttgggccaaaatcccacatcttagctctccatcctaaagatttcatatgactgaccaaaactaatctggctagtgggtggaaattacttttttcactgctcctgattttctttatttcatgcattaatgtttgtcatcttcaactttggcatgtgatgccaaattggactggatccacaagattatcctgngtttaattgtgcaaaattatccttagatttttttatagacatctggaagcaatttatatattttagaatgatggttgtcttactgaggaagacaatgaaaattccagtcttccattaatggtttac

SEQ ID NO: 22469 - DNA, 407 bp, Glycine max
agcttcgtcctctgatccctcttgttggactgggctcaatttagacagcccttctaagtttagattaacttaacctaagcttcatcctcagatgcctcttattggactagacttagcttaaatagcttacgaaagttttgcctaatttagcctaagctttgtcctcagaaccctcttgttggactagacttagaccaaacaacattattgtaatagcatacttaaaaccaaaacttaatccgcagattcctcttataagactaagttctaattctgcttcattcaagttctaaggcaacaatacattttccaatgttaaaatcacctatctaggcacacaaatggttgatcagaccaagagcatacaatatttaagcattgtaagaagcattgaacacaagatacac

SEQ ID NO: 22470 - DNA, 432 bp, Glycine max
tgtcaatgtttgaaatttcttctttggtgttgaagaattaattattatgggtttagtgaagttggaatgttctaactagcttgttgtgcaattgtttccttgccctaacaaagtaatgtttgaatgtatgcgtttaggaacccattaagataatgttttcttgtttatgctccctagtgttctctgtcttttcttctttggtgttgaagaagttagtattaagggtttagtgaagttggaatgttctaacttgttgtggaattgttgacttgccctaagaatcaatttgacttgcgcttagcttgttggaaacttcaatcagtagatagattcaaatctcttgtttgaagtatttcttcagcctgttgcatgtgttacttggagtacaaaaagtacaactattgacatgaactttgaataagagttagcttc

SEQ ID NO: 22471 - DNA, 409 bp, Glycine max
agcttatgctgcttatatttacaatagacctcctcaaactcagcagcaaaatcaaccacaacagagcaattatgtcctctccagcaacagatacaaccctggatggaggaatcaccctaacctcagatggtccagccctaagcaacaacaacagcagcctgctccttccttccaaaatgctgttggcccaagcagaccatacattcctccaccaatccaacaacagcaacaaccccagaaacagccaacagttgaggcccctccacaaccttccctcgaagaacttgtgaggcaaatgactatgcagaacatgcagtttcagcaagagaccagagcctccattcagagcttaaccaatcagatgggacaattggctacccaattgaatcaacaacagtcccagaattct

SEQ ID NO: 22472 - DNA, 432 bp, Glycine max
  unsure at all n locations
tcaagaaaaggccaaactcccctcagaaatctgatnttatgcttttataggtggctatgtncatgctcatgctcttagcataattctgaaccgcttagcgcgcattagtgaattttggcttagcgcggcttttctcgctcagcggatggactgaagcggtgcgcttagcgggatgaccattcgctcagtgaatatgcatagctcatcctccttccagattcttcctcatgctcagccgagaagtgttgcgcttagcggatgtctccctaagccagaagattggcttagcgagagggtgaaaatcaacacttcaaaacttgcctaattaacctgaaattgagagaaaaattattattaaacacacaaaaatggaagtactaagtatttattacctacctttaacanaaagtaattacaacactacaaaatacc

SEQ ID NO: 22473 - DNA, 389 bp, Glycine max
  unsure at all n locations
agctttatgatgtatcaagattgattcaaagagttntgatgataacaaagatgatgacaaaaaactcaaaagtcaagaacacttcatgataacaaagatgatgatctcaagaatcaaagaatgagttcaagattgaatcaagaacacttcaaggttcaaaaggaaatttgatttcaagaatcaagaatcaagtttcaagattcaagactaaagattcaagaatcaagagaagactcaatcaagataagtattaaaaagttttttcagaaactgagtagcacatgaatttttctcaaaaaccttttaccgaagagtttttactctctggtaatcgattaccagatggttataatcgattactagtagcagaatggttttcaaaagtcttc

SEQ ID NO: 22474 - DNA, 437 bp, Glycine max
atctccagcatagtcaacatcacagtagcttgtgagtccaaaatctttccttcttttaaagcatagaccaaggttataagttccaataagatatctaaaaatgcatttaataacagataaaaggactttccttggttctttttgaaaccttgcacataagtaaacactaaacattatatcaggcctatacgctataaggtataacaatgatccaatcattgctatttattgggttttgtccaacttttttagattcttcgtccaaccctaagtatctagttggatgtataggtgtctccatttcttttgcattgtccacgttgaacatatttagaagttctttcatatacttggtgatgcaatcctaccccgcaaggccattgggtagaagacttccagtaaattggctagagatccaatggaacgccctatggttt

SEQ ID NO: 22475 - DNA, 357 bp, Glycine max
agctttatgcatcattcggagaggctaacgagacaacgagatgatgcgctccatgagatgttgcatcaaatggagaatagagatcataatgaacaggaaaggaagagaaaagggaatgatggtgttcctagacaaaaccgaattgatggtattaaactcaacattcctccatttaaaggaaagaatgatccggaggcctacttggagtgggagatgaaaatagagcatgttctctcatgcaacaactatgaggaggaccaaaaggtgaagcttgccgccacggaagtttccgactatgctcttgtgtggtggaacaagctacaaaaggagagagcaagaaacgaagagccatggttg

SEQ ID NO: 22476 - DNA, 455 bp, Glycine max
  unsure at all n locations
gggctgtgctctgcgccctccaaactaagctgcttgaaaattttattttagatatgaaacttcatattctatcatataagaattgccagggaagtggatcttttataccattgtattggctaatacatttgcattttgagtatgttattgacatccgtgcttacatattatgacttaatatttttgtgctatttgtcatttgacatgctaaaggttatatcagcaacagtagcaagtgatccacagaaatattgtgaagcatttcttgggaaaccaaacgctgagtattgtaactggattcttgactcggagaagtggggaggttagttggcctatgnccttcctaatcaaggctattttaaataaaatttttaatggaaataaataccattttctctgctgcaattggaacactactttggtgttactgggtgaatgtatgaatgtcaatcctt

SEQ ID NO: 22477 - DNA, 377 bp, Glycine max
  unsure at all n locations
agctttatgatgatgaatcaagttttgatgatgacaaagatgatgacaaaaagcccaaacaatgatttcaagattgagtaagaatgatttcaagattgagtcaacaagttcaagatcaaatttaatttcaagtttcatgagaagaaatcaagaagattcaagaatcaagagaagtttgatttcaagattcaagagaagatgaattcaagattcaagagaagaaatcaagaagacttcacaagggaagtattgaaaagatttttcaaaaaaccaacatagcacagttttgttttccaaaagagtttttttcanaatcttctaagttaccagagtttttactctctggtaatcgattaccagtttcctgtaatcgatta

SEQ ID NO: 22478 - DNA, 423 bp, Glycine max
  unsure at all n locations
tcaagaatcaagatcaagattcaagactcaagattcatttatttttatattatttaatcaagataagtatgaaaaagttttttcaaaaactgagtagcacatggatttttctcaaaacctttttaccaaagagtttttactctctggtaatcgattaccagactattgtaatcgataaccagtagcaaaatggatttgaaaaagtttttcaactaaatttacaacgttccaattgatttcaaaaagctgtaatcgattacaatgttttggtaatcgattaccagtgcctttgaaagttgaaattcaaattcaaatgtgaagagtcacatcctttcacataaaatntttgtgtaatcgattacactgatttggtaatcgattacttgtgattgtttatgattaaatcaaaagatgtaactcttc

SEQ ID NO: 22479 - DNA, 366 bp, Glycine max
  unsure at all n locations
agtttgcaagcttgctccagaacacaatgantgcttacaggtaatggaaggaggccaagatgttctgaaagtacgaaccaaaacataagatcacccagtgaggtaaaagcgtcaagctaatgacgctaaagaagcgtttcctgagaggcaacccagtcttaaattctgttatctttgttgtctttcatgcaattaaatcatctaaaacatgctatatagtctgtacatagtagtatatctgccaatctttggatgtttaacataagggtttcaatttcttggaaaaaggagtgaaaataacttataaaaatattttctgaaaaacagtcctttcgctaagcgcatgcctcgcactaaaagcatctc

SEQ ID NO: 22480 - DNA, 342 bp, Glycine max
  unsure at all n locations
caagaaaggtttagtcattgtttaaaaacgacttaaaaaaaaaagtttaaaagttgtataagctctgtttgtactcggagaacagttatcctcacaatatggcaatatcactccccccaaacatatcatccacaattgtaatattgnacaacttcaacatgatcttctgctccacctagatatcccaccaacttattgatgcgtgtacataattcccttataacctcactatcaaattgcatctgaggattgtcattgaacttaacattctaaaattggacaaccacatgtaatacgtgatgaagttggatattccatcttcgttcaatgattcgaacacac

SEQ ID NO: 22481 - DNA, 394 bp, Glycine max
  unsure at all n locations
agctttaacatggtttattaaatgttaaatcggtatatttatcagaaataacttccaaaatcctaagaatttaaattaatttattaaaaaatttcaaaataaaagcttattgaaataatgcaatgaaaatgttattttgtttgataatgtataatgaaatcatattccattgtttattatacaacaaaattgtatgtctttcttatattattcaatgaaaatttgatttcattgtacaatattaaaataagttgggtgtttgaaaaaaaagaagacaaaagtaggttccattgcatacctgtgcaacgatatcataagtttgttgttgttaagttggagtgtgnaaaaataattcaacggaacaagattgattacatatctatctatgtatgaa

SEQ ID NO: 22482 - DNA, 342 bp, Glycine max
ctttccaatgtgtggctgaattgatcttaatattacgatgagaagttaattattgaatgaatattgggcggagaaattaaatatggagaatcaagttggtctagtattaaagaaaggaatgttacgtaagaatgaagcatatgggacaaaatgaaatatctcataattgtcgttttgttcaactcaagttgatgaactgagacaaatacgacgcacaaatgggacaagcttaatttcaaacctcagtgaatacagtattggctgtggaaatgaaatgagggaagtcaggttggtttggtctctcaaattgtaaaacaaattctacggaatacactgggtggg

SEQ ID NO: 22483 - DNA, 367 bp, Glycine max
tttgcaagcttgtccaaaaatgcacgaggcaatatttgtataaagacccaaaaaatttgcacttaagtgagtgtttgctcaagccaaaaacttcatgtttaaacagatactacaaactctgcagttttgtaactctgaccaaaatcagtttaagccaaagttgttttgcttaagctaattttcctctgcaactttctttttcatcttctccaaaaaagaacttcaatctgggacctctaatcccaacttaagcacatttgagttgaaattgtcacttcaagctttcattgaaccttggtccaaaaaattgctattcaatccaattcaaaaatcctacataaaggtccatcaataagcatgtgaacta

SEQ ID NO: 22484 - DNA, 420 bp, Glycine max
  unsure at all n locations
tgagtcgcttataattgagttggcatcttactatgtgtctctgtcaatgactcaagctgcttagctagcagtttgttctgtgccaacagtgcatcttgtgaagaaagctctaacaggcttctttttgtaggtatatgagtccgatcacgcaagatagcatgatcagtagcagccatattttcaataagctccatagcttcttcaggagtcttcaatttaatctttcctccagcagaagcatctaataactgcttggactatggtctcaaaccatctataaaaatgttcaattgaatcggctcaaagaatccatgagttggtgtctttcgcagcaagctacagaatctctcaagtgcttcactcanggattcatctgggaattgatggaatgaagagatagctgccttgccttcagctgtc

SEQ ID NO: 22485 - DNA, 391 bp, Glycine max
agcttataaacctttttatgtgaagatttgaagatcttaatgtatactacataaaagaaaatgctaagcatagcttctgctttttcctctttctttttaacttggttggactccataaattttgttgattaagatgttgattatttgaagatatatttatagcagtttgttaaatgagaaaaatcctaccttgcacattagttgatttggatagtattacggatgtttctcttaggggaatcaaattcagacaagaagttatatataaacttgacttatagaaaccaaactgtgcagggaagatgatgcacgaaggatcggttgagttggagaccgtgctttctttaagatctcctacagcagatatggaaaatgatgacttgtttggtaa

SEQ ID NO: 22486 - DNA, 423 bp, Glycine max
  unsure at all n locations
ntctgaataaccaagatgaaagtagaaggctgaggagtgtgatgtatcaatacaatggaggagaactgcatataaaggcaattttttttaaagcaactcgtagctcgtgatggcgcctcccccttgcaacgcgcaacctccaatggcgcgtccttgctacactgctacagcctgcactacactcagagctacgctgctgcaccctagggccttcaacgcgccagtttgactggcgccatgcccaagtcgccatttgctgcttgcgactccaatgccacgtangcacaaaggcaaggcgctggtgggaatggcgacaccagcgccacgtgtcacctcctcgccgaaagcgccaatggtggtggcgccatgcatggtgtttacgtgaaaaaacaacacccctctgtatatgtttagaaacaaccc

SEQ ID NO: 22487 - DNA, 394 bp, Glycine max
tttgcaagcttcaacgggatcgacagacccttggcatcactctacgatcttaaatcgggaaagtttcacttggttacataccaaagtgtgacaatccattgccatccttcaatggggcacacgactgatccgaaagccttatgttttcttactatgtagaataatcgaattttttttaaaaaaaggggaaaaccctaggatcaatatttcggttgattgattaaatgtcaaatggctccattgtcgtcatccaaaattgtcaagtgattaaacaaaacatactctttgaaggagtccccgaagagatttgcaaaaaaaaaaaaatagaataaggttgcatgaattatcacatcttctacaaagaggcaatcaatttgtgttttcataataaaaa

SEQ ID NO: 22488 - DNA, 420 bp, Glycine max
  unsure at all n locations
ntaacctcatcgtccctcacagtctttagatttgggttctcaatccaatccttgggttcggactctcagccacttatgatagtcgccgatgatcccattactgcttcccctaagctctctgtcctttcttcacgccgcatcccatgccttgcgaactccttggagtaccctcgcgttgtggtcactaaaaccccgtgcgatgaaaggcgtgatgctttcgtctaatggcgcttctctcatggggtagccaagctgtcttatggcgaggacgggattataattaatacaaccccttgttcccatcaagagaacatttggacatccttcgcatgaagatagaatcctgattcttccttccttctagcgaggaaaccaattaacagacgcccctccatgctagccaagagttggtcccaattc

SEQ ID NO: 22489 - DNA, 388 bp, Glycine max
agctttgactcggatatccgattgaggcccagtatatatcatcgccctcgaatatagaaatggactgaccacgcaaattcggacagccataacgtttgactcggattcccgattgaagctcataatatatggagatggtcttaggaaaaaaatgaagcccatcgcaaatacaaacgaccataacttttccaccggatctccgaataagccaagtaacctatcgcgatgctcaaaatttatcatggaagactcgggtgaattccgacgggcaatactttttactcggatgtccaattgaggcccataatatatcatcgccctcgaatatagaaatggactgaccacgcaaattctgacagccataacgtttgactcggattcctgattg

SEQ ID NO: 22490 - DNA, 414 bp, Glycine max
  unsure at all n locations
actaagctttcattcttcatgcacccgttgggttttatttgtttcggcattggattctcatttgttacttttataccccctgtgacgtgcttaagccattttacttaagtcatttctcgcttaacttataaataaaataaattcccaccgaacgtttgaattgtattatccattaacttcggttaaaataaattccgaccgttcggtcgtgccgtaaccacgttggaaatcaaaaaaagaggtaaaaataatataataatcaaaaacatcttttagtaaaataaagcggaaaatcaatcggacgttntctctntgggatttctcattcttaatcgaattgattaataactaaagtgaaactaaggctaanaatcaactcgcctagtcaaactcgtccacaaaaataggcttttg

SEQ ID NO: 22491 - DNA, 384 bp, Glycine max
  unsure at all n locations
agcttcgtggcaagccagtggttggaggacaaggctggatggtgaagttgatgtgagggattcataatcatgaattggccaagtcattagttggacattcatatgttaggcgattgactaaagctgaaaagacacttattgctgatatgaccaagtcaatggtgaaaccaagaaacattctgctaactctgaaggagcacaatgccaatagttgtatgaccatctaacaaatatataatgcaagaagtgcatatcgttcttccataagaggaagtgatactgaaatgcaacatctaatgaagcttcttgaacgtgatcagtatattcattggcacagattacangatgaagacgtagttcgtgatatcttttggtgtcatcctg

SEQ ID NO: 22492 - DNA, 408 bp, Glycine max
ctaagcttgcatattaaaaccttaatacttgtgttttagatcttacacatgataggtttgccaagagcatgagctcatataatgacattgatatgaagattttttgtgccaaatacatcaagctcaagagttaatttgatgtatctattactattgcatgatttaacaactataagaaactatagttagggtttagctatattgacttgtctttcttgagctttagataatagggttgactttaagcaagaaaatattggaggatgcacgttgcttctccaatcatgggtgtaggactggattacatgcatttctccatatgtgtaggtatgcaaaattgtatttttgtggttgatttgtttcttttatatagaaactaaaattgtgtcattattagtgttacaaatg

SEQ ID NO: 22493 - DNA, 407 bp, Glycine max
agcttttactatttatttaaagtctctaaaatggacctatattagactattgagtaaaatggccctatattggaattaatagaccttattagaactaaaatggtcctatattgaaagaaatttctaactatggatcaaaagactctgatcacatcataaataaaccatatgtttacggactgggcttatgctcaatccatatctcatctctactatgctcaaatgttccaaacattcatctcagacagaatatatatgatatactacatctattaagacacatgaatctttttatgtttcattaaatatctaactggtactatacctaaaaaaactattcggaatctgacataattttaccaagttaaagtgtgattgtgggataagataactgatcataagctaca

SEQ ID NO: 22494 - DNA, 430 bp, Glycine max
  unsure at all n locations
agcctttcaggagtgaatatcaccagaccaaataaaangnctttgaatcttctttttcctngagaagggcccttggccatgagtacatgtggaaggagtaaagcaacgtgccatttatgactgacttgatcagttgaacccgacccataatggataagagagcgcccttctgagtaaccaacttagattttatacgatcagcaataggccttatatgaataccgcggggctggcttagaaaaaaggggacaacaatgtagttaaacgacagactggccacagcaaaacctagaagaagttttatctactctcagggtgtacccaagggattggtttgggttagatttccaagaacaaaaaataatcatctaatctagattaacttcatcattgtacacagtatggatcgaataatcattcaaaatattta

SEQ ID NO: 22495 - DNA, 406 bp, Glycine max
  unsure at all n locations
agcttgcttgtgtagcttctatggaggctggatctttgagcttcaatgaggtcctttaatggtgattttccaccatggagatgcagcggaagacaaaggagaagaggtaagaggcggcgccatccactagggaataagccttggaagaatgagcttcaccacccagatgagtctgggataagaagcttggagaggatgcttcaatggaggaaaagaaagagggagagaaagagagaggggggagcacgaaatttaaggaagataaagagagagaagttgaactttgagttatgtctcacaagactctcattcatcatagttacaacaagtgttacacattcttgtatctatagactacgtagcttccttgagaagctntcttgagaagacttccttgagaagcttc

SEQ ID NO: 22496 - DNA, 413 bp, Glycine max
  unsure at all n locations
taagcttcacatggagctacatcacagcagctgctactgggctctcaactttgtcgcttcttctctncgcgcctcttgtcctcattcgtgcttccttcacgagtctcttctccacctctacaagtctcatctcctctgtcatcatgagtagtgttgtgtcgccgataatgagtttttattttttggactctgtttactccattcagatttgcaatccatatgggacatgcgaaatacgaaatacaaaatacaaaatcataacttatatggattgacaattcgtatgtttcatacagattagcatagattgaagttacaaacaaaataactaacctcctccgctgttgcattgtaacacccaccatgatgacaatcacaaaccgcatatgaaccaccacgaacaatgcacctcg

SEQ ID NO: 22497 - DNA, 393 bp, Glycine max
  unsure at all n locations
agctttataattattaaaatcgattattnncgntatctataaaacaatttgatttcacgtgcatcaaaactttgttttgttttaaaaaattatccattaggaaacaattgtgtgtaatatcgcattatttctacaatatgtcgtttcaaatgatttctttataattataaagctgaagttttccgacccaagaattaaaggtctccctagtgaaatatcattctaacttacgaaataatttgggtcagtttatttgttaaaaagtagagaccattgttatctataaaagatgaattgatgtaaataaaaagactaaattgatcgatttttttattggttaacaacaaaactggtaattttcatttttccacggaatatcaatcttaaatcttg

SEQ ID NO: 22498 - DNA, 431 bp, Glycine max
taaaggagaaagaagatagaggaaactaaaattagtagtgattgttaattatcttacaagagagttggttattatagttttatataattggttgcaagaataactaacttgtaactaactaaactatctcttgtaacaaagtgatcaatctgaattaaccatgatcaaactatatctatgttaagatcccccttcaagctaggaatggatattggatattcctaacttggaatacaaaaattgaaaagaatcaggcagcatggccttagtgtatatgtctgcaagctcattagcaaaggtgataggaagtaatttcacaattcttttatgcatcttctcccgaactagatgacaatcaatcttaatatgttgtgttctctcatgaaaaacatgatatgttgctatatgaagggcagatcgattatcacaat

SEQ ID NO: 22499 - DNA, 386 bp, Glycine max
  unsure at all n locations
agcttgtctttgttttanacattattgatacatgatttgggacttgtaggatttgatttgggcaagattggatgaaaggaagggtgattttcgaaatctgcacttatgcagaattttgctgtcaaaataggtgcagcagaattttggctttgtgcagaaaaatgcttgtgtgtggtgggctgtggaaagagtagtacagaatgagttctggacgtttacaagtagatcccaacggtcacaatgtatgcttatgtactagagacttccagtaaaattttcgagtcgatccaacggttaatgaaccggaacgaaggaattgttactggngtctntaagtgagaaaagctgtganttggttggtgttttgggcagagttttctgccttt

SEQ ID NO: 22500 - DNA, 429 bp, Glycine max
  unsure at all n locations
ctcagcttacaagcagcttcatcagtggttcagagccattatctttttttggtgctccttaaacctccattaattntcagctctaccttctcctccattgttgtttcttcatttttgtccatgtatctcctcacatgtcttgtgataaatgttgttaacatgattctttagaatttccaccgattaaacttgctatagaagctagatttgattctctatggttcaaatttcttgttcttgttcttgaaccatgaattgtgttgagtttagattcctttgagttttgtcttgcaatttttttgtggctgaaacctaaaccataaaattcttacaaaaacattaaagtagaagaaaacctaacaaatatagagtgacttgttcacctattgtagttntgtcatagaagtcatgtctaatcatgaaacttgt

SEQ ID NO: 22501 - DNA, 395 bp, Glycine max
agctttgagccataatcctaacttaccataaaccttgacccagggtgagaatgtcaatccttaccctcggaagcaaaaaagaagagaaggaaaatttccgatcaaagaaaaaaaagagaaggaaaatttccaatcaaagagaaagcaaaaaaaaaaagagaaggaaaatttccaatcaaaggataaaatagaggaaaggaaattcccaatcaaagagtgggagaaagcgaaaagaaaagaaagaaaattcccaaccaaagagtgggagaaagtaaaaggaaggaaagaaagctcctgatcaaggatcgaaagatatcagaagaaatgtgcagaaaggtctgtggaccggacaatatatgtacaatacagaattgttcaccaatgaacataaaaaa

SEQ ID NO: 22502 - DNA, 386 bp, Glycine max
  unsure at all n locations
taagcttacaacagattntagtaatgacccactaacctagaatataaattactgattgccattaaccttgggaattaagaaaaaacttaatggctgagtgtaactgagatcgtggcaaccaaaagtcaccctcatcagccaacaagtcagccaccatttggtctcccaaaaggctgatgcctaggttgccaattgggcccttattacaacttgaactaaacctactaatgcccctttatttgattaacccaaaacatatttttggtcagccaactttacaaggattgggccagtatttagacaaactaaacactctaagattgagacatagtggtgtcattcacacctgctacattcgggccatgatacaactcacatcctaggac

SEQ ID NO: 22503 - DNA, 400 bp, Glycine max
  unsure at all n locations
agcttccatcaagtggtatcagagcacaagagcttcaagtaggtgctccttaaacctccattaattttttgctttaccttctcttccattgttgtttcttcatttttctccatgtatctcctcacatgtcttgtgataaatgttgttaacatgattctttagagtttccaccaattaaacttgctatagaagctagattttattttctatggttcaaatttcttgttcttgaaccatgaattgtgttgagtttaggttcctttgagttttgtcttgttattttttgtggctgaaacctaaaccataaaattattagaaaaatattaaagtagaagaaaacctcaaaaatctagagtgacttgttcacctattgtagttntgtcatagaagtcatgtctag

SEQ ID NO: 22504 - DNA, 429 bp, Glycine max
  unsure at all n locations
nttctaaaggttataactcttctaatggttttcttgatctgacatgaagagtctataaaagcaagaccttgatttgcatttcaacaacacttacaacctttacaaacaacttttccacatattctttttcaacctttaaatctctttgaacatcttcttcttcttcttcttcctttgcaaaagctttcttaagttttttggttttccaaaccttgaaaacaaaaattgtgctattcatctttttcattcccttctccctttgccaaaaagaattcgccaagggctaaccgcctaaattctttttgtgtctctcttatcccttttccaaaagaacgaaggactaaccgcctgagttcttttgtgtctcccttctcccttgtcaaagaattcaaaacaacacagtctgagaattcttttgattcttccctt

SEQ ID NO: 22505 - DNA, 392 bp, Glycine max
  unsure at all n locations
agcttgctctaaatttacattgatgtttgtatttatgggaggaggttatatgccatttttgctttaagagtaatgtcccactaaaactaactttccaaatgtttgccttcgcaggaatggccccgaggaagcttgcctcaaagaggtccaggaaggacaaggcggccgaaggaactagttccgccccggagtacgacagtcaccgctttaggagcgttgtacaccagcagcgcttcgaagccatcaagggatggtcgtttctccgggagcgacgcgtccagctcanggacgacgagtatactgatttccaggaggaaatagggcgccggcggtgggcaccactggttactcccatggccaagtttgatccagaaatagtccttgagttttac

SEQ ID NO: 22506 - DNA, 430 bp, Glycine max
  unsure at all n locations
atggtaaaatctgggacctagccatggcagatgtcttcacataggccattgcctccctcgcccaatattatgaccagttgttgaggtgcttcacctctggggacttccagttatcacccatggtggaagagtttgaagagatcctgggatgccctctatgaggaaggaaaccatacatcttctcaggattttatccctctttagctacaatttctaagatagtccgaatctcgacgcgggaattagaccacagaaagcaagtcgaaaatggggtggttggagtaccgacgaaatgtttggaaacaaaagcaagaatcttggcaggtaaacgcgaatgggccccattctaaacatcctcgggcttttgatcttatgaggggtcctctttccaatgtggatgggttggtggacctggcagcaatcgacgctn

SEQ ID NO: 22507 - DNA, 394 bp, Glycine max
  unsure at all n locations
ctttcaagcttatgtnatnagtccatatgagccaatgagcattatacattttgctctgctggaaacaagagaaaaacaaaccaatatatactttgattcaaaggggtgaacaaatatataatccatatgcatcgaatacatagcatttatattcgcgaggctgatgttctcaatcatttcatggagatgttatcatttcccggctgaaaagcaaaaatgtaaatactgattttcgtttctatagtgtgctgataaaattcgttcccaaagatgaaaacttacattttacgttctcgaaagtgaaaaagtgtgataaatatattcattcattaatttttatccgttacaagttatgaagagacgaattcgttaatgctctacatattcaccaatg

SEQ ID NO: 22508 - DNA, 258 bp, Glycine max
  unsure at all n locations
aatatgaaactacgcttgctttacaaagcgcacacaaaaagtagtcatatctctatatgaaccttnggcccactgcccccggaacggcgccaaatttggtcgaggtcgtacctgaatcaaataaacattaaaaatgcagtatctaggaagcgatcataggtcgtctcccaacgagcaatggttaaccaaacgttcataatagatagtaatataacagttacgaatgggagggggggggttgtatattaaacataaaat

SEQ ID NO: 22509 - DNA, 317 bp, Glycine max
agcttgaaacacgctctttaaaggataaaagaggacaaattagaggcaaaagcggggccagaaattctcaccaattcaataaagagctcatcatttactttcttgtatgacagaggctgcatggatgcaaaatacttgatgcacacctgtcttgcttcaggcttttgagcctgcaaggccttccttgtctcttacagcaccttctgatacacttccagtgtcatctcctacaacacaggttaaatgccgtttagcaatgagtgaacaataacgaagaaaatataaaggtcaaacgtaacacactaaaagcatgatgg

SEQ ID NO: 22510 - DNA, 370 bp, Glycine max
aagaataaccacaagtggttcactgaaaggaggggaaacaaaactattatactataaattatcttttaccgtacaccacatgatgttgccgttgttgcgatctaaagcccatgcatagccacttttctgaaccgcaacaacaacatctttcttggttcgatttatatatatggacaacatcattggtgcctccccagaatcagcatcttgccaaaaacctctgggtggacaattaggagctgaagcatttatacatgctaagataaatatatcgaagcctccacactggcggtaccatctgatcttccacgaatacaaatcaacggctaatatcgaattggagtggatgtctggctaatacactcatctg

SEQ ID NO: 22511 - DNA, 392 bp, Glycine max
  unsure at all n locations
agcttgtaattctgagtactatcatagngagccagtggtggttgtggctcaaccaaactgcaacaccggtgaatgtggggaggttgttgattataaacctctagggctaccgattcgcagtttgagatcggttgctagagatgtagatagttctagatatgccaatgaaagtgattccagttcagtttcaaggggttcttctagcggattgggtaagagcggagatagggaatttggggatctgggtccttccaatttggagaaaaaatttaatgatgctgctgctgctggtggatcagcttctgcgattccctggtgctcaacgaatagatggacggaaagggagaagacatctggcaatgttaccagtccttcgcatgttatgccacttt

SEQ ID NO: 22512 - DNA, 426 bp, Glycine max
  unsure at all n locations
tgaagtatcaggcatgagaaatcacagacattatcatttttaattacattgtgtaaaatttattccgcaattctgagcatagcactgtatacaaaggagcttaaattattaaagaaggaaaattgatttgaaacggacaaacacataacattgttaatcagagcaaatattattaaatagtgaaaattggaatggatgctagcacatatcatcagtcatagcctcaccgacccatcaattcgacaacctcaaagtacaaacctttgagcaagaaacctcaacttcagagagaataagaaacacacacacacacgcagagagagaggaatccaaaaaaggcaacaggaggtcgagagatgccaaaatgcaaaaactccctacattctcttttgtctccattggaaaaatatcaccttannacagtca

SEQ ID NO: 22513 - DNA, 380 bp, Glycine max
agcttggagctgaggaacggcgcacgttcatagagaagcttattaaacacattgagaatgataaccttcgattgctgcaaaaattcaggaaaagaattgacaagtaaccatttctcttagtttcactactctttctctttccctttgtagctcgtgttgcttggagatgtttcactaagttttattaaattatgaatcatgttagaagtcaaccaaattattatttatcacacttcttctaatggcaaaagttacaatataagtctagctcaaatgtgtcatggaaaaggataaaatataaagttaaatataacggcacagagaaaacacattttcatctagttaagtatctggcgtgtaagtttatggtgtaatagatg

SEQ ID NO: 22514 - DNA, 344 bp, Glycine max
  unsure at all n locations
tgtatagcacataaatgcaatgntaaaaataaaatttaaaatgttctacacaagtgggctgcatctggctatatagtcgtggcatggcatattactagatattatacactcagaattgtcccatacaacaccagaagcgtcacaattgtctcaaaaattgttaccaccaaattatgttcttaccgccagaagtgttgtgtatggaaagcaagtatgagcttaacaaatcgactgcaaattacttagatgcaaggacaatttaagtcagtagaccacatcaagttattgcaataacccttaccaacatctgatgtaccctaatgaagccgagggacaaagaatat

SEQ ID NO: 22515 - DNA, 381 bp, Glycine max
agctttgaatggaggctctggtctcttgttgaaactgcatgttttgcatagtcatttgcctcacaagttcttcaagggaaggttgcggagaagcctcaactatttgttgtttctggggttgttgctgttgttgttgttgctgttgctgttgtgaatgatttgaccatctaaggttgggatgattcctccacccgggattgtacctatttctagagaggtcatagttgttcttttgtggctgattttgctgctgaggttgagggggtctattgtagatgtttgcagcataagcttcaagctgttcaattgcttcatattgttgacaaaaaggcaaaagtctgtgtggtggtcggcaaacgatcatataccatatagtctacc

SEQ ID NO: 22516 - DNA, 528 bp, Glycine max
  unsure at all n locations
acggtgattcagtctctgacancncnantnncnaacnncgcggggnaactcagacgatgaccgatttctttcacttatacacccaatagagaggcggagtgggggtgctatgtgatatacatagtccaccacacctacatgtgtaaaactcaagtcgtaactccaacgtcacatcgcctctgcggcacaagacaaccttctcgccacggtggcgttagaacacgagaaaggcctcgtgaacgcatcggcgctgtcccgacataatgcgacagccgtgatatggtagaaatggcgccgaggaagcggtaagttatatctcttgacgcatgacgtgcaggaagcaccacaccggggtatggttgcgctactccgtacanagcgtgtgctgatagcgcgcatatgctgagccaacgctcgacatgccgatcaactgccgcttgacagctactactgtgataatgagtatggcaaaaataacgataatcttagtgccctcatttgcctatacgcaacgcatggtttgtctcg

SEQ ID NO: 22517 - DNA, 408 bp, Glycine max
agcttatctaagtacccttttgctcatggaaggagcaagaatattgaaacaaaattccacttcctcaaaaagggaagttggagttgaaaaattgcaataccaatgagtagttggctgatttttaacaaaatctcttaatactgatcgattcaagctaataagagacaccataggggtgctgtctattgctaatctaaattacacggaagtgttgtatataattcagttagtggttatatgttagtgaattgttaacaaactacttgtaaatgtgtaccataaatagtgatgctctgtatatgtgataaaaagaagtaagaaataaaattttctattcaataccatatctcttatcttgttctctctcttttcttctctgttcatgtaagtgatctcattcattctgag

SEQ ID NO: 22518 - DNA, 424 bp, Glycine max
  unsure at all n locations
gaagcaagatgggattntcctgcactgatacattatctattatgattatgtatttgtcaaaataggttagggtttgatactgagttctgcaacagccacatatggttcatttttttctttaatgcaaaccttcacacctagctcactaaaatttaccatctgttgtagatcagtgcaagacagcatgatattgtacaattagaaatgtggtgcttgaggtttaaggaactagagtttacatgataattaccttattaggaatgtcattgtcgttgattntagtgatgatactgcaatctgtttcttctctttgctcccctgatgagtntattgttgttgatggagatacagatgaggaattttgggttctgcaaacatgcaaaaaagccatccttattagaaaaataaggtatttgttagatac

SEQ ID NO: 22519 - DNA, 395 bp, Glycine max
agtttatattaatttagtctaaactttcataagctatttaagctgagtctagtccaacaagagggatctgaggatgaagcttagtttaagttagtctaaacctatgagggctgtctaaattaagcctagtccaacaagagggatctgaggaggaagcttggattgattcagcctaattagggatcgaggtttagtaatttaggctacaacatagaacacaatagcacgattgattagagaaacatctttatatacatcagcttgtttgttagaaagacccaacaacacttttacctactgctgtcaatcttaattacctatatttctactggttttagcctagacttagtttaattttgttctacattaccaatgtttctttcaacaatgcctta

SEQ ID NO: 22520 - DNA, 426 bp, Glycine max
  unsure at all n locations
agatgaggaagtgtagaagggtgaacttcctgcttttattttcgaccacagagnggtacctggagatatgtcgcgggggtcaagagaccttggggacgtcaggtggggtgctattgcccaaaaccaagcttgaccaatcccgacccaacccgggcataatcggtcagtgagaacctgtgatgtacctaaacaggcgagctcctggcagtcaacagataaaaggaacaaagaccacaaagcatggaggcttgtggtggctggccagttgtgaattattgtgtgatatatgggttgtggcctctggtaatcgattaccaatggagggtaatcgattacaaggcttaaaaatgaagataggaggctaagatggtctctggtaatcgattaccacggagtgtaatcgattaccaggcttgaaaacgaggt

SEQ ID NO: 22521 - DNA, 401 bp, Glycine max
  unsure at all n locations
agcttatcaacctttagacataatcagaaacaggtaagatatcatgcttcgcattcatatcaagttttaaattatcaaattacctcaactaataaaacacatacaatttttaactctttcttttgcaactcctcaagagctttctgaaaaaatctgcattcttctagcaaggagatctggatgaatacattcgatgcagaaaatcaccatgtcagggaaatattaacagtggcatatgaaccatataaaagacttcatattcctaaacatgcacttctagtgacaacaganatatttgcattcaaaacaaaacacaatttacctagagcaagacatccgaaacatgaaaatatagatgctgagaaagttctctatttgagttataatggctataatgcata

SEQ ID NO: 22522 - DNA, 404 bp, Glycine max
  unsure at all n locations
agcttccatcatttcaccaacagacatgaaaacccattcaaaaaaaatgatgaaggcaagtgaattctcattattagtttcaaggttagcacaataataaatcttctctatttcacattaattgtgtgtgagcatctttattatctttatcatttttttttctctgtgaattcttaattttcaaactaaatctaacatatgccaatgtatagtttaatatataaaaggagaaactattgtaaaatataaaattcaactcttacacataaaaacaaaaaatgtgtagagatagacatatattcagaaaaaataattaataaaccanaaataacatangaaaaaaacttacaaaacatgattntgtgtaggtaaaaccaataaaataaaacttttactacctatgg

SEQ ID NO: 22523 - DNA, 487 bp, Glycine max
  unsure at all n locations
ggggatgtatttgtgcgtcgctagacgtgcactatagataactcaagctccgctagtcttttcaacaccaatactctntcactaagtctctaaaggatccacaacacaactcaatagttgtatgtccaaccaataatccaacactaactcaccaaatagctttgctaccataattcagtaacagtaatccttagtaagtagtctatgaagtattcttttgccaagctttcatagacttttcaacccaatattctttcactaagcctctaaaggatccacaacacaactcaatagttgtccaaccaacaatatatccaacactaactcaccaaatagcttttttaccatacttcagtaacagtaatccttactaattagcctatggaagcacaatctacttcaaggacttcactctagactctatgttggtntatacttggaaagaatggatacacaaaanaataaaatggctcataaacactcatta

SEQ ID NO: 22524 - DNA, 401 bp, Glycine max
tctttcaagcttattgcaacttattcatatacgcaactgaacgatagctgacgagaaaacgtatatgctcggacttaatgcgggctgcagcaccggctccgcttccctaactgtactacaggcggttgccgaggctctatcctctatggttctatggagtttcaacatgacctgtgagatagaagacacatgagacattaatgaccttcttatcgacagtgttgtttagttcctgtagggccttattctgcatcatttgaacataaaattaaatccactaattgtatagttagaggatcgtccacaaaacactgatggtttgatataaattataaattagttcttcaatatatttaatgattactaatattgaaattacatatgtataatacatctgacct

SEQ ID NO: 22525 - DNA, 434 bp, Glycine max
  unsure at all n locations
tatgtccaaacggctaaggtttgtcaatgtaaaaatgcttgatgtgttcattcctccagtgtangaatttgagtgcagcacaagaaacttcagttgcttgaatttcccaaaaatctcctgcacctccccaccaaatttattcctgcttaaatccaagatgaacaaatgggtcaagttcaaaagggtctctgggatatccctcgagaaagtgttgttccccaagaacaatgcatcaagaccagaaatggaaccaatttcactgggaatatctccagtaaaattgttaccagaaaggttgagaaccaacaaattcttgcagttagcaacctcctttgggggcttaccgtcaaattcattaacagaaaggtcaagtttttcaaggctacaattgattggaaaagccttggaaggaacaacccctgtgagaaaattct

SEQ ID NO: 22526 - DNA, 401 bp, Glycine max
tttgcaagcttcaaatcacgatttcttaatatatgacaattgaatagaaataagttgaattaatcaaattccaatattatacaaaatgttggaagatggagacgagaattttcaactcacaggacaaaatttagtcaaaactagaatttctccactaggatcaacagtatgtctagccgctagggtctccattacaattgaccttgctggtaaccatgaattgacatgaaatcgaacactctgcaaatgaggagggagctatctcaaacaacaaagcaaaaggtaaaacaggcaagataaaattcaaaaccacttattcatgttaaagttcaacaagaaagtacacaagtgaagacttacatccagaaactcactgccagcaagagccattgcacgttgaa

SEQ ID NO: 22527 - DNA, 422 bp, Glycine max
  unsure at all n locations
tacgcttgtgtaacttctccttaagtaccattttgaatgcgttttgacatccatttgttgtagtggccaaattgtgaggcgcaagagcaagaatatgccacagttgtcatcttggcgaccgggcaaaagtctcatcattagccaattcatattggtgcttatttccaagcacaactaaacgagctttgtaacgatctatggatccatccgagcgcagctttatagagaacacaaacttgctacttaaaggcttaacagatgtgggacacgggactatatcccatgtttgattttcttccaatgctagaagttcagtttcaatagctntctgccaacaagcattcttcatggcctggctataagaggaagggataggaataaaggataatgaggctgtcatggaatggatatacctgtctggg

SEQ ID NO: 22528 - DNA, 387 bp, Glycine max
agcttcaacatatgttcgtgagctatgtgcaatcactgttgtggtaaaaaaaatggaggcagtatttgcttggacattccttcattatcctcactgataataggagtcttaaggagttgatggcttaaatcattcagaccccagtgctatcttagattaatgggctatgactttaccatccaatataggtccgcccattcaaatttagtggtggatgtgctatcttgcacttccaaggtttccaggggtatggtcttctcactgtcgatgcctcatttcacattcttaactgaactcaaacgttaattagctgatcaccaagagttcatagctctccggtgagacctacaggaacatccagataatcaccctgatcacacttacaca

SEQ ID NO: 22529 - DNA, 474 bp, Glycine max
  unsure at all n locations
aggtgcctgtgatgatcgatgacgacacttanttactaagctccacactntannattcaaattttaaaagttgttacatatagtattaacttttggtaatcgattacatgcgttgtataatcgattacactgttttaaattcaaattcaaaatttataaaactgtttcaaaaattattttagttattagtaatcaattacatcctctagtagtcgattaccaaagagaaaacatcttatttttgaaaacataattttacttacaagtttttgtaagatattttcctctgtcaaacttgtgcagcatcatctaagaaattcttttcaagatcctatgaactaagtacatcgttcttcttgaatttttttattcttgacttagatcgtgctcatctttgacatcatcaaaacttcatatcatatatgcttctgcaatacttttttcactattgaattangaatgaatgagggtttt

SEQ ID NO: 22530 - DNA, 394 bp, Glycine max
  unsure at all n locations
agcttggctgcacacaactctctaatagctaagctcacctccttgagatgaaaagcaagagcttagctacacacatcccctataatagttaagctcacccccatgccaaaatacatgaaaatataaagaagtccctaatacaaagactacttaaaatgccctgaaatagaaggctaaaaccctatactactagaatggccaaaatacaaggcccaaaagtaggaaaaacctattctaatatttacaaagaagagtggacccaaccttggcccatgggatcaaaaatctaccctgaggttcatgagaatcttanggccttctttagcagctctagcccaatccttttggagtcttctatctaatacccttggggggtaggattgcatcanagtcg

SEQ ID NO: 22531 - DNA, 425 bp, Glycine max
ttctgcattcaaagcaaatgatttcattgctttccactttgtatttcttcttgaatttgttttatcttttcgtttgggggaatgctgaaactttcctttctttttcatcatttgttcaaacttcctagacataagagccacttaaatcatctgtggatccctcagaattgttattaaagccatcagactcaacaatatgcacttttagagctttaggagagttattcttttcttcttgtctggagctaacttctatagttttgagggcagcaaaatctttcaaaggtagatgatcttggcaaagctgtctagaatcttcaaatgtatctaagatttggtgaaggtttgtcttagagcttcaagaccactcataagcacttaaagtcttccaaacatgtcatccacaaattctccttctttcatgg

SEQ ID NO: 22532 - DNA, 391 bp, Glycine max
agcttgaccaatctttacccaacccgggcatagtcggtcagtgagaacctgtgatgtacctaagcaggcgagctcctggcagtcaacagataaaaggaaaacaagaccactaagcaaggaggcttgtggtggctggccagctatgaattttgtgtaatatgtggattgtggcctctggtaatcgattaccaagggtgggtaatcgattacaaggcttaaaattgaggacaggaggctaagatggtctctggtaatcgattaccaaggggtggaatcgattaccaggcttgaaaacgaagtcaggaaacttatggagcctctggtaatcgattaccagcctgtgtaatcgattacacagatgaatgggtcactggttatcgattaccaggca

SEQ ID NO: 22533 - DNA, 411 bp, Glycine max
  unsure at all n locations
taatgcggatcaagttgattcgcaagtnttgtgcggatctacttgttctgcagtaggtagggttctctgaggctgaatgtggatcaagttgatctgagagattcatggtttagcatatggatcaagtacaaggtatatgattcacaggagtattttcgatgaagttccttcatgcggatcaagttgatccgcatgaatgtatttaaatttttaaaaataaaaattagtttattatttattaaaatgctattaaattaaggtttagggtcaattttgaggctgccttgtcatgtgcctaaaaaggattacaaccacatgaataattatttccttggataagataaattttagtgacccctatataacactcctcccatgagttataatcagaaccacaagatcgtgggctta

SEQ ID NO: 22534 - DNA, 392 bp, Glycine max
agtttgtccatggttcagacatgattgatacatgatttaggacttgtaggattcaatttgggcaaaattggatgagggcaaatgtgatttcgaaaatctgcactttatgcaaaattttgctgtcaaatatgtgcagcagaattttggctttgtgcagaaaatgttgtgtatttgctggttgtggaaagagtagtacagattggattctggatgttttctagaagatcccaatggtcacaatgtagacttatgtgctagagacttccagtaaaattttcgagtcgatccaacggttaacgaattgtaacgaagagaatgttactggggtatttaagtgagaaaagctgtgatattggtttgtgttgggcagagttttctgcctctgccctgtt

SEQ ID NO: 22535 - DNA, 425 bp, Glycine max
tatgctgcaaacatctacaatagacctcctcaacctctttcagctaaatcagccacaatagaacaattatgacctctccagcaacaagtacaatctcgggtggaggaatcatcccaaccttagatggtcgaatccttcacaacagcaacaacaacaacaaccttattttcagaatgttgctggcccaagtagaccatacgttcctccaccaatccagcagcagcaacaacaacaacaacaacaaccccagaaacaacaaacagttgaggctcctccacaaccttcccttgaagaacttgtgaggcaaatgactatgcaaaacatgcagtttcaacaagagaccagagcctccattcagagcttaactaatcagatgggacaattggctacacagttaaatcaacaacagtcccagaattctgata

SEQ ID NO: 22536 - DNA, 359 bp, Glycine max
  unsure at all n locations
agcttttaggcagtttataccattgtatggagaatcgcctttgttgttggggtcatgactactacccatgttacagcccaacaggcactacaaagagagagagagagagcaagaattagagtggctggctaatgttgtgttttgcttgctgtttggtggcactaaggacatggacactcccttcatctaatattccttgtctagattgtcatgttcaatcagaaaacaccaattgaaatagaatcgggaactctccacaccaataaacagggctgcagatttttgttttttgttttaattcgggaaaggataatggatctgatgggcaaacaaatataatgcagcaagtagttntctca

SEQ ID NO: 22537 - DNA, 407 bp, Glycine max
taccagctgaagatccatctgccatgaaatatgtgagtcccttttctatttctttttgtcttttatgaacaattgagatgcaaacccttggaaattgagctcttcatacaacttggcagcctgaagattcagactgggatgaatttggcaatgatttgtattcaattcctgatcaagtgcctgttcaatcaagcaacttaattccagaggctcctcctcccaacaaagctgatgaagacagtaagattaaagcctttgttgatactccagccttggattggcaacggtgggtagagtatcctcctttccttagttgtgttgtttggtgcatgtagtcatcacagaatggaaataagtatgatgataataatcaatgaaacaaaaattactaattctttcccacctac

SEQ ID NO: 22538 - DNA, 433 bp, Glycine max
  unsure at all n locations
catttactattaaagctgtgaatgcaattcaaaatgtataagaaaatccccgatcaaagattggaggaaaacaaaggaaaaagaaagattcccgatcaaagatcggaagaaagcaaaagaaaatatatagaaaggtcgttggaccacacaatatctgaataatgtacaaaattgtcacaagcaagaaagaaaagaaaaacaaccatgacttgagacgcatgaagcaatccccttctttgttaccaaccaaatctttgtgctcgcatctctttcacactgtgccaaaagaaaacagaaaaggaaaaggctgaaatgctcagagccaaatttcccaccaaaaacaccattcccgaaaaagtcatgttagtccatgattgcgcatgttatctttgatttgataggaaatgatttgcaaagtcaagtcatgacatan

SEQ ID NO: 22539 - DNA, 398 bp, Glycine max
agcttgagatgatgaagtgtagaagggtgaaacttcctgcttttattcattgaccacagagtggtacctggagatatgtcgcgggggttaggagaccttggggacgtcaagtggggtgctattgcccaaaaccaagcttgaccaatcccgacccaacccgggcatagtcggtcagtgagaacctgtgatgtacctaaacaggcgagctcctggcagtcaacagataaaaggaacaaagaccacaaagcaaggaggcttgtggtggctggccagctgtgaaacttgattgatatgtgagatatggtctctggtaatcgattaccaagggtgggtaatcgattacaaggcttaaaaatgaagacaggaggctaagatggtctctggtaatcgattaccac

SEQ ID NO: 22540 - DNA, 440 bp, Glycine max
ctaagcttctatataagctgaaccattttatcaataaacacaagttgagttttattcagaaaatttgagtttatctcttttatcttagtgagagtgattctcctaaattcttgagtgattcaagaacaccctggctgtatcaaaggactttcacaacctttgtgtgttgccctcgccggaaagagtgattctttccttcctttcatcttcaaccttgttctttcaaattacaattccagaaaatccacttctgcccagaattatctcgtggccataactcctgttttacgcactcaaattaagtgattcttgagcttaaattgaatttcaagacgagacctttcacctcgtgttggaatcacctcatttggagccctgtagcttgagttttttccatttctatatttctgtccagccaccacttaacctacattgtctca

SEQ ID NO: 22541 - DNA, 404 bp, Glycine max
  unsure at all n locations
agctttatgatgatgaatcaagttgattcaagtagttttgatgatgacaaaaagctcaagagaatgatttcaagattgagtcaacaagttcaagatcaagattaaatcaagaagattcaagattcaatagaagtttgatttcaagattcaagagaagaaatcaagaagacttcacaagggaagtattgaaaagatttttcaaaaaacaaacatagcacagttttgtttttcaaaagagtttttctcaaaattttctaagttaccagagtttntactctctggtaatcgattaccattttcctgtaatcgattaccagtggcaaagtttgatttcaaaagcttttaactggaattgcaacatttcaattgatctttatatgatgtaatcgactacaatatattgg

SEQ ID NO: 22542 - DNA, 395 bp, Glycine max
gcgatgcccttatattttccctttcctaattaaccatgcgttgagctccatgtgcaataaatgtgccacgctgttgtgtgtgtgtgatgtatttgttacaaatgggtttatgatccctacatggttggctcatggtgcctaacacatgcatctgagaatcgagtgtgaagttgcacgcttccccttttgcgtgatatcttttgtaaggaaaacgcaatgatgatcatacttgagaacaaatggtatgcacttgtgtagatcaaaaagtttgttgaatgcatatgcatgatgatgccatgactcatgcaaaatgtgatgctggtatatgatcacggacaaatgcaggatcatatgttcgttatgacttatgaatagatgctgatgctatgcatgat

SEQ ID NO: 22543 - DNA, 388 bp, Glycine max
agctattgtggtcctttctctttatcgccagggagtctctacatgatgttgtgatatttcttgcgaaagaagcacaagcaaggaggtattgttgtgttctaaaaacaaaaaataagaagtcacaacaaatatattatctaaatcatgaaaattcaaaaatgaaacgtacttttagaagatgaaaacatgaatttttattttattgtttttttgctcttggtttgtatcaatcacaagtgattcatttgtgtgatggttgatatgcttgctcaacaggaacagaaaaagatatcttatcgaccgtataattgacatcccataatagattgaacctgagttggggtgtgaatgttgtatctacaaggcacctactagtcttttgaatgtg

SEQ ID NO: 22544 - DNA, 201 bp, Glycine max
gcaagagacaaacgtctctcttaacaagctaatctcgtgcttagcgtgcaaccttgatccttgtgctctttcagattcccttgtcacgctaagcgcgctgaacccactgggtccgcttagcgcgactgcttcttgtagcacttcaagactctatcctcatttgacctgatattgaacaaatttcatcattaaatctaatgg

SEQ ID NO: 22545 - DNA, 387 bp, Glycine max
agcttctaaactttgtacaagaatgaagctctgataccacttgttatacaagtggcctcagatatcttaagaagggggggttgaattaagatattccaaactgtttcccctaattaaaaatctatttcacttttttactcaagttatgaattcccttaatgacaatcttcttaaatattaattcaaacaaagcaacttgaatatgaatataaagcaataataaataaaggagattaagggaagagaaaatgcaaactcagttttatactggttcgaccacacccttgtgcctacgtccagtccccaagcaacccgcttgagagttccactatcttgtaaattccttttacaagatctaaacacacaaggacaatccttcctttgtgt

SEQ ID NO: 22546 - DNA, 409 bp, Glycine max
  unsure at all n locations
tcttggcaagccagtggttggaggacaaggctggattgttaagttgatttgtgagattcataatcatgaattagccaagtcattagttggacatccatatgtcgggcgattgactaaagcttgaaagacacttattgttgatatgatgaagtcaatggtcaaaccaagaaacattctgctgactctgaaggagcacaatgccaatagttgtacgaccatcaaacaaatatacaatgcaagaagtgcatatcgttcttccataagaggaagtgatactgaaatgcaacatctaatgaagcttctcgaatgggatcagtatattcattggcacagattanaggatgaagacgtggttcgtgatatcttttggtgtcaccctaatgtagtgaagttagtcaacacatgttat

SEQ ID NO: 22547 - DNA, 457 bp, Glycine max
  unsure at all n locations
gggattgatgtgacgccctattagaaacccgctgggnganatactccaccttttaagatttgttaatagaaatattgtcaaaanagacagaggtatacaaataatcaggtcccacatttctaaagattgtagaaaaaagtattaaaaataaaaaaaatataacaaaaaacattgtttagatttttttaacgtgtacattattttatatatcatttgtgtaaaaaatttatatttgtattatttgggtaattttttttgtattaaataggcactattagaaaatatgctgttcacatcggttatttatgactttctacatcggtttttaaccgatgttgaaagtattatcgttaacaccggttttttaaaaccgatgttaatgtaaaattgacaacatcggtttattaaacaaccgatgttatataataagatttacaccaaaaaaatatatgaatgg

SEQ ID NO: 22548 - DNA, 335 bp, Glycine max
  unsure at all n locations
tttgcaagcttgaactctgatactgtaccagcaacttgtggcatactgttgactatctttcttgacatccttcaagttccgtcgaacttcttcagagaagttattccccattacctcttatgcgatctctttcataatttctcagtctgtgtcaatcttcaactgactccccattatatgtgttgngacaactccagatgtgtggacatgtgtgtggagtatatgatcttattgctacatttgttatcgagttctctgattctgttgggatcctgtacgctgcatttttccatttatactacgatctgatttgctatctctttgcatgatctgat

SEQ ID NO: 22549 - DNA, 365 bp, Glycine max
  unsure at all n locations
ttannaattgatttgaaacgtacagtaactgttggtattctattaccatatatgagtaggcgattacacattgcatattttgaattcaaactataatagctgttgtaaatgatttttggccactggtaatcgatcacatcctctggtaatcaattaccacagagtaaatcccttgaaaaagacttttaatgtaaatcacttggccaatccttctgctagcttaattggaatggcctgcttatctaatgtacccttcctatgacactagagacggtcttgatcatccatcttggatatctttaattactttgtctcgaataaatctttgacaagcacgtgatccatgcgatcctttggcatcctca

SEQ ID NO: 22550 - DNA, 392 bp, Glycine max
agcttggtgtacttgatatatggagtataactctctggtgcttcttgtatgggaggtaactttttagataacttttttactgccatagcgccacatgcatgtcaacatctttatttgctttgtgttataaattaaaaatcaagatgaatataaaaaacatctcaaccttctagaggacaagaaaaccagtaattatcagaatgtaactcttcctcaggataattattgctatgacgtgattccagttcagttagattggctttcaatgaatcaatctagacaaataaactttcaaccttacgagcaagctttaaatgcatgtaaagttagtagcagaatagcataatgctaatggggggtatttgttagaaacccacaaatgtgttgagtta

SEQ ID NO: 22551 - DNA, 427 bp, Glycine max
  unsure at all n locations
ttggaagattacagatggaaggagccaaagtctcctgttactattgttttggtaaagattcacagaattaccactctacctgtgtagtacacaccagtccaatataaggataggtttcacaaaatcaacaatgaacacgggacaattgagagacgaggttcaagataaagcagaagatgacatagtatgacacaaaatattaagagtattaccgtgttgtgaaaggaagagggaaaaaccaagccactcttctcactaagctactctttctcataaccaggaatgaccacacattntagtagtcttactcgggttcgttggctttatttgtctctctctcctaagtatgnataatgcttgttgagaaatgctcttactcataanaatttaattctctgatacaagcttaaactttttttagcatgta

SEQ ID NO: 22552 - DNA, 388 bp, Glycine max
  unsure at all n locations
ttcctgagaaagacaaggagagagacgaagagagcggaatacgcccggagacgaacaacangggagtatagcccaactgcaaacattcaatgagtatgaaatgctatgaagactggtgagcgaatcgagacaacatctcagtacagaataatcccaatgattaacggtatgatcgatccacatagaacacacttcccgcggcaagtcaaacatgaatccctgactcacgatagatacacgcgcaacacaattaacagcaatacaaacaccggctctaacagggaatcacgctacgagaaacacacgaatgccacacgataatccaaaaaacgcataacgaatggatacgactgacgccaaggaccccagagagatgcacaggaccacn

SEQ ID NO: 22553 - DNA, 389 bp, Glycine max
agcttgttacttcattatgacattattttagtgtcccatacgatctagaggctagcctgggcgagccaggggtctaaaaaagcctccaaatgacccttttgccctcccttttgggtattttccctattcttttccaaaacatcaaaaaaccttttgaattgcacgacaagtggtgttaagcaactcaatttggctagcaagaatcaaaatgttagcaaatgatagtccccagacgaaattagggtatgacagttgcccttctttacttatcttttattggaaataaaagggaagtaaagataaggacactaatttcgtttgagcaatcttgttattcgacagggcaaccaaggaagtcaaaccgagaaaacatgaggacattgaagttc

SEQ ID NO: 22554 - DNA, 405 bp, Glycine max
  unsure at all n locations
tcaattcaagatncaatatggataggggncttggtagtataagtcttcaaggatcaaccattctattgggtatttgttcatgttgtgtcttcaagatcctatcaacatgatggacaacacaatcaagattgagaaatttataagaaagaatagcttcaacctttgatgcatcaagatacgagccttgttgaaagaacagggcatctaggctcctccctcctatcaattgtcaaagattgataagccagtgcttgagttacaagaggaaaaggtgcattcgctaatcctctaatctttatctaatgaggttttttattgggttctggctcgaattggagaaacttttcatgacaacatcaaagaaatattttgtcgttgctcttggtcagaatgactcctcatcgg

SEQ ID NO: 22555 - DNA, 394 bp, Glycine max
agcttatagaatatataataaaagaacaatgacaattgaagagtctatacatgtttcctttgatgattctaatgccattcttccaaggaaggattttttagatgatatttcagattccttagaagatacacatattcatggaaatgactctaaagaaaaagatgaaggaagcaatgaagattctcaagataatggagttagggcaaataatgaacttccaagagaatggaaagcctcaagagatcatcccctcgacaacattattggtgatatatcaaaaggggtaacaactagacattctcttaaagatttatgcaataatatggcttttgtatctatgattgaacctaaaaatataaaagaagccatactagatgataactggatcattgtc

SEQ ID NO: 22556 - DNA, 420 bp, Glycine max
taggaacccaaacttgtagcttcaatgcatgtaaacattcttatggctaggaatccaaaatttggttttagaattataaaaaacatgaaaattaggatttgcttgtgagagtcatcgctctattttgggctgccccatgtttgatactttacatagaggtagtgtggaaaacaccttgcaatagtgtgtatacataggtaaatataaggagcatgaaattcctagcaaagtgtgaatgattgtcttcctaaatgaatgtatgatagtgtggaatgcctttttgaaatgcaaatatgtgcaggatgtaatttgctttccaatatgcatataaataaatatgagtgaaaccgtaaaaatttgtatggtgtacttcaaatgtatgtaagtagttcgtgatagcaaatgtttaggatataaatt

SEQ ID NO: 22557 - DNA, 386 bp, Glycine max
  unsure at all n locations
agcttttgcaagctggaattatttatcctatctccgatagccaatgggtgagtcccgtccaggtagtcccgaagaagaccggcctcacagtgataaaaaatgagaaggaggagctgattcctactcgggtgcagaacagttggagagtctgcattgactataggaggctgaaccaagttaccaaaaaggaccattttcccctaccattcattgaccagatgcttgagcgcctgacaggtaaatatcagtactgtttccttgatggtttttctggttatatgcaaattactattgctcctgaggatcagganaagaccacattcacctgcccctttggcacttttgcctatangaggatgcctttcggcctgtgcaatgccccttgt

SEQ ID NO: 22558 - DNA, 402 bp, Glycine max
ttccacattgaattcagcacctaatgtcatattagattgtaattgggtatcttaacatatgagatttcagatggactttaatcctaatcccatagccgaccttttcacgagatctctacttaaccctttggttaaatgatcggccaaattatgctgagttctcacaaactccactgatatcacaccatgcatgattaactcccgaaccatgttgtgtctaacacccaagtgtctagacttcccattatacacttgactatatgccttagccaaagttgcctgactatcacacctgatagacatgggaggtataggtttgggccacaatgaaatctcatagatcagatttcttagccactcagcttctttaccagctgctgctaaagctacaaattcatattc

SEQ ID NO: 22559 - DNA, 377 bp, Glycine max
  unsure at all n locations
ttcatgacagcttatgactagcacacaatggggcctatgaagtgttacataagtgatggcttggcctcacaatgaaaatgggacaaagatggataagctaagcttatagctaagaggcctgaaacatgtcgaatgatggatgatggacaatgatgaatggacagcgttgatgattggacaatggacttgtgaattgtgactgcaaccatgtgaggcttttctgagtttcatacgaattattttagtagtgtgctgacatttggccatggatctcaatcttctgaggatatangatactttcatctgaataaagctaatacaggaccactcaaccaaacgggatactcaaggcagatactgttcaactatacatgtct

SEQ ID NO: 22560 - DNA, 417 bp, Glycine max
  unsure at all n locations
ntggccctactggggacactgttcatcagtttaattattcaaccacaaagtttagtgaacaaanaagtttttcaaatgattttactgaaaatgaaaaacccctcagttattctccacaatcaattcagggtgggcatcagtattcacatgcccctcatgttgggagatcatcagctggacgtccttctcatgctttggtaacttttggatttgggggaaaactcatcataatgaaagatcctaatcttttgagctcatcatacggaagccaggttaattcttgattcctcatttgagttttgattttttgctttatctggtttccgaaaggctttgaggttgctcaatattgtttcctttntatcgtctactttcttatgagtgatttatcaaaatgattaacactgtaaattcatt

SEQ ID NO: 22561 - DNA, 306 bp, Glycine max
agcttgtggtctattgaacatattaaacctggatagttgatggaaacatgaacagataactaatcagacgaccgatatgaaagacttcacagatcgaaataacgttaacttaaacaactgagttagtggctgaacttacaaaaattattggctgatgtaagaaaataatactaataattgacagtaataagaagagtgttaagagtacactatagactgtaactagtctctttaaccttgatggtccagtgtgtatcagtaatatctgagtgatacttatgaacatactaatttgaagcgagagta

SEQ ID NO: 22562 - DNA, 421 bp, Glycine max
ttagcttactgaggtttagaatacttggatgcgcatgttcatatttcatgatcttaacagtcctattgagccagagttctactatttgtattgcattactactaaagtgacctatactattggtatacaatataaatgaccattaggtatgtgttatgttttacatatcaatatcaatctcctgtcatgttgtcctttggttctcttttcctcctttctcagctatatatattttcaccaactataaatgtatgatgttaaaacttcttattaaacatattaaacaataccatacacatcatgatctggttaggcctgttaattttgcaatcattcacaatacaaaagatataataaaattctaacatgatttgatatttaagacttggaaaaatatctataatgtctctagcatgtgatg

SEQ ID NO: 22563 - DNA, 294 bp, Glycine max
agtgtgggatgatttatggggacccggtgacgagagaatcgaggatatgggctacataggactacgtgagactagttggatgtgggccacaggggatggtcggtttatgcgcacattgaggatgtggaagaactagttgtgcaccatcgcccgaccgcgaactattaccacatgtgatgggtacctcataatactacaagcttgagatgaggaagtgttgaagggtgagacttcctgcttttattgttgaccacagagtggtacctggatatatgtctcggtggtcatgagacc

SEQ ID NO: 22564 - DNA, 413 bp, Glycine max
agctggggctattccaagttcatttaccatacctttaagctttattgctctcttactccttcacctagggccatgtattctgcttcagttgttgaaacactaacaactgattgttgatttgctttccaactgattgttgtaccaaacaaagtaaacacatatcctgttaaggatttccttgtgtctacatttcctgcaaaatctgcatctacatatcctgtgattgctgcctcatgtgctgtcttcttgtaccttaatccagctatcaaagatccatatagataccttagtgttcacttcacaacttcccaatgcgcactgccagcatctcccatgagtctgcttattatacttacaacatgagccacgtcaggtctgctgcaaaccattccatacattatgctttacacacc

SEQ ID NO: 22565 - DNA, 366 bp, Glycine max
  unsure at all n locations
agcgtggaaaactctgctctngtttccngctggagcccatagatagacttcttcagtttataaacgagatgagaattggcagaagcgaaaccttctggttgctgcatatagacttcctcttgaatggtcccatttagaaaagcattgatgatgtccacttgtcgggtatcccattttctggtgactgtaatgctcatgattgtgcgaatagtggctggtttaataacaggactgaatgtctcattgtaatcaaggcctggtctttgagataacctttaagccactagtcgagctgtgtgtctgacttcagagccatcagcattgtatttcaagcaatagatccatttggagccaatagccttctta

SEQ ID NO: 22566 - DNA, 244 bp, Glycine max
  unsure at all n locations
acactcaagcttgggaaatcatctagcaccgcctagctcatcaatcgtatgtatgtgtntatgatcgcgaatggtgagggcattcaaggcgtggttatccacacaaaaccgccatgacccgtcatgtttcttcaccaacaacactggagataaaaaagggcttgttctcgattgaatgagacccttatggagcattaatgccacttacgcttccatttcacacttctgaaagtgtggatatcga

SEQ ID NO: 22567 - DNA, 402 bp, Glycine max
  unsure at all n locations
agcttcaccaagattcatattgaaataagctaaaaagaacttatacaagtcataaaccatattcataagctcaaataagctccataaaagctcttccaaatgccccctaaaccatatcgattagttataacaatagaaagagaaaaaagaaacaaacaagaacaacgctggttggtggttctgaaagcaaatgtaaacttggctgggcgagatatgtccattaaaaaaaacacattatggtggtatgtcccaaccatggttacttcattntgtcaaacatatttgtatccagtaacctaaaagggcattgttggtaggggtagccacgggtcagactggataggatctggggcattntttgatctgatccaatcaattttaaatggtttagatagaattttc

SEQ ID NO: 22568 - DNA, 406 bp, Glycine max
  unsure at all n locations
tttatggttctttntgtttgtttgttcacattattagggttagtttgatttttatgcagagatattcccttcgatgtgaattaatgtgttttcaacttcagtttcaagtgaaaagatgaagaataataaggttgttgtggctgatgtctcgttaagcgagacttgtgcgcttagcgagaatcatccgctaagctaggcactcagcctacttagcgagttgggagaatctggaggacaatctgccaagcatctgcacgcttagtgcgtcatcaactcgctcagtgagccatttgtcttctcttgcgctaagcacgtccagctcgctcagcggaaaatcacttactcgcacttagcgcgaaaatggcgctaagcgagccttcgagggacaaaaaacccttaatagatg

SEQ ID NO: 22569 - DNA, 402 bp, Glycine max
  unsure at all n locations
agctttattgatttcatgagaaagctcttcctcttccaaccaagagttttcaaaatgaaacctcttagctttacgagtttgataatgttggctcagcttcaatagaatagggaaatgatctatcctacaagaaataacgtttgatagacaacaatttgggaaagtatcagcttggagttgccaaagctcagtcaagcttttccaggatttcaatgggtgaacccttgctttttacccatgtataagaatagccctccaaggtaaatatcattcaaaccaaaatcaaacactacttctctgaaacctgttatgagataattcgggtgagaagtttgacccttcttttcatcataggagaggatgttattaaagtcttccatggtacaccatangagagagatg

SEQ ID NO: 22570 - DNA, 430 bp, Glycine max
taacaccatcatgagcagcatgtctgtacaaatttaagatgttcaagatctaatactgtataaacaatcatcatactttactagttacattttctcacataccgcaaggaagtatccattctcagagaaagatatggcagttactggcccagcatgtccgtcaaacctagcaacatttgcctacaaccaatggaggaaggtaagaacatagagaataacattgaatattaaaattgaactttaaacaagtataagaaaaaatgtttacctgactttttacatcccaaatcttgacaagagattctgtggtgccggttccaagaatgagaccatccggatgaaaagccgcagatgtgtacccttccgaagaacctgaagtgtcataaacctacacaactcatcattaattgtctgattcagaacttatgta

SEQ ID NO: 22571 - DNA, 399 bp, Glycine max
  unsure at all n locations
agcttgctgccacggagttttccgactatgctcttgtgtggtggaacaagctacaaaaggagagagcaagaaatgaagagccaatggttgatacatggacggagatgaaaaagatcatgaggaagcggtatgtgccggctagttactcaagggacttgaaattcaagctccaaaaactaacccaaggcaacaagggggttgaggagtatttcaaggaaatggatgtgctcatgattcaagcaaatattgaagaagatgaggaggtaactatggctcgatttcttaatggtttgactaatgatatccatgatattgttgagctgcaggagtttgttgaaatggatgaattgcttcacanagcaatccaagtagagcaacaattaaaaaggaaaggagtgg

SEQ ID NO: 22572 - DNA, 422 bp, Glycine max
  unsure at all n locations
tattgctgccggcacagagatgcaatgttctggctagttcccaaaggagaacctgngcatgtgtggcattatataagttaattaaaatccaaggagcgaaatagttagagtaaattgcatagaattggtcacattaataatgcaaagatgaaggttgcacgtatagtccctcctgaatatgcatttcctcagtcaaattagtcctcatgatacaaatctcgataacgaatttgactaatggaatataaattcaaggattaatttgactattcatatatatattcaaggaccttaaccttgatttctatcatttaagaactaatacgaggcgttgtactgtatctttcacgaactaatttgactatagactcanatattntaatatgagaaagaaattcagaagaaagttagtagcacaccct

SEQ ID NO: 22573 - DNA, 467 bp, Glycine max
ggcgcctgtgctcatacactgcggaccttaattctacgctccgcgctcatttgggaggctatgaactctattgatctctccatgaaaggttggatcaaatggggaatatagatcataatgattaagaaaggaggacaatagggaatgatagtgatcctagacaaaacctgcttgatggtatttaactcagcattcctccattcatatgaaagaatgatcctgaggcctacgatgcgtgcgagatgaaaatagagcatgtttcttcatgctaccactatgatgaggaccacaatgcgaagcttgccgccacggagttatccgactatgctcgtgggtggtggaacaagctacaaaaggagatagctagagatgaagagccaatggttgatacttggacggagatgataaagatcatgaggaagcgggatgttccggctaggtactcaagggacttggaattcaagccg

SEQ ID NO: 22574 - DNA, 476 bp, Glycine max
  unsure at all n locations
cgcgtgattgtgaatcgtgactacgctcctttgaaactacgcttcttactataaagctggaatgcgatcaataagtaaaagaccatccccgatcngagattggaggacttcataggaaaaagacagattcccgatcaaagatcggaagacagctaaagataatatatagaatggtcgctggaccacacaatatctgaataatgtacaaaattgtcacatgcaagaatgatatgaaaaacaaccatgacttgagacgcatgaagcaatccccttctttgttaccaaccaaatctttgtgctcgcatctgtttcacactgtgccaaaagaaaacagaaaaggataaggctgatatgctcagagccaaatttgccaccaaatacaccattcccgaaaaagtcatgttacgtcatgattgcgcatgttatctgtgatttgataggaaatgatttgcaaagtcaagtcatgacatatctat

SEQ ID NO: 22575 - DNA, 389 bp, Glycine max
  unsure at all n locations
agctttctccactatgttgcctgatgcctgaaatgtcttttctgatggcagtggtcctagatgcagggaagaatttctccatgaacaccctcttaaggtcattccagctgaaaatggacctaggagcaaggtagtatagccaatcttttgtcactccctctagagaatgaggaaaatcctttagaaagatatgatcttcctggacattagggggcttcatggtggaacaaaaaatatggaactccttaagatgcttataaggatcttcacctgcaagaccacgaaacttgngcagcaaatgtattagtccagtcttgagaacatatggaacaccctcatcaggatattgaatgcacaagctntcataagtgaaatcaagtgcatccatc

SEQ ID NO: 22576 - DNA, 423 bp, Glycine max
  unsure at all n locations
ctcagcttgcttctacaatgccgatgtatgaagaggctccctttatagattatgtaggggcatgggccagcaacaaaggccgtaagtgaatgaagcccctccatgccacatcaacaagagtttcgtgagtgtgggttggaggtgtgaagggcaagtcgccatgatacatgattaagcccgccaagagtgttcaagcttggtacattcgtgccttcctaatttccaattaggaaactagcgagtggttgaatggcctgaggtttccgtggtggagataatgtaattctttagttttaaccctacagctgggcctaggctttanggtttttctccttgttaaggcattatgtcttttgctattaagatatataatacaagatctttccttcatctattcttgcatcttcacccattctcattaat

SEQ ID NO: 22577 - DNA, 358 bp, Glycine max
agcttattggaacttaattatatacgtaactgaattatagttcataaagtaaccaattacatgtttgaatattcttatcctgccctatctatcttacagaagtctatcccatgccgaacatatcaacatccaacgtcctagactatctgcaatcaacaactatagatggtaatcagagtcaaaagacattaattaccttcttagcgagagtgttgttttgttcttgtagggccttatcctgcatcatctgaacataacatctaatccactaattgcatagatacaggatctatctacacacgactgcggtttgctatcataaaaacatgaattccacttgatctaaccattacttcta

SEQ ID NO: 22578 - DNA, 421 bp, Glycine max
gttaatggttgtattcttctcgaagctagttgtctattccgtgttcgtgtatggcttaactatcaagtacatagtccttcaggtgcaagggagtattactttgtcttttgggctcagctatttgccactcgtttctgctagatgtatcattaccaccgtcttcaaataacaccttgtcctcaaggtgatgaagggacttaagggttgaccattcttcccacgatgcttcatcaggatgaagaccctgccattgaactaacactgggtgctttgggcctatgtccgagggcacgatcttgtgagccaagatagctaagggaactggaaccggttggttgtccatggccaatgacggaaggtgcatagcttgttctgatgttggagatccgatgaagggttttaagatagagcaatgaaatac

SEQ ID NO: 22579 - DNA, 378 bp, Glycine max
agcttgtacagataaatataccaaggtgctgtgctgaaataagactaaaaatttgtgcataagcttagacgagcccttgcagttcataatcagtattttgtagatgtctacttgcgcatgcatatactatagttaaactattatacagatgatgggcataaacttattgaagcctaaagataaagagtatactgggtgcctgtgtggtgatgtgctatgctaaaagcacggaacttggtacccttggccaagttgtgttagattcacttaacctggttgtacagtgcatatacaagtctttactcatttaagacattattacgatgtgtatatgctagttaatatcttgagggtttctgggcttcccaatacaagaat

SEQ ID NO: 22580 - DNA, 375 bp, Glycine max
  unsure at all n locations
tctacacaaatcataagattcgttattnttttgtacactgactaactcttaatcatcttatagatggatgtacaatctcatcacttatcttttcttttgaggtgttcaaggtgttatcggagcttttttgaactatttaaaaatttatagaaagctttttatagaaagaatttaaatgagagagcgtaagttcataaccatgtattcaaagattctagtatttataggtcttcttcaacaagtgttcattgtttccatatggatagacttgagctcgcgtctaaagattgtggctgctagagaatttaatgcttgctctaaatgcatgtacttcttcatgccggaaaaccactcttgtgagcctttatgttactt

SEQ ID NO: 22581 - DNA, 381 bp, Glycine max
  unsure at all n locations
agcttcctttaccacaaagagcagagaaaaatgaaagatcgaagaaatacaagtgatgaggatgtctcctccacctctagaacctcacagttactcacaaactcatctcaagctctcaggacggcttcctcttaaagcttggttctctgcaggtcttcacacagcaaaatctctcaaaactctntggaacttggacctttctctctctagaaatctctaatcatgcaaaagcttcgagaactgcccaaactcctctccaaaatctgatttcagacttaaataggtggctctgtttatgcgtgcttgcacgcttagggcaactctgaaccgcttagcccgcattagtgaatntcggcttagcgcgtgcttttctcgctcagc

SEQ ID NO: 22582 - DNA, 418 bp, Glycine max
  unsure at all n locations
ntacacttgctagatagagcagggtaggtatgaaaattaaccaccttcattntgcttgatgcattagtcttttagattgacatgatgcataaaataggatgtttcatgctataaaactaattcctttttaggttatattttaattttaaattctgttgaatattttctcgctcccttcttgtgtggatgcagatgctgaaatcaatttcggccaggaactctgttaacagtgaccaaattaataccattgagcttgaactgcttttcatatacactntctgtgcttatgatatacaaggcatgctgaatgacttangatcacattgttttgtcctgatttaacttcaacaaattcatgctntatttgttgattctattgcagtataatgtttgttaacaaccaattagtggaaagtgg

SEQ ID NO: 22583 - DNA, 405 bp, Glycine max
  unsure at all n locations
agcttatcttcgttctaaaaaaattacacatttctattttgtgaggatgaaaaacatactgaaaattttgcaaggataaattccaaacattttgatatttataagaacaaaaaatatattttagccttgtttttattgttaaaaaaaaagagaaatgctactaacatactctttaacacactccttcatacacactttctcttatgtgttaaaatgtatttagttgaagaacaagttccacaaaatcttgaacctaccaagtgtgatggttgggattggtatgagtgggatcanttgccacaccctttggttgggcctcttgagaaaatggtcaaaggagctttcgacccatttccaatttgattctggtaattggtaatgatctttttgtgaggattcttggat

SEQ ID NO: 22584 - DNA, 419 bp, Glycine max
  unsure at all n locations
tggacgaatccgaacctaagtttctgatgtgtgtcctctaaaaactcagacactatcctactttttctttccctttctctctctctctctctctaatccaacgatcctagcctctcttccttctctttctctacccttcgccgtctctatttctactcggaacccttcttgcccttgcctttcctcctctcacctccatgacaacctcgatgacaagttgttcgccttcccctctttctttctccctccaaatctaggactccgacaatgacttcctcctcatcaagtcggtccttccacctcctctattggctcaaccctgacactgtgcaccactgtctcttcctccgatggatgcctctacatcgacaaccagatttgcgagggtgtanggtggaggctntgcgagggtggacttg

SEQ ID NO: 22585 - DNA, 402 bp, Glycine max
  unsure at all n locations
agcttatcacgattcaaagctgttgaagagagacttcaaaccaggacaacatgtattactttttaattcaagattgaaattatttcctggtaagttgaaatccaaatggtctgaacctttcatcatcaggaaagttcggccttatggtgcaatagagttgtatgatccacaatttcaggaccttgactgaacatggttggtgaatggccaaagattgaaactgtaccatggtggagagtttgaaaaggcaaacaccatcttaaatttgatataacccattgaggtatatgcgtcaggctaatgacgttaaaagagcgcttcctgngaggcaacccaactctgatttctttcattntgtttttcatgcattgcataagttggaatttgctntatgatcatcga

SEQ ID NO: 22586 - DNA, 429 bp, Glycine max
tggagaggatgcttcaatggaggaaaagaaagagggatataaagatagaggggggagcacgaaattgaaggaagaaaaagggagagaagttgaactttgagttgtgtctcacaagactctcattcatcaaagttacaacaagtcttacacatgcttctatttcgcggcccaacaagcccgttgacacgcggagatttacgtcatcttccgcgatcacaagatttgtcatactgacatttgagtcacgctgacaggcggagatacccgagtggttatccgtgtaatctttcttttgctatctctaagactcaaagcatgatagctagctgagtggataaacgtgcagatatatattatgcgccctttatcattcagattccgcaagttgggtgataaacgcgcagagacaaattctacgccctttgtcat

SEQ ID NO: 22587 - DNA, 391 bp, Glycine max
  unsure at all n locations
agctttctgttcttcttaacgagattctcgacgtactacgggacacaatcggacatcccagtcaaaagttatcgtcgatttgaatctgtagatagcttacgttttcaattatgagcgtcacgatatattcgggacacattcggacaacccagtacaaagtcattggcgatagaatctgctcatagcttccgctttaccatctcgatacatgaatggatgcattcggacatccgaataaaatgtcattgacggttgattttgctcagagcttctgttctgaattttgagcgtctcgatatacttcgggaccgattcggacatncgagaataaagcactggcgtaaaatggctaagagctacgttttcacatacgacatcgcgatacgtacgg

SEQ ID NO: 22588 - DNA, 250 bp, Glycine max
ggatctacgtaccctacaaccaatggaagcaatttatttctaaaatattattattattattattattattattattatggttgtcgtccttaaggatgtcaacgggataaggcaaggcaaaaagtacttacctgctccccatccccatccctgatcctcgtcgaggacaacttatttccccatatttgtccttcgtgggaccatcaattttatatatatatatatatatatatatatatatatatatatt

SEQ ID NO: 22589 - DNA, 401 bp, Glycine max
agcttgtaggattatggggtacccatcacatgtggtactaggtggcggtcgggcgatggtgcacaacaagttttccacatccacaatgcgcgcataaacccaccatcccctgtagcccacctccaactgagctcacgtactcccacgtagtccatatcctcgtttctctcaacaccgggtccccatcaatcctcccaagcttccccaacatcaaagtaatgcaacattcaaacagcacaaactatcacagccaagaaaacagagcaaaggcagaatactctgccaaaacaccaaccaaaatcacagcttttctcacttaaagaccccagtaacaattccttcgttccaattcgttaaccgttggatcgactccaaatttttactggaagtctctagtacat

SEQ ID NO: 22590 - DNA, 408 bp, Glycine max
ttgagcaaattcaagcaaattatcactttttactcggttgtctgtttgagtcccgtaatatatcgagacgctcgaaatggaacaccgaatctctgagaaaattcaaacgacaataactttttactcggatgtcagattgagtccagaaatatgtcaagatgcttgaaattgaagaccaaagctctgagcgaattcaaacgacaataactttttactcggatgtgtgactgagtcccgtaatatatcgagacgctcggaattgattatcgaagctctgagcaaattcaaacgacaataagttattactcggatgtctgattgagtcccgtagtatatcgagacgctagaaattgaataccgaagctctgagcaaatgtcaacgataataactttttactcagatgtctg

SEQ ID NO: 22591 - DNA, 397 bp, Glycine max
agctttggctgtcttcagctctgatttcgtgagtatttatagaagatgacgcattgtaatcgattacaggtattggtaatcgattacaggcccaataagccttctggtaatcgattacaggatgttgtaatcgattacaggctgcctgttcatgtgtaatcgattacactggatggtaatcgattaccagagcctatcctaggctagtttctaagagaatatctatatttatgctcaaatacatcctatatgactaattttcactactaatacactaaattcaatcatccaattactatatacacaagaaatcataaattctatcataaaaacaagaattcaaacatgatcaaacaaaataatctacaatcaaaaggtaaaaagtaaatcaaccaat

SEQ ID NO: 22592 - DNA, 446 bp, Glycine max
  unsure at all n locations
tagaatactcaacgcttggatattntgggatgctttcatccatgtcggggcgttggtgattacgtgggcgtctccttcctttttcctcgcgcccactactagggctcttctgttgttgttgggggccacattgcaagcatattcgaacttgccttttcgtagtccgaattcaatcctttctccggcgaagacgagatccacaaagttagctggcatgtagcctataagcttttcatagtagaacgtgggtaacgtatctaccataattgtgatcatctccatttccgtcatgggcggtacgacttgggctgcgagatctctccatctttgggcatattccttaatggactcatgctctcgcttagtcatactctgaagctggttccgatcgggagccatgtccgtattgtactggtactgcctaatgaaggaagttgccaagtcct

SEQ ID NO: 22593 - DNA, 392 bp, Glycine max
agctttcaacattacatatttggcttgcaaccataagaccattagcttgtccactcttgaaggttatggctaattagttaaggtcattaatgataacataaatatttgaaacatttgacaaatgactaagtagcttaaatgtaccatattttttggatcacacaaatatctactaccacagtaattacatgttatagttgattccttcatttgatttttagaaataaccttgaattgattataaacaacaaaaatttaccttttaccacttgtatttgactttcatttttgtgttggttttgggagtgaacattagaattagcttttatagttacatttgtttcaattggttgtttattaggttagggttcatcaccaccacctcttgtttc

SEQ ID NO: 22594 - DNA, 425 bp, Glycine max
  unsure at all n locations
ntgaagacatgaaagagaactaaagtgctcattatacttattcttttggtaaaaagctctctgtgtaaattcttgtaaagtttagaaaaactctcaaaacatttgttcatcttgagggaaaggactaagtgctaaaattgcttatttgtctgtaagacaataaagtgctagtcattgtgcaatcaaccaacaaatcttttattttgtgttacagacaacaatgacttggtagattaaagaatattggttgtaacaagcttggagtaaaacttaggctaaggatctagaagtgatagtgataaatacttgtaacttgttgaagttggtggaacttagtggtttgccatggacagaacgtagtcttggtgattgagacgaatgaatataaatttcctacgtcttaatcttattattttctcttctgc

SEQ ID NO: 22595 - DNA, 392 bp, Glycine max
  unsure at all n locations
agcttctacttatgtggcagggcgggcttccttcaccttcttgtctccaacgcgaactttgaccattgttcttccttcccgcgatgcttcttttcatgtctgcctgagtgggcttatagcctaaaccatacttcccacgattaccttgggtatttatcagtctagttatgccgccgttgttttttcctaaacccatcccgggctcataaccgttccccaacataactcgggccatcattaccgctgcatcggacagactgggctgcccaaagagggagtccacggaggaaatgttgaccacctcaaaagactgganagcagtttctaacgattcttctgcggcttccacataaggcatggaggatgggcagcttaccaagatatcttcctcg

SEQ ID NO: 22596 - DNA, 427 bp, Glycine max
  unsure at all n locations
tgccgccacggagttttccgactatgctcttgtgtggttgaacatgctacaaaaggagagagcaagaaatgaagagccaatggttgatacatggacggagatgaaaaagatcatgaggaagcggtatgtgccggctagttactcaagggacttgaaattcaagctccaaaaactaacccaaggcaacaagggggttgaggagtatttcaaggaaatggatgtgctcatgattcaagcaaatattgaagaagatgaggaggtaactatggctcgatttcttaatggtttgactaatgatatctgtgatagctgcangaagttgttgaaatggatgatttgcttcacaaagcaatccaagtggagcaacaattaaaaaggaagggagtggctaagaggaagtttaccaactttggttcttctagttgga

SEQ ID NO: 22597 - DNA, 382 bp, Glycine max
  unsure at all n locations
agtttgtagcctgttccaaggttcaatgtttgctaaaaaaataattgagaggaggtatctgggctgtagaaccatgaattgtaattggtcaaagattacaatttttttaaaaaaattatacggtcacttagaatttttttaaataagaaataaaaactaaaaatctaagtcatgcaatcttatatgaatgattaagatattaagtttataatcatatatgatacttaaaagagtaattacatttcacataagtatataagtagcgataaacacaaccgtaaatcttataatacaaggtgataacaaatgaggttagtttactattgcccctctaatactcgagattttntttcttctaattactacatttgcgaaattgaac

SEQ ID NO: 22598 - DNA, 374 bp, Glycine max
aactacgcttactctaatatataattaaccgcattttctctactattataagaaagaataaggggctaatataatgtgaaaacacaatactggaatttgttcactgtttatgttgttctgaattttctttttttgaataatgctctcaatatttttccatgcttgatttttgcatatcgtgatgtttcaattaattaaactcgttcagcgtccagattttaaaaaatataactgatacatattagtatgaaagatgtattataattgtatatttgtatggtcgtcgagagagactgacattaagaacaattcttcttagtacacatttggattgggtctagcttgtttaatgtatcagaagtgtactataattg

SEQ ID NO: 22599 - DNA, 384 bp, Glycine max
  unsure at all n locations
agctttntagctcatgctacaggaattggcaaccaacgtggcttgtgatgtttctctcccagccgacaattatcccttttggttggcccatacaagtgagggacattccgtgtatttcactgtgcctgaggattgtcgcttgaagggaatgattctatgtgttgtatatttatcaacccctgaaatcatggcatccgaatgtctaattagtgtcttgatagttaattacacaaagtgcaccatccagatacacaagcgagacacagtaatttcctttaatgatgaagattggcagggcataatatcacatttgggacctggagacgaagtggagatttttgtgacttttgngcatagattggtggtgaagaagacagctgtcta

SEQ ID NO: 22600 - DNA, 377 bp, Glycine max
  unsure at all n locations
tgtaggttatagtgacaatgattgngctagatatgaatatgatttataaattactagtggatttatgttttcaaggggaatacaaccttcacttggatgtcaaaaaagcatttgatagtcactttttcgacctgtgaggtgaaatacatagcagctacttcatgtgtttgtcatgcagtttggcttaagaatttgttaaaagagttaggcatgtcacaagaagagccaaccaagatctttgcggacaataggtcaggcattgctctagcaaagaatccagtgttccatgatcgaagcaaacatattgatacctgttaccactacataagggagtgcatagcaagaaaggatgtacatgtagaatatgtgaagtctca

SEQ ID NO: 22601 - DNA, 387 bp, Glycine max
  unsure at all n locations
agctttgagccaaaatcctgactcaccataaaccttgacccagggtgagaatgtcaatccttaccctcggaagcaaaaaagaatagaagggaaatttccaatcaaagaaaaagagaaggaaaatttccaatgaaagcaaaaaagaaaagaaggaaaattccccaatcaaagagtgggagaaagcaaaaagaaaagaaaggaaattcccaatcaaagaatgggagaaagtaaaaaagggaaggaaagaaagttcttgaaggaaaaacagaaggaatatgcagagaggtctttggaccggacaatatctgaacaatacagaattgtcaccaaatgaacgaaaaaagaaagatagggaaccacgacctanaatagtcttctccctttgat

SEQ ID NO: 22602 - DNA, 415 bp, Glycine max
  unsure at all n locations
tacctttgtgagaatttgagccattcatcatcttaatcttttggtgtgttttgccccattgattgcttgcacaatagccttggcttaattcttgttcatgcttcctaattcacatgcatatttggaaatgatttaggcaattttgttcttataagcttctagccaaatggacttaccttgaattaattcctttgatagcccctttgagcctatgttcccctttctttgttttgaagctcattacaagccttaagtgaaaaaccatgatatcaccttacccttaaggaattttggagctttggaattgttttgggaataagctgggaataagtgtgggggggtatgtttcattggaagatatgatttttggccatgcttaatgttntaatttggtcatgcttgatgtatntgtata

SEQ ID NO: 22603 - DNA, 380 bp, Glycine max
agcttttggttttcttttttgatttctcagtataagtgaactccttcatgagtggttttgtagagcataaaaatatatcatcaagagtggctttttttttaaaaaattgtcatcttattatgtcttttgtaaaattcttaatatagctttcaacaatattagtagcgacgacatatattatttactatgaggaaattcctattgcctccctgttgattgaattcaaagtttgaagaaactgttgctgacatgggaaatgtggacaaagacaacaagacaggataaaaggttatggttcattcattgacagaagataggacaaagtttatggggggaaaaagtgggtgggatgtttaaatatatatctggttttctcaata

SEQ ID NO: 22604 - DNA, 365 bp, Glycine max
cttgaagagctagcttccatcgtcaaattctcaccgttattatcagctttgttgatttccacattactcaccactatttgttgttgttgttgtagttgtgggaccaatggctgcacttgtggggcctcacgaactgttgttgcttgtgcttgttgtggtgttggagttgatgttggtgttgcttgtggcactggttgctgtggaacaacagtgatgctgctgttattcaatgctggttcaagattgatagtttcttgttgctgatgttcggctatcttttgcataaatgtcataacagcagcatcttttgctgcggcaatggacctctcttgtgctagaatctccctttcactgttgatcctttg

SEQ ID NO: 22605 - DNA, 361 bp, Glycine max
tttcatgcaagcttggacactttcaatatgattgtcctacgtgggaaaagaaaccaaattatgctgagatggaggataaagaggaacaagaggatgagctcttgttaataaccttcatagattgcatagaagggaagaaggatgagtggtttctagactcgggatgcggcaaccacatgagtagtaacaaggagtggttctcagaattggatgagaactttcggcacaatgtaaggctgggtaatgatactcacatagctgtgaaggggaaaggtagtgtttggatggttgtgaatgagattatacatgtaatcacacatgtatattatgttcttgaactcaagaataatttattgagtat

SEQ ID NO: 22606 - DNA, 472 bp, Glycine max
gggccgactgttgttgaaacctcgctttcgtgacctatgaaactcagcttgaggagttgatgcataggaacaatttacttttaagtgggtcctaattggattcctaattttcaacttacctatttggatgtgacatcatggcatataggtcccaactttccatcgtggattcagtcacaaaacaaacttcaatatgttggactgtctaacacggggattttagattctattcccacttggttctgggaaccacactctcaggttttgtatttaaacctctctcataatcatatccatggtgagcttgtgactacattacaaaatccaatatctatccaaactgttgatctaagcacaaatcacttatgtggtaaattaccctatctttcaaatgatgtgtatgacttaaaccttttcaccaattcattctctgaatccatgcaagattttttatgtaacaatctggacaagc

SEQ ID NO: 22607 - DNA, 375 bp, Glycine max
  unsure at all n locations
agcttgtagggttaaagtctcactattgtcacgtgctcatgcaacaattgttagccgtggctatacgagacatcttgccaaacaaagtcaggttagccataactcgcctgtgctttttcttccatgctatatgtagcaaagtcattgatcctatcaagtttgatgagctggaaaatgaggctgcaattatactgtgccagttggagatgtattttccccctgttttctttgacatcatgattcacttgattgtgcatctggtcaaagaaatcaaatattgtggtcctgtttatctacggtggatgtacccggttgagcaatacatgaagatcttanaagggtatacaaagaatttatatcgtccagaagcatcta

SEQ ID NO: 22608 - DNA, 430 bp, Glycine max
  unsure at all n locations
tgatattaaatntaagtaaattacttgcaattcaaaatgttaaattaaatttaattgctattatgtatcacgcagtttatatgtaatttactttttacttaatgattgcaaaataatgcaagttatatttaatttaatgtttagttaatattttgtaagagttttgtttagctgatatatacatggaactagattgcattaaagttagattttttaacagaaaaggttatttaagtattttgattttagaataaaataaaaggaaatgtaattggcccttgtgcttatttaatgtcaaaattcctaatattttttagaggcatttggggaagctttccttgaacacaaggactgttctagggactcaaaagtgaccaagtttttggtttggttgtggctggaggcttctttgttctgttctttgtgagac

SEQ ID NO: 22609 - DNA, 488 bp, Glycine max
  unsure at all n locations
ggcatgggattgtacgtagctatgacgtgacctatagtatgctcaagctcactntaagactatatattgatttctttagtttgcattctatgtgttcctttccctcaactgagaacctcattggttggtccatataaacattctcctctaaatctccatttagaaaggcagttttcacatccatctgatgtagctccaagtcataatgggctactaatgccatgataattctgaaagaatcctttcgtgagaccggtgaaaatgtctctttataatcagttccatatttctaagtaaatcccttagcaacaagtctagccttgtagcgttcaaggttgccatgagagtcacgtttagtcttgaagacccacttacaaccaactctcttacaaccctttggtaattctacaaggtcccaaactccattatgttccatggaatttatctcttctttcatgacatttaaccacttctcagaattatcgcan

SEQ ID NO: 22610 - DNA, 403 bp, Glycine max
agcttaaacattttatttcgagcgtctcgttatattacgggactcaatcagacatccgagtaaaaagttattgtcgtatgaattggcttaaagcttaaacattcaatttcgagcgtctcgatatattacgggactcaatcagacatccgagtaaaaagttattgtcgtttgaattggctcagaggttcaaaattcaatttcgaacgtctcgatatattacgggactcaatcagacatccgagtaaaaagttattgtcttttgagttggctcagaggttcaacattcaatttcgagcgtcccgatatattacgtgactgaatcggacatccgagtaaaaagttattgtcgttcgaattgggtctgaggttcaacattcaatttcgagcgtctcgatatattacg

SEQ ID NO: 22611 - DNA, 414 bp, Glycine max
  unsure at all n locations
tacgacaataactntttactcggatgtctgattgagttccgnnaaanatcgagacgctcaaagttgaatgtttaatctttaagccaattcatacgacaataactttttactcggatgtctgattgagtcccgtaatataacgaaacgctcgaaattgaatgtttaagctttgagccaattctaacgataataactttttactcggatgtccgattgagtctcgtaatatatcgacacgctcgaaattgaatgttgaagctctaagcctattcaaacaacaataacgttttactcggatgtccgattcagtgacgtaatatatcgagacgctcgaaattgaatgttgaacctctgagccaactcaaacgaacaataacttntactcggatgtctgattgagtcccgtattatatc

SEQ ID NO: 22612 - DNA, 403 bp, Glycine max
agcttcttcacatttccgcctttgcttgaccttctttatgcttaaaaacagaaacattatgcataggcaaaagatcaagaggagttagtgggttaaaaccataaacaacttcaaaaggagaacaattagtggtgctatgaacagctctattgtaagcaaattcaacatggggtaaacaagcttcccaagtttttaagttcttcctcaaaactgtcctaagcaaagttcccaaagtcctattaacaacttccgtttgcccatcggtttgtgggtgacaagtggttgaaaataacaatttagtgcccaacttgctccacaaagtcctccaaaaatggcttaagaacttagagtccctatcactaacaatgctccttggcaaaccatggagtctcacaatctcctt

SEQ ID NO: 22613 - DNA, 423 bp, Glycine max
  unsure at all n locations
cacatgagtttgacaaaccttttaccatatagtttttactctctggtaatcgattaccagattattgtaatcgattaccagtagcaaaattgttttgaaaaagttttcaaattgaatttacaacgttccaattattttcaaaaagctgtaatcgattacaatgtttgggtaatcgattaccagtgcctttgaactttgaaattcaaattcaaatgtgaagagtcacattctttcacacaaaagctttgtgtaatcgattacactaatttggtaatcgattaccagtgactgtttctgataaatcaaaagatgtaactcttcacaagggttttgactttntcaaattgngtttaagttgttctaaaagttataactcttctaaatggtcttcttgactagacatgaagagtctataaaagcaag

SEQ ID NO: 22614 - DNA, 401 bp, Glycine max; identical to SEQ ID NO: 22524

SEQ ID NO: 22615 - DNA, 418 bp, Glycine max
  unsure at all n locations
tctatcaagtggtaatcagagcacaagagcttcaagtatgtgctccttaaacctccattaattnttttgctttaccttctcttccattggtgtttcttcattttttctccatgtatctcctcacatgtcttgtgctaaatgttgttaacatgattctttagagtttccaccgattaaacttgctacagaagctagatttgattttctatggttcanatttcttgttcttgttcttgaaccgtgaattgtgttgagtttaagttcctttgagttttgtcttgttatttttgtggctgagacctaaacaatanaattcttacaaaaatattatagtagaagaaaacctcanaaatctagagtgactttgttcacctattgtagtttgtcatagaagtcatgtctagtcatgaaacttatc

SEQ ID NO: 22616 - DNA, 354 bp, Glycine max
  unsure at all n locations
agcttagttagtagggggcctgatgaccttgctaagagcaatgggcactctgtagaactgaccgcattcacctgtccctttggcacttttgtctataggaggatgccctttggcctatgcaacgcccctggtaccttccagcggtgtatgcttagcattttcagtgattntttagagagttgcatagaggtttttatggatgattttactatttatggatcctcttttgatgcatgtttggatagtctagatagagttctcaatagatgcattgaaactaaccttgtgctaaattttgaaaaatgtcactttatggtaaaacaaggtatagtcttagggcatatcatttctagt

SEQ ID NO: 22617 - DNA, 426 bp, Glycine max
  unsure at all n locations
tcctcggggccattcctgcgaaggcaaacatttggaatgttaattntaccagtgggacactatccttaaagcaagaatggcatataacctcctcccataaatacaaacatcaatgtaaatttagagcaagcttatgcgcatatttccttacgaacgttctcttgcacaagacattctattaactaagaaaaatgcacccatacacaatcaaggcagcttcgttacctagattatttacacgtatttccaaggtgtatttgttacttacatcacacacatctccttggctaaatttacatacatgcatactcaaagcattttggggtaccaaaaattgcacatgcgcacatcttggtatttctaacacctatacatacacaaacttcatgatgaatcttgactatcttcacaaaaaggtgctacact

SEQ ID NO: 22618 - DNA, 407 bp, Glycine max
  unsure at all n locations
tctggtgggacatcttgacttgctgtccaatctgacattctcctcttattctgccttcttctattttcagattgngaatgcctctaacagcacctttgtcaatgattttcttcatgcctcttaagtgcagatgtccaaatctttgatgccatattttgacttcatcttctttggagaatagacatgtggaggagtaactggtttcttgaggtgtccataggtagcagttgtcctttgatctgctgcccttcattagaacttcactcttctcatttgtcactaagcattctgactttgtgaagtttacattgaatccttcatcacacagctgactgatgctgattcaagttgtagtcagtcccttcaccagcagtactttgtccagactatgaagtccatcatggact

SEQ ID NO: 22619 - DNA, 395 bp, Glycine max
agtctttttacatctttgggttgttctaagcacgagaaggtgacgggaagaaaaggggaaaacactacgcatttcctaggtttttctatttgatcactttaaggtaaatgtttatgacccattatgttagatgagtatgttataacattgattagtcatgggctgtgagaaaaagagttggaaactaagtattagagattattatgattttctcaaaaccctaggcttgctaaaattggggattttgtctaatcccttgttccattatttaaatgcttaggttctgtggaaaatacagtggttgaccttcctaacatcggtagaagtcaatgattggcgttattaggtgagtagctaatatacttagcgattttcttatagttcaattatggaga

SEQ ID NO: 22620 - DNA, 418 bp, Glycine max
  unsure at all n locations
gaattacacaatanaacatgccttggtcgtttaaatttatttccctcccttgctacaattatatttcacttaattggacaaaacttatgtacaattttattatgggtaatggtattattactctatgtcatattgctcggtttttttttttttaaatacaccttttttttctaatttattgtaatttaatttccaatatacttgagactttttctctcctttttgttttttttactttaaaatattatcaaatataaatattatattatataattttttntaattggnttaaaattacttatttatcaaattaaattatataattatgtnntttaatttttttactaagatggactaataataaaataaacaagataaccanatataattgtttacgtttgtattgataatcaatata

SEQ ID NO: 22621 - DNA, 385 bp, Glycine max
  unsure at all n locations
agtctctctcttttcttcggttgccgagggcggtccttccgtggacaaaactattggttgtgtcgcgatgttgggttgaggcaacgtgctgggtgccggcccttcggggatcgggggatagaactcgacatcccttcgagcatagtcttgagggtctttgtgggcctcgtcgggctgttgagaaggttctctttcaaggacgggagaagcaatatggaccgcatcgtcttgcaagacgggtggtgagtagttaggcggcaatccataagggtaagccgctcggttgtatcccaggtgagggctgccatcgtgccctagtgtgtcatttccctgtcctactatgttngagggaggatggtgcgcagttgccaagagagttgggtct

SEQ ID NO: 22622 - DNA, 398 bp, Glycine max
  unsure at all n locations
tagcgcacaggcgcgcttagcctaactactaaagcttattaactgtgagagagttgagcatagcgcagcagggcacttagctcaacacatgacaaaggcttagcgcacagacacgcttagccttattcaaaggaaaacttacaaaagcatagtggcgcttagcctgataggccaggctttgcgctgaacaaaaattctcaaaatcttaatgtctgaacactagttctgcttagcgcatagacactcttagcgggctcatcacttacgttcatcagtatggatgaacgcgcgtancgtgacatgatccgcttagcgcgttcatctggaaatgtaatattctaacaattgctatgaacaggctaagcgcagcacgtgcgcttatcacgttcattgcgatt

SEQ ID NO: 22623 - DNA, 381 bp, Glycine max
agcttccaaccctacccctacccctctcttaactcattcccaattatggatgttaacaaatccgcattgaaagtatgaccaatgatattttataacatgtttggggtggttgcatatttttagtttttgattttcaaatgtaatttttgaaataaaatgtgcttgacaacaatgattgaaataatttataactcattcaaagataaaaaagatttataaatttggtttttagttttagaaaaacacatttttcttatatttgacaatgaccattttcgctaccaccaccagcacggttggtctgtcaccaccaccattggaactacttagtggcaaagcacggcccaattagttaaaggggccaaaatagttaagcaacca

SEQ ID NO: 22624 - DNA, 413 bp, Glycine max
tgccttgtcccttgatatatttgatggactcatggtttctatgaatgacaaattccttgggataaaggtagtgttgccatgttttcaaagcccacactaaggcaaacaactctttatcataagttgaatagttaagggtaggaccacttaacttttcactaaaataagcaattggatggccttcttgcaacaacacaaccccaatcccaacgtttgaagcatcacactcaatttcaaaagatttttgaaagtttggcaacgcaagtatgggggcattagttagcttttgcttaagaacattgaaagcttcttcttgtttctctccccatttgaaaccaacatttttcttgagcacttcatttagaggtgctgccaatgtgctaaaatccttcacaaatcgtctataaaaactt

SEQ ID NO: 22625 - DNA, 377 bp, Glycine max
agcttgctagagaagccatggctttctgtatgatgagttgctactaatgctttggctttgatatgttgcttgaatctcatcttcattgccacatggccaacttcatttatttgtgtagaatttgcaattcattcatgtcatgccatgtggtttcaagatgaataagcctatccacttagttgcatctctttgaaagataacatactacgtgtgctgattgagcggcaaggtatgagaagatgcattatttttatacagaggattagcttatacaacttacgtaaattgatttacatgttaatttgatatactgtcagttacagatatgtatactattaattaattaatctaacttttgaaggactaatcataaaaat

SEQ ID NO: 22626 - DNA, 402 bp, Glycine max
ctcagcttaccatcgatgggacaatggtaccctttgactctcaacagacccagaattctgacaagctgccttctcaagctgtccaaaatcccaaaaatgtcagtgccatttcattgaggtcgggaaaacagtgtcaaggacctcaacccgtagcaccttcctcatctgcaaatgaacctgccaaacttcactctactccagaaaaaggtgatgacaaaaatttacctaacaatttctgtgcaggtgaatcttcttccacaggtaattctgatttgcagaagcagcacattccccctcttccattccctccaagagcagtttccaacaaaaaaatggaagaggcagagaaagagatcttggatacattcggaaaagtagaggtaaacatacctctgctggatg

SEQ ID NO: 22627 - DNA, 360 bp, Glycine max
tcctgcttcatgcaatctttaacaacggtggcacgcctccttcgatgatgagtttcccgtaacggtcgttgtcgcgagcaagggagacgagggaagcggctgcgtctgaacgttcgtccaaggaagcaccggagagaagaatggcgacctgttcccagatgatgcagagaatgggctcgttggcggcgatgggagggaggcccaggtactcgtcgtagcgctcgtcggcggaggcacgtgggacgctcgtagaggtcgttgctgttcctggcggcctggcggatgaggcccgccaacttcttcagtttggatttcagctccagacattcctgtcggaaattctggtcctcttccgcaagc

SEQ ID NO: 22628 - DNA, 400 bp, Glycine max
  unsure at all n locations
ntgatgccttgcttggactcttgtttgccgtttaagttggtcgaagatttctcgaagtttttattttgaccgacgtattttcgacatatttcgctatatttcatgttttcaaaatttttttctttttttcttttttctttcttctttaatgttgatgtattgtattctccaaactaaaagtgttttcaacacattctagcttatgggggtattagacaaaattaatttagttagttactagaagttattttctataataatttttttctaatgtttaaaattggcaactaataacatgtttatggtgatttatttggaaaagtggaagtcccacgtatattgngtgcatcacataggtatgcattgttaattangataagggattatgaatgcaaaggaa

SEQ ID NO: 22629 - DNA, 376 bp, Glycine max
agcttgttaaattaaattttacaataataattacctaaaagtcataagtagtatttattacaatttttagtagttttttttgtgaatacaatttttagtagttgaaagtgtaaatattttttatattggttgcatataaaaattaaactataaaatgaataatataaaggaaattatagatagtagtataatacgtattgccttaataaattagcacgctgggcgtgtatacatattacatagagtggagaggaatcaggaaaccgacgtttgtggaaattatataaaaggtatgcaatagggttgggttagataaaaacccaaaacacaacacggcagtgaagttattagaatctgtgttgtgttgtgttgtgtt

SEQ ID NO: 22630 - DNA, 424 bp, Glycine max
  unsure at all n locations
tccaaatcttanacagttgtctgaacctcctcatacttaccaggtgatgtctaatttgtattcctcgtatctttctttgtttgcatcattgagctctgatggcttgcttatttgaaaccaattttcgattttgtttttcatatatgatttgcttttgtactagtttgaaacaagtctcactgtttttcttctgtttttcattgctttttctttcgcctcctcttgctgtctgcttttttttgtttttttagttaatgagcttatccagaaatgttctacttctccccattggtgtctgatctgatagtgtgtctcatcttttatgttacctttaaccttatgatgaaatattactatgctaaatttcttcccattttaatcttatgcctaaaattggaaacttcagtttcggctttaaaaagtt

SEQ ID NO: 22631 - DNA, 374 bp, Glycine max
agcttgttatgtatgcctacatgcagcgaatccaaattaaattcttatctagctagtgaagcgagtgaccatccatctattaataagatttaatcattttcaaattgaactgtacgtccaactgaacaatcctctatgtcttttaagttcggtgtttctggaattgtattgcttgtctttcacgtttgcacgcacttggagaaattgcgaattgtttacctgagaatcatatcatatatgacagattgaataatagattttgtgtcaagcacaacctttcagtctaacatcaatagacatcaagtatggtacgagtttgtgtaagtatgcaattcgccgattctaacattatttttacaagacttattgtaaag

SEQ ID NO: 22632 - DNA, 422 bp, Glycine max
agacaattacaaatggccagttagtggaaaacatattttactgtgattatattccacaaactggtgttaggaatgaaacaaacttgcaaaatgtatttctgaaggccttgccaaatttggtgcacatatggaaggaggacagcagtgaaatacttaaatataataatctgaaaagcataagcattaatgagagtccaaatttaaaacatctctttccactttctgttgccactgacttacaaaaactagaaatccttgatgtatacaattgcatggcaatgaaggagattgttgcttggggcaatggttcaaatgaaaatgctatcacgtttaagtttcctcagctaaacactgtatcattacaaaattcagttgaacttgtgagtttctacagaggaactcacgctctagagtggccatcg

SEQ ID NO: 22633 - DNA, 374 bp, Glycine max
agctttgtatgctctattcaatggagttgacaagaatatcttcagactgatcaacgcatgcacagtggccaaggatgcatgggagatcctgaaaaccactcatgaaggaacctccaaagtgaagatgtccagattgcaactattggccacaaaattcgaaaatctgaagatgaaggaggaagaatgtattcatgacttccacatgaacattcttgaaattgccaatgcttgcactgccttgggagagaggatgacagatgaaaagctggtgagaaagatcctcagatccttgcctaagagatttgacatgaaagtcactgcaatagaggaggcccaagacatttgcaacatgagagtagatgaactcattggtt

SEQ ID NO: 22634 - DNA, 427 bp, Glycine max
tgtagccattagaagagaatgagcatgtgattggaagtatgactaataatgttagtcagtttgtcagattgattgtgaaggaatgcattgactgtatcccggtgagagtgtgaactttaaattttgagagaaacgattatcatttagtactgatttttgcatgaatctctgaagtatggactggatgcatgaaattgaggatgatgaaggccatgtttgattgtgatagccacttagccaaaaagcttaccacgtgcttgaatgatttatcccttgcacccagtttgagctgaatgaattattgattgattgaaccttgagcctatacagtgttatctcttgctaccttgacttaggctgtaggagagcatcatccacaggaagcatggtgcaaggtaaatttgttccaaatttatgggaggcactg

SEQ ID NO: 22635 - DNA, 379 bp, Glycine max
  unsure at all n locations
agcttatcaaacttagaaatcaagtgatcatgtattccgaaaaatagggggagtaaacgaatgcacattttatctatatacaattgtttgttgcttgcttgaatcttgatttcaggtattgtattgtcatcatcaaaaagggggagattgtagatgcaattggctttgatgttttgatgatgatcatgatgatgtgttgcaattgatgcaaatgggcttttcaagattaaaattcaagacaatacttcaagattacaagtcacaacatcaagatgatcactagaatattaggaagggaattcctaattgaattagcaaaggtttggccaagtgatttaaaataaaaagtgtttttcaaaggttntactctctggtaatc

SEQ ID NO: 22636 - DNA, 430 bp, Glycine max
tgaagggactcccacatttcctggtcctaatatcccttctaacaaaatctttcttcctacacctatactcaccactcctttcacaaccaattaacacaaatgaaatccttcctctactaccagtgtttgtgtcagacctcataatgactgtcataaatccgttttcatgagcaacggatcaagcccactgcaaaacatcatttcgggtaccaaacacctataacgcaacccacaccattttagtcttctaagggacattgattttatgaaaataataacaaaaatcaacattattacctaagaagtattgaatgcattcgaacaatcaacatgctgctcattcacaccacattcctgttcattttgatcatccatatcaacttcttcaaacattatactgtcatacatccattgatctccatccatctta

SEQ ID NO: 22637 - DNA, 382 bp, Glycine max
  unsure at all n locations
agcttcacacaggctaatgtttcatcttaattccaaatcacatatatgtcataaatggattttgcaagtcatttcccatcaaataaaggataatgtgcataatcatcatggatcaataggattttttaagatcggacttgtaggaaattttggatttggttgctttggtctttttttttgtgtgtgtgtgagtaggagagtaggcacaaagatttggttagtaacttaaacggtcgatcacttcctatcccttcacgtcttgaccaagttactatcgtttcccttcctttttactctttaccacaactctgtacatggtttagacattgtttgttccaaagaactcatttttctttaccattccctattgntcttctccatt

SEQ ID NO: 22638 - DNA, 441 bp, Glycine max
tagaaccctagcttatgctacaaacatttataatacaccccctcagtagcttaaccaacaatagcagaataattatgatctttcaagcaacagatacaatccaggttggaggaatcatccaaatctgagataggcaagtcctccacaacaacaatagcatgtccctcctttccagaatgttgttggtccaagcaagccatatgttcctcctctaatacagcagcaacaacaacaattgtcacaacaaagacaatcggcaactgaggctcctcctcaaccttccttataagagatagtgagacaaatgaccatccagaatatgcaatttcagcaagagacaagagcctccattcaaagtctaacaaatcatatggggcagatggctactcagttgaaccaaactcaatcccaaaattatgacaaattgccttcacaaactgt

SEQ ID NO: 22639 - DNA, 372 bp, Glycine max
ttgcttgatggaaacctacacgcctaggttcccctgagacactaactggctataatacaaaaatctgcacatgtctctagacacacaggtttatgctcctgtgacgaccaacacacagactgttgccctcctgtgcaacattatgtatcaattgaacagactgaagctgatgctgcaaacatctacaatacacctgcgtcatctaagaatcgcacgctggcccagcataccaattacgacctgtggagcagcatgcacaatcctacgtggaggaatcatacctaccttgtatgcacgaaggcttggctacagaaaaacccataacaccaccctccttattagcataatgaatctggcccagcagccatacgt

SEQ ID NO: 22640 - DNA, 298 bp, Glycine max
tgggggagacatcgagtgagaactgaaggcgggcttgtttgaaacctactccgactattgctgtgtatacacagactagctctggatctatgtggaaacaagaactgccgatatggatcagtctaataatggtgtttgttgtaactccatgaatgaaagctgagtgcctaaatcaatgcaagcatggggtatgaatgaatgaacagccatgctccctatggatgaaggctcttctagaacctaaacttttttgcattcctttatccttatgaggaacacaatggaggctccattgctc

SEQ ID NO: 22641 - DNA, 375 bp, Glycine max
tagctttgagggtgcgcagcccaccatcttttcatagtagagtaccgataatgtgtctaccatcacgattatcgtctccctttttgcacatgttctgtagttgcatcctatctggaaccatatcagaatagtactgatactgcctaacgaaggcaaccattaggtccttccaagtatggactcgggaaggttccaagttagtgtaccaggtaacaactaccccagtaagactttcttggaagaaatgtattagcagttcctcatctttgcgtatgcccttatcttccgacaatacatctttggatggttcttggggcaagtagtccccttgtacttgtcaaagtccagcaccttgaacttgggaggggtgatgat

SEQ ID NO: 22642 - DNA, 419 bp, Glycine max
tgtagaatggctagacatgatacatgttacggtttgttttggttcacagatttaggggatgccccacattatttccatgacacaaatgcaaagatgatgatttggaaacttcatgcaaaactggtcatgcatgcacctatgtggacactcaagtgtcaaacttttatggtcatgtgatgctagggctcaggatttaaatcaacccaatgtttccaaaatatgttcttttatccatttgtgcattcatccgagtccatttccggcgtccggggaaatttcacagtgttcacccttcaggtgtagacacattttttttcaaaaactagttatgatcaatgaacttttttcaaagataagttggaagtcatctcttttcaaaagcatgtcggcttttcagctaaacaacttattattatttt

SEQ ID NO: 22643 - DNA, 375 bp, Glycine max
ttgcttacataatactgatacatgacatgtttattgcacgctgccctacaagtttattattggaacagggtataaaacttggggaaattccatgctaataaaaggtgtgtataaatcatattaataactcacaattcaccctctactggacattagagcttcccaatggatggtcaccaacctgatattaatatcttggactcataagatcaggatcacactaagctatatttgcagctagctttcagattatatatcatgtgaaagtagatatagctcacgcattatagccggttataccatctaattattagatcttccatatagactatgctcaagttcgagcattccctattccgttctggaccttggata

SEQ ID NO: 22644 - DNA, 396 bp, Glycine max
tgctgatggcagggattcaatctctttcataaaccattatctaactaatacaccttgtaaacagatatatacaagtcagcaacactgacgaagagaatgtattgtaatcactggttattattgttataatgtgaacactgctttccatgtccatgtcaatgccaataagaacaccaggatcatatttacgtagtaattgcctttaatccacattatgtgtgacagtgattggcatacaatgaaatatgtcagagagataccttaaccaatgtaaattgactactcccctggcacacaggaaaataatcttgacagcaattcttgctgcctccatcctgtgaatatttattggccatatatacaccgcttagatctcaactttcggcactctgacca

SEQ ID NO: 22645 - DNA, 187 bp, Glycine max
atctatataggttcggtggttgctagccagcatcttgtttgcaggactagcctagtcgttatcaaaatggccgtgattgaaaacgcaatggacactgctgatgtgatgatggtcatgatgatctggagaaatcgttgcaggctggacttgtccatagctgatgaaggactatgcttcatgactctgg

SEQ ID NO: 22646 - DNA, 492 bp, Glycine max
  unsure at all n locations
nttgacacctagttgttcccgctagccattctgagacactatcgagtactggacctcgaccagtactgatccgtatgggctttatgacgaattctggttgttctcacgctgcaggcgacgacggtccattacgcggccaccatgacactgaaagtaactctctggcgatagctaccatggaaagtgtacagacgctcggaatgacttgccctaatattctgagagctgtatcagaaagagctgaccacagtgattaccacgactatatggtgcctgacagatgtatatacggcggcgcgagaataaactgtcgaaggacattgggcttatgaatgtacgagctataaacagcattgtgacctatgaagcacgaatagattgcaacaactgacatgctgcctatatccaacacatgcccggcttgtccgatcattcatataacctatttgcaacactatactgtcgtacatacatcggatctcatgcctctaa

SEQ ID NO: 22647 - DNA, 379 bp, Glycine max
agctttcctacaagtcctaattgacattctaaactagaatcaactcactttagactccaatttccactaaccccaaatttggcttttccaaccctcaaaatctcacacttttccactcacaacattaccattctcacatttaaccctaggttaactctccccatcatctctacatgttttctatcaacattttcaacatacatatatcacaaagcatcatcataaaaccctaaatcagcatgggtaatttagctcacatcaaacatgtcaagtttagcatgatttcaacaaatttcttcacaaataactaccctaagacaataacctagtagaagtacccatcatagctcccaaaaacccaacacccacgaatttcaag

SEQ ID NO: 22648 - DNA, 411 bp, Glycine max
tctacttatgtggcagggcgggctttcttcactttcttgtctccaacgcgagctttgaccactgttctttcttcccgcgatgcttcttttcatgtccgcctgagtgggcttatagcctaaaccatacttcccacggtttccttgagtatttatcaggctagttatgccgccgttgtctctgcctaaacccatcccgggttcataaccgttccccaacataactcgggccatcattaccgctgcatcggacagacaaggctgcccaaagagggagtccacggaggaaatgctgaccacctcaaaagactggaaagcagtttctaacgattcttctgcggcttccacataaggcatggaggatgggcagcttaccaagatgtcttcctcgcctgacacgatgaccaagtgccc

SEQ ID NO: 22649 - DNA, 335 bp, Glycine max
ttggacattggtaaacctttcatctgagctccttatttgaataaaatctcccataatacactacagccccccatccattaatggctcaacttttttactggatcccacaaaattcttttattgtgtatggcacatggagaataaatagtaacaagggtgaccagttgtgcttcttggacccattccccaaccagtaaaataaaatcattaccagtgatttccctctgcaggttaaaagatttatcactccacaaacataatatacctcctgctgtattgatagctgtgaacacatttcaaattacctctgtgtgtgcccatatagactgagacat

SEQ ID NO: 22650 - DNA, 120 bp, Glycine max
ttcttgcaagcttgagatgacgaagtgctgaagggtgaaacttcctgcttttattgctgaccacagagtggtacctgcagatatgtcgcgggggtcacgacaccttgttgacgttctgtg

SEQ ID NO: 22651 - DNA, 406 bp, Glycine max
  unsure at all n locations
ntaatgagatatgcgagaaatgagagaatagcacatttaaaaatgttaaaatgaatatatgattatacaaaaaggaaaaataataattataaaaaaaattggaatattaccaattgaggaaacgatgataaaaaaatcgatcaagataatttgatcatgtatgaagaaggcaactaaaggcatcaatcaaaatagtagaaatagtccaaagagatcttatggtaaataatattcttaactttttttgtttttaaccttgtcaaatgacatcatgtaatctatatagtcaatcttacctattaggataagaattttctattattgttattggtttcaaattttcaaatatatacatgtatgagaattgagaatcatatacaaaatacctaacataaaatatgcttat

SEQ ID NO: 22652 - DNA, 377 bp, Glycine max
agttgtgagccaaaatcctgactcaccataaaccttgacccagggtgagaatgtcaatccttaccctcgggagcaaaaaagaaaagaaggaaaatttccaatcaaagaggaagcaaaaaaaaaaatggagagaaggaaaatttccaatcaaaggaaaggaaattccctatcaaagaatgggagaaagaaaaaaagagaagtaaaaaagaagagagctcaaggatcgaaagaaaacagaagaaatgtgcaggaaggtcgttggaccacacaatatctgaacaatacagaattgtcaccaaatgaacaaaagaaagaaaaggaaaccacgacctaaaatggtcttccccctttaattgccaaccaaaatcttgtgcgct

SEQ ID NO: 22653 - DNA, 282 bp, Glycine max
tgcttctgtacagactgtgatcaacacttgtgcccgctttatccttcgacagctttaagtgagtaggtgcacgtgttcttctatgactggcaatttccattccgaacttatttacgatggtctttgcattcttgctttgggagaagaacatgaaagctttccttttgttttgcttgggagccgaaaaaataagtctcttttccaacgagactcatttgaaattcatattgcatctgtggtacaaaatgtcaaaccatttctttcgacatccctccaaacaca

SEQ ID NO: 22654 - DNA, 346 bp, Glycine max
tgtctttctttcttttggtgaagcgcatgatataaagactaaacaaattattatactatattcgttcaaagcttgtattctacatggccgcatgctcgtttacatggaaggaattttaatttttcaacctgatctatacttataaatctgcgataatctctttttatgctttccaaaatacaacatgttccttattaatttatatgaaagttatattcttgtgtctatattccttgaaatactttttatttatatttattctaactcgtctgctgcttgatcattgttgtggaaagtcttcttcatttactagacgatatttggacccaaaaattatatatcacag

SEQ ID NO: 22655 - DNA, 380 bp, Glycine max
agtttatggtgaagagctcaagcgtgtatgtgaagggaacaactacaaacttatattagaaagatcaccagggttgttgtaacctaggtttgggagcttttatatgtgtttagaagccagtaaattggcctttaagcgtgcttgcaaacccataaaaaggcataacatacccttcaaccatagttttcttcaaagtccatcaaaagtgcataaccaacacataatccacaagcttcaaacactatcaaaagtgcaaagtcaagaccttaaaaacaggattcaccaaagtctatccaaagtgcaaagtccacatcaaaaccaacttctcaatcacaacctgttacacatatgtcttctgggactacaaagtccaccaactt

SEQ ID NO: 22656 - DNA, 422 bp, Glycine max
taattccatcacttaatttcctataatgttcaatcattagcaacactatctttaaacatctgaacctttaccgtaaatagcgcatacataccaatgttgtcaaaaacgccagttaactcggtgagtcgtacgagttacaagtttctgagcctttgtcgagcttaatcggaccaaagaatggagaaagttggagaatggcaatgaaatgtgagtttactctacagaacgaaagaacattaaccgtttttggcaactgctatttacacttctctttaatgctaatgcactcccctcctcacctttttgtccccaatctaccccacgtgtaacgcttatgaaaaagaatgatagtgtattggagtattagaataaagggggagtgttgtatcatctacttacttttaagtagcatatgtcttgaa

SEQ ID NO: 22657 - DNA, 362 bp, Glycine max
agcttttgtggagcttcaatggagaatgagggagaagaaaggcaacgtgagggagagggagagagaaggcttctgcaatgttttctgctgagtgaagagagagagagttgctttttggtttttaaaaggctttttcctcttttcttattattttattcaagctctgccacatgtccctatttgattggagcaaaaagggcccactttctctttttgactgtgacccatactcagtcacaaaagtgagaaaaatctgacctttgaaacgctaaaatcctgcctcggtttgcgtgccgtttctctggttccagtttctcgtgtttctctgcgtccgtcggcgccagttttcgaaagcaagcaat

SEQ ID NO: 22658 - DNA, 423 bp, Glycine max
  unsure at all n locations
agaggtgtgttgaaaccttctttatatctttatagttatttgtgtgataatgattttgtttatatgtggagactaatatagttttttttttctttggttaaggaatgggttttagcttccagaattgcagtgcctgacaacctgggtcttcgaatgcgtgggaggaccatggtccggccagctccaccatccaacaaacgagaactatcgtgggtcggcgatgttggttttgttgttgatgcttggtggcatgatggatggtgggaaggcattgttgttcaaaaggactcggaatctaattgtcatgtttatttcccaggtatgaatgtctgctctttctatgttaattagcttatgttggtaactgttcttttggtacttagattatgagctcgnttttttatttttgattaattcctatgg

SEQ ID NO: 22659 - DNA, 383 bp, Glycine max
  unsure at all n locations
agcttctcccccaattttctataaatagggggagaagtgaagtgaaaaagggttcagccccttaggcacttatctctctttcgaatttgcttggaaaaattgtttctgtgaagaaaatccaagccgaggcgcttctgaaacgttttcgtaacgtttccgtgaggaatttcgcgaaggtttcgaccgttcttcgacgttcttcattcgttcttcatcgttcttcgatcttcaacgggtaaatacctcgaaccaagcttttcgattcattctatgtacccgtggtggtccacattgtgtttcgtgtatttttattctcgtttcatttactttntatacccccctttgacgtgcttaagccattntatttaagtcatttctcgctt

SEQ ID NO: 22660 - DNA, 449 bp, Glycine max
gtgacactatatgaactcatgcttgccacccagctcgcccaggcgagctcagctagcctattcgagcagggttgcttcctccagaagtaacagccttctggagggcccaagtgggcctggttgctatttgcacccccatttttactaagtacaccccattgcctttttttttgtgattcttttttcgtaaagttacggaaacttatgaatttcgtaacgatacttgttttctttccgtaatgttacggaaccttgcggattacataatcatcccctttttgacttacggaatgttacggaacctcactaatcatccccttttttgatttccggtgtgtcacggaaccttacggattgtgcatcaatattttcttttgttttccggcatgtcccggaatttcacaaattgcctaatgatgggtgccaagcacctcacaaggaccaaacaa

SEQ ID NO: 22661 - DNA, 158 bp, Glycine max
tttcttactggaggccatgcctgcactagcagacctcacgaaagttccattacaagtgatgtgacaggctatcagaatcatggcccgaccttcctattctaggttggcatgactgcaggcgctctacatcataatatatttgaactcgtgcagatgta

SEQ ID NO: 22662 - DNA, 229 bp, Glycine max
tgtcgccaaagcatacggttaaagatgttacccattttggtagatacctccacagaggccttatgtctaactgacccaagcttatgaacgaccatcgatgtgcttcacctatggggactattcagctcataccaatgatctaagaatgtgtgaagatcctttgattggctgtacgggagagagcaacaatacctcttctgagggccttatccctcattagctaaaattt

SEQ ID NO: 22663 - DNA, 372 bp, Glycine max
tgcttgaagaatatatcatctttaacgctttagaaatcacttattagtgtttggaaaaattattggttgaagtagttgaaaaatgaaaaattatataaaggatgaaagtagtcaatttttactttaaatagaaaagataaaaaaaataagaatggtttaaatatatttttcatacttctaaaatagattattttcattttattatttaaatttcattttttaatctaagtattcaacatttttttatgtttcactgtagtatctattattagtcccattttgtaaagtgacaacatgaaaaatagagtgttgcattatctaacacctaatcactaacacgttaacaaatttttcacatcattttttattatt

SEQ ID NO: 22664 - DNA, 417 bp, Glycine max
tccacagcaactacaagcggtaagtccttctcactcttctgttatgaaggtttggggatgtcacatatgtggaggaacacatgagtcatgcttatgcatggtccaagatgaagcatccaatgaagttaactacatgggcagtcataatcatcaaggattccatcaaagaggaccaccaggattctatcagagcgataattttttgcaggaccacgattggagatattatccaagtaataacttcaaccaagggggttcaccctatcagcatcctagtcagggtccgagtcagcaagagaagccgcctatcagtatagaggaaatgctcttaagtttcatccaagagacaagggcaaacgctcaggagacgaaggcattcatccaggcaaatgctcaagagaaaaaaacattcatcca

SEQ ID NO: 22665 - DNA, 376 bp, Glycine max
ttgtcttaatggagtctatgccaacactaggagaactcacaaaattcccataggaagagaggagaaaggctaacagaatcatggcccgaccttcatattctatcttgacatgaatgctgtggagctccatcataatatatttgaactcgtcgatatgtacttttagtgacgtaccttctctcattcaaagaccaaacaaacctcatttcaaaagcaacttgttacaaattggtgttttcataaagagcttatctagcttgagccataacgcaaatatagtattcgcttcagaagcttcataaagaacttcatcagatagtgacaagagaatcaacgagtaacgattttcatgttgcaactgaagaactaactaatc

SEQ ID NO: 22666 - DNA, 254 bp, Glycine max
ctccacagaggccactgacttcctcacccaatattatgagctaccgtatgggtgcttcatctctgaggactaccacctgtcacccatgagtcatcaattgcataggatgaccatatgtcctctaggtggaacgagacactacctataattatggtgctatccctaattagctataatttatgatacttgccgaatttctggacaggaataagacctcagagatcaaatcgaatatgaagcggatggactacctc

SEQ ID NO: 22667 - DNA, 376 bp, Glycine max
agctttgcttctacaatagctattgagcctgaaagttcactgccaattttccatcctacggtgggtattttgtttcaatatttttctgggtgtaggattgacagatgttttaaactattattatatgatgacaaatttttccttatcatattgttgttaatatatatattgctaaatgggtccacagccatcgttgtcacagtccgctgattacgatccgggaaactcaacttgtttaactccaaccaaaaggattaattgtcagcaaaccagttctgattcggattctgatgagtatacacagtatcagctatcaactaacaaacatatcaaagctgagtaattagtggttacacaatcctgtggtatcagcctg

SEQ ID NO: 22668 - DNA, 418 bp, Glycine max
tatatgcaatgtgctaccatgtcagtttaaaataatattggagcacttaagattacataacaagacatgccacataatgggtatgttaggtcactctcactaagtaaaatcataaggtgaccagtcaaggtcactttgttttgtgagaatgtttcaaccatatgagatcaacataggtttaaaggagcactcaaactgagtgtctttaacactaaggcctagactctgaagaatccgttaggacctcaccttcctgattaaggtccaactcctaaaacaatttttgcacataaacaatgctcatgaattatacaatacacacgatctcagtcatgtttgaaacatgtttaacacattatgctacactttaacactttaggttcctaacttgggaccctatatttttcctttaacactt

SEQ ID NO: 22669 - DNA, 340 bp, Glycine max
ttgcttgccacccagctcgcccaggcgagcaaggttgcttcctccagaagcaacagccttctggacgaatcttttggatggcacaagtgggcctgaatgctatctgcaccaacattctactcaggcaccccctgccttttttggtgattctttcgtcaggaagttacggaaagttacgaacgtcctaacaagacttgcattctttcctcatcggtactcaaccttgaggagtaaataccatccacattctacttatggaatgtatcgaccactactaatcgcgcagcgatgcttgcatttgaattcacgtgtgacacacaaccttaccgaccgtgcatca

SEQ ID NO: 22670 - DNA, 321 bp, Glycine max
tgtaggatattcaaacgacaataactttgtactcctatgtccgattgaatcgggtaatatatggagacgctaaaaatagagactagatgctctgagcaaattgaaatgacaataactttatacacggatatccggttgagtaccgtaatatatcgagacgctccaatttgaaaactgaaactcttagaaaattcagacgacaataactattactcggatgccctatagagtgtcattatatatcgagggatgcttcaaattgaaaacggaagctcgtatgaaatccaaacgacgataaccttttactaggatgtctgattg

SEQ ID NO: 22671 - DNA, 347 bp, Glycine max
agcttacctaattaactagaaattgagagagaatgattattaaacacacaaaatataatttataagtatttattacctatctttaactaaaagaacttataacactacaaaataaccataaattggaggagtttgatacaatttacacaggttttatacacaaaagttagttgtattcatcgactaacaaaggaccataataatggtaccctaagggaatcaaagagtggatgctccttcctttcattgtatgagtggcaatgacttgcgaagtctgtgactcaagaagggtggcatatataacagggacaaaggaaaggaaaggctaacgaaacgagaatcggatg

SEQ ID NO: 22672 - DNA, 344 bp, Glycine max
ctccaggtattgatagctatatcctcagttggttcttcgtacatggtacttgatgtaaatactcttatatctatctaatgacgttgcatgtgtactctgcgctcagttaaggtcattcaacattgagaaatggtctgatccttataactagataagacccggctagattatcgcatatccactaatgatcgcggtaccgcaaccgaggagatggtacgaatgtcttaatgcacctttgggcaagtcctatttcaacatgatggatctgatgatgacgcttggatggattagactaaacatgcatgagacattgttgtttagccgtccaagagacaacgtcaaac

SEQ ID NO: 22673 - DNA, 547 bp, Glycine max
  unsure at all n locations
atgattgacnaccctggatgnacccttcganangatactanggacgatatgcgagactgcggccaccncgtgtgatagctcgtagcaggtacgagcactgcagagtcttgcgcatgtgtatcnattaagcacatgcngagacccanganaaagtgacagcatgatgcatatgtctctacatctactatcaggagaggtgctcnttatntcgcacaatcatactagtagttattgcttgtggatggtatcgtatctcgacaagtatgatctgtacaacataatctaataatatagatgagcaatatttgtgtcttatcacattgttgctgatctatatattgctccatgggtcctcggtcatcggtgacacaatctcgatgattactagccctgaaacttatcttgttaaatctctatccataacgactaactgtaaactcttgctttatcatgcatgcacggatgaggtgccactatactatacatatacgaacatacatatattagctcagaaaataatgcatgcacaatcctgaggatacggctc

SEQ ID NO: 22674 - DNA, 314 bp, Glycine max
ctttagacgctcacacatttcaggcacctattagatattttttgactttctttatctttattgggctatcaaatcgtatcacctatctgacatatatacttttctctctgctatgactcttactctctcaaggtgtcacataccgtatggaaatatatgtaggtttatactttttaaatgatcagtgaactcaatcaatgatgaatataggcgtcctctaaatattgaataccacgacatattatccaatgtattattagtagttccgacaatcaatactgctagaaaaaagatattctacgacgattagacct

SEQ ID NO: 22675 - DNA, 374 bp, Glycine max
agcttctttttctttggccaatgctggacttgcttggcagtgatttccttggcaatttgatgctcagaaatagcaatatccaccactccttcagttggtctgcccaggtacttgttgattacagcaggggagaatctaatacattttcctctgacaaacactttctgatactcatcactctttctgtttgctatgtcagagggaatgttgacaatgaattccctgactagactttcataacaatcacccatcttggtgacagttttcagcagtccagcagccttgatgaggtccatgatctccttgcaatccaaggcatctgtgtccagttctctttctaaggcaagtctgcgttgatatacaaatctccacct

SEQ ID NO: 22676 - DNA, 408 bp, Glycine max
tcggaagacagtgatgaggtacaagccctaaaagcttatcttgaaatatcccgggtagtcattgagaagttcaagtccatagccatcaaagtctgaagagagtatgatgaactaagggacgtcaatatggccacagctgaagccttggaacgagaaaccaagaaggcccgataggaagaacacgaccaaagcaaagtattgaggggctttatagggcagcaatagtgatctcaagctctgaataggtgaaaggaatcatcacgggtcaaaggcatgatcttgaaagacgagctaaaggtttgccttatgtcgaaaagaaatctgtcccaacagttaagcgagactgaatggaatatgtgggccatcatcgataagtgcaaagagaagctaaatctatcggcgactcac

SEQ ID NO: 22677 - DNA, 375 bp, Glycine max
agcttgcttgggcacactcctccttccattgttgacttcaaaatgacccagttccaaccattgtgtcacaatacctgcaacaacgtgcccaaatccttaatacaacaaaggataacctttgcttcatctgtcagagtatggagacacaagctaacaaacatagtaggactcttacctttgttgaaggagaatgagtttggcagaaactccaaatgtactaccaaaccttggtcagaagccaacttgccactaagtagaggcctcatttccatgggacttttcaagttaagtgtcatatagggacaatggcgtatgaactcactcttctaggctctgcttggattcatcctatggtgcatgtttccatacttcacc

SEQ ID NO: 22678 - DNA, 427 bp, Glycine max
tatgagacttccaaattctacaagaagaagaccaagattttccatgtatttttgatagctaagaaggacttcgtggttggacagaaagttttattatataactctaggctcaaactcatgagtggtaagttgaggtcaaagtggattggtccttttgtggtgactaatgtttttccttatggaatagttgagatcaaaagtgaatccacagataagagcttcaaggtcaatggacaccgactgaaaccattcctcacaaatcccttcttaatggatgtaatggtagaggagacctccttacttcaccctacttctcttctaccatgacttaggaagttctctcttctatctccttctttacttttattgcacttgtccaaatttattgattgatttgattgctcttgatcttatgattgtgctacat

SEQ ID NO: 22679 - DNA, 375 bp, Glycine max
agcttgtcttggttctactatggaggctggatctttgagctttagtgacgtcctttaatggtgattttccaccatggagatgcagcggaagacaaatgagacgaggttatacgcggcgccatccactagggaataatccatggaagaaggagcttcaccaccaagatgagccttggataaaaagcttggacaggatgcttcaatggaggaaaagacagagggagagaaagagagaggggggagcacgaaattgaaggaagatacagggagagaagttgaactttgagttgtgtctcacaagactctcattcatcagagttacaacaagtgttacacatgcttctatttatagactaggtagcttgcttgagaagc

SEQ ID NO: 22680 - DNA, 425 bp, Glycine max
tcctcggagccattcctgcgaaggcaaacatttggaatgttagtttttccagtgggacgtttttcttaaagcaaaaatggcatataacctcttcccataaatacaaacatcaatgtaaatttagagcaagcttatgcgcatatttccttacaaacgttctcttgcacaagacattctattaaccgaaaaaaatgcacccatatacaatcaaggcagcttcgttacctagattatttacacgtacttccaaggtgtatttgttacttacatcacacacctccttggctaaattcacatacatgcatactcaaagcattttggggtaccaaaaattgcacatgtgcacatcttggtatttcacaaacttcatgatgaatcttgactatctacacaataaggtgctacattttatgctcttttcaagt

SEQ ID NO: 22681 - DNA, 373 bp, Glycine max
agtatttgtactgtgactgagtctctagtgcctttcgacaatcccccaaacatcagtttgttagttttacaaatctctttatttttcttttctttttcaaagtatcattaattgaaaaagtgcaaagtcagttaaaaaacataggatactaaacaaagagcattacaataatgcatagctattaaataataataacgcaggggctcacgtccaaagctaactagaagtttctgcactgttgaatgaaagtttttaactattcaagtcaaaaacatagaaggaaggagtttgttagattaattttccattactccaactgaaaaacaaacacgcccttcattggatataatgttcgttgatattgggagaaact

SEQ ID NO: 22682 - DNA, 427 bp, Glycine max
  unsure at all n locations
agatgaanacttgctttatatgaactttntgcgagttaagcccagattaaaccatgattggattgattaaaaaattccatatttagtgctcaatattaaagcactaacccgatattccattggacaggtcgatcggcctggtatgcatatcaaatattaactctgatccaatatttaaagaacaattacctaatttattgatgccaataaaaatagttagatgggttaatgtcataaattttaattttattccatataatacaacaaccataaatcaataactataataacattaacaataataaccacaacaacaatacctagagtatctctaatcaatcaacaaatataatataaataacatggtgttaaaaagcagtcttctcctaatacttagaattcgggtgttactgaaacaagtagacaa

SEQ ID NO: 22683 - DNA, 381 bp, Glycine max
agcttcatgatgattattcaagttgattcaagtagttttgatgataacaaagatgatgataataagcccaagagaatgatttcaagattgagtcaacaagtttcaagaatcaagagaagtttgatttcaagattcaagacaagacgaatttatgattcaagagacgaaatcaagaagacttcacaagggaagtattgaaaagattttttcaaataatcatcgtagcacagttttgtttttcagaagagtttttctcaaaattttctaagttaccagagtttttactctctggaaatcgattaccagtttcctgtaatcgattaccaatggcgaagtttgatttcaaaagttttcaactgaatttgcaacgttccaattgat

SEQ ID NO: 22684 - DNA, 469 bp, Glycine max
  unsure at all n locations
ttgacacctgttattacgtgacactatctagtactcatgctagtgatattngttaatgtttcttactaattgtggttatttgattnttttattaatttcttttatagtaaactcacccctcgcaatttttgtaccgtgtggttagtacctgtgatgatcacgaacctttgttcgtaggagcagaatgacaacagtagagtaggagaagtgagattcttttgtggagctgtcgagccaacatgatgacgttgggattattttggtagagagttgtattttgttaatcaactcctctgtagttggttacataattcttttttttgaattgaggatgtaaatcacagatttaggtatatgtatgaacaaatttactttccattatgtgaatgatgtgtactgagttactatatatgtgtgtgtgtgtgtgtgtgtgtgtgtgtgtgtgtgtgtgtgtgtgtgtgtgcgtgta

SEQ ID NO: 22685 - DNA, 371 bp, Glycine max
tgtttttaacattgtttcacttacaagtgatcatggaggtgaatttcaaaatgagtcttttgaaaagttttgtgaagaaaatggaattcaccataatttttcagccccaagaacacctcagcagaatggtgttgtggagaggaaaaatagatcccatgaagaaggaactataacttttacaattgaaacaaagttacctaagtacttttgggctgatgctatacatactatttgctacactttgaacatagtaattataagacctacactaaatcttatgaactttataaaggaagaaaacaaaatatatctcacttgagggtttttggttgcaaatgttttattttaaacaatggtaaagattctcctag

SEQ ID NO: 22686 - DNA, 417 bp, Glycine max
tttcttccacaatcaatttgtctactgactaacagttctaattgcaagttctcattcttgttttttctttgtctaacatacacacttgctcaaactcatgaaaagaaacacaaactccatcacaatcatgcattcaattcaaaacgaagtcatacaccaattttcaaagattggacctcttgctagttgttattattgaataacttaaactcttgtgcttgagtgaaatagtagccgtgagactgtggtttaagatactttccttgatatctatcttatgtctaactccatctaattattcagattacattttatttttctctttggatactgcataccttgtgaaaaacaagcgatgagggcatttaatccattctcttatcatgcaatcagtaacttttgtagcatacacctttg

SEQ ID NO: 22687 - DNA, 285 bp, Glycine max
agcttctagccaaatggacttaccttgaattaattcctttgatagcccttttgagccttgtttccctttccttgttttgaagctcactacaagccttaagtgaaaaaccatgatattaccatatccttaaggaattttggagctttggaattgttttgggaataagtgtgaggggtttttgtttcattggacaacttgttttgttgactatgcttcatgatgtattttgggccatacttgatgtacattgtatattggataaatgttggacatgctgaatgaaat

SEQ ID NO: 22688 - DNA, 422 bp, Glycine max
  unsure at all n locations
tgaaaggtagtcatacctcacaaaatatatatgtatgtgtgtttaggtagcaagataccttggatatgcatgtatatagcaaaaatacctcacaaaaatatacatgtttaggtagcaaaatacctaaaaaaaaacaaaaacaaacaagaaaaaaaatatatctttcggctgaaaagccaacacatttttgaaaagaaataacttctagcttttctttaaaaaaagattcaccgatcaaaacaaagggtttttttttgaaaaaaatgtgtatacacctgaagggtgaatgctgtgaaaattttcccgaacacccaaaatggactcgaatgaatgcatgaattgataaaagaacatgttttggaaacactgngttaacttaatcgggaaaattaatcttgagccctagtgtcatgtgaccataa

SEQ ID NO: 22689 - DNA, 311 bp, Glycine max
tggcagctttttccatcgtcgctatagattggtgcttgtaatggcgaaacgtatgtaccattatttcttaccttttttatttggaccagtgttacttgttttttgagcatgacagttatgcacagctatgaaataatcataacatacgggctcacgtgcaaagctaactagaactttctgcactgttgaatgaaagcgattaactatccaagtcccacacatagaaggaaggaggtcgctagattaatgttccattactcccactgagaagcaaacacgcacttcattgcactatatgctccgctgatatt

SEQ ID NO: 22690 - DNA, 195 bp, Glycine max
  unsure at all n locations
tgttcccttttgggctntggagtttgctttatcccattaataacagtatgtttctatctgatatcatctataattattctttttggcagttttttccattgttgttaaagttggttgcttggaatggtgaaaggtatgtaccattttttcttcccttttttatttggtccagtttttttttttttttgggggggg

SEQ ID NO: 22691 - DNA, 373 bp, Glycine max
ttacatgttatggaatcagaccagagagcttaaagtaggcgctacataaaccagcataaaccaccaatcgggttagttcaatttactacatggaaggaaacacaagggaagtggtgaatggtgatagcatgatcctataaaactcccactgaagaaacccgctatggaatctagattagataatctataggccagagttcacgatcaagactatgaacaatgaatagccgagtataggaaactttgaaacgagaatagccagtaacatagagggagagacctaaacaaaataattctgacaaaaacattcaagcaaaacacaaccccaaaaatgtatagtgagatgttcacctatgggagaatcgtgatacag

SEQ ID NO: 22692 - DNA, 344 bp, Glycine max
gtgattatgttcacaccttgtcgaaaagcgagggactgttgacttatatcaaacctattgcatgtgtcagaaatatacccaataagaatgtagaatgcttattgcctattaatacacaggtacagcgtaaacaatcattaccgaggagtctgcttatttcacatggatgaccgaaggcacaacatctgagttagatgcaagaataagatgcataatgaaacatcttgttatatacaaaccattacgagactatcaaatgacaacgcatatttactttaaatccttacggcatacaatatgcccagctatggatttacaaatcgagcttacacaaaccttggcag

SEQ ID NO: 22693 - DNA, 380 bp, Glycine max
tgcttctttaaataaatttttacctaaaaaaaattattaagttaaaattaactcatatatgaactaattcatatgaatttgatcgagagaataaaaaaaataattaaattaaaacaaaatgtataagatatgaaaccttcctgagatctatattatttttctctactttttacctttcactctttgccaaagttcaaacacaagctaaaatatgagagcttttttataaattaacttgtgcatatgttaattttatctttaaaaaaacttgttttaatttattttcttatcttaaaagttttatttttttgaataaacttacccaaacacattctagtgttctagcagtgcaatgttaaaatgttaaaaaaacaacattt

SEQ ID NO: 22694 - DNA, 415 bp, Glycine max
  unsure at all n locations
ngatctcttanatatgcgacaatttttataaaatcatgtacaactttagatgtaacccttactaaggaatttagttggggtactgtttcatttcataaaagaatactatcacattattgttttgcaattgcaaattaaagaataattttacttgttgagtaacatcggtttacaatttgttttactcaattatatatataacttttgacaaacctaaattttcataatacaggatgtcttttgttctcattttcaaactacaatataacttgtttctccctctttacgtatccttgttcgctaacttttctacccttataaaccgatactgtctccatgtgcacatacgacaaatagagagctagtgaatgcctttattcagaatcatagaattcaacgaacattacatgttttt

SEQ ID NO: 22695 - DNA, 368 bp, Glycine max
tcaagcttgaagattttgtcagaaatctagtactctcatgccacaatggttttcttttagaccacaaataccttcttacagaatatattttatttgaacttgataggattactttaaatgatgcaactgtctttttaattatttaacatagttgaatatcttgaattcaaattcaaaacatctaattaaaccgaaataatttcatgtgaattgatcgagacttggtggtgtcacaatgagtttatacccatttaagttgacaagtttggaagttgaattagccagaactcttgcaaagtcaaatcgtactatgtttctttctctcttgtttttctgtaatcccagtgaatatacgatgaatttgtgta

SEQ ID NO: 22696 - DNA, 387 bp, Glycine max
  unsure at all n locations
tgttntacttaaatggagcataactccattgggtgttagaaaccaatacaacaacaaagccttatcccactacgtgaggtcagctatatggatcatacaatgccatttggcatggctaaaaaccaaagtcttagtaatattttttagcatgagatcttctctgacaacttcctctaacgtcttgttagaaaccaattttaaaattgaagtaaacaataaaagcaactagaatcatttttgggggcacaaggtaattgcttccttttatgttttcaaaggtaagaaaatcaacttcttaactcttttaagtttccaaagattctcattagaaaaaaaaccgattccaaacttggagtttttgttaccgctgtttgcccctataatcat

SEQ ID NO: 22697 - DNA, 363 bp, Glycine max
  unsure at all n locations
agtcttatgatgaatcaagattgattcaaggagttttgatgataacaaagatgatgacaaaaagctgaaaagtcaagctcacttcatggtaacaaagatgatgacattcaagaatgagttcaagattgagtcaagaacacttcaaggatcaagagcaaatttgatttcaagaatcaagattcaagattcaaagattcaagaataatcaagatcaagattcaagactcaaagattcaagaatcaagagaagacttaatcaagataagtgttaaaaagtttttcaaaatattgagtagcacaagaagttttttacaaaatcattaccaaaaagttntactctctggtaatcgattaccagattat

SEQ ID NO: 22698 - DNA, 403 bp, Glycine max
tgtaaaattaattcagtttggtcaaaattatttattttaggaaaatttatttttaccaaaatgtgtaggctcttattattctttttattacaaatcatagggatgcaatcttggttttgtaaagccatatgtccactcgtatgttctttagttaattttggaattatgcttttttcaaaattttcgtaaagaaaatctacagttttttctatttggttcaatctgatttccaaagtggaaatcctattgtttataattttatttccataatcattttctttcttaaagtctggaaattctattttcaaaatagtttgtacacaagtcttgcaaaaattcttgtaccataaactacagtgagctcttaatgttttgtggagatatcttttacagaaataacatt

SEQ ID NO: 22699 - DNA, 377 bp, Glycine max
agcttacggattacgaatcctaagtctcttatggattatgaatccgtttattggtaggggtaattttggaaaaaataaaaaagtgttgagtatataagaaaaacgttgggtgccaaagaaattcccaatccctcatgtcctgcaattctctcatttctgggtagaaaaacatggaacaactttaaggataaggaaatcaagcaatccatttgacataaatcatctttctctatttttttttatagtatagttgttgtatgttggttcattaacaaccattagttagttctcttactctttaccaacttagtatttttctgttttttgttattctgttataacatgtaacagttaattagttttaagttggttgggtt

SEQ ID NO: 22700 - DNA, 430 bp, Glycine max
  unsure at all n locations
tgtacgactatggggtacccatcacatgtggtactaggtggcgatcgggcgatggtgcacagcaagttttccacatccacaaatcacgtataaacccatcatcccttgttgcccacctccaactgagctcacgtactcccacgtagcccatatcctctttcctctcaacgccgggtccccatcaatcctcccaagcttccccaacatccaggtaattcaacatcccatcatcacaaactaacaaaccaagcaaaacaggcaaaggcagaaaactctgcccagaacacaaaccaaaaatcacagctttttcacatacaaatactccagtaacattttcttcgttccaattcgttaaccgtcggatcgactcgaaaattttaatggaagtctctagtacataagtctacattntgaccgttgggatctacta

SEQ ID NO: 22701 - DNA, 275 bp, Glycine max
agcttgtttagaaagtgaattaggccggaagtgatggaatagtcatggaggacctctggttgttgatggagtgcgccatgtaatacgtggaaagctggggataaggactgtgaatggtatatatcacccatacaatctgaatagagaactcagagaataaagcattggccttcggaggtagacccgataatgatcatctgctgctgcatagtcggagccaccactgtatagtaaggacttaaccatgatactgctgtagctacagagtctggatt

SEQ ID NO: 22702 - DNA, 437 bp, Glycine max
actcaagcttaaaggaccactcaaaccaggtgtatttacccccaatgtctagactctgaagagtctgttagggtctctccctcctgattcaggtccaacccaaaaaacattttagcacacacactctatctatgaagtgtacaaaacacacgactcctcaattattctcaaaataattttttctcgttgcgcttgtgattaaactcctcgggtccccacagtggttcccatcacaatactcttcgcatattaacttgtcgcccttaaagggtcttatagtcgtgtgattatacgtttcatagctcacaactcaatgcacacaacatctcaatgcacatatatattacaagtcaatacatactcaatttatcacatacactcagtctcaatcacaatggtataattccaaagtagcatgttatcacacctcatgaatc

SEQ ID NO: 22703 - DNA, 545 bp, Glycine max
  unsure at all n locations
ccaccgcactcctcatcacccattcgtgtaagagaaatatccaatgctaacacgacaagttgactanaananacaaagaaaggagananctgatgcctcgtgaatccctcgcaaanncaacgcggaacccggcgatgctctagagtagacctgacagcatgcaagcttacatattgttttctgacgagaggccagcgactccaagggactgaagatagccaacaagaagaaaagaagcagagaagcgaggcacacatcgtgggcaccaaaaaggtgacaatgagcatagagagcacgattgaacctataacaccgaatggataaagagcgaacgtgatactaacaaccagtaaccgagagataaagatcacaaaacgataagaaaaaacatcctaggatcatacaggcgacattcataagcccagataaagtagagaaccgcaataatgccgaccacaaagattacgccacgagaatgtcgctgcatgataatcaaacatgaagtaacttctgttgaacctcacaaactgaggatatacacggag

SEQ ID NO: 22704 - DNA, 536 bp, Glycine max
  unsure at all n locations
cgccgccgctacccccacccntaaaaagatanatatcgctgtgtgattaattagccaacacccccccgcgccgggcacttgaacctgtagacctcacactgaacctccaatccagtaccggacgaaacgcgacatggaagtttatggacctgaccacatatagtactataagaacactggaatgtaacaacacgtgcaagcccctatcaatcgctattcaccaatgcaaagcacagcatacaggtcatgtaaagccaaaagaacacacttacgtgcattagcgaaccttggaaatgcgccccaaaaagcagtgcgcgcaaacaaagtacagagtcatccatcaggggcacaccgtataccaaacagaaacaacacctgattcacagaaaaattccaacacatcactatcccatcacaatatggacaactcaagacaacgatgggacggcaccggcactagaaatcaaacgagagagacacacctccgagagaacatcaacaggttggggcgagatcccagacagacaaacccaccn

SEQ ID NO: 22705 - DNA, 382 bp, Glycine max
agcttgcattgtgttggagtgtacatccaccttttaagtatttgatgaagagaaatattttcaaatagaaacaaacttatacaaataattgattcccagatttctaaagatgtagaaaaaagtattaaaaaaaacaaaaaacattgtttagattttttaacgtgtacattattttatatatcatttgtttaaaaaattttatacttgtattatttgggtcatttttttgtattaaataggtaaaaaattctactcatgtaaaacacaaacttttgtaagttttgttatttgaaataaaaaaatttattgggtcccatatctcatttaatgtttgtctcttgatattgtagttttaaaaaaaaatcatcggtttttggataat

SEQ ID NO: 22706 - DNA, 429 bp, Glycine max
  unsure at all n locations
tatgaatgatatgagtcgaactcatttgctatattcaatttctatttataattattatccatactttatttatttatttattttataaaaaaacatttaatgtgaatttaattgattaaaacacatcacttaataaatcattaaaatttataccttaatttatatttttgtattaaattaaataatataataatgaaggaaaaatccctcgagaaaaacataatttgtagaaatgaaccactcctctcacattaaagttctaccaacacatgtatggggcgtgtacagatattgtttttatcaggcgtatgagaatggttctatagtacccttttgagatcctatccattgttatccatattgatgatccatttttgtgttcaagagctactcatattttttatactagtaataggtataattntattt

SEQ ID NO: 22707 - DNA, 384 bp, Glycine max
  unsure at all n locations
agctttgagccaaaatcctgactcaccataaaccttgacccagggtgagaatgccaatccttaccctcggaagcaaaaaagagaaggaaaatttccaatgaaagcaaaaaagaaaagaaggaaaattccccgatcaaagagtgggagaaagcaaaaagaaaagaaaggaaattcccaatcaaagaatgggagaaagtaaaaaagggaaggaaagaaagttcttgaaggaaaaaacagaaggaatatgcagagaggtctttggaccagacaatatctgaacaatacagaattgtcaccaaatgaacgaaaaaagaaggaaagggaaccacgacctanaatagtcttctccctttgattaccaaccaaaatcccgtgcgctagcga

SEQ ID NO: 22708 - DNA, 424 bp, Glycine max
ttgaatgctctattcaatggagttgacaagaatatcttcagactgatcaacacatgcacagtggccaaggatgcatgggagatcctgaaaaccactcatgaaggaacctccaaagtgaagatgtccagattgcaactattggccacaaaattcgaaaatttgaagatgaaggaggaagagtgtattcatgacttccacatgaacattcttgaaattgccaatgcttgcactgccttgggagaaagaatgacagatgaaaagctggtgagaaagatcctcagatctttgcctaagagatttgacatgaaagtcactgcaatagaggaggcccaagacatttgcaacatgagagtagatgaactcattggttcccttcaaacctttgagctaggactctcggataggactgaaaagaagagcaaga

SEQ ID NO: 22709 - DNA, 372 bp, Glycine max
ttgcttctacttatgtggcagggcgggcttccttcaccttcttgtctccaacgcgagctttgaccactgttcttccttcccgcgatgcttcttttcatgtccgcctgagtgggcttatagcctaaaccatacttcccacgatttccttgggtatttatcaggctagttatgccgccgttgtctttgcctaaacccatcccgggttcataaccgttccccaacataactcgggccatcattactgctgcatcggacagacaaggttgcccagagagggagtccacggaggaaatgctgaccacctcaaaagactggatagcggtttctaacgatttttctgcggcttccacataaggcatagaggatgggcag

SEQ ID NO: 22710 - DNA, 405 bp, Glycine max
  unsure at all n locations
ccgcttgctctaaatntacattgatgtttgtatttattggtataggttgtatgccattgttgttttaagagtagcatcccttggtaaaactaactttccaaatgtttgacttcgcaggaaatggccccgagcaagcttgcctcaaagaggtccaggaaggataaggcggctgaagggactagtttcgctcctgagtatgacagtcaccgctttaggagtgctgtacactagcagcgcttcgaggccatcaagggatggtcatttctccgggagcgacgcgtccagctcaaggacgacgagtataccgatttccaagaggaaatatggtgccggcggtggacatcactggttactcccatggccaagttcgatccagaaatagtccttgagttctatgccaatgct

SEQ ID NO: 22711 - DNA, 372 bp, Glycine max
agttttaaaatttgaattaaaatgttctgtaactattggtaatcaattaccatccatgtgtaatcgattacacattgtaagatttgaattcaaatttctaatgactgttgtaattattttcagctgcttgtaattgactacaatcctcatgtaatagattacatgccttcaaaaatattcaaaatcatttttaaaagcgttttaggaagtgttttggccactggtaatcgattacatcctctggtaatcgattactagagagtaaatctcttgtaaaaatattttagcttaaattcattggccaaacctcttgtcgtttcaacttggaattcccttcctaaatcactagagattttcttgatgatgtatctt

SEQ ID NO: 22712 - DNA, 390 bp, Glycine max
tctagccaaatggacttaccttgaatttattccttttatagcccttttgagccttgtttccctttccttgttttgaagcttactacaagccttaagtgaaaaaccatgatattaccatatccttaaggaattttggagctttggaattgttttgggaataagtgtggggggtttttgtttcattggacaacttgttttgttggctatgcttcatgatgtattttgggccatacttgatgtacattgtatattggttaaatgttggacatgctgaatgaaatgttgtttctcaaaggctaaaaaaaaaaaaaaaaaaaaaaaattcgaaaaaaattcggaaagaaaaaaaaaaaaaaaagaaaagctataaagttgagtgaataagatctt

SEQ ID NO: 22713 - DNA, 371 bp, Glycine max
ttgcttctttatttatttatatatatatataataaatagaaaatattttgagccttgtgaagaaaaagatcattgtaaacaggtgtagcatttgttgctagagaaatgattatttggactcaccaggttcactatagcagacttggctttaactttttcagacagcttcaaattaattccatttttcattatcaaattgatatgaagcacatgatcaaatctttcacagcttttattatagtacagagattatcttcacatgaatggatgttctttttaatataaccaatgatttttattagatatatgtttcatagttttaattaaaaaaatcaacatgtcattatttattagaagaatctgatgacaaa

SEQ ID NO: 22714 - DNA, 408 bp, Glycine max
tggtacttctactgaagctgagtttctaccctccttctgtcctgacatagaatctctagtgcagctgaaggatgctatagggttcttgatccttcagattcagtctttgtttcttgtttgttctttttcttggatttatctctcattaaaaaaatatcaatgaaaaatatgatggattaactggttttcctttttctggtatcggagaaaagataatgattttcattggtctcattattcagtatttggatttgtacattttttattggttattatctattcattcattatattagtaaattttagttgtttttaaataacaatatttgatgccaaaataaaataaaatgattagaactcaaggtattaattaataactattatttcatttatcatttataattattt

SEQ ID NO: 22715 - DNA, 353 bp, Glycine max
tgcttatactttttattaaaataccactaatcaaattttagatgaagttgaacaacatcctgtggtaccttacagattcattatgttaattagcatatctttaaataagtgggctaatgtaaaattattcacaattatctatttgaagatgatgatacgtatatattttaaggataaaaagagaataaaatattctaagctaacaattaatattgcaacaaatactactttatgtatcattccaaaacatatgagtgattaccatactatattatttattgaattctgaaataaacttttagatagtggaacatagttaaatgctagctaaaatgactcctcagatgtagcta

SEQ ID NO: 22716 - DNA, 420 bp, Glycine max
  unsure at all n locations
ngtatgtgttagtttaggatgggctctgtcaaagattatgtctatttcttgctttcaccataggtggcaagaagggttattatgtgtctaggcctgtgactcaatcctacatgaaggttcataacaatgacctattatcattttgtttggtgctggtgtagactattctccaaaaaatataattatgaactctacaatagaggccacgtaactgaaggcagctaattttcatagcctgaacaagatttggttntaattgacactatttgagtcccattcttaaatatatgatatgtgggtccaatgataagcaagactacctgtcactttatcagtaaatctggaggtatctcatacactagtctttattctacttcagactaactgctgattttattcctgactaatatgtatttcatg

SEQ ID NO: 22717 - DNA, 370 bp, Glycine max
ttgcttggtttgaggtacttacccgttgaacactgaagaaaaccaagaacgaacgatgaatcttgaagaacggtcgagaatcttcgcgaaattactcacggaaacgttacggaagcgcctcggctaggattttcttcatggaaataatcttcctcagcaaatgcgatagagggagaagtgcctaaggggctgaacccttttcttcttcacttcttcccctatatatagcaaaatatgggagaagctagcctgccagctcgcccaggcgagcaaggttgcttcctccagaacgaacggcccaagtgggcctggttgctatttacacccccatttatactaaatgcaccccctctctatctttttgtaattc

SEQ ID NO: 22718 - DNA, 408 bp, Glycine max
tgaagttatgtggattctttgctttttcatattctgtttattttatattgaatatccgttatgcaaaattcaggctaaacccctgctatcattcgttatgttgaattgaatcattgttaaatttctcttgttctagctgaggttacgaaatccttgaatatccctagaggtgtaagccacgtgcttttcagaactttaaacactgataggtgagttgtgtaagttacatgaatcatgattgctgtcggaagattttcttcctgtctttctaccataaaataaatgaagttattaaagtttcttcagtgattctctgacgcagcttcattggtcttgcagatacatgaaatgtgtattgtacaatattatcttgagaaccatatctatgaatcgaatgctagataagat

SEQ ID NO: 22719 - DNA, 310 bp, Glycine max
ctgcttgctagctttaggagaaaccattctatctaccgttgtcctagactaaaatcaattggtgaagcttccgcgcgcattccccttgataaacctttatgtcatgccttttattgctagcgctaatgctactcgactaattacggaactgaaaaaaactatattcttaatggctggcgaccgtgacaacgatagggaattactattcatgattggtagatgacttattgccattccagatcctccccaacccttagatcatacttacgcaatggtaacacgatgtgcctccgagataattgctgctata

SEQ ID NO: 22720 - DNA, 255 bp, Glycine max
tgcctgcggtacatacggtgtctaaacaccgcctttagcgctaaccatgaccgaatgttgacgcatactctgcgtacgataaactccatattccggtggcatatgctaacttgcggccgtatcgtacttaattaagccacggctgccacagtttctcaacctctatcttttcaaggatactactcgagcgcgacatgtgcatataatggatgaggtccgagacatgtgcttgattacttgctaacctcgcaatcg

SEQ ID NO: 22721 - DNA, 369 bp, Glycine max
agtttcaagaaaaggccaaactcctctcaaaaatatgaattcaggcttaaataggtggctttgttagtgctcatgtgcttagcgcaattctgaaccacttagggcgcattagtgaatttcggcttagcgcggcttttctcgctcagcggatggaccgaagtggtgtgcttagcggtatggcccttcgctcagtgaacaagcacaactcatccttcttctagattcttccttgcgcttagccgaggaatgttgcgctcaacagatagctggctaagctagcagattggcttagcgagagggtgaaaatcatcacttcaaaagttgcctaattattctgaaattgagagaaaatgattattaaatacacaa

SEQ ID NO: 22722 - DNA, 400 bp, Glycine max
  unsure at all n locations
tctcccccaattntctatatttaaggggagaagtgatttgaaaaagggttcagccccttaggcacttctctctctttcgaatttgcttggaaaaattgtttccgtgaagaaaatctaagccgaggcgcttccgaaacgtttccgtaatgtttccgtaaggaatttcgcaaaggtttcgaccgttcttcgacgctcttcattcgttcttcatcgttcttcgatcttcaatgggtaagtacctcgaaccaagcttttcgattcattctatgtacccgtggtggtctacattgagtttcgtgtatttctattctcattttctttactttgtatacccccttttgacgtgcttaagccattttatttaagtcatttctcgcttaaactaaagataacataaatt

SEQ ID NO: 22723 - DNA, 377 bp, Glycine max
agcttgttattattgtttggattaacttctctatcaacctttataggagaataaaattaaaaagtaaactaaccgaacttttttcacaaattaaaattaacgtatgcactttttttcaaacgcttatttaacttctctaaaaactgaagtgtataagttgattttcacaaggactcaagaccgcggggttgtattgagtcttcaatttattttttttaaatgcaacatttcaatcaaaaaaccgcagaagcatataattcaaatataagcaaaagtaagacaataagagttagagaagaatgcatctagattatacttagtttgattaacctaacttatgcagtcctttaagtcttgtctgaaatcttttaaccgac

SEQ ID NO: 22724 - DNA, 427 bp, Glycine max
tgtcagcagctgagttgcattccctcaaaacatggttagttagtgctagctataaggatgagagattaagaatgaccgaagtttgacacatccttgctcacaaaattatactcaataaattgtcaaaactaaaaattggaggaaagaaaaatctaaaacacaacttaaacattctcaatctagtatacaatggaatttcagtttgtgtgtgggacatctcaatgataaagatgttgtatgatcaatggttatcattatatgcttaaagtgcatttcctcattataagtagaacgactgaacttttgatttaaatggagtatcataaccaattcttctaagtctattgattctatatcacgaattctatattttcaagaagaaacaacagtgaaaattctgccttaaaagatgtttacgtttgaatca

SEQ ID NO: 22725 - DNA, 372 bp, Glycine max
agcttattcaggatatgggatgtcactctgcaaatgtttgggaatggaagcttgaatggagaagacacctttttgacaatgaggtgcaagcggcaaccagtttcttggatgatatctcgcggggtcatattgatcgttggacatcagactgctaggtttggaaaccaaaacctgatggccaattttctacaaggagcgcatactatatgctactagaagaagcagcagatcagactgtggatgaggctttagaggacctatggcagctcaaaatccctttaaaaccaacaacatttgcttggcgattgatcaaagatagaatcccaactaaagggaatttgcggagaagacaactggagaaaggctatgctt

SEQ ID NO: 22726 - DNA, 425 bp, Glycine max
tatttgtacgacaccttgtacgcaaattgactgttaattctctcttgattcaatgaaatttttatggatggatcttctctgatcatgcctgtgaatagaataacataatttaaatgacaattaatgctaaacaataacataatatgaacataaaatacgtacctactacacaagtgacaattaaatatgaatcaagtatctcgtgatcttgggtcatggtcatattgagacatgtgtgtggtccaccccattgagtgactttccatgaataagtttttttagatagaattgccctcatgtacaaagggcaaggacaatctgcatatttattcacgcaacaaaccacatacttgtctcatttgctttcaaccactttgaaactttgatgcaccttcataacatattgtttgaccgcattcttgacc

SEQ ID NO: 22727 - DNA, 378 bp, Glycine max
agcttcagaaatttttagatagtagatcttccaaaatcaataggcgtgttgcacaacttagaaacattggatctaagagaatctcgtgtgcttatgatgccaagagagttctacaagcttaaaaagttaagacaccttttagggtttcggcttccaatagagggtagcattggagatctaacgtccctagaaacactgtgtgaagtgaaagcaaaccatgatacagaataagtaatgaaagggttggagagacttacacaattaagggtgttgggcttgacccttgttccgccacatcacaaaagttctctgtgctccttgataaacaagatgcaacgcctggacaagttatacattactactccaaggtcattactt

SEQ ID NO: 22728 - DNA, 424 bp, Glycine max
tagccaaacattaatttaaaattcttacaagtattgcttaaattatctacgaattatggattgaaatcttgtaaattaatgaatccacttttaccaaaatttattgcttcttttcttactctaaatgtttgcataaacttttataatatttacataacctttaggtgatatattcaattattcattataatttttttatctagaggatttataacaacaactcatgtacctttatttaactaattgaactaaatttcttgacatccattaacattttttataatataaaactaatagcagtaaaaatatattatcaactattcagtaacaattataaactgccttttgtttccctaatttttgtttgtttttaaaaaaatcttataaaagcacaaatagactcagattatgttaccaaaatgat

SEQ ID NO: 22729 - DNA, 379 bp, Glycine max
agctttgaagcctaagagacttgaagaaatgaagaacaaaattgggatgcacaaattgatagatttgaattaaggtggtgtgttaaaagtagtataattcaaatgtaattgtccaattttgttagtctgtgaaatgcattagaggttagctataatagttaggttgttaactaacgatggttaagtcttatttagtgtataaaaatagcatgtgatttttttgacgcttaattcatgttttccagaagttactattttctgttattcactatctttctcccttgttcaatcttttccaaaatactaccaagaaatcttgatcatttccaacaattatgtgattgtaattggtatcaaaatagctagtgtagaaaataaa

SEQ ID NO: 22730 - DNA, 427 bp, Glycine max
  unsure at all n locations
tattgctattcagaagatctagttntcatggcttaatttgattatgttaagttctatatatagatcagcaaactgaataaacattcggggaaattaatccttctaattattggcttgttttaagcgtgtcaaattaatctccaaaataacatggataatatcattttcaacaaagacaaattgattacttctacactttattttattttttaccagctatatacttcacatgttaatcatgttttttgatagtgacggaccaatcaaaagatgaatggatttatgggagacgaatttaatattcaaacgattcatcgtatggcagatcaaacacgaaaaacacagtactatcttttggttctccgccacagcttgcttgaataattaatacatatacagtaacctcttatgttgccttgtatttaaa

SEQ ID NO: 22731 - DNA, 336 bp, Glycine max
agctttataattcaatttcgatcgtctagatatattactggactcaattcgacatctgatgaaaaaagttcttgtcgctagaatttgctgacagctccaacattcactctttagcgtattgatgtattacacgacttaaccatacatcctaggtaaaagctatcgctgatcgaacatggtgacagcttcaacattcaatttccagcgtttagatattttacgggactcaatcatacatacgaggtaaaagttattgtcgattgaacctgctgagagcttcatcattcaattacgagcgttcggatattatacggcacttactttgacctccgagta

SEQ ID NO: 22732 - DNA, 373 bp, Glycine max
tggggttcccatcacatgtgggactatgtggcgatctttcgatggtgcacaacaagtgtttccgcatccacaatgcgcgcataaacccaccatgccctgttgaccacctccaactgagcacacatactcccacgtagcccatatcctcgtttctctcaacaccggggcccgtaatatatcgagacgctcgaaactgaattatgaagctctgagctaattcaaacgacaataactttccgctcggatgacagattgagtcccggaaactatagagaccaccgaggatgagctgagcacctcataagacatgcaaacgaccattaccttttactctgatgtctgcacgaatgcagtggtagatggggacgctcgc

SEQ ID NO: 22733 - DNA, 342 bp, Glycine max
ttgcttcgggagaaacgctgtacaaagacgtcagtctactttttagcttctccacttctccgacattggtaggattgtgcatttgcagtatcatcgtacactcgtcaatgatggctttaatccccttgtgggtgatcatgaaccccacgaattttccactttcaaccccagacgtgtactcttcaggattgaggcacatgtcatacttgtgaatctctacgcacacttcctcccaatctattaagcgttgggctacactatgagactggacgaccatgtcatccacatagaatttgacatgttggcctatatgctgtttaacgacccggtccatgatccttt

SEQ ID NO: 22734 - DNA, 415 bp, Glycine max
tcccgtgtccgcacttggaaagatcttattaccgcctttctaaggcagtatcagtacaattctgatatggctcctgaccgtactcaactgaagaatatgtttaagagagagggtgagacctttaaagaatatgcgcagcgatggagggatttggcggcacaagtagctcctcccatggttgagagagagatgatcaccatgatggtagacactctgccagagttctactatgagaagctagtgggttacatgccgaccagcttcgcggatctggtgtttgccggggaaagaatcgaggttggattgaagagaggaaagtttgattacgtttcctccacaaacgtgaacgctcaaagaatcggggcatcaggggcaaaaaggaatgaaggagatgcccatgccgtctcttctacac

SEQ ID NO: 22735 - DNA, 372 bp, Glycine max
tgcttgacttgtcttgttaattggtatacttaaataccaataagcataagatattatttctaaattttaaccttttgaagctctagatgctgacgagcttgacttgttaggttgtttatttatataaacaataagcgtcagaggctccatgtgaatgtgttgggatgaatgatgtgatacattaacatttttggttggaagattttcagtactaagtgacaacttggacttgccactgaaaatgtaatagaataatatgttgcaagtcatggttggtcttaaaatataaaaccagaggggtaaatttaaagcaagttaccttgactgaaaattgcctatccaggtatgcaaatctggtcatttacatgcaat

SEQ ID NO: 22736 - DNA, 402 bp, Glycine max
tgcatgcatgtgaagagaaagccagatggaaagtgtatcattcatgagtttataaaggaacataatcatgaacttgtaccagctctggcatatcattttcggattcatagaaatatgaaattagctgaaaagaataatattgatatcttgcatgctgttagtgaacgaaccagaaagatgtatgttgaaatgtctaggcaatctagcagctgtcaaaacattgggtctttcttgggtgacataaactatcagtttgacagaagccagtatttggctttggatgagggagatgcccaagttatgcttgagtattttaagcatgtacaaaaggagagtcccaacttcttctattctatagatttaaatgaagagcagcgcttaaaatatctattttggattgat

SEQ ID NO: 22737 - DNA, 353 bp, Glycine max
ttgtttctatccaaatagacttaccttgaattaattcctttgatagcccttttgagccttggttccctttccgtgttttgaagctcactacaagccttaagtgaaaaaccatgatatcaccatatccttaaggaattatggagcttcggaattgtttagggaataagcatggggggtttatgtttcattggacaacttgatatgttggctatgcttcatgacgcattatgggccatactcgatgtacactgtatattggttaaatctaggacatgctgaatgaaatgttgtttctcaaacgccatagagttctatgacataattatccgaaatgagatagtcgatcatagaaa

SEQ ID NO: 22738 - DNA, 382 bp, Glycine max
tcacaaataactttctaaggcagtgttcagtgcccttactgttagcctctcgtaaagcactaataaattcttgatcacttcctagaaatccttttgcaaagcatgctttcctaaatgtatcatacaccacattatcaactgttctaatgtctttgtaagactgtggacctttagcagaggaaagcattattctgaagtaaaacaattcgccacttgaaggtgggacccatatgaacatgcctattgcatttccttgctttcttggatgccagcatcttttgcatagcaacataaacaaattatgacacatattgaggataagacacatcccgtccataacggtatattttgttataatgcatccaggctgtgaacattgatt

SEQ ID NO: 22739 - DNA, 546 bp, Glycine max
  unsure at all n locations
cccgccacacccgcgagtgaacacgaatcagaggaggtgagtggcaacagaccaacggctcatgcgtgttgnataaannaannaaganagagtgtatgttgatgacgtcgtagaaccaacgcgagnganaacgagcaacgcgcgggaggcaccaagacagacggccggcaggcaagcttggtagcacaaaagaacggacgaaagggagaccaaagagagagaagcacgagagagaagcaacagcgaaacgtgacgaggcgaaagaagagaaacgcagagggagcgcacaccagaaaccgcaaagcaaagaggcatcacaacagccgggcgagacagcgaaggcaagtgctgcaacacagcgagaggcagcacgcgacgggcctcgacgccgaagcgcaagccctacagaaggagactgagaccgcataggaacgcaagacccacaccgaggacaggactaaaacaaagaccaccaagagaacacgaccatagaccacgacaagggggaggaaaccggaacagcagagcgcagagagaaaagaaacg

SEQ ID NO: 22740 - DNA, 333 bp, Glycine max
cagctgcttcattttctggacgtttagtagaaacacgaattgagcatatatatccatatcgaaaaagaaacggtgtaagcttatgcagaacgattctacaactatcatgagcgatttctaagcaacgtgactgactcacactacacattggcatcggtgacagatatcattgctagccttggtgccagtttccttcggacatcgataccacccgtggagatgaccacacattctactgagcgccctatgaccagaattatcatgaggacatgactaccattatacacactcatattattagtattatgagcctaagttgactcatggaacgac

SEQ ID NO: 22741 - DNA, 381 bp, Glycine max
cgtcttgcatagccgctcttggtgctcataagctccttttaacaaatcccccttttgtactcctatggagaattccctaggaccagaatgtacaaccttgaaactggagatagctcccctctatcttttctgcactaaacataatcaaatgctgtcaaaacatggatgaagggctgagaaaatctacatcacagaagacatggatgagatcacacttaaaaagcacaacgccctatctttcagagaccctcggctgatgagtcctgtgtccttatgtaggggggtagcgtataacacacgtatacttttgccttccaaaaaaaacttatcactattcctcttttcgttgagacaaccctgcatgttattgtataaaagatc

SEQ ID NO: 22742 - DNA, 205 bp, Glycine max
aaccattgccgaggatcgaccttctgcaaccatacattcccacaatcactgactcgataggatgctcatctatgcacactccactacggatatgcccacagctgaaagagctgccaccgctgaagtataacactatcaccagccggatgaagatgcacaagggtaagcaacaacagagacaagccgctctatcggtcttaaaaga

SEQ ID NO: 22743 - DNA, 369 bp, Glycine max
tcagctttgagggtgcgtaacccaccatcttttcatagtagagtatcgataatgtgtctaccatcacgatcatcgtctccctttccatcattgggggtaccacttgggccgccagatccctccaccttttgggcgtgttctttgaaagatccgtccccctttttgcaaatgttctgtagatgcatcctatccagaaccatatcaaaattgtactaatactgcctaacaaaggcaaccattaggtccttccaagaatggactcgggaagattccaagttagtgtaccaggttacagctaccccagtaagactttcttggaaggaatgtatcagcaattcctcatcttttgcgtagtcccccatcttctga

SEQ ID NO: 22744 - DNA, 366 bp, Glycine max
taaggctgttcaattgctcttgattgctgcacagataggcaaaggtctatatagtggtcgtcagaggagcataaaccatagagtcttgcgacaggtgcagatttttgattcatgggcagttgggttaccaggttaaccaaggcgtctggtttaccttcaagcttcttagtttcaaatgatgcagctgagtttgtggctacctcatgcactcctctaatgactatagcatcacttttggtgctaaactattgggagttggatgccatcttctctattaaatttcgagcttcaacaagggtcatgtctccaacggctccaccactggcagcatctatcatactactcttcatgctactgagttcttca

SEQ ID NO: 22745 - DNA, 369 bp, Glycine max
agttttgttctttttataaaatgagaagttctgaactcatcacgttatctaaaaaacccttggggtggatccaagtgctccgatcattcatttgcatattcatgttttggtggcatactcacctttgtttatttctttaggaatttcatcataactaagaaaacaccaaggcacccctataacactcgatccagaaaaatggatgatgaagagggcgtgcaggaacagatgaaggccgatctatcggccttaaaagatcaaatggcttccatctcggaggtcatgttaaaactccagaaaactatagaggataaagccacgacaaccgcctccagtacagttagggaagcggagccggtgctgcaaccc

SEQ ID NO: 22746 - DNA, 417 bp, Glycine max
acttccttgagaagcttctttgagatatctttcttgtgaagctagaggttttctacacacacccctctcataactaagctgacctccttgagaaacttccttaagaatattcctaatgaagctatagcttagttacacatacctctgtaatagctaaactcacctccttgagatgagaagcaagagcttagctatagacaccctataatagctaagctcacccccatgacaaaaaaacatgaaaatacaaaaaaaagtccttactacaaagactacttaaaatgccgcgaaatacaaggctaaaaccctatactactagaatggccaaaatacaaggcccagacgaaggaaaaacctattctaatatttacaaagataagcgggctcatacttagcccatggactcgaaatctaccc

SEQ ID NO: 22747 - DNA, 372 bp, Glycine max
agcttttatctcggaggcccgattcatgcgcataatatatcgagacgctcgaaattgaacaacggaagctatcgagaaattcaaatggtcaatacttcgaactcggaggtcctattaaggcgcataatatatctagacgctcaaaattttacaatggaagctctttggctatacaaatggtcataacttttcactcgaaggtccgattaaggcgcataatatatcgagacgctcaaaattgaacaatggaagctcttgagcaattcaaatggtcataacttgtcactcggaggtccgattcaggtgcataatatatcgggacgctcgaaattgaagaatggaagctcttgagcgattcagatggtcataact

SEQ ID NO: 22748 - DNA, 409 bp, Glycine max
ttgatgtaacattaggagaggttaatgaaacaacgtgatgatgcgcttcatgagaggttggatcaaatggagaatagagaccatatgaattgctcaagagcttccattgttcaatttcgagcgtctagatatataatgcgcctcaatcggacctccgagttaaaagttatgaccatttgaaatgctcaagagcttccattgttcaatttcgagcgtcacgatatattatgcacctgaatcggacctgcgagtgacaacttatgaccatctgaattgctcaagagcttccattgttcaattttgagcgtcacgatatattatgcacctgaatcggacctgcgagtgacaacttatgaccatctgaattgctcaagagcttccattgttcaatttcgagcgtctcgatata

SEQ ID NO: 22749 - DNA, 379 bp, Glycine max
agctttaggctgttcaattgcttcagattgttgcacagaagggcaaaggtctgtgtggtggtcggcagaggagcataaaccatagagtctggcgacaggtgtagatttttgattcatggccagttgggttaccaggtttaccaaggcatctagtttaccttcaagcttcttagtctcagctgatgaagatgaattcttggctacttcatgcactcctctaatgacaatagcatcacttctggcactaaattgttgggagtttgaacccatcttctcaattaaatttctggcttcagcaagggtcatgtctccaagggctccaccactggtagcatctatcatacttctctccatgttactgagtccttcataaaaatat

SEQ ID NO: 22750 - DNA, 425 bp, Glycine max
tctatataagctgaaccattttatcaataaacacaagttgagttttattcagaaaattagagtttatctcttttatcttagtgagagtgattctcctaaattcttgagtgattcaagaacaccctggctgtatcaaaggactttgacaacctttgtgtgttgccctcgctggaaagagtgattctttccttcctttcatcttcacccttgttctttcaaaccacaattccagaaaatccacctctgcccagaattatctcgtggccataactcccattttacgcactcaaattaagtgattcttgagcctaaattgactttaaaaacgagacctttcacctcattttggaatcacctcatttggagccctgtagcttcagttattgccatttctatatttctgtccagccaccacttaacctaca

SEQ ID NO: 22751 - DNA, 379 bp, Glycine max
tgcttgttattaaagaaaagataacaaaagagggcagacatgatgaggtcacactcacacccatatgagccgaatgtattgaaaagaagtccctacataacgagggcagcgcctttaaatctaatacgctcttcaatctttattttttaaatgactggcttgattcaatatatgtgttatatatctttcattgtcaatggttcaagactttaagatgggaaaccctcatatggttgactctaatactcttagacctttcctatgtaaaaaaaaatgaactgcattgggcgtactctatctagaagatagaaatattatggacatctgtcttcttgctagttactaccactgatgaatgtatatatttccaatctactaa

SEQ ID NO: 22752 - DNA, 360 bp, Glycine max
acagtattgggaactatatactagctatttttacgtttgcattctgcttatctcatactaggacaagtcatttaatgcttttaccaaacattttcttaatgcccttttgcactcattagctccaggagaatgaaatacatacttattctggtgttttctgtcacttgaccttgtgggagaacctttgtttacacaggggatggagaatggggaaatctgtataagactgtatgcattgatggatacttagaaggtgtgccatcagcctacacttgctaccttcatgtgtgaatagataattccactagaacttgcactgtctagctgaagcgccttagtgtcttaagcattaacaattga

SEQ ID NO: 22753 - DNA, 381 bp, Glycine max
agcttgtctaattcatttctcttccattttcttccctttcatctcacttttatatttgtaagtctctcatgacaatcagaagctaaaactacccattattgggagctttgcaaaccaaactctctttgatgtaatgattctaaactatatattaatatgatgttgatattgttatttatctttgtgttcattcacatgtcttcgatctgatcatccattttcataaactgttttaggatttaggcattggaaaatatttatatgctagaactggggaagaacatttaggtaatccatctctagggatagagtgacattgtctagcctatgcatgcatctttgctcgtaatgcaaattatttaatataacttttaagggatt

SEQ ID NO: 22754 - DNA, 428 bp, Glycine max
tctagaacttggtacgaaaaactaagttcattgttcttgaaaaatggttttaagtgaggaatagttgacataacactctttcgcaaaaactaagattatcaatttttattagtgcaagtatatgtagacgatatcatttttgatgctactaatgaaatgctttctgaagatttttctaagttgatgtagacgaaatttgaaatgagcatgatgggagagcttaaattctttcatcgattacaaataaaacaaacacccaaaggcttctacattcttcaaaccaagtatgtgaacgaattgctgaagaaattcaacatcgacaatgcaaaagaaatgaaaactctaatgcaccccatgacatacctcggactgaacgagtaatcaacaaaggaaagtttgtctatgtggaagcaatgattcactcacta

SEQ ID NO: 22755 - DNA, 388 bp, Glycine max
gtcagctgcatgcatgcatgtttgtagaacaccaaagatgtaagacgaaattctgaaagaagtgtaaattttgaaacaataagagctaatatacaatcagatacctgaaagtgataatgtatgttgctatgatccctaacaatgtataattagtccctgttagatcacatctatctttacatgatcttgtatatattattacacataaacttatgattctgattgatatgtaattacctaataatcagtagttgattgatatgtaatcaatattgattctgatttctccattataaataaggatgagatgtggtcatctaagacacataattacagtctaactaatacactgctgtatggtatcaaagcttagggtattcttgacaga

SEQ ID NO: 22756 - DNA, 410 bp, Glycine max
tgttaataattttctttgcctcatattttgaaggatgaaacttttctttttcaaatgtgtcatttaacaaatccaatatcatagtcattgccttgttgcttaatccacacaaaacttttatatgatataatttgattataaattcaagttttgtgtacttgcttccttcatacaatgtttgactcccatcgtttagaagctcataaaagccattatgatcttctcttggttcatcatttactatttcatcttcatttaatggttgtgatgcacctacattaaggtcatgttgcctatattgttcaaatgcgtcattgatcatcatttccattgggttttgaggttgaacaccactatctcggaaaacatcttccacttgagaagattctaatgcttgcttttcaccatga

SEQ ID NO: 22757 - DNA, 375 bp, Glycine max
ttgttttgaatagtgttgattttcacttctcgctaagccaatctgctggcttagcgagcgtccgctaagcgcaacactcatgggctaagcgcgaggaagactctagaagaagatgtgctatacaagttcgctaagcgcaccacttcatctcacaaagcgcactgcttcagttcatccgctaagtgagaaaggcacgtgctaagccaaaattcactaatgtgcgctaagtggtccataagttcgctaagcgcacgagcacgaacaaggccacctatttaagcctgaaatcagatttcagaaggggagtttgaactaggattcaaatctttgcatgtctagggtttctagagagagaaaggtccaagttcgagagag

SEQ ID NO: 22758 - DNA, 415 bp, Glycine max
  unsure at all n locations
tataatgaaattataaacttcaactttattnttgcttataatcgaaacaacataatgtttgtaaaccttaagatatagaacataagtaagactcccactaagctaaggtactatcaagaattaaacccatattatcaatgtgctcatgaaaaactttaagtgtcataccattagtaagtggatcagctagcatcaaatgagttcctatatgttatatacaaatctgtatttttttgaattctttatttaacaacaaaatactttatttcaacaaacttttacttggttgaatccttaataataccactaagatattgttccaataaacacccgatgactacttaatgttggcaacaacaggcaagcctattacaataatttagcaataataaattctagtatgatgtctcatagc

SEQ ID NO: 22759 - DNA, 378 bp, Glycine max
  unsure at all n locations
ttgcttctcatggcctttntatgactccaaatgaatatttagttatgttatttattggcacacattaatttgaagcctagaacattaaataatgaagcaaatactccaaagcaggcccaaaacaacaacagtacatgtaaatgcaaaagaaagcagtgtttgactgtttatatatactatcaaaacttggatttaattcatgggtccaactatttgacaccctcctttattttcttcataccacttgtattttttaaactcctatactacccatgtccctttgtacctgcaatcccttctatttctctcctaccctctagtctctcccaaattcacacccctaaaccttttgatgctcttcttcttcttcatcccgtg

SEQ ID NO: 22760 - DNA, 415 bp, Glycine max
tcgatctaattcttctctaaaacaacttgggaagctatattacttcttgggaattgaagtcaagtctatggctgatggctctattcttctaactgaaagaaatacataagatatcttctacagaaaactaaaatggcagaggctcaacctatatcttctcccatggtttctggatgtaagctcactaaaacaggagcagatatattctcagaccccactctgtatagatcagtggttggagcactccaatactccaccataaccagacctgagcttagttttgctgtgaacaaagtatgtcaattcatggctaatcctcttgaaacacactggatagctataaaaagaatcctcccatatctaaaaggctcgttacatcatggtcaagtacttgagctatacacgagctgagtat

SEQ ID NO: 22761 - DNA, 377 bp, Glycine max
agtttgtatggttaaagtctcacgattgtcatgtgctcatgcaacaattgttagtcgtggctatacgagacatcttgccaaacaaagtcaggttaacaataactcgcttgtgctttttcttccattctatatgtagcaaagtcattgatccagtcatgtttgatgagttggaaaatgaggccgcaattatactgtgccagttggagatgtattttccccctgctttctttgacatcatgattcacttgattgtgcacctggtcagagaaatcaaatgttgtggtcctgtttatctacggtggatgtacccggttgagcgatacatgaagatcttaaaagggtatagaaagaatctatatcgtctagaagcatttatt

SEQ ID NO: 22762 - DNA, 421 bp, Glycine max
cagcttgtaagctaaagtctagaaagaatattgatagttttttgaaaattctccggtttaataatggtcaagtcattaatggcatacatgtaaataatttgattttattctagaaatagaaatcacaagattgaaagaagaaaattagttattaatgtaagtaaggttagaaattaagtagggataattaaggttgactaatgatgatttagatttcatggaattagaaaaagggtgattaagtcataagagtttaaagtggagggcattttcataaatcactatacaattagttctaaaatagaattttaatttaattagttctgactaattaaagtgtctaattatatgatgaagaataattaaaataagttaaagttgtaaaaccctaaaaaattacaactcatattaatagacaaaa

SEQ ID NO: 22763 - DNA, 368 bp, Glycine max
tgcttatagcttacagaagaagaagaagcatcatcagcaactttcacaatactgatccaaccagacactctattttggttaccaacaagcttagcagcgagtcctgtttctggtagaccctcgacgatagtccacttggaacgtgggtcccacttagaacgaattggacttgggggacaccctggactgagtgtggatggaaacacaccgaactgaatgctcttgaaaagctggccttgggtgatgaaagcgactcctgctgatcgagatgcaatctttatcggtaacccctcacagagctcgttgccagattgctccacagtcagagggcatgtttcgattggtgctgttgctacttgtattccacc

SEQ ID NO: 22764 - DNA, 363 bp, Glycine max
gtatcgctggaattagaaagctgaaagctgcccaccactatgatagagagcaagacccatgcttctgagctcattcgggacttaatcatagaataatgcctggagaccaaccatagtaaaaacattcgaaattccgaaaaagaaatattggggaaccaaccaccacacactcattggaatggttgcatttggtttatcaactggaccatactcttgcgctgtcttcaatctttgcctcaacaattgcagctgacttaatcatagaaagagatcagtttaaatctctcaaacattaacactctaacaaaactaacaattaagatttgctaaaaaaacaatatgctcacatgacacaagtcgttc

SEQ ID NO: 22765 - DNA, 375 bp, Glycine max
tttttgcaagtcttaagaaaaggcctaactctcgtaagaaatctgatttctggcttaaataggtggctttgttcgcgctcatgtgcttatcgcaattctgaagcggatagcgcgcattagtgaattttggcttagcgcggcttttctcgctcaccggatggactaaagcggtgcgcttagcgggatgccccttcactcggcgaatatgcacagctcatcctccttccagattcttcctcgtgctcagccgagaagtgttgcgctcagcggatggctcgctaagctagaagatgggcttagcgaaagggtgaaaatcagcacttcacaacttgcctaattaacctgaaattgagagaaatatgattattaaacaca

SEQ ID NO: 22766 - DNA, 394 bp, Glycine max
  unsure at all n locations
ctatgctgatttttcttcacttgaactcctcaacctctgtagcgcaatcagcctctgctgaaccaccatgacctctccagcgcttggctcaatcccggacggcggaatcatcccctccttacatggtcgaatccttcacagcagcagcaacaacaacaacaaccttattttcaaaatgctactggcccaagcagaccatacgttcctccaccaatccagcagcaacaattgcaaccaccctataaaccagcataagatgaagctgcttcgcaaccttcccttgaagaactcgtgaggcacatgactatgccaaacatgctgtttcaacaagagaccagagcctccattcacagctnaactaatcagatcggaccaatcgctacacagctcaatc

SEQ ID NO: 22767 - DNA, 377 bp, Glycine max
tgctttcaagctttactcgtggctctattgagaagctctctcgagaggcttctttgacaagctagattcttatctatccgcacccctctattaactaaactaactctcttatgaactattacggacgaatataacgcatcaaataatcgaacatcatacataattactaataatatatatagatatatatatcacggtgttacaggaatacttatatgtgcaacttgctttatgacatccttcagttcatcgatggtacatcctgaaagaatatcaaatgtctttggattgtttactgtgaatgcgtaacctagaaagatgttctggcgtggcatgttccacctcccgttgtaatacaagagcgcgtcatgagtatg

SEQ ID NO: 22768 - DNA, 415 bp, Glycine max
cgacactaagaaactcagcttgagaagtttagacatgttacatgtcacggttttgtttggatcaaggataaaatggatgccccacattatttccatgacacaaatgcaaaaatgatgatttggaaactttatgcaaaactggtcatgcatgcacctatgtggacactcaagtgtcaaatttttatggtcatgtgattctagggctcacgattcatttcctctattatagtcaacccaacgtttccaaaatatgttcttttatcaatttgtgcattcatccgagttcattttgggcgtctgggaaaatcttcacagcattcacccttcaggtgtatacacattttttcataaactaggtatgatcagtgaatttttttcaaagaaaacgtggaagtcatctcttttcaaagcattg

SEQ ID NO: 22769 - DNA, 373 bp, Glycine max
agtcttaagaaaaggcccaactctccttagaaatcagatttcaggcttaaataggtggctttgttcgtgcttgtgcgcttagcgcaattctgaaccgcttagcgcgcattagtgaattttggcttagtgtggcttttctcgctcagcggatggactaaagcggtctgtttagcgggttgacccttcgctcagctaatatgcacaactcatcctccttccagattcttcctcgcgctcagccgagaagtgttgcgctcagcggatggctcgctaagccagaagattggcttagcgagagggtgaaaatcagcacttcaaaactatcctaattaacttgaaattgagagaaaatgattattaaacacacaaaatg

SEQ ID NO: 22770 - DNA, 430 bp, Glycine max
tccacaacatccaagtaaaacaacattcaaacagcattagctatcacagccaagcaaaacagagcaaaggcagaaaactctgctcaaacaccaaccaaaatcacagcttttctcacttaaagaccccagtaacaattccttcgatccaattcgttaaccgttggatcgactccaaaattttactggaagtttatagtacataagcctacattgtgaccgttgggatctactagcaaacttccagaactcattctgtactactctttccacagcctaccacacacaagcatttttctgcacaaagccaaaattctgctgcacctattttaacagcaaaattctgcataagtgcagatttcgaaaatcatccttcctctcatccaatcttgcccaaatcaattcctacaagtcccaaatcatgtatcaatca

SEQ ID NO: 22771 - DNA, 374 bp, Glycine max
agcttgtatgccttggatcttcttcatcaacggagtcctttgcttcttgaagttcaatggaagcggaatggagaaggaagaaagatgattggagatgccacttcaaggagaagatgagtcaagaacaagctcaccaccataagaagccatggataagagcttgaaggtaggagaagatgagtggagggagaaggagagaaggagcacgaaatttagttcctcaaatgaggtatgaactttgaagtgtaattctcaaatgatcaaagttcaaaaaatacacacatatggcctttatttatagcctaagtgtcacacaaaattgtagggaaatttgaatttctattcaaatttcacttgaatttgaaattgaattt

SEQ ID NO: 22772 - DNA, 427 bp, Glycine max
tcctcggtgccattcctgcgaaggcaaacatttggaatgttagtttttgtgggacattactcttaaagcaaaaatggcatataacctcctcccataaatacaaacatcaatgtaaatttagagcaagcttatgcgcatgtttccttacgaacgttcacttgcggaagatatcctattaaccgaaaaaatgcacccatatacaatcaaggcagctttgttacctagattatttacacgtacttccaaggtgtatttgttacttacatcacacacatctccttggctaaattcacatacatgcatactccaagcatttggggtaccaaaaattgcacatgtgcacatcttggtatttctaatacctatacatacacgaacttcatgatgaatcttgactatctacacaataaggtgctacatttcatgc

SEQ ID NO: 22773 - DNA, 362 bp, Glycine max
tgcttattccgatctttatctctctattcattacagcagagatgaacttaattgctgaatgacagtcttcacatatcctaaggatcttgacaatcctgagagtcactccatcgccagttttcatcagcccaaatgccaccgcaagcttctcactgtggtacctgacggcatactccctttcttccccttacaactcgtgcatcgcggactctggcacgggtgcatagcctgcatccttgcacctccatatcaactcatccaagaaactataaatctcattagtctcacggtgagacttgtcacccatgctaaaaagataactactattgtcaacatctatggtgctataacccacttgcttc

SEQ ID NO: 22774 - DNA, 169 bp, Glycine max
agaacctgcttattattatagggcaccactactgaccggtgatgggctccattctgataacgatccccctactactgacaacaccctcctattttatttggtggcaaccattctacagtaccgcaacaaccactttctaaccattaatcacgacatattttggctcatg

SEQ ID NO: 22775 - DNA, 363 bp, Glycine max
  unsure at all n locations
gaatacggaggtagttaaggttgggactggaaccaatcaccaatggctttcttggggagaaaaacatggaagactggatgaatttttctgggaagagggagaatccacttgttaaccaccacacccacctttgttaatacctggaaaggatcataaaacctggggaagaagtttttattaatcctttttagcaaaggatctggcactgtaaggattccatctatgagaacacccaacttaccgactaacatattctatgtcccggcggcgcctggtggcaattgctcgcatgatatcttgagacttccacaaattttcttaaagtaaccaataattcattctgagcaattgtaatttattgcn

SEQ ID NO: 22776 - DNA, 426 bp, Glycine max
agcttatgaagtttcaatagaggctggatctttgagcttcaatgatgtccttcaaaggtgattttccaccatagagatgcaacagaagataaaggaaaagaggtgagaagaggcgtcatccactagggaataaactatggaagaagaagcttcaccaccaagagagtgccttggataagaagcttagagaggaagcttcaatggaggaaaagaaagagagagagaaagagagaggggggaacacaaaattgaaggaggaaaagagggagagaagttgaactttgaagtgtgtctcacaagattctcattcatcaaagttgcaacaagtgttacacatgcttctatttatagcctaggtagcttccttgagaaaatttcttgagaagcttccttaagaaacttccttgagaagcttctttgagaagc

SEQ ID NO: 22777 - DNA, 382 bp, Glycine max
agcttcctagaatcaagatcaagattcaagactctagattcaagaatcaagagaagacttaatcaagataagtatgaaaaagttttttcaaaaaactgagtagcacatggatttttctcaaaacatgtttaccaaagagtttttactctctggtaatcgattaccatattgttgtaatcgattaccagtagcaaaatgtttttgaaaaagttttcaactgaatttacaacgttccaattgatttcaaaaagctgtaatcgattacaatgttttggtaatcgattaccagtgtgcttgaacgttgaaattcaaattcaaatgtgaagagtcacattctttcacaaaaaggctttgtgtaatcgattacactaatttggtaatt

SEQ ID NO: 22778 - DNA, 427 bp, Glycine max
  unsure at all n locations
ntatggataagtaaacaaggtttgcaagtgttaaatttattataggatgaactgaatgcatgctaaagtgattgatcataattctgatttctgaagacgtgttactaaagagaaatttatagttctagcttgccccataatattcttttaagaaacgtggaatgaaaaggtatttaattttaaattcgactttgctgaccattacgtaccaaatggatatttagcaatcattgaggaaaacttttattaaaaaataaaaagatggaatatttaatgttgttattaatagtgtctccattttaattttaaaaataatatatatataatattaactntatttgtttactggcaatattatgtcacaaaaccttgaagtgcttatggatntacaagttcaaagaaaatgctttcatttcatccgtttcgt

SEQ ID NO: 22779 - DNA, 418 bp, Glycine max
agctcggtacccgggatgctctatagtagtctgctgcatgcatgcttgcttatcatggtccgccctcttcgttatagactaatatttcgaggcttaaagattgaggattaggtgcagcttgcgcactggccgcaatatcgaaccgctaaacgagcaatgaggatggcggcgtctaagctcgatgactggatacagggatggtctaatccggtccgttgatcgcgatgactgtgagttaatatattcatgtctgctgagtctggtgtcatatgactactttcacttaatcgatgcttgtttcactcaatggatggctcgctaatgcacatgattggcttatatagacggtgattgatcacacttcaactctatccaatgtgacttgttgttgagagaaaatgatattagactgcgaatt

SEQ ID NO: 22780 - DNA, 405 bp, Glycine max
tatgcacggaaagtgtaattatgattctgatatgctcgaagaaacaccattttctaggtaaccatgcattatgtaccatgttcaattattctgttcttaagtgaaacgggattatgatcccaacaccgttggctcgtggagcctaacacatgaaactaataatgtattgtgaagtttcacgcttcccccttctttcgttgtgttttgtagaggaaaacgcttggatgagcctacatgagaacaaatggtatgcacatttgcacatcaaaaagtgctttgaacgcatatgcctgacgatgccatgactcatgcaaaatgtgaggctggaatatgataatggacaaatgcatgatatgtccattatgatgttatgaagagatgcttatgctatgcatgatatgaatg

SEQ ID NO: 22781 - DNA, 375 bp, Glycine max
tgtctttgtggttgattgggtggtgggtaatgagaagggctgatattggctgagtaatgacattgttgagctggtgagaaatttggccatgtaggaacgacagtcacaacatgggttccttcttccttctcatcctctctatttgccccaggctttttatttgtcaaagcaggatgatcaaatttgcctttttttagacccacttcgatcctttcaccggcgaaaacaaaatccgcaaagcttgaagctgtgtaacccaccattttctcaatagtagaacaccggtaacgtgtctactatcattgttatcatctccctttctatcatcgggggtgccacttgagctgccccagtaaggctctcttgaaaaaaatg

SEQ ID NO: 22782 - DNA, 419 bp, Glycine max
tgagatgaggaagtgtagaagggtgatacttcctgcttttattcgttgaccacagagtggtacctggagatatgttgcgagggtcaagagaccttgggaacgtcaggtggggtgctattgcccaaaaccaagcttgaccaatcccgacccaacccgagcatagtcagtcagtgagaacctgtgatgtacctaaacaggcgagctcctggcagtcaacagataaaaggaacaaagaccacaaagcaaggaggcttgtggtggctggccagctgtgaatcttgtgtgatatatgggttatggcctctgctaatcgattaccaagggtgggtaatcgattacaaggcttaaaaatgaagacaggaggctaagatggtctctggtaatcgattaccaagggggtgtaatcgattaccaggctt

SEQ ID NO: 22783 - DNA, 378 bp, Glycine max
  unsure at all n locations
tagcttcccgaatccgtacttggaaggatctgattaccgccttcctaaggcagtatcagtacaattctgatatggctcctgaccgtactcaactgcagaatatgttcaagaaagagggtgaaacctttaaagaatatgcgcagcgatggagggatttggtggcacaagtagctcctcccatggttgagagagagatgatcaccatgatggtagacactctgccagtgttctactatgagatgctagtgggttacatgccgtccagcttcgcggatctggtgtttgccggggaaagaatcgaggttggattaaagagaggaaagtttgattacgtttcctccacaaacgtgaacgccaaaagaatcggngcaacagggg

SEQ ID NO: 22784 - DNA, 418 bp, Glycine max
tgccacccagctcacccaggcgagcattgttgcttcctccagaagcaacagccttctggaggaatcttctggagggcccaagtgggcctggttgctatttgcacccccatttttactaagtacaccccccttttctatttttttgtaactctttttctgtaacgttacaaaactttacgaacttcgtaacgatacttattttttcttctgcaaggttacgaacccttacgacttatgtatttactcttttttagctttcaaagaagttacagaaacttacggattgcgcaaaaacacctctttttgacttccgccacattacggaagttcacggatcgcacaagcctgcttccttttgatttctgagacatctcgaaacttcatttattgcatgtcatcaagtaataatccccggacg

SEQ ID NO: 22785 - DNA, 358 bp, Glycine max
ttgtcttgcactttattgaactatacagatgcaaagtgaatgccttacattatttttccaatatcatcttcaatgaaagactattcgtgattgagtataaatcgcactgtacaactgtctggaactaggtatattaatggcttacttgtgttatgagagatgtgccaaataacttagtacagttgggcttgaaattttttgacttatgggagcgatctgactgagataaacattatataataaagaccaataaatatcaagaaaacccacttgccgaaaaaatgcacttcctacatcatctaacagaggactcttgatgaatagacgaggtatccttactatggagataacacttatg

SEQ ID NO: 22786 - DNA, 333 bp, Glycine max
ttcatgcaagcttgggtgatgatgcgcggacagatgggtaccatgaggtgtttgctggggtttgacccatgcgggcgttgaaaagagggcatggagcatctccttccttcctttttgcccctgctgccccgattcttttggcgttcacgtctgtggaggaaacgaaatcaaactttcctctattgaatccaacctcgattctttccccggcaaacaccatatccgcatagctggacggaatgtaacccactagcttctcatagcataacactgccacaggtgtaccatcatggggatcatgtctctctcaaccatgggaggagctacttgtgc

SEQ ID NO: 22787 - DNA, 336 bp, Glycine max
tcctcggcttcctatcttgttggtgatgaacacaattgcaacacggaatcaaaaagtgccaagaaggatgaccctacggctgcaaactcgacaatcccgtgggtatggcttttgaaaggggggaaaagaagtttttgaatgcaaaaaacctccccccttatgacattcttataattaggtgcaggggtggctcgaccagacgagctaacctgcacatatttttttttttttttgagaacaacatgaaccatgtcccctcccttttaatggattatcatctggcctaacttgaacttacttacgttagaaataggggttgattacttatttttactt

SEQ ID NO: 22788 - DNA, 348 bp, Glycine max
tttcattcgagctttaacctcatcggctctcacgagatgtagattagggagccaatccagaccttgtgttcggactctaaaccactgatgatagccgaccatgagcccattacgggttcccctaagctttctgactcttcttaacggcgcatgccatgccttgcgaactcgttggaggaccctaccgttgtggtcactgaccccccgtgcgacgaaaggcgggaagctctagtctgatggcgctcgtatcatgaagaaccaccgctgtcttatggctaagacagcattatagtgaatactatcactggatccatcaagggaacatctacacatgcttcgaatgaagat

SEQ ID NO: 22789 - DNA, 375 bp, Glycine max
ggaagcggttatccgcctgaaaagatatgaccattttaatttctcaagagcttcagatgttcaatttctagactctcgacatattatgcgcccgagtcggacattcgcgtaaaaagttatgaccatttgaatttctcgagagttttcgatgttgaattttgagcgtctcgatataccataagcctgaatctgaccttagtgtgaaaagttatgaccatttgaatttcacgagagcttgcgttggtcaatttcgagcgtcactatatgtgatgcgccaaagatggacattcgagttaaatgttatgagcatgtgaatttctcaagagctgtccgtgatcaattctgagcggctcgatatgttgatttgcctgaatc

SEQ ID NO: 22790 - DNA, 370 bp, Glycine max
  unsure at all n locations
atctttgaagaagcaagacataaatcatcctgtgtaaatatattttttcattcattcttgtaaagcttcatgaaatccttgtatagatactaagctctcaaacaccttgtaaaccttgagagaaaagactaaaatgttgagtatttaatccgtctataagatgatcacgtattagtcagtgtgcaatctttcaacaaatcttgttgatttatttagagttagcgatgacttggtaggacaaagaatattggattaagtcaagcttggggtaaaatttgcatgtgtaagagccaaaagtgacaatgaaaaatatttgaatacttgtagctntgtgataagttagtaaaaacttggtggtttgtcaagaact

SEQ ID NO: 22791 - DNA, 393 bp, Glycine max
tgtgttgtgtgtagtttcagttgtgctgttcttctgtccatatttggttgtctcaaacttggtaccttagttaatatttttggtgttctacttattctgttgttgataattaaattatttgttttaggtattataaaatttgtatgctatatttgttctacgtattctaagtttgtatgttattatttgtgttacatatatatggtaccttagtttgtatgttaatattatttgttttaggtattctaaattattattcaaatatatggtacgttagtttgtattaattttgtatatatattgtttaaatttttctttgcatattaatttatgttattcaaatatatattgttttatttatttaaatttgtctttgcatgcattttaatttat

SEQ ID NO: 22792 - DNA, 377 bp, Glycine max
agcttgatggtaaactagatgtcttggttaacttggcaacccaactggccatgaatcaaaaatctgcacctgtcaccagactctgtggtttatgctcctctgccgaccaccacacagacctttgcccttctgtgcaacaatctgaagcaattgaacaacctgaagcttatgttgcaaacatctacaatagacctcttcaacctcagcagcaaaatcaaccacaacagaacaattatgacctctccagcaacaggtacaatcccgggtggaggaatcatcccaaccttagatggtcgaatccttcacaacagcagcaacaacaaaaacagccttattttcagaatgctgctggcccaagcaaaccatacgttcctcca

SEQ ID NO: 22793 - DNA, 376 bp, Glycine max
agcttgttagaagttgtgatatgaagttcatggtgtgacatcctctaccccgacatacatatacttaagaaaaacatataaaaatctggaatttaattaaatcaattttattgaaatcacttaaacaaattcatgtgggtaaaagggcaacattcacttcactattaccaaataaaacttattaaaaacatctccggctcaaaactgttggatcaagtggtctcgaaataattaagaagagggggggttgaattaattattaatgtaccttgactaattaaaaatcagaccttcttaatgttactatatttaattaggcttttactacaaagttaagaaagtaaagaaaaataattgaaacttaaccaaaattaaa

SEQ ID NO: 22794 - DNA, 438 bp, Glycine max
actcaagctagtgaaactctttgagaaaaaaaagtccaaattatgtattgagatagttacaaatgctagcaaaaaagatacccttcttaagaacttttaggagttggaaaacagactgaaagatcttcaaaaggatcggaaggaacttaatgaactacacattaataagaaagaagaaagatatgatctttggagatagtgtgcacaagcacacaaagattttgatgaactcaaagtgagtaaacacaatctttgggtggaatgtgaagaactaaagaaaattgcaagtttcctaaaagatgagcttctaaagcatcaataatttataggtcaacctcaagatgttgtaaaacttcacgaggaaataaaaaccttaaagactacattatccaagtttgtcaatggaacaaacaatcttatcaagttgttaggaaactg

SEQ ID NO: 22795 - DNA, 378 bp, Glycine max
agcttttatgtgatttgatgtgacacttcacatttaaatttgaatttcaacgttcaagggcagtggtaatcgattaccaaaacattgtaatcgattacagccttttgaaaataattggaacgttgtaaactcagttagaaaactttttcaaactcattttgctactggtaatcgattacaccaatatggtaatcggttaccagagagtaaaaactctttgacattcaaagttttgaaaaaaaaaactttttaatacttatcttgattgaggcttttcttcattcttgaatcttgagtcttgaatctaggcttatttcttgagtctagaattcttcttgattcttgaactcttgacttattcttgattcacttgagatg

SEQ ID NO: 22796 - DNA, 412 bp, Glycine max
ttcctcctcatatgaaatgttaaattgttatttattccctaaatgcttatatgtgattcaatttggcccttaaatctaaattacaaaaaaaatcatattttgagataattcaaaattgttattaaatgattttaaactgctacaaaatgcatattttttaaaaaaatgaacttattttgaaaattagaggaccaaattgaattgcttttaaaaattagaggactaaataaaaaaaaaatagaaaaccaaacctaaataataaattaaaggaaacaaaaactaatttaatcttaaaagaaactaagaagcttattaaatgaataaaagccatatttaaagcattgatgcatacattgagtttgaaatactctgcatagcaacaaattgaccaaatacttatttgagttcctag

SEQ ID NO: 22797 - DNA, 377 bp, Glycine max
agcttgatgaatctcaagaaactactagagatatcactatcattgtcacaatacacacgtgaacccgcttagaggtaagggatgagtttatcacaattgggattagaataaacatgtgtagggatccttagaagattaaattgagtttattttgggatgtttattgaacttttttcctttatgattataaatacaatattgatgtcctgatgtgaattagttgataaaattgagttctcttggtgttttcgttttttatacctatgattttgatataattatgcgaaattatttgaggggttttacttctcatgttgtgataaactgttatattgagattctgaaattgtgattcaaattatgagtatgtgataaat

SEQ ID NO: 22798 - DNA, 428 bp, Glycine max
tatatctcactgtgtgcaagaggaagagagctgcatatagatagatatgaaagtgttcatttaagctctacctctcaaaataagaaaagaaagaaaactaagggtgctgctgaagggttttctcagcaaaagaaaccaaagaaggatgaggaatttaccagctacttctgcaagaagtctggacacatgaagaaaaagtgtcccaagtacgccacatggcatgtaaagaaaagggtttcttgtgaagctgactgccaagtgatgatgaaagattcatatttgttggcgatggcaaaaaggttacggtgaaggctataggaacttttagattgcagttaaagactgaattttatttggatttgtttgagacttttgttgtatcgccttttagacggaattaatttctatttctagtttgaacaaaattg

SEQ ID NO: 22799 - DNA, 239 bp, Glycine max
agcttagcagcctttctttcagtgtaatgccccctttccacaatcctatcaaacaactcaccccctgcacagagctccataacaacatgaaccgcgacagcgtcctcgaaagcctccttgatggagatcacgttaggactcccagccaagtggtgcattatttgaatctccctccttacatactgcacatcctgatatgtcaaaagcttcctgctcgataatgacttgcgtgcatactc

SEQ ID NO: 22800 - DNA, 400 bp, Glycine max
tctggtgggtctttcagctatttgcttaactaattttcccacctgcacctccagattcttgatggctgactcaatgctcttgtggtttgacagggaaacttgcatgaactgcatcagcgtgtcttccagcttggtggttctctcatatagattgggcccttggttgggaagctgattggatggacctccttggtctttttcgaagctattccatggatgggatctccaaccttggccctgagagaaatatcctccctgatggtaccctgacagtcctccttgatggaatccttgacgattatgattggccatgtagttgacctctattgatgcgtcgtcttgagccattcaaaagcctgactcatgagccccaccatagatgttgcatcccctaatgtgc

SEQ ID NO: 22801 - DNA, 372 bp, Glycine max
tgcttgtctagcatttcacacaaaagtagaaataggcaagtatttgtcgtcaattcaagattgatggaaaatattaatgtgattcaactcttttaaaccttaacgcctgtaatagctcctaaatcatactctttttgtagtgatcaattgtaccttaaatggatatgttaagtttagatttaattggatcaaaataaataaaaaaatgtattcaaacctaaggatatcatcaaagttatggattttctatcgtctaaagactaaaatcgtataataaatgagacaaaatcacgaatcaccaattacaagagattaaattataatctagctttataaaagaaaaaataatgatttgtaattagatcacaatac

SEQ ID NO: 22802 - DNA, 234 bp, Glycine max
agaaaaccgcatagaggccgtgggaactctatcgattagatgaacagccgtgataaaggcatgatcccaaaactttggacgcatagacccatgactaaaaaatgcaggacctaactccgcactgcgaacctctccactacaccatctcggtgatgagtgtgaggacaaacaagttggtgaataacccctagatctgtgagaaaaatgttgataggtctgaactccccccccccc

SEQ ID NO: 22803 - DNA, 374 bp, Glycine max
ttgctttaggatcaaattcttttctctcttttttctctcaattgttcttcattctttttcctcttttcagttctcttcttcctttttcttgcttaatttttgtggcttttccattggtgatgatcatggaaggctaaatactcaatcaatccaatgaatttgagttcaggtttagtatttctattttgtatgattgttcattttttctcctatctaattttcgattttcatgattataaatatgcttaggattgaaaatggattaggttatggattcatttcctaattgcgaaatttaatcatagattgtttggatgatattctaacctaatttgcggtttcaatgaatttagggattaattcgattgaactaa

SEQ ID NO: 22804 - DNA, 418 bp, Glycine max
  unsure at all n locations
ntataggatactagggtgtctcctagtatggcctcctcaacgtgcggagctagtcgagggatgatgatctgctgaccaccagcctaatgcctgctcgtacccgtccccgagcatctgaaagcgggaaatggcatttatgcagtgaaaatatggccacgctaccacttaccttggttcatccctgtctaggatttgatgttgtattaaccacctctcgaaatgatcatgtccttgtctaccgattcacaaggtccaaaatgcatgtgcctgcgtatgcatgaaaagtttcaaacgcaataattctttagcaaaaacccattgggttcagttataaataagcgcttatggcatccctatgggtcgagcgaaaaggatcggatcatttaaaaagaatatgctccttataggaacaaaacga

SEQ ID NO: 22805 - DNA, 380 bp, Glycine max
ttgcttgacgtcttaaactgagttataattaaccttctctgaagcgatcaatctagatagggataaacaccatatgatgcccagattttacttccataacaataaatttgttgattactaactgaatctatttcagttgattaaaaaatgtatgatttgttgtacatttttagtattgaagatcgatcatccctttaaataaaaaatagcttatttatttttataataattaacttaaaaatcatactaataaacatctagttaattgataatataaatatatattaactgtgctcttatatcaatattattattattttatcatgattacataatatttttggcaattaatttcgtagatatatatatatatatatata

SEQ ID NO: 22806 - DNA, 389 bp, Glycine max
aatactcaagctggcatgttgaggaatatagcacttttattaaccatctataagagttcctctactcataattattcgcattttatcttcacataattcttaagttatttaaactaagtcactttaagctttattcaacaactaatgaagatgtattgaacgtatggcattattaacttatagtactctatataaatgagagaaacatgtaccatactgtgatgagttttttataagtttatttaaatatttgtcgtggacctatacgaatatataatatatcacacctctgctatattattattctttttatttgtatttgattctaaacaacagactatttgagttctttttcataaacatctattgtgtataaggaacatgctcca

SEQ ID NO: 22807 - DNA, 358 bp, Glycine max
cagctttcactctgctcgagctatcacagccatgcaccacatatcagggcatggactatgctctacacatcagccattaaacacaaacatgtttactgatacacacaagaatcaattgcttcgatccagggatgtatacggagcatcgactccttaagattactggaactctatagagcatctgcactacattgagaccgttgggatcgactatctaacatccataactcattatgcactacactttgcacatccaaccacacacaagcatgatgtgcaccaagctaaaagtctggtgcacttattatgacagcatacttctgcataagtgcagattacgaaaatcacgacttactct

SEQ ID NO: 22808 - DNA, 421 bp, Glycine max
  unsure at all n locations
aatactcacgctgagcgcaagaagaagagagctgcattatatacatattaaagcgcacatttaagctctacctctcaaaataagaaaagaaagaaaactaagggtgctgctgaagggtttctctcaacaaaagaaaccaaagaaggatgacgaatctaccagctacttctgcaagaagtctggacacatgaagaaaaagtgtcccagattctccacatggcgtgtaaagaagagggtttcttgtgaagctgactgcccagtgatgatgaaagattcatatttgttggcgatggctacaaggttaccgtgaaagctatacgaactcttagatngcagctaaagactgactccatccgtatttggatgagactattgatgtctcgcctatgagacggaattacttactatttctagttagaac

SEQ ID NO: 22809 - DNA, 371 bp, Glycine max
agcttcatctgatgtgttagtaggtaatttctaatttgcatattaatcattatagaataaaatatggtgtatgcttttgcgggacaattttagatttattatcttctttttctaagtagatgtgattaactacactaaacattggcattggtgacaaatatattgttcaaccttggtaccagtttctcgcggacaatgattttagccatggagatgaagttacattttactgtaggtattattattattattattattattattattattattattattattattattattattattattattatttagtttgtttcatgtttttcctgcattactgatatttcctgttttttctttctttctgattttcc

SEQ ID NO: 22810 - DNA, 403 bp, Glycine max
tattgtatgcatgcttgtggtttgatcatccattgttgtgtgctgttaggaactttagcattgacaaatgtactgtttccttggaacttgatagagcagggctagataactgtagtgctagacatagtgtgcagggttctagtttttattatgttgtgcttataatgctgtttaaattaggctaagttcaacaagagacatctatgaacgaagcttagtttaaattagtccaaactcatgagacatcggtgttggtatttttgtcctcagcatagaacacaggaataatttcaaatagagaaaaaccctaattgcatcaagtatctcggtggaaggacccaacacttttatttagttgttttcacactcaattgttcacgtttactgtttctttgattacaat

SEQ ID NO: 22811 - DNA, 365 bp, Glycine max
agcttaaaagaaaataactaaaataattgcccaaagtccctacggcatcactcaaataagcaaaaaggaaataacataaatagaccatataggatataaggtattctctctaattataatcacccatttgtatcctttatgtactggcttagaacgctagagtctttacaagtatatcaccagaatatggttcgtgcgtgttgaagaaattctgtccgaatattcaagatgcaggaaccagagctgaatactggtaacgatgcaacgagtaatgaactctaaactaaaatacttgagtgattttttgaggcagatgcataccatatcattaattgctacattatacttcattaattactgaaagc

SEQ ID NO: 22812 - DNA, 392 bp, Glycine max
gatcatatataataggtgtactttaattgattaagtttatccatttttgaactttgagaatcgatgaatgttcagatgatcactcaagtcaatagatgacaaactcaaaacagcaagattttggagttcaaatattgaatttggaaaattatcttacagtttgttcttaaagagtgtgacaagtatttgaaagaataagatgagaattcaccaattggtcccatgagctggttgttgctaagatctaaaatggagagttaagttagattaaacaatgataagggaaccattccatcaaaattgcaaataatcggaaatagttcgttaagagacttcaaatggccaatggaagaaagcggaataagagagattcgagagtcttactggagtat

SEQ ID NO: 22813 - DNA, 370 bp, Glycine max
agtttgtagcttccaaatctttaaaaaaaaaaaaaacatatagggcattaggagaatgagccttgaacctctcgcaccctaggcacgactttttggcttattttttgcttttcttatggaaaaggagaaactggccaaaaatgatttttcattagaataaatttattttactaatatattttattttcataaaagtttttttattagatgagataaatatttttaaacacaataaaaaaatttgaatttttttgccaaataacttttgagtaaaaaaaaaaggccaaaacacacttgagatggaatgacattgtccaattctctatatatagtttttgtaaagagaagctcagcatcttttgtatctttc

SEQ ID NO: 22814 - DNA, 331 bp, Glycine max
aacgtcaatagcggacttcctctgaaaaattacaacaccatctcctgactgagccacctcaatacctaggaagacttctaatgtccctagtctttggtctgaaaatgactgaataagtgctcctttagctaaccaatcttagtagcatcattccctgtcatcactatatcatcaacatatactatcacataaacacacttctcagaggatgaatgacaataataaacagaatgatcaacctcactacgtttcaatccaaaaagtcgaacattatgactgaatttaccaaactaagcccgacgggattagcttcacccatagagagatcaac

SEQ ID NO: 22815 - DNA, 483 bp, Glycine max
gatctctcacgccggtcccattcatcctccaagctttcccagctccatgctatcgaccttcagacagcccagctatcgagccaagcaaacgagccaagctgaaactctgctcaccacatctcccgaatttcaaattattgtcggcttaaagaccacagtaacaattccttctatccaattcgttacccgtctggatcgactccaacattatactggatgtctatagtgcataacccgacattgtgaccgttgggatctacttgaacattcggacctttctgtctatttttcccatcaacccacacagctttttgaccagctgaatctgtgaccatttgcgcaaatctctacggaattcgaataccttcctaacatctggaatgatctcacccatcttttaacagctacaaagactttcccagcccgatcggtgccccttctctggttttgtgaagaataaaagaattaacacccctccatctc

SEQ ID NO: 22816 - DNA, 405 bp, Glycine max
acctatagagcccgctaagcctaacaccaaccgcaatgatatgcgcttagctctccctgagccgcgcttagcggtattacatagtaaaattttcacatattttactaagtaaaaggagctcagcgaactgggtcgctcagctcattcactgccgctaagaatcttgcttagcgcagggatattggtttagcgtgcagctctcaaaacaatataaaaattttctacgatacctgtgcttagcgaatcaccctcactttaccacaggtacatatcaagaggatgaatatgcatcctctacatgttacatcgcttaacgcgatgaacacgctcattgaattcttttgaagactacaactactattgagacactcactcagcgcgacatgtgcgcttagcgaggttctt

SEQ ID NO: 22817 - DNA, 203 bp, Glycine max
  unsure at all n locations
catgttctgtagttgcatcctatccgaagccattatactgacacagcctaacgaaggcaaccattaggtccttccaagattggactcgggaaggttccaagttagtgtaccaggtaacagctaccccagtaagactntcttggaaggaatgtatcagcaattcctcattttttgtgtatgcccgcatcttccgacaatacatc

SEQ ID NO: 22818 - DNA, 347 bp, Glycine max
gtatctcaagaaatgcacagatcgttatcacaacaggtgcgcttgctctggagccatgacggagatcatttgcttaggaagattgcccgcgcgttcctgaaccttctactactgtgggccccatactaccatcgacaacactatggctaagagttttatctcacacgagacaagcagatatccttatgacagcgtgtgagatacctgggcgtgtctaatccgtgttctacctcgatggcgctctctatgatctgcctccccgatgatgcctctgcatgcatttcaatatgcaggggctaatttagatagctgctgagaattccattctgcgtgcttttactctgaaa

SEQ ID NO: 22819 - DNA, 379 bp, Glycine max
  unsure at all n locations
ggtatgagcattgtcctggtattcactaaattaatgtggctccccctttctttgatgtatgggcattgaaataacaagaatgttgctacatatggatctgtatttgaaatacctccatgaaatactattctctatttggggaagtttctggtacgttatatttttctttgagacattactacttcgaatatatttttttccagctacctggcttgttagtataaaatcacaatatacatcgactgcgataatagatatttttaacatggccatccacctcataagtacanacatgacttagtgccttgataggctggaagaagattgtccttacctctattttcctctctactgcagctttatttacttgttatttact

SEQ ID NO: 22820 - DNA, 432 bp, Glycine max
taccactatatttcgtccatcatttgtaatgactgttattgtctctgtcaacaaccaaaagattcagtaaaatatagcaactactagcatggtttaaggcatatctcacagaaacacaatttgatggagaactggttcctaatgcttcattaacttaaataattgtcattaataagcgcagcaaataatataactatgtatagaattccaaacatcaaagcaaaacataaagatttaactatgtagagaattccaaacatcaaagcaaaacataaatatttacagatgacttacgatctacaagagattcaagtccaggcccagctgacatcttgcgtttatagatagatcacacacttatccttgcacctgtagaagcttcagtgtcaaaatatcaattaaacaatgcaaatgtacacattgagaaacagc

SEQ ID NO: 22821 - DNA, 256 bp, Glycine max
  unsure at all n locations
caacaactacaagaatctgacattttcttgttagaaatagtagagatatgaactttttcatttggtttagaaattgagacttcatttctaaaatgatctaattctttgtttaattctaaaatttcattttctaacattgaaattgttttctttgaagatgaaactaactttgcaagtttaattgactctttatgcaaatcagcaaatgcatctngcaattcatcaaaaaaatagataaattgttgaagatgtacct

SEQ ID NO: 22822 - DNA, 367 bp, Glycine max
tctcttctctccaaaccttcccttctctccaaaccttccctcccatttccattcccgttcctctctccgaaccactccccattctccctctccttcccccccatgcgccgcgtcctctccacaccgttatgctgcaccttctgcccctccgaacccaatctcagcccctccgaaccggaacacgaagccggttcagccaacaccgaagagccgggtataaattcaaccgaagaaggtgcagcttcagtttcagattctggtttggaagaagaagaaagcgccgaggcagtgcttcggagtggcgcggattcggagaagatagttgttgcgagtggaaggctctcgatagtggtgtacattgaggggc

SEQ ID NO: 22823 - DNA, 296 bp, Glycine max
  unsure at all n locations
attgattctcatgcagaatttgaaggccaactatcatgtcttgcagaagtattgtcatgaagtcacagtcagtgtgctttgtaatgcccatggtgagttcaggttcaggccattgtggatagtattgacccaaaatataaagtgcctcagcgcagtccatttctttgaagtaagaagggttaatgccaagagcctctgacaatagctcanagattgtaatgcccaacacccttacttttttggtatattcagccacaatatctctgcgaaagcatgattatttcatcaatgacaag

SEQ ID NO: 22824 - DNA, 412 bp, Glycine max
tgagctatcagaagacttttattcatttagtgctaagttctctaccttcacagtttagtcagtttaagatctcttacaactgtcagaaggagaaatggtctcttaatgagcttatttcattctatgtacaagaagaggaaaggctgaagcaaaaaaggactgaaagtgctcttgttgtgagtacctctaaagacaagggcaaaagaaaaaggattaagaagcccaagaatgaagttactaagggtccaggacaaaagaaacaaaatcaggatgacaactgtttcttttgcagtaagcctggacatgtaaagaagagaaatgtaccaaatatcatgcttggcatgcaaagaaaggtatgtttcttactttggtctgttctgaggtcaatctagctctagtacctagaaacact

SEQ ID NO: 22825 - DNA, 324 bp, Glycine max
aatcaaaactctgacatctatcatgggtggaatggatgaatgcatgaagaaatgcatatggcacatatgcaatttatgaatacgggagcccgggaaattgtctccatatttaagaaggtggcacagaccctccgttggttttccaaagagaggggatcaaaaccgaatccatgcatgatgcatatgcgaaaggcgcaacacgagaatgtacagtatgacaatattcacgaaatataagccaaagggtacgtgacacttatgcatggcagtgtgaaaattgcacacagcgtgtccgcttctgcccctattcagggactatatggg

SEQ ID NO: 22826 - DNA, 419 bp, Glycine max
  unsure at all n locations
tcttatccaaagctcatcttggtggcgaagctcattcttccatggcttattccctagaggatggtgcctcctctcacctcttctcctttgtcttccgctgtatctccatggtggaaaatcaccattaaaggacctaattgaagctcaaagatccagccttcatagaagccccacaagcaagcttccatcaagtggtaattagagcacaagagcttcatgtaggtgctccttaaacctccattaattttttgctttaccttctcttccattggtgtttcttcatttttttctccatgtatctcctcacatgtcttgtgctaaatgtttttaacatgattctttagattttccaccgattaaacttgctatagaagctagatttgattntctatggttcaaatttcttgttcttgttcttg

SEQ ID NO: 22827 - DNA, 291 bp, Glycine max
cagatcaagatatcttaatgttgaaagttttccaaatcatctagaaagggcaccaccaattgagttgttgtaaaaatctagcatgtcaatatttttaaaaactccaatttaatccgtcaaattgggttattttatcatctatggacaaattttttctgttcttttttctcatgtgggtacttttcatatcatgccccacaagtgaataagtggtattataatatttaagtacaagtccgatatgacttttttttttttaacttaatcgaaaaatattatgcctctttttta

SEQ ID NO: 22828 - DNA, 420 bp, Glycine max
  unsure at all n locations
tgaaggagtttattgcatcagggaattatttcactttaaaagtgggtcctaattggattcctaattttcaacttacctatttggatgtgacatcatggcagataggtcccaactttccatcgtggattcaatcacaaaacaaacttcaatatattggactgtctaacacggggattttagattctattcccacttggttctgggaaccacactctcaggttttgcatttaaacctctctcataatcatatccatggtgagcttgtgactacattacaaaatccaatatctatccaaactgttgatctaagcacaaatcacttatgtggtaaattaccctatctttcaaatgatgtgtatgagttagacctttcaaccaattcattctctgaatccatgcaagaattnttatgtaacaatc

SEQ ID NO: 22829 - DNA, 517 bp, Glycine max
  unsure at all n locations
ctctagggactccaaacctgcaaaacaaattagatctaacaaaacccacaacaaccttagcatcgttagttctggtgggtttggcttccacccattttgaagcataatcaacaacaaggagaatataaacaaaaccaaaagagacagggaaaggccccatataatctataccccagacatcaaacacctcacaaaatgacatgggttattganggcattgctgtctccatgaaagtgagccgcctgctctctgacaaggctcacaaatgctactgattctccatgcatacttgaagatggtgggccaataaaactgtagtcagcaccttgcgagctgtctctgatgccaaatgacacctgtgcgaagatgacagaatgctgaccgatcatctatggctgaatgcattctaatactgtactgacatttcacaaagggtatccaaatatgctactactctattatatcaacttaagcaggagaaacaaacccatattctttacaccagatgaagatcaa

SEQ ID NO: 22830 - DNA, 426 bp, Glycine max
taaagtatgcccgagtcattcatccctatgagatgttgttgaagtattggcgatcagaattgccattccttggattatagggttgaaccaagctcatgcttttacaaaaaggttcatcaagtcaagttgaaatatggaagtaaccgtcttgcaaaaatggggcaaaagatgaatcgagtcacatcactgcttcgtctactgccaaacatatttaggattgttgatgtccttgttacttccagtttcaccttgacaaagatgtcatggaccatgttgaaaatctaaattgattcaacctcatatcctgcgtaaaaattcgcaatacttcaactgtacttcattcgcatacatccatgcttttcattgtttgcattgctcattgcattctttccttgaaaaataagataaaataaaataaaatgaact

SEQ ID NO: 22831 - DNA, 422 bp, Glycine max
tatgcttttctttatattgtcacacagatttcatattcttaatggctgctgttttttcagacacttcctatttttcttgatggccttgttactgcatggggcgctatcctaatttctgtgacattaattcttttgtttggtgaggtgagaaagttctgtccttatatgattttaagtataatacattcatgtcacagattaagtgcttgtgttgtttgtttagaggttggaacctggaacaaaaatctggtggcacagcacccgttttgtttggttcacgttttttccatttgtgaaagacattttttgttaattagaatcaattccagttaaagtgggaaccagtagcttctcattcctctaatgttatgtctggcaataaaaaatgttcagatgctattatcgatcaatgtaatgaatat

SEQ ID NO: 22832 - DNA, 327 bp, Glycine max
tcatcctctactccaaaatgtattgaatgcaatcaacctggacatctgagggttgattgcccaattttcaagaatagaatagacaaatctgaaaggaaagcttttaatgaaaagaaagctaagaaagccctactctacatgggatgacaatattatggactcatctgaagattcagaaaacgaaggtgtaaccctactctgatggccagattttgaaagcatgaaaggtacatttttgatacaactatcatttattgagatttcagatgctttgtgattacatataatcagcaactgaaaatggttcatttctaaaaacttttattt

SEQ ID NO: 22833 - DNA, 416 bp, Glycine max
  unsure at all n locations
nttgtcactccacccatatttggccttcacattaatttaacttaacaccaccgacaacagcgtcaatgaattgttgcaccttggatacaaaggcttctttgaatcactttgtaatgtatcatacataggggcatgtgcttgatgaaaagactcttgtccaaggtcacgaatcatatcttccaagcgatcttccatttctacatcaaacggttcagattggggcccactttgcatgtttgtcatttcaccatgccatatccacgtcatataactcctcttaattccatcacacaacagatggtctcatatgtcgttgaatttttccgtctcccgttcaaaaaatttatgcacggacaaaaaaacttcccattttcattcggtcgacttttttctgaagcaaattgtaggaactgttc

SEQ ID NO: 22834 - DNA, 420 bp, Glycine max
tgtagtcaaattgaagaccctattttgcgtatcacttctccttttatgcttcttttgcacattgtttatccttcgcactcgttagaggtggcctagctgtcaacgccaaagcgagtttatgtagttgctatgtttttccttctcatttgtcaaacacaaaacttgtcactccctttatttctcctattgctacctccattgctttggctgccacccgtcaccacccactgtgacccacttctattgtttctggggcatctcatttgccgcgataaagtttgctttctatatgataaagatagatccttgaaaatgttcgcatggaacttatatatatgctaaacaatgtacattttcttttctatcccatcctatcattcatttctcttgaactaccatatgttcgtttttgttgagtgg

SEQ ID NO: 22835 - DNA, 343 bp, Glycine max
  unsure at all n locations
tgcatgtatgcttatgatttggatgtttaagtgcagcaatttaaacaggtgttatcgtgttcaatttttacttaaacgcttacggcaccccattaattgagaaagatggctccggattcagtgngcaaaattgacagtgtatgttcttaagaagtaaaaacacaacacaggagatntagatgcanatcattaatccaatatttattaatgttgcggtcattggttacaaaggattttatgactatgaaaatcccaatgagtccttggagaacaaacatgtattgagccttccagctgccccaggtacaatgcataatatcatttgacgatatcgaaattcaca

SEQ ID NO: 22836 - DNA, 438 bp, Glycine max
ttgagccaaaatcctaactcaccataaaccttgactcagggtgagaatgtttatccttaccctcggaagcaaaaaataagagaaggaaaatttccaatcaaagaaaaaaaaaagagaaggaaaatttccaatcaaagagaaagcgaaaaaaaaaaagagagaaggaaaatttccaatcaaaggaaaaaagagaggaaaggaaattcccaatcaaagagtgggagaaagcgaaaagaaaagaaagaaaattcccaaccaaagagtgggagaaagtaaaaggaaggaaagaaagctcctgatcaaggattgaaagaaatcacaagatatgtgcagaaaggtctttggaccggacaatatctgtacaatacagaattgtcaccaaatgaacaaaaaaaaaagggaaaggaaaccatgacctgaaagtggtcttcttccttt

SEQ ID NO: 22837 - DNA, 346 bp, Glycine max
tcgattacattgttcttgaatagttctccaatctttgggaagaacactttaatcaatcaaaatggtaataatcaattacttctttgaaataattgattacattgtatatttaattgattacaggcaggtattacgagctggtataagctagaataacattattagataatatgttctttacatcggttatttatgactttcaacatcgtgttttaaatcgatgttgaaagtaccgacgttgataggattattgttaacatcggtttcttaataactgatgttaacgaaaattaccacatcgatatataataaccgatgtgctatatgaatacaccaaaaatgttat

SEQ ID NO: 22838 - DNA, 414 bp, Glycine max
tggtaatcagagcacaagagcttcaagtatgtgcttcttaaacctccattaacttttttgctttaccttctcttccattgatgattcttcattgttatccatgtatctcctcacatgtcttgtgataaatgttgttaacatgattctttacagtttccaccgattaaacttgctatagaagctaaaattgattttctatggttcaaatttcttgttcttgttcttgaaccatgaattgcgttgagtttacgttcccttgagttttgtcttgtaattttttgtggctgaaaccaagaaccataaatacttacaaaaatattagagtacaagataacctcaaaaatctagagtgactggttcacctattgtagttttgtcatacaagtcatgtctagtcatgaaacttgtcacata

SEQ ID NO: 22839 - DNA, 332 bp, Glycine max
cctcataactttaacgaaatatcatcacttaattatatatgtctttcatttataaaattcaaaattaacatcttattttaaaaaaaaaaatttagtaccactagtactctaatcaaattgtgatgttctttgtctaatattcactttggtcttatataataaataaatatttcgaatgtataaatatataatctgaatcatataaataaatatttgaaacatcaaatacattgagaaaacggtgatttagaattataaaagattaaatgttgatttttttcttagacatttcatcatataaactctgagaactatcataaaatacctctaaa

SEQ ID NO: 22840 - DNA, 427 bp, Glycine max
  unsure at all n locations
tcaacattcttagtctntacctgcttaactaacactttactcttcacgcctttgttaatctagaattgtgaccttttgttagttctttcaccttttcattttaatagttaatatgctttattctgtttctcagatagatcaactagtcgccagatccaaagaaagtataagaagatcgttcataacaagccatatgtatatgtgttaaggttttctttccagttttgcagtctgtctttttctttctcaagcttgtgaatcaagtttgttctgtgcgactatgtactattgcttttatttatttatttattagtaatgataaggaacctaacatgcagattgaggtgatgcacattgcacaagatctcgtcgacataagacactaattcttttcctttatttatagaaaagtcgaattcgatgatct

SEQ ID NO: 22841 - DNA, 316 bp, Glycine max
ctcacaaatcactctacagtatataaacctatttgcacttaactacatatacttatggtccttctaacaggaatgcaagctctgttggatctcatttttgcagttgcggagtctgtctcacaagctgcaaaatatcttgtgtatttgatatagtgctataagtatgactttctgctctatgatgtaattgagcatgtgaaacctcattagttactttgattatgacattcaggacttacacatttttattcagagacatccttttgggtgagaaatatctttgcctgccatcacatgaatagttcgttttactgct

SEQ ID NO: 22842 - DNA, 415 bp, Glycine max
tgtacaagccagaatctgaaagcaatgggttgcattgctgatcattgagcactttctcagctgagatgttttggtgaacaagagcttgtttctttgctatgtatgcatgtaaatatgctatacctggttaagaaaacaaggtttcagtatgcacatgaagattggaaaccatgagaatatgaattcaaatgaatgcaaattgatcacagcaatgttgaaggaaatttaatctacaattaggcaagaggtttgtcattaagccagcaataaaaaaaagaaaccaagaatatgtttatctatagatagaaatagaataaaatataatgtgtgacaaaaataatataatatatatatactatgtaagtggtgttggatctcttgaagcaccatgataacagtgagataaagatgctct

SEQ ID NO: 22843 - DNA, 221 bp, Glycine max
cgtccgccggacgtttcaaccggggactacagggttttgtgcgcctcgaggagcgcaactcagcgcaactaaccgctgggccaggagcttgcccacgcgccgtcacgcaaccatttcgtgcgcgccatacgccggcgcgtgaccaccacgcgccggccttcccttgccggaaacgcgcgcgtttgctttcggccgtctcgtcgggctctgctgagtccata

SEQ ID NO: 22844 - DNA, 421 bp, Glycine max
  unsure at all n locations
aactcagcttgnatgaggaagtgtagagggtgaaacttcctgcttttattcgttgaccataaagtggcacctggagatatgtcgcgggggtcaagagaccttggggacgtcaagtggggtgctattgcccaaaaccaagcttgaccaattccaacccaacccgggcatattcagtcagtgagaacttgtgatgtacctaatcaggcgagctcctggcagtcaacagataaaaggaacaaagaccacaaagcaaggaggcttgtgtggtggctggccaggagtgaatattgtgtgacatatgggttatggcctctgtgaatcgattaccaacggtgggtaatcgattacaaggcttaaaaatgaacacatgagactaagatggtctctggtaatcgattaccaaggggtgtaaccgattacc

SEQ ID NO: 22845 - DNA, 360 bp, Glycine max
  unsure at all n locations
atagagagaagcttatatatatttttgtccatgtgaaccaagtgaattctaattttagttcctaaataattttttttcatctctctgatctttgaaatcactatttgtacaaatgaattttaattttaattcctataagaaaatttcctttgatctttatctgtcaaaaatttgaaatcactattatttgtccttaacatttantttagaataggaaaataacatttattttgtgatcttgaattatttctagagatgtacatgatgtcttatatatagacacctgggagtgcatatggatagctctgacattgataaacattgccgtaatgagtgctatgtatactaggacaaacaatg

SEQ ID NO: 22846 - DNA, 431 bp, Glycine max
gaatactccagctgacctaaggttgagatctcacttactaaggttaagatcctatatatcaaagatatggaagaaggagtctgcaccaacaaaccacttctgttcagagggataaagtatgattactggaatgagtgtatgatagcccacttagaattgattcatgtaaatctatgggacatggtggaaaacaaagattatattccacatgatgactagctgaatgagattcctagaggccagtggacgagcaacataagctcaaatttttgctaaactccaaagctcagaatatgatgtcgtgcattctttcaaaagaagaatacaccaaggtacccaatttcagaagtgccaaacagatgtggggcaatttggctgtaacatacgaaggcacatcataggtaaagaggaacaaactcaatctcctcact

SEQ ID NO: 22847 - DNA, 199 bp, Glycine max
ggttaagctcaacagctgggctgagcgcatatccatcgctaagcgcagttctagcgcgcttagtgcggaagattatttggcagagcattagcatcaaatccacacactaagtgcgagatcagtgcgctaagcgtagcaggtgccttcagccaggctaagctcgagactagcgctaagcccaatattacttactcgcgct

SEQ ID NO: 22848 - DNA, 414 bp, Glycine max
  unsure at all n locations
tgggaggatagatggngacccggtgttgagagaaactatgatatgggctacgtgagaggacgtgagctcacatggaggtgggcaacaagagatagtgaggttatgcgcgctttgcggatgtggaaaacttgtatggaccatcagaccgaccgccacctagtaccacatgtgatgggtaccccataatcctacaagctcgagatgaagaagtgtataacggtgaaacttcctgctgttattcattgaccacagagtggtacctggagatatgtcgcggaggtcaggagaccttgcggatgtcaagtggggtgctattgcccaaaaccaagcttgaccaatcccgacccaacccgggcatagacggacagtgagaacctgtgaatgacctaaacaggcgatctcctggcagtcaac

SEQ ID NO: 22849 - DNA, 328 bp, Glycine max
  unsure at all n locations
ggccaacaggtttagccttctcaatgtattctgaacaaaatttaatggcttcttctgcaacgtacctctcaacaatagatgcttctggacgatatagattctttttatacccttttaagatcttcatgtatcgctcaaccgggtacatccaccgtagataaacaggaccacaacatttgatttctctgacctgatgcacaatcaagtgaatcatgatgtcaatgaaagcaaggggaanatacatctccaactggcacagtataattggcagctcattntncaactcatcanacttcacaggatcaatgactgtgctacatatagcatg

SEQ ID NO: 22850 - DNA, 425 bp, Glycine max
  unsure at all n locations
tgaagaggatgctctaatggagganaataaagagagaaggggggagcacgaaattgaaggaataaaagaaggaaagaagtggaactttgaagtgtatctcataagactttcattcatcaaagttacaacaagtgttacacatgcttctatttatagactaggtagcttccttgagaagctttcttaagaaaacttccttgagaagctttcttaagaaaacttccttgagaagcttctttgagaaaacttccttgagaagctatagtttagctacacacacccatctaaaaactaagctcacctccttgagaagcttccttgagaagctagagcttagctacacacacccatctaaaaactaagctcacctccttgagaagcttccttgagaagctagagcttagctacacacccctataatagct

SEQ ID NO: 22851 - DNA, 323 bp, Glycine max
gctcttggagggaatggaagagggatatgctgcttctctttagattcacctgcatataaattgttaggtaacttactctttaaattgttgtcatcatctttctctggagtacagtgaggttgggcacgttcatttgcggatgacgaagatgctactggttgaggtccttgacactgctttcctgaccttaatgtaatggcactcacatttttgagattttggacagattgagaacgtaatctatcagaaatctgggactgttgctgatctaactgtgtagccaactatcccatctattagttaagctctaatggaggctttgg

SEQ ID NO: 22852 - DNA, 422 bp, Glycine max
ttgcgaaatgcttgtcgctggagttgtctcgatcaattgcccttattcttttagacgggtggttcctaagctcttgaccttgacttgatagaacctctttttaagcgaaggcgcttgactcgatcccatgtttactaaagtgaaacaaaacccagtgcgaatcaaaactccgacatctatcatgggtggaatggatgaatgcatggagaaatgtatatgacacagatgcaatttgtgaatacgggagcccgggaaattgtccccttcttagatacaacatttgggcagcatggcgcccgacatatgtatttaagaaggtgacacgaaccttccgtcggtttgacaaagtgaggggatcaagatggaatctatgcatgatgcatatgtgaaaggcacaacacggtgatgtacatagcacgaca

SEQ ID NO: 22853 - DNA, 333 bp, Glycine max
ctcaaagattcagcctccatagaagccccacaagcaagcttccatcatagtcccttattttttagctaatcaaacgcaccctaactctctatgtgaaacataataccgcaacccttgacatctagaactttgcaaacacgcacagtggcaagaggctgaagaagttgttgcagttgattttgatgtcgtccatgatgtagtggaggtcctccaacaagatgtcagtttcgagatatcgaagcatgttgtcaagcttgtcggcaaagatcttgtcattgtggttggtgttgaagaatatctctaactcatttatgacttcgaagtacgaaaagg

SEQ ID NO: 22854 - DNA, 418 bp, Glycine max
  unsure at all n locations
tcttgtatttaaggaaaagttaatatggtcatgtttggcagcttcttccactttcttccttcccacttcccttcacgtacttattctctttaatatgattatgaactcactttggtttggttgtgtttaatttagataaaagaattagagaaatagagtagaagaaaatataagagaaataatttttaaaaaataacagaataaaaaaattattatctattttaagagaaatggatgagatataataccgtgtcaaagaaaatcaatattttttctaaaatattgattttatttcctaaaaagttaattntttgacaaacaaaaaataatttttactgtttgtaaagaccaaatttacaaacctaactctcttctaaatcgtgctacataccaaccggccctcaattgcatctatagt

SEQ ID NO: 22855 - DNA, 317 bp, Glycine max
  unsure at all n locations
tgccattgaggcatttcaccgaacacgtggggggcgcgcattcatacatgaacaaaaggggaatgggggcaatgtgacatgccccatcattttagaacactccttaggcctaaggccatcccctacaactcccttattcaacaaaacaagcacaaattcaaggatgaattggatcttggattcaagcaaatacaatacaatntgcacaatgttggccaccccattatggtatcaagccatagccaagaagccagtgtcgaattgctnttttacttcctctttgatttttaggacatccctggcttcatccttcaatg

SEQ ID NO: 22856 - DNA, 419 bp, Glycine max
  unsure at all n locations
nttctttgtgggttgatggtgttttgtcacgtagaatggcgtgatcactggttgacattctcaattagcttagttgcttcttcttgggtctttagctttattttccctgctgcagaaacatctaacagttacttggtttgtggtctcagcccatctatgaacatattcaattggattggctctgaaatcccatgggtgggagttcttctcaataaacctctgaacctctcgaatgcttcactcagagattcatcacggaactgatgaaatgaagagattgcagctttccctttcgcagtcttggactctggaaagtatttctttagaaacttttcaacaacttcttcccaggttttcagactgttacccttaaacaagtgaagccacctcttggtctctcctaccaatgaaaatgagaa

SEQ ID NO: 22857 - DNA, 458 bp, Glycine max
  unsure at all n locations
tccagtttaacagttgatctagttttcaagtagtttaaattccagacccatttcataaaccagtttttaaattggatttaaaaccggttttccttttttttcttattttggtttcatatatttaaaattttaatacccatcccatccccgttgtgatttatcgagttcgataaattntaatttacttttatattttgacataattaagttctgcgatactctttntatagttntaatttaattntatattntgaaataagttatttattaagtttttaattataatataattcanacaatatataaaatgtaatgaataacagagaaaggaaagataaaaattaagaactcattatgnttttagtaatatattttcaaantataacatananctattatattattatatatatatatatantannaattatataatatatatatatatatatatttat

SEQ ID NO: 22858 - DNA, 445 bp, Glycine max
  unsure at all n locations
gaatactcacgcttctccttcttttccctataaataggggaaggagggtttaacaaaaatgttcaaccctcctggtatctgagaatcacttaaaattagtgagaaaaattgtttccgtgaagaaaatccaagccgaggcgcttccataacgcttctgagacgtttccgtgggtgatttcgcgaagattttccgtcgttcttcgtcgttcttcgttcgttcttcgatcttcaaccggtatgttcccgaaatcgaacatttcaattcattctatgtacccttagtggtccccacttgtttggcatgcttttattttcatttcatttactttctgtacccccttttgacctgctttagtcgtttatttaagtcattttctcgcctaatcaaaaaataaaataaatntccaccgatcttttgaattgtaacatattttaatttctggta

SEQ ID NO: 22859 - DNA, 290 bp, Glycine max
ctcagtagccattccccttaatcgatacaaaaaaaaaatatatatattaataacaaaactatcttatatagcttggttgtcatcaaagagaaattgtgtttttacagttaagaaatgttacttttatgtttttaatttttaagaaagttagtttttgacatgccttactatcaatactcatggctctcattttaacaaaataaaaatttgaattatgtaaaacaagataacaaagcctgtgactttccatgcttcaagttcataaaactcctgcatgaactaggaatgcg

SEQ ID NO: 22860 - DNA, 435 bp, Glycine max
  unsure at all n locations
taggtctatccactaggattgaaagatggatgtttcttgatttgtttgataaattaagtagtcaatcttatatatggtgtttgtaaagttggactcattaagaaaggttaatagaattatttgattacaaatagacaattatttataacttttaaagtaataataataggatttaattatcattttggtcttgaaatttgattgatttttaaaatttttaacataataaattgatactttagaataattnttattatgacaattttaaaatacaaattcaaacaattaaaaagtaaaaattaatttatttcaactaaaaatcataaaaaatgtcaatttattataccaaagataaaaaagtaatttataaaaaataagggcaaaaaaatatacaaaccccaaattcaaggacttatgtctaataataataaaaac

SEQ ID NO: 22861 - DNA, 432 bp, Glycine max
  unsure at all n locations
ntgaggaaattcaaacgacaataaatttttactcgtatgtctgattgagtttcgtaatatatcgagacgctcggaattgaatgttgaaggtctgagcaaattcaaacgacaataactttttactcggatgtctaatttagtcgtataatataacgagacgctcgaatttgaatgttgaagctctgagcaaattcaaacgacaataacattttactcggatgtctgattgagtcccgtaatatatcgagacactcgtaattgaatattgaagctctgagccaattcaaacgacaataactttttactcggatgtctgatatagtcccgtaatatatcgagacactcgtaattgaatattgaagctctgagccaattcaaacgacaataactttttactcggatgtctgatatagtcccgtaatatatcgagac

SEQ ID NO: 22862 - DNA, 436 bp, Glycine max
  unsure at all n locations
gaatttccatggataagaagcttgaagaggatgctttaatggaggaaaagaaagagagaaggggggagaacgaaattgaaggactaaaagagggagagaagtggaactttgaagtgtatctcataagactntcattcatcaaagttacaacaagtgttatacatgcttctatttatagactagatagcttccttgataagctntcatgagaaaacttccttgagaagcttctttgtgaaaacttccttgaaaagctagagtntagctaagcacacccatctaaaaactaagatcacctccttgagaggcttncttgagaagctcgagcttagcacacatccccctctataactatgctcacctctcaagagagaggtagagctatctcacaccctatatactaacgcaccccctacgatactgaaatacaaaaaag

SEQ ID NO: 22863 - DNA, 442 bp, Glycine max
  unsure at all n locations
aaactcagctngcttctacactatggtctggacatgattaatgtattatgtatattgttccctttctaatcaatgctaagtatttattctatgtacattcgaaggtggtgcatgatgtggctgtgcagcatctgcctgtaatagtaactcatcatttattaagatatgtatgccatggtgatcaacatttattaaagtgtcaagttttgataacagcattactttgtaaagtaaagaatgaggatatgagtgatgtcactgtgtaacgacccgcctcgtcgctacgatatcaccattctaaatcgggattatttcaaattttaaatgaaaactcagttaatttgcttataaaaaaaatgaaagtaatttttgtctcaacatacattcaccanacaacacacattacttaagtggatacatatatattagtatagtaactcag

SEQ ID NO: 22864 - DNA, 244 bp, Glycine max
ggtttacttggaccttgtttttgaaaaccataaatgaagctttggatgcttttcacaaacatgccaaggtgattcaaaatgaaaagggtctcaacattgtttcaattatgaagatgaatctcaaaataagtctttagaacacttttgtgaagaaaatggaattcaccaccattttcctgccccaagaacaccttaacataatggtgttgtggagaggaaaaatacatcccttgaagaatgtgca

SEQ ID NO: 22865 - DNA, 424 bp, Glycine max
  unsure at all n locations
actcaagcttagagaggaagcttcaatggtggaaaagaatgagattgagagcggtgggagcatgaaattgaatgagaaaaagagggagagaaggtgaactttgaagtgtgtctcacaagtttcacatttatcaaagttacaacaagtgttacacatgcttctatttatagcctaggtagcttccttaagaaacttccttgagaaacttccttgagaaacttccttgagaagcttctttgagacacacccctctaatagttaagctcacctctttgagaaaaaaagctagagcttaactacgcacacccctctaatagctaattagctcgcccccatgccanaatacatgaaaatacaaaaaggttcctgctacaaagactactcagaatgccctgaaatacaagggttaaaaccctgtactact

SEQ ID NO: 22866 - DNA, 287 bp, Glycine max
aaagtgccttggataagaagcttatagaggaagcttcaatggaagaaaagacagagagagagagagggaaagagagaggggggagcacgaaattgaaggaagacaaaagggagagaagttgaactctgaagtgtgtctcacaagactctcattcatcaaagctacaaatcgtgttacacatgctcttatctttagcctaagaagcttccttgagatacttctttgagaagcttccttaagaagcttccttgagaagctagatcttagctatacacatcccctaatac

SEQ ID NO: 22867 - DNA, 416 bp, Glycine max
taatggaccgattcaaggcatgatcctatatgtcatgtgccaattgacccgaccgggacatgtagatcccactatactgcgttattagtgttttgtatgttgaatccaataaatcaatccgatcatattctaattatattcttatcatatcttaataatatcttatttccgaaatcaatgaagaaatttttttattagatcttcccatgattaaagaattactgtataatctaccctcactataaaaaaagagagatctaacggcgattagttttggccttacccacaattttaacctccgttaaacacatttcctgcggttctcttgtcattagaaaagcttccatgacaaacgctctacactttactagcggcttttaccagtcctcgaaggcgcaaatattccctccattttt

SEQ ID NO: 22868 - DNA, 292 bp, Glycine max
tcccataaacactcatttgataaagtctagaaagagcgttgattggttcaggaagtgatttcagttctgcgaaagatgacacgaggaaattgtttatgtatggagagaccaatgatccgctatcgggaactgtctccagcttcaaacacgcgtgtatggataaactctcaagacgcatgagactctgccatgatgaacactgcatgacgctaatatgtttaagattcttgcaacccagaatgtataagcttttgtaaacagggaatggacacggagaagatgcatgagtaca

SEQ ID NO: 22869 - DNA, 424 bp, Glycine max
tagctaacattgaggtcctctcatcattatccaccttagagttgaatgctacacggacattgttggtcacacagacactctttcttaatagatcaaaagtatgtctagcctatctgcgttagggtctatcatcagataataaccaaattgtagcttcagaattcacctttctcaatccctcaattgctttgttaaaaagaattttgctgtaagccatgacacatttccaaaagtgagttgtcagcaatcaagatttgatccttttttgaaatgattaagcatatgattgacacaaaacctgccctcgaaaacagaaacgataaagtatataaacacattcaatttaattaagcagactggaatgaaaaataaaaatgtttgaacaataaagtctgaaattgctctcaattaaaatgaaatgata

SEQ ID NO: 22870 - DNA, 397 bp, Glycine max
  unsure at all n locations
tttaatctaacaattactattctaccagatttggtcaagtatatttcactcgtttgctcttagaaaatgtttgataaaaaagaagctgagttttctgagaattttgaattgaaaatagtttctcatgtttgatatttaataaaaaaaaataagattcctgataaataatgttcatcgggaatatnttttaacaatcttcccacaaaactttctaacagagaaggtgtcgtaaataattaagataactattataaatatcacgtaactcttccattctataaaattatctaaatatcttatgaccactaataaatctactattctagggattgatttcaccttctatgtccacaaaaaactattctccaccaactatgacactatccttctttcttgt

SEQ ID NO: 22871 - DNA, 433 bp, Glycine max
  unsure at all n locations
aactcaagcttaccaaggcacaactttaccactatgtttagctcattctcaatcatatagataaaggtgatnttatttgggaaaactcaagtcccgcataggctagagatagtgcaaagatagagtatataagtgagggacaacccttatcttatgagctagcttttggggttaagttagacccaaactcacattctaatagattataaaaaatttaaagcatatttcataattggccctttataatttaaagtgtgtcatgataaagacatgatataagttatttcggtattaaaagattctatacttctttctttctgatgctattattcttatgatcccctggacacccaaaaccaaaacttctagatccattactggtatctaccatatggattatatgatactttccaaaatgaacacattgtagata

SEQ ID NO: 22872 - DNA, 286 bp, Glycine max
cattttgaaacaatgggacatgccacattgtccccgttctcttgctattgttacctaaacgcgcgcccaccaagtgttctgtgaaatgcctcaatggcattagcgcgtgacttttgtaaggaaacaacccatggggcattttggtttgtacatattttctttttttttgggacatgtattcattcccgaaaaaggctatagtaattgccccacatatatcccaagcctatgaaccgaagttttatgctaaagaacacataggaggtgcatgttgggtaaagtatcc

SEQ ID NO: 22873 - DNA, 311 bp, Glycine max
actcagcttcatgccacacttggcataggcatgttattactatcttgttgcatggcaccggcgcggggcggtgtcgtggagtactcccccgctctctaaccccgaatcttaccctacttctcgcccccgctttttgtggtgggggtatcattttgacccatctccgtttcccggcttcgcgcggagacatgtgaaaacccgctgtatattagaaaaaggcaaagattatagaaaaaacctataattttttgttatctctattatacaacaataataaatttaatgtttaattgtaagtataaaacatgact

SEQ ID NO: 22874 - DNA, 301 bp, Glycine max
ctctgatggtagtcatctttacaactggagagaagatctttgtgaaatcaattccttgtttctgctgaaaccctttcaccacaagtctctccttgtatcttcttctaccgtcagattcttcctttagcctatagacccacctattctgaacgctttctttccttctggaaatttagttaaagaccacgttctattcttctgaagggatgtcatctcatctttcatcgctagctcccacttaatagtgtcattcccctgtgtaggctcactgaaacattctggctcaccagcatcagttaac

SEQ ID NO: 22875 - DNA, 415 bp, Glycine max
  unsure at all n locations
tgttaaagaacttaggaaaaatcaagtacaagcttgttcgcacatcgttcacgtgtatgatatccactcgacaaggtttgaagtagaggagaccttcaatcctataacgcaacgtggcggacaaaagtgggcagttaacttgaatgaccattattgtcaatgcggaaggaattttgcgcttcactatccatgttcacacattattgcagcttgtggttatgtgagcataaactactaccaatatattgttggatcgagtggcctcagaataattaaaaaggggggttgaattaattattcctaaacatttaccaattaaaaaattactctnttaaggcttttactaaatttttaagagaatgaggagtagaagagaatcttaacagaaagtaaaagcggaaattaaatgcacaac

SEQ ID NO: 22876 - DNA, 501 bp, Glycine max
tacagtctccgatactcacgaaaccctgaacttgcggcataacacagatgcggaccatggttaaatccttgctcctatcctttgtacttgcaaggacttacgatcaatacattccgtgaacaattttacatactaactattaaccaatacaccccggaacagttctacaatgtagagggactcctataaaaaatataggacactagggaggactgtcttttgatagagaaaaatccctaaggaaaagaaagttccttttcactttctgaccccaggggtaaaatagtaatccccccttctatcttttctacgagagacgacaggcacgaattgcaagttctattcatctctctgataagttactgaagtctatgtgccctcgacttgtgagatccaaaagctgaactcatgtgaacttccgatgcggtaggactgttactccgaagtaaaatacctttcacattataataacatacgctacgcgcctattaaatgtagccg

SEQ ID NO: 22877 - DNA, 325 bp, Glycine max
tgttgtctgccatattatactcaggatgtgttaattatgttatatgcctctgcaagcaatgcaactaattcaagacgacggccaatcaggtgaaaaaaggactacagaaggccgacgttgtaatcactgagattctgatccctgagaaggtatgttaagaaagaagatataactgtagatcatgtaatgttggttcacactttcactgacccttggaagactgtttatgtcagtgatctattgttgaaattgctagggattgcgtacttagcaccgctttgtttactactcccttctatccacacgggaaatcgaatgtaacctt

SEQ ID NO: 22878 - DNA, 385 bp, Glycine max
tgaagccccttacagacccttctgcttctgccctagcctcttcccacatgcccatgtggtcgcttcttctccaacaaccttcatttccagcgacccggaaactcaagtgaccagcccactccggcaatcccacctgagattaggttttcttttctttttcagtttttgagcttatacatacatatatatatatatattgaaagagttacactctaaccacatgaaccaaattgacaaaaaaaatgtctctttggtcctgagacctatggcacacccaatggccaatacccatcaaaaacgccaataaatgattgttcatggagaaacacaatagaacagtgtcaaaagatgtggagccaattctgagccacacatgacatgcata

SEQ ID NO: 22879 - DNA, 416 bp, Glycine max
  unsure at all n locations
ntataagcgcggctctgggagacgaaggtcaagtggtcgcgatatacgaggatgatgttccgagtacattggatttggtacgaccatgccctcctgatttccagctgggaaattggcgagtggaggaacgccccaacatttacgcagcgagcataatgtaaacctttacggttttaaaagctctatagttgggcctaggctttagagtttttcttttggttaaggctttgtgtattttgttttttttttaaatttataatacaaggatctttcttcatctgttcctacgtctctacccattctcatccatttgcatgtttacttcttttctgaaacggcagatccgatgacgagtcccccgaaggtactaatacctgngacccgcctatcaacttcgagcaagaaatgaatcaaac

SEQ ID NO: 22880 - DNA, 427 bp, Glycine max
  unsure at all n locations
ccaatttcataagctattgatcgagcccactgcaaaatatcatctcaggtagcaaacacctacaatgcaagccacataattttagtcttcaaagggacattcattttattaatttaataacaataaatcacattattacctaagaaatattgaacgtataagaataatcaacatgttcttcttcattcacaccaactntgttttcattntcatcattcatatcaacttcttcagacattatactttcaaacaaccattgatctttgtccatcttaacaacacattcaanatttcaacatcacagacaaacaacacctaaccgcaccatanatatatgatcacacaaagccctacgtaatttttactgcataccatttataaacatttaaatgatacnctattattaaaaccatacatcacttttatc

SEQ ID NO: 22881 - DNA, 425 bp, Glycine max
  unsure at all n locations
gaggctttgcatatataacttatacacactcattaatatgaccagattaattacaaagtgtttaactatcttagctgagaatgaagggggtatcttattgaccaaaaataacgtaatgcttatcttcctagctaggccctaagtccaaattctaagatggtatcaaagttatcctagatccattgctgggccatctacattgccatgctctaagccgatgccttgggcatgatgagagagttctaaacccaccttaattgcggtcactcgttacctactctagctgtggcctttttggggtctaccttaattgtagcctcaagggtggcgtttactcccacattgattacagatattccttanataaaataagcgttacaagtgcgtgaaaccctcactcttgagctaactattgtggtcgagtc

SEQ ID NO: 22882 - DNA, 306 bp, Glycine max
  unsure at all n locations
gggatcgactccaaaattttactggaagtctatagtgcataagcctacattgtgaccgttgggatcgactagcaaacatccagaactcattctgtactactctttccacagccaaccacacacaagcattttctgcaccaagctaaaattctgctgcacttattttgacagcaaaattctgcataagtgcagatttcgaatatcacacttcctctcatccaatcttgttcaaatcgaatcctacaagtcccaaatcatgtatcanacatgtctaaaccaaagccaaacttcanaccacagtaacac

SEQ ID NO: 22883 - DNA, 425 bp, Glycine max
gcttcctccagaagcttcctcgtggcttgtttgagaagctttctcaagaggcttctttgagaagctagatccttatctatccacacccctctattaactaaatgaaattccttaaaaataattacggatgaaaataacacaacaaataatcaaacatcaaacataattactaataatatatatatatatatatatatcagggtgttacagacagccatattctacttgccatatacaaacaaaacacatattagatcatatcaaaactcaagtcacactaacaacataaccaatacaaacaaaaattcaattgttagttaattctagtggcacataaagaccataataaaatatataattaataggatagaagctccactcaaaacctttttcaatcttcaacatcttgagacacaacttcattt

SEQ ID NO: 22884 - DNA, 283 bp, Glycine max
caataaggcttgcaaggtgcatggcattgggactgtcagactgagaatgtttgacaacagggaaatgctgctgcaagatgtgaggtatgttccagaactcaagataaaccttatctctataagcatgtttgaccttataggatacactacaaaggttgaggatgggatgatgaaggtgtccactggagcctcaatcattgctaagggaagccgaagcaatgggttgtacatcttggaaagatccacagttattggacaagcattctgttgcaagtcaaacaat

SEQ ID NO: 22885 - DNA, 417 bp, Glycine max
  unsure at all n locations
tgactatatatattctcttatatcaagtgaaagttgtcatgctgatttcaatacataatgggacaattagtagtcatttagtgtacactgtatagcatctttaagattttccacagcttatgttataaaggaatctttcttcggacagaatttgtgattaatagtttgatactattactcatctactttagttttctttatattttaaaaattaaaataaataatttaccatctttcttgattttgtctgattgtatcttcttgctttccaccgttacttttcaagaagcatagtgtcatgaaaattgtatgaaggcagccatttgcgattgatagtttgatactattgctcatcttctactttagatttctttatatgntaaaaattaaaataaataatctatcatctttcttgat

SEQ ID NO: 22886 - DNA, 370 bp, Glycine max
atgttttagacctagtaattgtcttagaatgggagctattctaagatgatttcgttgtcatagtcatcttatgtaacacccttattttttgtaaaataaattaaaacagattttatttaaaaataaatagggtttacgaaaataatgaggtttctgaattaaataaaaaggaggaataatttattaataaaaatggtttaagggaataataaattatttctagaaataaaactgttattattattaataaagtaataagtctttttaaatataataagaaatgagtatttcgtgaagttctcactataaaagaccttgcatttactacatcgccttctttttcttaatcttttctttcttcaaccttttc

SEQ ID NO: 22887 - DNA, 429 bp, Glycine max
  unsure at all n locations
tgacacattctggcattgtgcaccaggtgattcaaattcatgaattcaattattgcaactcagaacaatgcaacagcaaaaaggtttcccactgaggaaactgttgttgatggggaagacataattagcaagttgcatgaaagcattcttggtcacattctgtctttccttccaacaatggaatcagtccacactagtgtgttatcaaaaaggtgggttgatgcttggaaatccataactggcctacaatttaatgatactttgctttgttttgggaaaaagatgcaaaaagaacagtttgtgtgttttgtgaacatggtgtttcttcaccttgccaattcaagtatccacaatttctctctttgtttaacacgttatcagtatgattcaaccttgataagtgcatggatctcctttatctntaaaagg

SEQ ID NO: 22888 - DNA, 248 bp, Glycine max
ataaattattaccatgcatcaatatcctcaatacttctatgcactagacagaattcatctcctcattagttactactcctcacaacatcacccccatgcaatgcaagtcctcatatattgagtgattccttttgctaatgttgcttattgtctataacccacaaatataaaaattctatattgaacataagcacataatatataattggtatgtgagacgaagatggtaacattgtacatgcatacat

SEQ ID NO: 22889 - DNA, 339 bp, Glycine max
taataaagaggacaattatataagagacctcctcttttacaatattctcactttcatcaatagccctccttgtcctgtcttgcatcttcaactgttccttttatttcacttgtctgcttcgctttcaatacagacatcgatgcgcactcagaaattgttgaacattgttgtagatggaaactcacccttgagtcctattgtcccaaaattgctttagataatttcgaaaagactgtcacgtttgataattcttgctgcacatatattaataataccatgatctgctctatatcatatgcagtattaaccatcatatgcatgaccttaactatatatatc

SEQ ID NO: 22890 - DNA, 329 bp, Glycine max
  unsure at all n locations
tggttgtcgccttgaacttttccttgaccactcatgttctttcaagctccgctttcaaggcttgcacttcctcactctcctcaggggtttcagcctcttcctcacttgaaatctttagttgcgggagccaagttttccattgcgtccaagccttcaaccattgatgatatccaccaataacatcgttgctgctctttctaagctccttatcctttctttgcacggaattccatgcctttcggactctctgaagcactattgcattgnggtcactganacctcgtgcgatgaaaggcgtaatactctctaccgacggcactcctcttatg

SEQ ID NO: 22891 - DNA, 444 bp, Glycine max
acactccccaatactcaagcttcttagctagaaacttgtactgtgcctatagtgcatcttgtgaggaaagctctaataggcttctctttgtaggaatatgagtccgatcacgtaaaatagcatgatcactaacaaccatattctcaataagctccatagcttctttaggggtcttcaatttaatcttccctccagtagaagcatctaataactgcttggactgtggtctcaaaccatctataaaaatatttagctgaattggctcacagaatccatgagttggtgttttcctcagtaagctatggaatctctcaagtgctttactcaaagattcatctggaaattgatggaattacgagatagctgccttgccttcagctgtcttaaactcaagaaaatatttcttcaaaaatttctctacaacctcctcctaaggcttcaagc

SEQ ID NO: 22892 - DNA, 226 bp, Glycine max
ggagaaatgcctaaagggctgggatccttttcttcttcatatttctcccctatctatagcacaatacgggagatgcttgccgcccagctcgcccaggcgagctcagctcgcccaagcgagcagggttgcttcctccagaagcaaccgtcttctggaggaaccatttggagggcccagatgggcctgggtgctatttgcacccccatttctactaagttcaccccct

SEQ ID NO: 22893 - DNA, 427 bp, Glycine max
  unsure at all n locations
ntgctgatttagttttcacttacgaaaggatcgaaatgggtctgaaaagaagaaaatttaatcatcttgcttggacgaatgagaaaactggggcgaatgaaaaggatgagagtgaaggagaaacccatgctgtgactgtcattcctatacggccaagtttcccaccaacccaacaatgtcattactcagccaataacaaaccctctctttacccaccacccagttatccacgaaggccatccctaaatcaaccacaaagcctgtctaccgcacttccaatgacgaacaccacctttagcacaaaccaaaacaccaaccaagaaatgaattttgcagcgaanaagcttgtaggattcaccccanattccggtgtcatatgctaacttgctcccatatctactcgacaattcaatggttgccataaccc

SEQ ID NO: 22894 - DNA, 351 bp, Glycine max
  unsure at all n locations
ggagatggctaggtgtttgcttcatgaaaaagaattgccaaagagattttgggcggaagccgcaaatattgcagttttcatgcttaacagactgccaacaaaagctttgcaaaagaagacaccatttgaagcatggtatggctataaacctgagttgctcaatctgaagatatttgagtgcttgtgctttttcttacattcctcggggtaagaaggacaaactagacatgagagcagaacctggaacctttgaggctatagcttaatttcacaggcctacatgatctanttgccacatcatgacaagtattgtagcagaatatgagattctggactggatantggaactgg

SEQ ID NO: 22895 - DNA, 417 bp, Glycine max
tgctgaacaaactttgagattcttatgatcctatattatagaggatgctcatatactttggagagcaaaagggagttgtgtttttcgtttttatctttttcaagtgcaaggttaatcaggttccagagaagaaaaaaaggaaagagtcttaaagttgaacatgaacaaagctgttagtgtttatggccttttgggactttttgcaggtgttattttcagctcatgcatttgtgggactcccaggaattttaatgtggagaatgattccggtctaatggtcaaaattggtgagttcatttcagccttgtacaatctggtcataataattataccagcattatttcatctcacattacattcatcatatacaagcatgctaatatctttctatctgactgcagaaacatcactcaacaa

SEQ ID NO: 22896 - DNA, 161 bp, Glycine max
ttggtcagatgagaattgataatgactcacgctggaggaaccagatgaatatagaaaggcaatatgatgtttagaaggatcaccagcatggtggaacaatgctcatgatccttaatgcttcttttacctaaagctctcaaattctatgacaaaaactatat

SEQ ID NO: 22897 - DNA, 423 bp, Glycine max
  unsure at all n locations
taaagttgaaaaataatataaaagtcctaatacaggttcagcatgattccactcactagtacaaaactcacctactaaaatgtgtgctaaccagtgtatcatacagtggcctccattcaatagttagtgaaatctttttactatatttgttgagtagtctaactaataaatttccccatctaacctaataaacaaaaaatggcacaatcatttaagagcaagcagagacatatagagaacaagaaaactcagcatctcatctaagacaaaatgcagcagcacctaagcataatgcttattacgggacacatgaaatatctcaaggcccttctgaataaggttgtgaacatcctccaaagctacatcacttttttcctttatgaaattgcacaacacacatatnaagttagatttcaacccaac

SEQ ID NO: 22898 - DNA, 299 bp, Glycine max
  unsure at all n locations
atagacacagtgggatcaattaatgaagatgctgcactagatccagagaaaatgacgctggaggaagcagctacaaaggcacaagctgctttcaggggttatttggtatacaactctgttttattgaatactctactgattaaaaacacttcactgatgaaattgtatgtgtcctttagttctaaaacaaaattgaactgtaaatatgaaaaatatgttttaatctgtactgcanaagaatagtanatgagtggaattgattctctgctatgattcgcaattatgttaacatctgactt

SEQ ID NO: 22899 - DNA, 424 bp, Glycine max
taccgagaagaagaaccatcaacagcactgacccattcatcatgtaaagaagggtcttcctcctttcgtggggccacagcccttgtgtactcaacttccaatatcctttcctgtaattgatcattgaagacagttagctatgatttcctatgacatcataccaaaaggtaacaatggtttcacactatcaccataacaagcaaagcatttatttgtttgattgagatacacacgctcacgctatgaaagagtgcccttaatataaaaagaaattaaaaactaaaatgaatcattggaatccaatggacaaatcaaacactcctagactcctggttctactacttatccaagcacctatccagttcccaagttaaatttccattccatgaaacttcattcagaataactccagtccccattttct

SEQ ID NO: 22900 - DNA, 196 bp, Glycine max
gtgcccaatacctcgtaagatgtttaataccacacccaaaaggggtacacatgaaaacctagtaggatttaacaaataaaacggcaactaaagttcattaagtgaaataaacaagcgaaatcccaggaaactgaaacatatctaatctcccccataagccggattttagtcttgtacataaaaatgcccaagagat

SEQ ID NO: 22901 - DNA, 420 bp, Glycine max
  unsure at all n locations
ntcttttgtaatagccccaacaataagatttggatgttgatactctaccctgtgtacaccacacgtactgatactaagcaataatattttgttgaaataggtagctcaaaatttaatagctaattagtggattcatttaaaaatagtgtcagaaagattaaggatattccaaaaatattgtccaggaagaacaacttctgatatctataagtattaagtagttccaaaacacaaatggcaggaaaaaaatgaggaaagactagaggctttctttgacaaaagttgcaaagtatttggtggcataccttgagaatagccgcaatatctcacaatgtaatttagaagttgagtaagcataaactctaaaatttgtttccacaaccacaaatccctgaaaatattaaatagagtgacactttt

SEQ ID NO: 22902 - DNA, 357 bp, Glycine max
  unsure at all n locations
ggcaatctctgaaaaatgagttataataattatcaggtttgcgcttaaagtagacgttaagtgaggaaaggtatagatattattcaaagccgctgcatggatatacaattatacataatgctgatctaattaagacataaattaaaaaacatttatacctaaaaaagtcaggcactgaatgtcttactccaaaagaggggaagcactgcggctagctgacaaagccaatgcaccaagtccaaactcacatcgcaaacattttatgtgtgagtaaatcaattttctaatacttattattccacanacaataaattcacatttacttaataaataattctacaaatcacgtgtttaaaa

SEQ ID NO: 22903 - DNA, 412 bp, Glycine max
  unsure at all n locations
tgtgcaccaatgcactctccatgagaccattcgtgtaaaaagtggagcctgggatgacaatggtgttttcatctacacgacattaaatcacatcaaatactgccttcccaatggagatagtgggataataaagacattggatgtccccatttacatcactaaggtttctggaaacaccatcttctgcttggatcgggatgggaagaaaagagccatagctattgattcgactgaatatatttttaaactctccttgttgaagaaaaaatatgaccatgtcatgaacatgataaagaattcgcagctttgtgggcaggctgtgattgcttatctccagcaaaaaggctttcctgaggttgccctccattntgtgaatgatgagagaatacggttcaatttggcgttggagagt

SEQ ID NO: 22904 - DNA, 360 bp, Glycine max
gcatgtctaacacagggattattgattctattcctacacagatgtgggaagcacaatctcaggttttgtatttaaaccactctcataatcatatccatggtgagcttgtgactacattaaaaaatccaatatctatcccaactgttgatctaagcacaaatcacttatgtggtaaattaccctatctttcaaatgatgtgtatgggttagacctttcaaccaattcattctctgaatccatgcaagattttttatgtaacaatcatgacaagccaatgcaattagacattctcatcttgcatcaaataatctgtcaggagaaatacctgattgttgaataattgaccattttagtggaag

SEQ ID NO: 22905 - DNA, 287 bp, Glycine max
aaaagtttcttgaggaggaaaaagttctctatgttaatcgattacatcctgtatcgtaatcgattacacaagttgtcttaagtttgcaaaggtatgtctcgtatcgatctaattgattacaaccttattgtgattcgattacacacgtgtcttgagacaatgactaatttattcagagtctttgtttaatcgattacccagtgatatattcaatacctttcttttataagagttcagaaggaacaggattactttatcgatacattgagtattaattgatacattgt

SEQ ID NO: 22906 - DNA, 212 bp, Glycine max
gaccacacagcggcaccagcagatatgcctcaaggggtccaggacaccttacggacctcaagtggggagctataatccaaaaccaaacttgaccaatcccgacccaatccgggcatagtcagtcagtgagaacctgtgacgcacctaaacagacgagctcctgccaggcaaccgatcaaagaacacagaccacacagcccggaagctagtgt

SEQ ID NO: 22907 - DNA, 184 bp, Glycine max
catgcatgtgctcgatctatttaattcctgcgcttccaatttacactataactgagaacactactatctggtataaaattgtttaattcccctgcgggttttaacttgtttacataatggccttttaatgtctattttatagcaaaattctttccttttccacaggagttgtccttttgagtta

SEQ ID NO: 22908 - DNA, 432 bp, Glycine max
tctttccgagttaatcacgtctctcaccttagaattttaaaaaccattgtatatattgtttatattctaattaaaactagacttttctgtcattaaaaaaatcgtgtaataaatagctgatattaatgtttgatgtttgttattgaaattgtcgaaaaaattccaagctctacatcaactagaaataatgagtatatacggactccagtttagaagaaatatgaatattctgtattacaaaagatattctccatttagtaaatcttcattttattaaaagatactactattttaatatatcgaactacaaaatatgaaagaatacgcgatcaaagccacttattataaaatagtactactacttccaagttccaagtattcttcaacttttgccattagtaatatgtattatccgaatcttgactaagagta

SEQ ID NO: 22909 - DNA, 62 bp, Glycine max
gctggtgaaaacactaatgccaagctgatataaatgtgaatgaagattgtaacgggcgagtg

SEQ ID NO: 22910 - DNA, 493 bp, Glycine max
atagaacgtcatgcctctatcaatagatacgaacatccatgattctattgtctatcgacatgttacaaaaccgaaattgaagatgcactgggactatgagagatcgtcataaacaaactccacaaccgattcatccattatctcaccacgctgcaaatccattatacatacagccccactacggccgaaagagatgattgcctatggctcgagcaatacgaattcaatttatgtatgttagtcggggacaatgcgaacaacaaccactcaatcaatcatctttaagaacgtttgaaataacgttatcattcaacgcaaaaaaattgcctgactcttggacagatttcaaacggaccctttacagatgtctgatatacaagaatcgagatttccatgtatcatcccgcaacttgtattatggttcacaggaggaagtaggaaacaataattcggaacctcgctattctcataatagacagtagaaattccgtgg

SEQ ID NO: 22911 - DNA, 382 bp, Glycine max
cagcctgaacaagtatatatcttcgcttcctgccattcttccattctcctgcagagaatgggattcttaaagtcttaacatgccgtgattgcaagcataatgatgtcaccttttatcggctttcttgctgacagtattgacttgtaagactatcctgctcctagtggaagtgactgatgctcatcttcttgccctaattgaaacttactgccgagaatcagaggtcaggacccttcacaagcacatagagaaaatttaccgaaaggtctgtgataagtttcagtcactaacacagtgaaaatgctatatggtgtatatggtctgaacagagaacccgtcatgactagccgcttcaatagtttatgctgcattagtgcattac

SEQ ID NO: 22912 - DNA, 338 bp, Glycine max
tcagcccatctatgaacgtattcaattggattggctctgaaaacccatgggtgggagttcttctcaataaacctctgaacctctccaatgcttcactcagagattcatcagggaactggtgaaatgaagagattgctgctttcccttccgtagtcttggactctgggaagtatttctttagaaacttttcaacaacttcttcccatgtttttagactgttacccttaaatgagtgaagccacctcttggcctctcatgccaatgagaatgagaataggctgagtcttatagcttcatctggcacaccaacaatcttaacagtgtagcatatttcaatg

SEQ ID NO: 22913 - DNA, 321 bp, Glycine max
  unsure at all n locations
tacaaaacaagaaatgaattgaaagtctcggattttaaaacttacccgttgaagaacgaagaacggatgaagaacgatgaagaacggacgaaaaccttcacgaatttgcttacggaaacatctcggaagcgttacggaagcacctcggcttggattttcttcacggaaacaatttttttcacccaaaacagctgaaatacatagccagggggctgagggatccttcgaacagcccccttcagcctttttataggaaaaagggggaggaggttgccgcccagctcgcccagncnaccttatctcgcccaggcgagctgggcg

SEQ ID NO: 22914 - DNA, 334 bp, Glycine max
aatggggtgtccacttaagaagccacaaaggaggttctcactgaagaaaacttggagccagactaagaggtggaggaaagagaggtattggcatctccctaggttaacattcctttccctcaaaggctaaaaatgaacatcatgatacgcaatttaacatttcattgaaataatgaagagattgacatcgacattcctttcattgaggtatttcacaaatgcaaaatatgctcagtagtaaatatatattccctataacgaaaagtggtagattttgattggtgacttaatgaaaatggatgctatatctgagaaatacccaaagttaaaacct

SEQ ID NO: 22915 - DNA, 410 bp, Glycine max
gtaggatacaccttcaccaaagcccatatcaatatgaaggttctaggaaattttttaaaggtgtgggaactaataataatagtcatccaagaagctagaaacatgaaaactctatcttacgataagttgatgagagtgctatgtgtccgtgagattcacctccaaaacagagaccatctgccacaaaaattttactgccctcaagtctggagagacaaacttgagaagagaagaaaataagaacttatccaaagctcttatagtttagatgactaagtctgaagcttcaaacaatagctctagagggtccacagatgatgaatcggctctaatgttcaaaaagttcaagtagatgttgaaaaagataggaagaatttagcactcctctagaaagaaggacaacacattca

SEQ ID NO: 22916 - DNA, 164 bp, Glycine max
aaaatttaagtggccctacccttaactattcaacttatgataaggagttgttgccttatacgtgctttaaaacttggaacactacctttatcccaaggaatttgtcattcatagcgaccatgattccctcaatatattaacgggcaacgcacgcttatacaaaa

SEQ ID NO: 22917 - DNA, 264 bp, Glycine max
tatggatggaatacttacttgttggtgatgaacatttgctcataacggaatcaaaacatgcgaaaaaggatgaccctatggctgccaattcgtcaattccgtgggtatggcttttgaaaggggggaaaagaattttttgaatgaaaaaacgccccccctttcgtcatttttataatttggtgcaggggtggctcgcccaggcgagctaacctgcacctttaatttattttcttctttatcttttagagcttgaggggaacatta

SEQ ID NO: 22918 - DNA, 422 bp, Glycine max
  unsure at all n locations
tgtgcgaatcaaatcactcctgcattttatctctattatgcattctttctttctttacccactcctcacgtttggttttttagggaaaaaacaccataactaaacgcgccacaaggcatccctatcgcaccagatccaaatctagaacgatgggtgatcaagaggagacacaggaacagatgaaagccgacatgtcggctctgaaagaacagatggcttccatgatggaggccatgttaggaatgaggcagctcatggagaaaaacgtggccaccgctaccgctgtcagttcggctgccgaagcagacccaactctcttggcaactacgcaccatcctccctcaaacatagtaggacggggaagggacacactgngacacgatggcaaccctcatctgggatacaacccgagcggcttaccc

SEQ ID NO: 22919 - DNA, 140 bp, Glycine max
tatgaacttcagctgccaagattgtctcgattcttgcactaatacgcgtattccaaatcatgtctgccgcgactgtgatcatgatcagcagctctccaaaattcaagcccagatcatagaaatggaccgaaagctacttg

SEQ ID NO: 22920 - DNA, 392 bp, Glycine max
tgctgctagacgctttcagaatcccaagatatgtttataacttgatgggtctgatgataatggtgatgtgccttccatggatatgcgttcatagtaaaaataagtttcctttctctttttttttcatctgcggatgttgtctttgagtttctgacaatttctctgctatggcagtaccgagtcccctttattatggattacagcagatcctgatatggagtaccttgctgaggttcattttaaccaaccagttcagatgtgggtaaggataaaattgtggtagactggtacgggggcagtcaattgattctgtggagttgctattgtgacatagtactttgccaccctatgagaggcactgcatatgttcaattatttaagtccttctttct

SEQ ID NO: 22921 - DNA, 150 bp, Glycine max
taatgaatgagcgtgcataaaaaaatgagtaattcttcggaaagaattacgtgcagtaattttgtgaagcagaggtgaaagatttagctgcgcttacgacacgggctcttatggcgaaagaaattttactggtctgaattgtggaaaaga

SEQ ID NO: 22922 - DNA, 416 bp, Glycine max
tgtatggctgtgcgagatctgtcatcgtattccattttgccttagccagaatctgaaatctggacgaattcccttcccacctgcatatatggcatatacagcatcgccgatcataggatcttttcttgattcctttatgcttgccctctgatacgattcaactccaatcacaacctaaaccacaagtcggattgctctgtactaaaaatcataactgctacttgtaataagaactggtccataatatgcataaattccatagacatatgtgcgtcatctacaccggccattaagacactcatacatcccactggtctaacatggaccactttaatctttatcctgttcttttcctttctctgtacacacagaccactttttatctgttttttactaaaaaacccatgctaaacgct

SEQ ID NO: 22923 - DNA, 322 bp, Glycine max
  unsure at all n locations
tctcaattagcaaactaaacagcttttcaacagaagacaagtgcctcgaggattataataatgagtaatcctttgtattctaattctaatttcagaattacataagcatcanaattttgaggcataaaaattcagattatagaacanaaacgataaatctttatgtcgcacaattataagaataaatataaagaattcaatctagtctcaatatatattcataaatttcacaactaattgggtttatcatttagttcttaacctctctcaaattggtctaagacctggaagatgaagaaatagttgattgatgaatgagagt

SEQ ID NO: 22924 - DNA, 390 bp, Glycine max
gctatcacgagcgacatccacgatatgtgcttaatttcttcttgtgggaaacgtcagccttgccggtggcaagatagacattgaccacaggtctttctgccccaagtggtctagtggccaatgatcgtagccgtgtcaccttgcgtgtctacttcaacggacatggagacgctgatgcctctgcatgaggacgaggaagaggaggaggatgcgatgcacgtggagtatccatggtcctttaaagagaaaaagttgagttagggaatattatcagaagacattgtatgagttatgtaaatgaatggaccgaaatgaaatactatattagaaaattacgctagacgatgtctaataattctccttcatcatgatcattacgattagcatgaa

SEQ ID NO: 22925 - DNA, 186 bp, Glycine max
gacgagtatactgattttcaggaggaagtagggcgccggcggtgggcaccactggttactcctatggccaagttcgatccagatatagtccttgaattttatgccaatgcttggccaacagaggagggcgtgcgtgacatgatgtcctgcgataggggtcagtggatcccgttcgatgccgacgct

SEQ ID NO: 22926 - DNA, 407 bp, Glycine max
  unsure at all n locations
tgagaactgtaactaagcttaatatcattgaaatttctattaagaacaaaaataattatcctagtttaaatgagccattgactaccatggatcaccagtaatggacctgatttccctttgtagtgtcaaaaccatcaaatcctgagatgaagtgaagtaacagtgacgaagtgaaaatgtctacaatcaatggaattatatttctcaataattcttaatctactatgtaccaagactatgaaataaattataaagaaagaaatctatgacagaggagcttaaatttgaccgaaagaatcacattgtttcaaaagaacaccttctgacaaacaaggcttatctaattatcagaactntctactatctctctcccactgangtcaaaataccagtgcacatgtttaagt

SEQ ID NO: 22927 - DNA, 338 bp, Glycine max
aggtgatgacattggaatatgtgaatgtccattaatctgatgcatgactaacgagaaccacccttacaactacgtagactcataaccggagataggtttgaggtcaagatctaatctagagaattagttggtagatgtgcacaccaagcttgaacattcattccggaccctttatgtgagcatcaatattatggatcggctcctagcagttaggacaggtgcaaggttgggaatgttattggttggcatcagagtcatgctgagggcatgcaaaattgaagagatctgatcccttctgatcccttgaggtaataaagatatatatacgcgtcgatgtt

SEQ ID NO: 22928 - DNA, 365 bp, Glycine max
  unsure at all n locations
aacctgttccattttactgatcgttgatagacatatattataacaaataggcgacatataaataaatgaattaaatatgtttgttttaataaatgatcgaattgtattctggatctctaataaaagaatctattattttgagtcattaatatattaaaaatcttgttttgaatctctcttatcagntatgtgatgatgtgatatcatcacaacccattaataaaatttgaaaaattaatttgtaaggtgatacgtcatctgctcactaatgataaagattaaaaataatacttatattatcaaggacttcaaacaccatactaaatcattacacatgtgtaataaaataatcatttattattgac

SEQ ID NO: 22929 - DNA, 429 bp, Glycine max
  unsure at all n locations
tgaaatgcanaaagactcnttaaaagttcaatcatgtgtctctgattggaaaaggtaaaaaaggatcatttaacataatgtaaaaacaaacaaaccaaataaaataaaaggactaacctcaatttacaaccggtaaatcaacagtagaatcatgaaaaagagaattgaatcaatttttattttttttttaacagcaaataattgaatcaattgatactgttgggaaaattattctcaaaccaaccaagaaagaaagatggatttttattattatattattatcatatactacaaggtaagaatgaaaaattagcatacaataaaagagaatctagcctataataattggaatctgccacatcccaaataagaaaaaccactcatagtctcatacagtgcaaacaccagcatactggctaaccagcaaaa

SEQ ID NO: 22930 - DNA, 249 bp, Glycine max
tttttgctttagcaattctaatgtgtaggactccatgagctgtttataacacaacttaaaatttaactctgttgtggcatacaaatgaatcaattgatcatcttggtattggaactctttgcttaatatataatggtaaaatagtttgaatgacaagaacataatgaattggcttataccaattttcagtatgatcattccttatatagaatttgaacgctggagtgatgttatctgagtgatttttgt

SEQ ID NO: 22931 - DNA, 396 bp, Glycine max
atgcattttatctgatgaatagtaacaaaggcatttgggagatttataggtaaaacacgcttgtcatcgcgagacatctggggcaacgtaatctaatatatgagggtaggataaatctacctgattaataaagaaaaacctaataatcatacatcttaagcaaacaaggcatgctacgtcctaacattctcatcccattgaatcctctattgattattctgcttcatattatgagctttgtctacaactatctgctattaattcctagaccctttatttatcctgtatctctctttatttcttttcttataaattgaacatcatacaatacatgtaccatactgagtccctggggaattcgacactctgacttctgagttttatactacttggaca

SEQ ID NO: 22932 - DNA, 430 bp, Glycine max
  unsure at all n locations
aaatgtgcataaagaacaataaagatgtcatagatacagaattatctttttacaaggaactttattttgtcttttctagagatttggtgcaaaaacaatattgaaggggaagaccaatcatatttggacagcagataataaattataaatgaaaaatagaaataagatatgcacacttacccactgtctctgatgcctttaaaccaatttcgaatatctgattcattgggttcagcgtatccttctttattcatgtcaatcttagatccatctgtgacaccctttatagcaataacaagataaggttacttacanatatcaacagagtattaaacaaanattaacagaattatctcttttgtttgatccttacccagcagaagaaagacataacaagaaatgcgttcgcctaaagtatatgctctccctg

SEQ ID NO: 22933 - DNA, 423 bp, Glycine max
tctaatttctatttccaaaacaaaatctaattattataatctcgaccattaatgagttgaccattatttgaccaaagaattttctctgaattattcttattctttctaggctttaggttaaaaacttcaaagtttaaccatgcttaggtatcctatgggtaacatctcattttctaccactccaatagtctaaaaacactactcaatcacacaaaaaagcaataacactatctaccacacacatggaaaattgggatgttacactcaacatctaattatctaggactaccttgagatcaaagtaccgctccactcttttgacctatctgaaagaatctttcccaccgaacaatggtatcttgagctttctctgatgattttctcttgagtttgaaacttaaggtgttcttcctcttcagtcct

SEQ ID NO: 22934 - DNA, 421 bp, Glycine max
tgcttgtggggcttctatggaggctgtatctttgatcttcaatggggtcctttaatggtgattatccaccatggagatgcagcggaagacaaatgaaaggaggtgggaggaggcgccatccattaaggaataagccatggaagaaggagcttcaccaccaagatgagccttggataagaagcttggagaggatgcttcaatggaggacaagaaagagggagagaaagagggaggggggagcacgaaattgaaagaataaaaagggagagaagttgaactctgagttgtgtctcacaagactctcattcatcaaagttacaacaagtgttacacatgcttctatgtatagactaggtagcttccttgagaagctttcttgagaaaacttccttgagaagctcttttgagacaacttccttga

SEQ ID NO: 22935 - DNA, 189 bp, Glycine max
tttaatgaaatataacacgtaacctaacttgtaactttgcatttgtaggttacgctattttacagtgcatttagctgcctgcatttttctattttcttgctttagatcgcgacccaagtcaacatggcttagcctggttctgatgacgctcaaagcagtgtttggaagcgctatgtaacatcaatgact

SEQ ID NO: 22936 - DNA, 423 bp, Glycine max
  unsure at all n locations
ntgtgtacactgagagcagataagcatgttagagattagaggctacatccttatctcactctctgcagactacagcatgccacaattntgaagggtatatgttatgaatatgatgccacatttaagaggacagaatataaatccaccaagagaagtaacattaattaaaataacaataaaataaaaaagattactcactgtgagaggccaccctttcaaagtcaaattattgctacctggatttgatcctgtcacaagaaaatctcttgtttactccatttatgcgcaaaaatagtaattaaacatcataacgaaattaacactaaatcccaaaatatcctcaaccaaccatgaataaattgcaaaggaaaaaaaaattccatcaacttgcagcaaaacagtttcaaaataataaaaatcagt

SEQ ID NO: 22937 - DNA, 337 bp, Glycine max
tcatactcaccaataacataatgctcaggatgctcaaaaggtacacaatgttcagggtaatcaagatgcacaatatgcctaactaatctatgaaatgtcctatctattttaggatgaaagggttgtaagtcacctgcattgcctctagtcatgcactatatgcagcagttcatgcgtttctcacacagggcataagaggtgggttaaaactacagctctactaagaaaatattcaagtgtgctataattttgtgagcaacaccctagaatcataaaacgatagcacacatatgtttataaaaatattcaaagtctaatcatggaaactacctaagga

SEQ ID NO: 22938 - DNA, 420 bp, Glycine max
tctttgagaaaacttccttgagaagcttgagcttatctacacacacccatctaaaaactaagctcacctccttgagaagcttccttgagaagctagagcttagctacacacacccctctaataactaagctcacctccttaagaagagaagctagagcttagctacacacccctataatagctaagctcacccccatgacaaggctaaaaaatcctacatttctagggtacccgacctacattatggagccctaaatacaaggctaaaaaataatgaaatcctagtctaatatgtacaaagataagtggacccaaccttggcccatgtgctcagaaatctaccctgacgttcatgagaaccctagggccttcttcagtagctctagcccaatcctcttggagccttttgctcatggctct

SEQ ID NO: 22939 - DNA, 302 bp, Glycine max
  unsure at all n locations
taaaaagagagagagcaaaagcatccgttgctatcaagtcacttcgacaaaagatggaagacaaactgaagacagaactagaacaaaaggtgcacaattagtttttttgttggttttacacgtactattttcccactttctcaacatgtatgctgttagtgttatcagttactatatagtatttgttaaataaaatgtatttttggtaattgcatgaaattgaaactaatttgaagttgaaacaaactcangaattagcagaggtagacttaaatgcagccataacaaatgagaacacaact

SEQ ID NO: 22940 - DNA, 420 bp, Glycine max
  unsure at all n locations
tgatcctcatcatcaatagcaacatctatattttctatatcaagaatcagtttattaaacaaatccaattgttctactactgatctatcttcaatcattttaaacgaatacaaagactgctttaggtaaagacgattaactaaagatttggtcatgtacaaaccttcaagctttaaccaaatcccagcagcagttgtttccttagagacttgcctcagcaccttgtctccgagactgaggataattgcattgtgtgccttctgcagtagtgctttcttatccccatcagccatcatcttttcaagtttggcttctccatcaagtgcttccaccaggccctgctaaacaagaatagctctcatcttcaatcgccatagcccagaatcattttgccctgtgaatnnntcaacctcatacttg

SEQ ID NO: 22941 - DNA, 289 bp, Glycine max
ggaggaaaaatcaagttgaagactctagaggaagcaatggagctcattgagaatatggtagctagtgatcacgctgttttgcatgataggacacacatccctaccaaaagaagtctgttagagctttcttcacaagatgcattgttggcccagaacaagttgttggctaagcagcttgagacactcatagagacacttagcaaattgccaagactgctgcaagtagctcaaccatctcactcagcagttatgcaggttgggggctgaagtatttgtggaggggctcatg

SEQ ID NO: 22942 - DNA, 416 bp, Glycine max
tcttatccaagacactttcttggtggtgaagcttcttcttccatggcttattctctagtggatggtgcctcctctcacctcttctcttttatctttcgctataactccatggctgaaaatcaccattgaaggaccttattgaagcttaaagatccaacctctatgatgcaatcctaccccgcaagggcattgggtagaagactcaaagtagattgggctagagatccaagggaaggccctagggttctcatgagccttaaggtagatttcgagcccatgggctaagtatgagcctgcttatctttgtaaatattagaataggttttcccttcgtctgggccttgtactttggccattctaatactatagggttttagccttgtatttcgaggcattttgagtagtttttgtagtaa

SEQ ID NO: 22943 - DNA, 354 bp, Glycine max
  unsure at all n locations
tcttctgattgagcaacctcaataccaagaaaatacttcagatatcccaaatctttggtctggaagtgactaaacaagtgttctttaagttgggcaatcttagtagtatcatttcctgttatcactatatcatcaacatatacaattagataaacatacttctcaggagatgtatgacaataaaaaacagaatgatcagcttcacttcatttcaacccannaagttgaacggtatgactaaatttaccaaaccacgctcgagggattgcttcaacccatagagagatcgatgtagcttacatacgagaatactcccnctgagcaacaaacccaggaggttggctcatataaatc

SEQ ID NO: 22944 - DNA, 418 bp, Glycine max
tctacttatgtggcagggcgggcttccttcactttcctgtctccaacgcgagctctgaccactgtccttccttcccgcggtgcttcttttcatgtccgcctgagtgggcttatagcctaaaccatacttcccacgatttccttgggtttttatcaggctagttatgccgccattgtctttgcctaaacccatcccgggttcataaccgttccccaacataactcgggccatcattaccgccgcatcggacagacaaggttgcccaaagagggagtccacggaggaaatgctgaccacctcaaaagactggaaagcggtttctaacgattcttctgcggcttccacataaggcatggaggatgggcagcttaccaagatatcttcctcgcctgatacgatgaccaagtgcccctccact

SEQ ID NO: 22945 - DNA, 356 bp, Glycine max
  unsure at all n locations
aataaaacacaatatccataggtggatctcctattaagtataggtaataatctccttataccctctattctcaaactctaatccatccttttactagtgatcctctaagaaatattagaattctgttgttagatctatcaaagagtaatactagctaccgtgattagtcacaacacgaccaaaaaaaaaacattactactaacatgggattatacttaaatgactagtaaacaatggcattcanagatcagcagagccagtcaatttggtgaggccaaatgttatggccatagccatccaaccttcaaccagaaccctaagacaagacctcgtcactggagtttttccaagaacta

SEQ ID NO: 22946 - DNA, 404 bp, Glycine max
  unsure at all n locations
ntcaacaagttccttcacaaataatcatcacacagcttaaaactaacaaaaccacccatcatatctcccaaaaccccatacccacgaaattcaaaggagaaagaagtccagccaaacctgaattttcgaagtcccactcgtagccacgcacttcacgactccgaaaatgctctcctttcacgatttggggcagaaacgggcactaaaggttgaagctttgtatggagctttaatggagaatgagggaggaagaaaggcaacgtgagggagagagaaagctgtctaaaaaaagaagtgagggctgagtgaagagagagaaaagctttntggttttaaataaaaagggttttccctttttccattattttattcaagctctgccacatgtccctatttgattggag

SEQ ID NO: 22947 - DNA, 282 bp, Glycine max
  unsure at all n locations
cgacgagtatactgatttccaggaggaaatagggcgccggcggtgggcaccactggttactcccatggccaagtttgatccagaaatagtccttgagttttacgccaatgcttggccaacagaggagggcgtgcgtgacatgagatcctgngttaggggtcagtggatcccgttcgatgccgatgctatcagccagctcctgtgatatccgatggtattggaagagggccaggaatgcgagtatggccagaggaggaaccggtctgatgggttcgatgagga

SEQ ID NO: 22948 - DNA, 434 bp, Glycine max
  unsure at all n locations
tgatcaaaacaattatctaatcattccaatccacttttatcatacaattgctcattcaaatcattctcaaacactcatttcatgcaaaacaatccactacatatcattttcaatcaattcattgttcaaacacgcttttggtacaaacaaacaactcaaagtgctgaaatttatataattgaaatttaaaaaaattgaaatataaaatctgaaattaaaatgactgaacataaatcataaaataattgaaaataaactaaaatgttcgagatgcacaaatttaaatgtcctgctcctgtggttgctcctatgcatgctcattaaagtccaacacctgagcagctggtgcagatggtgtggcataatcaagtatgggtgctanggatggctttgggatctggtttgtagaagcatcctcctcttgagccctgttg

SEQ ID NO: 22949 - DNA, 186 bp, Glycine max
  unsure at all n locations
atttcaagtttcaagttttcaagaatcaagaatcaagaatcaagaataatcaagaacaagattcgagactcaagattcaagaatcaagaaaagactcaatcaagataagtactaaattttttttcataacattgagtagcacatgaatttttcacaaaaccttttaccaaagagtntgtactctct

SEQ ID NO: 22950 - DNA, 387 bp, Glycine max
tggtgcctttgtcgggcaaattcttgccggtaacgttgagggttctcttcttgctctgaatcgactccctgagcttgtgatcgggaatagcggagaggtcgtcctgatcggcggaggaggaggccggcaggatgtcgtactcgcgcggaggcgagtcactttggaactgccggctccagtcaatggggagaggactctttggtttttgttgttgccgctgttgttcctccatcgtgcattcgacaggagagtgagttgaaagtgttgggtttttacgttacttgtgaaattggtgagagcagaaatcgaacatagaaaatgggggcagcgagtggcgcgccaccaccacacaccacacttgtgtgtggttggctgctcgtctactct

SEQ ID NO: 22951 - DNA, 379 bp, Glycine max
  unsure at all n locations
tcagacaatccaaataattaagagacattatttttctgtcatgagcatctttaatgttaaacattagtatatcttcgctattaaacatcattagaccaatagagttgcctaactttatttttatgagctctattatataacatctttaataaatntaacaacttttttcactttttaataatgtaactcttcatatctaacttaaaatagatctaataaattattgtagatgtttatatttttttaataaggaattattttaatattaaaaacaggttcttgcaaaagaagaatatgtgtagtctcttgtcatctanataactctaatagtanaagtggtataaaattaattgttaagttaataaagtcttaattaaga

SEQ ID NO: 22952 - DNA, 427 bp, Glycine max
  unsure at all n locations
ntatagtttcaaatcataagataacatagtaagactatataagcattatttacacacacaaaaaagtgtccccgacccccacaacaacgttgtttcacccatgcttcttcatcttttgtttctgcctccatttttttgaagctttttcttgaaaaccaaagaaacaaattgaaatattcccttcaaatcatggccataactcttgttcgcttgcgaacccaaatccatggtgtccttcattgcctctggtgtctcctttgcctccacctctaattcctcctctatgatttcatttcctttgatttctcttgttcctctatcttcttcaacttcttgaacgatagaagaagatgaagcgagattaagcatttcaacttctggttcctctctgggaatcttgtattcatcatcttggctgaagagagac

SEQ ID NO: 22953 - DNA, 259 bp, Glycine max
gtcctgtggtgcagaaggggaaaaatccatggttgtgacatcatcctcatcctcagagagctccagcacaggcgtgcctactggtgatgcctgtggggaagtcaactccagcacaggtgtggtcactggtgatggttgtggagtcgagtcaggagtagcctccacaacgtcctcctgagtagctgggtcagtctctatgatctctggctctggaatctctaagtcagcctctggatcaacatctgtatcagcttactga

SEQ ID NO: 22954 - DNA, 426 bp, Glycine max
  unsure at all n locations
gacactcagagtactcaagcttgttagtttgtcatccctttcattagttntttttttatacctaaaattgatttccagtgcctgttaatttatgcaggatttaccaagtagcaaatgtgaaatctgaatggaactgtatcaaaaccttccctgatttatctggaacaggttttatacctttttcccattgttcattattccttgagggtttgatgatttcatgtttgttcagttactaatacacaactcgaactttttcttctcagggaagaacacgtgtgtaaaatttggtccagattctaaatacatagctgtgggatcaatggaccgaaatcttcggatattcggcttgcccggtgaagatgctcctactgagtcataaaatgcctcagttgtacaagccanagtcttgctctggagtaaaca

SEQ ID NO: 22955 - DNA, 252 bp, Glycine max
ctgctggttataccggtcttttacaagagagatccttcttatgtcagacaccataaaggtatctatggagaagcaatgactaaacatcacgacaggttcatagacaagatggagaagctgcaggaatggaggatggctttgaaacacgtagctgacttgtctggctctcatttcacagatgggtatacaatcatactaatatatattactttatggcttttattggattacgacttacttgtctattgattt

SEQ ID NO: 22956 - DNA, 377 bp, Glycine max
ctaagcttcagatttataatagattcttaaaattattatctattaaactatgacaaacagtgaactggtgggacctttcagaccttctactatggactttattaattggggcgcataatacatgcatacagatattatacacttacaaaatatatcagagatgaacaaacaatttaacatttttctttagagctagcaagtgctgggtctcttgctaacagtttcaaaagcttaccttttcttccactttcttgaataatgtggatatagtagcctgaacaagtgaaccacgattactggacttaacttcagtagatgcactcgctgaagcagattgagacacttccttacattttgatcgagaagcaaactcatta

SEQ ID NO: 22957 - DNA, 455 bp, Glycine max
gagaccactgatgataatcaccacacgataatgcattgctgtgattgacactattattctttccttaggaatactacaaagcttactttgtcgtggcagaatacgcctgtgcatagatagcaccggcgagcgtccttgctcatagatgccttgtgtgagagtgaattattatcactaggccgaatcctacagacttgtgttttgccataaaatgaagacagaaacatgccgacagcatattgtacgcttgactgatgaggagtgcactcccagatctcaactggatatttgcaaataaggaggatagaacaatgaacaaatgtacaaaattgctaattagtatcttcttaaatgaccccatgataaacatctgggatcgattgagccaacaacgtacaaagggtatacgcatcctgatttggtgccctgcctctgctaaatccagatggatccct

SEQ ID NO: 22958 - DNA, 287 bp, Glycine max
catacgaggtacttacgcgttaatgccattcaaatcatgctatttcattgacagacatgaccagagaagatccctcaatagaagtttctttgatacacgacaggatgaacaatgaatatgcctacgaggtgttgtacgagacagcttactttgggaaacaaaaagccatcgcaatacaatatggagattgagaacacgtatatgcgaaactatcttcgaatctaacacacctgctaaagcagttctcctgcatcatatcttcgaatactacatgaccgatctattat

SEQ ID NO: 22959 - DNA, 271 bp, Glycine max
atttgataaatatccccaatattttgtgtttgtgtgaatataattttgtttgaattttgggtaggatttcaattttgacaacctttggtactaggatcaatcagatagagtatatctgttacaaccttttttttttaaaacaaaataaaactccctaaatttgatcctccaatgtgcacactcttatcacattacattagtgcctcataaaaatatggttaccaaattagtccctcgaagatactattcttaccactttagttctcttaag

SEQ ID NO: 22960 - DNA, 424 bp, Glycine max
tgtattgctcgccctcaacacccaacacacaccaaatataaagaagaaaaaaaatctacattgctctaaaataaaagcataagttcattccccgccaaagacagcactgattctttacaaaatattacatctgtatttctttcttctagataacgcgagagcataaaactagaactacgtttaaactatatatatatatatatatatataagaacctagaaaatcttgaattaaaagccaaagaattcacacgacaaagattatacaaaaattgatgaaagcagaggaacaaaattgaaggccacagcaagcatttatagacacaaatgattgctcacgcaaaagaggtgtataaatctccactagactgaaaaatatctgctccttttcctcaagctgagtggtggaatatgttagcaatcaa

SEQ ID NO: 22961 - DNA, 251 bp, Glycine max
atatcgagacgctcgaaattgaatgttgaagctcttagcaaattcaaacaacaataaccttttactcggatgactgattgagtcccggaatatattgagacgctcgatcatgaatgttgaagctctgagcaaattcaaacgacaataactttttactcggatgtctgattgagtccgatatatatcgatacgctcgaaattgaatgttgaacctgtgagcaaattcaaacgacaataacttatttctcgga

SEQ ID NO: 22962 - DNA, 418 bp, Glycine max
  unsure at all n locations
tcaacatcagaccacttccagggtgctggaactacttcacatggacttgatggggcctatgcaagttgaaagccttggaggaaagaggtatgcctatgttgttgtggatgatttctccagatttacctgggtcaactttatcagagagaaatcagacacctttgaagtattcaaagagttgagtctaagacttcaaagagaaaaagactgtgtcatcaagagaattaggagtgaccatggcagagagtttgaaaacagcaagtttactgaattctgcacatctgaaggcatcactcatgagttctctgcagccatcacaccacaacaaaatggcatagttgaaaggaaaaacaggactntgcaagaagctgctaaggtcatgcttcatgccaaagaacttctctataatctctgggct

SEQ ID NO: 22963 - DNA, 330 bp, Glycine max
ccgccaagaggacaaaggataaacagcctatgaactatttctgctgttaatgaaggcatttcatttatgcattaataacatcatagttagctcgaaggcatttcataaacttggaaagccatcttagctcactgaaaccactgcaataaattcttaaacaggcaagcattgaaagcgatgactacagtatgatattaaatgcacctgaacaaagatgggatgataaataggaggattcttcccatcaataaggaaaaactaaacgctgcataactcttctcttaatacctacatgaaaacaaagtagtgcaaaaacattctgcttttctt

SEQ ID NO: 22964 - DNA, 359 bp, Glycine max
tgtaacgatgtctagctttctttacgttgtttattatgacaccagatctagttcggtcatcacgttgcctaattctctttacattgcaaatttcactgcttgcacaattaggactatttcttgagtggcttgtcaagttgacctcttattatattgtgtcccacacgccaatcactctcgtatctacgtatgatggtgagcatgatgtatgctgtgggagattccctaacaccttctataaaaaaaagacctagcttataacatatattgctgcacctaatgaaattatgctgcttacttgcactgactagagactcctctccattgcttattctattattcttatgcccaactcaact

SEQ ID NO: 22965 - DNA, 425 bp, Glycine max
ggacctaagaatactcagcttagacaaatggatgatgtgagaaatttctgttatgttaatgaagagtttcaggttatttatatttacctcgctatctaatttggagtctgattcttcctcttttgggtcttcatcgaatgatgtgtcattcaatacttcctatgtgttcatcaatactttcttgtcccttggtttggagtaccttttcttgtgaactgatatatcaagatctggacattctgacttgaagtatcatagattcttttactcatagcatatgatgaagcttgtatccttgtcttttctttctttttatgaggcctctaggatccattccagtttgatccactccctttcttccataagatccttatcatccttgagatgaaggctaactgatcatcttcatcagagctttcatcatt

SEQ ID NO: 22966 - DNA, 306 bp, Glycine max
gaatttatgccatcccatgtagccatcattaccttcttctttggacctcttcttttgaattctttctttaggaaagaaaactaagacttgatatagcgagacttgttgtattcaaagcatttgacttgcccagaggtttctccttgttggaagtctcttttgaagtagttccttcttgctccttttctccttttgagcaattttgaaccctttcagtcgtaaaggccaattcttctttatcttcttcttcttcttcttcttcagagagctcggcatcactatactcaacatcaaaattggatacta

SEQ ID NO: 22967 - DNA, 415 bp, Glycine max
  unsure at all n locations
ntattcataattgtcgtccactctacaattaagtatctatttttgaaaaaaatagtatccagcatctaacatgctgctaatagaacaaacattgaaaactaaaggatcatccactacacttttatcacacatccaaaaggactcttaaacacttgcataaatttttctctcttttataagtgtagttcaataatgagtggatttaaactaatgtttgaatctagcatgattaagacagatttagaaaagacttattctagatcaatccactattagaatggtgaagagcttgacttatttaaaaagattcgcaccttcatctgctaatgcgctataaagactaacaacaatcaaatattgaatgacaacaatcaagtgaaaagagatcaagtcgagaatgcaaaagataatcaaa

SEQ ID NO: 22968 - DNA, 303 bp, Glycine max
  unsure at all n locations
gacgctcgaaattgaatgttgaacttctgagcaatttcaaacgacaataacttttttctcggatgtctgattgagactcgtaatatatcgagacgctcgaagttgaatgttgatgctctgagccaattcaaaccacaataactttttgctcggatgtctgattgagtcccgtgatataacgcgacgctcaaaattgaatgttcaagctctgagttaattcaaacgacaataactntttactcggatgtctgatagagtcctgtcatatatcgagacgctcggaattgaatggtgaagctctga

SEQ ID NO: 22969 - DNA, 421 bp, Glycine max
  unsure at all n locations
tcaacattcaattntgagcgtctcgtaattntactgtactcaatcagacatccgagtaaaaatttattgtcgtttggattggctcagagattcaacattcaatttcgagcgtctcgatatattacgggcctcaatcagacatccgagtaaaaagttattgtcgtttgaattggctcagagcttcaacattcaatttcgagcgtctcgatatatgaccggactcaatcagacatccgagtaaaaagttattgtcgtttgaattggctcagagcttcaacattcaattttgagcgtctcgatatattacgggactcaatcagacatccgagtaaaaagttattgtcgtttgaattggctcagagattcaacattcaatttcgagcgtctcgatatattacgggactcantcagacatccgagt

SEQ ID NO: 22970 - DNA, 371 bp, Glycine max
  unsure at all n locations
agtgttttgagaagcttagtatctatacaaaaatttataaaaagctttacacgaaagaatatgttcgcgtagatgattcatgtcttatttctattccatatatatagttttcattttcatgtatctattgtctcacaatggttaaactcatcactgtgctcttcatctaaagtcttgagcccattggagcatttacgtcctttctttaagcaaagtccatgttgataggctagtgtgtcttgtactttagtaggaaagtcacttctttcttcatagtaagtcagcaacaacagaatgcacacctantgatanggatcaacttcttctagactatggacttcatgtattcttcataggactttgacaaatcc

SEQ ID NO: 22971 - DNA, 414 bp, Glycine max
  unsure at all n locations
tcttagtttcagatgatgcagttgagtttgtagctactctcatgcactcctctaatgactatagcatcatttatggcgctaaactgctgggagttggaagccatcttcacaattaaatttctggcttcagcaggagtcatgtctccaagggctccaccactggcagcatctatcatacttctctccatattactgagtccttcataaaaatattggagaagcaactgctctgaaatctgatggtgagggcaactggcacatagttntttaaatctctcccagtattcatacaggctctctccactgagttgtctaatacctgagatatccttcctgatggttgtggtcctggaagcagggacatttttttctaagaatactctcttcaagtcatcccaactcgtgatggacctt

SEQ ID NO: 22972 - DNA, 330 bp, Glycine max
  unsure at all n locations
aaccaaagtttattgagaagctgtcattgtttgtacattaaccactgtacttttaaccattgctttaaacacaaattctgcccatctggcatgaggcatgctggatgatatccaatatattactcttgttttgtttttttgtctgtgtgtgcgcgcgcactttcaatgtttattttattgtttgattntaaagcatcattcatgtggaacggtggaacccttatgaggaggcanagcatgaatttgcggcgagggacaaaaagcatgagatacggttagaagtgagaaagtgaccgctgaaatnttttgtggcataataatttaaacatc

SEQ ID NO: 22973 - DNA, 433 bp, Glycine max
tgtttcaagttttttttacaaattatttgcggttttctattaaaatatataataaataaaaataattttattacattttaaattgattttttaatataaaatttgacataaatgaacaaaagtaacgaatattcataactaaatgatttttttattatttttgaatgaatctttattaagaactaaaggcatttgggaaaaaacaaatataggcaaagtcggctaataaggcattcgaaataaaagctggaaccacataaaaatatgaagataaacttgcattatcagacctgccttagctaaagcatcaataacttgatttgcctcacgccacgtaggacaccaaacagtctgacccttctgctggtggacattatgttgcatcttaaagtgaagtttaatttactgttactagaaaaataataaatatata

SEQ ID NO: 22974 - DNA, 296 bp, Glycine max
  unsure at all n locations
ggatggggacaatgtggcatgccccattgtttcagaatacagcataggcctaaggtcttctcattcaaatccttaactctaagaaaacaagcataaaaacaaaccaaaactgccccacaaatacaagcatattcccacaatttggagcaccaaaagatgaagaaaatataccaatgggaagctgaaaacatcaaggattgaatacttacttgttggagtgaactaaagcgtgaaaagggaagcanaaactcaacaatggaagcttgggggctgctattctcttagttcccgtgagc

SEQ ID NO: 22975 - DNA, 429 bp, Glycine max
  unsure at all n locations
ntggtacctgagcatgacggtggtggaggcgtgagaaagaggaattaagagaaaggaggaaagaggaaaagaagaagaaaaaagacaagcggagagttgccgcagctgggaatcgcctccagtggtgactaatggcgacgaaggaagggtggtgactgctgaagggatttggtgatgatggtctagcataagattgtgcatcctagattgatctaagggttgaaacttatggtgcataatacaccacttaaaatggtggtccatggccttcaatttaatgtgtgaatcccattaattcactccaactaaaaaaaaaggagaacacatggtgcttccctcaacaaaacattggttgaacatatctatgcaaaaaatggtgtctaagagaatagataggtagatctcagcaaaaaccagcatttgaaagaa

SEQ ID NO: 22976 - DNA, 360 bp, Glycine max
  unsure at all n locations
ctgtcatcatgccgagactcaggaaggccaataggtttagccttctcaatgtattctgaacaaaattcaatggcttcttctgcaatgtacctctcaacaatagatgttgctggatgatatagattctttgtatacccttttaagatcttcatgtatcgctcaaccgggtatatcctccatagataagcaggaccataacatttgatttctctgaccagatgcacaatcaagtgaatcatgatgtcaaagaaagcaaggggaaaatacatctccaactggcacagtataattgcggcctcattntccagctcatcaaacttgacaggatcaatgactntgctacatatagcatggaagaaa

SEQ ID NO: 22977 - DNA, 430 bp, Glycine max
acactatcgactactgctgcttgactatgcgagtcgcagttatccttaatttcactttaggaatctagacaattcaattacacacatgacatatcctatagcagaaacgtccgattgaaatttcactgtattatactataaggtatatatttgattattatataatcatttacctctttttttgattaccaacgcgaatgcggcacgaccgatcgggcataattcatttcaaccatcattaacggatgatacaattcaaacgatcggtggaaatccactttatttttacattactcgacaaatgacttaactaattggcttacgcacgtcatatgggggtctttctagtaattgacagcgagaataaaaatccttgattccacatgtcgaccaccacaggttcttacattgtattaaacagcttgacttg

SEQ ID NO: 22978 - DNA, 254 bp, Glycine max
tgctccacctcaaagatccgtccccgcatgaactaccccaactgaacatagtccgtcataccctagccttacccacacccgtaaaagaatatgttccctttgcggaagataatggaaagattgacgcgcttgaacagaggttgacagcagtcgagggccttggctattacccattctcggatttagcacatttatgtctcgtgcccaacatcgtcttccctcccaggttcatagtaccggactttgataagtac

SEQ ID NO: 22979 - DNA, 419 bp, Glycine max
tggagaggatgctccacggaggagtttaagaggtttacgacgagagaggggggagcacgagattgaatgaagaaaaacggagagaagccgaactttgtgctgtgtctcacaagactctcattcatcaaaggtacaagtgttacacatgcttctatttatagactacgtatcttccttgagaagctttcttgacaaaactttattgagaagcttctttgagaaaacttctttgagaagctagagcttagctacacacacccctctaataactaagctcacctccttgagaagctttcttgagaagattcctaaagaagctagagcttaagtacacacaccccctataatagctaagctcactctcatgccaaaattcatgaaaatataagaaagaagcttctattacaagactactctaa

SEQ ID NO: 22980 - DNA, 387 bp, Glycine max
  unsure at all n locations
acaacaatgatccgatacttgtccatgttactgtttatcatcatttttcgtcattttataatatttatgatatcacccacaactagatctcatgagccttaccatattctaggtggtgtgtatatctcaaatcgaanagtttatcgattctttttgtgttgagttggtattgtaccaaaaactatattatcgggtgttgttctatcaagatagcatctagtgctagtgttggtttaagaaatttatgtgagaaacttgtagaggctatacgaatacctatatctttaattaatcactgaaaaaatctcactactctatcgagaaaactagnataaatggaatataatacaaggggttgaatatgtgtaacaanagtaaatttttctc

SEQ ID NO: 22981 - DNA, 386 bp, Glycine max
  unsure at all n locations
tttagctaattntatcgaacatatcttatataagctaataactaaaaaagttacaagctactactagtatgtttggtacacaagcttattttaataacttgtttttcataagctactttaaataacttattttcattaactgctttgaaataacttatgaaaaataagttataagctactggtttttttcttctcaattttatctattttatttgaaattttattttatcatttcattcaactaaaaatccctcatcatcttttattttctgtctggaaaaatgctcttatcttttattagtttgttgaatgtcaaactatttatgtcaataaactattacattgcttattgtaatttattattaaaatattttggtactaaacaa

SEQ ID NO: 22982 - DNA, 313 bp, Glycine max
  unsure at all n locations
gctaatattttttttaatcaagtttgtgaatcacatgtatgtgaacactcttagttcaacgatttttttttttttttttgtttaacgtttgtgttgtacttaaatgtgaaacacacctataaggacgaagagactagtaaatataggaacaatctagaggtatgaacttgactttgggagcattaatggttgagttttgaagcattttaagatggaatagttcacatgtcttaaggcacacaaatctaaattaagagaaaatattgattgcacgttatattttcatttcttggcagngccgtgactgaacctc

SEQ ID NO: 22983 - DNA, 416 bp, Glycine max
  unsure at all n locations
tctgtcttacagtttaaacaaatataatatttcgacttatgaaaagaacaaggtttgccgaaaaaaagtgaaagatcttagtttataatataacctanactggatactgcatgagaatttttagaacatcttaccaaacatgattgcacacttaaacagagtaatgaaataatcatgtcattttggacccctttccttcaaaggttagagattaatagaatttgcatatcaaatgataaataaatagatgtatgcaagccagatgacataagtcgctgattctgatttctgagcccataaggaaaatgatgacagaagagtgatgggttttttacaacacaactcccttttgtggatacaatctttgtacagatatgttggtcaattgatcattagacattgcatttgcattaaat

SEQ ID NO: 22984 - DNA, 254 bp, Glycine max
cgcagaaccaccaccaccaccgccaccacaaccacaaccactctttctggtgtgaaaaaacgccactctcttttttccgagatcggtgcagcaacacttactagctccaccaccactcgaacctgaagaaagcttggagcaccgaagctgagccagggctccgggcctgaggtacttgttcttcccggagctccgaaccttaacctatcaaccttgctctttcggcgacaccttccccattattatttcttctc

SEQ ID NO: 22985 - DNA, 405 bp, Glycine max
cttattatagacatagcaataaaaatatatttactattagaatttataaaagaatttttaggtcttactagtaagcatgctcagtgcaaatgactaattggttgaaattgacaaacaactcatctaccaatttattgcgagacactgtaataacaaaagtaggtataataatcattaatccaatcgacatcatcttaaatgcaccatataaagcgtccttcatcagtatcaaaaaggaaaggaagaaagacccatctcattaatagtgaagttggtcatggtcaagaacaccgttagcattagaaaaagataaagacaaggccaaataaatatcaatcatttcatacgcatggtccattattattaaaacgtacaactcggataagtccaggggttcacgagtct

SEQ ID NO: 22986 - DNA, 409 bp, Glycine max
  unsure at all n locations
aattttaaatgacagtggtggaattacgtgagttatgtttaagtaagttgtatctcatttatatgactcactccctgtgtgctatttgtgtttggatcctatgatgatctcgaactttgtgttcgggggagcagatgactaggtgaattgctttaaagaaccttatgctgaaggacgtcgggacacaatactctgataggatgtgacattggggcataagtttctatattattatttattccttatattattagtacatatacgtatggngtagagggtgtcacaacaagcacaagctatagcaacaaaaagttcagcttctattgcttgacaagtaactattgggtgcttcttagataaccatganatgacaccgggttccaacataaagacataactagaagtactc

SEQ ID NO: 22987 - DNA, 413 bp, Glycine max
ttagcgaattactattgttattgaaaaatatgcttcttgtagataacatgctaccgaagaatcattatgaggcaaagaagatattatgtcctattggaatggaataccaaaagatacatgcttgccataacgattgtattttgtataggcatgagtatgctgaattacgcaattgccctacatgtggggtgtcatgctacaaagtcaattccaacgattgcagtgaacatgctagctcatacaaagatcgtccatccaaagtgtgttggtatcttccagtaataccaaggtttaagcgattgtttgctaatgcagaagacgcaaaaaacctaacatggcatgctgatggcaggatcaacaatggattgctctgtcatcctgttgattctcctcaatggaaaataatagatcag

SEQ ID NO: 22988 - DNA, 453 bp, Glycine max
gtgcttaattgttaaacttatcaaaccatagataccgttgattactaaaaatacccattttctctccccctttggcaacgccaagaagccaaagtgtgcgaaatggaatatattagtggcgcgtcaaagactaccgaacattgatcaagaatcaaccgatgaccacctttttatctaaatccctacatctaaagacaagtttctttaaaaaaagaagttcctttggaaaggtttgggaaatagtcacaggcatttaattctccaatttaaacacatcccttttaaaacagtccctaaaggagcatagcctatatgttggcaacacgtcggatttgataatacggctggaagtacgtctgacacaagggttggacaaaaatgttacaatgggttcctaaattggcacaaccggaaagttctaggggaaaactatttgttgggcaacaagatacc

SEQ ID NO: 22989 - DNA, 410 bp, Glycine max
  unsure at all n locations
tgatcaaaacaattatctgttcattccaatcctggagctgctgatgaatcctggataggatgctctagctccgtgactggtgtagatggctgggtctcctcaagaacaggtgcagaggatggctcacgtatctgatctgtggaggtaccctcctcctgagccatgtgtgcatctgtgtcaaaataaaaaggctcaggaggggtgagtgtttgaacccggcaagtgcaccggatcacgcaatttgtataaaacgataagaactgagtatcgaactctcggggaacttgtgttacttggtaaagctatattcaatgaataagtgtctagtatgaaaagagatgtgttgactatgaataggtatgtaaattaactattaagagganaatcacatgagtaatgatgcgtgaaga

SEQ ID NO: 22990 - DNA, 269 bp, Glycine max
atcatgcgcctattgccaccgtcataaatataggtattttgagaatacatcttaaagaccaatggttaacgatggctctaatgggcggttttgcttgaataaataataatgagatcattgctttagtaaatgatgcggaaaaggatagggacattgatccacaagacgcacagcaaactcttgaatagcaaaagcttatttgaataggcggaaggcaagagacaaacaattgaagcaatctagctcttgacgagctaggacacgataga

SEQ ID NO: 22991 - DNA, 416 bp, Glycine max
  unsure at all n locations
tctcaaggaggtgagcttagttattagagggtgtgtgtagctaagctctagcttctcaaggaagtttttctcaaagaagcttctcaaggaagttttctcaagaaagcttctcaaggaagctacctagtctataaatagaagcatgtgtaacacttgttgtaactttgatgaatgaaagtcttatgagatacacttcaaagttccacttctctccctcttttattccttcaatttcgtgctccccccttctctctttcttttcctccattaaagcatcctcttaaagcttcttatccaaggcaattcttggtggtgaagctccttcttccttggcttattccctagtggatggtgtctcccctctcctattctcctttgccttccgctgcatctccatggtgaanaatcaccattga

SEQ ID NO: 22992 - DNA, 408 bp, Glycine max
agcttgcagtttgagatttcctgttctgtctgactaccttccaaagtttatcaaccataaattgtaagaaatgcttatcatggaattgtgccaccttgttatactccactgctaaaaaaatttaccacataaagagtagtagcatgctgcaaccacaagaaaacttattcaaatgattttaaatgtacaggttcttaactttcaaagtaaataatacttaattttgtcagaattttttaacaacgtaaaatggaagaatttctcctatcaaggaatatctaatgccaaaaagcgaataacatgttcagaagtgaacaataacaaatgataaatagaaggcaagagagaatatcatttacacgtttcagaatttaattgttcacgcaaccttgtacaagtaagcatgtg

SEQ ID NO: 22993 - DNA, 390 bp, Glycine max
  unsure at all n locations
taactctcaaattccncttcatcccaggctctntagtataagctttccttcattanggacaacaacctcagcaccaggtttgacaatatctgtcaatgggatcatgagactccttccgtccaatgtggtgagatccaacgttntaccagtaaaggcctcaagaaaggttatctcttggttgatcaccanatcattaccatcccttctataaagagcatgcggcttctcatctatcacaaaaatgagatctgctgggatgacaccaagctcacggntacctttctctggaaaggtaatttttgttcctttcttccagccaggttttatctcgatagtcaaaatctcctccacatccccacatttgctgaaatggaattgcatgtgtcaaat

SEQ ID NO: 22994 - DNA, 409 bp, Glycine max
agctttgatgttgcgtagcccaccatcttttcatagtagagtatcgataatgtgtctaccatcacgattatcgtctccctttccatcattgggggtaccacttgggccgccagatccctccaccttttaggcgtgttctttgaaagatccgtccccctttttgcaaatgttctatagttgcatcctatccggaaccatatcaaaattgtactgatactgcctaacaaaggcaaccattaggtccttccaagaatggactcgggaagattccaagttagtgtaccaggtaacagctaccccagtaagactttcttggaaggaatgtattagcaattcctcatcttttgcgtattcccccatcttctgacaatacatctttagatggttcttgggacaagtagtccccttg

SEQ ID NO: 22995 - DNA, 326 bp, Glycine max
tcctctatcataacctttctatgagctcgcgactggtcccagtcttgccttcgcgacttgagttcattattgctaccccatagagctccgcaaaattagttgcggccatactcttgcttgagagccctcttggtctcttggtcaagggctcttgcgggaattgcaatctcatcccgtaacccggcacactccttccgaacgtgtgtagcagccaacttgaacttctcttggcgagtgttgcctttccttactcggttttgagagcttggacttcttcgacctcttccggtgctgcgaaaatctcttcgctggcgacctttaacttg

SEQ ID NO: 22996 - DNA, 347 bp, Glycine max
agcttgtcgttaattgttacgacaaaaattcggagctaagattgccgaataaattccgtagtatatcgagacgctcgaaatgcgaagtaacctctcaccgaaatgaaacgacaataactttgtactcgaatgcccgaatgaatcccgtaatatatcgagacgctcgtaactgataacagaagctctgagcaaagtcaaaagatgattactttatactcgtacgtgcgattgtttcctgtagtatatcgagaccctcgtgattgaaaccagaagcccgtagcaaactcaagcggcaataaattgttactcggatgcccgaatgaatgccataaaatgtcgaggcgatc

SEQ ID NO: 22997 - DNA, 408 bp, Glycine max
agcttttgttcaaagaagaaaaagaagttcaaagagattcaagacttgtaaaggattatataagattgattggaaaagtgtcttgaaaagaaaatcaaagccttgcttttatagactcttcatgtctggccaagaggaccatttagaagagttataacttttagaaaaacttaaaaccaatttgaaaaagtcaaaaaccatttgaagagttacatcttttgatttattcagaaacaatcactggtaatcgattatcaaatcagtgtaatcaattacacaaggcttttatgtgaaaggatgtgactcttcacatttgaatttgaatttcaacgttcaaaggcactggtaatcaattaccaaaacattgtaatcgattacagctttttgaaattaattggaacgttgtaa

SEQ ID NO: 22998 - DNA, 410 bp, Glycine max
  unsure at all n locations
agctttagtttcctatattntgaagcaagatttgacattcctataatgtattcactgtcatttcctctgccttgatacttcatggaaatcaagttctaaaggagagtacttgtttccgccttatcgctttttgcatagcgcttttcaatttcatcaaggaattctttggcactagttatatcatctgaaacagtacccctaacgacctcaggaatgccacgcttaatgatcataagactcatgcgatttgagtgatcccacttctcatgaagtttcctctattcagaggtacttgaatccgtaggagaaggnggtttctcaatccttaatgcaaggtctagatccatgcagccaagaaaaatntacatgttctcttttcggtccttaaaatntgcaccattaagaactgg

SEQ ID NO: 22999 - DNA, 421 bp, Glycine max
  unsure at all n locations
gagttggagtgcacattgtattatttattgtggagagccatgaaagaagcaaagcaactagtggaaaggaatgagaggaaacaatatgtcaaagtatttgattatgcacatgaattattgaggagcaatcctggatcaacagttaagatcaacatagtgccaagcccagaaggtccaccacaatttcacaggttatatatttgtcttgctggctgtaagaaggggtttgttgctggatgtagaccattcataggtctagatggatgtttcctagagagtgcatatggaggaaacttgctctctgctgttgggcttgatggcaataaccacatctttgttattgcttatngtgntgcggacattgagaacaaagacaattggaaatgagttttaactgtgttgcataaagatcttggggatt

SEQ ID NO: 23000 - DNA, 332 bp, Glycine max
tagctttcagcaaattcaaacgacaataacttttttactcagatgtttgattgagtcccgtaatatatcgagacgatcaaaattgaattttgaggttctgagctaattcaaacgataataagtttttactaagacgtttgattgagtcccgtaatatatctagacgctcgaaattcaattctgaacctcagagcaaattgaaacgagaataaatttttactcggatgtctgattgagtcccgtaatatatcgagacgctgtaaattgaatgttgaagctctgaccaaattcaaacgacgataactttgtactctgatgtctgattgagtcct

SEQ ID NO: 23001 - DNA, 357 bp, Glycine max
  unsure at all n locations
ncaacattcaattgccaaggtctcgatatattacgggtctctatcanacattcaagtaaacagttattggccgttgaatttgctcaaagcttcaacatctcatttttgacggtgctcgatagaattacaggactcaatctggacatgccgagacaataatgtaattgtcgtgagaatttgctgagagcattgactttcaatttcgagcgtgtcgatatattaggagactcgatcagacattcagtaaaaagtattgtcgtttgaatatgctcagaagcttccggattcaatatcgagcgtctcgatatattacgggactcaatcatacatccgactagaaagtgattgtcggttaaa

SEQ ID NO: 23002 - DNA, 369 bp, Glycine max
tcaagggtgaaacttcctgcttttattgttgaccacagagtggtacctggagatatgtcgcggtggtcaggagaccttggggacgtcaagtggggtgctattgcccaaaaccaagcttgaccaatcccgacccaacccgggcatagtcggtcagtgagaacctgtgatgtacctaagcaagcgagctgctgccaggcaacagatgaaacgattacgagactcacaagcatggacgcttgaggtggctggccagctgtgaaacttgattgatatgtgagatatggtctctggtaatcgattaccaagggtgggtaatcaattacaaggcttacaatgaagacaggaggctaagatggtctctggtaatcg

SEQ ID NO: 23003 - DNA, 227 bp, Glycine max
gactaaaaaacattattgaacaacataattaaaaccaaaacttaatcctcagatccctcttgtaagactaagatgcgatcctgcttcaatcaagtgctaaggcaacagtcattttccaatgctaaaggcacctagctatgcacacagatggatgatcagaccaaaagcatacaaaaattaagcagtggaggaagcattgaacacagagaacataatcaataggatat

SEQ ID NO: 23004 - DNA, 409 bp, Glycine max
  unsure at all n locations
tttagcttgtaggattatggggtacccgtcacatgtggtactaggtggcggtcgggcaatggtgcaagtcgactatccatattcacaaatcacacataaatccaccatccccagttgcccaccttcaactgagctcacatactcccacgtagcccttatcctcgttcctctcaacaccgggtccccatcaatccctccaagcttccataacatctaagcaatacaacatccaaacatcatgaactatcaaaaccaagaaaacagagcaaaggcagaaaactctgcccaaaaacacaaaccaacaccgccgctttccttactcaaataccccagtaacattctcttttttccaattcgttaaccgttggatcgactcanaaattttaatgaaggtcccaagtacataaat

SEQ ID NO: 23005 - DNA, 417 bp, Glycine max
  unsure at all n locations
ctatgaatattntacactaatgtcatggggacataaaataaatgtctcctcaaattaacatacaaataagttaataattcaaagcactaaatcctacaaaaatagtttcaaacaaatatatataaacaaaaaagggatatgattattgcatttacgtagtctagctaattttttttgtcttaaccctctggttcatcaggagaaagagaccataactaatccaaagttcggtcaagagataagtaaagtctgacaaagaattgttttcatcaatgatcgaacttgaatagtacccaaacaatctaaccttaacttcaacatattaaccatttgtgctcaatcacttggttatgtagtctagttaatttgtgtgtgctnttgattntagattgacatggtaagataatgatccaagac

SEQ ID NO: 23006 - DNA, 399 bp, Glycine max
agcttcaccgtatgacgccgatcgaacatttcctaaccgacgtcatgcaaatttcgttcagggattgaattgaaaactcgttaggcgacatctgtcgtgaagtagcgaccgatatttttcagccgacattgcacaattctttttagaaaagctcgctggtcgataatggtctttttacggcagagtaagttttcttgttttggtgttgcataaaaaagttacaatgtacttcggctaggtttttcgtgcgagttcaaccgacattttgtttcggccaggaaaacattagcccacctctgcaaaaaaaatatttgctaaccgtcttcatgcatatttcattcaacgattgaatagaaaactcaatagccgacaacggtcgtgaaatagtcccgactgata

SEQ ID NO: 23007 - DNA, 427 bp, Glycine max
  unsure at all n locations
tctttgttagacctcgatcggtcatctttccaggccgtagtcgaccgtcattnttttcgatccatttcggtgaataatatttttttgccgagatgggcaaaatgccagtttcggccgaataaatgggaaaatgccagtttcggccgaaacgataagtcggttgggctcgcacataaaaacctagccgacctacattttaaattttttatgcaacaccaaaacaagaaaacttcctgtgccgtaaaanaaaaacactacatgacagcgagcgttttgaaaaacaaaattgcgcaacgtcggctgagaaatatcagtcggagctgtttcacgaccgatgtcggctattgagttttcaattcaatccgtgaacgatatttgcatgatgtcggttaggaaatgttcgatcggcatcatcctgtgaagtttc

SEQ ID NO: 23008 - DNA, 410 bp, Glycine max
  unsure at all n locations
tcaagcttcatgatgatgaatcaagattgattcaaggagttttgatgataacaaagatgatgacaaaaagctcaaaagtcaatatcacttcatgataacaaagatgatgacaaaaagcccaagagaatgagttcaagaatgagtcaagaacacttcaagaatcaagtttcaagaatcaagaatagacaagttgaagattcaagaatcaagaaaatactcaatcaagataagtactaaaaagtttttcanaactttgaatagcacatgaatttttgacaaaaccttttaccaaagagtttttactctctggtaatcgattaccagtttattgtaatcgattaccagtagcaaaattgttttcaaaaagctttcaactgaatttacaacattgtaattaatttcaaaatggt

SEQ ID NO: 23009 - DNA, 434 bp, Glycine max
tattaacaattccctcccgagtgtctgcctttatctatgattgaacttcaacaatttaccctcattggctaagattgaacaacaattcaataacaagttatatggtgtatgttaaaatttattacatctcgggtaagtggtaaatttacacttacgcgatttacttttatcattttactgccaagtaccctttcaattgaatacataacatattgcttgagtcttttctcttgagagctcccatccttataccggaagcttccccgagccactttggtgatcgcagagactccttttattgagcttatgcttccccttagggtctttaacgagagggggaatggacctccgttggcaacaatttggctcctgcgggccaggcagaaggcgttcatgtcgacaccaacttgagtcatgattcctataaaataaca

SEQ ID NO: 23010 - DNA, 390 bp, Glycine max
  unsure at all n locations
agctttcaaaatagacaaccaacattccattcatttcccccttaagattttggatgttgattatcaaggcagttataatgttattcatgatttcacgtagataaagtctagcaaatctagaaacggacataatgaattgaagtcaataattcactttggtatgaattatataaaaggaaaaggtaaaaagccacagctgcatcgcaccagtaacacggatatatgctggaaatgagaaatggtaactgtagtttgtttttgtataacttctgtatgaaagaaaagagagatgagaagaaaagaaagagaagtttgtgatgagcgatgcaataaagataaaaaaaaggataanaatgctatanagagtattgtatgaataatataaatcgt

SEQ ID NO: 23011 - DNA, 413 bp, Glycine max
  unsure at all n locations
tgtaaatgagctntatataccataagttcttaattatttaagggacattnggataaatactttaattaagcacttatttataagtttttatcaaaatttaagttaataattgtccccctaactattaaaataagttataaaaaatcttataaaaataacataaataacttttattagctcgaataaaccttatttatcaaaatagcttaccttatcagtataagtattaattacctctntcccatattttttaatatttaaggttattacacataaactaaanaatgatatattaaatacatcgatgtttcatacttgtactaatagtaataatgatattaattagactctaaaattctaaagtatcaattattttgaagagaagatgaaaagttagaatgtctaaaaataca

SEQ ID NO: 23012 - DNA, 393 bp, Glycine max
  unsure at all n locations
tttgcatgtagcttgccgcccagctcgcccaggcgagcaaggatgcttcctccagaagcaacagccttgtggaggaatcttctggagggcccaagtgggcctggttgctatttacagccccttgtttactaaatgcacccccctttctattttttcgtaattctttatctgtaacattacgaaactttacgaatttcgtaacgatacctatcttccttccgcaaggttacgaatccttactgaatatgtatttactcttttttagctttcgaagaagttacggaaactcactgactgcgcaaaaacaccgttgttcgatttccgccacattacgataattcacgaatcatgcangcctgcttcctttgattgctgagacgtctcgggacttca

SEQ ID NO: 23013 - DNA, 341 bp, Glycine max
  unsure at all n locations
tggttcgaggtacttacccgtngaattgcgagtaactttgaagaacgaatgaagaacgccgaagaactgctcaaacctttgctagattcctcacggaaaacgttacggaaacgtttcggaagcgcctcggcttagattttcttcacagaaataatttttccgagcatattcaaagagagagaagtgcctaaggggctggaccccttccttcttcctttcctcccctatttatagcaaaataggggaggtggttgccgcccagctcgcccacgcgagcaaggttgcttcctccagaagcagccgccttctggaggaatcttctggagggccctaatgggcct

SEQ ID NO: 23014 - DNA, 410 bp, Glycine max
  unsure at all n locations
agctttatgatgatgttccaagcaattttgataatgccaaaagcccaagtgattgattcaagacttcaagatcaagcatcaagaatccaatccaagattcaagattcaagagaagaaatcaagaagcaacaagtcaagacttcatatagaataagtattaaaagaatttttcaaaaaccgaatagcacaattttgttttacaaaagaattttctcaaattttctaagttaccagagtgattactctctggtaattgattactagttactagtttggttttcaaaatgttttcaaatgatttgtaacgttccaaaatgattntcaaatagtgtaatcgattacattatattagtaatcgattacaagtgaatctgaacgttggaattcaaatccaattgtgaagagtcaca

SEQ ID NO: 23015 - DNA, 375 bp, Glycine max
  unsure at all n locations
ttgatgggcaacactggtggatggacgnaacacaattttgctgcgttagagagagagagagaatacgcttctgaatttctactttggctgagtgaggagagataaaaactctttggttataataaaagggttttccctttttgcattattctattcaagctctgccacatgtccctatttgattggagcaaaagggcccactttctctttttgactgtgacccatacctcagcacaaaagtgagaaagatctgacctttgaaacgctacaatactgcctcagtttgcgtgccagttctctgattccagtttctcgcgtgtctctgcgctcgtcggtgccacgtatccaaagcatgcaatatatatatcaaaacgc

SEQ ID NO: 23016 - DNA, 411 bp, Glycine max
agcttgcactcaagattctccttgcctggcacttcaaaaccttctggttgggtcatatagatgtcttcctctaaatccccatgcaagaatgcagttataacatttaactgctcaaagtgaagattctctacagctgctatactcagaataactctgatggtagtcatctttacaactggagagaagatctttgtgaaatcaattccttgtttctgctgaaaccctttcaccacaagtctctccttgtatcttcttctaccgtcagattcttcctttagcctatagacccacctattctgtaacgctttctttccttctggaaatttagttaaagaccacgttttattcttctgaagggatgtcatctcatctttcatcgctagctcccacttaatagtgtcattcccctgt

SEQ ID NO: 23017 - DNA, 413 bp, Glycine max
actcagcttgtaaagaacttaagataaatcaagaacaagcttgttttcacatcggtcacgtgtatgatatccactcgacaaagttgaagtaaagaaaccttcaatcctataacgcaacgtggcggacaaaagtgggcagttaacttgaatgaccattattgtcaatgcggaaggaattttgcgcttcactatccatgttcacacattattgcagcttgtggttatgtgagcataaactactaccaatatattggtggatcgagtgggctcagaataattaaaaaggggggttgaattaattattcctaaacatttaccaattaaaaaattactcttttaaagctttttactaaattttaagagaatgaggagtagaagagaatcttaacagaaagtaaaagcggaaattaaat

SEQ ID NO: 23018 - DNA, 307 bp, Glycine max
  unsure at all n locations
acaagcaaacgacacacgcgaaagancaacatcagctgacgcaccaactacaacagcaactcaaagaaaacagttgatcagtttcttaaccaatcacatgaaaaccgaaaacaccattgatgcagtagccacgaatgtaacaggtatctgtaagaatgatgatgttaataatgattaccacacttggatcattgacactggggctacttctcacatccgttgcctcacagagctgtttaattcatatactaccattctgaactctcatgttcttctgcttagtaccacgaaagctcaagtagaagga

SEQ ID NO: 23019 - DNA, 476 bp, Glycine max
  unsure at all n locations
tgccattatnccttagacntnctaagnacntnacgaaactctcgcngatcctcagaagaatgatgatgactctcctccctattcccttttgcaggaacgaggagaacggtgatagcattaacagccttggccatacatcggaactataatgactttgcctgcttttcacaagtgctaccaaatgatggctatcttgtaagatgttagaagtaggatcagagtgcattccgctcctcaatgagacaaagctccctcaactctgggtcctccctagagattgtagaacacagtgaagatgagagctcccactaactacaacagtgctgggaggattcttacaaactaacgaactagactgaactacattgagagtgatgttatctgtactcgctctctttttacttaagctggtccttagaccacagtgcatgtatatgctggttactgttcttttgcccttacatccatgtcaatcn

SEQ ID NO: 23020 - DNA, 399 bp, Glycine max
  unsure at all n locations
agcttanagtangtcnaatnctaaaangacgaaattggaattcttaaatatgaagactatgtcaagaagatgaagtaagtctcaaaatttaaatttagttttttttaatagaaaatgacaaacgatttactgcataaggaccattcatatatcttagcattatatgtatacaaagttactttctctaacataatttcaatagtaattcaaatgatggcattacatttgaaacataaatctctattaaaacaaaaataaggttcaaatatattaatgatcccttaatttgatttttttataattatctaaagtttttaaatgattccctcacatgttagtactttaaacaacctattgtttgtaattttcgggataattttgattgttaaacttttttat

SEQ ID NO: 23021 - DNA, 308 bp, Glycine max
aatcctctctagcacattaatgtccaaagatctccatattatgtagcattcttaggaatatatctctttatgattaatactagaaagtaagacgtgacgataaaaaatcctactctggttatatgcgactaaaagtggattctaatgcccatcgagactttagaaggagatcaacacacagttcaaccgactcacgacacaatttttggttcagtggttgatacgcaacacagactactttgttctattaggcgttcgttatgcttaagtattaaatagaacattgcacacgtcaaaaactctactat

SEQ ID NO: 23022 - DNA, 248 bp, Glycine max
gctcggacccgcgatcctcttagtcacctgcggcatgtaagctactggaggccatgcccgcacaggcagacatcaggaaagtcccataacaagagacgtaacaagctatccgaaccatggcccgacaccactactcatggctgaaatgagtgcatgcgctctacatcataatcatattgaagacgagctgatatacgactcatgcacaacccgacacgcacaaatgagcgtgacacatcaatctactc

SEQ ID NO: 23023 - DNA, 407 bp, Glycine max
  unsure at all n locations
taagcttgnccttcnctaaagcanaggggattattatttttctgttctcgcaacaccaaatgtctccccttgtacactttgtatatccactttgaaccaacatacttgtacctttatgatgtcatctcccccatagaactgatattgacaacaacaaaaggtacaaatctcacatttgagaaagtttgaatagcacaattatgtaacttcatgctcacgctccctatgccttcaaccttcattgtttcatcattttctaacatgaaatgaccgaattttccatcggttattaaagtgtcaaacatttctcgatctctacaaatgtgctttgagacaatagaatccatcacccattctgttttatcaaccttatcatatgttgccaaaaacaagtcatcttcatcttc

SEQ ID NO: 23024 - DNA, 404 bp, Glycine max
tcaagcttgtatagttccccagtttatggttattttgtagtgatttttgtaaataaatcttttggttaatgttgtctctagaaaatttccattggatttaatcatgaaatatgttcattttaaggtgaaaaggaggctaagttttgaattgcaaaatgtagcagttgggttaagctcaacagctgggctaagcgcatatccatcgctaagcgcagttttagcgcgcttagtgcagaggataatttggcagagcattagcatcaaatccacacactaagtgcgagatcagtgcgctaagcgtagcaggtgccttcagccaggctaagctcgagactagcgctaagcccaatttcacttactcgcgctaagcacgagggtggcaatcaatgggagaggaccacttc

SEQ ID NO: 23025 - DNA, 399 bp, Glycine max
atgggacccgggttgtttaacttggatatgggctacgtgggagtacgtgagctcatatggaggtgggcaacaggggatggtgggtttatgcgcgctttgtggatgtggaaaacttgttgtgcaccatcgcccgaccgccacctagtaccacatgtgatgggtaccccataatcctacaagctcgagatgaagaagtgtagaaaggtgaaacttcctgcttttattcattgaccacagagtggtacctggagatatgtcgcgggggtcaggagaccttggggatgtcatgtggggtgctattgcccaaaaccaagcttgaccaatcccgacccaacccgggcatagtcggtcagtgagaacctgtgatgtacctaaacaggcgagcttctggcagtcaac

SEQ ID NO: 23026 - DNA, 407 bp, Glycine max
  unsure at all n locations
agcttggattttcttttagtaaggaatctatccttcctaagatagagccaaacccaatccccctcattaaaaactagctcctttcttcctctattgcccttagttgaatacacctttgtttggttctctatgtgggtcttaaccctctcatgcaacttttttacaaactctgacctagattccccttcttcatgtataaaaagaagtgtcaagtgggaggggaatgaggtctaggggtgttaggggattgaacctatagacaacctcaaaaggggattacttagttgttctatgaacccccctgttgtangcaaattctacatgaggaagatactcatcccaagacttatggttgcctttcagaagagcccttaaaagggtggataaagacctattcactacctctg

SEQ ID NO: 23027 - DNA, 418 bp, Glycine max
cttggagagaacacaaagtggtaggcctatataagtctagtttagtgataggggaaaggagtaaacgtccaatgagtttgataaattttgcgaagaagaaggtgtcaacaggcagttgactgctggctatatacctcaacaaaaaggtgtattcgaaaataagaatcaaaccgttatggagatgactaggtccatgctttttgagaaaggaataccaaaataattcttgtccgaggctgttaatatagccttgtacctattgaatagatgcccaacaaaagtggtacggaatatgacaccatttgaagcatggagtggaagtgttgatggattggcaagtgcaccaatttgtaagaaatcgttggctacacgaatcattgaggtggggaggactataagacatgactgatgggatgga

SEQ ID NO: 23028 - DNA, 404 bp, Glycine max
tttagctgatcatcgagttcatagaacatcagagagtcttactttgaagatacacaggtcacttgatcattataaagaggctgatattgtggaagcatgttgaacggagtaacagagatgctaatgccagtcttttatcacatgtgattatggtgaaaattgtcgatattgatgaacatgttacctgtgaccatagagaggaaatgcatgatccatcagtgggagatggatgttatccccacgaaaaagaggatatgaatagtatgactaccaatcttatcaaggatgtgatgagcactcttggaactagctatgatgacaataaaactggaaatgcagaatgtaacgtactcatgtgaatgtacatgggactatgtatttctttgagatgtcatgatatcatg

SEQ ID NO: 23029 - DNA, 398 bp, Glycine max
agacgtcatccttgaccagtgatccgctcttttaccttctctctttcctcccaactcatgcccaatagacgcaccaccacctgtggagaccttaacagcatccactccatctccatctcctcccaaaccaccaccaacaacagcacccacgttagctccgcctcccttggctgtttcccaccatcccgaactcaaaatagtcgcacccatggctctgctaccgcttttacgctttcattcgaccaaccgccacatctagcttagttgtctgttgcctccatcacttcgcaccgcccaccgttgatactgtcacggccattgccacgaaatcccttacggcaatgacaccatcctgctcagcaacgctgccatcaagcatcagattcatctgcgctcag

SEQ ID NO: 23030 - DNA, 408 bp, Glycine max
ttttcatgcaagcttgtgcccgaaacactacatcatccaaactgcagataataactcaagttcttgaggcttgtcattgcatgtataccgtacaaaacctgaatccaaaatttccttcctaggtagcaactgctgagtatcactcacataagaactgctgccatgagtctttatctgcatcctttttctttatctgtttttcctgatgagcttaaaagtatccatctaaccaagaaccattgaaataataaacaatgggcagataaattaataaattaggatccaatatgaacagcagttaacggatgggatgatattgggctgatattctctttgggggcaatttgcgcaggatgtagaggactaaagctgaaggtaggacctcaaccagctgtattttgaaaagtg

SEQ ID NO: 23031 - DNA, 332 bp, Glycine max
ggacctaaaaactcaagctagcggtaaataggaacgcaacatctccctgcatactatagacagacagggaaatggaggctgcaaacttagtaccgcaattccttacaccaaattccacacttcgatataccagccacttgggaatgactttgtaaagcaagcaacgcttaggacaataaagagagtgactctggtggcaccatttggggcgtgctttgattcaagaaccattggcaagaccggtactggacccaatgtgccgacaattgatctgagtctcaaggggggagttcaatggagaatctatggtgccaattcaatggtcaaggttc

SEQ ID NO: 23032 - DNA, 400 bp, Glycine max
agcttccacaaccccaactatagtcctagtaagctccgctgcctgtctctcggtataatgcccacgctgaataatcctatcgaaaagctctccacctgcacatagttccatcacaacgtggacagccatggcatcctcatatgcacccttgatggatataacattaggatgcccagccaagtggtgcattatctgaatttctcttctcacatcctcgacatcatcatcggtgacgagcttcctctttgcaatagatttacaggcatactcctgtcctgttgccttctccacacacaagaatgttgtcccgaactgaccctgtccaagttttctcccaagagtgaagaactccttgaaattatctgtctctctttgcaacacagaatcaacacgaagccct

SEQ ID NO: 23033 - DNA, 411 bp, Glycine max
  unsure at all n locations
acagcttactaaaacaggagcagacctcnnctttattttatttttatagatcagnaggtggagctcttcaatactccactataaccagacctgaactaagttttgctgtaaacaaagtctggcaattcatggccaaccctcttgaatctcactggacagcagtgaaaacaattctcaggtatctcaaaggctctttacaccatggcctacttctcaaagctgccactcctcccattcccattaaaggcctttgtgatgcagactgggtgtctgaccctgatgatcacagatctacttcaggagctgctatttattttggtcctaatcttatatcttggtggtctaagaaacaacagattgttgcaagatcaagtactgaggctgagtatcgaagcccagcacaagccttct

SEQ ID NO: 23034 - DNA, 412 bp, Glycine max
  unsure at all n locations
agctttgttctttnttataaaatgagaagttctgaaactcatcacattatctaaaaatcttgaggtggatccaattgctccgatcattcattagcatattcatgttttggtggcatactcaccattgtttgtttctttagggaactcacaataactaagaaagcgcagaggcacccctataacacttgatccagaaaaatggataatgaagagggagtgcaagaacagatgaaggccgacctatcagccttaaaagatcaaatggcttctatcacggaggccatgctaaagcttcagaaaactatagaggataatgccatggcgaccgcctccaatacagctagggaagcggaaccggtgctacagccagcaataaacttgggccgagatagaaacacgacggtgttcggtc

SEQ ID NO: 23035 - DNA, 331 bp, Glycine max
gaaaaaccctgatattaccatatccttaaggaattttggagctttggaattggtttgggaataagtgtggggggtttttgtttcattggacaacttgatttgttggctatgcttcatgatgtattttgggccatacttgatgtacattgtatattggttaaatgttggacatgctgaatgaaatgttgtttctcaaaggataaagagcaaaaaaaaaattcgaaaaatgaaaaagaaaagcaataaagttgagtgaataagatcttatatggacaagaatgatagactcttgggtctactttcatgttaattttatcttactcctttattt

SEQ ID NO: 23036 - DNA, 407 bp, Glycine max
agcttgcagtacttgctctaaagctcttcttctactgggacagtgggtgcctgaactctcattctccttctccgagagtatcctgagcttgcttacggtcgtgcacattgcggatgttccctagccatctgaagctatgtaacagaatacatgtagagagaagcttacatacatcttcgccatgggaaccaactgaattctaaggtgaggccctaaataattattctccatctctctgatctgtggatgaacaattatgccagatgaatgatacttctacatcctataagacaatatactttgataggcatctggcacaaactcgaaatgacgtatgtttgagcttaacatacattatagaatgcgactatacgattagtgaggaccttgatactgatgatagagat

SEQ ID NO: 23037 - DNA, 227 bp, Glycine max
agcttctatgtaggcttgatctttgggcttcaataaggtccttcaatgctgatttttcagccatggagttgcagcggaagataaaggagaagaggtgaggggaggcgccatccactagagaataagctatggaaggagaagcttcaccactaagagagtgccttggataagaagcttagagaggaagcttcaatggaggaggagaatgagagggagggagggggggg

SEQ ID NO: 23038 - DNA, 440 bp, Glycine max
  unsure at all n locations
tcaacaccaaagccctgagccaaaccttcagccaaacttgtatgttttttactcgcacacaatcctaactcccaaaatgcatgaacatcaaccatgaaggcacacaactcatgtgatcaccctcaacacccacacattcctagacaagaccatccacgacatcaatgacccacaaattgctaatcctaacccttttgtggtaaagtgaggcataacgtgtgtaagaagaagacatagatcatttttgtgatgaggttgaggcaaggctgattaatttggcctttctaaattagcaaaatgacacaagtttttgtgttacatcaatttttatttaaaaccttagataaattataattggaattgctaatttcattntacattgataattaattaccagagaacacttcttatctaaaagtttgacttagtcttggagcata

SEQ ID NO: 23039 - DNA, 382 bp, Glycine max
  unsure at all n locations
agctttccatattcctctagaacaactcaatttcatttctgaaactctagatacagggtctagaatgaactcatcctattgatgaaatttcattttgagtgtgttgcatcaatgttgttcttcatgtcatgttcattgggcagatctctgcaatatttttcttgtcctctatcgattacttcttatggctttgaattttctcttaatctattgagcatgttgacttcttcattgcagtacacaaccaaaggcactctaagtcttcttttgagatttaaaccctatcatcctttttgagtgactcatgagaacctcacgtttactttaatntggtgtcctctatagaacttgccttttttctgaatacacttaaaccaactca

SEQ ID NO: 23040 - DNA, 439 bp, Glycine max
  unsure at all n locations
tactcaagctttgctggtgtcgagaagatatcacatgttngncatcattataaatgggttagaatgcgaatgtatgtatacatgattttgatgatgccaaagaaaaatcaaacaaggttgcttcaaatgataagcatttgcttcaagaataattcaagagtgcttcaacaaacaaagccttgtttcaagattcactaaagaccaagccttgccttaaaacaaagtgctttcaagacatgcaaggctctggtaatcaattaccaggaagtgtaatcgattaccagaagacagggttgagaaatagctgttgaaaaaggttttgaatttgaattttcaacatgtaatcgattaccatatgtctgtaatcgattaccagcaacgaaactttggaaattcaaattcaaaagtcataaccctctcaaatataactgtgtaatcg

SEQ ID NO: 23041 - DNA, 399 bp, Glycine max
  unsure at all n locations
taagcttgtggtcaatatacttatgaatcatagctacaaccttatgattaaggagctcttattcattgtccttcgtcccctccgacttattatcgtgggtgattagctcgtgcaaatccttacagcgtagatggtcatccatcattggcttccaatatgaataactttttgcggttagctcgaacatatctacatcatgagtgacaactccctcaatattgaatcacacaggatagtagctcccctcaaaccagtcgagctttgatactacttttagganacaccagtactatttccctttctgtagtttcaaaataggaacttagcataaaacaaaaatagaatagaatgtaaacgaatgacacactaaattttaacgtggagaaccctttccgtgtg

SEQ ID NO: 23042 - DNA, 235 bp, Glycine max
attcaagagaagttgatttcaagattctcgataagacgtcaggaagaatcaagattctagagatgatgaattcaggattcgagagaagaaatcaggagggaacaagtcgagacttcccaaggataggtttgaaaagggattttcaagagaccaaacatagcatagttgtggtatacaaaagagttttctcgaaattttctaaggtaccagagtatttactctctgggatcgatta

SEQ ID NO: 23043 - DNA, 401 bp, Glycine max
  unsure at all n locations
agctttatttttaaaatttggtagagcagttcttcaaataaagtttgttatattctttataaactctagctgaaatttttgggaattccttatttcactttagatttttatttcacaagtagagtaaaagtagtacgcaggtgattaatcagtgttaacaagtatgatatttatagaatgtgatttggagagaaagctaagtatgggaaaagaggagtgaatcttgttcgccttgtatgaacagttaagcttaatgcatcaagtcatgtgactccaaagtattgtgtctatcatttttaaaaataactaggttatgttgagaactaatattagaggatcctagttccttcactctgttntttggcatattgtctggtcaactgaagggatttatatcacct

SEQ ID NO: 23044 - DNA, 342 bp, Glycine max
tatcgagcaagcctctccctccaattaacattcgaagtctcttcttagggtttctacgaatattttctcgtgattgtgaattttagatccgcggaagacttgtttaattctagaggtttttgcgacattgcttggatggttaggttcatctgattttaagagtgtgctttagacttttagaggataaaatatggaattatggttgttagttttaaagttcatggttgagattttaatagttccatgatttggtatgtgtgtgtgtgcatattattctattacgatttttaatgcggttataacttccctctttaagtggattccatacttttggttatattt

SEQ ID NO: 23045 - DNA, 406 bp, Glycine max
  unsure at all n locations
tanagctttataatcaaacaaacccnngcggtctgggtccctcaactgtactgcattcccctcccttcgattttgttttactccgattctacctattgctagaaaaaatatcagggctcttccactggtgatgatcatggaagcccaaagacacaatgaatccgaggatccactccaagcaaggctaaaattgagtgatggctcagcaattcaatgttgtgcgaatgggcatctttatcttcaatcctattttcaaaataggttatggatccatttcctaatttataaattcaatcatagattggggggatgatattccaacctaattngcgatctcagtgaattcagggatcaattcaatggaagtaactctaatggcgttgattgaacttacataacatgatca

SEQ ID NO: 23046 - DNA, 408 bp, Glycine max
ttagcttcctcatgaactcatcaccaaagtcttcaaaatcaaaagagatggtaagggggctactgggaggtgtagaagagcgacaaggcttccatccatatgctttcttgtaaaagaagtctccaattaaagaccatttatgagccctattcttagcaaaggaatgatccttcaaggcttctctagttttgataagttctttcttatgtagttgaacatagttgcgagaaggtgaaggatcgtacacttgaacaaccatggaactagacgcaacatcaatgtctaagtcaacttctttaagtgggatcaacatgatgaatgaaaaagaattgagaaaaagggcaatatcaccagaaaacaaaacgtgtgatcaaacaatgcatagaaatccctttgtcatgggtagat

SEQ ID NO: 23047 - DNA, 428 bp, Glycine max
  unsure at all n locations
agcttgacaaaatctgtgttgccgtgcccggaatgtaggtcgtgcataaacagagggaaaagatagaggcacaagagcatcaaagtgctcaaattaattcagagtatgcagatgcgaaaaggcttaactgcagctcactagtaatagatctgcagtttacatccccacctatacctgtcgatattcctgagagaaatagaagtcaaaataaggaagaactggttgtattagcttccaatctggagtcacatgtttcccaagaaggacatgttgggagtattactgatcatagcttggtggtnagtactaatgctgaggctggtactgtcatggtaaataacacatgggtgaagaatatcatggggaaagcaacacgagtgcatctcaatactaaacctgctggtggagtgcctctcaatagcatgggg

SEQ ID NO: 23048 - DNA, 388 bp, Glycine max
  unsure at all n locations
tttgctttgttatcttgagataataggtggtcatcctcatttgaagttgatggtgcaacatatttctttggcctaacaggaactccaatatttttacagcttctaatgttatgattggtttggccataccttccacatgtaaactaagccaatttcctctttagcttatgtcttgtgacattgtcctcatctacagatctccttccatttttctttggccttcctctttggacccttttatgtggtggaacagggtgtgtatactgtgtctgggcccaatattgtggtccttggagtggttcaataaaatgctggtatgtcttattataagcttctattgataactactcatgacacatgtcctcagngcttccttctttgtgagtta

SEQ ID NO: 23049 - DNA, 436 bp, Glycine max
  unsure at all n locations
tgctaacccatggaagctcctaatatctccctcactttttgtggtgggccattcttggatggccttgattttctcaaggtccaattggaccccatttcttccagctacaaaacctaagaaaactatattatctacacaaaaggtacacttctctatatttgcatagagggtgtttttcccaaggactgaaagaacttgcctgagatgtcctaagtgatcatctaggctcctattgtacactaaaatatcatcaaaataaacaactacaaatctacctatgaaatcccttaagacatgatgcataagcctcataaaggtgcttggtgcattagtgagcccaaaaggcatctctagccattcatacaaaccaaacttggtcttgaaagcggttttccactcatcactctctntcatcttgatatggtgataaccactt

SEQ ID NO: 23050 - DNA, 395 bp, Glycine max
ttgtcattctagctttgagccaaaatcctgactcaccataaaccttacccttggaagcaaaaaaaggaaagaaggaaaggaaatttccaatcaaagagaaagcaaaaaaggaaggaaaggaaattcccaatcaaagagtgggagaaagagaaaaaaataaacgaaaggaaattcccaatcaaagagtgggagaaagaaaaaagaaaagattgaatattcccaaccaaagaatgggagaaagtaaaaaagaaggaaaccatgacctataagtggtcttctccctttgattaccaaccaaaatcctgtgcgctagcgacttttcgccccgcactaaacaaaaacagataaggaataaagccaaccaaatatcaaaagccaaaaacacacataagcca

SEQ ID NO: 23051 - DNA, 390 bp, Glycine max
  unsure at all n locations
tcaagcttattaagtatatgtatataaatgtattaacataacattaaaatactaacataattatatatataaattatattaatgtaaaaaaaattaatatatatatatatatatatatatatatatatatatatatatatatatataacagacatataaattcagtacttttgtgcttacgagtcaaagtttttatacaagaaagtcgaagtatatatcttatttgatacaaactctnttttttttttgcagatccattgtaataatgagaaaaatttcggcatatccaaaaaaccggtcaataatatcaaaattagataaattggcccacaccggcttacaaatgggatggccaaatacattacaaaattntgctttcgccaatgatct

SEQ ID NO: 23052 - DNA, 393 bp, Glycine max
  unsure at all n locations
agcttgcaatcaagttcaaacaaattttttgtangtttatatcgggaacccggcgcatggtgtccataagagcaacagcttctgcctcttggataggaggattacctatatggatagagattgtagcagcgatgaactcttcatattaattgcaatgcatgttacagtaccgaacttgcatgattccacaaacaaagatgcgccaatggttcttcttttcatcagccccatttcaagctctgaccattgtgatacaacactatcatctggtgctctcggctgaatgcaatggccttggggcttgatccgactgccctccattggtggatataatccctagtagaattgaacgatatggcgattggattctgcacatcatcctacactctgaca

SEQ ID NO: 23053 - DNA, 411 bp, Glycine max
agctttgatggtgcgcagcccaccatcttttcatagtaaagtaccgataatgtgtctaccatcacgattatcgtctccctttccattattgggggtgctacttgagttgccaagtctctccatctttgggcgtattcttcgaaagattcgtgcccccctttttgcacactttttgtagttgcatcctatccggagccatatcaaaattgtactgacactgcctaatgaaggcaaccattaggtccttccaagaatggactcaagaaggttcctaagtcagtataccaggggacagttgtcctagtaagactttctcaggaaaaatgtatcagcagtttctcatcttttgcgtatgcccccatcttctgacagtacatctttagatggttcttggagcgagtagtcccctta

SEQ ID NO: 23054 - DNA, 437 bp, Glycine max
  unsure at all n locations
agtgaccatttgaataactcaagagcttccattgctcaattgtgtgcgtctcgaacattatgcgccttaatcggacctccgagtgaaaaggtatgaccatttgaataactcaagagcttccattgttcaatttcgagcgtctcgatatcttatgtgcctgaatctgacctccgtgtgaaaagatatgaccatttgaatttctcgagagcttccgttgttcaatttcgagcggctcgatatcttatgcgcctgaatcggacctccgagtgaaaagttatgaccatttgaataactcaagagcttccattgatcaattacgagcgtctcaatatattatgtgcctgaatcggacctgcgagtgaaaagttatgaccatatgaattgctcaagagcttccattgtccaatntcgagcgtctcgatatataatgcgcctga

SEQ ID NO: 23055 - DNA, 412 bp, Glycine max
  unsure at all n locations
agcttcattttgaatcaagattgattcaaagaagttttgatgataacaaaggtgatgacaaaaagctcaaaggtcaagaacacttcataataacaaagatgatgatctcaagaatcaaagaatgagttcaagatgttcaagattgaatcaagaacacttcaacgttcaaagagaaaatttgatttcaagaatcaagaatcaagtttcaagattcaagttccaagaatcaagatcaagattcaagactcaagattcaagaatcaagagaagacttaatcaagataagtatgaaaaagttttttcaaaaactgagtagcacatnggattttcttanaatctttntaccaaagagtttttactctctggtaattgattaccagtagcaaaatggttttcaaaaagttttcaactg

SEQ ID NO: 23056 - DNA, 527 bp, Glycine max
  unsure at all n locations
cagcagggaacgaaggcgcgcgggcaaggggaggcaacggagggacgacancccccaggggagcgtgaatgagccatgagaccgngcatctcaaaccaagccgcccgagcaaacaccgcaggaaaggagaagattagggcgancaagcgaccaacggcgaggatagggnggaaccaagctcaagcggcgacaagaaagtgcatcangacaaggcgaaagaaggaaggaacccgcctgcaaaaaagaggcaaaagaagaagcgagacacagcactgctgcggcgacggccaaacaaaaggaggaaaatggacgacccagcgacgcccgagagcacctggacaaagaaggcagggaccaagtggaaaaccgaaattgagacaaccccataacgggcggagaaaggcgcaacactacaactgcacagcaatcgcgtgcaaccaagccggacaaaggtagcagtggggggtgcatacctgccgtgaaacaaaacaggaaatggaccccagacagggccaaaaaaagaaagg

SEQ ID NO: 23057 - DNA, 408 bp, Glycine max
  unsure at all n locations
agcttctcttttggtttggntattnccagtttcctgaaaatatctaaaaatctcaccaaatgacagtccttctccttcttggaaggtaccacaggatatggtactttcatactttcgttcacaactttatcacttcaactcttccttccttttcatttttttcatctttttcaatttttttattttctttttctttttctacttctttttctttttcttggtcgttaaattcttttttcttgaccattatttgtttctttntttcctgattgctttcacctctcacatcatttttcttgtcatcagtacctttcttttcagcagctttcttcttatgcacaacactctcctcatcctcatcctccacaaaccttntactccttatcatcacagctttgtaaattaaac

SEQ ID NO: 23058 - DNA, 423 bp, Glycine max
  unsure at all n locations
tcatctatgtttcttggttcaatctgagaagcaaaatttatgctattgtataaaatcttgagtctagagcaagtagatactccttttgatatttcgccaataatgttgtccacggagaggtctttntgagttctccattctctgggagatctttaagaggtgtgatagtgatttctttgctttgttctagctcttcaactttagtttcatcttcaagtgcaatatccttatcctgaaaacctatatcttcatcttccaaagaaatntcttgaacaatagagttagtttcatcacacacaacatgtataggttcttccacacacaaagttctcctattaaacatctatatgctntgctntgcaatgaataaccaagaaaaatagcctcatcgtctttagcatcaaatttgttgagatattcttt

SEQ ID NO: 23059 - DNA, 408 bp, Glycine max
  unsure at all n locations
agcttcagattaaaataactcaaaatctaggcatctaaaccccctcaatttagtggatttttcaaggtttgagaagtgaaaatgagaatggggtaaatttggagcaaactttcacctcaaacaagtctatatcatcaatctaaacttgctcaaactggttttacgcctaaaattccaccgaatcaaaatttgactcctcaacacccaatttttaccctagaaatggttcttgccttcactttggtcatttgttttcctctcttgcacagcccaagctttctcataagtcctaaatgacatttcaaactaggattaactcattntaacctccatttaccactgaatccagatttggccttccaaaccctcaaagcatcacactnttccactcacaggactacattctca

SEQ ID NO: 23060 - DNA, 263 bp, Glycine max
accagtctttgacccatgaacaataactagtagaggacttcgcacaagcctacaccgagaaggaagcaagagggagggtgattgatgcattgcatcaagaagcgaccatgtggatggataggttcgccttgaccttaaatggaagtcaagacctcccgcgactactagccaaagcaaaggccatcgctgaagtgtgttcagccccagaggaaattcacgggctaatcaattactgtcaacatatgatagaattaatgggccat

SEQ ID NO: 23061 - DNA, 378 bp, Glycine max
agcttgctgccacggttttttccgactatgctcttgtgtggtggaacaagctacaaaaggagagagcaagaaatgaagagccaatggttgatacatggacagagatgaaaaagatcatgaggaagcggtatgtgccggctagttactcaagggacttgaaattcaagctccaaaaactaacccaaggcaacaagggggtaactatggctcgatttcttaatggatgtgctcatgattcaagcaaatattgaagaagatgaggaggtaactatggctcgatttcttaatggtttgactaatgatatcccgtgatattgtgagctgcaggaagttgttgaaatggatgatttgcttcacaaagcaatccaagtggagcaa

SEQ ID NO: 23062 - DNA, 439 bp, Glycine max
tctcgatatgttatgcgtctgaatcggacatgcgagttaaaattatgaccattttaatttcccgagagcttccgttgttcaatttctagcatctcgatacgctatgtgcctgaatcggacatgcgagtgaaaagttatgaccatttgaatttctcgagagcttccgttgttaaatttctagcgtctcgatacgctatgcgcctacatcgaacatgcgagtgaaaagttatgaccattttaatttctcgagagattccgatggtcaatttcgagcgtctcgatatgttatgtgcctgaatcggacatgcgcatgaaaagttatgaaccatttaatttctcgggagcatctgttgttcaatttctagcgtctcgatactctatgcgcctgaatcggacatgcgagtgaaaagtataaccatttgaatttctcgagagcttc

SEQ ID NO: 23063 - DNA, 410 bp, Glycine max
  unsure at all n locations
taggttgatgtagtaatcccatactcgtacccgtacctgacttttgattattggggaaaactcaaacccgaacccatactcgatcaacttgggtattacccgtcaaagtcggaacgaatacccacgggtatgggttttcttgcaatgtctaagggggagagaggaaagagaaggaagaagaaggtggaggggaggggaagaaggaaagttaggagagaaggaggggaaaaaaaagaaagaaaaggaaaaagaaggtagtgtacacaatgccgaanaagaaagaaaaaagaagaaaaaaggaagcttaacggtggggttaggggagggagaaagataaaaaaaatatttaaaagtgaaatctacgtgagacctacaaaaaattgtttaagatctcaaaatgagatctacta

SEQ ID NO: 23064 - DNA, 373 bp, Glycine max
  unsure at all n locations
ggaccttgatctagctttataaatgcctattaatagacaaatgctgttttccgtatttatttggtttgaattcatacagggttgatcgagactgacttatttgtaatgaaatggaatttaaatttgtaattaagaacctgggtagaaagagtgaaagatagatctcactaaagtggtgagtaattntaccatcaaatttaatcattcataaaatcgatatatattaatttcatactaataatataaagaaaaatatcactcatttatgaataatcacacttaactaagaagtgtcaaaattatagcattaattcaaataaaaaaaataattaaggaatgtaagtatanattattaaattaaaaacttcatatg

SEQ ID NO: 23065 - DNA, 408 bp, Glycine max
  unsure at all n locations
agctttntaatcacattgcatgtctgtcagtgagactacctaaaggaaaccatgaaataagttgaataatgataagctttatgatgatatcctattcaaatatttgaaaacaagaaacaaatgaaaacaaggtgatatttttataataattaataaaaaaaaaagtgttctgattttcgattcaaacaggaaaatatttcacagcagataatgaaaaattataacaagcaggtaaatccatgccttgtgaaaaaccatcactttgctgcgcaatctttctttttcaccatggccttctatagcaagcagcaaggatgttgaaggaggaaaagcgaattgtgaggttaacccgaaagaataaagtgactggttaatgaaatgcttcgcaacatccttgactgtggagag

SEQ ID NO: 23066 - DNA, 393 bp, Glycine max
  unsure at all n locations
taactgtaaaagaccatggatgacanctgtaaagaccttttgaaatttcctgctcatgaaatcactaaaatctttaaagccatttcatgcatatacttggggcgaagtctctttgataaatctggcataaattaaaaaaaaaatgaaagaaaagggtagttcccaatgcaacattccaatgactttttcttttcaaaatacaaatggacaaaaatgccctagtgagttagcctaagcagagttcagtccccaccacaaggcccttcatttccctccaaaaatttgtttttcgctaacaaaataatgaattgccttccaattcaatcacctgagttgtggagtcagtaagtgcttgcagcaactacctttgctttgtttaattgaatttttttt

SEQ ID NO: 23067 - DNA, 407 bp, Glycine max
  unsure at all n locations
tttagcttgtagaatggctagacatgatacatgtcagggcttggtttggttcaagggtaaaagggatgccccacattatttccatgacacaaatgcaaaaatgatgatttggaaattttatgcaaaactggtcatgcatgcacctatgcggacactcaagtgtcaaatttttatggtcatgtgatgctagggcttangatttatttcctctattttaaatcaacccaatgtttccaaaatatgttcttttatcaatttgtgcattcattcgagtccatttcgggcgtccggngaaatttcacagcattcacccttcangtgtagacancgtttttttctcttcaaaaatcggtcatgatncaatgaattttttttcgaagaagagttggaaatcatctcttttcaaa

SEQ ID NO: 23068 - DNA, 340 bp, Glycine max
tgagatgaagaagtgttgaaaggtgaaactttctgcttttattgaagaccacagagtggtacctggagatatgtcgcggcggtcacgagaccttgaggacgtcaggtggggtgctattgcccaaaaccaagcttgaccaatcccgacccaacccgggcatagtcggtcagtgagaacatgtgacgtacctaagcaggcgagctcctggcagtcaacagataaaaggaagacaagaccacagagcaaggaagcttgtggtggctggccaactgtgaattttgtgtaatatgtggattgtggcctctggtaatcgattaccaagggtgggtcatcgattaca

SEQ ID NO: 23069 - DNA, 407 bp, Glycine max
ttctgcttgaaattgaaaacggaagctctaagaaaagtcaaacgacaataccttttaactcggatgtccgattgagccctgtaatatatcgagacgctcgaaattgaaaacggaagctctaagaaaagtcaaacgacaataaattttgactcggatgtccgattgagtctcgtaatataccaagaccctcgtaattgaaaacagaacctctgagtaaattcaaacgacaataacttttcactcggatttccgattgagtcccataggatatcgagacgctcgtaatttaaaacggaagctctgagaaaaatcaaacgacaataacttttaactcggatctctgatcgagccctttaatatatcaagacgctcgaaattgaaaaccgaagctctaagagaagtcaaac

SEQ ID NO: 23070 - DNA, 460 bp, Glycine max
  unsure at all n locations
tgccatgacttgtgtcgtacattncnggacactatgaaactcagcttccgtttaattacgagcgacccgaactttagtttcatatcggcatccgagtcagaaggtttgtcgatgatttgttacagcctccgagcccatttcgagcgcctggatatattatagggctcaatcggacatcctatgcaccagtcattgaccgctgacctttctcagagcttgcgctttcacttaccagcgtctcgatatattacaggactcaagctgacatacgagtcaaatgttattgccacttgactgatcttagagcttccgttgatccattacgagcgtctagatctactacaaggcccaatcggacctcctagcttaaatgtattgtcggctgactctactgaaagctccgcttaacattccagcgctcgattattacaggcggccccggacatcgagccaaaggttt

SEQ ID NO: 23071 - DNA, 391 bp, Glycine max
gctgatctttcaacatcctccatcttttagaatttccaaagcatattttctttgcgaaatgaatatacctttcttggatcgagaaacctccatgcccaaaaaatacttcaagtcacccaaatatttaatctgaatcattaccagttatgaggatgtcatcaacatagatcaataaggcagtaaatgatttgcctttcttacatgtaaacaacgaataatctgcttttgattgaataaatccagcaccttgaatagttgtaaagaacttggcagaccattggcgagaggcttgttttaatccatataagggattgttgaggtgacacacaatgttctcccgctgtcgctgaacactaggaggaagagacatataaatttcttcagaaagatc

SEQ ID NO: 23072 - DNA, 426 bp, Glycine max
  unsure at all n locations
tgtccctgacaccaaacattgctcaatattttatttttgatttttcaaaggnaataactaatagggtgaaatatattttcaatccccacattccttccggtactttcagagaaagttagttttagtccttgaacttcaactttgatcaatttgatacccctgaactttacaaaaggcattggtttttctcctcccaaaggtgaaatctgtgggacaaaaaccactgttgttctaagattcatgaaccaaattgatcaaagtgaaagtacggaaactaatacgagactaaaaacatatttgtcccctcaacttggtttgagttctagaactttgatcaattcggtcccctaaactttacaaaaaccattgttgtttcctaaacttcagggaccgaattgatcaaaatcaaagtacagagactaatac

SEQ ID NO: 23073 - DNA, 398 bp, Glycine max
agcttgtgtattgctgcattctactaatatatggaattgcccactgctttgcctgagaataacaattgcttgaccacaacagcgctggaggcggcaagggacaatggtctttcaaataaacctgttgtacatgaacaaacattatatcatgcgctgaccgtgccaaacgaaccagcgaaatcattgcataattgttatactaactatattcaatgtacctgaacaaaatgatttccaaacacgtgaccgacacatatgatgcggtggccagaagagtcaggtggtggttgacttctaagagggaaaaatgtcatgcttttttgttgggacaacgatacaaggattatgttataccatgaagcaatcacatatcacatgtccgttatatccatccactt

SEQ ID NO: 23074 - DNA, 333 bp, Glycine max
gttacctagtactcaaagataccacctaatttattattaaactaggcggacatggagagatgctttcataataaatcttataagcgctaacctgaaggcactatagctgatttgatgaacatgaagaaaatggttgaagaattaacaatagacttcatagaaaggttcataacagctggaagtcattgttcagtacaatttccagaagtagagtgtgcagacatggcaactatgaatatgcattctaggctgaaagaaaaattagtggctcaagagtatagcgaccttatccagctagcttgcaaggctaatcatatagagcagcgtatacat

SEQ ID NO: 23075 - DNA, 339 bp, Glycine max
agcttggttggagggacttacccggggaagagtgaatattacctagaacgaacgatgaatgttgatgatcggccgtgaatcttcgcgtaattactcacggaaacgttacagaggcgcctccgctcggattgtattcatggaaataattatgctcatcacattcaagagagggagaagagcctaaggggctgaacccttctcttctgcactgtttgccctatatatagcggaataagggagaagctggccgcccagatggcccaagcgagcaaggttgcttgctccagatagaacggcccaagtgggcctggctgctattgacacacccacttttactaa

SEQ ID NO: 23076 - DNA, 409 bp, Glycine max
  unsure at all n locations
agcttctcaaggaagctatctagtctataaatagaagcatgtgtaacacttgttgtaactttgatgaatgagagtcttgtgagacatacttcaaagttccacttctctccctcttttattccttcaatttcgtgctcccccctctctctttctctccctctttcttttcctccattgaagcatccttccaagcttcttatccaaggttcatcttggtggtgaagctccttcttccatggcttattccctagtggatggcgcctcctctcacctcttttcctttgtctttcgctgcatctccatggtggaaaatcaccattaaaggacctcattgaagctcanagatccagcctccatagaagccccacaagcaagcttccatcacataagtctatggcactttcgtatg

SEQ ID NO: 23077 - DNA, 431 bp, Glycine max
  unsure at all n locations
ntgctgatttggttnttgtcggcaaaaagatcgaagttgtcttagaagaggcaaatttgattatcctgctttgatgaatatgaagcctanggcaaatggagagaataaggagggaggaacccatgctgtgattgtcatccctacatggccaaatttcccaccaactcaacaatgtcaacactcagccaatatcagttattctcattacccaccaccctaccagtcaagaacacccaatcatccacaaaggccacccctaaatcagccacaaagcccgcctgccgcacatccgatatcaaacaccacccttaacacanaccanaacactaactagggatggaattntccagaanaaaagcctgtagaattcacttcaattccgggtgtcgatgctaatttgctcccatatctactcaataatgcaatggtag

SEQ ID NO: 23078 - DNA, 409 bp, Glycine max
agctttgccacttttatctcttcgtgtagaccccaggggactagagggttgccgagtctcagatgacaatctttcttgtgttctgcaacataggtggtgtccccaaagattttataaatttacttgcaagagcaaaccttgccaaaactatcactacttaattttgcagttccagacagggtgttgattagattcattataatatttatgatttggaacttgaaacctacttcagaaatgaataaacaattctgtatttgaaaatatctcttttgaaaagctttactttatcacattaataaattcatgcacacccaagaaaaaacagaatcacgctaatgttattcaagcatttccttaagtgccccaatacctgactctccccatagaagacggcaagggacttctt

SEQ ID NO: 23079 - DNA, 389 bp, Glycine max
tacaaactcagcttgagctggtcagattcaagggagaggaaccaatttattcatatggagagaatgcctatgggtctaagggtaagaagaatcacgagcgcgatgatatagacaccagagaagaagaagagaggagaagtctcttgcaatcagcacttaaccttgttgatgagagtgacttgtcagatgcttttgatcgagttgtgctgcttagtgtggaaaatgttcgtaatgaacactgtagtttgcagagtgaaacagtgaaggcttgagagccaggtggagtgaaaggtcgtcctaagaatcaagcgacaaacaaggaaaccagagatttgaggaatcttctgatgatgtgttcacaatctgtgtatgccaatgacaaaagagct

SEQ ID NO: 23080 - DNA, 398 bp, Glycine max
  unsure at all n locations
agcttgccttatagagttccaggaaggataaagtggctgaagggaccagttccgctctcgaatatgacagccaccgttttaggagcgctgagcaccagcagcgcttcgaggccatcaagggatggtcatttctccgggagcgacgcgtccagctcagggacgacgagtataccgacttccaggaggagatagttcgccggtggtgggcatcactggttacccccatggccaagttcgacccagacatagtcctcgaattttatgccaatgcttggcctacagaggagggcgtgtgagatatgcgatcctgggtgaggggtcagtggatcccgttcgatgcggatgctctcagccagttcctgggataccctntagtgctggaggagggccaggaatgc

SEQ ID NO: 23081 - DNA, 376 bp, Glycine max
catgtgactgaactttgcccaatttatatgaaataaaataaatgcattctcaagttttgtttgctgaatgctacaagctttgcaaaacgtttttgctgctttagtctattctgcaaatactagtattgattatgtgttggagtcattatttgcctctgctaagccttctccacagtctggtggcattgctaaacaagctttgcattcgatagctcagtgtgttactattctatgccttgttgctggtgatcagaaatgttcatctacagtgaaaatgctcactgacattctcaaagatgacaacagttctaactccgtaagcttttctcttcagtgaaaatgctcatctacagtgaaaatgctcactcacattctc

SEQ ID NO: 23082 - DNA, 407 bp, Glycine max
  unsure at all n locations
agcttgtattctttcttcttttttttccaattcaaatgtgattttttttttgcattgtgatctataacaacaaatttcaggttatatttgcactaaaagaagaggatgtagtttttgtctttctttacctagttataaatttattgtagttatcagtatgctattttaggggctccatatattttttggttttgtagagtcccaaaatattgtggatagtttgaaaagtgatttgggtttcatttctacttattttgtcattgcttatttacaatagccagttgttcatgtttgcaagttaaaaacaaaaaaaagcacatcgatagtgtttcattggaaaagtgtcatctacaattntgaatatagatactgcttatttaatgaagcataatctatatgtttatcat

SEQ ID NO: 23083 - DNA, 429 bp, Glycine max
  unsure at all n locations
gtggtaatcagagcacaagagcttcaagtatgtgctttcttaaacctccattaatttttgctttaccttatcttctattgttgtttcttcatttttctccatgtatctcctcacatgtcttgagctaaatgtttttaacatgattctttaaagtttccaccgattaaacttgctatagaagctagatttgattttctatggttcaaatttcttgttcttgttcttgaaccataaattatgttgagtttaggttcctttgagttttgtcttgttcttttttgtggctgaaacctaaaccataaaattcttacaaaaatattaaagtagaagaaaacctcaaaaatctagattgacttgttcacctattgtagttntgtcatagaagtcatgtctagtcatgacacttgtcacataagatttcttatgttg

SEQ ID NO: 23084 - DNA, 406 bp, Glycine max
agcttgaagtaaattcaaacgacacacaactggatctgagatttccgaatgaattccgtagtatatctagacgctcgaaattcagaacaaaagctctgagcaaattcaaacgaaaataactttttactcgtatgtccgatcgtttcccgtagtatatcgagaccctcgtaattgaaaccagaagcccgtagcaaactcaaacggcaataaattctaactcggatgtccgaatgaatcccatgatatatcgaggcgatcgtaattgaaaacagaagctatgagcaaatgcaaatgacaataactttttactcggatgtcggattgagtcccgtaatatatcgagacgctcggaattgaaaacagaagctctaagcatattctaacgacaataactttttactcggat

SEQ ID NO: 23085 - DNA, 382 bp, Glycine max
  unsure at all n locations
tctgttctgaatttcaagcatctcgatagactacgggttacaattggtcttccgagcaaaaagngataancgggggatattgcttacagaattatgctccattatcttgaataacagaattaaagagaccttaagctattgtcgggtgatttttcaatttctattacgagggtctcgatatattatgggattcattccgacattcaagtaaaaagttattgtcatttgaatttgctacgagcatctggtatcaattacgagtggctcgatatactacgggacataaccggacatccgagtaaaaagttattgtcagttgaatctgctcatagcttctggtctgaatatcgagcgtctcgatataccacgggacacaatcaga

SEQ ID NO: 23086 - DNA, 409 bp, Glycine max
ggtaatctttgagctgcaaaaaatctaataggaaagatttgcttcgtttgttcttcaatgacaacagttaatatatagggtctgattagggtaaatttttctagaagaactatgaaaaagaaataaaatgattttttttcgtaagttaatttgaacttatgcacaaactaagctctaattctttttttcatcttttagagaaattattatacaagagcttttacaataagtaaaaatatgaaaattttcttatgataaatccatttcatttgtaattattcctagaaatccttctggacagaaacccatagactaaactcaaaaaggcctttgacgcacgatacctccgctgtgtgggttaaaatagtttaaatattgtttaactcttccgttagtaaacaagcgacac

SEQ ID NO: 23087 - DNA, 406 bp, Glycine max
  unsure at all n locations
ttagctttgcattagatgcttgatctccctctgccatcacgctctccgatctctgtcaccgtcaacccttcaacctcctctagtggaatttctctttttcaaaactatcataatctgatgagatgaatttgtgatttggggttgtgatttgtggttctttacttgttttaggttatgttcttgttctgggttatgaattatgttcttcatttggattcttagatgttgttcttgcgtttacaaaataaacatgtttaaagaaaaaaaagtattttgtgatgacttttaactgctaatggagctagatttgtcttgacggaagaattgttttgaaccttttagttaagataaataaccaaagtgaactttntttataaaaaataaactaaactganaaaaaaagata

SEQ ID NO: 23088 - DNA, 434 bp, Glycine max
agaaactcagccgagctaagccccagagcataaaaatcttgtgttcttttgtgccaatcattacttcctgcataaaccagaccttagaaacaatagtatctttggtggtcatcaatttccaaccttgctttcctagcatgacaagattaaaaagcgtgaagatgcttgaaccccatacctccaaattctttgttcattgtcaacctctcccaatttaaccatttatacccttgctcgagtgattgttacatactaccccaccaaaaagagttcattattttttttctaattcaccctgaagagtagatggaaatagaaaaatgcttatacaataagtgggattgagtgagctactaacttaatgagaatttctttatccaccttggaaagatactcaatggaccagggatgaatacacatggaaagtctatctt

SEQ ID NO: 23089 - DNA, 403 bp, Glycine max
agcttgtgttattcacagcctccaccgctagcttggagtcactttcaatccataactttctccacccacgatcaaacgcaatctcaatggctgacagttcgcttatatcactcttattatattcttcctaaaaatagaataaactttgttatactgatagaatttagtagtagttaggagactttgctgtagtaactagtaactacttgatgagtcataaatgcagctgcattatacaaatgcatagcatctgtattcatttcacaattttattcaatcaatacatgatgtgtggccatatcaagtgggtattgcatggaacgtaacatccattgaaattctaatatgaacttttcagtttatggatgatgttaatcaaatgatacagtaaactagatatata

SEQ ID NO: 23090 - DNA, 421 bp, Glycine max
  unsure at all n locations
tcagtcttatcgctaagcgacattntatccttggctttgcaagacctatngncaccaagcgcaagtcctcacggccttaattgaggtccatgacactaagcgctagtcatggtagctaagcgagattctttgtggcaatatgagcgctaagcgagtacctctcagctaagcacgtgctcctttgtacttaagatgcatcatattagctaagctggccaaggccaggcttagcgagagttgcagcttttctaatctacaggtctcgctaagcagacgtactctcgcgctaagccgagtttttgtgtaaaaaaaaaatattttcaaatttgaaacgtcggctaagcgcacgtgttcgctaagcgagccttggtaagaaaccanatgtctctcttgcttgcttagcacaatagttcgctaagcg

SEQ ID NO: 23091 - DNA, 396 bp, Glycine max
agctttagttttggtcttcatgaattctctctagtgttccttcgtcttcatttttgcatatatatatatatatatatatatattcaacttgaactttacacctatttggtacactacaaaatgtatgggtagtagttttaagttttaacaaaagtaaaatcttaaaatataaacaaaaaactatcatataaggaagtgaaaagtagtttgaatttggggaaaataaataataattaatttaaaatataaatagttgagattcaaaataaaaaaaagactttcatataaacagtgaaaataattaaatggcatttttttctcttttcgctagagacacacatatacaaatgtagttgaggtatcaaatgatataactatgtttatacgttccatggc

SEQ ID NO: 23092 - DNA, 419 bp, Glycine max
  unsure at all n locations
tctagccaaatggactcaccttgcaataatttctnagttatttcctctagagccacgattccctttgcttgttttgaagctcactacaagccttaagtgaaaaaccatgatattaccatatccttaacgaattttggagctttggaattgttttgggaataagcgtggggggtttttgtttcattggacaacttgttttgatggctatgcttcatgatgtattttgggccatacttgatgtacattgtatattggttaaatgatggacatgctgaatgaaatgttgtttctcacaggctccagagtaaaaataaaaaaataataaagttccaaataaataaaaaaatctgaaaagacaagaaaagataatgaataatggtgagtgaataagatcttaaatggcacaagagtgatgaaac

SEQ ID NO: 23093 - DNA, 405 bp, Glycine max
agcttgacctatcccgacccaacccgggcatagtcggtcagtgagaacatgtgacgtacctaagcaggcgagctcctggcagtcaacagataaaaggaaaacaagaccacagagcaaggaggcttgtggtggctggccagctgtgaattttgtgtaatatgtggattgtggcctctggtaatcgattaccaagggtgggtaatcgattacaaggcttaaaattgaagacagggggctaagatggtctctggtaatcgattaccaaggggtgtaatcgattaccaggcttgaaaacgaggtcaggaagctagggaagcctctggtaatcgattaccaaggtgtgtaatcgattaccaggcttaaaaagggaaatgggagatggtggaagcctctggtaatcgatta

SEQ ID NO: 23094 - DNA, 431 bp, Glycine max
ttttggaccttgaacaggcaactaactcttctttatatatcatgctatgtgctcgcgactggtccctttcttcctttcgcaacttgagttcactattgctaccccatagagctccgcgaaatttgttccggccatactcttccttgcgagccctcttggtctcttgttcaagggctcttgcggtaattgcattctcttcccgtaacccggcacactccttccgaacgtgtgtagcggccaacttgaacttctccttggcaagttttgcctttcctaactcgcttttgagagcttggacttcttcgtcctcttccggtgcttcaaaactctctttgctgacgacttttaacttggcgagccaatctaaacctcgtatatgaactttcagccattcgtggtacccaccaatgatgccattacgaatgcctcta

SEQ ID NO: 23095 - DNA, 401 bp, Glycine max
  unsure at all n locations
agcttgcttgcggggcttctatggaggttggatctttgagctttaatcaggtccttcaatggtgattttacaccatggagatgcagcggaaggcaaaggagaagaagagaggggaggcaccatccactagggaataagccaaggaagaaggagcttcaccaccaggaattgctttggataagaagcttgaagaggatgctttaatggaggaaaagaaagagagaaggggggagcacgaaattgaaggaataaaagagggagagaagtggaactttgaagtgtatctcataagactttcattcatcanagttacaacaagtgttacacatgcttctatttatagactangtagcttccttgagaagctatcttaagataacttccttgagaaactnttttga

SEQ ID NO: 23096 - DNA, 300 bp, Glycine max
ccgcttgcccatataaggaatccacagaagattatgcttatctttctcgaaagactgaaaagcggcttctaaggactcctctgcggcctccacataaggcgtagaggatgggcagctcaccaagatgtctacctcgcctgatacgatgaccagatgtcttccactacgaatatcaagatctggtggagtgtatagggaacaactcccactgagtggatccacaggcgccccaacagacagttgcatgggggttaatatccattatttggaaagtaccttgacaggtgtgagggcctatct

SEQ ID NO: 23097 - DNA, 397 bp, Glycine max
agctttgtcttggtttagacatgatttatacatgatgtatgacttgtaggattcaatttgggcaaaattggatgtgggaaagtgtgatttcgaaaatctgcactttatgcagaattttgctgtcaaatatgtgcatcacaattttggctttgtgcagaaaatgcttgtgtatggctggttgtggaaagggtagtatatattgggttctggacattttgtagcagatcccaacggtcaaaatgtatacttatacactagggacttccagtaaaattttcgagtcgatccaacggtgaacgaaatggaacgaaggaaatgttactgcggtctctaagtaaggaaagctgcgattttggtttgtgttatgggcagagatttctgcctctgccctgttttc

SEQ ID NO: 23098 - DNA, 379 bp, Glycine max
ttcatatgtgaaatcaagagcagcctatttccttagattcctctcacagagtggaggttgagccgtgttctcacaatgttcaaaaccacgatgttcaaaattaccaaccacaaaatgctcaaactcaccaataacagaatgctcaagatgctcacaaagtacgaaatgatgcctaactaatatatgaaatgtcctatctatctcaagatcaaagggttgtaagtcacatgcattgcctctagtcatacactacattcagcatgcacaactaagtgtcttcttatgccactaacagggtaagtttgaactacaactaccctctaatgatatccaaatgacttgaaattttgtgagaaacaccctataatcatgaaaagat

SEQ ID NO: 23099 - DNA, 413 bp, Glycine max
agcttagtgtattatgtgggtacccgtcatatgtggtactaggtggcgatcaggcgatggcgcaaatcaactctcccacttccacaagtcaaatataaaccgaccatccccggttgcccacctttcaactgagctcacgcactcctgcgtagcccttatcctcgttcctctcagcatcgggtccccatcaacccctccaagcttccacaatattcaagcaattcaattccaaatatcatgaaactaccctcaaccaagaaaacaaagtagaggcagaaaactctacccaaaacacattcaaataccacaactttccttactcatataccccagtaacattctctttgttccgattcgttaaccgttggatcgccttgaaacttttactggaggttcctagtacataaatatac

SEQ ID NO: 23100 - DNA, 459 bp, Glycine max
  unsure at all n locations
acctatccaatactcaagcttgcttgtggagcttctatagaggctggatctttggctacaattatgtcctttaatggagattttccaccatggagatgtagcggaagacaaaggagaagaggtgagaggaggcgccatccactatggaataagccatggaaaaaggagcttcaccaccaagatgagccttggataagaagcttggaaggatgcttcaatggaggaaaagaaagagggagagaaagagagagggggggagcatgaaattgaaggaagaaaaagggagaaaagttgaactttgagttgtgtctcacaagactctcattcatcaaagttacaacaagtgttacacatgcttctatttatagactangtagcttccttgagaagatntcttgagaaaacttccttgagaagcttctttgagaaaacttccttgagaagctagagcttacctac

SEQ ID NO: 23101 - DNA, 411 bp, Glycine max
agcttctctggaggtgagcttagttatgagaggggtgtgcgtagttaagctctagcttctcaaggaagttttctcaaagaagcttctcaaggaagttttctcaagaaagcttctcaaggaagctacctagtctataaatagaagcatgtgtaacacttgttgtaactttgatgaatgagagtcatgtgagacatacttcaaagttccacttctctccctcttttattccttcaatttcgtgcttccctctctctctttctctccctctttcttttcctccattgaagcatccttccaagcttcttatccaaggctcatcttggtggtgaagctccttcttccatggcttattccctagtggatggcgcctcctctcatctcttctcctttgtcttcctctgcatctccatg

SEQ ID NO: 23102 - DNA, 419 bp, Glycine max
  unsure at all n locations
ntaagatgaaaaccatgatatcaccttacccttaaattatnnatgatctntggaatagnnntgggaataagtgtggggggtatgtttcattggaagatataatttttggccatgcttaatgtttgattttggccatgcttgatgtatctgcatattgcctagttcttgctntaatcttcaaattcgtactgttaaaaaaaaatcaattgctgcaaattttgcaaattcgaactgttncaaaaaaaagaagtgaagttgaataaatgaggtcttgttatgaggactntatttgggagccttggttgattntgttaaattagagggtttgggtttactacttgtgcttaatttccacttattccccattgctcctctattcctttgggatttagctacatattccatatttgtccctacct

SEQ ID NO: 23103 - DNA, 408 bp, Glycine max
  unsure at all n locations
agcttgcctttccccttgatatattngagggactcatggtcactatgaatgacaaattccttgggataaaggtagtgttgccatgttttcaaagcccgtactaaggcatacaactccttatcataagttgaatagttaagggtaggaccacttaacttttcactaaaataagcaattggatggccttcttgcatcaacacagccccaatcccaacatttgaagcatcacacttaatttcaaaagatttttgaaagtttggcaacgaaagtatgggggcattagttagctnttgcttaagaacattgaaagcttcttcttgtttctctccccatttgaaaccaacatttttcttgagcacttcattgagaggtgctgccaatgtgctaanatccttcacaaatcgtcta

SEQ ID NO: 23104 - DNA, 440 bp, Glycine max
  unsure at all n locations
ntgatgaataagaagcctggggcaaatggagagagttttaatgtaggaggaacccatgctgggactgccgttcctacatggccaaatttcccaccagctcaacaatgtcattactcagcaaatatcgacccttctcattacccaccaccctatcaaccaggaacacccaatcatccacaaagggcacccctaaatcagccataaggcccgcctgccacacatccaatgccaaacaccacccttaataaaaaccaaagcaccaaccaaggaagcaattttctagcaaagaagcctatagaattcacctcaatttcgggggtcgttgctaacttactcccatatctactcgataatgcaatggtagccataaccctagccaaggttcctcaacctccagtttttcgaggatacgactcgaatgcaacatgtgcttatcatgg

SEQ ID NO: 23105 - DNA, 410 bp, Glycine max
  unsure at all n locations
agcttcatgttggcctctttgtggtctatattttatgttggttcgagttggtagttttttttttttaaatataatgttccaatctaactcagaaaagaaaaagaaaaaaacagaaatgaaattattcatgacatatgagatacagtattttatagatggtggtggcgtgagcctgngtcctctacgtgttggtcaatcaggaggttgaaatgcacgcgtatatagatcgtatttatagaatatattctggcctaattgcttagactaattattatcaaatacaacaaacactattttatgtatataatttattcttttactagtacatatatgtatttttctttcatatatatgtccatgcgactacagatatttaatgattataaaaaaaatccctgtaaatgtttact

SEQ ID NO: 23106 - DNA, 439 bp, Glycine max
agcttgtacatgacatttacaagatgcagtgacatatggtttcaactttattcattataaaaattggtcatgctcataatcacccaattgttgacagttgacctgaaaattacatggttaagagaagggtgtagctagcataatgcagaaattgacaattaaattaggaccacaaataaggagattttttttcaaaaagaacattacaattgataaaattaaagactgtaagaataactatgaccagatgtaaaaagttctgacatatcaatgtaaaattctaaatgtacatatgacaaagaaggcagcttcaagtttggaccaatattgtgctgccaagtctagaagattcttatcaatttaagtcatatatttcatttgagcacaatgagaacttaagttattgtattattgaggcaacacagaagaacagtctaca

SEQ ID NO: 23107 - DNA, 406 bp, Glycine max
  unsure at all n locations
agctttgtgtttcacaattattggttctactgtttactctttctacacataaaaattatcaaactatttttttttaaacatgttatactaattaatttgttagaatattaggtttgttatgagagggagggaaggaactcatgaccttttttctttttctttctctcttaatcatgttattgatagagagtattcatcatctattttattaatgattaatctccattagaaatctaactatctgaattntctttttcaatcatatttttttcatccacaaaattcaaaatcaaaattntacttaatggaccgagtctaatatcactcgagccaactacttatntaatttaaacttatgtttaactaaactagcanattgcaatgttgttcanaattcctacaaatt

SEQ ID NO: 23108 - DNA, 412 bp, Glycine max
  unsure at all n locations
ntgtcatcaacatcattcatagtcataancnctnggttttgtatatacttattgcataagtaggtgataaacaaaattaaaggagagaaattgttacatgaatgtataagaacatcttctgtcacacccgtgaaattgaaaaaaaaacattaaaaatattattatgcaaataatgtaaaaagaagaaaaatgtaaactggaagacactgaacaaattgagaaaaaaagtcagatagtaaaagagggaatgaagcatgtaaaggggtggagaaataatgcacgtggaatttaaaatagaaattagaagatatacataattgttacacgtattaatttcagaattaaattattcccaaaactaactatttttaaaaattaattttctttttttaacatatttctaanaatatat

SEQ ID NO: 23109 - DNA, 408 bp, Glycine max
tttgcttcaagaaaaatggccttagcaaacttcttatttccagaaggaaattcaatcaatagacctccaatctttaatggagagggttaccactactggaaaacccgaatgaaaatttttattgaggcaatagacttaaatatttgggaagccatagaaatagggccttatatacccaccacagtagaaagaatcacaatagatgggagcacaacaagtgaaagcataacaatagaaaaacctagagatagatggtctgaagaggatggaagacgagtacaatacaatttaaaagccaaaaacataattacatctccctgtggaacggatgaatatttcagggtttcaaattgtaagagtgctaaggaaatgtgggacactctacaattaacacatgaaggaacaaaa

SEQ ID NO: 23110 - DNA, 408 bp, Glycine max
  unsure at all n locations
tgngtgaagagatagattaanaagacttttatcnttttttgcaatagnctattcggaaaaagcagaccttgcgctaagcgcccaatcttcacgcgctaagcccgagcttgctcgcgctaaacgcagagacccctaattggttagctgaatagttcagctaagcgcatatcactgtgctaagcccaacatcttcactataattgaaacttaataagtgggcttagcgtggatgatgcgctaagcgcaatttcttctctggaaaaatttcattgttggcgcgctaagcacgctgtcttgtgctaagccctagatccattctggaatttgagctttcaagctgggctaagaagggtatgatgcgctaagcaccaatcttacctgttgcgctaagcctgaactactctctgt

SEQ ID NO: 23111 - DNA, 311 bp, Glycine max
  unsure at all n locations
taagcttgtgcttaggnctgcggaacgcgccacattttgatgtcaatcaacaatatggaataatatatattcaggagacttacactatatcacaagtaataaaaatgaataaacaaaaccaaaaaacagactgctcaggagctctcactcgacagaaataatgaattgaattgacagatgtcaacaaaaagatattttacaacaaaacatattgcattcattaagcatcagtaaacctgacaccgacacccccccccctccctgttcctgtttgactcaatatgaacatcaatttactctccattgaacgg

SEQ ID NO: 23112 - DNA, 175 bp, Glycine max
tatggcgaactctcattgtgataaactacatatgtccaccaatttctatacaagtcgttgaaataggagctaagataaacttgacgccatctttggagttatttataaaaacaaaagacgcggacagagaaattttaaaaaatcacatatgcccatatctgctagtaaaaggctc

SEQ ID NO: 23113 - DNA, 409 bp, Glycine max
tttaagtctttgaggtatatatgcaaactcaacttgtccctttctttgagtttctcatacttataatattataatatgtttaagtcccaataaacgaattttcatttgggtcatgtcatcacttcacttaactgacgacatgaactcatgacaaaagttttaatatattaagcacttaaaacaaaattcatatcatttattaatatcttaaaggtatttaagtctatattatattattcactctctcactctgtatatatatatatatacaggatgttgttgatatcagaaatctcagtctggtttacactcttgctggaggtaaggtcttttataactataagtttttaggattaatattaatataacagaagatacatgcatgataaacattaatcagcatgctgtg

SEQ ID NO: 23114 - DNA, 431 bp, Glycine max
  unsure at all n locations
tgtacgtgaattttcaagacttcagactcttttctctttgtcttgngaaatagattcagagcagtcacattttcatgcattcaatttattttatatttgttctaaatttcagtagttcaattttgaacaactgaaatttggaattcattttttaaaattaattggtcgaaataaaatatgagttattcaatcttcatttgatagttccaagttactaaatgcattgaaaagtgaacgcagaggatctgatcctctgcctcagtctttcagtcaatgataggtattctcacacaaccttccaagctagcttgctccaattnttgcaaaatgcctcaatcctaatagtattaaatcctatgtaagagtcacaacatacagtacataactgaagagttattannatgtaatattattgtctaattaccctttaa

SEQ ID NO: 23115 - DNA, 401 bp, Glycine max
  unsure at all n locations
ttaagcttttaattctatccttagatcgtcacctagccacataaactgtttctgccggaagcaaatacataaatagaattgtgaaattgaactttgtagttttagttgatctgacttcactaatctgttgacctttataacaaccgaactctacactacataggttttagcttcaccatgctgtttaggtttagaggcgttcttgtcatatgggcaatgatcactttgcctaaatctataaatggaggaagttgagttacaatgatgattgcaaattaggctcgaaattatatgtgtatagaatcgttgagctttatttgaagtgaacatcacgaatttccggtattggaaatattggacattacgcagaccatgcttctttggttgacattgntaaatga

SEQ ID NO: 23116 - DNA, 110 bp, Glycine max
  unsure at all n locations
agagagctagttaacaatctattaagacaatttccaattcatactcttgatgatgggggttaaattaacactttcttggagggggcaggcaccccccccnggacccacat

SEQ ID NO: 23117 - DNA, 355 bp, Glycine max
ttagcttgatagctttgaaatattggatgctatatgtaagctaatgaagatctcgtgcttcaaattacttggaagaaagatcaattaggttattcctttttttttttggattaataagggtaaacaaacataaaatatataacttacaacactttgttttttggtatttttgtcagtgcaggaagcaagacagtcaaatagtctatatcaatacttaatgatagagttcatcacccaatctttgttcttcatgaccgtttaatacttataatgacacacattacataatatatataatagaacaatggatttaatcatcaactcagtagaaccacacatgtaacaaacgcaaaac

SEQ ID NO: 23118 - DNA, 433 bp, Glycine max
  unsure at all n locations
ttggacatttgaatatgaaatgaattttttnatattttattttgctaaagagctacaaattagccatgagagttgaaagatctaaacgagaactttatatatccatctttatgagtgaaatttcttcaaatcttaaataaatgaacaaaagaagtaggcaatataataagctataaagaaaggaacaaacctctattcttggaattggatgaccgtgagttgtgatttgtctttacttgtcactattccaaatcgtaagcaataaactgaatgtgagaaaaaaagagcagatttaggaagaaagctgaaatatgttggcaagctaaacatgatttaagcatatggatggcgtactactagtccgaagaanaccaagatcaagttaaagagcaagagaatactcagagcatgacgaaagaaaccagaaaacata

SEQ ID NO: 23119 - DNA, 396 bp, Glycine max
tgtcttttcaagtttcgagaccatgctggagagatatggattgggtgtaactggagtccagaacttagactagtgaagagagggttagccaaacttcactaagattattgtgtctggatttctaataaatatgggtcatattaacgcgagtagtatacatacccaatataggtttgatccttattaccgctacgaaaaaaaaaaaagactaaaatgcatatatggaatccattattgcggactaaacaaatacatatcgctaccttaataagtgaggcaaacagatgttaaaatgtgaattcttagtggctttaacattttgtaatcaaaatatcgctttatactagcattttaaactactattgtttaattaattatcaaatattcttcaaataa

SEQ ID NO: 23120 - DNA, 399 bp, Glycine max
agcttgtaggattatggggtacccatcacatgtggtactaggtggcggtcgggcgatggtgcacaacaagttttccacatccacaatgcgcgcataaacccaccatcccctgttgcccacctccatctgagctcacgtactcccacgtagcccatatccttttttctctcaacaccgggtccccatcaatcctcccaagtttcctccaacatcaaagtaatacaacattcacacagcacaagctatcgcagccaagcaaaacagggcaaaggcagaaaactctgcccaataacaccaaccaaaatcacagcttttctcacttaaagaccccagtaacaatttcttcgatccaattcgttaaccgttggatcgactccaaaattttattggaagtctata

SEQ ID NO: 23121 - DNA, 334 bp, Glycine max
  unsure at all n locations
acaacacatcggtcatcctagacccatatntgaatgcaagaatacaacgtcagtggctataaaagaatagacgttataaaaaaggattcaacgacgcacatattagacaacccgtcngtgttttggtccatttcatcgtcgggttagcaagactcngtcgtgttggtgtccatatcaacgtcgggttcgcataacacccgtatttgttttgtgtcctgtcaacatcggtggcaagctcaccaccgacgttgtttggtagtatgtcaacgtcggtggtgaggacaccgtcattggctctttctcattntaaatgaataaaaatgaagtcttttat

SEQ ID NO: 23122 - DNA, 410 bp, Glycine max
  unsure at all n locations
agctttctagcttttcactggtgtattttgatctccttttggtgctctaaattgtgggaatgtgctcaaatatgtggggcaattttggtttgttttcttgcttgattgggttgaattgggggtttgtatgagatggccctaggcctataatgcattttgaagcaatggggcatgccacattgtccccgttctcttgctattgatgcctaaacgcgcgcctgccaagtgttcggtgaaatgcctcaatggcattagcgcgtgatttttgtagggaaacaacctatgggacaacttggtttgcacatgttttctattttttgggacatgtattcagtttcgtaagggctagagtaattgccccacatatatcctangcctangaaccanagttnttatgcaagagaacacaa

SEQ ID NO: 23123 - DNA, 438 bp, Glycine max
  unsure at all n locations
ccnccagtccatgagccgttgaagcaattctccacttcaagacatcctaaatctctttgcccgcgatggcccatcctcttcaacggcgttcacgctagcccctccatgactagctagcgggttggttttaacatttgggccttcctctcgaaacgatagtcaaccggcactaatcaggtgctgcatcttatacttgaacgggatgcaggagtcaatgttgtgtccgggagctccactatggtacgtgtgacatccttgaaatttctacccggaatttttgtaaacggggtattttgaatgattatatatatatatatatatatatatatatatatatatatatatatatatatgagtattattcagggtatatgcatatatgttcctggtagaagtaggaataaagggggcaagatacgtgggttaggctgattaagg

SEQ ID NO: 23124 - DNA, 409 bp, Glycine max
  unsure at all n locations
agctttgatcttctaccaccgccgccaccatcatcttagaattatattttaatattattagtactttgattttcagccttgtattttggctatattattatggtatttgaacaatttactatttccttatttgcatggtatggttgaacaagtatgttattttactatgtggatttcatagttaatctatttatgattgttgcttcatggttcttacttcatgatttgattgatggtttttcatgaatgttgtatgaatgtttagttatatttgcatacttaaattttgatacgcactttggctttttgttgatgccaaaggggaagagaaatgggattaaatcaagaactcacaagagtaatcaatttaattntaagataagcacanattcaaaaacaaagggggaga

SEQ ID NO: 23125 - DNA, 431 bp, Glycine max
  unsure at all n locations
tccatcaagtggtaatcagagcacaagagcttcaagtatgtgcttcttataccaccattaattttttgctttaccttttcttccattggtgtttcttcatttttctccatgtatctcctcacatgtcttgagataaatgtttttaacatgattctttagagtttccaccgattaaacttgctatagaagctagattttattttctatggttcanatttcttgttcttgttctcgaaccatgaattgtgttgagtttaggttcctttgagttttgtcttgttattttttgtggctgaaacataaaccataaaattcttacaaaaatattaaagtagaagaaaacctcaaaaaatctagagtgacttgttcacctatagtagttntgtcatagaagtcatgtctagtcatgaaactagtcacataagatttct

SEQ ID NO: 23126 - DNA, 411 bp, Glycine max
agctttagtttatgattattatgaatgaaaaatgataaaacctaaaatcaacacaaaaacatgattcaagagtagatctacaaaatttgaaccacagaaatgcaagaacaagtgtagatctaagatttaatcagtttattttttttgaatctactctaaacatcaacaaaccacaagacaatggagaatatacatggagaataagatcaagaacaaggaattaaagagaattcaccgaacaaaaagatagaggaagcaaaagaacatcacctagatgaagatgctcttgataccacatgatgtaagctccatcggagcttgtaggcctaggatcttcttcatcaatggattcctttgcttcttggaagatgaatggcagcggaatggagaaggaagagagagaggagatgc

SEQ ID NO: 23127 - DNA, 428 bp, Glycine max
cttctatggaggctggatctttgagcttcaaataagatctttaatggagattttccaccatggagatgcagcggaagacaaaggagaagaggtgagaggaggcgccatccactagggaataagccatggaagaaggagcttcaccaccaagatgagccttggataaaaagcttggaaggatgcttcaatggaggaaaagaaagagggagagaaagagagaggggggagcacgaaattgaaggaataaagtacggagagaagtggaactttgaagtatgtctcacaagactctcattcatcagagttacaacaagtgttacacatgtttctatttatagactaggtagcttccttgagaagcttctttgagaaaacttccttgagaagctagagcttagctacacacacccctctaataactaagctca

SEQ ID NO: 23128 - DNA, 386 bp, Glycine max
caagctttgatctcatttggagaggttaatgaaacaacgagatgatgcgctccatgagaggttggatcaaatggagaatagagatcataatgaagaagaaaggaggagaagagggaatgatggtgttcctagacaaaaccgaattgatggtattaaactcaacattcctccatttaaaggaaagaatgatccggaggcctacttggagtgggagatgaaaatagagcatgtattctcatgcaacaactgaggaggacaaaaaggtgaagcttgccgccacggaattttccgactatgctcttgtgtggtggaacaagctacaaaaggagagagcaagatatgaagagccaatggttgatacatggacggagatgaaaaagatcatg

SEQ ID NO: 23129 - DNA, 437 bp, Glycine max
  unsure at all n locations
ntgagaaaattcanacaacaataactntntacacggatgtctgatagagtcatgtaatatttcgagacgctcgaaattgaatacggaagctctgagcaaattcaaacgacaataactttttactcggatgtctgattgaatcccataatatatcgacaagctcgaaatagaatcttgatgctctgagcaaattcaaacgacaataactttttactcgaatgtctgattgagtcctgtaatatatcgagacgctagaaattgaatacggaagctctgagcaaattcaaatgacaataactttttactcggatgtctgattgagtcccgtaatatatcgacacgctcgaaattgaatgttgatgctctgaggaaatacaaatgacaataacttttttctcggatgtccgattgagtcccgtaatatatcgagacgctcg

SEQ ID NO: 23130 - DNA, 411 bp, Glycine max
  unsure at all n locations
caagctttattttaaacttggccttctcttaattgtctttgggcttggcgaccacgatcaacaaagtactttcggcacctactatatgttgacttgaccaacgctgttattggaatgctgcgacaatctttcaacaccttattcacacattctgataggttggttgtcatgtgaccatatcgtcgtccagatgtatcgtaagccatgcttcattnttcctttgaaatgcgatcaatccatcatgctatggctggactcagttgacgaaatttttctaagttttgatcanacacatgcttgcaaggagtgcacgctgcatcaaatttgttatcatcaaaagttgtacgtagacatcaaactcanattaaattaatgtataaaataaaccttacccaatttcttgaacatctc

SEQ ID NO: 23131 - DNA, 402 bp, Glycine max
  unsure at all n locations
tgcagaaggtggttgcgggagtgtgtantaaaggatcctattgcgtatcttgatggccaaagtgatccaattccagttgctatcaaaaggctcaacactcgtggcttccaggtatatactccgtccgtccctatttataataagacagacatacccaacaaatttttttggccctgttataagacttcattatatttctcttctattaattttttttttttttactgaaacttcataaattgtctttttttccgtcttatgatgattgaagaagatgagtaggttgtcaataaagttaaggataaatttgaaaaaatattactcttggaaagttaaagattggagtataattattgacaaatttaattttaaaaactaaattaattaactttcttaataaac

SEQ ID NO: 23132 - DNA, 400 bp, Glycine max
tctgctttagcccttaggttgttcagaagctagctagttagttaagttgaacatcctttagattgctagctggttgaaatcaagcttaacgaggtggatatagataaataataggaggaaaaaagttttaaaatataaaattctattaaaacttttaaattataaaaagatatttaaaagtttaataaaattacaaagaatagcaactatttaatgtattagttgcacatacttgtttaaacaaatgtgtgatttgtcttggcaaaaaaatgcgtgagttgcaccttatataagtatttcattccatatatggctatatgctagaggttttgaccaacccttctaacatatttcatatatattcagccgcccaatgttaaattggaaagttatagataat

SEQ ID NO: 23133 - DNA, 339 bp, Glycine max
catcgccgcgagtatgacatgcactccactatggctgaagtagacgagaccttcaatcctattacgcaacgaggcggacaaaagtgggcagttaacttgaatggtcattattatcaatgccgaaagtattctgcgcttcactgtccatgttcacatattattacagcttgtggttacgtgagcctgaactactaccaatatataaatgttggttatacaaatgagcacatcttaaaagctaactcctcacaatggtggcctcttgggaatgaagcggctattccttcttctaatgacgcatggacacttatccctgacccaactacaattcgtgcgaag

SEQ ID NO: 23134 - DNA, 405 bp, Glycine max
  unsure at all n locations
ttagctttcatttttttttggtttccaaactttgttctttcacagaaaacaaagtgtgcaattcatctttttcattcttttctccctttgccaaagagaattcgccaaggactaaccacctgaattctttttgtgtctctcttctctctttccaaaagaacgaaggactaaccgcctgaattcttttgtgtctcccttctccattgtcaaagaattcaaaacgacacagtctgagaattcttttaattctcccctttcccttaaacaaaaaatttcaaaggactaaccgcctgagatatctttttttttccccttcacaatgtttcaaaggactaaccgtctgagaactntgtcttaacacattggagggtacatcctttgtggtacaagtagagggtacatctc

SEQ ID NO: 23135 - DNA, 409 bp, Glycine max
tcatgcttaagtatgtatggaacaacttcattactgttgtttaacacatacaagagagcttatgacaaatcttctagacttggagtcattacatgcaatcctcttgaacccttaccacccactctgacatcatgctgaaacttaagaaggccaacaggtttagccttctcaatgtattctgaacaaaattcaatggcttcttctgcaatgtacctctcaacaatagatgctcctggatgatatagattattcatatacattttaaaaatcttcatgtatcgctcaactgggtacatccactgcaaataaacaagaccataacatttgatttctctgacgagatgcataatcaagtgaatcatgatgtcaaagaaggtatggggataatacatctccaactggcacagta

SEQ ID NO: 23136 - DNA, 395 bp, Glycine max
  unsure at all n locations
tcaagcttgtccaaatcccttgaagctgaaaactcctctaatgaagattttgagtaagagtctaatgaagatgaactcaccttcatctcatgaaagattttcaagatgtggaagaacaaaggtagatccaaatagaataacttctcaaaaatgttgttcaaggaaaagaatgacaaagacaaaagctccataatatggtatgaatgcaagatacctagacactntaaatctaaatgccagaacaagagaagtcttgggacaagaagatatactacaagtccaaggaaaagaaaggtctctttagcacctaggaggatctggacgacacattgtctaatgaagatgaagaagaagccaacctatgtctaatggtagacatagtctttgaagaataa

SEQ ID NO: 23137 - DNA, 431 bp, Glycine max
  unsure at all n locations
tgcttctacaacaaaaggtacaagcaagactctctattagttcttactcaatataatcctcaaacactctttgagcctgtctaatcctttctttcatagccctcttacccccgaccacattacaagcccaataatgcccatgtggatcaaggaatgactaatttgcttttaagttaggattctagaatgaaacccgcacatgcttgtgattgttaaaaaatatataaaacaaaaagagaaatccctgaggttcgcacttgcatgtttgagaagcaaactcatttggctaagagctcatggaagatgcccaaacatctaatgttagtctctcatgcaaactctntgatatttctttcgaatccaatggtagcttcattacataaatcttgtcaagatcaacccttgccatcaagtttcagtagggtcaacag

SEQ ID NO: 23138 - DNA, 400 bp, Glycine max
  unsure at all n locations
agcttccatattgatgttgnagctgctatccacccgattttccaccttctgttagtgtctttcaatcctgacatggaatagtgctggatgaaattatccataggcctccaatggagcactctaggttcctttacccatgagctgaattcccaccatagaggcataactntatgacacaggaagaataagtgggaggcagattcagctttgctctgacaaaaagggcacaaatcattttcaatggtaacatgcctcctaattaaattatccttagtgggcaatctgtcccatagaagtctccaagcaaagactaaggctctaggagggattntgatgttccatangtgatggaaaccaagacattgatcttcatgaaggtgatcagctttaatataaagat

SEQ ID NO: 23139 - DNA, 432 bp, Glycine max
  unsure at all n locations
agtcaaggaagctacctagtctataaatagtatcatgtgttttactagntgcaactctgatgaatgagagtcttgtgagacatacttcaaagttccacttctctacctcttttattccttcaatttcgtgctcccccctctctctttctctccctctttcttttcctccattgaagcatgctctccaagcttcttatccaaggctcatcttggtggtgaagctccttcttccatggctgattccctagtggatggcgcctcctctcacctcttctcctttgtcttccgctgcacctccatggtggaaaatcaccattaaaggacctcattgaagctcacagatccagcctccatagaagccccacaagcaagcttccatcaagtggtatcagagcacaagagcttcaagtaggtgctccttaaacctccatt

SEQ ID NO: 23140 - DNA, 402 bp, Glycine max
  unsure at all n locations
agtttgcataaagattctcattttggtttaatcgattaccagctacctgtaatcgttactcagttcagttgagaccatgtctggttttcatgagtatttgctttaatcgattaccaagtgattgtaatcgattacttcaatcttgaaagtgttcccagaagtgatcaagaacactttaaccaattaaataaataatctaattgattgcattgttcttgaaaattttccaggtttcgggaagaacactttaatcaattgaaataataatctaattgattacttcatcgaaataatcgattacattggaaatttatttgattacaggcagttataacagttcattgaataatacacttganactcagttcttgacatatntgcttgagaaaatcatatcccttg

SEQ ID NO: 23141 - DNA, 428 bp, Glycine max
  unsure at all n locations
atactcaagcttcaagaattatggcctcatcaaactatttgntttcgtgtgaaattgtataaatagacctcctatctttaatggagtgggttaccactactggaaaacccgcatgcaaatctttatagaggcaatagatttaaatatttgggaagccatagaacaaggaccttatgttccctctataatagccggaagtgcaacaatagaaaaacttagagcagactggactgaggaagaaagaagattagtacaatataatttaaaggccaaaaatattattacatttgccctaggaatagatggatactttagggtttcaaattgtaaaagtgctaaggatatgtgggatacactacaagtaacacatgaaggcacaacagatgttaaaatatctaggataaacactttaactcgtgaatatgaac

SEQ ID NO: 23142 - DNA, 396 bp, Glycine max
  unsure at all n locations
agctttctagcttttcattggtgtattttgatctccttttggtgctctaaattgtgggaatgtgctcaaatatgtggggcaattttggtttgttttcttgcttgattaggttgaattgggggtttgtatgggatggccctaggcctataatgcattttgaagcaatggggcatgccacattgtccccgttctcttgctattgatgcctaaacgcgcgcccaccaagtgttcggtgaaatgcctcaatggcattagcgcgtgacttttgtaaggaaacaacccatggggcattttggtttgcacatattttctattttttgggacatgcattcattcccganaaaggctagagtaattgccccacatatatcctatgcctagaaaccaaagttttta

SEQ ID NO: 23143 - DNA, 395 bp, Glycine max
gacctataaaactcagcttgcgattggtcttcccaggattgattttgttggtccaaaaagaagcaaatttgatcatcctactaggacgactgagataactggggcaaataaagagggtgacgatgagggagaaacccatgctgtgactgccattcttgtacggccaagtttcccaccaacccaacaatgtcattactcaacccttctccttacctaccgcccatttatccacaaaggtcattcctaaatcaaccacagagtctatctaccgcactttcaatgacgaacaccacctttacacaaaccaataactccaaccaagatatgaattttgcatcgaaaagcctgtaagattcaccccaaattccggtgtcatatgctaacttgctcccata

SEQ ID NO: 23144 - DNA, 396 bp, Glycine max
  unsure at all n locations
agtttgtgaaaaccttgacacaattcatgcaagtcttcatctcaaaccataaaaccacgaaatcggcaatcaaaaatcttgaagttcaagtaggccaacttgcaaagcaacttgcggagaagtccaatgggaattttgtggctaacacagagaaaaaccacaaagagaaatctaaagtggtacttacaataagaaaaaggatggatggccttgttagtgataatttagtggaaggtgtagtaaaagatatgggtgatgcgaggaaagtgtangagagagagacatagctgagaataaagagaaacaaataagtgttgaaaatgtagaanaaaccagaaaagtggagaanaaaagaaaaacacttttaaggaaggagttgacgaggcatatcttcta

SEQ ID NO: 23145 - DNA, 429 bp, Glycine max
agggttcctccaccttgctaccttctctaattttttttagtttcctcttctttaagaatttccatcaaagtgtcaagacttttctattagagatagggggagaaacatgagcaacatggtgaacaacctaaatgctaaagcctgaagctcaaggaaaagcttaaagaagttttggcttttacatgcccaactcccttgaatgacatttgtattggctgtcattttggttgttgcatcttagtacattcgatatctatattgcatcctgcatcatcatggttagtatcaacaaaattttttaagtcagaaaaatttcttcagaggcaaaaactctctattttaatggatgacagggttatcgtaatcgattacaacaagctgtctgaagcttgtagagttgagtctcatattagtttaatcaattacatg

SEQ ID NO: 23146 - DNA, 613 bp, Glycine max
  unsure at all n locations
accgacgcgatgagacgccacaangtaaataaagangagcgananagatatacataacnacaacnaacacaagacacgagagttgaatcatngcgagngcatncgnannacaaananacaannagacnaccangaaaaaggcacgacaacgaagacacanaancaggttgnnaactacgcagtttacgaaacgcaacagacagagcgcacgaggaagggggagccgagaagagagacacacagaacgcacgcagcagacggccaagggaaaacagacgagacgacaagaaacaggaagcanggacagcaacagaaacgagcaaagaaaggagagaaacgaagagcaaaggaagacacgagacgcaagagaaaggacagagcaaggacgagccgaaagaagacgagcaggaagagaaggagagcgaaggaccaaaagggacacnaacggaagaaagaaaggacaagagagagagcaaaggagcgaaggggcggaaagaacgcggagacggaaccgaaggacaagaaagcgacgacaggaccggacaaaaagaagaaagagaaancaaggaaagacaagganggaaaagcagaaggagaaaacgcagaaaaaggg

SEQ ID NO: 23147 - DNA, 411 bp, Glycine max
  unsure at all n locations
agcttatattatcaaaattgcctaaatcatttccaaatatgcatgtgaattaggaagcatcaacaagaatcaagccaaggctattatgcaagcaatcaatggggaaaaacacaccaaaagattatgatgatggatggctcaaattctcacaaaggtaaacttatcactttcaaattgagctttcaaaactatcatgacatgtagaggaaaaacaaggatttaaaatcacaaaatgtcaagagacttttattttcagaacaattacccatttcttgaacatatcctataattcaaagaaaaatatgcaaagttgtacatgcaaacagaattgacctanaatattaaactagaaacccaacaaaactaacaaaattaacaaaacaaacaaaacttgcaaaaccaaaaccaaag

SEQ ID NO: 23148 - DNA, 438 bp, Glycine max
ctaagcttgcctggctcagaaaaagaacatcaagattgtccattaaatatgggatttagattgtactgattcagagaagtgtccacgcattagttcatcattaaaaatagttgtcatgtgtatcagaaaaacaaaaagttcatatttacaccaaagaattcaacaatccaaattgcattgatccatgtccgtgcacccattagtagaaaaattattttctacgataccaaaatgaagacgattccttaagaaccgtcttagtatatcaggcggagacatttttgtaattaaatataatcactctcactcttcgactcccctctagggttcgaagccgcaactacatctattggggttccaactctttgaatccctctcactcttccttcatggacgctttgcttctttttcttctcctttgtgtgacaatggttcaat

SEQ ID NO: 23149 - DNA, 407 bp, Glycine max
  unsure at all n locations
agctttcaacaagagtttttacaaataaccatcatgaagcagaaaactaacaaaactacccatcatatctcccaaaaccccatacccacgaaatttaagagagaaagaagtccacccaaacctgaaatttcgaagtcccactcgtagccacgcacttcacgactccaaaaatgccctcctttcgcgatttggagcagaaatgagcaccaaaggttgaagctttgtttggagcttcaatggagaatgagggagaaagaaaggcaacgtgaggaagagagagagctatctgaaaaaagtgtgggggctgagtgaagagagagaaaagctttttggttttaaaataaaggggtttctctntntctattattntattcaagctctgccatgtgtccctatttgagtggagc

SEQ ID NO: 23150 - DNA, 410 bp, Glycine max
tcggaagatagtgatgaggtacaagtcctaaaggcagtgcttgttagattctgagtagtcgaagagaagttcaagtccatagccatcaaagtctgaaaagagtatgatgaactaagggatgtcaatatggccaccgatgaagccttggaatgagaaaccaagaaggcccgaaaggaagaacacgaccaaatcaaatttttgaggggctttatagggcagcaatagtgagctcaaactccgaagaggtgaaaggaatcatcacgggtcaaaggcatgatctggaaggacgagctaaaggcttgccttatgtcgaaaagaaatttgtcccaacagttaaggtgagactgaagggaatatgtgggccatcatcgataagtgcaaagagaagctaaatctagcggcgactcatg

SEQ ID NO: 23151 - DNA, 412 bp, Glycine max
  unsure at all n locations
agcttttacttttatacaaaattaaaatattaacacataaagcataagacacaactaaaacaactagattaacaaaaacatccctatatgtctaacaaattaatgttgaagtaacaaaaatcgggagcataatagtttcaatttatcatgaacaaacaaaaaactagataacaacaaagattattttggtaacacattcaatgaaaaattgtcataccctaatttagttcggggaccatccgttgttgggatgcgaccctcgtttgaccacttcgaggtatttggcacccatcgttaggcaatttgtgaagttctaagacatgccggaagccaaaagataagcgttgtagcacaatccgtgaagttccgtgacatggcgganattataaggaagtgttagtgcgtaatccgt

SEQ ID NO: 23152 - DNA, 389 bp, Glycine max
  unsure at all n locations
tgtccttctccaccgtaattctctccaccctgccaactaagtctttnttcactttctacaagtccttgtagcacccaaacaactcatctctatccaatctggtgcgtagcaacttggaaaggacaatgccaaccttggaagatagttggtggtttgacttcacagcttcagtgaaggcaacggtgacattagctaccttaagggacttcactctccagactgtgcgagcagcaaccctccatttggcaacctcagcctccaaggatgccaccttgtttggtgcctcttggtgcctttgtccattctctnttaggatcatcaaacttcgttggaggaaaaccttggcagaatccatggcatgctggaccccagctgaccggataagtttt

SEQ ID NO: 23153 - DNA, 389 bp, Glycine max
tcaagcttctagaaggagatcaacttgatgttctatgcttcttgaaggtggcagtccatgaggaatctccttgggaaagacatctttaaattcctgcaataagggttgaacactaggagaaacataaatagttaactgattagaattatcactctctctcttgtgtatcactcttttcctcgggtgtatcactcgtctttttcatattcctttgtggtgcctcactattttctttctcttgttctctcttttctctcattctgatttggtcatcacacacttctctaggggatagaggtttaagagtaaatgaggaagatttggctattcgtctgtagggctcttctttgttacggttcaacaaacgttgcatttgtgtagtccacgcg

SEQ ID NO: 23154 - DNA, 428 bp, Glycine max
tcattgcctaacaagccaacttacaattacgagccctatgagactcagcataaggatgcacaggtcaaagttgagtatgtgaaaagattgtatgaccaagtgaaggtgcaaattgcaaagaagaatgaaagttatactaagcaagccaacaagaaaaggaaggaagtggtacttgaacctggtgatgatcctggacatttgagggcaaatgttttccaagaaggagggaatgatgatcttgaaattggccaaatacaagctaaaggcctaagtggagaagggcgaacgcccaagtggagaaggataaagccccccaatggagaaggatgaaggcccagagacagagacactatcaagactattaattgttgctgaagacccaaattaatttgaaggcccaagttaaataagtttttagttataattta

SEQ ID NO: 23155 - DNA, 404 bp, Glycine max
taagcttgccgcaactatgtgaagtttgctttagtttgttatttggtgcttgatagtggtttatagaggctgaaattgggcttgctgatccagaaaaaaaaaatgcatgtagacttaaaacttgtcgagccatagggtggtcctgttaaagaaattgggccaaagattgaagtagatgtgttgtctctaaattgcaatgcaaaaaaagtggttaaggttgttcctgaggactctactcagaatggtattgaagatatggatgttgatggtgctaatggtgtgggtaaaggtggtccagtcgctaaaattgaagttgttagagttaaaactttagctaatgtacaagatgctgaaactgaagttgtatatgtgtctccagaagatgatggacaaacaagtgacac

SEQ ID NO: 23156 - DNA, 470 bp, Glycine max
  unsure at all n locations
tgcatgaatgtgctttcaagnacggacctatgatactcagcttgcaaaacattttcatcacactggtttttctattgttttgagccaattaatgctaggactatcttcttctaaactaatcctccatgctttagaatcttcttgtcctcgctcttgattcaaaattattgtcttcattatttgattgagtaacttaagatgcaatatatatatatatatatatatatatatatatatatatatatatatatatatatatatatatatatatatatagagagagacagagagagagagagagagagagagagactggaacatgtgtgatgggatagagaaaggtgtgacaactcacacaaaagagaaaaaaatatctcaattggataacattgttttataggcgcgatatctgtatatcatatgtaaagatcgcatgatattcatggatatncattctaagaaactcaatg

SEQ ID NO: 23157 - DNA, 399 bp, Glycine max
  unsure at all n locations
agtttggtgaatcttcaagttgattttgatggtatacgtagtccaaactccaaacacgttagttttaagggagattatctaagtatttgtaaagatatcttaatacttaaatcagcgagtgaacgaattgaataattgattagttatatatggaaagatagttcgcttgataacactggatgtaccttatttatagcgctcaaatacaattaaattaaatatgacattcaagcacatatctatttttttttaaggaagcacatatctaatttacttgataaagaanatcttaaatatttttatttttatgatgttaaatacattntttatttaatacttttattataaaatagtacctaaagattaataaaaaatattataagagaatataatattact

SEQ ID NO: 23158 - DNA, 428 bp, Glycine max
  unsure at all n locations
tcggcctatatctgtgatgcaggggaaggattagtgttattgcggaagaagctcgatgatgagtgtaaagacgacttaacaatatcaaatactaaagatgaattgagcctagtatgataaatttccacgaggtggtcacgttgacatgaagctagctcgttctttttccatgcaacattttacaatgtatattcaatccaaaaataatttcagaactgattgtttcgaagcaagtagtgttggttatagttggaatatccggtgtctataaattgtgattcctatccagccattgacattctttacgctgcaattttttcttttcaaccgaaattagcattaaaataattcaaggtaatgatccaggaattgatcgatgtgcaagaaattctttttttttttaatacacacttattagntggaattta

SEQ ID NO: 23159 - DNA, 396 bp, Glycine max
agcttggagaggatgcttcaatggaggaaaagaaagagggagagaaagagagaggggggagcacgaaattgaaggaataaaagaggtagagaagtggaacttcgaagtatgtctcacaagactctcattcatcaaagttacaacaagtgttacacatgcttctatttacagactaggtagcttccttgagaagctttcttgagaaaacttccttgagaagcttctttgagaaaacttccttgagaagctagagcttagctacacacacccctctcataactaagctcacctccttgagaagcttccttaagaagattcctaaagaagcttgagcttagctacacatacctctctaatagcgaagctcacctccttgagatgagaagctagagctta

SEQ ID NO: 23160 - DNA, 431 bp, Glycine max
tgtgaaattcttaaaggaaatgggtccaagctttgttttgagaatgagacaattgctaaagaaaaatctactcttttgggaaacttttgggagttggaaaacaaattgataggtctacaaaatgatataaaggagctaattgaacttcatgatcatcaaagtaaagaaagatatgatctatggagagaatgtgcacaagtacatttagattatgaggacctttaagtaagtaaacataatttttcagtagaaagtgaagaacataatctttatcttatgtgcaagatttcaccaagtacttagggaagtccatctaactacaaccaaatgtatgtttagctatctaattgggacatctaatattggtctattgttcaaaagaagggaagattttgggctcacaagtttgtgtgatgttgactatgctggag

SEQ ID NO: 23161 - DNA, 354 bp, Glycine max
  unsure at all n locations
agcttgcttgagaagcttctatggaggatggatctttgagcttcaatgaggtccttcaatggtgatttccaccatggagaagaggttagaggaggcgccatccactagggaatataagccatggaaggagaagcttcaccaccaagagagtgtcttggataagaagcttagagagaaagcttcaatggaggaaaagaatgagatagagaaagggggggaagggagcncggnattganggagaaaaagaaggagagaagttgaactttgaagtgtgcctcacaagactctcattcataaaagttacaacaagtgttacatatgcttctatctatagcctaggttgcttcctttga

SEQ ID NO: 23162 - DNA, 428 bp, Glycine max
aagtcctaaatggcatttcaagctaagatttacttactttaacctccatttaccacagaatccagatttaaccttccaactctcaaagcctcactctttttccactcacaacaccacattctcactttctaaccccaagttaactctacccttcatctctaacagtttccataagcaatttcagcacatgaacatcacaagcatcatcataaaaaccctaaaacagaatgggtatgtttaactcatccaaacatggcaatttcaacatgctttcaacaagtgtcttcacaaataatcatcacacagcagaaacctagcaagactacccatcatatctcccaaaaccccatacccacgaaatttaagagagaaagaagtccacccaaacctgaattttcgaagtcccactcgtagccacgcacttcacg

SEQ ID NO: 23163 - DNA, 401 bp, Glycine max
  unsure at all n locations
agtttatgttaattgataatatttttattctacatttgtaattaaggaaaggaattaagagcaaaggacttctagaggattttgatatgagaaattgtatttttacaccatccttcctcaacctaattttgtaccttttaataaggataaactaattttgtaccttttaataaggataaactattataacaggtcattgaacaccaaaattgataatatctcaaatgaagtgatcctaacgatgcatgatgatttgaggttgacacaaaagactaaaagtgcaattaactntactttntttattttttcttattacattaatcattntatctcatatgttgtattacataaaaatataatttattatatcaaaatcctccanaagtcaagctcttaattat

SEQ ID NO: 23164 - DNA, 433 bp, Glycine max
tgatgggttgcatcttcatttcatgttaatttttacttatagcacataaatatatacccgttgttgtttaatttagtcatccttattggctcctttttcttacactactagaaaaacagttttctacgacacagtatctacgacggttgtataagaactggcttaaaaagtagtacggtggcatttttgtaattattataaggtttgaagcattttacgaaatacattctaagacggttattaaaaaccgccttagaatgttatatgaaattaaatttactgcgggttttagtaaaaaaccgtaataattcagaaaaaaaaagaaataaaacgcgtcctcccaccttcctttcgcgaaccctaattcttgaagctggcctccactcagcctccctctcactctcacgctctcatactctctcttctctttcac

SEQ ID NO: 23165 - DNA, 443 bp, Glycine max
ggcaattgagctcggacccgggatccttagagcacctgtggcatcaagtttgcgcgctaagctgaaaagcttctctagaattttaacattttgaattgggcttagtgagcagatgcgctaagcgcaagggctcttaaaactcaaacgtcatatgggcacgctaagcgcagctgtgcgctaagtgcaccatacgaaactgccaaatattataaggtacctgccgtaggtagttaccatttcactcttgttgtgcattaaggccattcattgcatctaccctcaacttgcttcatttgcctgcattcctgcacctttgctattctttgcattcatctacacaatccaagtaagttgctttactttacttcatttcgttctaagttttcaaccttaggatagataatttagtgattgttaggtaaaaatactgtttatgcttagtg

SEQ ID NO: 23166 - DNA, 567 bp, Glycine max
  unsure at all n locations
caacactgacgccgacaaagccgccaagcgcacgtcgaagacgaacggacgcngcgcataccacccacagcagccgcggcttgacatgattgcctccgaaagccanncngngacactatagaacacgcgagcggctcaaggaaggctgcacaagaaagctctccattgaagcgacctgcggccacaaaggagaagcgaggcgtaacacttagccgccacctcgacgaaagagagactgtgcgagacatactacaaagggccacgcggcgccctcgttgataccatcagagccgagagccccccgcgcacgagctaacccacggacgaggacaccaaagaagcaatccggcaagcttctgacccaaagctcagcgaggcggagaaaccccatctcccatggctgataccctagaggaaggcgcctcctcagacctctacgccgtggacatccgctgcatccggaaaagcaccatcaaaggacctgataggagctcacacatccagccgacatagaagccccacaagcaaggcgccatcagaaaggcgggaggagaaggagcctctaag

SEQ ID NO: 23167 - DNA, 410 bp, Glycine max
tttgcatttaagcttgttggcatcttcatgaaattttggatgaacttgcaccatccactgtcaataagaacaaattataaataaaattacaaattgggagcacaaaggatttatacaataaattactccctccgtccctttttataacaccatttcaactaatttgaaccctttaagaaaattggttaatttagttaatgacattaaattttcaataatttgtaatgttcttccaaaatcaccctcttaagttttttgaaattaatcatttccctctttccacttaattgcttctcacctagttgccactcatcttccccaatcctgataagagagaaagtatttatctcattaaatttcagcatttattatttttttactaaaaaaattgttaattaactacaggtact

SEQ ID NO: 23168 - DNA, 358 bp, Glycine max
catcttggaactcctcccctcggcactaaattgagaagttctacttgaactggaaaaccaaaatattgaaaaagctgtataagaagataaaatgcttggtttcttgaagctgctttaataagtgttctgttttgaagaataaaatgggcatcttgtccaattcttgcttgtattttgcaggttccacacaaaagcctgaagatatgtacaggattattgagcactttgcccttggaaggaggagactagaactatttggtgaagaccacaatatacgagccggctggctgactgttggagagaattatcatcttccaatcttaataagaggtaagatatctgaaatgctagcatacct

SEQ ID NO: 23169 - DNA, 290 bp, Glycine max
  unsure at all n locations
agctttgatcatctaccttatttctgacagccagtgggtgaatccagtccaagtggtccctaagatgacagacctcacaataattaagaatgatagggatgagcttatccccataagaatgcagaacagttggcgagtctgcattgattataggaggctgaaccaggtaaccaaaaaagatcatntttccctgcctttcattgatcaaatgcttgagcgcttggctggtaagtctcattaatgctttcttgatggcttttctggttatttacaaaatcatattgctcttg

SEQ ID NO: 23170 - DNA, 330 bp, Glycine max
tcaacatcagaccacttccagggtgctggaactactttacatggtcttgatggggcctatgcaagttgaaagccttggaggaaagaggtatgcctatgttgttgtggatgatttctccagatttacctgggtcaactttatcagagaaaaatcagacacctttgaagtattcaaggagttgagtctaagacttcaaagagaaaaagactgtgtgatcaagagaatcaggagtgaccatggcagagagtttgaaaacagcaagtttactggatactgcacatctgaggcatcactcatgagttctctgcagccattacaccacagcaaaat

SEQ ID NO: 23171 - DNA, 305 bp, Glycine max
tatgaataacgagaattgggctctactgtccccgatggacctctatgctaactatccctcttttcggcgagttttccgaatttcgccgcaaagttcccctttgatgcgaacactaacacgcatgctgcgagcatgcgcgcttacaccggcactgtgctgccatctcgctggagtgaccctctgatcagaagagctctatccacaaacccaacggcaccggatgtgccaccacgcctcccatactccgacatgtcaccctcacgcacgatcccctttctgggacatgacggtgttacacaacccac

SEQ ID NO: 23172 - DNA, 310 bp, Glycine max
cttttctatgctgcagagcctgcattatggctagctcttgatcatgcaaagcttgtagaatgtggtgcaccaacggccggtaatgagcgttgaagaatttattcaataggtggcctggccaggaatccaaccttctcctttgggaaggggtgaggcctccgcagcccaagagcctcatcaagatcagcaggaggacattccagaggccgtagagcctacacctcctgaaccattcactttagagtctgatccggtttgtgtacacgttcaagaggatgttacgacatcagaagcctttatttttaagctg

SEQ ID NO: 23173 - DNA, 272 bp, Glycine max
tagcttttgttaaagactatttattttcattctcttgctacctcaccgtttttgtgccaaactctctctgttgggtccaaacttatttattactcatactatctaagcttgggaacctccagatctgagttcttggttcatatgacaattttcgtgctaccattattaatggaaggggggtcgttgcacttcttgaaccatgtccttattgttataggaagctccgcttccttgcatgctggggagatgctcaaagcctcatagttaatgtc

SEQ ID NO: 23174 - DNA, 109 bp, Glycine max
agctttattctccagttttgtttcagggctggccatcagatctggtacatctgccatatactctaccggtcttaggcctcatgaactttctcatattccgcatcttact

SEQ ID NO: 23175 - DNA, 377 bp, Glycine max
ttattgtatcgaatctaacaagggcgagtggttttcggatattatatagacgctcgaaattcaaaagaaccctcacagcgaaatgaaacgactttaacttattactagaacgttcgaatgaatctccgtaagatatagagacgctcgtaactgacaacacaagctctgatcaaagtagaagataatagctatttactcggacgtgcgcatgtttcctgtaggatatctagaccctcgtaatagataccagaaacccatatcaaactgtaaacggctttagatcattactcggaaggccgaatgatatccagtatatatcgaggcgatcggtattgtaaacagaggcttgaacaatatgtacgacaatagctttaacc

SEQ ID NO: 23176 - DNA, 387 bp, Glycine max
ttgcatgccagctttgttcgaggatgcctacccattacccattaaatatagactagttgatagggccacaagaccctgcctacttagcttcttagatgcatactcaggggacaaccaaatacggatgcatccacaagatgaggagaaaacaaacttcataacctaggcgactaactattgctatcagattatgccattcggcctataaaaggctagctccacttaccagcacctattggacatgatattcaaagaacaaattggaaagaaaatggaggtatatgttgacaacatggtggtatagtctaatgatgcagaatcacacacctatgattttgaagaaatatttgcaaagatctgaagcctaacatgtaactcaattcgaag

SEQ ID NO: 23177 - DNA, 295 bp, Glycine max
agtaattatacagcatcacaatcctaatctcgttctatttgcaatcaaaatgttatgctctattcctagaaacctaatgtaaagagtaaattcattcagttcagattctaagagtactttccaatcaaaattaagatccaatttcatgaaacttgtgatcaaatagaatcaaacattgagaatagaatgaaatcaccaataatgagtataaaatattcatacatatatataatatcacaagagatacctaagggtacaaagaatacattccatcctttagagaaactaaccgatc

SEQ ID NO: 23178 - DNA, 323 bp, Glycine max
actgggataaacttcttgaagggcttctttgtctgcttgcattccaagcaatttctacatttctcctgtggttattgtagttgaagaattccttgtgccaacttgtgcatttgagcaaaatctttgaaattcaagtgtccaagcctacagtgccaaagccattcttctttgttgctcacagcactaagacattcgtgctcaaatgcttgcgttccaattttgaaagttctatttctggtcaatggtgtttttatgattagatttctggttttgtcatataccagcatcatcatgtcctccatagttatcttaaagcctttttg

SEQ ID NO: 23179 - DNA, 359 bp, Glycine max
  unsure at all n locations
gatagaaacctcatccagtcagctggggtgcagattgctattgactttgccaaagtgttcctctagagaagtttaacgattctggaggagaacggacagtggcaccaagaggctctacgcaaggtgttgtccttggagacagaggttgccaaatagagggctactactcccacagttagagataggagcgccctaaggtagctaaagccatcatcacctttgctgaagttgtgaggtcgaaccaccaactatcttccaaggttggcagtgtcttggccaaattgctatgcacaaggttggacagtgatgaactatccacacactgcaaggggttgcaggaagaggganaggacttggct

SEQ ID NO: 23180 - DNA, 360 bp, Glycine max
agtttgtcgtctcggagatgtccgactatgctcttgtgtggtggaagtgattatgcaagttgaagtggacgtttccattgggaaatacaatgataaggtactttgtgatgttgttcctatggaggccagtcacttacttttggggagaccatggcaatttgataaaagagccaatcatgacggttacaccaacaagatctctttcattacttttggtgttgcataaaaaatgtacaatgtaagtcggctaggtatttttgtgcgagctcaaccgacattttgtttcgagcgaaactggcatgttcccatttatattggccagtaaatcattagcccacctcggcataaaaatatttgcta

SEQ ID NO: 23181 - DNA, 386 bp, Glycine max
agcttgtttagaataacaagatcaaaatgcacaatttgctacgtgacatgggaagagaaattgttcgtcaaagttctctagaggaacctgagaagcgtagtcgattgtgggttcaccaagaagtgcttgatttgttgttagaacatactgtaagaactttctctacatattattttgaaacttttgatcatatgtgtttttatcatgatcacaaaactaaatttaaatcatcttgttctttttaagttatgctaatttttgtgggattcattgttcacaaaaataaatttgaatgattctgctcttttaatgtgatgcaatgttattagacccggatttattcagaccatgttgcttgcaaaccagtgttcgactgtctgaactac

SEQ ID NO: 23182 - DNA, 417 bp, Glycine max
tgtaatgtcctccgacaaacaatatatgaggatggttatgttagaacacgaaggaaaaattaaaagccgtttaacaatgtattttttttttaaaaaaataaaaaattaaaagacattttcttccatacccattcctcatgaatgaataaaacattcaactttgatgaggaattccaagaatatatcccaacgcaaattaaaatagttcttaagtttatcccttgaaataatgtgaatatatctttcatcatgcaatgaaaaaattaaatgatgcctacaatcttttttatcccttgcaacaaatatgtggttaataatataaaaaagattattatcttatttattttcaaaattttgtccagccaaaaaaggttgtgttaatagaaacaaattaaaaataatataataattatgtaa

SEQ ID NO: 23183 - DNA, 372 bp, Glycine max
tctatttttgcccttgcagaaattaatgttctatctaatcatgacagttcaccaggaaatcaggttactctttcatttgaagagtatactgctctgacgggcaaagctcgagatgcagaggaacaatctaagaagagagttgcaagttctatgcttgaagttgacgaaacaagtttgtcgaacatggacattttgaaaagggtagaagaagctacagaagaagttaaaactagcaagaaggcccttgaagaagctctagaaggggtagaagctgcgaatagagacaaagtagcagttgaagaggctctaaggaattggcgatctgagggtcaaaataagcgttcttctatacacaactctaccaagttcaaa

SEQ ID NO: 23184 - DNA, 416 bp, Glycine max
taactaggataaaacttcaaaagagtagaattccatgtccaaagaatggctttcctagacaattcttatagtttgtgggcttcattctttaggctatgttgaaccttgaaaggtctttcctatttagctgccaattttccttcttgatgaatcttttcaggcttcaccttgggttgtctagacaaggtccccctccttgaactgcctaagcattaatttttagttaaaacgccaagccatgtactgcttgcaagctttgactatgatgattgtattttctcgcacttgttctacgaggtctagatcttcctgtaatgcttcattgttctcgacctctatgaaaatttgtcgccttagtgatatttcccctacttctgttgggaccatagcattcgtcccgtacatgagccgaaatg

SEQ ID NO: 23185 - DNA, 379 bp, Glycine max
agctttgagccaaaatcccaacttaccataaaccttgaaccagggtgagaatatcaatccttgcccttagaagaaaacacaaaaagaaggaaaatccccaatcaaagaaagggagaaagcaaaaaaggaaagaaaattcccaattaaaagagggagaataagaaaagaaaaagaagaaagataatccccaatcaaagatcggaagagaacagaagatatatacagaaaggtctttggaccagacaatatctgaacaatacagaattgtcaccaagaaaacatggcaaccaaaaacctgtgcgtcagtggcttgttcacctcgcgccaaacaaaaacagaaaagaataagccaaaaacactcaaagccaaatttcccacc

SEQ ID NO: 23186 - DNA, 437 bp, Glycine max
  unsure at all n locations
taagtggacaagttccacaaatttgttttatttttcttattaaaaggtattcttttnttatttcactttctcccatgcttttaattaatttaaattttttcatatattacatctttatgaactgtattcctatgaaatatgttaattggtttattattttattgcaatgaataattgttttcttgcaaatatgtgtgattgaaaaatactantggtcgaatggatgcangtgagccgcatctgctccataaaatatttattaattaactgttatatacttgagtttgtagttggatttcttggtacagtttataggattttggttgggccttagtaattagttaaaatagtatatctacgtgattcaaatattanggggtaggaattaccttaataagatgaaagggcttcaaccatgacttgaacttcatatgatg

SEQ ID NO: 23187 - DNA, 396 bp, Glycine max
agcttgtctaatactcattagacttgattaaaacttaaatgagttaattaaaccttgaatgagagaaaaagattagaacaacagaagaaagacacgatgttttatactggttcactctctatttctagagaagctcatccagttatctaatccacaacctgaattagattttcactatgcatcaagaatccttacaagcaatcacaaccaatcaaccattccctggaaaaagagactaaggcacccaacactagggtcctttgtgaatataagcctaagagaaccctactcttagcccaaactagaaaaccctattctagcatgttgtaagcaattcatggataaaaaacagaccgtgtgaaaaccatactcaagaaaaaacaagtaggagagata

SEQ ID NO: 23188 - DNA, 402 bp, Glycine max
attaataattaattcaacccttcttcttaattattccgaggccacttgatccaacaagtggtatcaaagcaagtatcttgtagaaagtttcacaactaccagattcatggcctccttaaattttctgtttctggaaggaaattccatccataggccacccatatttaatggtgagggttaccactattggaaaatccgaatacaaatctttattgaagccatagatttaaacatttgggaagcaatagaaataggaccttacatacccaccatagtagatgtaagcactagcaccacaacacaaaaacctagagataagttgactgatgaggatagaagaagatcccatattatcttaaagaccaaaacattatcacttctaccctatgaatagatgaatat

SEQ ID NO: 23189 - DNA, 311 bp, Glycine max
gcgcctgttatacttgcgaatctttctgaacacctattccaagactgtgatgtgtcgggtcatgctataagacttgacaggcatgtcatcaacatagacctcgatatttcatcctattttttgtttggagacccggtccatgaacctttggtacgtggcccctgtagtcttcaatccaaagggcataaccatgttacagaaattgatgtcttcaattatgaaggcaattctctcctcgtcaggagggtgcatcctgatctggttataccctgagtacgcgtctatgaaacttaacaactggaaacccgacg

SEQ ID NO: 23190 - DNA, 193 bp, Glycine max
ttagctctctggccgagaataagggttatcgagccatgctcgcttaaccgctgtgctatttcagctaagccaatgtgtctcggttatccagagtacttggtagtgtgtagtcgtgctaagcgcaacttggacgcttaagcaggactattatttttataaggcgtgctaagcgagccaatcttcgtaagcgccc

SEQ ID NO: 23191 - DNA, 388 bp, Glycine max
  unsure at all n locations
agcttattactttattntttcggatcgtgtaatttaaaacttataattgatagcagaaaataaaatttataacttgttaaaatagaattgtttgatatatttaattattctatcagttgataaatataaaatgatataaaaatgtttatatactattgtcacataaaaatgttntttaggtaactataattttaaatatttgattcttattttttttggaaatatataatattttattaaaaataaaatatcagaaaggatattaaaatagttaaaagacctataactattaagaagagatgataaataaagtggattaaagcaagaataaaaatgaaaagaaagaataatattactaatacatgcttttaacgagttataagttaac

SEQ ID NO: 23192 - DNA, 315 bp, Glycine max
  unsure at all n locations
aacttttataatgaataagcctaataacgaatgccaacaatatgatcaccaaatgtcaccttaaacaccacaaccagtacaaaccttcttcattcaacatgtcatatggaccaagaaagaaaaacaaattcgtttaacaattcagtcacactaaacattatagaacaactaaaactaacctaacatccctaaaaaaaaacgtaaaccacatctatgaatngactaacccaaatcccataaattacaactcatacacgggatcaaaacacctaaacaacaaatatagcataaccctgtcatgtagataacaaccaa

SEQ ID NO: 23193 - DNA, 360 bp, Glycine max
agctttacacagtttatttttctcaaacttgagttttggaagaccaattactaagtctttcctaattagatgatttaaatgattcatattaatgtgtgcagtcctacaataccacaaccatgaatcatctatcttactcaccaagcaacttagctcatgaaaaactgcatgctcaacattcagcatataaatgttacctattctcttaccaatgtggataactttatcggatatggcttcacttataagacatcaatctatgttgaattcaatcttgaaacctttatcacaaagttgactaatacttagaacggtatgctttaatccattcataattaacacatatttcatctaaggttt

SEQ ID NO: 23194 - DNA, 378 bp, Glycine max
actcagctttatacacacctattaagttgccactcaaaactttctatgtcttgttttaataattgtttcgatagacatttttatgtgaagaaaataacaaagtaaaataaattgagtttctctcgtaaataaaaatcaacttatgcactcaacttttatagaaattctcttaactggataattgaaatgtataagttaattttaacttatggaaaaaactaaactcattttatcataacttctttttttataaatactcatgggaaaaatattccaattggataaaaaaaagatgaaatagcatttgtttaatagcaacatgtggggggacatagtgacatgaaatttttaaagctagttacctccagataataaaga

SEQ ID NO: 23195 - DNA, 400 bp, Glycine max
  unsure at all n locations
agctttcacaacaaatttctaaatatgtttttgaacaaaatgaagtacgtaactaattaccactaatatatactgtgactacttagaaggaagggataggtcatgattagtccaacctaatctgcctaattaaactaattacacaaagcaaagcctaaattcgtaacccaattattcaagtgcagaggttctgacttccaatattaatttgaccctcaaaatggaaggattggcccaagcttattgatgcaatcctcccaaggaggggacccatcaccatagccatgactaggagactccaggaagattgggctagggatgcaagagaaggccctaaggttctcatgagccttangatagatnttgggcccatgggctaagtatgaacccacttatcttt

SEQ ID NO: 23196 - DNA, 193 bp, Glycine max
catcaaatcttacagagaatgggctgttaaacttcaatttaaaagccttaacacatctcaagatttgcacactaccaatatagtgctgttgatagcacctcaactgtgcacattctctcttttgatggaaatttttggcatataccaattatttttccatgacagagtgaacttttaaactggattaatctat

SEQ ID NO: 23197 - DNA, 354 bp, Glycine max
  unsure at all n locations
gaaacttcctgcttttattccttgaccacaaagtggtacctggagatatgtcgcgggggtcaggaaaccttggggacgtcaagtggggtgctattgcccaaaaccaagcttgaccaatcccgacccaacccgggcatagtcggtcagtgagaacctgtgatgtacctaaacaagcgagctcctggcagtcaacagataaaaggaacaaagaccacaaagcanggaggcttgtggtggctggccagccatgaacttgattgatgtgtgagatatggcctctggtaatcgattaccaanggtgggtaatcgattacaaggcttaaaaatgaagacaggaggctaagatagtctctg

SEQ ID NO: 23198 - DNA, 416 bp, Glycine max
gcgtagcccaccatcttttaatagtaaattaccgataatgggtctaccatcacgattatcgtctccctttttgcacatgttctgtagttgcatcctatccggaaccatatcaaaataatactgatactgcctaacgaaggcaaccattaggtccttccaagtatggactcgggaaggttccaagttagtgtaccaggtaacaactaccccagtaagactttcttggaagaaatgtattaacagctcctcatctttgcgtatgcccttatcttctgacaatacatctttagatggttctttgggcaagtagtccccttgtacttgtcaaagtccaacacctttgacttgggaggggtgatgatattgggtactaagaacaactcttctatgttaggaaaggcataatctttacctcc

SEQ ID NO: 23199 - DNA, 362 bp, Glycine max
agcttttggtgggacatcttgacttgctttccaatctgacattcaccacagattctgccttcttctattttcagattgcgaatgcctctaacagcacctttgtcaatgagtttcttcatgcctcttaagtgcagatgtccaaatctttgatgccatattctgacttcatcttctttggaggatagacatgtggaggagtaactggtttcttgaggtgtccataggtagcagatgtcctttgatctgctgccctttattagaacttcacacttctcatttgtcactaagcattctgaccttgtgaagtttacattgaatccttcatcacacaactgactgatgctgatcaatttgcagtcagt

SEQ ID NO: 23200 - DNA, 566 bp, Glycine max
  unsure at all n locations
actgtgtcgcatcgtaagtgattctgtaatcgaaccattaactantcaccccncctttcncnnncagagattatgatacatacactagcatncngngacactatanaacactcaagcttcttattcaaagctcatcttggaggtgaagcttctttttccatggcttattccctaatggatggggcctcctctcacctactatcctttggcttccgctgcaatttcctgggggaaaatcaccattaaaggactcccttgaagctcaaagatccaacctcctaaaagccccacaagcaagccttcattcagtggtaatcagagcacaagagcttcaagtaagtgctccttaaacctccattaattatttgctgtacgttcccttccattggtgttacttcattttctccatgtatctcctcacatgtcttgggataaatggttgtaacatgattctttatagtttccaccgataatcttgctataaaagctagattttattttctattgctcaaatatcttgttcttgtctataaccatgaattgggtcgacttaaggtcctttgaat

SEQ ID NO: 23201 - DNA, 380 bp, Glycine max
  unsure at all n locations
agctttatgcggcataattttagttgtttcttcttcctttatcttttaagatagtccatacaatcaggtctctccaatttcaagacatgttattctattaagaaattataagaactttgaatttttaaaactattcatatagacattagcaactcacattgttttaaatagaaattatgtgcgtgtttggatgaacattaatataattgattntgaatgaaattaattttataaaattgatttaaagtaatgtgatttatatttgaatgtttttaaagtatgttaggagtaaaacttaatattaaaattgtgttnttatacatatatntatgacaaatactaattacgttgnccatgatctttttatgttcacctatgtt

SEQ ID NO: 23202 - DNA, 300 bp, Glycine max
  unsure at all n locations
atgacacagncttatggtctttcctggattatatgctgcatacatcgggctcttggcataaatggagaaagtggatcccagcttgtcttcactcagcaaccatttctatccttattaatggcagccctacaaaagagttcaccccatctagaagcttgaggcaaggagaccccctaacccctttactctttaacatagttgggaaagcatttcaggcctaatgaaggaagcagtccggaagaatctctataccactacaggttgcgatgaaatatgagcccacaatattctgccaaatgc

SEQ ID NO: 23203 - DNA, 368 bp, Glycine max
  unsure at all n locations
tttgcatgcaagcttgctctaaatttacattgatgtttgtattgatgggaggaggttacatgccatttttgctttaagagtaacgtcccactggtaaaactaactttccaaatgtttgccttcgcaggaatggccccgaggaagcttgcctcaaagaggtccaggaaggacaaggcggccgaaggaactagttccgccccggagtatgacagtcaccgctttatgagcgttgtacaccagcagcgcttcgaagccatcaagggatggtcgtttctccgggagcgacgcgtccagctcanggacgacgagtatacntgatttcangaggaaatanggcgccggcggtgggcaccactggttactcctat

SEQ ID NO: 23204 - DNA, 397 bp, Glycine max
  unsure at all n locations
cttgaataanaagtcaagagatgtaactcttcttatgattntcaggtttttctcaagggtataactcttccaatggttttcttgaccagacataaacagtctataaaagcaagaccttgacttgcattcgaaataacttttgaacatctttgtgaacttcttcttcttcttcctttgccaaaagctttctaagttttctgttttccaaacctttgtctttcacagaaaacaaacgtgtgctatatcttttcattctcttctccctttgccaaaaataattcgacaaggactagcctcctaaattctttntgtgtctctcttctcccttttccaaaagagcaaaggactaaccgcctgaattcttttgtgtctccctttctccttttcaaagaattca

SEQ ID NO: 23205 - DNA, 412 bp, Glycine max
  unsure at all n locations
agctcggccccgggatcctctgagtctcctgcggcattttactttgcttttcattnatgggactggagaccttgctcacacttacaaatatggaaatgacagcttcatgcagcatacacaaggatcttctagtcgcactaaagatgctgtagagattaaccgactgcgggaggagctgcgtcaatcaaaggaggagatatgtgtttttcaatcagttgtccttcaattcctaccttctaaagcgcgaaacattattcatcatcatcatcatcatcatcaacaacaacaacaacaacaacaacaacaacaacaacttcaccggtagcaacaagaccaacaacaacaccaacactagcaagaccatgtagatgacccgcangcagatgaccaacacgaacatgatgaccaacag

SEQ ID NO: 23206 - DNA, 372 bp, Glycine max
tgttcttctacaactcgaggatgacttccctgtctgttcgaaccttctccactcgaaatcgcagttcgtgaaaaaatgaggttaagcttcttctaaccttcttttatgttaagcttcgaagaaacccaatcaataaggttcgtgtgaggtcacgaagcttgtattactactgatgtatgctaatgttggtggcacggaagatgcaagtcacgaatgagttattgatgaacaatagctactgggctaaaagagttaacacggttgtgctttataatcatatcttctaattgttaaggataactgcgtaagtgcatcctatctagtgttgtgaatcgttaaaatgtatgccttggaaacgacatgttagatatt

SEQ ID NO: 23207 - DNA, 374 bp, Glycine max
tttagcttgcattattttacttaggttgtgttcagcattacaattaacaaaaccaaaatcattattaactgaaaatgaatgaccaataacagacaaattccagaggccaatatcttcaagacaatttggaagctgaacatccccccaagggctgcggttttctcttggagacttatcaaagatagattatccactagatataacctccttaaaagaaatgtgcccattcaggacaatgaatgccctctctgtgggtattaccaagaggaggctggccacttgtctttcaattgcaaattgaccagaggactatggtgggaatccattatgtggaaccagatggtaggaccactttcagcttcttcagcaactca

SEQ ID NO: 23208 - DNA, 359 bp, Glycine max
  unsure at all n locations
tgtcatagaatgaacaagtagnnagctagttgtggttttgttncctaaccctcttgatttacttctgcttaattctgcccgtctgctccatatgcaagagaatcatgcctctattggaattaaattttccaacactctaagttaattgaaggtctattaacagggttttagattgatcttaactcccataccctcaaaaattcatcatagctgatatatcgtggactttagaatgtcatattgggagtgaggttttgatgcacatcctaattaataactagataatttagatgttgtagatttccacagttcacagttctaagtatagacaacacgtttaantaaattagttctaaata

SEQ ID NO: 23209 - DNA, 386 bp, Glycine max
  unsure at all n locations
agcttgaggtgagtntattcgttatctacgaagaatcaaaggcatataggctttatgatcctatctcataaaggattatagtaagcagagatgtggtttttgaagaaaatgaagaatgagaatgggacaaacaacatgagtcaactgatatatgcgagctagaatgggaagatgatgaaaaggttgtttccaaagaatctcctatagaagaagatgttgttgatgcacaaccggaggagtctcttgtcactaatcaagaaacttctgaagttcttgtcaaagggaggagtagaaagcaaccagcttggctaagagactatgtgttcggtgaagggttgtcagaagaagaggctgcattttacttaacattctttgccttggatact

SEQ ID NO: 23210 - DNA, 366 bp, Glycine max
  unsure at all n locations
gagatattctgacatgttattaggatctagcttaccaagcatctacttaaccctggcatttatcaagaaatttaaggtctattatatttatactgaagacagttgcaagtctgtactttgttcacatttcaaactcagtagatcttcacttcaaaggactttggttagagatataaaactatntttgtacatttcatttatccagaaatttagggtaatattatactaaagacagtcgcaagccagtaggttcatatttcaaactcagcagatcgtaattttttagaagttcacactgagaaaacagaatgaacaaggccgcctaacttagggatattttnctcaagataaaatccatcacatctt

SEQ ID NO: 23211 - DNA, 398 bp, Glycine max
  unsure at all n locations
agcttgtattgtcactcttatcttgactagttaaaactttttgaataaaatgagtttatcccatgttttgactccgaagtcagtgtgaatcaaatcactcctgcattttatctctagcatgcattcattattttttacctactcctcacgtttggttttttaggaaaaacaccataactaaacgcgccccaaggcatccctatcgcaccagatccaaatctagaacgatgggtgatcaagcggagacacaggaatagatgaaagccgacatgtcaactttgaaagaacaaaggggatgtcgagttctaccacgcaactcttctagctaccacgcaccatcctnccccanatgcggtaggacgaggaaggagcacactggggcacaacagcaaccccca

SEQ ID NO: 23212 - DNA, 361 bp, Glycine max
  unsure at all n locations
tcttatccaaagctcatcttggtggtgaagctccttcttccatggcttattccctagtggatggcaccgcctcttacctcttctcctttgtcttccgctgcatcttcatggtggaaaatcaccattaaaggacctcattgaagcccaaagatccaaccttcataaaagcttcgcaagcaagcttccattaagtggtaatcagagcacaagaacttcaagtaggtgctccttaaacctccattaattntttttctttaccttctcttccaattgtggttcttcatttttctccatgtgtctcctcacatgtcttggtctaaatgttggtatcatgattctttagaagttccatcgattaaac

SEQ ID NO: 23213 - DNA, 387 bp, Glycine max
agctttctaagttttctggttttcaaacattgttctttcacagaaaacaaaagtgtgctatatcttttcattctcttctccctttgccaaaaagaattcgacaaggactaaccgcctgaattctttttgtgtctctcttctcccttttccaaaagaacaaaggactgaccgcctgaattcttttgtgtctcccttctcccttttcaaagaattcaaaacgatgcagtctgagaattcttttgattcttccctttcccttaaataaaagatttcaatggagtaaccgcctgagatatcttttgtttccccttcacaaagattcaaaggactaaccgcctgagaactttatcttaacacattggaggatacatcctttgtggtacaagt

SEQ ID NO: 23214 - DNA, 415 bp, Glycine max
  unsure at all n locations
tgggataagaaactaagaaactatgaaaaaataagacttttataatatactaaaaatatcattaatgattaaatatggtgaaataaagaaaaaaattaaaataaagtgagataaaatatttaatttgataaaatttattaacttctaaaatgatatacagatacacgtgtatttaggaatgaaaacataatatacatgttaattcataatataagaaaaagttataatattttaaaattagcataataaaaatacagacgtacacgtgtttgtatttctgctagntatatataaattaaattattaaatatanaacacattaatttttaatcaacatactctattagaataaatgatctatactggttttcaatggtaatttggtggttttgtttaaatttgttatattttctaa

SEQ ID NO: 23215 - DNA, 396 bp, Glycine max
  unsure at all n locations
agcttgcatctcggacgtttcacatttactacaagtgaaaatgactgccgaatccttttcaaattggcgcgtgttaaatactttggtccttgtttgttgttccttgcataatgatgcacaagtcctctacatatctaatccttgtaaaatatacaagtagatctaaacatgcaaatcaattcaaatgacatatttagatcaaacaacggaaattaaatattacgagcgtacctccaaccattgcaaatcgaacgctaagcggtgcatacatgaacctaaagacagttntgttcttccagacccttactcgctctgaatagatgatgtatttttttctgaatagagaagtcagtttggtgatacaaaactgagaacaccccatcctatntatagagt

SEQ ID NO: 23216 - DNA, 371 bp, Glycine max
  unsure at all n locations
cgccaaatgctctataggctgatgagttggtccatcttctctaagtccaatcgtatcatgagtcatcacataaataacttcagcttcacacagtgcataaatccttatggcagctctcatgtagtcagtgaaaacaaagggcatntaaattttgctgaaacagatttcttgtagcatatgcagggctttctggagtgtatgtctgaatgttgaaatttaattaaaagggtagtcaataatccagaaacaaatgatggaagtcaagttttatttatctttaaagttgaaggctatacatgcatgaagcanaaagatggatgatgagtgaagatgcaatgtacttaatatgaaatttactgtattaggaaagt

SEQ ID NO: 23217 - DNA, 384 bp, Glycine max
agcttatgagaaatccctgttttgtggagagataagtccttgtttggctgatttaaagcatttgaatcacttgaacttgagcggcaattatttccttggagcaggtatgtcaattccttctttccttgggacaatgacttccttgactcacctcgacctctctcttactggattcatggggaagattccatctcagattgggaatctctccaatttggtctatcttgacctcggaggttattctgtcgagcctatgttagctgacaatgtagaatgggtatcaagtatgtggaagcttgaatatcttcatttgagttatgcaaacctatccaaagcattacattggctacacactctccaatctcttccttctttgacccacct

SEQ ID NO: 23218 - DNA, 367 bp, Glycine max
actcaagctgtagatttgcaagatcatcttcgctgacaactccttgattattattgccatcgatatgaagaagtgacaatttagagagtgatccaagactttcaaatggatttccactgaatttattcatagagagatcgagatatgttaaatctgtctcccttgaggtgcggagacttcccaaaaaagtcggaattgttccttcagttgaagatatgacaaaacaagttctacgagagaagtcaaatttcccagagaagttggaatggttccttcaagttgattgtatgacaaaagaagttcaacatgagaagtcaaatctcgcaaagaagttggaatgttccttcagttggttacctgataaatc

SEQ ID NO: 23219 - DNA, 384 bp, Glycine max
agcttgtatgattatggggtacccatcacatgtggtactaggtggcggtcgggcgatagtgcaaaacagttctccacatccacaaatcacgtataaacccaccatcccctgttgcccacctcaactgagctcacgtacttccacgtagctcttatcctcgttcctctctacgccgggtccccatcaatcctcccaagcttccacaacatccaagtaattcaacatccaagcatcatgaactaacatagccaagaaaacagggcagaggcagaaaactctgcccaaaacacaaaccaacatcacagcttttcacactcaaataccacagtaatattctcctcgttccaattcattaaccgttggatcgactcgaaaatttactgg

SEQ ID NO: 23220 - DNA, 435 bp, Glycine max
  unsure at all n locations
tcttatccaaggcaattcttggtggagaagcttcttcttccttggcttattccctaatggatggtgcctcccctcccctcttctcctttgccttccgctgtatctcaatggtgaaaaatcaccattgaaggacctcattgaagctcaaagatccagcctccataaaagctccacaagcaagcttccatcacatatatcctcatatgtaggttccctgaccctaactatggtgttaaaatggtaaattttataataaactccccacacctatcgtgagctaccctgcggattcctcgtcatgtcacttgaagattcctttctgtccttgctcgttgattccactcaagcctctaccatgccaaaacgaaggagacttagtatggattttagaaagctagtgacagtgctctgggtcanacacccacatcactacat

SEQ ID NO: 23221 - DNA, 386 bp, Glycine max
agctttggtatatagtgatgaggtacaagccctaaaggcagagcttgaaagagcccgggtagtcgaagagaagttcaagtccatagccatcaaagtctgaaaagagtatgatgaactaagggacgtcagtatggccacagctgaagccttggaacgagaaaccaagaaggctcgaaaggaagaacacgaccaaaacaagttttgaggggctttatagggcagcaatagtgagctcaagctccgaagaggtgaaaggaatcatcacgggtcaaaggcatgatctggaaggaggagctaaaggtttgccttaggtcgaaaagaaatttgtcccaacagttaagcgagactgaagggaatatgtgggccatcatcaataagtgcaaaga

SEQ ID NO: 23222 - DNA, 332 bp, Glycine max
tatccttatggcctgcctccggacatcaccccttgttgtcctctcgaagatttaagccaagcccctactttcgaggagcaacttccacctttatgaagactatcccgggcaagacgatggggaaggagatacccatcttggccccctgctccacctcaaagatccgtccccacatgaactatcccaatcgaacatagtccgccatatcccagcctcacccacacccgtaaaagaatctgttccctttgcggaagataagggaaagattaaggcgcttgaaaagaggttaagagcagtcgagggccttggcaatacccattctcggatttggc

SEQ ID NO: 23223 - DNA, 377 bp, Glycine max
agcttgaaatcagatattgtgaaggtagtttggactatgattcacagctttgcatgtctagggtttctagagagaaaaaggtccaagttccagagagttttgagagatttttccgtgtgaagatctatagagaccagagcttgaagcaagagccagtttgagagcttgagatgagtttgtgagtgattgtgagattctacacgtgaaagagacatcctcaccacttggatttttgcaatctttcatcttggtcttcttttagtagtaagaaggcttcctggtatggaaagctatattctctgttggatcctccctgtaggtacctgatgtaaaatatttctatctatttagcgatggtatgtgtggtctctatgcta

SEQ ID NO: 23224 - DNA, 372 bp, Glycine max
agctttgtttttttggaggcattattggcttctcttcctttaattttattttaatagccacatgctgatcttcacgtgttgtgcatttagatttgtgctgatgtatgaaagacaaatctttctctctttcactttaaaaagacatgcagtgggtcacacatggggatggtgaaagataatgtgaggcaatatacattgcccatatttactctgtagtctatatatatacttgatcctaaggaaggtggtgatattaatttttggaatagaatcttctgattattgaatatttatttggactgtttctatttcatagcattgatgcaaggtattttagaggcttctatagactttgaccagcaaacatagtgc

SEQ ID NO: 23225 - DNA, 257 bp, Glycine max
ttgcatacattccatacagatgacacacacaatctcagtttctgtgatttgcttttgagggcccatgttatttcttttaggaaaattattctgatttggaagcagtgggacacagctatatgactttgtttcaaatgccctaggggtgcattgcttcacaattccagtaaatgtaattcttttttggattaccgattataaagttactgctatcattctatttacatagaaatgacttggtatcatgctctattata

SEQ ID NO: 23226 - DNA, 335 bp, Glycine max
agcttggtttgatgtacttacccgttgaagactgatgataaccaagaacgatccatgaatcttgaataacggtcgagaatcttcgcgagattactcacggaaacgttactgaagcgcctgggcttggattgtattctggagaaatctatctcagcaaattctagagagggagaagagtctaaggggctgaaccctttccttcttcacttcttgcgctatatatatcaaaatatgggagaagctggacgcccagctcgaccaggcgagcgtggttgctatctccataacgaacgggccatgtgggcctggatgctatttacaccacactttttact

SEQ ID NO: 23227 - DNA, 268 bp, Glycine max
  unsure at all n locations
tgaagtcatgtggatgctacgcttncccatatttcttctatttcatatcgagtanccgttatgcaagatttatgctaaacccctgttatcattagttatgcataactgaaacattgttaaatctctcttgcactaactagagttacgaaactcttgagtatccctagatgtgtaagccgcgtgctttgcagaacttgtaacactgatccgagactagtgtaaatcacacgagatgtgattgctgcaggaataccatcttcctgttttc

SEQ ID NO: 23228 - DNA, 354 bp, Glycine max
  unsure at all n locations
agcttatgctgcaaacatttataatagacctgctcagctgcaaaatcaacatcagcagaataattatgacatttcaagcaacagatacaatccaggttggaggaatcatccaaatctgagatggacaagtcctccacaacaacaacaacctatccctcatttccagaatgctgctagtctaagcaagccatatgttcctcctctattacagtagcagcaacagcagcaatcacaacaaagacaacaagaaactgaggctcctcctcaaccttccttagaagagttagtgaggcaaatggccatccagaatatgcaatntcagcaagagacaagagccttcattcanagtctgac

SEQ ID NO: 23229 - DNA, 377 bp, Glycine max
  unsure at all n locations
tttagctttttcttaagctttttctacaaccttttctccccctttggcaacatcaaaaagccaaagaactcggaaatcaacacagatataacaatggagtagaaagatatagatatcagagtataaaacacaataagccaaactcacaaagaagaagtaatcaaaccagaatccaaataactgaaaatgtcaacaaccacaaaacatccaagactgaaatttanaaaaccacaagataaataagcaaagtacttagcaaaatagtgtaaattctaagaaactaaaagccaaaatacacggcttataaaagacatataatcagaaactaaaatctaagaagacggaggtggtggtggaagatcgaaactctgacgaat

SEQ ID NO: 23230 - DNA, 408 bp, Glycine max
  unsure at all n locations
ctggttcttaatttttctaagttctttaacaagctttgttcaatatacttgcccttcatttaactgtctctgggcttggtggccacgctcaacaaagtactttcgacacctactgtacgttgatttgaccaaagctgttatgggaatgttgcgacaatccttcanaaccttattgatacattctgagaggttgngtgtcatgtggccatatcgacacccttctctatcataagccatcgtccatttttcctttgaaatgcgatcaatccatgttactatggctggacttaattcacgaaatttttctaaattttatcacaatgtgcttgcaggagtgagactgcataaaattagtatgaatacaatttcaagttatatgaagttaaataacgtaccatcaaaatgaaa

SEQ ID NO: 23231 - DNA, 400 bp, Glycine max
  unsure at all n locations
agcttctgaanatcatagcatgtttgaaaatcaagtagaaaatgacttttgaggagaatttttttttttttttgcaaatgatcaaaatcattgctgttgtttttgtgacttttgaggtaaaaaaacttttgcaaaatgattaaaatcattatttttgtttttattattcgatggatctgtatttggagtgcacatcacaataagttgaaaactgtaaatcaaatatgcactcaaacatgatcttaataattaagaaattctagtttaattgattaaacagaatgttgattaagtagaatgtgtaagatcttgtttaattcttgcgggaaaaaaaaatataacaaggttgtagatctatatctttagctctccatttggtgcaacagtaatggttatggag

SEQ ID NO: 23232 - DNA, 428 bp, Glycine max
  unsure at all n locations
acttcaacaatattacaaaattgatttttatatctttaaattgattaaaaatatcattttaaaataattaacaaatatggtttttgaatataaaaaacacacgctatttcaacaaatttaatataaatatttatttttacgataaatacatttaaaaattaattatgaaaagaatcaagtccatcttacacatattatctcaaaattgaataattatatattcatatttaacatatttacattcttttttaatttatatatttcatataagtattccatgactattactgcttagtaaaaaattaaattataataaatttcattaggttaagtatttttaatgataacataggtttaattacaattttaaataatcatcttctttgatntaatataatatatatatatatcattgatattttgacatg

SEQ ID NO: 23233 - DNA, 396 bp, Glycine max
  unsure at all n locations
agcttgagatgttgngatatgacaagggccttcatgattgaccctgaccttcttgattgatcacgaccatggtcaatgtatcacggctattatcaagtgaaaatagtatcaaatcttcatgaaagtgcattttccaacttttccacttgattgagcaattgtatttctacaagataaaagctaatgtccaaaccactacaaaaaaaggatatttctaacgaaatattttccacaaaatttattatgtcaagaatatttgaatttttgatggaattttcaaaggattatattccatgggaaatttttgaatttgtgacagaatttacccaccaacaaatttttcatcaaaaagtattttaccgaagaaatacagatccgacagaatttaccaccgag

SEQ ID NO: 23234 - DNA, 415 bp, Glycine max
aactaagctcgaggattatggggtacccatcacatgtggtactatgtggttgtcgggcgatggtgcacaacaagttttccacatccacaaagcgcacataaacccaccatccccttgtgcccaccttcaactgaactcacgtactcccacgtaacccatatcctcgtttctctcaacaccgggtccccatcaatccttccaagctttcccaacatccaaataatacaacattcaaacagcacaaattatcacagccaagcaaaacaagggaaaggcagaaaacttttgccaaaacaccaaccaaaatcacagcttttctcacttaaagaccccagtaacaattccttcgttccaattcgttaaccggtggatcgactcgaaaatttactggaagtctctagtacttaagcataca

SEQ ID NO: 23235 - DNA, 391 bp, Glycine max
  unsure at all n locations
agcttgctctaaatntactttgatgtttgngtttatgggaggaggttatatgccatttttgctttaagagtaatgtcccactaaaactaactttccaaatgtttgccttcgcaggaatggccccgaggaagattgcctcaaagaggtccaggaaggacaaggcggccgaaggaactagttccgccccggagtacgacagtcaccgctttaggagcgttgtacaccagcagcgctttgaagccatcaagggatggtcgtttctccgggagcgacgcgtccagctcagggacgacgagtatactaatttccaggaggaaataaggcgccggcggtgggcaccactggttactcccatggccaagtttgatccagaaataatccttgagtttta

SEQ ID NO: 23236 - DNA, 408 bp, Glycine max
  unsure at all n locations
ttgaatgctctattcaatggagttgacaagaatatcttcagactgatcaacacatgcacangggccaaggatgcatgggagatcctgaaaaccactcatgaaggaacctccaaagtgaagatgtccagattgcaactattggctacaaaattcgaaaatctgaagatgaaggaggaagagtgtattcatgacttccacatgaacattcttgaaattgccaatgcttgcactgccttgggagaaaggatgacagacgaaaagctggtgagaaagatcctcagatctttgcctaagagatttgacatgaaagtcactgcaatagaggaggcccaagacatttgcaacatgagagtagatgaactcattggttccctttcaacctttgagctaggactctcggataggact

SEQ ID NO: 23237 - DNA, 394 bp, Glycine max
agcttagatacgtcacttatacacgtatcaattaagtatttaaagagtgttggcattagatgcatgaagcaaattgaattatcggtgcttcatagatttagatacttcaccgatatacatatctgtgaagtatccaagagtatcagtatcaaacatgaatatgtgaaacaaattgaagtatcaatgcttcataagtcccttaccttggcttgtgaaatgatggtctaagctcttgggttaggcctcagatggaattctcaatttgcccatttcaccaagtgcccatcaattataaagcttggacctttcggttgctccaaggatattggattcaacatccttaactctctattaagcttttgaatggagcaatggtatttagtagtactagtat

SEQ ID NO: 23238 - DNA, 352 bp, Glycine max
ctatcttgaggggatgtcctattcattgactttaactatctgttcgttcaacttctaacccatccaacatttggtatcccaacttgggtgcctttcatcatgttactatcaatgttgaaaacattcagtagtgttcttgatttgagggtcccaatcaagtgattgtaagcaatggtcaaggtctggaaacaaatatattggttcatcttccttataatcattctactaatttagttgtcaatagaatattgcatgttccaaccatttctaaacatcttccaagtgtaagtcaatttataagggataattcaatctccctttgaattcaccctaatgtgtgccttgttaaatc

SEQ ID NO: 23239 - DNA, 367 bp, Glycine max
  unsure at all n locations
agctttccagtttggtagtttctccaactttagttacaaacccatatggatgaaatgatagaaagcttttttctttttttgtcttgaagcgattgcatgagctgggttttcttccatttggtttgttatttttgtatgcgttactccaaaagtttgagactaggctatattactttgtttctggttatatggaataaaaatttgagatttttatgctattttagatagagtgcaacgttgaagtttgaacttttctgttttagtctttttctccttgggttagttcttaatttaaacataanatgtgtattataatttataacattctggttcttaaatagatgtattgaattcctctgtttctcat

SEQ ID NO: 23240 - DNA, 375 bp, Glycine max
  unsure at all n locations
attgacttattgcattctatatttaaatatcaaacataatttcttacttcccaacatgttttcaaacacatgtttaataattaaacgccattaattgaaaattaattatagctggacaatgtctttttaaaaataattattgatacaaatttaattaaaaaagaaacaagatatatcactatcttgctgtactagttgtctttttcctttcctttcctttaaccacttggccaatatgagacaccaaacaaagataagctgtggcgtctaactgataagacatttcaagtctccatttttcaagtaaggttttaagaacaatgggaagacgttgattttggtcagcagaaatatatcctatnactctattcctac

SEQ ID NO: 23241 - DNA, 305 bp, Glycine max
agcttataacctttctttaagctttttttaagcttatttcagtaagtttcaagttcgtggttaagcttttgatataacttctaatgtgaatgtgatatgcttaggcgcctaattaagctatttactcaaatgcaccttacatgtaattgtacacatattatttgcctatatttgatgtttggtgtttttttaaatattgttgttccttagtgagcttgaaacattaacgtgcggagtaaaaattgcatttttgtttaatgtttcaacaaaaccttttttttttcatttttttggggggggggggg

SEQ ID NO: 23242 - DNA, 443 bp, Glycine max
  unsure at all n locations
tttcttagtcgtctgtaaagatgattaggtgttanttagcggcgatgcctactgtagactgtgtgtctcccatgtttaagttgtatgtaacttgtattttcttcacagatggggcatgcgtgatgacccttaacactgtaaccgctgagattcccatatgctggaaagtcattaatggtacaaaaaagcattgcacgcatttcaaacgtctccttgcgaaacgcatcatacactacaaccccctcgtcccacaactttctcaaatcttcaatcaacggacttagataaacatcaatgtcatttcctggctgtcttgggcccgatatcatcatagacaacatcatgtattttcgcttcatgcacaaccaatgagacaaattgtaaattactagtagaactggccatgaactgtgttgagtgcttaaggagccatatggattcat

SEQ ID NO: 23243 - DNA, 385 bp, Glycine max
  unsure at all n locations
agcttttattctagagcatcccgaaggagaaagctcacaagtcacaagtgtcttgtaagaccaaacctggaatttgcttcgagggagggagaccaagaaaaaaaaatgtttacatgtatataacatataaaaaaaggtttaatatatgatatatatttaatatttttttataaaaatatatataacaatatcaagtaaaaaacattattatctaactaattatatcatttatataaatataagaaacaaatataatatttnttcttgtaattataaaaaaagacaaacttgtatttaaatatattaattatacatttatataagagacaaatagatacaattnttatatccttaatgtattggtgaagttactaatgagataatc

SEQ ID NO: 23244 - DNA, 377 bp, Glycine max
aaaccagcttactcatattcaaaatgattgatgtttatatattgtggcatatatcgcatgtgatatgtgcacactttccccccatatataacacatatcagatcgatgttaataagcatttgctaaaatataattctctaaattgtaggaggttgtgttaatttcatcctcaaaatagtgcatataaataaaagatatttattattattattattgaattaaaatcaaacttaaatgttaatacgatatcaaaatttattatattgatgattgttaggccatcaaagcactcaatatcgctgattcattatttaattatctacatatgcacgtctaataaaatattgttagaaaatacattctctagcatgagagag

SEQ ID NO: 23245 - DNA, 372 bp, Glycine max
  unsure at all n locations
agctatgaccattcgaatttctcaagagttgccgttgttcaatttcgagcgtgtagatgagttatgtccccgaatcggacatctgtgtgaaaagttatgaccattcgattttctcgagagcttccgttgttcaatttcgagcgtctcgatatattatgaccccgaatcggacatctgtgtgaaaacgtatgaccattcgattttctcgagagcttccgttgttcaatntcgagcgtctagatgagttatgtccccgaatcgaacattcgagtgaaaacttatgaccattcgaatttctcgagagcttccgttgttcaatttcgagcgtctcgatatattatgttcccgaatcgggcattcgagtgaaatgtt

SEQ ID NO: 23246 - DNA, 215 bp, Glycine max
ggtttcctgaacataggaaatcaaagcttcaacaatggggagatggaccatttcaagtgcttgaaagaatcaatgacaatgcttacaaagttgagctgcccggcgagtataatgttagttccaccttcaatgtctttgatttacctctctctgatggcagatgtagaatccgatgtgaagacaaatccttttcaagatggagagattgatgagga

SEQ ID NO: 23247 - DNA, 303 bp, Glycine max
agcttgttcaatggtaatagaggcaattagaaggtaagacatgcatgtgtactttgtgagaagttaaccaactaattcatttgttgtgactttcttaaaaaaaataataattgtgaagaacggcttctctgccaacacaaccaactgtagtcaattaaggtgtgttgtttggagaataagaggataaaagaagttgaaattcacaaagtgagattcacatttctacacttttagtttaaaattttatcctaccttaaattttttcatttcttttcacttacaaacctttaaatttgagaaaat

SEQ ID NO: 23248 - DNA, 387 bp, Glycine max
  unsure at all n locations
ttctataatcaacgcacattctccatcctgtgtctgttctggtatgaatnagaccatttcgaacatttcttattactgccattcctcctttctttggaacaacttgaacaagactgacccatgagttgtctgagattggatagataaagcctgcctctaataacttgagcacttcttttcttacttcctccttcattataggattcaatcttctctaggttgtcgcacaggcttataatcgggcttcaaattgattttgtgcatacaatatgatggactgattcctttaagattagaaatgtgccaaccaataaccgacttacgtcatttagaatctgcactaattgatcttcttctctcttcttcaaagagttgctatttataaca

SEQ ID NO: 23249 - DNA, 385 bp, Glycine max
agcttcatgcatggatgctgagacagactcttcatcagaactttgtattggaccatctagtataatctttatcaacaactcaaacatttggacaaactcttgtgcaaatttggctagagtattctcacattctcccattccactgaaaacggcatctggatgacccaatatcatataaccacaaagaacaactctcacaggataccttgataacctaactaagctattgtttgactccctgactgaatctactttctttgcctgtcggcttctcataaaactcttggaagtagcctttttcttggggtaagcaacccatttaagaagattatcaatgttatccaagctagacaaattgttggcaggagccactgttgtagacact

SEQ ID NO: 23250 - DNA, 344 bp, Glycine max
  unsure at all n locations
ggacctataaatctcagcttgagttgtgaaaacttgattggatcttccatttntttgtgtagagttgcngggaaacagaattcaccaaaaaaaaagaaagaaaaaagcatagagagaaagatcaacatggtgttgaggaaagtgggtaaatatgagattggaaggaccgttggagagggaacgtttgcgaaggtaaagttcgctcataacacatacagtggcgagagtgttgtcatgatagtgctataccgtagcgccatcatcatacacaatatggtcgaccaggtatttgtttttttaagtactacatcacgtgaattcctgaaattacaagattcagttca

SEQ ID NO: 23251 - DNA, 327 bp, Glycine max
  unsure at all n locations
tctatttgtactcatgagtggtaagnngaggtctaagtggattggtccttttgttgttactaatgtttttccttatgggacaattgagatcaaaagtgactccacaaataagatcttcaaggtcaatggacatcgacttaagtcattcctcacaaactcttctttagtggacgtagtggtggaagagacttccttactccaccttactcttcctccaccatgacttagggagtttttctttttctatctccttctttacttttattacatttttccgattctatttgatggtttaattacttttaatcttttaattgtgctacattg

SEQ ID NO: 23252 - DNA, 435 bp, Glycine max
  unsure at all n locations
ntggggctgaaaattatataacagctccaatgttcttttttangccctcttctatcctctctctcctctttcgttttgagttttacgcttctcttcttctttcaaacacttttttgttttgcaattccacgttttacttttcattttagcaataagatatcattctctattgattaatggaaggctaagtctccagcgttgctttctcttgaggatctagcacagttctctttgaccgggaggccaacagtgacggccaattctaacaccgtcaatcgtggacccactaattccacaaggagcggtaatgttagcaacaacaacattagtggtggaagaccaaaagtaccctctcgggtgtttgctatgagtggttcataagcggctgccttcgacgatatgatacagggtaagtggttgattgctgataaacta

SEQ ID NO: 23253 - DNA, 375 bp, Glycine max
agcttggttatctccttcttcactacatcaagaatcactgggttgagtcttctctgtggctgtcttactggtttagctccatcctctaaatttattcgatgcatacatgtggatgggctaataccaggaatgtccgccagggtccagcctatagccttcttatgcttcttgagaactgacaacaacttctcgtcttgctcatcagcaagggaggcagatataatcactggaaaactcttgcaatcatccaagtaagcgtattttaaatttgatggcagaggcttcaattctggtgtggtcggctggacagtggtagaaggagatggtttctcagcctttacctcataaagaaagtcagaggtatgtgtacttcct

SEQ ID NO: 23254 - DNA, 426 bp, Glycine max
  unsure at all n locations
ntgatggtgtcgagaagaaatcacatgcttgtcatcttcaaaaagggggagaatgtgaatgtatgtatacatgattntgatgatgtccaaagaagaatcaaacaaagttgcttcaaaagataagcatggcttcaagattaatacaagattgcttcaacaaaacaagccttgcttcaagattaactcaagatcaagccttgccttatagcaaagtgctttcaagacattcaaggctttggtaatcgattaccggaagatagggttgagaaatagttggtgaaaagagttttgaatttgaattttaacatgtaatcgattaccatatgtctgtaatcgattaccagcaacggaactcttgaaattcaaattcaaaagtcatgacccttcaattataactgtgtatcgatacacaacattgtatcgata

SEQ ID NO: 23255 - DNA, 391 bp, Glycine max
  unsure at all n locations
agctttcttctacatgatttaatttanagagaatgagagacaaggacgtcaaatttatccctattattagaattatgagtgttgtttatagtaatggcataaaattgaaaatcctaatgagtcattggagacatcaaacaacaaccttcaaattgccccatgcatagtgtcgcttgacaacgttagaattcacaagtgattgtcttcctcgaatttcaactagcccgcatcacttacactntgcatcttacgtttcagggtcatacaatgctcaacggaatgccctggaactccttcatgataagcacatgttggatccgagttgtattctcgaaaaaatggaggtcgaggaatctttgntgggattacgactaccattgcattattgagt

SEQ ID NO: 23256 - DNA, 354 bp, Glycine max
atgaagaagtgtagaaaggtgaaacttcctgcttttattcgttgaccacagagtggtacctggagatatgttgcggggatcagaagaccttggggacgtcaggtggggtgctattgcccaaaaacaagcttgaccaatcccgacccaacccgggcatagtcagtcagtgagaaccagtgatgtacctaaacaggccagctcctgacagtcaacagataaaaagaacaaagaccacatagcaaggaggcttgtgtggtggctggccaactgtgaatcttgagtgatatctgtgatatgtgttagtgcttaacactactgagtttaaaaaggttggctaagattttgtttaaacat

SEQ ID NO: 23257 - DNA, 302 bp, Glycine max
  unsure at all n locations
ccgccccgggatccttaaggcacctgccgcatgcagcttcttggaaacattatacncgagaggaacggctcgcggccaatattttaacagtaggttcacatcggttttcataaaaaaacaaaaataacgacgttaaccaatgatggccacattaacattagatttctggagaaactgatgttacttatcatacgtaacatcggtttccacaaactgtgttaaagatacacatattacaactatgccccggttatgttacctctgttttcgaaatcgtgttaccgacaacttaatctacattt

SEQ ID NO: 23258 - DNA, 332 bp, Glycine max
agcttgtgatattcgagtctgggatcggctcctaggaatggaaggtacccaataactgtcaagcctattggaactggaggccaacgagatgaaacagcggcttcattggttgaattcttgaaccatcttatcaagcatagcacactgatcagtgtgactagaatggttttaattggatgcaagttggtggaatcccatcaccacaaatatggtcgtgtgacacataatgagctcaacagcattcttgattatgcatggtgaactaccatgtgtttcctagttatttttgcttaattaacctgcgattgagtgaattgtcgatctcatcatct

SEQ ID NO: 23259 - DNA, 393 bp, Glycine max
agcttcgatcgaatcgtttgcggctttgtggagagatctgctgtttctcgatctgttctcgcaatgcgaggcgatccgagtctattctattgcttgagttcgtcgtccgagcaagatccgatgctcgtttttagcgtttttcgctaaacgacgactttttctggttgtatttgcttaccgttgttgcgttctcgttggtttgaattgaacgctaatgtttaagttaactaaattctggagcgagtctcagtgtttttgtgcttcgacttgtgaactttacttcatttagttattgtaaatttgtcctcaactcaaatctaagtgaatgagctacttgcttgagctgccacacgaagcttatgaattttctactagtgtactgttgactgttat

SEQ ID NO: 23260 - DNA, 300 bp, Glycine max
  unsure at all n locations
cttacaaattataatcaagtcaagatgagtatcnttcttcatttttatgcactggggtagtattataggagcaaaacattaaaaattaaagacataaaacactaaaattaacatcaattcatgatttcttttatctgttagatatactgtctacattgatttaaattttttgtctataggaataaggataacatctatttttttaggaaaatgtttagtgaacacacattgtgctatgatacacctggggagaaaaaagaaaaagagaagaaaaaatatagatttaataaagcttatgat

SEQ ID NO: 23261 - DNA, 393 bp, Glycine max
agcttttactaaagtattctctagtttagagtcctgcatcagtacaacccttattccaacaccaaaagcatcacattcaatatttcaaaagctttatcaaaatttgacaaacaaagcaaatgtgcattggtcaacttgtctttcaatatattaaaagttgtctcatgcacatcagtccacttgaacaccacattcttttttacaagttcgtttaaaggtgcagcaagtgaactaaagcttttcataaatcttctataaaaacttgctaaaccatgaaaagatcttacctcattagcattcttaggtacaggccattccttaatttcctttaccttttcttcatcaacacttattccttttgagctaatgaaataacctaagaacacaactgat

SEQ ID NO: 23262 - DNA, 343 bp, Glycine max
aactaagctctctcagttgtcttcacaaataatcatcacacagcttagatttttcttgactacccagcatatgtgccgagaccccatacccatcaaatttcagagagaaagaagtccacccaaacctgaattttcagagtccctctcgtagccacgcacttcacgactctcaaaatgccctcctttcgcgatgtggagcacaaatgagcaccacaagttggagctttgttggggtttcaatgggaaatggaggagaacgatacacaccgtgaggaagaggagaggctttgaattttctggtttggctgagtgaggagagagaaaagcttttttggtttaaata

SEQ ID NO: 23263 - DNA, 351 bp, Glycine max
tttataataaacaagccgagccgaaccgagtcttacgtaagtcgaattgaagaccctcgacaagctgttcggctcatttccacccctacctgcaataacatagaagtgggtaaccccacaattttacttattccaattatcactgctcttttccccttgattttcacaccgggcctaagtaacaactcaatgcagcccttgggagcacaaggaacaaagaagggctttcttcctcttatgcaatttcaattctttagcaataacttaattttgtagattttttaaaaataaattcaatatttagtataattattactttttcacatgtcttttaagtactaattcatttca

SEQ ID NO: 23264 - DNA, 349 bp, Glycine max
actccgcttataatcaaaaagcgttccccaatttctttttgcgcagcacacttcttccttttttgttttgtatactctatatctcttcctatcttcttgaaaaaatttcgtggctcttccactggtgatgatcatggaagcctaaaactaatcagtcaaggatccactcctagcaacgcttaattcgagttttggtttaatatttcaatattgtgggaatgtgcatatttttcttcaatcctattttcaaaataggttatggattcatttcctaattataaatttaatcatacattgtttggatgatattccaacctaatttgcgatctgcatgaatctagggatttat

SEQ ID NO: 23265 - DNA, 392 bp, Glycine max
ttgcatgcaagcttgttgttaggatagaacctaatgacgatcacatataccagatgacattgatgatcccacaacttttcctcaagcctatgcaggtgtcgtgggattcaactgtgtttgggtagtacaatgataatgtccccttgtacataaagcatgaagatcatggggaaatagcacacgatggtcaatgtatgaacatcattattataaaaattatggattatgaaagtaactctaaatgacagtccattacctaattgattgtcttgaattgatccataatttactttattgtaacaacaatagtcaatcaatgagttaagtctatgatcagggaatgcctctgtgtatggattcaatcgcaggttgaatctgaggattatattaag

SEQ ID NO: 23266 - DNA, 284 bp, Glycine max
ataacgggaagtcatcactcccacaaacctgaaaggccaactcgcaacagttttcagtgcttgccaacttcacctggcataacaagaagtcatcactcccacaagcctgaacgaccaacttgcaaaagtccttaatgctcgccagctacacctagcatagaaaaagagcaacactcgctgttgaagtgagagaggacttagattttagaacgttggccctcactcactcatagccagagacggcaaagggggacgatggtgacccaaagtatggctaagcacat

SEQ ID NO: 23267 - DNA, 346 bp, Glycine max
  unsure at all n locations
tatgcatgcagcttttgggtatgactccggagaactggatgttaaacaaggagacattcttaagatgtttaagctctgtcatctcaagtggtagctcgcccgagaggttattaatgtacatatggatctgctcaaggctttgaattntccatatgccaagtggaatttctcctgtcaaatggttttcacacaatctaagatcacgcaatttactcaagtttcctaattcgcttggaattcctccttcaagttgattgtaattcaaactccactctttcagtgattcgcaattaccaatctgtggatgtattttccctgacaataggttctccggaatgaataacat

SEQ ID NO: 23268 - DNA, 72 bp, Glycine max
aaaaggaaccaaacagagaggaaggaaaaaagcaacaggagtaccaacccccgaaaaaaaagcgggacaaaa

SEQ ID NO: 23269 - DNA, 249 bp, Glycine max
cctaactgacataagctaaaaaaccctagtcggcatcaacttaaaaatagcactgaccgatgttgatcgaaaataccctagctaacatcgacgaaaaatagcctggctgatgtaggcaaaaaaaccttagtcgacgtctaccgaaaatctgtagtcgacattggctgaaatatcctaaccaaggttgaccgataatccctagctaatattgactaaatagtcgctctaactaatgcgtgtgaaaagcct

SEQ ID NO: 23270 - DNA, 387 bp, Glycine max
agcttgcttctacaatttccccgtttttgatgatggcaacttcaaaaatcaagagacacacatgtagaagcaagcttcatgatgaatcaagattgattcaaagagttttgatgataacaaaggtgatgacaaaaagctcaaaagtcaagaacacttcatgataacaaagatgatgatctcaagaatcaaagaatgagttcaagattgaatcaagaacatttcaaggttcaaaaggaaatttgatttcaagaatcaagaatcaagaatcaagtttcaagattcaagactcaagattcaagactcaagattcaagactcacgattcaagaatcacgagaagacctagtcaagataagtattatagagtgttttcaaaaactgagtagca

SEQ ID NO: 23271 - DNA, 389 bp, Glycine max
  unsure at all n locations
nttgtttgttgaaatacaagaaggcatgatgagtgttatcatgttggtgaggtttctccttaaggccagcacttggtttgggctgcaccatgttttccttgtgcctagatagtgtgagaatgtcattcaccatctacatgtgtatgttgaatagatagctaaatgctttgcaaatgtgcatatatgttgaaaatggcacgaaaatgcgtctcgaagtaggaacatatgatataaaattgcctttcaagaatgagaatgagtagtacaaagattgctttttcaatgaaagtgcgacataagattgttttcaaatgagtgtgaacatgtgcgaatatataacatgaagttgcctctcatatgtatgaacatatatgtgaatgaaacgtgaa

SEQ ID NO: 23272 - DNA, 365 bp, Glycine max
tcgtattacaattcactggccggcggtttacaacgatgagactgggaaaacccttgcgttacacaacttatcgcctagcaacgcattccccttttagcagctggcgtaatatgcgaacaagcccgcacctatcgcactttccaacagttgcgcacactgaatggcgaatggcgcctgatgcggtattttctccatacgcatctgtgcggaattcacaccccatatggtgcactctcagtacaatgagctctgatgccgcataatgagctagacccgaccccgcctaacccgttgacgcagaccctgcggttattccaaagtatacaaaggagggcgcttgggaaagttcccttttgcctggaacg

SEQ ID NO: 23273 - DNA, 378 bp, Glycine max
  unsure at all n locations
agcttggttntgggcaatagcaccccacctgacgtccccaaggtctcctgacccccgcgacatatcctcaggtaccactctgtggttaactaataaaagttggaagactgactcttccacgctttctcacacatggcttattgggttatggggcacccgtcatatgtggtactatgtggcgatcgggcaatggcgcaaaacaaatatcccatttccacaagcccaggcataagcacaccatccctagttgcccacctttaaattgagctcacgtacacgtacgtagcccttctcgttcctctcagcaccgggtccccatcaacccctccaagccttcacaatgtcaaatccattcaattccatttgacatgaaactac

SEQ ID NO: 23274 - DNA, 347 bp, Glycine max
tagcccaataatattgctaacaataatggttatatctatatttctaactccctcccctaaactatagttcacttagcatcacacttgttacaaagtattaaaatgtcgcaacatctttaatgtatctcagaatattgttaggatcatattgcaaggtatgaaagttgagtctcacattgaaagtttggcatttaatgtagggttttttacgcctccaccttcatttttccaactacaattgatggcttttatggtgtagttctggtagggtcttaataattggtattagagcttcttcagtgttgttaaatggtggcgctacggctaccatggctgaatggcatcat

SEQ ID NO: 23275 - DNA, 397 bp, Glycine max
agcttgtcagagacaattgcaaatttttctcttatctttccatcaagaccaacatgactactgtgctttagattagttgattatacctttatgcttcatcatggtgagcatcactttgaagttggaactacattataataatatacaatttataatataattagattccattatatataattaaaaccaaaaatcacctctacctgacacactcttataatgttttttccaagaaaataatcaaaacaaaaaagaattttcagacatagaagactacagaaatatataaaaatatggtctagctgagtcttcccagtccttggaggcccctgaaagagagttggttaggctcgattacaatttttagacatgatataaatggacaatacaacctctt

SEQ ID NO: 23276 - DNA, 434 bp, Glycine max
  unsure at all n locations
atctttttgggattgtttttttcccctataccctttcccatttggagtattaaattaaggttggcttggaggagcttangctcaaaaggatgatggtctcggaaggatgtgcaagtttatatagcttaccatgttggtctataatgtatcaatgggtttatgggtttaaggagacattggaggtattgtcaatgaattttttgtttttaatccttttttcttggattatgatggtttgtgtataaagctttatctttctgggattctttttccctatccctttccccctttggagtatgagagcaaggttggcttggaggagcctangctcaaaaggatgatggtctcggatgagagcctcgagctactctcttggtctttcacacacttcaagtcttttgttgggccaatagtgcacatgtcattatagatct

SEQ ID NO: 23277 - DNA, 350 bp, Glycine max
agctttgagacaattcattcgacaataactttgtactcggatgtctgattgagtcccgtaacatatcgagacgctcgaaattgaatgttgaagctctcagccaattcaaacgacaataactttttactcggatgtctgattgagcctcgtaatagaacgagacgctcgaaattgaatgttgaagctctgagccaattcaaacgacaacaactttttactgggatgtctgattgcgtcccgtaacatatcgagacgctcgaaattgaatgtagaagctctgagacaattcaaacgacaataaatttttactcggatgtctgattgagtctcgtaatataacgagacgctcg

SEQ ID NO: 23278 - DNA, 324 bp, Glycine max
  unsure at all n locations
ataatttnagcgtctcgtatattacggtttctatcagacatccaagtaaaaagtgagtatcgtttgaaatggctcagagcttccacattcaatttcgaacgactcgatatatgaagggactcaatcagacatccgaataaaaaggtattgtcctttgaaatggctcagagattccacattcaatttcgagcggctcaatatattacgggactcaatcagacatccgagaaaaaaattatttccgtttgcatttgctcaaaggttcaacaatcaatttcgagcgtcttgatatattaccggactctatcagacttccgagtaaaa

SEQ ID NO: 23279 - DNA, 394 bp, Glycine max
agctatgcttacaaactcttcatccccctcaacaaaagactctttcaaatcgcttctaccattataacaacaattccaaagaatattgttcatattctatttatttaataaaaattagggacattgatgtttagtcatgcatactcttagagtgatctctattatatatttgtagcaagaattatgatcatactttaggtgaaaaaaatggcatacatataatgtttgactttctaaagtcacaaagtatggaatataaataacataaccacaatcagatatatatacttaacacgtttagtataaaaaatttcaaacaagtacaataaaaacctcaactaacccaaacaatagaacataagtgtcagtaatgaagcgatcacccaagataaac

SEQ ID NO: 23280 - DNA, 445 bp, Glycine max
  unsure at all n locations
tgcaaactaagtgctcacctttagtagaggagaatttcttatgctggttcatggtaaccttttcctctagatgaccattaaggaatgtcgttttcacatccatttgatgtaactcaaaggtcaaatgagctactaatgccataattattcagaaagaatctttcttaaatacaggaaaaaaaggctctgtgtatcaattccttctctttgagtgaaccctttggccacaagtcttgccttatgtctctcaatgttgccttgtgagtctttcttgggtttaaaaacccatctacatccaatggcttttacaccactaggcaactgtacgagatcccagacttggttaaacgccataaaatcatctcatncttcatgggatatgtcaacaagttgattctttagaactcatgggcctgtgaaacgttcaggatcatttgcagctcta

SEQ ID NO: 23281 - DNA, 348 bp, Glycine max
agcttcttatccaaggcttatcttggtggtgaagctccttcttccaaggcttattccctagtggatggcgcctcctctctcctcttctcctttgtcttccgctgcatctccatggtggaaaatcaccattaaaggacctcattgaagctcaaagatccagcctccatagaagccccacaagcaagcttccatcactttgtttacagcatggccatttaagctacatgcaattatattgttaatgactcttgactccatcatcaactagattgcatgcttacccattgtgcattttcttgggtactatatacgagagagatattggtggttagtttaaataactggatg

SEQ ID NO: 23282 - DNA, 404 bp, Glycine max
tcttcgccagtgaaaggatcgatgtgtgttttataagaggcaaatttgatcatcctactatgacgactgagaaaactggggcaaatgaagagggtgagaaagagggagaaacccatgctgtgactgccattcctatacggccaagtttcccaccaaacccaacaatggcattactcagtcaataacaaacctcctccttacgcaccacccagttatccacaaaggccatccctaaatcaaccataaagcctgtctaccgcactttcaatgacgaagaccacctttagcacaaactatagaaacaccaacaaaaatgaattttgcagaaaaaagcctggtaggttcaccccaaattccgatgtcatatgctaaacttgatcccatttccactcaataattcaatg

SEQ ID NO: 23283 - DNA, 391 bp, Glycine max
  unsure at all n locations
agctttacatgatngattttggtgttagatttggtcaatttgaaggcaagatatgggaggagtgataaaattttcactgaattgcttgtgttgttgaagaagatgatccctaaagataacaagttgttgaatattcactatgaggtgaagaaaatactatgtcctattagtatggagtaccagaaaatacatgcatgccttaatgattggataccaaaaaatgagtttgcagaaatgcataagtgccctacatgtggggtatcgtgatacaaagtgaatgatgatgactacagtaatgatgtaagcacacacaataaccatccaacanaggtgtgttgctatcttccaataattccaatgcttaagtgattctttgctaatggagacaaca

SEQ ID NO: 23284 - DNA, 167 bp, Glycine max
gatattatgtcctgtgggtatggagtaccacaaaatacatgcttgccctaatgattgcatttcgtatgggaaatagttggctgaaatgcacaaatgccccatatgctgggtatcacgggacacaatgaaagatgatgaatgtaatgatgatgcaaccacatgctgta

SEQ ID NO: 23285 - DNA, 302 bp, Glycine max
agcttccagagtttgcccgtatttcgatatcatacggggactttatgccatctttgatcgccaaccaaatggcagtcgtgacctctggaaagatttatcaatctcctttcccttggtggttcaaccccaacgcaacttgcgcgtatcaagaggtaccccgaggcattcaatcaaacagtgtgtggccctcaaacatagagttcaaagcttgaccgacgtggggtggcttacattccaagaagacgacccaaatgtaaatacaaatccgcttgccaatcatggagggtcgggagtaaatgcaa

SEQ ID NO: 23286 - DNA, 181 bp, Glycine max
  unsure at all n locations
tctgtgcggtatttcacaccgcatatggtgcactctcagtacaatctgctctgatgccgcatagttaagccagccccgacacccgccaacacccgctgacgcgaaccccttgcngccgcttctnatttactttccatnaggctgctctcgacgcgttagcgatgagctcgcacttcatgtt

SEQ ID NO: 23287 - DNA, 379 bp, Glycine max
agtttcttatccaaggctcatcttggtggtgaagctccttcttccatggcttattccttaatggatggcgcctcctctcacctattttcctttttcttccgctacatctccatggtggaaaatcaccattaaaggaccccattgaagctcaaagatccagcctccatagaagccccacaagcaagcttccatcaagtggtaatcagagcacaagagcttcaagtacgtgctccttaaacctccattaaatttttctctttaccttctcttccataggtgtttcttcatttctctacatgtatctcctcacatgtcttgttctaaatgttgttaacatgattctttagagtttccaccgattaaacatgctatagaagtt

SEQ ID NO: 23288 - DNA, 247 bp, Glycine max
gggatggcggatttatgtgtgatttgtggatgtggatagtcaacttgcacattcgccgaccgccacctagtaccacatgtgacgggtaccccataatcctacaagcttgaactgaggaagtgtggaatggtgatacttcctacttttattcgtttgaccacagagtgggacctggagatatgtcgcggtggtcaagagaccttggtgacgtctggtggggtgctactgcccagaaccaagcttgacc

SEQ ID NO: 23289 - DNA, 340 bp, Glycine max
agtttgtctcagcgtttatgcaagacagagaccaacatgttatccattgtcagcaagtaccaagaagaattaaatctagccacgacccacgagcacaaagtggcggacgagtatacccgagtatacgcggaaaaggaggctagaggaagggtgatcgactcgttacatcaagaggcaacaatgtggatggaccgatttgctcttactttgaatgggagtcaagaacttccccgattgctggccaaggccaaagcaatggcggacacctactctgccctcgaggagatccacaaacttctcagctattgtcagcatatggtagacttaatggcccatataa

SEQ ID NO: 23290 - DNA, 380 bp, Glycine max
  unsure at all n locations
ggggagcacgaaattgaaggataaaataaaggagagaacgtgaactttgagttgtgtctcacaagactctcattcatcaaagttacaacaagtgttacacaatgttctgtctatggactaagtagcttccttgagaaactttcttgagaaaattcttaaagaagctagagcttatctacacacacctctctaatagctaagctcacctctttgagatgagaagctagagcttagctacataccccttataatagctaanctcacccccatgacaaatacatgaaatacaaaaagtccctatacaagactactcaaatgcctgatatacatgctaaaacctatactactagaatggccanatacaggccctatgaagaaaa

SEQ ID NO: 23291 - DNA, 380 bp, Glycine max
agcttgtactttcaatgttctttcatatctagagttagacctttacatgaactgtgacagttttgtactttcgataatgttcattcatttatagagttgtctaccattttcaatgtgctccaaagaaagaaattattatatacctaagctaaggaccttctattggtgtcatgaacattttttttttaaatgaattaggagttttttttttggttacaatcaatcaccatttggataatgtctcctacaaacaatcaaacatgcgcagcttctctaaagtctcttctaataaattgctgcctgtaaataaatagtacttatgacacaagaaaacaacaaaaaatttgcatttcaaacctgcactagctaaaaagcaaaca

SEQ ID NO: 23292 - DNA, 444 bp, Glycine max
  unsure at all n locations
tcttttggaccttgaacaagcaatcaactcctctttttaaccatgctatgtgctcgcgactggtccctttcttcccttcgcaacttgagttcattattgctaccccatagagctccgcgaaatttgttccggccatactcttccttgcgagccctcttggtctcttgttcaagggctcttgcggtaattgcattctcttcccgtaacccggcacactccttccgaacgtgtgtagcagccaacttgaacttctccttggcgagttttgctnttcctaactcgcttttgagaacttggacttctttgtcctcttncggtgcttcaaaattctctttgctgacgactnttaacttggcgagccaatctanacctcgtatgcgaactttcagccattcgtggtaccaccaatgatgccatacgaatgcctctaactcttgatctttc

SEQ ID NO: 23293 - DNA, 272 bp, Glycine max
  unsure at all n locations
agctttataacgtggccatggcttgctgcggaaaacaccaactcatggatgcactgagcctattcagctgaatatagtcaatgacggtttgaggctgcgatacaagcagttattaaatgcttctcactgaggataaatccagttgaagactctacaggacaccatggatctcattgaaaatatagcanctagagatcacgctagtgtgcgtgataagacacacatcgctacgccacgaagtctgttgaagctttcttcacagatgcattgct

SEQ ID NO: 23294 - DNA, 488 bp, Glycine max
cggcgcttgatccattgatacctcgcattcaggacactatgaatactaagcttgtctgaagagactcactggaggtgattttcttctctcctggactagtcactagtggatggtgactactctcacaccttcacgtttagccttcggtataggtacatggctgagatatcccattggaagactttattgaagcttagagatccaccctatatgatgctatcctagcacgcgagggcattggaccgaacactgatagaacattgggctagagatccaagggacggccctagggttctcatgagccttatggtagatctcgagcccatgggctaagtctgagcctgctgatatatgtaaatattagacaacgttatcgctggagccgagccttgtacttagccattctaatactatagggattgagccgcgtatttcgaggcatcttgatactgctttgagaaggaatcttctctgtatgcaagtctcgg

SEQ ID NO: 23295 - DNA, 358 bp, Glycine max
  unsure at all n locations
agcttggatctttatcttttgttctcagcaaaacaacaaagacatgtttcccctttcttttgagccatatataccaagtattgtaaggtctagagaatcaattggcaccaacaaaaaagaacaattgatacacaagttcttctcatcgactaccatgatcgcattntttgtagatctatggatagatctccacacatgaagtcgagcatgtaatctctacgactntgcgaccccaccatanatgttgaagatgtcagggtccgtgatagtggcttttttgtggcaactgggtgcatggcgtgggtggagatgcggaggccttcgtaagtggagatgacaatgttgtggttgcttgtgc

SEQ ID NO: 23296 - DNA, 415 bp, Glycine max
  unsure at all n locations
tgcctgtccgatgcagcagtaatgatggcccgagttatgttggggaacggttacgaacccggaatgggtttaggcaaagacaacggcggcataactagcctgataaatgccaaaggaaatcgtgggaaatatggtttaggctataaacccactcaagcggatataaagagaagcatcgcgggaagaaagagtggtggtcaaagctcgcggttgagacaagaaagtgaaggaagcccgccctgccacataagtagaagctttataagcgcgggtctgggagatgaaggtcaagtggtcgcgatatacgaagatgatgttccgagtacattggatntggtacgaccatgcnctcctgatttccagctaggaaattggcgggtggaggaacgccccgcatttacgncacgagcataat

SEQ ID NO: 23297 - DNA, 374 bp, Glycine max
agcttgaaagagcccggatagtcaaagagaagttcaagtccatagccatcaaagtctgaagagagtatgatgaactaagggacgtcaatatggccaccgatgaagccttggaatgagaaaccaagaaggcccgaaaggaagaacatgaccaaaacaagttttgaggggctttatagggcagcaatagtgagctcaaactccgaagaggtgaaaggaatcatcacgggtcaaaggcatgatctggaaggacgagctaaaggcttgccttatgtcgaaaagaaatttgtccaaacagttaaagtgagactgaagggaatatgtgggccatcaccgatgagtgcaaagagaagctaaatctagcggcgactcacgag

SEQ ID NO: 23298 - DNA, 387 bp, Glycine max
agccgagcttagttgttagatgggtgtgtgtagctaagttctagcttctcaaggaagcttctcaaagaagcttctcaaggaagtttctcaagaaagcttctcatggaagcttctcaaggaagtttctcaaggaagctacctaggctataaatagaagcatgtgtaacactttttgtaactttgatgaatgaaagtcttatgagacacacttcaaagttccacttctctccctcttttattccttcaatttcgtgctccccccttctctctttcttatcctccattaaagcatcctcttcaagattcttatccaaggcacattcttggtggtgaagctccttcttccatggcttattccctagtggatgatgtctcccctctcttctt

SEQ ID NO: 23299 - DNA, 373 bp, Glycine max
agcttttactagttcaaaataaacaggtaatttcagagacatgaatggaataagattggagttttcaaatgcttgaaagcattcaaaattctcatttgagaagaactccatatctatgaattttaggtctataattgaatgagaggaaaaaaagtttgtgtaccgtatacgctgttcctcttatgagaacaatggtccagagggaatgaagggaggaattggggtttcctgtgacccggaatgccgctgactttgacttgaagtgcctttcctcttcttcgatggttcctccatttgaggagttttttaaagatttcaatcggttcaaatgaaaatgagtgaaaaagataaagttgggctttgtggggagtga

SEQ ID NO: 23300 - DNA, 339 bp, Glycine max
tgaatataatgaatcttgctaacttaacaaagctaatattctctcatttctcgcaagtttccttcatccattaaaggtgatagcggtacacatggccgttactgtgaaaagagagatagtgggaactctaaacactttttgtaacatatcttcatagaactacaacttgccagtgtcgtcttgcgctcaaagttgacttttagtgtaccaatcaaatataacattaacagcataagacaaaaggaattaagaatattaagacaagacaatttaaatcttcccttttgtgcgttgtggcacgagttgcttattgaacctatggacgctactttctgatga

SEQ ID NO: 23301 - DNA, 391 bp, Glycine max
  unsure at all n locations
agcttctacggcaagaatgacaaacaaaaaatttaatttgaatgaagcttttgacatatctcctagattgcaatcttaagatataaggatgagatttaagactaaatgtcagtaagaaaatttaaagattttttggaataatgttgatatcaagataatgatgaaatttgaactcaatgtgtgtaaagataaaattgtatttcttggtgtattattaatcttttgaatatttatagaagagggtggaccttgaaataaatggaaagagtgattttggtcatatactattagttgactagtcaaatattgactctaactaatatgacttattggcgatgacctttgaaatggtgcttatatgacanaggaatnaatggcgtgtgtaaaaaaa

SEQ ID NO: 23302 - DNA, 436 bp, Glycine max
  unsure at all n locations
tttctaagttctttaacaagaatttaacaatatacttggccttcatttaactgtctttgggcttggcggccacgatcaacaaagtactttcgacacctactatatgttgatttgaccaacactggtatcggtatgttgcgacaatccttcaaaaccttatttatacattttgagaggttggttgtcatgtggccatatcgacgtccttctctatcataagccatcgtccatttttcctttgaaatacgatcaatccatgttgctatggctggactcaagtgacggggaattttctaaatttgattaaaaaaaatgtgcttgcaaggagtgtagcctggcattaaatagttagcaacaacaattttaagtatatatgaaacttanattaacgtgaccatcataaatgaaatcttacccaattcttcaacatttcttt

SEQ ID NO: 23303 - DNA, 388 bp, Glycine max
agctttgatgcaacattttgaaaggttaatgaaacaatgagatgatgcgctccatgagaggttggatcaaatggagaatagagatcataatgaagaagaaaggaggagaagagggaatgatggtgttcctagacaaaatcaaattgatggtattaaactcaacattcctccctttaaaggaaagaatgatccggaggcctacttggagtgggagatgaaaatagagcatgttttctcatgcaacaactatgaggaggaccaaaaggtgaagcttgccgccatggagttttccgactatgctcttgtgtggtggaacaagctacaaaaggagagagcatgaaatgaagagccaatggttgatacatgggcggagatgaaaaggatcatg

SEQ ID NO: 23304 - DNA, 379 bp, Glycine max
  unsure at all n locations
ngaagaaagtttgtcttttacatgcccaactctctttattggtttttgtattgattggtgtatggtgtgttgtatcttagtctctatcaattcatacgtgcatcatgcatcatcatttaggaataaggagaaagtttataaagttagaaattttttgcagtagtcaaaactctttggtttaatggaatacaaccttacaataatcgattacacaagttggttttaagcttgcaaagaagtgtctcgtatcggtttaatcaattataagcttatcgtaatcgattacacaattgtttttgagacaatgattgatttattcaggagtctctgctttaatcgattaccatgtgatattatcgaatacttctcttttaaaagt

SEQ ID NO: 23305 - DNA, 394 bp, Glycine max
agcttgtagggttaaagtttcatgattgccacgtgttgatgcaacaattgttagccgtggctatacgagacatcttgccaaagaaagtcaggttagccataactcgcttgtgctttttcttctatgccatatgtagcaaagtcgttgaccctgttaagtttgatgagctgaaaaatgaggccgcaattatactatgccagttggagatgtatttttcccctgatttctttgacatcatgattcacttgattgtgcatctggtcagagaaatcaaatgttgtagtcctatttatttgtggtggatgcacccggttgagcgatacatgaagatcttaaaacggtatacaaagaatatatatcgcccagaagcatctattgttgagaggtacaatgc

SEQ ID NO: 23306 - DNA, 327 bp, Glycine max
  unsure at all n locations
tataaaactcaactatgctgctatatttacatagacctcctcaacctttgctttataatcaaccacagcagaacaaatatgacctctccatccacagatacaaccctggatggaggaatcaccctaacctcagatggtccagccctcagcaacaacaacagcagtctgctccttccttccaaaatgttgctggcccaagcagaccatacattcctncaccaatccaacaacagctacaaccccacaaacagccaacagttgaggcccctccacaaccttacctcgaaaacttgtgagacaaatgactatgcagaacatgcaatttca

SEQ ID NO: 23307 - DNA, 372 bp, Glycine max
agcttatagttattggagggagaataaaacaatccaaaatcaattgtacctttcaagtaacgaagaattctttttgcgacttttagacgaggagaggtagaaacaattatgaggaagaggtagaaacaattatgaaaaagcatatgaaaggaagtatgataaatctaatgttgaatgttttaattgtcataaatatggccattactcttgggagtgtagaacaaatgttgaagagaaggtcaatcttgttgatgataaagaagaagttgaagagtcaacactactactatcacttaataatggtgagaaggaagacaaatgcttatggtatcttgacaatggagcaagcaatcacatgtgtggatgcaaaga

SEQ ID NO: 23308 - DNA, 306 bp, Glycine max
  unsure at all n locations
ttttttacgacacttattctacgacggttctttataaaaccggcttaaaaaatgagacgcggggctattcgtaattatagcaatgaaaaatgccttttacgatgcacattctagaacgggctctagaaatcagtttataatgttatatctaataagattcacgataaagtttatactaaaacccgacttaatattgctgaaacaaaataaaagctctgtagtactcatgctggcctaaagtcacactcgacatctgtcatactntctcatgtgacctttaactctcatactcactcattagctcac

SEQ ID NO: 23309 - DNA, 372 bp, Glycine max
ttgcatgcaagctttgtatcccagggaagggattcgagcttaatgttgatggacaacctttgaagattctaaggaagaacatgaccatgctcgctcagacatggagcgttctttctttgtctaaccccattcctacctcccacacatttgatgtgactttggactgagccaaattgatttatgggattattatgaagatggacatgaacctggggtacctcatctcctaccagatctctctgattgcacaacatgacacatccaaacttgtattccctgccttgatcaccactctatgcaaggctagaggagttcaattagactctagatccctggagagcttgagccctgccattaactttacatatatta

SEQ ID NO: 23310 - DNA, 385 bp, Glycine max
  unsure at all n locations
aaccttctatgaatcttcggtaatatcctgctaagtccaaaaaactcctaatctcaaaaatagacttaagactctcccacttcagaacaacttctatcttaaaagggtctacaactatacccccttgagatatcatatgccctatgaaactaactttctctaaccaaaattcacacttggacaacttaacataaagctgttggttcctaagggtatgcggcacaatccttaagtgctcttcgtgctcttcatgttcttcatgttcctctctaacctgacctanagtctatcttgctaaacacacaagctcctaccagctggtccagaaggtcatctattctangcanagggtacttattctttattcgtcaccttattcaactga

SEQ ID NO: 23311 - DNA, 384 bp, Glycine max
  unsure at all n locations
agcttcaacatttttttattgtttcttgctaatttattttgacaaacagaatgggaagcaacttcatgaagttatggtggaaagaactggaccttcaaaaactagtggaccaaaagaatcctgaggactgagttgtggttagagcctcaggtatcaaacctgtgcttgaattataatcattcttttgttccaagatataccaattaagtaaagggatatgggttgtggtttgatatatcaatcttactaggcgtaggtagtattgatatgacaattggtagagttatcatggatttttggcatcctgttataacttattatattgagaatcaatctctntagcctgcgaatttattgtcttctgagttccatgcttaggtcttt

SEQ ID NO: 23312 - DNA, 378 bp, Glycine max
attaccatatatgtgtaatcgattacacagtgcaaattttgaattcaaaatttaataactgttgtaaatcaattttggccactggtaatcgattacatcctctaataatcgattaccagagagtaaatttgtttgagaaagactttttaacttaaatttcttggccaaaccttttgctacttcaattggaattcccttcctatttaatataccctttctaagactctagagactgtcttgatcatccatcttgaatatccttaatttctttgtcttgaataaagctttgagatgcatgtgaacctttggcatcatcaaaacattcagcttgatcctttgtctacaatctccccctgttgatgatgacaattcctgaaa

SEQ ID NO: 23313 - DNA, 385 bp, Glycine max
  unsure at all n locations
agcttgcatgatttacatctccctctttctcaagcaaattcttcttgatatcatcaaaatcttcatgatttacattctccccttttttgatgatgacaaccacctataggttaggagcaacaacaaagaaaatatctatttgcatatagtttactcccccttggttttacattgattgcttatatgagacaattgaagatttcatatttttcatatataaaaagttatctcataaaacaatagatattttgcaatatactctcttcaagagaagaatattacaataaagatcatgtangaatccttatagattttgcaaagtgttggccaaggatttctttttgagagagcatttgacaattgaagttctttggaatctctctca

SEQ ID NO: 23314 - DNA, 372 bp, Glycine max
  unsure at all n locations
ggctaattaacctgaaattgagagaaaatgattattttcacacaaaatgaaaatactaagtatttattacctatacttaatagaaaatacttataacactacaaaataaccataaattgggagagtttgaatcaatctatacaagttttatacacaaaagttagtcattttcaccgactaacaactcccccatatttatagttttgcttgtcacttgtcctcaagtgacaatgacatgcagtgaactatgtacaaaggtgtatgctacaaagttattgattgcatgatgagaaagatgaagcatgtgtacctataacttgtcttcacaaaatatgcggatattcaaagagaagaatanaatgtgaactgaac

SEQ ID NO: 23315 - DNA, 378 bp, Glycine max
  unsure at all n locations
agcttggctattgcatatcttgccaccaagccacctaaagagtgacctacaaatgaaattttctgaacacttgggtgacgttttataactgatataacctgngaaaaaagaagaagaaaacaagtatcctttatttttctggatttgatgctacagagttgaagtcaattgaacatcttaagagccaaaagattagtatctaacaaaggctaaaattaaagtatgactaagttttagacttaggattagtctcataatcacttcaaagatcctaattacagtggttacaaaaaagaacaagttaaaagtcaaagccataacacacctcctctgctagtctatctcccattacatcaacaccatcaaatgtcaacatgg

SEQ ID NO: 23316 - DNA, 442 bp, Glycine max
  unsure at all n locations
tagtcattatcatattntcctanacagtttctgtttttatcattntttgagcatagacagacacaaagaaccagtttctttggattggctttagaaattttggaaggcataacagggataaaaatttgtagatatgagccttatatgcattgctttaggatatttggttggagcaaaatggttcaattntaggagtcctcattggctttagatctgcacataataggattgtctccataccatctctntgatattcagctcaaggttaggtttgtctgataaatgctaactaaagagctatactatatcacaactttntggttcanatgaataagttttgacaagaaagaaaactntnttgtatcatttcattatactaatactaaccaaaaggtattaacaaataacaactgagtattattaggattatacataccgtact

SEQ ID NO: 23317 - DNA, 378 bp, Glycine max
  unsure at all n locations
agcttgcagtacaacatttcaattgttgacaagtaacttaaaaaagagaaatatgacaaccctttttctacttaaaaagaaatgacatgcatcagcaatgaaacaacgtagcaaacttacatggtaccaggccaatgtacaacagatatgttgaagtttctctgttcctcctgataaaacactgtattggagaatcacgaggaccangctattcatgcacaaaagagaaacataacataagaaacagaataccctaaagggaaaaaaagataaaagattaggcaacacaagaggtgaagaatttatcacctgcttcaatgaaatgggaaatgtgagccttncacattgttcaggagtcttaacaatctctttcgtaac

SEQ ID NO: 23318 - DNA, 424 bp, Glycine max
ctataaaactcagcttgaggtacacctggatctctgtttgttctattgtgctgattatataccgcgtttggacaacgaacaggctttgaaaatagtgcgtagcacacaacactatgaacacagggaaaggcattgtcctgaggaccctcctacttgccttgtgccaatccctaaaggttacaaaacacccatcgagtggcctagcagcagagataaggacattctttattttaatttatcggcaaatgttaattgttatggggaaaaattaaacttaccatctttcccttggttcttcttttgcactaagccaccttatagttataactcacatgtacacacacttagtcggccttttatatatttcaggctaataatttgctggccggttaaaaaacatatggaccacacgtacacacaactg

SEQ ID NO: 23319 - DNA, 362 bp, Glycine max
  unsure at all n locations
taagctttttagtaaataaataaataaatatagagcaaataataggttgagtaccctaggtataaatagctatgttaagtcaggtgtctcctcttggactcattttcgtttttttcccttctcttctcaaaatcctttctttttcgcgcaactcaccaaatctgtctcagaaaaataacgatctcggactcatttaccgttggattgtcgtgaaattttagcagcacgtttgcaacccaatttcgagcattctcactgttgggaattgtaaaaacatgtcggagctaagagaaatacctttcgcaccgtagctttctcatttnccgtagaaacccanaaaagtctcagtaaaactacaatcc

SEQ ID NO: 23320 - DNA, 433 bp, Glycine max
  unsure at all n locations
taatggccatggtgattgagaaggagacatacattattggaatgcaaatcatgcttccattttgctttttagacatgactcttgcttcaataacatggtttgctagtcttgtaaccaccaacctagtaccattgcataacccttgtgattgatacatgttccttaaaagcattattggggtacccacctttagttntatcttatgattaggaagaccaaatgttctcaaactattgagaaattcacttgtgaccacttcaagtgcatttcattcaaccatttttgacttgtcaattgaataagaacttagatattccctttgatcacctgaaaacaattcattaataaaaacattgtagaatcaatattaattattaaatcaattgattatttgtgagatacctggattaaagaaaaacataatcttatttga

SEQ ID NO: 23321 - DNA, 394 bp, Glycine max
  unsure at all n locations
agcttagacctttgntcatttttgatcatttggttatcgtttcctatacccagctgggaagccttttgatcttgcatgtgcatcatgtagtaaattttttcatttttcaggttgtaaacttccttctctacctgtaatttgcttcacttcttccccttaatttgctagacttcatcttcaattgctttggttcctcttctggcttctggcatttcaaattgaaggtgagcaagttgaaatttataaatagaaatacacatattatttgttgtgttatataaacctcattntttacgggttatgaatacctaaacctaaaaatgttatttgtatcatagaggtctatatcagaaaaaggtacaaattaaaacatagaggtctatatcaaggattt

SEQ ID NO: 23322 - DNA, 343 bp, Glycine max
  unsure at all n locations
tntcaaaccttgatagaagaaccacaaaaacatccttctcatccatgctaagttgaaatgaaatcggcattaccataatcacgatggtttagattcgacaaattgagaatggaaaagtagcatatgaacatgggaagaagaagcccctgtgaggattttgagagtcagagaaatggtccaagctccaagcaagagaactattattatataagaggaaactatacatactacgtgtctatgaaatacggatactctagtcccttgtcgtgttcggngnccnacacacatcgtgtcantgtctgacaccgacacgacacccgtattacgttctatattttggaca

SEQ ID NO: 23323 - DNA, 392 bp, Glycine max
agcttcttcttgcactacttatcatggttcaaccatcactgcaccctcacccctcttggatcgccctcagccggccgatcagcctctcccaccgatcgggaagcccaccaacggctctgatgagtcctccggagaatggcacaaaaagcaagaagagtctttggtcagtggaaatattattgtttcacatgaatcaccttaattttttctcctttttctgggggggtgggtttgggtttgtgaattagtgcacttttgcccaactttgacaatgagttggtgtaattaaattaaattattgttattgtgttgttgtttttaatttttattttagacttctcacaaaagagtacatttaggggtaaccattaaccaataaccaaccttgtatt

SEQ ID NO: 23324 - DNA, 434 bp, Glycine max
  unsure at all n locations
caaactcagctgacagccacaactctcgcacctgtagagtntaccaccctctacatcggacaatacttattcaagttgaggggcttgacaaactcgcaaccctcttacttgtcaaggctactacctttgacaccataaatctcttttgccaacaagctaactcaaagcttgggggattatgtactgcccggggtccacaaaatggacgtggcaagtgacgtggcactccaatgagcacgtcaaccctctatgtcaaccttggcataggagcacagacaccttgcccttagcagccaagctactgggccgatagggtatctctgataccttattatttgaatattaatgataatgttagaactcccttatcangtgacaggtacctaattatctataagccacancttatctactagctattaactataagctat

SEQ ID NO: 23325 - DNA, 398 bp, Glycine max
  unsure at all n locations
agcttgtaataatatcctgagcataaaaattccaattctaacagctggcacaattgttttctttttgtgcaaataggttttaattttactatcgagaacgggttagatgtgagtaaaaaaaaagtgcttttgatatcatatttaggaaacaaaaatcgttttttaattaaaaaataaagtttatctgtgtagaatttgtaggatctttcttttgccattttttacaaaacaaaaaatagtttttttatcccaaaattacaaaataaaaaattacacaaataatacaagtgtaaaaatatttgccaaagtgaaaaattggtcccctcaaactgatgtctcaaagtgtatgaaattctttnttttgctttcaatgttgggaaatcgatttccatgcaccg

SEQ ID NO: 23326 - DNA, 419 bp, Glycine max
ctcagctaacaatccttgtgatctattatggaatatttctatccctatcacatagcttacctcatccatatctttcacttcaaagtttctagagagaaatttcttagtctcatgaagaagaccaagatcgttagttgcaagcaagatatcatccatatacagaattagaaaataaccttactcccactgaccttcagatacatataccgataaatagtattttccttaaatctaaaggaaacaatggtatcattaaacctcaaataccattggcgggaagtttgctttaagactgtatatggatttctttagtttgcacaccatgtgttcctttcctttcactgagaaccccattggttggtccatataaacattatcttcctaatcttcatttagaaaggcagttttcacatccatct

SEQ ID NO: 23327 - DNA, 378 bp, Glycine max
  unsure at all n locations
agcttgttgacacgtggagatttacgtcatcttccgcgctcacaagatctgtcatattgacttttgagtcacgctgacgggcggaaatacccgagtggttatccgtataaactttttgctgtctgtaagacgtaaagccttataacacgcagagactaacgtcgtcttctacgaccttcgtcaatcgcggccgacaagcccatttaaaagcggagatttacgtcatctttcgtgctcacaagatctgtcatactgacttttgagtcacgctgacgggcggaaatacccgagtggttatccgtataaactntntgcattctgtaagatgaaaagcgtaatagcacgcagagactaacgtcgtcttctgcgcccttcgtc

SEQ ID NO: 23328 - DNA, 367 bp, Glycine max
  unsure at all n locations
taatgaaggcgttatcagatatgtactagaagccgttgatagccaacaaagtatacttgatgcgtcggttgttcaaccttaagatgggagaaggtatctctataactaatcatattaatgaatttaatactattcttgcccagttgaagtcggtgcagatcaaatttgaggatgaggtgaaggcattgattctattgtcatcactatcggatagttgggttgcaactgttactgcagttagtagttctacaagagagaacacattanagcttagtgacattcgtgacttgatcttaagtgaagatgttcgcaagagagatttangagaatcttctagtcatgtttccaatttagcattgaatactga

SEQ ID NO: 23329 - DNA, 382 bp, Glycine max
  unsure at all n locations
agcttgtgcaaatcaaatcactcctacattttatctctagcatgcattgtatgttggtctcgtcctttgtcacgggaagccggaaggtccatatcaccttcttaattgtacacatggggcactacgcccccaaatgcgcaagtaagaagagataattttccgggctctcgtgtccgtaaaatgcattcatatcatgcatcgcataagcatctcttcataacatcataatggacatatcctgcatttgtccgttatcatattccagcctcacattttgcatgagtcatggcatcatcatgcatatgcgttcaacaaactntntgatctgcanaatcgcataccatntgttttcatgtttgctcatccttgcgttntcctctac

SEQ ID NO: 23330 - DNA, 450 bp, Glycine max
  unsure at all n locations
tgaaagtgtgtaaccaaccattntctcattgtataactaccggaacgtgtatactatcattgtgatcatctttttctctgtcattgaaggtgccacttgagctgtcaagtccctccacctctgggcgtattccttgaatgactcatgctcttttttacacatgttttgtagttgcgttctatccggagccgtatcataattgtactgatattgcctaacgaaggcaaccattangtccttccaagaatagactcgggaaggttccaagttagtgtcataccctaatttcgtccggggattattacttgacgacatgcaacctttgattggtccgttcaagatacttggcaccctttgttgcacaatatgtaagtcttgagacgcaccggaagtcaaaggaagcanggttatgcgatccgtgaaattccgtaatgtggcggaaaccaaaag

SEQ ID NO: 23331 - DNA, 383 bp, Glycine max
  unsure at all n locations
agcttattatcttctataccgtacaagagtatgaaaacggctgaaaaaaatcagctgttgaaaaataataataaatttcatattttcatataaaaaaacagctattttagaagaaaaaaacttttctaaatttcagctgtgttttcaaataactttgttattttgcaaacattttttattataaaaaaatagttgaaataagagattataatcttttccaaacataatccttgtttacaaaaatatattttgtgagaacttaatacattntccttatccaataatgagcttcatctagcgtataataactcataaattnttattagtataaaaaaactcataatttataaaataaattaatntatttatatcattagttgact

SEQ ID NO: 23332 - DNA, 486 bp, Glycine max
  unsure at all n locations
cccagcttatgattcttgcattacggacctataaaactcagctgctattgggtacaatgggacaaattgtcagtttgttgggaaaaaaatgcttgtgcacctttgggacttgggaccgtatgcagaaagcaactttgggttttgtaaattgaccctcttaaccttttggtggtaccatggatgtaattcaaatatggaataaaaaacgaaacctgaaggagctcatctcactcccttttatttgatctgtgtgccaatcctgcttttcaaattaaaaataaaaagaaaggggttgatttaggatccttcccttccactaaactaggtaatttatatagaaatacaatgcaaaatagncaaatgttttattttctctctttcctgatcttcaagccttcttcagtgaagcatatgtttctcagtgcctatcnacctcagaactaagcacctgtctaattgggggagtatgaaacagttctaaagagn

SEQ ID NO: 23333 - DNA, 387 bp, Glycine max
  unsure at all n locations
ttttgcatgcaagctttattcaagacagagaaattaaagatattcaagatgaatgatcaagacaagtctctagtcttagaaagggtatattaaataggaggggaattccaattgaagtagcaaaaggtttgaccaagaaatttaagttaaaaagtcttttacaataaatttactctctggtaatcgattaccagaggatgtaatcgattaccagtgaccaaaactgatttacaacagctattaaaatttgaattcaaaatttgcactgtgtaatcgattaccagcagtttctgaacattttaattcaaattttaaagcgtgtaatcgattacacacatactgtaatcgattaccagaggagaatttcagagnacagtttcaacagtc

SEQ ID NO: 23334 - DNA, 446 bp, Glycine max
  unsure at all n locations
tgagatngagataagaacatacatattttanatatttttacattaccgnatatcacaccatatagtctttcaattgatgtattgtgtgaatttggttcattttaaagtaaaaggaatgtattttagagaatataaaatactaataattattattaattcaaaactaatgattaagattatataattaattataaaatttattatatttctatttaaatttctctgaaatcataatcgttaattttttttaccataatcataattaagattaattattagaagtataatttattgtttaaagtgcttgtatacttttgactataaaattctactagtttctgtttgttttcgtcgtatttagcacaaaaacgaagggcctgtattacgtcaaagcccacaagttacagttaatttgtaaagataacccttaacgaagtcatgttttt

SEQ ID NO: 23335 - DNA, 363 bp, Glycine max
agcttccgttttcaatttggagcatctctcgataaattacaacactctgtcgggcatccgagtaaaaagttattgtcgtttgaattttctaagagtttccattttcaattttgagcgtctcgatatattacgcgactcaaccggacatccgtgtataaagttattgtcatttcaatttgctcagagcttctagtctcaattttgagcgtctcgatatattacccgattcaatcggacatccgagtaaaaagttattgttgtttgaatttgctacgagcttcccttttctacttggagcgtctcgatatattacgttactcaatcggacaaccgtgtataaatttattgacgtttgaatatgct

SEQ ID NO: 23336 - DNA, 387 bp, Glycine max
  unsure at all n locations
tgtagcanattcaaacgaaaataactntntactcggctgtccgattgagttcggtaatatatcgagacacttgaaattgaaaacgaaaactcgtagcaagtgcctaccgcaatcacttttaaatcgtcgcgaaataaattgacatgctccaatttgaaaaagaaagttcatagcaaattcaaacgacaataactttttacacggatgtccgattgagtcccgtaatatatcgggatgctccaaattgaaaacggaagcccctagcanattcaaacgacaataactttttactcagatgtccgacagaggttcgtaatatattgagacactgcannatgaaaacagaagctcgaatcanattcaaacgacaatatcntttttactcga

SEQ ID NO: 23337 - DNA, 376 bp, Glycine max
agctttgatgcaacatttggagaggttaatgaaacaacgagatgatgcgctccatgagaggttggatcaaatggagaatagagatcataatgaagaagaaaggaggagaagagggaatgatggtgttcctagacaaaaccgaattgatggtattaaactcaacattcctccatttaaaggaaagaatgatccggaggcctacgttgagtgggagatgaaaatagagcatgttttctcatgcaacaactatgaggaggaccagaaggtgaagcttgccgccacggagttttccgactatgctcttgtgtggtggaacaagctacaaaaggagagagcaagaaatgaagagccaatggttgatacatggacggagatg

SEQ ID NO: 23338 - DNA, 387 bp, Glycine max
  unsure at all n locations
ttgagccaaaatcctgactcaccatataccttgacttatggtgagaatgtcaatccttaccctcggaagcaaaaaaagaatagaggggaaatttccaatcaaagaaaaagagaaggaaaatttccaatgaaagcaaaaaaagaaaagaaggaaaattccccaatcaaagagtgggagaaagcaaaaaaagaaaagaaggaaaattccccaatcaaagagtgggagaaagcaaaaagaaaagaaaggaaaattcccaatcaaagaatgagagaaagtaaaaaaggaagaagaagaaggaaagaaagctcctgatcagggatcgaaggaaaacagaagaaatgtgcagagaggtctttggaccggancatatatgaacaatacagaatt

SEQ ID NO: 23339 - DNA, 373 bp, Glycine max
  unsure at all n locations
agctttgattaactctttaatagtggtctaaacgttttatgctgagaaggtcatgtgctccattagttttggagttgaaaaaccaaatattgaatgacatcaattggtggtaatggctactaaatgcattcttgatggtagaatgcctatatatagcacatgtgtttgatccctgagctcacatctttcattttcgtctaatacaccatctacagagagagagagagcttagaagaaccaaaacaaagtagctcttcatgacaatggttggaggtatatttagattttgtttttcacattnttaatgacatgtgtttcattttgttgtttgtaacatcataggtttgatantttagtcttacatttgatatta

SEQ ID NO: 23340 - DNA, 406 bp, Glycine max
  unsure at all n locations
ntgagcttcgaaaaaagctctccaatcggatccaattttggttggctttcgccagtcattgtgcacaacgttctataattaaatgggtaaaccttttatctttcataaagtaatacataatacttaaaacatcctgacatagacaataacttaatgtaagaaatgggataaaaaaattgacagataaaggtgcttttgaattaattaagtatatagctaagtaacttaccaagttgctgcacatgaccttgtattcatccagaaataccttgaaagtgattgaattcgacacttgatggtataataagtaccattttgaaaaaagttttgcatcattggctggtntgatatggtcagcaagaagagaccctgacataatgggtaatgtcacttgtgatttcctcga

SEQ ID NO: 23341 - DNA, 371 bp, Glycine max
  unsure at all n locations
agctttgagccaattcaaacgacaataactttttactcggatatctgattgagtcccgtaatataacgagacgctcgaaattgaatgttgaagctccgagccaattcaaacgacaataactttttactcggatgtctgattgagtcccgtaatatatcgagacgctcgaaattgaatgttgaatctctgaccaaattcaaacgacaatagctttttactgggatgtctgattgagtcccataacatatcgagacgctcgaaattgaatgttgaacctctgagccaattcaaacgacaataacgttttactcggatgtctgattgagtcccgtaatatatcgagacgctcganattgatgttgacctctgag

SEQ ID NO: 23342 - DNA, 392 bp, Glycine max
  unsure at all n locations
taaacattcactttcgagcctctcatatattacggttactcaatcaaacatccgagaaaaaagttattgtcggttgaatttgctcaaaggttcaacattcaatttcgagtgtctcgatatattacgggactcaatccgatatccgagtaaaacgttattgtcgtttgaatttgctcaaaggttcaacattcaatttcgagcgtctcgatatattacgggactcaatcagacatccgagtaaaaagttattgtcgtttgaattggctcaaaggttcaacattcaatttcgagcgtctcgatatgttacgagactcaatcagacatccgagtaaaaagctattgtcttttgaaattgctcagagattcaacantcaatttcgagggtctcgata

SEQ ID NO: 23343 - DNA, 245 bp, Glycine max
agctttgttttacatacgggaaagaagatgttgcacatgggcaccgaagatcacacaatcagctctgatctatttcacgaagatgaagagccacctgaccggaatgcctgtgatacagctcacgtgatggaggaaagaagacctatcacgaacgtccctgaagtgggaactttattggatcctggataacacgacgatgcgtccagctagtgacattaaatatacgcttactaagacgcaaccca

SEQ ID NO: 23344 - DNA, 379 bp, Glycine max
catgacgcatacgctttaaaagcctctttgtttcagccaccagagggggcgcttgtgatagtggacactcctatagcagttttgtatcatagcgcgaaagcacgcctatcttccaatgaccgagatccgttaacactgctcttaaacgaagggaccatcagtctctccccctcgaacgaatttagcttccaacacattgccacacctagactccttgcacccactcgccactctcccctggagagctctgtttatgctccgaagtcacaaaaagctgagggtactgcgtcccaagagtgcattcgccgtaccacttatgacaccacgtacacacaataatgctctatcaaacacccaaacattcctaattgctaatacc

SEQ ID NO: 23345 - DNA, 389 bp, Glycine max
agctttggtgtttagtgacctttagtgagcccagctgctagggttttaggagtgggtcggttattgttcacgtaaagaggattgtagggtttcattttcagttttcggggttactgttcacgtagcaactccattttcgttttctggttcaaattctagtttcgttttctgcttttaattccagtttcgttttcatttctgtcttctaatttcatttcattttctgcctttgatttccttttcatttctgctattaatggaaggctgaatctctagtgttgttttctcttgaggattaagaatagctctctttgaggttttgttattaatattaaattctgatcattttttccccttcacgaattattctgtatttgctgctgatatta

SEQ ID NO: 23346 - DNA, 387 bp, Glycine max
  unsure at all n locations
agtcttggggtttanaaactgctaaaggaaatataagcatcacattaaattaatctgttgatattggtcaaccaatgatattggattactttcctaatgtgtgactgaaaaaggatctcgatctcaatgtcttttggaattctctaatcttaacactgcatctttaatttattgattggctttgttgtggtggtgtttgtttatctctaaggttatatagagacttttgagatgtttttagagcattagctgcagtactgttatgtactatcttcatgatgtagctcttgattgctattcctgttagaatgccccagaatacctgttgtactgtttcaacttttaactctcaagggtggcccagtatttcactttttgttntaactt

SEQ ID NO: 23347 - DNA, 433 bp, Glycine max
tacataaacattcgctagtccaacacacactcaacatttagtcatcattattcaatagttccaatcaatcatgctcagtatgatgcatgcacctgacctcaactctcaaatgcaatgtggtaccatccccaaggaaatagcctaagtgtgtccacacgacactctcacttagaaaaattaagcagtaagtgtcgaggtaaccctatcgtgcacaggcaactcccctcccccctacccacggtgatcagcctgagtctcaagggagtttcaaaccgagtgacatgcccccaagtacaagtattcctcctcatgagaaactacaagtacttaatgacaaagtttatattatttctatgtcatatgaagtatgaaacatggacaccatcaatgcactgaccgtagataattaaagattctaagccatccccctcca

SEQ ID NO: 23348 - DNA, 378 bp, Glycine max
agcttgaagttgttttgaagatgttctggcttttacatgtctaactcccttgagtggcatttgtattggttgctatcttggttgttgcatcttggtacgtttgatatatgttttgcatcatgcatcatcatagtgtctgtgaagaaaagattctaagttagaaaattttttttagaggcaaaaactctctgtattaatcgattacagagttgtcgtactcaattacaacacgttgtttgaggcttaaagagttaagtctcatcagtttaatcgattacagcagtattttaatcgattgcactgttgtgtgagacaatgactgatttatttacgactccttattttaatcatataccaggcggattaatagattacttc

SEQ ID NO: 23349 - DNA, 379 bp, Glycine max
  unsure at all n locations
caatagacctccaatctttaatggagagggttaccactactggaaaacccgtatgcaaatttttatcgaggcaatagatctaaatatctgggaagccattgaaatagggccttatatacccaccacagtagaaagagtttcaatagatggtagttcatcaagtgaaagcataaccatagaaaaacctagagatagatggtctgaagaggatagaanacgagtacaatacaacctataagccaaaaacataataacatctgccctaggaatggatgaatatttcagagtttcaaattgcaagagtgctaaggaaatgtgggacactcttcgattaacacatgaacgaactacagatgttaaaagatctacgataaatgca

SEQ ID NO: 23350 - DNA, 378 bp, Glycine max
agctttaactgcaattaaatactcaaacataatcatggttatgtttttcttatcttgctttcacaaaatgcattaaggaggagatatcacaaaaaaacagaccataatttcagtagctatgagactacatcactacacagatattaaggttcatggtctagaatggggtcagaagactattggctttcaatgcacaacaaaggcaacaaagggggtcaaatataattatatattgatatattgatttctaataatgctgatgtgcttttcaaagtacctatttttggcaatttcaaggtgactatgatagagtttggttcctgtttctatatggattgagaaagttctggactattgttcacttttcacccaacaccc

SEQ ID NO: 23351 - DNA, 440 bp, Glycine max
  unsure at all n locations
actatacaatactctagcttcatctacacacatgctgggttattccccaattagtttaggaaaatgtttaatgatggggaaaccgattgcagcgtgaggagagtaggaaatgaagaaaaaatacatcttctagagtacaaaaatcttgtagcaatttgaagatagacttaatttacaaggatgaaactatggctcacgaactactatgagatcttacagatgaaattgactgtgcagagacagatgcggtcgggctgttaaggtccctctccccatttatttctttgggttttccgctaagtctttccatagcatcttgacatatgtcgttaaaccattcgtcttcaggcagttctctggcaacagaatatacatatcagactcttacagatttaatgccacaactttgaatagaanaacaattgcaaatgcaaagatat

SEQ ID NO: 23352 - DNA, 468 bp, Glycine max
  unsure at all n locations
gtggggcattgaaccttgtgatactttgannacnnancnnnnaaaccccacgcagattcttggaaccggccttttggaacccnttaaatcttaacgcngccccaaagtgggggacttggccgaacggtccctccttactaccttaaaaagaccgaaaaacccttaattgtgttataaatgggctcagatgacccaactgttgaaagttgaacaaactcaattcttatatgaaaactatggagggtggtatggaaggttgatcagaagtggattaccggaatgaggtatcccgtgaaagggggaaaaattataccttaattaagccatttttttcttaaatccaacaaaactgatggtctttcttttgtttttgaaaccaaacgactccaaggattgaataatatgacccaattttattaataaaaaaacctgtttaatgacaccacccttgccgaatggtgtgggacn

SEQ ID NO: 23353 - DNA, 335 bp, Glycine max
tcaagctgtttctcggatgctgcgatggttagtgggagtgatgctcttgcgaacattacatcgaaagtttatctgtctcccaagctttggtatttgagggttaatgtgatagaggcacacgacctgatgccaactgataagggtagataccctgaggtatctgtgaaggctatcctggggaatcaggccttgaggactagaatctctcaaagcacgagtattaatccaatgtggaatgaggatctgatgtttgtggtggccgaacagtctgaggagccgctgattttgagtgtggaggatagaagtgcgcctaacaacgatgaaatgttggggag

SEQ ID NO: 23354 - DNA, 386 bp, Glycine max
  unsure at all n locations
tcaagtttgacaagatgtctatgtatttagatcaaaattatgtggttaatttaccatatgaccgaaggactaagttactaatatcaccattcaggaactcccatgtggctaatgcaattgcaaattggtttcaataatggaaatctaattttccctaatgtatgtccaataactagcattaactctccagactatacatagtatgtgggcactctcttctttatggtgcttaaaagggatagtttcctttaccgtgctgctagagcaatacgctcatacaagtcacgagtcctctttcaacgtgtgcattgcctagttcggtttggtcctaacacgagagtcattcatgactgtggacgcatccgatatcanatagttgggctcat

SEQ ID NO: 23355 - DNA, 421 bp, Glycine max
  unsure at all n locations
gtgaagaattggtatatgatccaagtattttataagctttgataattnccgcgtaacataatcggatcttatttatctttaaataaatgatcaatttaatccttaaaattatatctcgttgtcacattaatctataagactaaaaagtctcaaataaatcctaaaatctatattattattatcacttcaatccatggcctaaagatcaacatgaaaaaaaatagttaattttagagacttaaaaaaattctagacctaaaagatgttagagattacaatgacaatgaaatataatttcatggattaaattaattatttactcctaattgtttcacaccaattaaaaaactagaccatataatgttatatggagattgatgggagcatggtctgataatgattccacactacttaccatata

SEQ ID NO: 23356 - DNA, 386 bp, Glycine max
tcaagcttctggaacaaccaggtacaccttacaactttcataaagtgacatcatgtaaagccattttgaggaacctttatgatggacattctgaataaccataagaataatcattctaatgtatgctaagagttaatccatacttgatgaatttagttgatgaagtttagactaatatcccattctaaagtagcacaacttcatcattctaaacacttctttttagctacaagcattctgaagttgattactttagaaagactaagtagaagttcaattgctagtgtgttagcgttttgttcaaggttagactgagtggcattctttaaaattttcattttgatgtgtctcatcagcgactctcatggactacttcaactttcaac

SEQ ID NO: 23357 - DNA, 432 bp, Glycine max
gaccttagaaactcagctgcttcacatgtcgcttctttttagcagcttttattctcacttgttaaaggcccgagatggttttccctttgctggtgtaagatctttgactcttcgatctatagtggtcaatattcttgccttttgctgaaattaagcattacaattttcagtttatagaattaagctctttttaattgttgtcaagtcaactcaattgagaaaattagaaccacaaatcttttggtgtgttcaaaaatttctaagagcaagatccattgaaatgatttttatggttgaagagatattggtatatttggcatgatgtggattatttgttttaactttgcagcttattgatttacaaggtgctttgataaagaggtgtttgggtctaacaactcttaatcaaagaagataatgtctcaccaaaag

SEQ ID NO: 23358 - DNA, 317 bp, Glycine max
tttcatgtatgctttgcagaccaagccctccttgacgaagctacggacttttttgagatcctattgatccccctatgtgaaacattactcgatccattcgtttggggatgaaagggtgatgctacttttcctcgcacatgatagcgctggacgacatttgagagatgatcgtacacaaatgtgtacctgcatcgactaatccagagtctaggctctccacacctagacgatatgtctctctgtaagagcttaatcaccatcgttgcatgacaggcgggctaccaggtgcttccacccactatgagacatagtccact

SEQ ID NO: 23359 - DNA, 231 bp, Glycine max
gaagaaatttcgaggtgccgaaacaaaaatccacaagcgagacacaaaagagagaaaggcaaaagtgacacaacgaccgactcacacaagttggaccgaatgacacaaactagacaaacagaaggcccttccaaagggaccaaagtacgtgttacaaaccccagaaagacaagggagccaccatactcaaagaagcattcaatgcaaagatacccataatagaacccccct

SEQ ID NO: 23360 - DNA, 353 bp, Glycine max
  unsure at all n locations
ttgcattctagcttatgcattcttatcatcatgtcaacctcatcttcactcaaatctcccctcttaatatttggtattagatagttcagccatctcaatctacgactcttgcggcatctgttcaaccctatacgtataccagacgcatattaatgtttattatttattacaacttatgaggatatatgtcatagctattatatatatatatatatatatatatatatcattgcgagtcacaagcatattccagataacgaaaagagaacatatacaaatataaacacatgcatatattaatattatgggtcttgctaatcataatatctattgtataaatgatngaaaagtat

SEQ ID NO: 23361 - DNA, 111 bp, Glycine max
aacttataccattgggaggagaatcaatgaaggcaatgggacagtagttttcttatacttaaaggcttcaatccttgaggcaacttcaaatgtgtatcagcaatgtcttat

SEQ ID NO: 23362 - DNA, 397 bp, Glycine max
agcttcttttaccctcgggttataaatgtgcttcaaaagaaaagaaaagaaaagagaaaaagaaaatcaaccaatcaaagattggaggaaagcaaaagaaaaatagaaaaagaaagaaaggaaaatacagaaaggttctttggacaagacaatgtctgaacaatgtgcagaattgtcaaaaagaaaaagaaaaaaagaagcaaacaaaagtttgcttgaaacctcaaggatgtgtgaagcagtcacctccctagttaccaaccaaacctttgtgcacacgcttgtcccgcgtcgaaccaaagagaaaagaaaaaaaaaagacgagggaaaggccagaacacccaaaagccaaattccccaccaaaatccaacttcctaaaagtcctatggatccatg

SEQ ID NO: 23363 - DNA, 441 bp, Glycine max
ttatgcaagatacctcctagtagcatggacaagctacataaattagcgaaaaggtacattcagatggaagaaatgtcgaggttccgaaacaaagttcgacaagctagacacaaaagagagaaaggcaaaagtaacacaaggaccgactcacacaagttggacctaatgacacaaactagacaaacatcagccccttccaaagggaccaaagtacgtgttacaaacccttgatagccaattgagccaccattctcaaagaagtattcaatgcagagatacctatatagttacccccctatacctcctcttgtaaggccttgaaattttgataactgaaaataaatgtttgatatatttcttgtgttatttgattaatttcaattatttgaggtgttgtgtttattatcaatgtgtgattgcttggtgtggatgttaggttat

SEQ ID NO: 23364 - DNA, 381 bp, Glycine max
agcttttaagtatgggtacattagtaatttctatatacttcagttttagtatatagatattgatgataattgattaagaagccgtaaaaggaaaacatatttacaaaaaggaagctgttacatgacataaagaagtgtcaatgatgtttatcaaatttttgtattgacttttgtacattgagacttaattcgattatactcttgatattttaaatgaataaaaaaatagtatttgattaataaaaaagtatttgctaacacataagtgatgagtctaatggatttatattgttttgatttgacttttagggtggttattatcaaattcaatagggtaaataatcattcttgtctctaaatgtatagagcgctgataaattt

SEQ ID NO: 23365 - DNA, 422 bp, Glycine max
  unsure at all n locations
gcttctatggagactggatctttgagcttcaatgatgtcctttaatggtgtttttcagccatggagttgcagcggaagtaaaggagaagaggcactatccactagggaataagccatggaagaagaagcttcaccaccaagagagtgtcttagataagaagcttagagaggaagcttcaatggaggaagaaaatgagagagagagagagagagaaagtggcatgggattgaaggaaagatagggagagaagttgaactttgaaatgtgtctcacaagactttcattcatcaaagttaccacaagtgttacacatgcttctatttatagcctangtagcttccttaagaacctagtgttacacccctccaatagctaagctcaccccatgacaaaatacatgaaggaagaaagcttccttgag

SEQ ID NO: 23366 - DNA, 392 bp, Glycine max
agcttctgtgcctgatgctgagaaagatgttccaacatcttccaccccgaatgtttctgtgcctgatgttgagaaagatgttccaacatcttccggcccaaatgctgaagccctcccttcacccagtgaagaggaatcaacagaagaagaggatcaagcctcaaaggagactcctgcaccacgggcaccagaacctgctccaggtgacctcattgacctggaagaagtagaatctgatgaagaacccattgccaacaggttggcacctggcattgcggaaagacttcaaaacagatagggaaaaacccctcttaagaggtctggaagaatcaagactatggcacagaagaagagtactccaatcactcctgccacagccagaagaagcaagg

SEQ ID NO: 23367 - DNA, 424 bp, Glycine max
tgtagtgaggcttggctacaacaatttattggtttttttaggattcaaatgtttagattttaagagagcacaaatcatagacttatcccaatgatcttgtatcatacaagtagctttctcactatcttttcctcttaagttgcttttgaccttattgtaacaacacaatttattctttttttttaacatacaacttatttgttgtgtgtgctgatgcttaacctttttcttttcattctaattgacttccctcccccaaatttagagtaactttgccttgaaccatatgctctcctaaaatctaaacaaggtattaggagataattatttaagtttagggttcaattcatgacaaaatcatttagcttatacagggagcaaaggatgcaattatcattcaaggtaagctttttggtcaaaaggc

SEQ ID NO: 23368 - DNA, 385 bp, Glycine max
agcttcttgcttgtaccttttgttcacttcaatttttgagttaggctctactccttttctcttgtacattaatctttcattgcacttttgtgccttgcagaatttggagatcttttgtctctcttttttttttctttttttactcgcctttggcagatctttttttctttttttattttcattgttgcctaacttcaagcatgcattatttgcattgctcttctcgttggtttagtggtggttcccactcagggtttgcattttgcttttgttgtttatttgatgctttcggaaaacaaatatgctttggctcggagggggtagcaagggataaattagtgtttgggatgttgaaacatggacatgtgtcacttcaagtcttgac

SEQ ID NO: 23369 - DNA, 436 bp, Glycine max
tactcatgctagcttctacatcatctttgttaacatgaagtggtctttatttttgagctctttgtcatcatctgtggtatcatcaaaactccttgaatcaatcttgattcatcatgaagcttgcttctacaaagacaaactagtaatgtcttcgcccagttcaggggtcataacaatttgctcccccttaacctatacacataaaaagctagactctccatcaatatgagcagtagtgtagaaaatccttaccaaatcatggtagtatacttccttcctctctactaacttcttcaacccatggtactcaagaagttatggaaaaacaaacccttgacacttcaaccacaccaagtctagatacttgggttgagattgctctttctttgcataactaaactcgtaagacacctcgtagtgcttctctacaaaccat

SEQ ID NO: 23370 - DNA, 383 bp, Glycine max
agtcttaagtatgctctgaattcacgacattgtgcttagtgccacccttgcacttagcgcaggtaagtggactcgggcttatcgctagtcgagtgctaagcctggttgaagacacctgctacgcttagcacactaatctcgcacttagcgcacgaccttgatgctgatgctcttccagattctccttcgcgctaaatgcgctgatgctgcgcttagcccactgatgagctaagctcaactgtcacttttggaacttcatgacttagcctctttttttcacctgaaaatgcacatatttcatcattaaatccaatggaaatgttctggagacagctttaatcataaaacaagatttatttacaggattacgtccaaataaccat

SEQ ID NO: 23371 - DNA, 392 bp, Glycine max
  unsure at all n locations
caccggatagntcattctttataagtgcttaagtggaattagagtatcgtatgtataatgttngaataatactctgtgattatacttccaaatattcagaactctgcttggttatgattatcaggcaagcaaaggatgttgttaaaggcataaagaagcggattggaagtaaaaattcaaaagtccaacttcttgcactaactgtaagcaaaatagtcttgcgatacaaccttttttctctttaaactctgatgtcagtattgctctagattcttttggactcaagcatgtttgctgtaattgcatttttcaaatttcattttggcctcccaaacttcacattgttgactcgntcatttttgaatggttttgttgaatgacgacgatgttta

SEQ ID NO: 23372 - DNA, 264 bp, Glycine max
acgctcatgttatcctcgggatataaacgtgctgcacatgcaaagatcagaatagagaacatgattatcaatctatcatagattggaggagcgcactagacccttacacctcgattgacaggaacatacggaaacgctattcggacaagacaatgcctgaacactgtgcacaattgtcaacatgaaaaagaaaaagagatgctcacaaatcgtctgcttggaacctcaaggatgtgtgaagcatacacctccctagtttccaac

SEQ ID NO: 23373 - DNA, 362 bp, Glycine max
aatgtttttccattgattgggaaagctgttcccgaaattcctgaaaaatgtaaagatccaggtacattcagcataccttgtattatagggaatagtaagttcgagaatgccatgctagatttacgagcttctgttagtgttatgcctctgtctattggtaattctctatctctaggtcccttgcagtcaactgatgtgataattcatttagctaatagaagtgctgcctatcctgttggtttcatagaagatgtcttagctagagttggtgaactgatcttccctcgtgatatttatattgtgaatatggaagatggattttctcaaggatcagatcccatgattctaggcagaccctttat

SEQ ID NO: 23374 - DNA, 334 bp, Glycine max
tctagcttgttctttgattatactaagctgtgtagcaagcttagaacaatatacttggccttctcttaattgtctatgggcttggcgaccacgatcaacatagtactgtcggcacctactatatgatgacttgaccaacgctgcttatggaatgctgggactatctttcaacaaccttattcacacattctgataacgaggctgtcatgtgaccatatcgtcgaccagatgtatcgtaagccatgctccatttttcctttgagattcgacaatccatcatgctatggctggactcacatgactaaagtgttctaaatatgatcaaacacatgct

SEQ ID NO: 23375 - DNA, 380 bp, Glycine max
tttaaaacaacgacagcctatgagtaaggtcataaaaccgcggggactagcggacaaagaacggaacaagagaaaaatgggaacggaacggaagcgggcgaactacgaaccaagaccaaaaagcagcattgccgaaaggaatcgcagacaggcttgaccgcgataacctcatggaaggagataaaaacatcggactcaaacaaggaaccaagacacgggcatagccaacacgttgaacactgactatcacgataagacaaacgcaagaattgcaacgatatgtgaaccaggggagagcacaggtataaacggagccaagcggcgcataccgaacaaacaggagcccccatgaaaactcggcaaacactagagcggaacac

SEQ ID NO: 23376 - DNA, 378 bp, Glycine max
tcaagctttttattgtttcttggatggctatttgaagtataattagatagcagtggaccctaacgaccaagaaaaaattgcttttacatgcccttttggtgtctttgcttacagaacgatgtcatttccttgccaccttttagagatgcatgctagctatttttgttgatatggtagaaaaatgcattgagtgttcgtatataatttttcagtcttcgatccctccttcaactgttgcctaaccaatttggaattggtgctatgacgatgtgtagagactaatctagtgctaaactgggagaaatgtcattttatggttcaagaaggcgatattttgggaaataagatatctcctagagggactgtagtagacttggc

SEQ ID NO: 23377 - DNA, 325 bp, Glycine max
actccttgaatacctcatgctgcatcatgaagcttgcttgtaccatgacaaactagtactgtcttaatgcagttcaggggttataacagcttgcgtgaccttatgctatacacacaaatggctagactatatatctttataagcagaatggaaaaggatccttaccacatcatggtaatatacttccgtcctctatactacctgcttcaaccgatggttctcacgaaggtatgcaaaaacaaagccttgacacgttatacccaccatatctacatacttgggttgtagtcgctctttctttgcatcactaaacttgtaagacacc

SEQ ID NO: 23378 - DNA, 380 bp, Glycine max
ttaagctttgcctttagggcttgaacctcatcactttcttccgaagctataacctcatcgtctctcacagtctttagatttgggagccaatccagtccttgtgttcagactctcagctcacttatgatagccgccgatgatcccattactgcttcccctaagctctctgttctttcttcacgctgcatcccatgccttgcgaactccttggagtaccctcgcgttgcggacactgaaacctcgtgcgatgaaaggcgtgatgctttcgtctaatggcgctcctctcatggggtagccaagctgtcttatggtgagaacgggattataattaatacaaccccttgttcccatcaagggaacattcggacatccttcgcatg

SEQ ID NO: 23379 - DNA, 416 bp, Glycine max
tgtaggattatggggtacccatcacttgtggtactatgtggcggtcgggcgatggtgctcaacaagttttccacatccacaaagcgcgcataaacccaccatcccctgttgcccacctccaactgagctcacgtactcccacgtagcccatatcctcgttcctctcaacaccgagtccccattaatcctcccaagctttcccaacatccaagtaatacaacattcagacagcacaaattatcacagccaagcaaaacagggcaaaggcagaaaactctgcccaaaacaccaaccaaaatcacagcttttctcacttaaagaccccaataataattccttcgttccaattcgttaaccgttggatcgactcgaaaattctactggaagtctctagtacataatcctacattgtgacc

SEQ ID NO: 23380 - DNA, 376 bp, Glycine max
tagcttctacttatgtggcagggcgggtttccttcactttcttgtttccaacgcgagctctgaccactgttcttccttcccgcgatgcttcttttcatgtccgcctgagtgggcttatatcccaaaccatacttcccacgattcccatgggattttatcagactagttatgccgccattgtctttgcctaaacccatcccgggttcataaccgttccccaacataactcggtccatcattaccgccgcctcggacagacaaggttgcccatagagggagtccacggaggaaatgctgaccacctcaaaagactggaaagcggtttctaacgactcttctgcggcttacacataaggcatggaggatgggcagctta

SEQ ID NO: 23381 - DNA, 392 bp, Glycine max
  unsure at all n locations
ttgaggagctnctanggaagccagaactttgagtttcaatggagtcctttcaattatattcgacaccgtggtgattaagcgctagacagaagcaccgatcagcatgtggcaacatccacgatggaagaccctatggaacaacggatatccctcgctacgagccgtggaataaatcccgagaggacgccttctgtctgcaaccatgtatggactaaaagatacaaggggggagcctaaattgaaggaagaaaaatggacatgaagtggaactgattggtatctttcacatgaccatgaatgatgatggtacacatacgttatcatggcctaatgtatagactaggaaacctncttgagaacttcttttaaaacatttcttgcaaccgccttcn

SEQ ID NO: 23382 - DNA, 374 bp, Glycine max
agctttaggttgctcattgactccagattgctacaaagaaggacaaagatatgtatggtgatctgcagaagaacatagaccacagactcttgcaacaggtgcagatttctgattcatggcaagctgagttactaggttgaccaaggcatcaagttttccctcaagctttttattttcagtagatgaagatgaatctgtagccacctcatggactcctctaaggacaatagcatcatttcttgcactgaattgttgggagatggaagccatcttctcaatcaatttcctagcctcaacaagagtcatatcaccaagggctccaccactgccagcatcaatcataatcctctccatgttgctaagtccctcataga

SEQ ID NO: 23383 - DNA, 146 bp, Glycine max
acctattaatactcagcttctctgtaacttttatccaagcactctcttggtgttgaagctcttctttccatggcttattctctagtggatgacgtctcctctcaccttgtttactttatcttgcgctgcaactccatggctgaaaa

SEQ ID NO: 23384 - DNA, 392 bp, Glycine max
agcttatggaataagcttgcaaagaaagaaaacgataaaggaagcaagtgaataacagagaattaattggcttacataaataactaactcttaactaactttcaactaactccattaactgtagttacatgagattaaccaattaaccaactctagttacaatgttctatgctaagataacatgagtttgttccaaaattcacaaataatgttgtcggaaaagaatgtaaacaacatattagaatgtaattgagactcaaacacaatcaaaatgacacaaacaacaataagttacattgttataagcattaaaaaatataataaaatagttggtttagtttgggtttgaaaaaaatgtaaacctactcaaaccaattaacattgagtattaa

SEQ ID NO: 23385 - DNA, 431 bp, Glycine max
  unsure at all n locations
ntacgatacgtgcaccctananagcacgaacatatcctctcctttntctatggtaaaaaggggctggggacccaaagaaagcaacacataactacaaaaaggagttaaataatactagcatggagcaccgtacagcatcttcaaaaatcaaggatttgggaccctcaaaagcaactgatagcctttgcctgngggttgaggcagtaatatgccaactatcaaccaatctctctccaaccgtgtattaacttaaccatccaatcgtggtgttttatattcgagagaggaggttagtatatagggacaggattgggatcttacagttgtgtgatgaatgatgatggccagccatccttaaaaaatggaaaagtggaaaaatgtcaaaaatcaattctggaactctcataaaaaaactagttntaccattaccc

SEQ ID NO: 23386 - DNA, 387 bp, Glycine max
  unsure at all n locations
agtttatctattcctatactgtaaattagaatcctcaatttgaagagtagagtctcattctctcaactaagtattctgaatattctctcctctctccttgatagtacattttattagtaactcaaaaaaatatatttctcaatcatctcaaactaacctccttatatctatcatttatagcaattataatggatatagacctttttggtctccacttttcttcagacaattttattcatcgattgcacgtgataacacatctctttccttcctgtgtcataattgagggtttgcccctctctcaactgtgcactcccattntttatgtacctttctccccttttcttttagttttcttttaaaaatatagatcccttagtctttata

SEQ ID NO: 23387 - DNA, 377 bp, Glycine max
  unsure at all n locations
acattgaatcttcttttttcacatcatttagaaaaaaaaaattagggtagagtatgagtagactactatattacataaaaattccttgtattagtattcatatttgtatgggtagtaattgtaatattcttatattttttgttggatatttaaatgttcgtcatattgttacctatactttaattaattataaaaaatcgataaataaaaataatagtaataataaattaaaatctcatttaaaatattttataaaatataaacataaaatatcacaaaaattaaaatcttattcaatgattntggttcttgctaatacacctccatgtttgctaagttaacccctcttttttttttatcaaagttgttatcaccaa

SEQ ID NO: 23388 - DNA, 391 bp, Glycine max
  unsure at all n locations
agcttataataacaaaattgcctcaatcatttccaaatatgcatgtgaattgggacgcatcaacaagaatcaagccaaggctattgtgcaagcaatcaatggggcaaaacacaccaaatgattatgatgatggatggctcaaattctcacaaaggtaaactcatcactttcaaattgagctttcaaaactatcatgacatgttgagaagaatcaaggatttcaagtcacaaaatgtcaagaacttttattttcaaaacaattacccatttcttgaacatatcctataattcaaagaaaaacatgcaaagtcgtacgtgcacacaaaattgaccgaaaatattanactanaaatccgacgaaactaacaacattaacaaattaacacaacta

SEQ ID NO: 23389 - DNA, 433 bp, Glycine max
  unsure at all n locations
ntgatgatatggtcgtcaccaacgaaaggatcaaagtgggtctaaaaagaggcaaatctgatcatcatgctttgataaatgccaaaaaaaaactagggcaaatgaagagggtgagaatgagggagaagcccatgctgtgactgccatacctatacagccaagtttcccaccaacccaacaatgtcattactcagccaataaaaaaccttctccttacccacctcccagttatcaacaaaggcaatccctaaatcaaccacaaagtctgtctaccgcacttccaatgacgaacaccacctttagcacaaaccaaaaacaccaaccaagaaatgaattttgcagtgagaaagcctgtagaattcaccccaattccagtgtcctatgctcacttgctcccatatctacttgataattcaatggtagccataacctt

SEQ ID NO: 23390 - DNA, 426 bp, Glycine max
  unsure at all n locations
tctgtgtaagtaatacatatctttcattcaaggctgttangctttgctcaaagtcaaaggaaactgggaattcctctgatgaacatttaactctccactatcagggtagtggtgcatttactttgactaatattcttttcatatcattgcccaatggggatactttccatcttccgggatgcctttgaaattatgaatcactgcatgatgcatgtgaatgtaaaaggtgtctcttgcaagttcgacatcttgacacatcagacaagaatgaacttcataagttacaacaactgaaggatgagcaaagtctgggtgccatttttgctcaaaagctactcatacttagaaatattacctgatgggcagacttagtatggttgatttgtatgcattttatgttatagccctattaatttagtaaatttc

SEQ ID NO: 23391 - DNA, 280 bp, Glycine max
  unsure at all n locations
agcttcaagatgcccactagagttggatcgcgatgttctgcgtgtgggtcgtcgtcgacgttcgcgccgtgggtcgtcgttgtcgtgctcgttgccgccgttcacgccgtgggtcgtcattgctggttgctgtgtgctgcgggtcacagctaggttccagggtcgcgctttgtgttggagattggagggctcgcagctgcgctctgaaagcttggaggggtcgtgcttttcattaagttaccgggtagggttgggtcgggtcancccatcttctaccgtg

SEQ ID NO: 23392 - DNA, 421 bp, Glycine max
ttgatgatgaattttgaactgtgtacgtcttgtgtgtatgtattctgcctttgtctttgcaacgatccatacaagtggttgtatgaataagccgtcgtgaagtagacaacgtaggaagcaagaccttgttgatgtagaaagactgtggtggtcttgtaaagagtagaatgacatggagtcatctcaagtttgatttcaacctgattaaagatcttgtcacccatctgttggggcttccttttgttttaaggagcttgtcccctgataattgtgagaacttgtgttttgaattgcccctagttgaaggtcctgcctaaccagtgtggggatagtcgcttgacttgttgagttccttctctgatgattataaggagtaagtgtgagctacacctgattgaaggtcttgccatacaattgggtg

SEQ ID NO: 23393 - DNA, 380 bp, Glycine max
agcttgcacttcttcgctttccttagggacttcagcctcttccccacttgaaatctttagttcgggagccaagttatcccttgcatccgagccttcaaccatttatgatatccaccaataacaccgttgatgcttcctctaagctccttatcctttctttgcaccacattccatgcttttcggactcgtcgaagcatttttgcattggggtcattgaagccacgtgctatgaaaggcatgatactctcttccgatggtgcccctctcatatgatagcctagttgtcttatggcaagtttgggattataattaatacaacccctcgttcccatcaaggggacatttaggaacccttcacatgaggacaatactccgaccct

SEQ ID NO: 23394 - DNA, 404 bp, Glycine max
ctgattaagggaaagaaaaaatcattgttaaatgtttctacaagtcgaactggagcttcatacttttaacaagccaagtacaagttttgaatttacttcattttaaataaatgaccaaaacttagcatcttctacttttgcaaaccaagcatcaactttaatttcttggcttgacttgatactttgacaatgcccttaacaatatacattactccaatttgattgaacttaagtgctaatattacatgtaatataatttcacttgcacacaccgaagaaaactcattgaccaaatggcagcacctgatattacttctagaatataaggtttatttgcaaagttaccatttcaatgcatcttatcctaaagactgctttcaacatcacacacacacacacacaca

SEQ ID NO: 23395 - DNA, 385 bp, Glycine max
tcaagcttctcccccaattatctataaatagggggagaagtgaagtacaacagggttcagccccttaggcacttctctctctttcgaatttgcttaggaaaattgtttccgtgaagaaaatccaagctgaggcgcttccgtaacgttttcgtaacgtttctgcgagtgatttcgcgaaggttttcgaccgttcttcgacgttcttcattcgctcttcatcgttcttcagtcttcaatgggtaagtacctcaaaccaagcttttcgattcattctatgtacctgtggtggtccacattttgtttcatgtatttttattcttgtttcatttattatttatatccccttttgacgtgcttaagccattttatttaagtcatttctcgc

SEQ ID NO: 23396 - DNA, 426 bp, Glycine max
aagctctattcaagacaaagaaattaaagattttcaagatgtgtttatcaagacaatctctagtgtcttagaaagggtatattaaataagaagggaattccaattgaagtagcaaaaggtttgggcaagaaatttaaggtaaaaagtttttttcaacaaatgtactctctggtaatcgattaccagaggatgtaattgattaccaatggccaaaactgatttacaacagctattaaaatttgaattcaaaatttgcactgtgtaatcgattacacacatatggtaatcgactaccagcagtttctgaacgttttaattcaaattttaaagcttgtaatcgattacacacatattgtaatcgattaccagagcatattttcagaatatattctccacagtcacatctttttatttggtgcttgaatg

SEQ ID NO: 23397 - DNA, 377 bp, Glycine max
ttaagtttaccctatttataccgcgtttgagagagtggggtaatgattctgcatcaatttgtgtttctatagatttttcaatatagtccttgccacattggactcaaacttgccacattgggttgcttacgtggactgatgtgtgccaaatagacatttgactaacggaataaattagattttaacagcaaggacttatttgcatatctgatgtaaagatagggactattttgaattaaaatttaatgtaaggactaatatgcaaactggttacaatctcagggactaaattgcctattcactcaatagaactagctataaagcaaaagaaccaccacgcgcgtgtagttaaggcagatatcaacatttggctttgc

SEQ ID NO: 23398 - DNA, 216 bp, Glycine max
gtgagctctgactccacacgacgcaggtaaggtctgattacgcgccaaggatcgaggggatgtgtgagctcgtacgcataacgcaagtgcgaacacgatgagtgcacaattttgaagcaccagctgtgccgcgccgcgctcttatgctaaagcgaaggacccaaacggtgcccgtagtgtgatgaaatggcgcgctaatggaagctgctcaactaa

SEQ ID NO: 23399 - DNA, 368 bp, Glycine max
atcttgaaggtaaaatagatgccttggttaacctggtaacccaactggccatgaataaaaaatctgcacctgtcgtcagactctgtggtttatgctcctctgccgaccaccacacagacctttgcccttttgtgcaacaatctgaaccaattgaacagcctgaagcttatgctgcaaacatctacaatagacctcctcaacctcagcagcaaaatcagccacaacagaacaattatgacctctccagcaacaggtacaatcccaagtggaggaatcatcccaaccttagatggttgaatccttcacaacaacagcaacaacaacaacaaccttattttagaatgttgctggcccagcagacatacgtt

SEQ ID NO: 23400 - DNA, 339 bp, Glycine max
gttcaaggataaaagggattccccacattattcatcatgactcaaatgcaaaaaggatgagttggaaattctatgcacaactggtcatgcatgcacctatgcggacgctcatacgttacatctttatggacacgtgatgctagggctcacgatgcattgactctatgatagatcaaccgaatgtttccaaagtatgacattttatcaattagtgcattaatgcaagtccatttcgggcgaccggggaaattacacaggattcacccctcaggtggagacacattttccaaaaattggatatgatccatgaagtgtctacatagaaaagttggaaatcat

SEQ ID NO: 23401 - DNA, 228 bp, Glycine max
agctttaaacatctttgaagagaaggggtggcttaaaatctttaattgtccacagtcagtgcattgatggtgcccatgtttcatacttcatactacatggaaatagtataaactttgttagtaagtacttgtgttttttcatgagggaaaatacttgtacttgggggcatgtcactcagtttggaacttccttgtgactcagacttatcaccatgggggggtgggggg

SEQ ID NO: 23402 - DNA, 281 bp, Glycine max
  unsure at all n locations
tttcttaaagctttcttgttaatctgggacctagctttggcagaagtctccacagaggacattgcctccctcgcccagtattatgaccaaccattgaggtgcttaacctttggggacttctagatatcacccatggtggaagaatttgaagagatcctangatgccctctatggggaggaaaccatacctcttctcaggattctatccctttttagctagaatttctaagatagtccaaatctcgacgtacgaattagaccacagaaagcaagtcaaaaat

SEQ ID NO: 23403 - DNA, 522 bp, Glycine max
cctacacctctacccccaaactaatacatactaacaagaaagagttaattaacaatcacccccgaagaattgagtgtgctgatgccatgcaaaccaaggcgaatcgaacacggacagcggatacttaaacgcacccgtttacttctaatgtaaatacgcccagggaacaagagaaccacacagggcatcaacataatatcatggctccgtctacaaagtatgcggacaatgcacccatgaccatcaccacacagatctttgacctttggctgaataaaatgcagcagtaggacaatctgaagatcaagcatgtataatccacagatgaccacctcaacgttcaaagcaaagaaaggcaggacagaggagataacaccgctgcactatcaggaaccatacctgaggaaagaatgatctcgaccttaaacgcttgaaaaccacgctgcaaccagaacagacacaacaacctgatccttagaatggtgctggaccacgccaaaatacgtgtctccaccaagcccg

SEQ ID NO: 23404 - DNA, 498 bp, Glycine max
  unsure at all n locations
cgctgcgttanaatttgattcgtttgtganaacnctgaannacgngatttgaaacctcgaagccagngaactatgaanacacaagactgttattgaatattatgcacaaagccgacgcgatttcttgtcanggctgaaacacaaaatcattggtcataacatattgaactctatcactacacttagtccgatgtcaaagttgacaggaactcataacagaccaccatcttatcaatgactgatgttaatgaacgacgatccaaagctcccttataccggaacgcttacctagcggacgtggcttcagtatctttattttagaacgagacactagtgatacacctgggtacatttgatgcccctgtggtagacaattgtcttgtatcatttaatgagccaaccaataatctaagaatatacctacgagatcaatggtgactaatatgggacgctactcgtacttctataggagactagtagaacagacatgttgcgttn

SEQ ID NO: 23405 - DNA, 385 bp, Glycine max
agcttgcatttggaattgcgaaagcccccctccatcattaggatttgtgcctgccatctcaaacaaacaaatcaaacgtaacaagacaattatagttgttgtttgaatacctcacccactcaagtgtatcacacaattatggcttttctctaatgaaacactcttgccttttaccactctaattccccttgagttcttatgaaattcaagagattatggccacaacaaagaacaattcaccaatatgtgtaaggtaaggctagagagacaaggaaaaggttaaccaagaaaaaggctaacaatgtttttaggcacaaatgaaggaaataaaattcagaatttaggaattcaagtaacaatccttcattcaacaaatatattacct

SEQ ID NO: 23406 - DNA, 426 bp, Glycine max
  unsure at all n locations
aggaagaagaagaagaaattcaagaggatgttcanagagttttaaaggatgtaaaagattgttatcaatgtcttgaaaatgcaagttaaggacttgcttttatagactcttcatgtctggtcaagaaaaccattagaagagttataaccattagaaaaacttgaaaaccattggaagagttacatcttttgatttctattcaaaacttatcactggtaatcgattaccaaatcattgtaatcgattacacaaagcatttttgtgaaaggatgtgacacttcacatttgaatttgaatttcaacgttcaaacacactggttatcgattaccaaatcattgtaatcgattacaccattttgaaatcaattggaacgttgcaaattaagttgaaagctttntgaaaacaatctttgctactggtaatca

SEQ ID NO: 23407 - DNA, 393 bp, Glycine max
  unsure at all n locations
agcttatgctcttatttccttacaaacgttctcttgcaccagacatttaaccgaaaaaatgcacccatatacaatcaaggcagcttcgttacctagattatttacacgtacctccaaggtgtatttgttacttacatcacacacatctccttggctaaattcacatacatgcatactcaaagcattttggggcaccaaaaattgcacatgtgcacatcttggcatttctaatacctatacatacgcaaacttcatgatgaatcttgactatctacacaataaggtgctacatttcatgctcctttttcaagtttttgctacctaaagccgcatgcanattcaagcatattttcctttgctgactaaaattgtattcaaattaaaaggtatatt

SEQ ID NO: 23408 - DNA, 417 bp, Glycine max
  unsure at all n locations
tgccgccacggagtnttccgactatgctcttatgtggtgtaacaagcttcaaaaggagagagcaagaaatgaagagccaatggttgatacatggacggagatgaaaaagatcatgaagaagcggtatgtgccggctagttactcaagggacttgaaattcaagctccaaaaactaacccaaggcaacaagggggttgaggagtatttcaaggaaatggatgtgctcatgattcaagcaaatattgaagaagatgaggaagtaactatggctcgatttcttaatggtttgactaatgatatccgtgatattgttgagctgcaggagtttgttgaaatggatgatttgcttcacaaagcaatccaagtggagcaacaattaaaaaggaagggagtggctaagaggagttttaccaactt

SEQ ID NO: 23409 - DNA, 377 bp, Glycine max
agctttcttcttcaaaagctctgcaatttcagaattcaatttttgatccacttgcaacagcctgtctaatgcaagaaaagcagctgtgacccattttggaacctgttctttctccctgttaccaagactagaatcccattggtagagtagatctgaggcaatttttatgaaaccactctttgaagcagcttctcgcgcaacagcatcctcattaagaatcaatgcaagaacatgaaatagagcagcaagcatggtattatttccgttaccagaaatcaatccacattccttgatccggtcaacaataaaagtgagaacattagatctattttgaccatcattctgagagcatatcatcatgagcaagtcacggacag

SEQ ID NO: 23410 - DNA, 429 bp, Glycine max
  unsure at all n locations
gcagggaattggtgatttgaaagcacctggtattgttggttatggttcaaaatttttcaaaaatagctggcatatagtaaagaaagattttattgctgcagtgaatgaatttttcgagaaaggatctttattaaaggattttaatactactcttgtgactctcattcctaaatctattactgctaagactgtcaaggattacaggcctattgcagtttgctctactttttataaagtgatctaaaattttttgactaggaggctagggatagtgatacaggatattgttcatactagccaagcaacttttgtacccggtcaagtcattcacaatcatattctccttgcaactgagttgatgaaggggtataccagaaagggtgggacccctacgtgtatgatgcanatagacctccaaaaagcttatga

SEQ ID NO: 23411 - DNA, 391 bp, Glycine max
agtcttgtggttatttatgtactgtctaggattcacaaattgatgtggcaagtgacgtgacattaaaatatgcacgtcaaccctggtacaggaacatggataccactcgcttagcaactgagtcattgggctaataagttgttaatatatttgaactttaatgataatgtcattgtcctcttatcaaattgcaggtacccacttatttcgtagcaatgaattatctatagggttgctacgctactataataagctcaacaatcatagaccttgggctcccatccgactttgtaaataattaggctctaccttcatttttcatttattctcaactcactcacataataaagttccatccaacataaattgtaataaaaagtaataaaataaa

SEQ ID NO: 23412 - DNA, 382 bp, Glycine max
  unsure at all n locations
accttgaagacctttgctatatatcnttgcattcactgctgcctttgccaggcagaattcgccaaggactaaccgactaattgtttttgtgtcgctattctccctattacagaagaacanaggactaaccacctaaactcttttgtgtctcccttctcccttggcacagaattcaaaacgacacaaactgaaagttctttagattcttcccattcccttatacaaaagtgttcacaggactaaccgcctgagaattcttttgtatccccattcacaaagtatcacaggttcaaccgcctgagatctttgtcttaacacattggagggtacatcctttgtggtacatgcagagggaacatctacttgtgtttgactgacaaca

SEQ ID NO: 23413 - DNA, 389 bp, Glycine max
  unsure at all n locations
agcttgtgcaaatcatttcactcctacatttcatctctagcatgcattttctttctttacccactcctcacgtttggttttttagggaaaaacaccataactaaacgcgccgcaagggatccctatcgcaccagatccaaatctagaacgatgggtgatcaagaggagacgcaggaacagatgaaagccgacatgtcggctctgaaagaacaaatggcctccatgatggaggccatgttaggtatgaagcagctcatggagaagaacgcggcctctgccgccgctgtcagttcggctgccgaagcagacccgactcccttggcaactacgcaccatcctccctcaaacatagtaggacggngaagggacacactgnggcacgatggcag

SEQ ID NO: 23414 - DNA, 437 bp, Glycine max
  unsure at all n locations
tgagctctgtgtaatcgattacactaatttgataatcgattacttgtgatagtttctgaacaaaatcaaaagatgtaactcttccaatagttttcaagtttttcttaaagttgtaacatttccaaatggtttttaagtttttctaaaggttataactcttctaatggttctcttgaccacacatgaagagtctataaaagacccactttgatttgcatttaaaattattcattcaacaattcttttgacaacaacttttccactttgatttctaaatctctttgaacttcttcttcttccttttgccaaaagctttccaaagttttctggttttccaaaccttgaaaactgtgttattcatctttttcattcccttctccctttgccaaaaagaattcgccaaggactaaccacctgaattctttntgtgtctctct

SEQ ID NO: 23415 - DNA, 387 bp, Glycine max
tcaagcttgctgagattcattctgataaagcagaatgtactcaagcatagtacataagaaagcataatataacaacctaggaaacacagattcagtatgggatacaaatatgatatgacatgacaagaacaagacaatatggcacattttaaaagttatacagatatgatatgtatctaaattctaacatggctacatgacatgaccactgattccaagtgtatgtacttcttagttaaaaactatgaaagggaaggtgtttatcacagatatgtggcactaagagatatacaaacgtaatgagctatcaatccaaatgagtataacggtcatataatttggctctaccccaaaccaaagctggatagccgagtattttaatgaata

SEQ ID NO: 23416 - DNA, 478 bp, Glycine max
  unsure at all n locations
caccgctaaaattgataccttgtgataccnttgcataccgcgacctatgaatactcaagctgctggcaccaaggatcctagattgttacaatattcgaagngggaaaggcagtgtcctgagaacaatacaacatcaagtgagagcatttggaatgatctgggaagatgcgtccgttggcgctatacttaaacatagccgtcgaggtaaagcggcttcacgatcctgccatcgagctattcttctttcagcaccccctctcttggacttgcacccgctgatgatgctgctgtgatctactccgccacgcacacccgaaccctgttgaatgcactttcgtcatcaaagacatgtgatgcttacgttgcctacatctgcacatgacaaccattgtacctcaagaacgcatccatgtggcccccataacttgggaatcatggccaattatggagtgatgcgagaactgacacttgagatctg

SEQ ID NO: 23417 - DNA, 217 bp, Glycine max
gagcaatgcatgattagccgtgagctagattcatgccactgggaccaatggaaactggtatgccctatctgctccgaatggctgctcaaaggacatgaatgttgggctcctcaggctttcacaaggcaccgatgaggttgaagagtatcattatgaataggatgagctcttgactctctcgcatcttgcacatgatgaagacgtttcgatgggtatg

SEQ ID NO: 23418 - DNA, 369 bp, Glycine max
tctagttttgaacccttcaacagcagaagatcttcttacttgtccttgttcgtcaaggcaatcacaaactttggcggccacaccggcggagccacgtcaccactgccggacggcgagccaccacccttcttgctttcgtgcgcggtgtctgatgagaccacagacttgatgttattattgtcattaaggtggttgttatgggtccccttcttatagtgcgcacccctgtccggtgaggcaattcccctaacactcccgttgctttggcctcctctcataccacttgaagtctccgaattcctaagtaagatgaatgatataaatatagacaacgaaagcttaacccacatatgactattatcccatatg

SEQ ID NO: 23419 - DNA, 422 bp, Glycine max
  unsure at all n locations
ggtgtttataggagccaaagnnaaagtagtgataggttagaaactaaaaataggcaaaatgttgtcagaactaaaatgtaaaaatatgtagattgataagaactaaaaataaattgtacgaatcaaatggagaaaaagcatataaaagcacgaacatatttaagtctaatgttaaggaatgatgatccaaggtgcattaagagcggaatgcacacgtagcggacatggctttgtaatttttttttaggaacgagcgcgagttatacacattggtacatttgatgtccctatggtagaatattgtgttgtatcatttaatgagccaaccaataatcgaagaacataacaacaggataaatggagaagatgatgggacaatactcgtacgtgtttaaagactcacttgatttgatatgttgact

SEQ ID NO: 23420 - DNA, 381 bp, Glycine max
  unsure at all n locations
tcaagtttgtggaacatcgatagggtgtgggtatagggggacacgttgaattgcacccgccagtcatgggaacaaccgtcgctacccatcatgcggcggaggtgcttgctagtgcggagggcctgtgccatgccttgcgccattgactgaatgttatggtcgggtatggtggtgtacgccactgtgtcttggttcccctgtgactttccatgccgcattaatattcttctctttggaagcacaccaaccatatcttctcttctctttacattcattttctttcaccctcacaattctaatcttttttatccacacataaaattntgacaataaaagaatatttatacactttcctttgcgcatgatggttgattcctatat

SEQ ID NO: 23421 - DNA, 427 bp, Glycine max
  unsure at all n locations
tcgctggcacatcatcttacatgtgtatggatgtaatttctctgcgctaagcaatggtaaatatatcttaggtaacctacatgctgaagctactgatgcgttattcgcttgngctattccttgaactaaagatacaatagagttgagccatctatcattctcctgcaccaatatatacttactactgcgcatgaacatgaagtcctaggttgtctacattatgtatgtgatattggtccctacttaaataacgtgggtgaaccattacatgacatgctaaagaaaactccgactccttgtaccgacattcatacccaagccatgagatatatcatttgcgaccccaactcatactgtgtacgtgtcttcccattccacaagcattcatgattgttgatacggatgcatcggacatgagttatggcgg

SEQ ID NO: 23422 - DNA, 380 bp, Glycine max
agcttatgcgcatatttccctacgaatgttcacttgcacaagacatcctattaactaagaaaaatgcacccatatacaatcaaggtagcttcattacctagattatttacatgtacttccaaggtgtatttgttatttacatcacacacgcctccttggctaaatttacatacatgcatactcaaagcatttcggggtaccaaaaattgcacacgcgctcatcttggtatttctaatacctatacatatacgaacttcatgatgaatcttgactacctacgcaataaggtgctacctttcatgctttttttttcaagtttttgctacctaaagccacatgcaaattcaagcatattctcctttgctgactaaaatcgtat

SEQ ID NO: 23423 - DNA, 426 bp, Glycine max
  unsure at all n locations
agcctgatgatgatgaatcaagttgattcttgtnattttgatgatgacaaaaaccgaagagtgatttcaagattcagtcaacaagttcaagatcaagataaatttcaagtttcatgagaagaaatcaaaaagattaaagaatcaagagaagtttgatttcaagattcaagagaagaaatcaataagacttcacaagggaagtattgaaaagatttttcaaaaaacaaacatagcacatttttgtttttcaaaagagtttttctcaaaattttctaagtgaccaaagtttttactctctggtaattgattaccagtttcctataatcgattaccagtggcaaagtttgatttcaaaagcttttaattgaatttgcaatgttccaattgatttcaaaatggtgtaatcgattacaagatattggtaat

SEQ ID NO: 23424 - DNA, 192 bp, Glycine max
cctgcacgcattcgagtttatactgatggtggcacaccaggattgcagactcatacaaacattatcttcaacgacggcctaattacatattataagacgaatgcgaactctcagaaaaacggacgtggtcttgtgcatacctcatataatcacaaatgcgatacctggatgcataagttaaactttatacga

SEQ ID NO: 23425 - DNA, 392 bp, Glycine max
ttttatgcatggtttcctagattctgaacgacgcttgttatgcaattatattcttatatacgcgacctaaccacgtatgccataatgctcctgagttcgtataatggctgtacagcttagaccaaggacttccgcattaggcgatgacccgtaacaggctacgctatcaaagtaactattgattatcattagccaagacagtttcagccatatctgactttaaagacaacctaatcacattatttccgaatgagcatagatagtccaatatggccgagtgagaaattgaaaccatacgccggcggaacgaagatacgacaaaaggtctgtcttattagcaaaaagcctgtcatactattgtctaaatgcctatactgtcacgattaccactc

SEQ ID NO: 23426 - DNA, 368 bp, Glycine max
taagcttgaagctcaaggaaaaacttgaagaagttttggcttttacatgtctaactcccttgagtggcatttgtattggttgttatattggttgttgcttcttagtacatctgatatatgtattgcattctgcatcatcatgctttgtgtgaagaaaaatttctaagttagaaaaatttattcaaaggcaaaaactctttgttttaatccattatagagttgctgtaaacgattacaacaagttatcttaagcatgtagagtgtagtctcgtatcagcttaattgattactgatatcttgtaatcgattacactgttgtttgagacaatcactacattattcagaagtctatgctttaattaattacc

SEQ ID NO: 23427 - DNA, 392 bp, Glycine max
  unsure at all n locations
gttttgttccaatttgatattcccaagcatctagggctacaaaaacttcctagtattcatcaaccaatccattgagagtgttaatgagaaggtctacatcatcaagtggtgagttgatcatggctagttcatcacataatgaattaattccatgtatacttttagtcatggagcgagagcatttggtgaactacgtgaagcgctctctgaggtacatgattctaacccttgcttttttggcatacattttgtaacaaccccaaatgctatttgatgcaatcctaccctccaaggatattggatagaagactccaagaggattgtgctacagcggntaaagaatgtcctagggttctcatgaaccttanggtagatttctgagcccatggacc

SEQ ID NO: 23428 - DNA, 386 bp, Glycine max
  unsure at all n locations
agcttgttgatattgccatgtttgaatgagttaaacatacccattctgttttagggtttttgtgatgatgttggtgatgtttacatgctgaaattgctgatggaaatctgttagagacgaagggtagaactaacctaaggttagaaagtgagaatgtgatgttatgagtggaaaaagagtgagactttgagagttggaaggctaagtctgaattctgtggtaaatggggggttaaagtgagttaatactagcttgaaatgtcgtttaagacatgtgagaaaggttaggctgagctagagagaaaaacaaatgaccaaagtgaaccaagagccatttctagggcaaaattgngtgttgaagagtcanatcttgatttggtggaattt

SEQ ID NO: 23429 - DNA, 450 bp, Glycine max
  unsure at all n locations
atacaatacttaagcttgtgtcgcactgtctactgctgaagctaaatatatagctgcaggaagttgttgtgctcaaagtctctggatgaagcaacaacttgaagactttggagtaaaccttgatcacattcctctaaaatgtgacaacacaagtgcgatcaacctaaaaaaaaaccttgtcatgcattctaggactaaacacatagagataaggcattattttcttagaaatcatgtgttaaaaggtgattgttgtattgagttcattgatagtgagcatcaactagcagatattttcactaaacctcttgctagagataggttctttttcattagaaatgaactaggcatattagatgcatctagcatagaatgatattttgtttgcacagtgtgtgtgattgacattgctactcatataatttctttntgtttagtttgtgtcacaag

SEQ ID NO: 23430 - DNA, 389 bp, Glycine max
agctttattttcatatccctcttgtaagactagacctagactaatcaacattactgtgacaacacaattaaaaccaaacctaaatccgcagatcctactctgaagattaagtatcgatactgctacaatcaagttctaaagcaacagtaacattcccaatgctaaagacacctaactatgcacacaaatggatgatcagaccaaaagcatacaaacattaagcattgaaggaacattgaatactaaaaacatagatcaattagatatcagggatctacatcagtgcgtcatttgaaaaccccaactagcgcgttgtgccggccataacaaagaaacccaaacattaataatcttacaaaacctagggtgcaacgcacaagctacacctc

SEQ ID NO: 23431 - DNA, 412 bp, Glycine max
  unsure at all n locations
agtaatgacccattaacctaatttaaatacttttgccattaacctagggaattaaaaaaaacttaatggctgagtgtaactgaaattgtggcaaccaaaggtcacccccaacagccaacaagtcagccaccatttggtctcccaaaaggctgatgcctaagttgccaattgggcccttattacaacttgaactaaacctactaaagcccttttagttgattaacccaaaacatatttttggtcagccaactttataaggattggaccattatttagacaaactaaacactctaaaattgagacaaagtgctgccatttagtcctcctccatttgggccatgatacaactcacaaccttggacttttctccttgaaacttgngcttgtattcaaatagtatggacaacacttg

SEQ ID NO: 23432 - DNA, 366 bp, Glycine max
tgaacgagtgcttcaccaaatgctcatttgaatagcagtatgtgaatagatttttttccccaaccttgtctatatgttacatggtgactgatgacatattcaaattatacagctatgacttggacagtaccaaagaagaaagagatgctatatgaactcagaataggtaaacatatatataggatccacaaattcatgctcgatccatcatgtgtctccagcaattacaacttaattcgtgtgtacttccctctacagtttgacgagtgagcataatgatgctctgatgcaaaagccttaacagcatagaggagtatgagaaactccgcacacaatgccggcaactactaaagcacaacaatggga

SEQ ID NO: 23433 - DNA, 386 bp, Glycine max
agctaatgcttaactatgtatgacaaaactgcattactgttgttcaagacatacaagtgagcttgtaacaaatcttctacacttggagtgatcacctgcagtcctcttgaacccttaccacccactttgtcataatgccgagactcatgaagcccaacaggtttagccttctctaagtattctgaacaaaattcaatggcttcttctgcaatgtacctctcaacaatagatgcttctagacgatatagattctttgtatacccttttaagatcttcatgtatcgctcaactgggtacatccaccgttgataaacaggaccacaacatttgatttctctgaccagatgcacaatcaagtgaatcatgatgtcaacgaaagcaggggg

SEQ ID NO: 23434 - DNA, 373 bp, Glycine max
  unsure at all n locations
taaatgtaaaaaaatattgagggtttccctacattaataattatggaaaaccaacaggaacttgagatttatgggtctcacatacactctataaagaataatagataattatcgtgtaccttttctccaataggaatcttgctctgggtgcactctgaagaattgagagaatatagcgatttccactttcctcttggccctttcttttcttgtctctcttacgntcgtgatggctatgtggtgagaaaagagcactttttggtcaagaacgggaccttatctcacattagcgggtattaagccccttttataaccactactctcatcaagtagcagttaatctacaaacttctcctattaagtccaattacaa

SEQ ID NO: 23435 - DNA, 352 bp, Glycine max
  unsure at all n locations
agctttggaaagngacgattatcaccatctcgctaagccaaactgctggcttaacgagcgtacgctaagcgcaacactactgagctaagtgcgaggaagactctggaagaagatgagcaatacagggtcgctaagcacaccgctgaatcaactaagcgcaccgcttaaagacatctgctaagcgagaaaggcgcgctaagcacaaaaaacactaatgtgcgctaagcggtccataagtgcgcatagcgcacgagcactaacaaggccacctattcaagcctgaaaacagaactttcgaagagagtctggactaagattcagagcttagcatgtctaagggttccagagagag

SEQ ID NO: 23436 - DNA, 480 bp, Glycine max
  unsure at all n locations
attgaaacctttgtttgagaccntcagcaanntcagcgactttgatacctttgtaaaacccccganaangatcctggaacagggctctaaagtagtcctagcctgcacctaagagttactaagaggtccatgacattaagaagatgcttcggtggccgaatctgaagaaaatacgcaatgagttcgccttgttgcctagggatcacaaagctaagatagagcaccagaagcctcccgggaagttgcaacctttacagataccttgtgtggaagtgggataacatctccatggattttcgaggtgggattacctacgacccccaaaggtttaaattccatttggggtattgtagacaggttgacgaaatctactcacttcatcccgaataacatcagatatcccttaaagaggttgactagcttgtatgccactgagatagctaaactacctggtgctacttctatcatagatattgaaag

SEQ ID NO: 23437 - DNA, 534 bp, Glycine max
  unsure at all n locations
acccgcaacacacaccacaaaccgccataccgcacagcacggagaaaaataanacanaaacannnacaaggaggaaatggagcgatgaanacccacancaanggcgaanacgcacccggacccgaggagccaccacaggcacgccgccgcatatcagctcaacaaaacnaaaanagccggcaccagagcagctgccaacggcaccccaacccacacgggacaaggcccacaacaggaaacgaagaaaaccccacggagcaccgcacacaccaaacgggcaacaggagcaaaacacgagaacccgaacaagacgagcacgacacagacccgctgccaacgaacaaagggcgccacacgacgcgaaacaacagcacacaaaacccgcagacaagaccgacacggaagacgcaccacaaggcacggccaccaacacccaaacagcgacagaccccaacgcaccgcacgaccaccacacgaaacctaccggagcacaacccanagagagacccacgaacgaacccccacacgcgcgcn

SEQ ID NO: 23438 - DNA, 272 bp, Glycine max
attgaacaacctttattcacacctttcaaagttagtgagaatgctaaaagaaaaatttaggaacttagaataactaactccttaattgaatgcgtaggtgacaaccatagtgaattactaaacaagattggttgttgacttaaagtcattccagataccccccaagcctcggaaaatacttcctaaatggtaactagaagtacctcctaattaatcaatatcattaatgaagatagggaccagaactcagataacacaactgagataggatc

SEQ ID NO: 23439 - DNA, 349 bp, Glycine max
ggcgaaacgacccggacccgcgcacacctacaacgaccgcacgcattcagctacgagaggaggctcacaaccacacgcggggcatgacgaggtacgactctgcccggaccgcaacaaggagaaaggcgcggaacatgcgcaccaccacgaccactctcacacacaacgggacgacgcagctgcgtaccacacatcgcccaagcgaccacaactcggacctcaccccaccaaagtgtcagccggccgacaccataccgacacacgtgagacgacaagcggctcagcagaacactgacgctacataccaacctgcagggatagtgcgaaccagacacccggcggacccgga

SEQ ID NO: 23440 - DNA, 416 bp, Glycine max
atgcaaacaatagaatccacatgttggagaattttcttgaaaacctcgggggtgttcttaaagcgcgatttgcagaagatccacaaattaatcaagtcttagaaactatagatcaggaggtatgaatttataattcaacttattcaacgatttaactatgatatgatactttacaaagaaaaaacattcttttaatttaggtacctacaaatggttctactagtaaaaatcatcaaactacaaacaatctcaactagaggtgagttgaaatttaataattaatatgttgacaataccatttttgttagcatatggtataacttgtagtgtatccgtactatctatgtatgtagtaagtcgacatttaataattaatatgttgaaatttttgctatttgaggaacatgatttagatg

SEQ ID NO: 23441 - DNA, 356 bp, Glycine max
  unsure at all n locations
tcaagcttgtaattgncnaaggcnaagtgtatttgggtagacattttatgcagatccaaattgatagtatgatgactatagagaatgaatgataatcaacttattggtctgctgtgatgatatgcaacctactgcatacattggtgtggcaacccgccaatgtatagggaaccatagtgaaggcaccatgggtggtgattcagagtttagctgctgaaatacctaattataggctaaagcaagatgcaatgtattgaattattatttgagagtctgccaatgtaaggggaaatagagtgaagccactacagacatgtttcttaagggagtagcactgttgtgaatcttacattgag

SEQ ID NO: 23442 - DNA, 349 bp, Glycine max
catctactatgaagtgagcgatgacgttcttctatggtccattatccacttctgcatgaacataggcctagagaagcaaacgaatacagagttgaatacaaaccgaggcctacttgctgcccttggggcgacatacttatgtttccctgacacttatacaactatatgtgtatagtatgaccttttgagggtgacataagatgcgtgcagaccactcttttgatcgaggaattctggtaagaagacttctttatcctgtaggcgactagtaatccctaactaatgcgtgatgggtctatgtgcacagccgcatgtctatgagatggcatgcacatattcaccgtgggac

SEQ ID NO: 23443 - DNA, 265 bp, Glycine max
ttgcatgcaagcttgtgacactttcttcaggactagatccccctcgctgaacttgtgcgggcgcaccttggcgaaaacattctttactcggcatagatacaatcgttcatggctcatggcagccaacctcttaccttctataagaatcaacttatcacagcgagattgtgatatgaatcctcatggcacaagggctgactcaagatcgtctacgattaaaacttgatggagaacgcggacattgatcaacgaaaggacggaaaat

SEQ ID NO: 23444 - DNA, 399 bp, Glycine max
  unsure at all n locations
tattatagttctttatttattgaggatcataaaaagtttaagtcatgtatgagagacataacaacttccttcttgaacaaaagttgagagaggaaatgttgataaaactcttttcattaaaaagtcctctcataacattttacttgtgcaagtttatatggatgacatcatttttggttccactaacaaatctctttgtgaagattttgtgcacaagatgtagggggagtttgaaatgttaatgatgtgggagttaaattactttcttggtctccaagtgaagctagtggaccatggaacatttctctatgaagtaaaatactacaaggaacttttcanacagtttgagatggacnatagcaaggaggctacaactcatatagctactaattgctacct

SEQ ID NO: 23445 - DNA, 314 bp, Glycine max
tttgtattctagcttatcatccagccccttctaggacgcgcccactctttctgatgggttcctgacactgttgaagtctcccagctagcaccataggccacctaacttaggcttttcagctgctctgaccgagccccagagagctctcttgttatgaacatcacatggagcatatatgtctactatgtgaaccttctgagcctagtgagtcaatactccttccacaataataacccccctgccagtaaccttattttccactttgaaagtgttcttactccataagcacagcagtccacctgatgatttgatgc

SEQ ID NO: 23446 - DNA, 494 bp, Glycine max
  unsure at all n locations
agagcgcgaacatttgaaacccttgtggaaacccctggananccanattttgaaaccttagnaanaccngngacactannagaaacnccagcttcttcaannagccttcagccggcacccgacagcggtgttacgaaccnccacactctaatcgcacataaccgaggacaatactcacaaacccccgacaaaccgaaaatgtgtgaagcccagggagctcaaacaccccgagtttggtcctaataaaccgaaatctggcagaagagaggggctttgcgagaagaactgcccaccgaccctgagctggtatgtgacccacagagattggtgcttagaacattttcccttacaaagaagagattgatctccaaatcgctgaattttccctatgaacaataggtttatgtgctcgtgccataacgctttgattatcacagagaatgagaggcttgggaagaggaacaccaagttcttgaaagaacgcttgaagcccg

SEQ ID NO: 23447 - DNA, 391 bp, Glycine max
  unsure at all n locations
agcttgaggattgtgtaccttccagattggatggttatcgttttcaatgacttagtctctacgcatttcgtccttgggggttgtgtaccctttgggttggatcattcccaatccatagcttagcccttccgattcgtgccttgagtcgaaccttgcctcatcatatctatgtctaatctaattatctctagaggcctaaacgcaccataaaatcgtcatagacacaattaatcacacctcgagaatcttgagatatgggagaatattttgaaatgtcataatgcattgactcatgaatataagagaggatacacatagtaaatgatgataaatagtcatctctttgacctaagaagacaagtngagcaatacaatttgcttgagtactctg

SEQ ID NO: 23448 - DNA, 418 bp, Glycine max
  unsure at all n locations
ataaaataggggatggaatagcaatgtccgaaatgtcaaaactatatcaactaattagaaccagatctgtgtatgttacttttgggctgtaaagactaattaaggatacagggatgttgcttcctgcacttcccaagttgcttcctgtactccttcaggaatatttttttgaccttctgggttggtcattccataagacaaaaagagaatgcattcaagaaagtaattatacatttcggattgatcgttctgaaaagtgaaaagggagtgcaggaaacaactaggaaatgcaggaagcaaagtcctaattaatggagcactagaagaagaagttcggcctaagaaaaaaaatggtgtatggacccgtaaccatgtgctcantttggttctacaacctctgatcctttcttttacattt

SEQ ID NO: 23449 - DNA, 386 bp, Glycine max
  unsure at all n locations
agcttatgtcactacaaccaaatcttgccttcaagttcaccaaagctaacaccctcgataatcgtgtgaaggttgtgcatcccatatacaatggcttcttagaatcaatttctaatttttcataataaggtgcatgtgcttgtctaaaaccctcttgcccaagatcgcgtagtatgtcttctgtacggtctcgcacttggacatgaactgcctcagtcggagggactgttgttgtctgtggtaactcaccatgccatatccattntgtataagtaggactgatactgtcacatataagatgtgctctaatgtcattcaatgactgtagtctcatgttcagacatttaacacatggacacagatactctccacccatttctcctgca

SEQ ID NO: 23450 - DNA, 418 bp, Glycine max
  unsure at all n locations
tgagacttcaaagaaggacaacaagnntgttttaattattgctgaggctntttcttggtatgttaaaatctaaatgggtaggacctttcataataaaaagggtgaagccttatggagaaatggagattgaagatccttccaatcaaagaagttggatagtaaatggtcaaaggctgaaaccatatcttggtggagaatttgcttggggaatccttgatcttccttaactgtcaacctagtgatgttaaataagtgcttatgggaggcaacctaatcttctctcttttctcctttatttttttgttagttaattgcttggtggaagaaggtaagtataagacttgtgataactgtagcaggggttaaaaattgctatggcgaattagttgcaggtcttttgcaataccattcattgcag

SEQ ID NO: 23451 - DNA, 387 bp, Glycine max
  unsure at all n locations
agcttctatataagctgaaccattttatcaataaacacaagttgagttttattcagaaaattagagtttatctcttttatcttagtgagagtgattctcctaaattcttgagtgattcaagaacaccctggctgtatcaaaggacattcacaacctttgtgtgttgccctcgctggaaagagtgattctttccttcctttcatcttcacccttgttctttcaaaccacaattccagaaaattcacctctgcccagaattatctcgtggccacaactcccattttacgcactcaaattaagtgattcttgagcctaaattgactttcaaaaggagagctntcacctcgttttggaatcacctgatttggagccctgtagcttcagtta

SEQ ID NO: 23452 - DNA, 550 bp, Glycine max
  unsure at all n locations
agagagatcaaatttgatacgctagtagataccttacgatatacaatactcattgctttacatgcagatntntagtaattgaaccccactaacctagatattataaataactttaattgccattaacncttagggtaattataaaaganaaacttatatgngctcgtagtgtacactctgaaatntggtggcanactcataaatgtcaaccccctcaacaatgccaacaaangtcaggcccaccaattttggctcttcccaataagggcttgatgcactagtgtttgccaaattggcgccctttatttacaaccttgaaactaaaacctcaactaaaagccctttttagttagattaaacccaaaacaaatatttttggtcaagccaactttacaagtgatttgtgccattatttagacaaaactaaacactctaaaattgagacaaagtggtgtcattaagtcctctcatttgggccatgatacaactcacaaccttggacttttctccttgaaacttggcttgtattcaaatattatggacagcactt

SEQ ID NO: 23453 - DNA, 366 bp, Glycine max
agtttctatttgttcctgtagaaaactgatctgatatgtgaatccaatagaagctcacggctgctctgctccgcgactccaatatagcatgctattgactactatgcacatatacttaaccaaaacaagattgtaaatatcatcccctcacgatgcttacgagaaacttggtgtgtatttcataaagactcaaactttataacaacatcacaaacccggcagacaggttgatcaaattcattatacctgtatgtataggcacataaaggcagaaacagtcgaaataataacagatacaacattatgccaataagaagggaataattttacgttaaacacacatcattcatctagataacagataat

SEQ ID NO: 23454 - DNA, 410 bp, Glycine max
agatccataacttcaagcactgacgttgtgcaaggtttgtggaatgcgccctggcaacttgcggcgagacaagttgagaatctgaatcgaacttgcattgcaaattgaggaagagaagccaccagtgatcgagttaaaactaagatcaaggtaagcgagttgttggttccaggagaattggtccaatgattgcgtcaataggttatgagagaggtccaattcagataaccatgagctcgcttcatgcaaccaattgggcactctacctttaagtttgttgttggacaaatggagtgatttcaaaaatgggatttttcctgataattttggaaattcagttaaatccatagaagataagtccaatctccataataggcgggagagattatactcgacattggatttgaatt

SEQ ID NO: 23455 - DNA, 321 bp, Glycine max
gacccccaaggagcctcgtacagaaagcctcggcgaggggattcatgagacaactaaaacataccactggattgccatggcaattatgtggtgcgtctctgcatgtcctaatgcgcttgctgtctagggataaatgcaagcccctatgactatatactggaccagggcattgggagctgacccgctgcgaaacttgttggccaccctcagactcgccctgcttatagtataacacaccacatatgatgacgagccatatagctcgagacgagcccaaacgatgacatatatgccctgcgggcacactagagactgagcatg

SEQ ID NO: 23456 - DNA, 357 bp, Glycine max
caacccaccatcttgtcgtaatagaacacctgtcatgcgtccattatcattgttatcatctccctttccatcattgggggcgctacttgaactgccagatcccttcacctgtgggcgtattctatgctcatgtctctaaacaaatgaatgtctcaccaaccaaactaacataaaatggaaaattccgaatctcttttttactctaaaaattataatggacgtctactgcattaagtacaagggaaaaatcacattggattccagagaaagccttaacaggaacacaattctaacttatgagattcaatacacataacgggcaaaagctctacaactataatacattaacatctcata

SEQ ID NO: 23457 - DNA, 328 bp, Glycine max
  unsure at all n locations
gaaacacnngggctgccagatccctccacctttgggcgtattctttgaaagacctgtgcccacattctgcacatgttctgatattgcatcctatccgaagccattatactgacactgcctaacgaaggcaaccattaggtccttccaagaatggactcgggaaggttccaagttagtgtaccacgtaatagctaccacagtaagactctcttggaaggaatgtatcagcaattcctcatcttttgcgtatgcccccatcttccgataatacatctttagatggttcttgggcaagtagtccccttgtacttgtcaaagtccagcacct

SEQ ID NO: 23458 - DNA, 377 bp, Glycine max
ttcccatgcgacatatggacataaaatacgacttagcatttggacaagggagccgctgctctcatcctctacaaagctatcctcacccttttcattttggaaaacgagaagaagataacgcgatctggaacatcccatttccctcatagattaagtcaaaaaaagccgatacagggacataaacaagccttacgataagggctccgcaattaaataaacaaagacaactaagtgtattaaaataatagactgataaaaaaaatacagacgatatttcatctattcatctgatagagaataaaccagagctcgcttcataaaaaataaaaaccaaccaataatatgcgcgagcaccctaagataaaaacacgaaagcg

SEQ ID NO: 23459 - DNA, 433 bp, Glycine max
  unsure at all n locations
acactatgaaactaagcttgtaaagcccctttaatgcatcttttcngcattttttgaggtgttccccacatttgttgctcaatggtttacaattccgtgcacgtctatcaaaacttgttttgtagcacttgcatataaatattgaagagcaatgttatatcttttcactattcttctcaatgttttatgaaaatgatgttaaatgacatagtaaataatgtcatgttttgacatttttaaaagctttcaatactttttgttatcgtctaataagtaaaaaagatttagaattatttttaaaaaaatctctgtccaatgataaagagtataaaggtaaataaaataagcatgtaattgctaataaaaagttaataataaagaaatgcgantaaaataagtttatacacaatanaatttaaaattattataattt

SEQ ID NO: 23460 - DNA, 379 bp, Glycine max
agcttctagattttcgatatgaaaacatgtagtttcatgttctcttcaattaacgcataatacattttactactttctagtgttgcataccaagattactcaaatatcaccttaggactcccacaaaaatttagtttaggacaataaaaaaataaacttaagcatacatgataaattgtaatataactattttgcaacaataagtcgtatgatgatagtaggatgtcatcgacatataatacaaaaataataaatttactctcattgaacttttagtacacacaatcatcaaccaaatttatctcaacaccataagagataatctagatgaatttttaataccatagacgagagacttgtttaaagcataaatgaattt

SEQ ID NO: 23461 - DNA, 424 bp, Glycine max
gctcgcatcatgttgctggacaatcatgtatgtcaagtctatgtaacccttttgtttttgttttggctatgctggtttgcagtaagaaggcgatcaaacgagtccggtgccggctcaggctactcaagaacaagaggcaggcaatagcaaggcaactgagaaatgacttggttgagctaatacaaagtggccatgaagaaactgcatttaaccaggtttgttagttaatgctacatactcatttgttaaccactgtttgcataagtatattccttcatgctctgtttttgcttcttttctacttttcctttccattaagtatgagtatagggagatggctttacataaacaaagttgccgccactacatactgcccccattttatcgcatagactgcccactaaaccttttctatttctatacg

SEQ ID NO: 23462 - DNA, 373 bp, Glycine max
agcttaatttgttaggctcgtatcagtttaatcaattatggtagtactttaattgataacactgttgtttgagataatgactgattttttcacgagtatctattttaatcaattaccacatgtattaattaattacttctctattatttaagttgttctcaggtgaacatgaagactttaatcgattaattaggtcatctaatcgattcaagagttaagtctcgtatcagtttaatcgattatggaagtaatttaattgattactgatgtcccaataattattcctatttcttaaccctttttgcaccattttaagtactgattagtcttaactgtcaaattaattaggcagttttattatttgggcccattc

SEQ ID NO: 23463 - DNA, 415 bp, Glycine max
  unsure at all n locations
taagattctagagatcaactttatcctatatcttgattttcttggattcttgtattcttgtcttgaataaaacttagaagcacttgatcctttggcatcgtccaaacatcaaaacatcttgcttctacataggagtcattcgacttaatccatcaactaaaaatccttcaactatttctcgtccttgggaaattctttttgcaagaatcaactacttctttcattcttcctcactacgaggttgtgaaaacaagacaatgatggttacctcatagccctacactggggtaatgaaaggcaccatgcatgaacctcaagcgaacctaggggcagattagaagttctcacccaatacgttccctactacaaggtcatgacgaagaacaacgattggtacctcanagccttacactgg

SEQ ID NO: 23464 - DNA, 467 bp, Glycine max
  unsure at all n locations
cggtgcantttgatttgtgattgattgcctcgaatactctnacggcatttggagctcggcactccgtgatcctgtagacacgcactgttgtatgcaactttgatggcggaactaagaactggaatgtatgacttattcaataaggaggcaatgtgaatgcttgtatacatgagatgaaggacgtcagctatgaattaacgttgcatgcctcagaggacttcaattgcttcctaaatatgctcggatagcttccacgaccaaagccgtgtctgccgattccctaactaccgccacttggcttaaaccatagtgcttacatcacgtgccgcgctctggaaagagcttaccaggaagtgggatgtgtcaccacagtagcaggttgagaacatatgtgcaaaacgttcgaatcagagtcttcccatgaagtaactaccatatgcctggtgtcggaacagatgtggatcctg

SEQ ID NO: 23465 - DNA, 500 bp, Glycine max
  unsure at all n locations
cggagatgtgcaanttganncctttgttgannacgtgaganaataanantttgatnacgttcgnatannncngngacactataganaactcaagctttttatgatgattcatgttgattcaagtagtgtggttgagaacaaagangangacaaaaaggccaagagaacggacncaagaaggaggcaacccgccgaaagagccaagagaagcccgacnncgagacgcaagagaagaagaacccaagaaccaagagaagaaagcaagaagaccccacacgggaagcagagaaaagacnggccacaaaacaaacagagcacaagggggggacccaaaagagcccnncncaaaacangcgaagccaccaaagggaccactctctggtaatcaattaccagcttcctataattgattactagtggcaaagtttgatttcaaaagctttcaactgaatttacaacgttccaagtgatttcaaaatggtgtaatcgattacaagatt

SEQ ID NO: 23466 - DNA, 385 bp, Glycine max
ttgcatgcaagcttgaagaggatgctttaatggaggaaaagaaagagagaaggggggagcacgaaattgaaggaataaaagagggagagaagtggaactttgaagtgtgtctcataagactctcattcatcaaagttacaacaagtgttacacatgcttctatttatagactaggtagcttccttgagaagctttcttgagaaaacttccttgagaagcttctttgagaaaacttccttgagaagctagagcttatctacacacacccctctcataactaagctcacctccttgagaagcttccttaggaagattcctaaagaagctagagcttagctacacatacctctctaatagctaagctcacctccttgagatgagaagc

SEQ ID NO: 23467 - DNA, 388 bp, Glycine max
  unsure at all n locations
agcttaaaggagaagttggttttctgaactctaaactggaaaacatgacaaaatcaataaagatgctgaataaaggctcagatacgcttgatgaggtgctacagcttggaaagaatgttggaaaccagagaggacttggatttaatcctaagtctgctggcagaacaaccatgacagaatttgttcctgccaaaaacagcactggagccacgatgtcacaacatcggtctcgacatcatggaacgcagcagaaaaggagcaaaagaaagaagtggaggtgtcactactgtggcaagtatggtcacataaagcccttttgctatcatttacatggccatccacatcatggaactcanagtagcagcagtggaaggaagatgatgtgggt

SEQ ID NO: 23468 - DNA, 445 bp, Glycine max
  unsure at all n locations
actatacaatacttaagtgcttatgaaacgtattgtgcggcggcatagttagattctatgaaagagtctacccctttcttttctttcttgtagatcgtgatggtggcgcagctaatccatgatcgagtggagatggagtgcctagagggagcttgggagaccctcgaaggcaacacgaggtgccgatttcggggcaccattcgattcacggctacttctttggtgcatccagatgaacctgcacggacgcttcagcgcacggtggagtggatactacccacgcctacaccatatcgtctagtggagcccgtccaagtgatcgaggtaacgtcatccgaggaagaccctgatgaggatctgggggagctacctcccgagcctgctgtggaagcccttgactntctagagggtgatgaggatccacttcctgaggtggattctcccg

SEQ ID NO: 23469 - DNA, 392 bp, Glycine max
agcttaaagtatgcccgagtcattcatccctatgagatgttgttgaagtattggcgatcagaattgccattccttggattatagggttgaaccaagctcacgcttttacaaaaaggttcatcaagtcaagttgaaatatggaagtaaccgtcttgcaaaattggggcaaaagatgaatcgagtcacatcactgcttcgtctactgccaaacatatttaggattattgatgtccttgttacttccagtttcaccttgacaaagatgtcatggaccatgttgaaaatctaaattgattcaaccccatatcttgcgtaaaaattcgcaatacttcaactgtacatcattcgcatgcatccatgcttttcattggttgcattgctcgttgcattct

SEQ ID NO: 23470 - DNA, 419 bp, Glycine max
  unsure at all n locations
tgtacgaatgtaaganacatcttctttgaccttggtgttccttgactccatctcattgaatcgaatgtccactagtaactccaaagtatcaaacctttcaccaacaaaggtttgaagaccatcgaacctgtccaaaatcttttgaagaagagaggaatcttctccaccatgtaaatgtccttcttcatcaatgggttgagcaccctttttcacccaaaagccatcatgctctttacggtaaccaaaggatgcaacacaacagcgcctattagaaaggatctcttgattggaacataaggttcagaatcaagaggaatgttgaagtgttgaaggaagagagtgactaggtgtggatatggcaatggagcatttaatcacaatgccttatgcatgcgatatcggactaagtgtgcccaatc

SEQ ID NO: 23471 - DNA, 386 bp, Glycine max
agcttgtactagtcatatatatgttacaaaacaacgaaagcaaaaaattgaatcgattattgcagatacagaaatacttaaacaaacctggcaattaggggttttgcggctttttgcaaattccgcccatgtttctggatcaaggccatacttgactgtaggatcagatatttgctgaccttcattgtcagcaaagacaaattttgaagtcaatgaagacttaaattgcctccatcttgctgcaactgttgacatcacctttttttttgcattttcaccttcagggatatcaaatttgggctgcacaacaaaaggagttatgtaacagtatgtaaatgaatcctttataagtaacttaacaacaaaatcatgaatacaagtgtatt

SEQ ID NO: 23472 - DNA, 443 bp, Glycine max
  unsure at all n locations
ctatacaatactctagctntactatgcanagaataaccaaggaaaattccttcatttgacttagctttaaattttcctaagttttctttttcattgtttaatacaaaacacttgcaaccaaaaacatgaagatgcgagatgtttggtttcctaccattgaacacttcatatgaagttttctttaagatgggtcttattaaagccctattcatgatataacatgcagtattaacggcttcagcccgaaaatattttggaagaggagtatcattcaataaggttctagcaatttcttccaaagacctatttgtcctttcaataactccattttgttgaggggttcttggtgcataaaagatatgttcaatgccatgcttatcacaaaataaatcaaattctttattttcaaactcacccccatgatcactcctaatagatataat

SEQ ID NO: 23473 - DNA, 384 bp, Glycine max
agcttattgtttgaaattagtttgtaggaaatagttgtgattcaaactattataataaatcccgttgaagaatattttgttttaatttgtattagtttattttagaatattatgctgatggtattaaatgaatcaattttactactttgagacatttgataatattgtgttaattgtattggatatttggatgaatcataatataaaatagtagttctaagaagaaaaaaaagaccaaatttaaatggataacccattggctcgaaccaaaccaaaacgttcatgaataggttgggttggattgggtttaaataaaattgtgaaaaccaaactgaaccaaaccgatcaaatttgattacgttggatcctgaatttggccaaact

SEQ ID NO: 23474 - DNA, 419 bp, Glycine max
  unsure at all n locations
ctcatgctgagctgaagtttgagtgtgctgaaatnggctttgaatagcaatagacacattcccatgctttcatttactggaagttcaaaggtacttcatctctctcttattttgattaaacattgtaatctttatttttatgtgtttacaacgtacattacattttcatgatagtatttttatgttacgacctctactagttagctaacaagtgtagttttttataattttttgtaattcatttttttgttggttccattggattttattctaaatacctattcttattttataacatatatggtagtagctgtaacataaaaattggtattgaatcttaggttatgcttcttcccccaccaattattctttttagttagaataattattatagattttcttcttaatttatattataa

SEQ ID NO: 23475 - DNA, 385 bp, Glycine max
agctttaaattgtagttaagactgcagacaacttctgttcatgtttgaagtttgatagaaacacagatgttagctatagtaatatgaggaaggctgcttcatgagaagatttgactgacaactatttattctatccaaaagctgtagatcttcagtacaaggatttaaggcattttcagtggcattgggaaaagggggagcctgtaattgtcagcaatgtgcttgaatgtacatctggtttaagctgggaatcgcttgacatgtggcgtgcattacgtcatgtaactaataccaagcatggccaacatttggcggagaaaacaattgattgcttagattggactgaggcttgcttaatttcccaatctttaactctattgaccat

SEQ ID NO: 23476 - DNA, 427 bp, Glycine max
caatgaggcgacaatgaaaatacctagaggtactacctgatattttgtatgagctgctcgttatattgtcgattccaactgcatcgatgcatctttaacaagcataccacgaaccagagcagcaaccaagttgaccttctttggactctaaaataccatagaaaacaaggtatgtaaaatgtgcaactagtcagatattagtcagatccttcttaaaccataaattaagacattttccacagcaagccagggaaggcatttcaatggctaagaaattagatgccaacttttctgcaaaataacatgttggttaaaacacagaagtttcttagcaagtagctaggcagtggcaccacatagatgtaacagaacattggaattattcaatattcatgttatagctaagctgaacatacttgtgatgata

SEQ ID NO: 23477 - DNA, 340 bp, Glycine max
cgcattctagcttcccgtatccatacttggaaggatctgattaccgccttcctaaggcagtatcagtacaattctgatatggctcctgaccgtactcaactgcagaatatgttcaagaaagatggtgaaacctttaaagaatatgcgcagcgatggagggatttggcggcacaagtagctcctcccatggttgatagagagatgatcaccatgatggtagacactctgccagtgttctactatgagaagctagtgggttacatgcacgccagctctgcggatctggtgtatgctgaggaaagaatcgatgttggattaaaaagaggaaagtttgattacg

SEQ ID NO: 23478 - DNA, 436 bp, Glycine max
gacctatgatactcaagctgggtccctttctttgtgacattttctttcactattttaatcactctataccctacattcatagggttagaagataccacaaataccaactcaatgatcagcaatgccttctttatgtcatcaaatactaaaggatggaatggaacacgctgagcactacatcactctcaattgaatcaatgttttccaaggttatgacaatcaactaacctacacttatttctcacgacgttggatacaactttacagtctttacactgccctccataaagagacgagacacattcattcagcaagatttatataattcagtctgataaacatagaagacaatttttattctctgaaatttacagaacataaaatacaacaaacaaaaatgccgatgatgattctcttacatgttgatgatatatct

SEQ ID NO: 23479 - DNA, 486 bp, Glycine max
  unsure at all n locations
agccgtgtggggnnttttgaagtcgatggcccgatgcnacactctanggcgacatggaactcggagctccgtgatactctatactcagcttgcgccttctgcttgacagaggattcgtacatgtggatgttgctgctgtattggcgagaccacttaccgttccctggataattaggttggagcctacgaaacctttgacacataaggtgatgagctatagtccaaatacgaacttgaccaatttgcacccttcccgcacataatgagtcgatgagcatctgtgatgtacctactgacgcgaacatctgggagtattgatgtccttggtacttacaccaccaccctgagaggcatgtggtggactatgcagaagaaataaattgagacataccgatatggtgcgtatggaaatccgaatactataggtgtgcaatctatcacatgcgttcatgcatgatgacgtgatggctagcacggtctatggtn

SEQ ID NO: 23480 - DNA, 174 bp, Glycine max
cttcaccaacccttgtttgcagaccatcgaacctgtccgaaatcatttgaagaagagaggaatccatatccaccatgtgaatgaccttcgtcatgaatgggttgagcaccctttttcacccttgagccatcatgctctttgcggctcccaaaagatgctaccctacagagccta

SEQ ID NO: 23481 - DNA, 383 bp, Glycine max
ttaagcttgctggttggttctcaacattgtgaggaatcacgtaacatagtaccctttctttctcacctatcttttatctgtaagtactttgctactccttttaattgttaacaattcttaacttaaatagaaaatataaaacacttggatcaataatggtgtgtaatagctaggctagtctaccgaattgcagcaagtaatatagaggtaagaatcaacagtgtggacaaatcgcaactaaactagaaactttcatttgcagttagaaaattcgcacaaaatacggggaagttcagaaaacagggaataattcactatttaatggtggtagtgtcctatttattctaatcttcccttatgcatacaattgcattctcaatgca

SEQ ID NO: 23482 - DNA, 420 bp, Glycine max
  unsure at all n locations
tttctactttgcagggcaggacactatgntcagnanngtcgtgctcggacaaagatattattgagtaggtaccctgattggcaagcacgcgcaagggaggaagtctcacaagttgttggcaaccaaaaaccgacttttgatggactgaatcaattaaagaatgtaagtttgtattataaacttgttattgaatagcatgttcatggtatttactatgaatatttttgcaacaggttactatgattttgtatgaggttcttagattataccctccaggagttggtgttcctcgaaaagttatcaaagatgtgaaacttggaaacctatcatttcctgatggagtggagattttcatatcaacaattctggttcaccatgatagtgagctctggggtgatgatgctaaggagttcaaacctg

SEQ ID NO: 23483 - DNA, 383 bp, Glycine max
agcttgaagaggatgctttaatggagaaaaagaaagagagaaggggggagcacgaaattgaaggaataaaagagggaaagaagtggaactttgaagtgtatctcataagactttcattcatcaaagttacaacaagtgttacacatgcttctatttatagactaggtagcttccttgagaagctttcttgagaaaacttccttgagaagcttctttgagaaaactcccttgagaagctagagcttagctacatacacccctctcataactaagctcacctccttgagaagcttccttaagaagattcctaaagaatctagagcttagctacacatacctctctaatagctaagctcacctccttgagatgagaagctaaagct

SEQ ID NO: 23484 - DNA, 413 bp, Glycine max
gctgaacattgactgaatctagttctttagtttttagtcaaaatatctgctggttgatcattggaactaatgaactcaatgacaatctccttggacaatagtttctcccgaatgaaatgacaatcaatctctatgtgtttagttctctcatgaaaaacaagatttgaagcaatgtgaagagcagcctgattatcacaatataacttcatttgtccaatttcacaaaatctcaactcttggagaagttgcttaacccacataagctcacatgtaaccatagccatagatcgatattcagcttctgcactggatcgagcaacaaccgtttgcttcttgctttttcaagaaataatattccctctaatgaagacataataatttgatgtggctctcctatccatgggacagtcagt

SEQ ID NO: 23485 - DNA, 375 bp, Glycine max
agcttcaacattcaattttgagcgtctcgatatatgacgagactcaatcagacatccgagtaaaaagttattttcgttttaattggctcagaggttcaacattcaatttcgagcgtctcgctatattacgggactcaatctaacatccgagtaaaaagttattgtcgtttgaattggctcagggcttcaacattcaattttgagcgtctcgatatatgacgagactcaatcagacatccgcgtaaaaagttattgtcgtttgaattggctcagaggttaaacattcaatttcgagcgtctcgatatgttacgggactcaatcagacgtccgagtaaaaagctattgtcgtttgaatttgctcagagattcaacat

SEQ ID NO: 23486 - DNA, 398 bp, Glycine max
  unsure at all n locations
ttgagccaattcaaacgacaataactttttactcggttatctgattgagtcccgtaatataacgagaccctcgaaattgaatgttgaagctcttagcaaattcaaacgtcaataagtatttactcggatgtctgattgtgtcccgtcatatatcgagacactcgaaattgaatgttgaagctctgagccaattcaaacgacaataaatttttacccagatgtctgattgagtcccgtaatatatcgagactctcgaaattgaatgttgaacctctgagccaattcaaacgacaataactntttactcggatgtctgattgagtcccataacatatcgagacgctcgaaattgaatgttgaatctctgagccaattctaacgacaataactttttactc

SEQ ID NO: 23487 - DNA, 483 bp, Glycine max
  unsure at all n locations
gcacgcgacatttgaaccttttgagtccctngaananncaanantttgaatcgctcgctattccgngacctataaataccagctngtatcatgngctgtttngaagacgntncagaccatcactttggtcatgccaactcttccatggaacacgtaaccttttaatgcacgttttttgcttcaattttgatcttaattatttaagggtactgctaatttacttcctgaatagcattcgaagcattgggctaaaagaatccaacgagagtggaagtcattggagaatgatttaccaggtgagaatcagttcgattagtatacatgttataacttggctaagatattctccttatccggctcactctttgattttgattaaagtgactttctttttcaagccatagatctggactgaattgacggttccacgatctttataatttgcttaagggataccaccaaaaaactatctattgcccgatn

SEQ ID NO: 23488 - DNA, 114 bp, Glycine max
gtacttcataagtatatttgattggaagctttcctattatcattattagatatgcctatactcctgacacctctcctttatatcgatagcctatgaacattatgcctgttctat

SEQ ID NO: 23489 - DNA, 328 bp, Glycine max
ttggatgatggcttcttttacattaaggaggatcacttatagggctagcaatgaaccgaaccaactcgaacattgatcgaaactcaattcaacaattaagtcattgaacttggttcatgaaccaaaagaagtgagcttgagttaaacgttgaacttgttaaataaatgagttaaactttagctacttataactcgattcaattggttataaaccaactcgatatatatacacacacacattaaataatatatgttatattatagcatcgatataattattctaattaattctattgtacacaatacatgaataaatacagtaaagttt

SEQ ID NO: 23490 - DNA, 389 bp, Glycine max
agcttgaggattgtgtaccttccagattggatggttatcgttttcaatgacttagtctctacgcatttcgtccttgggggttgtgtaccctttgggttggatcattcccaatccatagcttagcccttccgattcgtgccttgagtcgaaccttgcctcatcatatctatgtctaatctaattatctctagaggcctaaacgcaccataaaatcgtcatagacacaattaatcacacctcgagaatcttgagatatgggagaatattttgaaatgtcataatgcattgactaatgaatataagagaggatacacatagtaaatgatgataaatagtcatctctttgacctaagaagacaagttgagcaatacaatttgcttgagtactc

SEQ ID NO: 23491 - DNA, 334 bp, Glycine max
agggtgaacttaaataaaataggggatggaatagcaatgcccgaaatgtcaaaactatatcaactaatgagaaccagatctgtgtatgttacttttgggctgtaaagactaattaaggatacagggatgttgcttcctgcacttaccaagttgcttcctgtactccttcacgaatattattttgaccttctgggttggtcattccataagacaaaaagagaatgcattcaagaaagtaattgtacatttcggattgatcgttctgaaaagtgaaaagggagtgcatgaaacaactaggaaatgcaggaagcaaagtcctaattaatggagcact

SEQ ID NO: 23492 - DNA, 372 bp, Glycine max
  unsure at all n locations
agcttgtaactccttgaaaaattatagctcaaattgacagaggaaactatgttgtgtcatttgtgcatttatgaatttaatttcagtagttatatgtttttaatcatagaattttgtgctatatatatgtatgtgattgatttagtaaagtttgacatagaaatagaaactgtttgagctagattttccttgagttttttatgccaaaagtgagttctttgcatgttataacatagacataaccttaaaattttcccaaatcagagttctctagcaaaagttacaaataaaataagtntaaggacctttactaaaatgaaaagtctgtcacgaatttggactaagagttacaaaagtatgggttgtttttat

SEQ ID NO: 23493 - DNA, 432 bp, Glycine max
  unsure at all n locations
tgtcttgtgcagaattagggtacacacattntttgtgtattctagagtcttgagaccacaatgctaatttcaagatagaagctctggaggcagcaagaggagcagctttgcagagaagcctagggttcttcaatttgagagagattagtgagctagagagtgattgtgaggtactgagaagaggaggagggatcccccttcttgtgtaaggaacaattattctatactctcaatctcatttgtgttagggtttttctgtaatggctggctaaacacccttgtaatggctcgccatatcccttgccttgccttccaagtatttccgtggcaggcccactattccattccgaatttgcttcatgcgacccaactcttttgctgaatccncaatcacagctgcaatcttgctcaaggaaggaagaaagccggaga

SEQ ID NO: 23494 - DNA, 385 bp, Glycine max
agcttgagataggatttggtgtaacaatctagaatctagatcggagtatctttggaagacaatttggttacgctatttccaaaggtggttgacaatgattccaaagaaggaactccaggtatccactgcggcttccatgttgttattccccaagttaaaatctagccaaccatgaagaccaaggctgaagaatttggcctagtgattttgatcaattaatttggagcaaaactccctaacctctttgcaatctctgagggaatgcatggtgtcttctacgtagtttccatatctgggacagatatcaaaatttgacatcttcctgtgcttcctcatggcattaggaagaagcctgtcatgggtgagtttccaaaggagaactcag

SEQ ID NO: 23495 - DNA, 416 bp, Glycine max
  unsure at all n locations
atatgttataaacttattcacataaaaatctaatatctaatctaatttatttatttaattaaaataacatttatttctataattaatattttcaataatttaatattaatccaaaaattcccaacatattcttccctaaattatcctttttgaatgtatggctgatggtgttataatgacatatgtatcaacagatccctctcgtcaacatatagtttattattattattattgggaaaaaaatgaataaatgagggtcaactatagcgcaaggtcaacatatagtagtaaaatacaatagtatgtactttttaaaatttatatatgaaaataactatttagaaatttataatttttaaattattatttatttatcttgtgtacatgtaaattntacttanatttaatttatttgg

SEQ ID NO: 23496 - DNA, 391 bp, Glycine max
agcttttatcttttgatatagcttcccacttgattgaaaatagcaaaaatccttccatgtgttgttgctgaagtcgaaaatcatgaacgtggttgaacttcttgagacgtggtagtcactgacctaaaaggtttatctgcggtatcccacacaaatctcccaggatacaataagaacgtcttagcagagttaaatttatagaacttgcaaatatacacaacctaggaataaagaggaacagagattaatagaagtaaaaaggaggaacaaccaatatcatttgaaaatttttttctcacacccataccgtagtagtaaaagtaataataataaaaaaaatgatcaaaccaagttgctcaagtatgcacccgtaataaagcacctcgtattt

SEQ ID NO: 23497 - DNA, 426 bp, Glycine max
  unsure at all n locations
tgagcaaaatggcttgtcagaattagccagtggaatgtctngtaactctgctggacgccattccaaacacagtggttttgttcactgtctaaataatagaacagatgttgcaggtttgctaggtttttctgtctagctacttactctttgtttacatatctatatcattaacagatatctaacagtcaatacaaataaaaatcattttaattattatccaactgttgtgttgtgtttattttctgtcagataaatctgatgtggcaaatttattttaaacattttcattatggttgaaaatcagtttgatacagaaaaaagtattctatgtattgacaacaaaaccaaatattttaatagtttcctaggggattnttttaactaaaatagaaattcagcaacaatccatattaatggaaagttgca

SEQ ID NO: 23498 - DNA, 376 bp, Glycine max
  unsure at all n locations
agcttatattgtttaagatacaacgattttaccattaatcaagtttttttaatttcaattgatacaaaaatttaagttaactatacttctgatccttttagtttggattatgtacaaattttggtgctaaagtttttgtcattctagatcctttacttttaaaactaagtgaactcattctctactcaatttccttctatgttttttatccaaatatttaatggtttatggtgaactcgcaatatgaaataattttaagactgtcgtattttctcaaaaaaaataataatgaaatttgatagattnttgtaagacttcatattangatatcaaaatagtttaagtcggttggttgaattgaataaaaataaaaatg

SEQ ID NO: 23499 - DNA, 394 bp, Glycine max
acttatctttcccacaatgcctctcccaagcttaagatgtagtctaactagtctcatccactttattttgtgttcgagatcaagaaaacgaccgattgaaacaacattacaaattaaaacagatccatctccatgtgcaactatgagctttatataaaccaatgcaataccgtctggcatccatatatcagccccaaattataagaatcacattaactaaactataacatcaattaattgtaaagcaactaaaatttatgttctatgtctaccaacgaaataatattttttattaatatttataaagtaaaaaagatcttatatattgataaaaaaaagttattacatatattaacaaaaaaacatatttaaagtaaaaaaattcttttaaaat

SEQ ID NO: 23500 - DNA, 385 bp, Glycine max
  unsure at all n locations
agcttttcgttcggcatanctatatcagccaaatctatttcaggtgtattgtttggagcacagaagctatattagacatttgcgtacaagagctgacaagcaagatgtcacagtagatatatgtccactttgggccagaggagttcgcctagttcctgatcaagatccaaacataacttgggagaatcatgtcaacaccgagtgcgacccatcgaattacgagaaagtcacacagaagaaaaaatgccctgtccctgaatgcagagagatattagtattctcagacacaattaagtgcaaggactgcacagtagagcattgtttaaagcatcggtttggacctgatcataaatgtcctggtcccatacatgtggaatcaagtttt

SEQ ID NO: 23501 - DNA, 430 bp, Glycine max
  unsure at all n locations
acctataaatctcagcttctcaagagggagctaattatattatgggngttagctaagctctagcctctcaaggaagctttctcaaagaagtttctcaaggaagttatctcaataaagcttctcaaggaagctacctattctgtaaatagaagcatgtgtaacacttgttgtaacttttatgaatgagagtcttgtgagacacaactcagagttcaacttttctcccttttttttccttcaattttgtgctccccccctctctctttctctccctctttcttttgctccattgaggcatactcgccaagcttcttatccaaggttcatcttggtggcgaagctccttcttccatggcttattccctagtggatggcgcctcctctcacctcttctcctttgtcttccattgcatctgcatggtggaaaatc

SEQ ID NO: 23502 - DNA, 379 bp, Glycine max
tcaagcttcacacaattaacattttctcaaactaagtattagaataccaagtactaagtcctttttaactagacaattgacgtggtgcatgtttacatgtgcatccctacgaagcgatagtcaaaaatcatcaatcttattttccaagcaactaaactcatgaaatgatgcatgttcaatattaagcatgtagatattacctatttttctacctatgtgaacaacctcactagtttttgcttcacaaatgagacaacaattcttgttgaatgcaattttgaagcctttgtcacatagttgacttatgctcaaaagattgtgcttaagttcatcaacatataaaacattttttttatttgagtattgggctaaattccaa

SEQ ID NO: 23503 - DNA, 489 bp, Glycine max
  unsure at all n locations
ggtgcagcaantttgataccttgtgataccnttgaattccgngactcatagcgtactcagcctatgtcggctgacgaagacgacggttatgcctngaattatcaaaccgcnatgcacgactctactgataaacataagaatgcggcaagaggagcaacgattcagaggagacaaagacccatcattgttggaagggaagaagtgctagacaatgaatgtgaagtacatggaagaaagctgaaggatccagattattgtgaaaagctcaataatattaatactacaagagtcatagggaaaatggaagagaagaaaaggctagaaacacctctctataatggaaaaaggatatgccttacccttgggtacctttcaagaaagataaggaatgccaccggcgagattcttagatattttcaagacatcggaaataactatgccatttggagaagctgtgccacaaatgccactctgctcaaagtccttaaa

SEQ ID NO: 23504 - DNA, 338 bp, Glycine max
agaggcagagcgttggaattgactccaccagctccctcgcggtcatcatcatcgtgctttgttactccaaaattgactcttacagtactattggatgcaggaattgcctttgcatggcaagactattcacaatgatatctgccaactaagtagtattacttgtactattgcatgtatagtcatgtacaatacaaaccttacactgcccgatgtgcctgcgtgcattcatgactttctaattgatcataacaatacatcgacaagaacaaattgattgattatacaaacaatcatgcccatctgattatacattctacatgataaaaattgcaatacca

SEQ ID NO: 23505 - DNA, 354 bp, Glycine max
gacctataaaactcagctgtaggatatggggacccatacttgtggactatttgtgggcgggcgatggtgcacacaagtttttcacatcaaatgcgcgcataaacccacatcccctgttcccacctccactgagctcacgtactccacgtagcccatacctcgttctctcaacaccgggtccccttcaatctccaagcttccacaacatccaagcaaacaacattcaaatagccaagctatcacagcaacaaacagggcaaggcagaaactctgtcaacacactaccaaatacagcttttctacttaagacccagaacattcttcgtccattcgtaaccgtggatcactcaattt

SEQ ID NO: 23506 - DNA, 414 bp, Glycine max
gagctcggcgcccggcgatcctctaacgtcacctgccgcattcttgctttaacctcattgtccctcacagactgtagatatgggagccactccaatccttgtgtgcggactctcaaccacttatgatagctgccgatgattccattactgcttcccctagactctctggcctttcttcacgccgcatcccatgccttgcgaactccttggagtaccctcgcgttgtggtcactgaaaccccgtgcgatgaatggcgtgatgctttcgtctgatggcactactctcatggggtagccaagctgtcttatggcgaagactggattataattaatacacccccttgccgccatcatgggagcatttggacatccttcgcgtgaagatacaatcatgattcttccttccttctagcga

SEQ ID NO: 23507 - DNA, 420 bp, Glycine max
  unsure at all n locations
agcttgccgcccagctcgcccaggcgagtttgttgcttctttcagaagcaacaaccttctggaggaatcttctggagggcccaagtgggcctggttgctatttgcacccccatttttactaaatacaccccctgccccttttttggtgattctttttccgtaacgttacgaaactttacgaattttgtaacgatacttattttccttccgcaaggttacgaatccttacggattatgtatttactctattttagctttcgaagaagttacggaaacccacggattgcgcaaaaacacctcttttcaacttccgccacattacggaatttcacggatcgtgcaagcctgcttccttttgatttctgagacgtctcgggacttcatttactgtgtaacaaaggacgccaagtatctcanagc

SEQ ID NO: 23508 - DNA, 252 bp, Glycine max
agctttaatatccctttatagttggatcgcgatgttctgcgtgtgggtcgtcgtcaacgttcgcgccgtgggtcatagttgtcgtgctcgttgccgccgttcacgccgtgggtcgtcattgttggttgctgcgtgctgcgggtcacagctagggtccagggtctcgctttgtgttggatattggagggctcgcagctgcgctctgaaagcttggaggggacgtgcttttcattaagttaccgggtaaggttg

SEQ ID NO: 23509 - DNA, 478 bp, Glycine max
  unsure at all n locations
tggacgtgcgaatttgannccnttgttganacgttgtannancgancttgacnacgtagagangcngagacnncgaacagggcacaggcgtgtttgnacggattgttactacgncagagcaactatccatacaagtgtnangaagaataatccgtcgtgtactcagacttcgtaagaaacaagaccatgtttatgtacatagactgccgtggtcttgctaatagtctaatgacaaggagtgtgaaagatgatttcacctggtttagatctcgtcatccaactgatggggcttgattatatgttaaatgagattgtcccctgataatgtggagaacgcgtgattcgaatagatgatagatgaaagagctgcctaacaaatgagtggatagatcgatgacttgttgagacctgctctttagatataagagtcatttatcacttcaacagattgctcgtatgctatacttttagcgatccg

SEQ ID NO: 23510 - DNA, 341 bp, Glycine max
aactttccatacagaactcacttaagtgagcacaataacataaaaatatctccaggggagcacacttgagaaaacaaaaaaggtcatgtttaagcaagcctaatactgctctaaagccttcagggactagctagattaagcttgacgactatggcatgcttaagctagtttagaatcttcaaaattcttcaagatcctttcattgcaatggtggttcttcaaagtccctccacagtgtcctccaaaaattgattcctacatttttttttaaataaaaactaatgaagaccatatgggaaaaacattaaaattaaatttgctaaataaccaacgaattatac

SEQ ID NO: 23511 - DNA, 131 bp, Glycine max
tgttgtcagctcattttctcttgagttcagatcacttagaggtctgattggagaaatgccttcgagctttggtgccctcatgaaccgtcagtcactaccactattaaataatgggttagcatgcaaaattc

SEQ ID NO: 23512 - DNA, 363 bp, Glycine max
ttgcattcaagctttgggcaacggagaacattcttattgcggaagctctaagacttgatctaaatcttaataacaagtactaattatataatgcattagatacaacacacatggtcttgatctcattgtttctatctagctatttgatgctatgaaattggaactgttgcgctacttgatctgatttatatggaaaattacttatactcaccttaatataatcatatttgtctaccaaaaaaagacaagagttaacacacatagcatagtgatacaacgaagttatacgaaagcatgcatgccatttcagtgtgtattaataattgactgcttaccaaaagagaagcgagcatgcatgcctta

SEQ ID NO: 23513 - DNA, 283 bp, Glycine max
tcaccatggtctacatgataaaagccattcgatcttctatagcggacctgtcgaccatcatcagttcttgcactccctccttattaaccatcctacttctgtgataagtatgttatatggatgcgcttcccgcttttctaactatggtgatgttgtcaccataacatgaatatactaatgaatgatcatagcactttaattcaccttaaggcttctttacacaacgtgatcagttccagaactcctatttttataaataagaacaaaaacttttatctatcca

SEQ ID NO: 23514 - DNA, 393 bp, Glycine max
acctatacacaacccaagctgtgacctgcctctatattcacaacaatcccatccttctttcaaataatgagttcctggtggagggtacatggcccaaccccaactccatgaatccattcccttcctaatagcaaggtaaaattagccctacactgtatcaccacaaatagagttggtcgaactatactgcctaacagcaacaatctacttgaatggctcccacagacaagccagcatcacccatcaatattcgaaagcacaatggtgagagcagatagatcagagacatgtttcccgatcttgtggagcatagatcgaggcattaagttaacagcagctcctccatctatgaacacattgtgagatccaaattctcacttttgctctgatgaa

SEQ ID NO: 23515 - DNA, 324 bp, Glycine max
  unsure at all n locations
agcttcataataaatttccncgttctacagctacacaaatcattgcttcttaaaattaaaaaatatattattttatattgaagcagatatcacattatgtaaatcataaagaatttaaacagtcaaaataataattaaaaattgaagatgtctttcatactgttactgttagaaactcttatgtttctgcgcacaacataatgagcacaaggctttttcctatttaataagcatgattaagaccaactctttctgcagtattatgcatacatgaataatatgagttgcaagacataatgagtgccaataacagacctctaagac

SEQ ID NO: 23516 - DNA, 407 bp, Glycine max
  unsure at all n locations
agacatcattgacatcaaagggtntttttatttgagtatgaataagacaatacaatacacatttcaatcttccatggaaggaaattaaagagcctctcaatctctctaaaaaatagaataagtaccataaacagagaaggaaagaaattagatcaggagagaaacaagaacagattttgagcagtctatactagttggaaaaatgagagagagggtgagagagaaagagacaaacacagagacagggcgagagatgagatcgggagagagcctgagagagagagaggtcgttcaagacttaggaaccagcagtggagggagagacatcttgatggggacagatacagtcaggttgagagaggaagtgggagaaggatttccaggcatcctgcatgagataatcatcg

SEQ ID NO: 23517 - DNA, 387 bp, Glycine max
atcttgtagaggctacttcaagaaagtggttctatagaataaaacagttaatatagataaattggccatggtatacaatgacactatcataagtgcgctgctctattccacaatattggttttggttttcatgagtgtccaacagcatcatcattgtattactttgcttttaacagaggccagacagctgcttctgcatttaagttgacatttgagaataaaatcatgtaatgtaattcatgcccctctattcatgtgaatacttaaatacacgcatgctttgtttgcacatcaccgggtagagggttgattaagtagttgttcaaaggctctggatatattaatttggactgtaaaattactaccaatttctagaatattcttaaa

SEQ ID NO: 23518 - DNA, 383 bp, Glycine max
tcgagaattagaaaacccgagaattatttgggcttatcgtgaaggttcgcgcttagcgagtgctgcagctctgattggtctgcaactttcactaagtgggacgtggccggcttagtgaattaaatgcctcaagatgtagtagtggggtcgtgcttagcgagatggtctcgcttagcgcaatgccattccaaagagggaattgggcttagcgggtatgacccgcttagcccaattggcatgggggtccaagcagagaggtatgcacgcttagcgagactatgttgtgcgcttagtgagctggctcgcttagctcaattgcaataaatgcaattccacagtggattttgcgcttatcgtagtgtgcttagttaccgagacccttt

SEQ ID NO: 23519 - DNA, 377 bp, Glycine max
  unsure at all n locations
atcttgcctcaaagaggtccaggaaggacaaggcatcagaaggaactagttccgctccggagtatgatagtcaccgctttaggagcgcggtacaccagcagcgcttcgaagccatcaaggggtggtcgtttctccgggagcgacgcgtccagctcatggacgacgagtatactgatttccaggaggaaatagggcgccggcggtgggcaccactggttactcccatggccaagtttgatccagaaatagtccttgagttttatgccaatgcttggccaacagaggagggcgtgcgtgacatgagatcctgggttatgggtcagtggatcccgttcgatgccgacgctatcggccagctcctgngatatccgttggtg

SEQ ID NO: 23520 - DNA, 415 bp, Glycine max
ttcttggtttcagctgctgaagatgaattcgtggctatttcatgcactcctctaatgactatagcatcatttctggcactaaactgttgggagttggaagccatcttctcaattaaatttttggcttcagcaggggtcatgtctccaagggctccaccactggcagcatctatcatacttttgtccatgttactgagtccttcataaaaatattatagaagaagctgctccgaaatctgatggtgagggcaactggcacatagttttttaaatctctcctagtattcatataggctctctccactgagttgtctaatacctgaaatatcctttttgatggttgtggtcctggaagcacggaaatgttttttctaagagtcctctcttgaggtcatcctaactcgtgatggacctt

SEQ ID NO: 23521 - DNA, 277 bp, Glycine max
atgcaggaattccacctaccggcaacgatttgctaacttacacaatacggttctcataatggtgcgttagaagagctatgtaatcttcctataatatctcgtggtaatttggagtcgactaattcacaactattgtgtcaacatgactgattcgtattgctctgtcttgtctgcatgacaactagttggaacaggatacaattgtgataccataggaaacagcttggtttggctattatccaaatggagccctccatcccgttgtaccaagtcaaca

SEQ ID NO: 23522 - DNA, 176 bp, Glycine max
  unsure at all n locations
actcacgctgtgatctgcctctatatttcacattcccatcctttttccagacaattgtgtttctggtggatggtanatggcacagccccaactccatgaatccatttccttcctaatagcaagttaaaattagccttagactgtatcaccaagaatagagttggtcgaactatacc

SEQ ID NO: 23523 - DNA, 371 bp, Glycine max
agcttgtaatgaagatgaacatgaacttaggatcacttatttctggtcagatttcactcattgctcagtccaactcctcgcggcttggatttccagccctgattactgccttgtgcaaggcccgaggagtcacctcagattctcttaccttcgagtcactcagcccagccattaatttggcttatattaagaagaattgctggaacctggatgacccttcggtaacttttctagggacccaaaaatccatggctagaagatctgaggccctatcttcttcagctactcctgctccccctacccctgctccctttacttttgctctcccttcagcaccagtaactccagttcttccaggtcctttcgctcag

SEQ ID NO: 23524 - DNA, 378 bp, Glycine max
  unsure at all n locations
agcttccattattatggatcctcatgatccattccgactaaagggtgtgaaccaatcagattgagcagtgcttgcttcaactgcacaacctttgtggaagcaaagcttcatgatgaatcaacaatgattcaaacgtgttttgatgataacaatgatgacaacaaaagatgatgacaaaggtgatgaacaaaaagctcaaaagatcaaagaacaactcaagtaaatcaagaacaagtcaagagttcaagaatcaagaagaattcaagactcaagaagaaagtctacaatcaagaatcaagattcaagattcaagatctcaagaatcaagatcaagattcaagactcaagattcaagaatgaagatnagactcattcaag

SEQ ID NO: 23525 - DNA, 409 bp, Glycine max
ttccaaagttttctggtttttccataccttgaaaacttgtgctattcatatatttcatttccttctccctttgccaaaaagaattctccaaggactaaccgcctgaattctttttgtgtctctcttctcccttttccaaaagaacaaaggactaaccgcctgaattcttttgtgtctcccttctcccttgtcaaagaattcaaaacgacacaatctgagaattcttttgattcttcccattcccttatacaaaagtgttcaaaggactaaccgcctgagaattcttttgtatccccattcacaaagtatcaaaggtttaacagcctgagatctttgtcttaacacattggagggtacatcctttgtggtagaggtagagggtacatctacttgggtttgactgagaaca

SEQ ID NO: 23526 - DNA, 127 bp, Glycine max
agtctttatagattgccgatgtaatgagatgtggtttttgcattacccttcttgtatactattattattacgagattgtcagctggagctctatgcttatcaattaattcgtgcacgatgatataat

SEQ ID NO: 23527 - DNA, 293 bp, Glycine max
tgtattagagctagatagatccatttgtttcgcgtttatcgatctgcccaccggcttggctcagagataaacccctccgatgatctgctccatacactcctcccatccgttcgcaaagtcagcctagatccacacattatgggctccattacaggggtcaatcaaccgccccccggatactgtgccggatacttcgtgcaatacggcctgatctatccactggaagatgaggtggccagaggaagcctgcatcataacattaatcttgcttatcaatcatacatcctaccctc

SEQ ID NO: 23528 - DNA, 323 bp, Glycine max
agctttatcttctctgctgaaatgaagctagtcaaatcaagtcaagtcttggttggaatctagtctatagactctcatggttaattaggtatctgtctgggctatatagtgtatctgttctgcctttttggctcattgcattgctcaatcaagtgtagtgttgttcactgttcttctcttcttcagttctccgtggttgtttctgttatgttccagggtaggatggtgctttgtgtctactacttctattatggtggtgtagtgtatttggttcattagaaatgactttggttttggatggctctctatgcatgatggggttc

SEQ ID NO: 23529 - DNA, 397 bp, Glycine max
tctagcggtttgaattgtgagtccaaagaatgttcttgtttagccttggaaaaactggaatcagcaacaggctttgcattgctatgttgagttaatccaaccactgccttcattcatgtgattatcaatgtttactgcactcacttcttgaccttctagtttatgattcttgacatcaagaaaaataaaatgcttgattacaatcaacatccctgtaatttaagtgtgaaataactactatcttcctttcatttccataaattatcatgaaattcatctttctccattccttttaatacatgttaaaatcaaaagataaagattaaactagcctataagatttaaaagataaattcactagaaattacccttacctttcattaagttatcatgtatt

SEQ ID NO: 23530 - DNA, 375 bp, Glycine max
  unsure at all n locations
agtttaccaacccaatcccctaacactagagttgacaagaacgattgacgtgtgtactttgatgccacatcatttacggaccccgaatagttcagttaacttggaagattgagaagtttgatatcaacaactaaaataataattattgttgttactattgacttcatacaaaaaataaagctattgtggtaacctaaacatcactgtgtccaagtataggtgtccgtaacacccaatgcagtgaatataggattgggaatcttgtcatcctacatcgatcccatacaattgtgaattagcatgggatttgacacataatatgttaaggttaaatgtgactcancattcctttagcttaacataagagcttcaaaa

SEQ ID NO: 23531 - DNA, 374 bp, Glycine max
agcttctacttatgtggcagggcgggcttccttcactttcttgtctcaaccgcgagctttgaccaccgctctttcttcccgcgatgcttctctttatatccgcctgagtgggtttatagcctaaaccatacttcccacgatttcctttggcatttatcaagctagttatgccgccgttgtctttgcctaaacccattccgggttcgtaatcgttccccaacataactcgggccatcattactgctgcatcggacaggcaagcttgcccagagaaggagtccacggaggaaatgcttaccacctcaaaagactggaaagcggtttctaatgactcctctgcggcttccacataaggcatagaggatgggcagctc

SEQ ID NO: 23532 - DNA, 326 bp, Glycine max
ggacacttaaaactcagcttctagcgtatgattggtattcaagaatgatctgtttaaccttggaaaactggaatcagaacaagctttgcattgctatgttgagttaatccaaccactgtcttcattcatgtgattatcaatgtttactgcactcacttcttgaccttctaatttatgattctcgacatcaaaaaaaataaaatgcttgatttcaatctacatccctgtaaattaaagtgggaaataacaactaattttctttcatttgcataattaataggaaaattatttttttacattccttttaatacatgtttaaatcaaaa

SEQ ID NO: 23533 - DNA, 396 bp, Glycine max
agcttgctcaagacattttataacatttcaatccactcaattcatacaatttctcattcaaatcaatcacaacacttcatttcatacgaaatcaaaccactgaatcatattcaaccaattcactgttcaaactgttcaatcatgcttttgtacaagctactactacaaacaaaataactaaaatttaaaactgaaatttaaagattgaaatttaaataattgaacataaacatacaataaactaaaatagaataataataaacttttcaaaatgaaagataagaatataaagatcctgtcaatcctcctgtgggtgatcctctgcatgcttcgttcagatctagcgctggagtagctggtggatcctgtgaaatgggctgctcttgctccaatgct

SEQ ID NO: 23534 - DNA, 405 bp, Glycine max
atgaagttttctggttttccaaaccttgaaaacttgtgctattcattcttttcattttcttcttcctttgccaaaaagaatttgccaaggactaaccgcctgaactctttttgagtctctcttctccctttttcacaagaacaaaggactaaccgcctgaattcttttatgtctcccttctcccttgtcaaagaattcaaaatgacatagtctgagaattcttttgattcttccctttccctaatacaaaagtgttcaaaggactaaccgcctgagaattcttttgtatccccattcacaaagtatcaaaggtttaacagcctgagatctttgtctcaacacattggagggtacatcctttgtggtacaagtagagggtacatctacttgggtttgactgataac

SEQ ID NO: 23535 - DNA, 389 bp, Glycine max
agttatacaaatcacatttagccccttttcaatttaagacttctcaattttgggcactaagattgttcaatgaggataatatcgattgcgtttcattcttgtgtgcagttggtgacttgaaccatctgatctcagctacaatgtctggtgtcacttgttgattgaagttccctgttcaacttaactctgatctgcgatagcttgcagtgaaccttattcccttccctcgcctccacttcttcatggatggatatgctcctttgacatctcgtggctctcagcaatacatggccttgagtgttcctgagctgacacagcagatgtgggattcaaagaacatgatgtgtgctgctgaccctcaacatggccgctaccttactgcctcatcc

SEQ ID NO: 23536 - DNA, 334 bp, Glycine max
gaccgtcgaacattggtcataggtctacaacgacgtcgcatttaaaggcaggcctgcgccgtcgttgaatgccgacaaggaccgatgtaaaacggcttttttctagcagggaaaaaggaatgatttttcaatagaaatgatgaaaaattccaaacccaggccctaattgctcatcattgccctaccaaaacctagaatcaaaccactcagtagagaaaagtgatgcaattctcccaatgaggggacccatcaccagagacatgactaggagactccataaagattggacaaggatgcatgagaagatcctaatgttatgagaagccttacacac

SEQ ID NO: 23537 - DNA, 328 bp, Glycine max
agcttaaacattcaatttcgagcgtctcgttatattacgggactcaatcagacatccgagtaaaaacttattgtcgtatgaattggcttaaagcttaaacattcaactttgagcgtctcgatatattacaggactcaatcctacatccgagtaaaaagttattgccgcttgaattggctcagaggttcaaaattcaattgcgagcgtctcgatatatttcgggactcaatcatacatccgagtaaaaagttattgccgtttgaattggctcataggttcaacattcaatttcgagcgtctcgatatatgtggggtctcgatccgacat

SEQ ID NO: 23538 - DNA, 397 bp, Glycine max
  unsure at all n locations
ttctaacgataataactttntactcggatgtccgattgagtctcgtaatatatcgacacgctcgaaattgaatgttgaagctctaagcctattcaaacaacaataacgttttactcggaagtccgattcagtgacgtaatatatcgggacgctcgaaattgaatgttgaacctctgagccaactcagacgacaataactttttactcggatgtctgattgagtcccgtattatatcgagacgctcgaaattgaatgttgaacctttgagccaattcaaacgacaataactttttactcggatgtctgattgagtcccataatatatcgagacgcttgaattgaatgttgaacctctgagccaagtcaaggagaataactttttacttggatgtccga

SEQ ID NO: 23539 - DNA, 367 bp, Glycine max
agcttgtaggcactttgaacgcaatattctccattattttccatcctccaaatgactattttgcttttgtaccttgcataataggcacttgaagaatggtattcacatcccttagattgaatatttgattaatcacatccatgtttcaacttccatgtgaagtatccataatatttgttactttgagatttttcatcccattgattataagagtttcaatagtgagattctacttcattctcaactagggttcgttccaaataccaatattagtaccatttcccaactttcatttatatccttcctttatgaccattgtagaagagaacatacttcaccatgtatatgatgggttgtgcctaactaa

SEQ ID NO: 23540 - DNA, 390 bp, Glycine max
cgtgatcaatagattcattggcatagattgtaggatgaagttgtggtgcgtgatctattttggtgtcacccagatgcagtaaagttatgcaatacatgtcatctggtactttttatagatagtacctacaaaacaaacaggtacaaactcccactacttgactttgttggggtgacaccaacggcgatgacattctctgttgggtttgcatatctggagactgagcgtgttaataatattgtatgggctttggaacgatttcgaggtctatatataagaaacgatcgcctccctgttgttattgtcactgacagagacctagcactgatgaatgcagtgaaaattgtgttcccagagtgtacaaatgtggtgtgcaggtttcatatcgat

SEQ ID NO: 23541 - DNA, 285 bp, Glycine max
tttcattccaaattttgttaccgaatatggattgtatcaacaagtgaagaaacactcttgtttgttttgttcctgtatagctgcataatgcagcgcaatgacaaatttattacaaagtgatcaatatagtgaaggatatatatgtactgagaagtcttaatgcaatgccccaattacaacgtacaaatgatagattgtattgtgtagattatttaaaaaaaatgaaaatgtttaaccataatgcatatataatttcttaaaagaagatttaaaggatatgtcctt

SEQ ID NO: 23542 - DNA, 377 bp, Glycine max
  unsure at all n locations
agcttcagaccaaagcaattcaaaatctaggtatctaaaacccctcaatttagtggattttcaaggtttaagaagtgaaaatgagaatggggtaattttggagcaaactctcatctcaaacaagtctataacattaatctaaactcactcaaactggttttacgacgaaaactccaccgaatcaaaatttgacctctcaacacccaatttaccctagaaatggctcttgctttcactttggtcactcattttccccatttgctcagcccaagctttcccacaagtcctaaataacattttaaactaggattaaatcactttaacctccaattaccactaaatccagatntagctnttcaaaccctcaaagcatcaca

SEQ ID NO: 23543 - DNA, 407 bp, Glycine max
tggttcgaggtacttacccgttgatgatcgaagaacgatgaagaacgaatgaagaacgtcgaagaacggtcgaaaccttcgcgaaattccttacagaaacgttatgaaaacgtttcggaagcgcctcggcttagattttcttcacggaaacaatttttccaagcaaattcgaaagagagagaagtgcctaaggggctgaacccttttcttcttcacttcctcccctatttatagcaaaataggggagatgcttgccgcccagctcgcccaggcgagcagggttgcttcctccagaagcaacagccttctggaggaatcttctggagggcccaagtgggcctggttgctctttgcacccccatttttactaagtgcaccccccctttctatttttttgtaattctttt

SEQ ID NO: 23544 - DNA, 374 bp, Glycine max
atcttgtgaaggagtcacctcaatggggggtcgaaccaattgctgagtgataagtgtcggccattgaggaggtatcttgacaataaaggactgaatttggtgagtccaagttggaggaggcaaatggactatatcatctaatggtgagtgtcataccctaatttcgtccggggactattgcttgatggcatgcaacctttaattgaccgcttcaaagtacttggcaccctttgttgcacaatatgtgaagtcccgagacatgccggaaatcaaaaggaagcgttgttatgcaatccgtgatattccgtaacgtgacggaaatcaaaaggaagtattgttacgcaatccgtgagttttcgtaacctttttgaaag

SEQ ID NO: 23545 - DNA, 407 bp, Glycine max
  unsure at all n locations
tgtgtgacttaatcacaggctcaattttctgtttccattgaaggtggtttgaatcatcaagcttttcagctatggagtttggaaaggatcagggtacggaagggaattggaattggatggagaaacctagggctcatcataccataatagagtttctgagagtgagagaaattgagagagaatttaaagagataaaaatggagtctaatgtttattcattgcttatataggctctcagtacagctgtaactaactgttaacagttaacagttagtacctacactaaccaacctaacagattcactaactgatttcagttgaataactggttatttacatatataccctaatacaattaatgttatccaacgcccgatgctcattattgtgaggtangggatgcttct

SEQ ID NO: 23546 - DNA, 378 bp, Glycine max
agcttgcctttccaagtatcaaagatctcctcaattttgctgtcctcacaacgccaattatatcccctcgtacaccttccatccccaatttaaacaaacttacttatatccttgtgatgtcatctctcccaactaaatgacattattagtaacaaaacgtactaatgtcacattatgaaaagtttagatgacactgctgtggaataccattctcacagctctaatgatatctaccttaattttccaatcgtttcctacattgaaataaaggaacttcctattaatttgcatagtgtccaacatcgctcgatctctacaaatgtacaacagacgaacatcatgcctcatgtgtttccttgttacaatctgcgctaacat

SEQ ID NO: 23547 - DNA, 354 bp, Glycine max
tgtgtgaagccactctcattgacatacagtcaatgtattttgctgtcaatctccatgttctccccatttctggtgcctatgtagtgtcaagcgtccaatggcttaaatcattgggggcactactcacagattataacatcttgtgcatgcagttcttctatcagggacgcatggtggaactgaatggagatcaggatgacactccgaactttgtcacactgtcacagttttggcgaattttgcacacccatactttaagactgtactaccaaattacacttctatcgaaggactcgcgcaacccacaggaccttcacccagatattcagtccctcctgactaagttcgcacact

SEQ ID NO: 23548 - DNA, 358 bp, Glycine max
tgcttgattgttcaatgactgaataagatagagtcttcttaaaaaaaatcatgtaaatactctgtattaaaagaatgacagagagtgctcatagaattgttaatagaccattcgggagataagaagacacacttagtttatactagtgcactcaacctgagctacgttcagttctcctttacacttccagtaaagatcccacttatgaaaactcgattaagaaacaagtatgttgacctatcactctaggctataaaagcattcttaatacaactgctggcactgtgttagactcccctgaatctaagaaaccctagtattagttaacactgagcaactcctatctttcacaaacagt

SEQ ID NO: 23549 - DNA, 362 bp, Glycine max
atactcaagctcgttttgatgcaagataacacatgattgggtgcattttgggtgatgctaccctggttggccagcaatcagctatgagccatgctataatagtttccatacacctagacgtttacgaattatgttcatcacggacgtgtaggtgtagaataggtatcaaaatacctttggcaagtttacactttgggtatgatagcatagtacttggatgtatgtacatgtaattcttggtagtcaaaatgtctcacacaagtatatatatgttgcgtgttatgtaaagaaataccttacaaagatgccttttaatttgaatgcatttctgatcaccaaaagaaaatttcttgaatttgctg

SEQ ID NO: 23550 - DNA, 376 bp, Glycine max
agtttgaccaggaattacttgtatgggttggatgttgaattctggttgttcctggtgcggagatgatggtacagcgggtgaaccagaagcggaagtttcttttggtgaggtagccatggaaaagcagagcgtttggaatgatttcgtaaatctcagaaggctattgggaaatgctggtataaacacgaatgccaagcagatataaatttgaatgaggaatgtagagggtcgtgtgaagcaacggtcgaattttccttggttcagtagtgaacgtgctattaatgttaagtgattcgtttgggcacgttcagattgctgtagttgctataattcctctagcacacaaatgcccagcttgcccctcatgttttcatac

SEQ ID NO: 23551 - DNA, 401 bp, Glycine max
  unsure at all n locations
ntatgtatgagtgtccacatggatgtatgcatgatcatgttttgcacaaatttctaatcatcattctcatatgtgtgtcatggaaatgatttgggggcattcccttattcttgaatcgcttgataaacaaatataccgacatgcatcatgtcccaccatccgtaggccttttgagccaaacctcaacgttttggccataaccttgacctaggatggaagtttccaaccttaccattggtaaaaagaacagaaggatcttccaaaaaaaaagagcttattttaccttgggttataaatgtgccctaaaagaaaagaaaagaaaaaggaaaggaagaaagtcaaccaatcagagattggagaaaagtaaaagataaaatagaaaagaaagaaagaaaaaatat

SEQ ID NO: 23552 - DNA, 380 bp, Glycine max
agtttgtacttgttcacccaacctgagtttgagggggtaattatggagtatatctagcatactgtcgcagagctttgggtagctcatgttatgcataatgccaaccgtatagctgttttagttaaccacaattaattatataagattctaacttctaaggttctggaatttgttgtaacagacttcagacacttgaaaacccgacatctgtctctgtagatatatgtggaacttatgcagttaattaagtaactttctgtgaaatatacatttaagatatgattgatatgctttaattgtatagctaaaattagggatttccttatttattcttcattattaggtttcctttattatgtatccatttttattataaataa

SEQ ID NO: 23553 - DNA, 394 bp, Glycine max
tgtttatggtattatagcatgtgactacatcatcaatcgttgattattgtgctcatggtataggcttgtatccaaacactttttctattattgtatatcacggtggtcactttgtgaatataccaacaaaatcacatggtcttgaggaattatgttgggggtaaaacctttctgatgggtaaatgtgatccaaatgattggtcattgcaagaggtaacctttgatcttaaacaacacgattataaaggttctgttcagattttctatcgccaacttggaataaggttggataaagatcttattaaagttttaaatgatgatggaacaaggaaaattgttaagactgctatggatttgattcaaaaacatgttgaagtatatattaatcatactt

SEQ ID NO: 23554 - DNA, 292 bp, Glycine max
tctaatcatcattctcatatgtgtgtcatggcaaagatttgggggcactctcttatacttgaatcgcttgataaacaaatataccgacatgcatcatgttccaccattcgtacgccttttgagccaaaccttaaccgttttggccataacctttacctaagatggaagtgtcccaccttaccattggttaaaagaacagaaggatcttccaaaaaaaaagagcttattttaccttgggttataaatgtgccctacaagaaaagaaaagaaaaaggaaaggaagaaagtcaac

SEQ ID NO: 23555 - DNA, 393 bp, Glycine max
agctctggatcaagtgtacctttggtgcaatactgtactgtcctttgtgctcttgaggagtttctataaactagaggcaattggcttgttttcttgcccttgtataatgatgaccctttgaaaacctttccattcccaagcttcacttgtgttggaaagcttatgtctgtgtagctagcagcaacagtcatgatccatggagcaacatttccagcagttgaactagaggggcctgaattgcctgctgagcaagaaacaaaaactcctttatgcgttgctccgaacgaggctatggcgatgctgtcattgtaataaggtcttgcaatgccacctaatgagagtgacaacacatcaacaccatcagcaacagctcgatcgatagcagccaatatg

SEQ ID NO: 23556 - DNA, 423 bp, Glycine max
  unsure at all n locations
gcttggagtctatataaacttgtgagaatttcatagattcgactcgtgaactcaacttatagactcgtaagagtctacttcatataaaattaataataaaatatttataaatgatttatcaattaaatatttcaacaatataataaagtaaaatagtaaatcataaatttcataatacttaaataatcaaatctagtaatgcatcactattaaataataacttgcatatattatagtaatggtaaatcatttccattgatgatttgatgttattagagaacaagagttttattttattaaaggtagaattttttttattcgagaacaacacaataaatgaaaatatgttgatcactaaatagacagaaaataacccanaatgacttatatttcggtttaatttttttaacttattaactcgcc

SEQ ID NO: 23557 - DNA, 245 bp, Glycine max
acgtacgatgggtcttgattactgtatacaatatagaacgggctaaactaacgtgagtgccgacgcgctattacgatgttcagaggtaccaagtgcctcgctattcatactctcaatgcctcactttgtgtttcttgaagatctgtctaatgaattgcacccgcataatgaatttataaccttaagggacaaagtccacgcatacccagacacctaccgtgaccatgtgttaacacccaactttg

SEQ ID NO: 23558 - DNA, 408 bp, Glycine max
  unsure at all n locations
ttgtgcaacattggaagaaanttttgtagaaaatgatgcagccttgaagggagaaactaaactgtgcaatttccattgtctgacctcattaacattatgggaattaccagagctgaagtatttctacaatggaaaacactcactagaatggccaatgctaacacaactagatgtatatcattgtgacaagttgaaattgtttacaactgagcatcatagtggagaagttgcagatatagagtacccacttcgtacttcaattgatcagcaagccgtattctcagttgaaaaggtaccaaaaagatttcctatctagtattcatattatgcttgcacgtctcaatatgcataaataattaaagaaattgctagtcacaaactttttggcatcccatgctgatcttaaat

SEQ ID NO: 23559 - DNA, 297 bp, Glycine max
tcattgctgttacattttctcattaaggttaaaagagtgtatccttcaaacttgggtggtccaagtcgtggtaatcgtctcaatcatgctactgtatctaaactcgaagcgtaagatcaccaatcctttgttcttgaaaacttttttcttctttttttcttatttaaatctaagcttcaaaacattcctgatctaaggttgaaagataacagaagtgtcaccttaatgaatgtatgagacagacacaattatatgtactgttcacataatcacatcagacgttatatttcataattt

SEQ ID NO: 23560 - DNA, 401 bp, Glycine max
catgccttaaagaagaataagatttgcagtagtacccactccttcattaataagtaggacctgtgggagacccactagagttgggcctagagttaagggatttgagtagtatgcatgagatcataggttctaatctaagtgtaaccattgtaccaaaaaaaaaaaatagtaccatgggactacaaattttccaaagagaaagggatgcatcacacacctagcagctgggagtcacacttcatcttttattttctatttttgatagctaactacatcattcatacagggcccatcatacatggggaccaagtaaaccgtaacttaaggcccaggtttttttggtctaaatcacaggtatcctccattgtaggctgtttgagccaaataggactactatatgc

SEQ ID NO: 23561 - DNA, 398 bp, Glycine max
  unsure at all n locations
agcttaaaagaggtggtaagtaacattgaaactacagggaagcgactgtcaagcgtgcatgtgttagagtctatttcatccctaaagtattccaaatattagaaattataataagtagtattcttttaagtactaaaatcaggttatatttaaactgaaaacagagaatgaagctctcaaggaagaacttgcaaaggcaaacgattacgattataagttgtacatcgagtaattaaatttcatgagcaattaaattccgaaacaaattgctagattaataacgaaaacaaaaaataaaaatctagggcacgcctctaatggaatgtagagatacgatgaaggaagaaagatacgaaactaatagaatgactaangattaatctaatagatataacacc

SEQ ID NO: 23562 - DNA, 396 bp, Glycine max
gatttagtcttggtttcacttttgttattagtctattaattcaagaaaactttcaaagaggaacgtccgattgatttctttgattattttattcaaagatattttgattattttattattatttttttaagatattttgattattttattattattttgctttttttggtttaaccgaggttacagcatgaacgatcggttggattttattttaacagtgattaaacgagattacaacacaaatgatcggttgaaattcattttatcatttattaggcgagataacgacttaaataaatgtttaaagcacgttaaaaacggaagaaaagaaaattggaagtaagcgaaattaaggtgaaagttcacaaaacaagttgggaccactaagggtgcata

SEQ ID NO: 23563 - DNA, 376 bp, Glycine max
  unsure at all n locations
agctctaagcaaattcaaacgacaataactttttactcggatgtctgattgagtcccgtaatatatcaagacgctcgaaattgaatgttgaacctatgagccaattcaaacgacaataactatttaatcggatgtctgattgagtcccgtaatatatcgagacgctcgaaattgaatgttgaagctttaggcaaattcaaacgacaataactttatactcggatgtctaattgagtcccgtaatatatcgagacgctcgaaattgaatgttgaacctatgagccaattcaaacgacaataacttgttactcggatgtctgattgagtcccataatatatcgagacgctcganattgaatgttgaacctctgaacca

SEQ ID NO: 23564 - DNA, 395 bp, Glycine max
ttacagcagattttagtaatgacctactaacctagatataaaataacttaatgccattaacctagggaattaaaacaaacttaatggctgagtgtaactgaaattgtggcaaccaaaagtcacccccaacagccaacaagtcagccaccatttggtctcccaaaaggctgatgcctaggttgccaattgggcccttattacaacttgaactaaagctaactaaagcccttttagttgattaacccaaaacatatttttggtcagccaactttacaaggattgggccattatttagacaaactaaacactctaaaattgaaacaaagtggtgtcatttagtcctcctccatttgggccatgatacaactcacagacctggacttttctccttgaaa

SEQ ID NO: 23565 - DNA, 384 bp, Glycine max
agcttgtaggtatttgggaagtatgttgtatgactcttcccaattaccatatacctgcttgagggcccattgttttgctagtcatgctttacgatatgtgatggtctatccaaactcttgtccaacgaatgtgatgaatgtaggaatgttagttgctcattttcttcaaccatcgcaaggatatttttgcctacaagtttcaattccatcttattgtgatcttgtgaaatggtcggcataacgcatgtgtgaggcccttttatcattctaatttcccaaacttttagattttttctttcaaacgctctaagtttccattgacacccctcaattgggaaacataagacccatgtatcctttgcacacctcttgtgtatgaaagtg

SEQ ID NO: 23566 - DNA, 367 bp, Glycine max
ttcctcatgtgtacccaaaccttatcacctggttcaagcacgactttctttctgcttttgttggcttgccttgcatatctcgcattttttttttcaatttgagccttcacttgctcatgctacttcttcatatactcagctttaacctgagcatccttatgcttaatcatagcaatgttcggcactatcttctaatcaagaggagtcaaatgcattgatgcatacactatctcaaatggcgaacaattaattgtgctatggacagcccgattatatcaaactcaacatgaggcaaacaagcgttccaagatttaagattttcctttaatacactcctaagaggtgtgcctaaagttctattgactac

SEQ ID NO: 23567 - DNA, 310 bp, Glycine max
agtttctattttaatagacttaccttgaattaattcctttgatagcccttttgagccttgtttccctttccttgttttgaagctcactacaagccttaagtgaaaaaccatgatattaccatatccttaaggaattttggagctttggaattggtttgggaataagtgtggggggtttttgtttcattggacaacttgttttgttggctatgcttcatgatgtattgtgggccatacttgatgtacattgtatatcggttaaatgttggacatgctgaatgatatgttgtttctcaaaggctaaagagtt

SEQ ID NO: 23568 - DNA, 404 bp, Glycine max
gaatactcccgctcgtggactataccttcgaccaaactctgctgtgtttctgtctcggtccggatttaatgctgtttgcaacaccggctctgcttccctaaccggactggaggcggttgccgaggctttatcctctatggatttctagagctttgacatgacctccgagatggaagccatttgatcttttaaagccaatggatcggcctctatgccttgctgcacgacctactcattatccattcttgtcgttaaacagattgatgggtgccttgatgagctcttagtatcatgaacctcctaaagaaataaactacggagaatatgcctccaaaacatgagtatgcaaatggatgatcagaacacttggatccacccacaggtttttatataacatgatgagt

SEQ ID NO: 23569 - DNA, 379 bp, Glycine max
agtttatcccgactatccaaattctcattaatccatcacccctagctcgttgagaaaaaaactaacaggtaactagaacaaagatcatgccatatgggaacaacacaattggaatctcacaaaatatgaaactgtgcctcaacagcctggccacacaaagggcaaaatcacttatcatcatatattgatcaaaccaaaagctatttgtcagaagacctccatgtaaaactttctagaggaagcatccatcacgagaatgggatatggttttccaaatcttcctccaagtatcactataacccccccccccccctcacgagacttattcaacaggtcaaaagtcattttttgtggtgaataccccatcaaaaaagtaatt

SEQ ID NO: 23570 - DNA, 393 bp, Glycine max
tgcatgatttacatctccctctttctcaagcaaattcttcttgatatcatcaaaattcttcatgatttacattgaatgtgaatgtatgtatacatgattttgatgatgtcaaagaagaatctaacaaggctgcttcaaatgataagcatttgcttcaagaataattcaagattgcttcaacaaacaaagccttgtttcaagattcactaaagaccaagccttgccttaaaacaaagtgctttcaagacatgcaaggctctggtaatcgattaccaggaagtgtaatcgattaccagaagacagggttgagaaatagctgttgaaaaaggttttgaatttgaattttcaacatgtaatggattaccatatgtctgtaatcgattaccagcaacg

SEQ ID NO: 23571 - DNA, 396 bp, Glycine max
agctttacatattcaaacgtgactctgatatatgactagagaactttggtttttatacacttacctacaacaataaaaggtcgaaacgatttggaggtaacactagttaattatgggtatggcatctatgatccatgtgattcattggctgaagtcaatgtgagatttccatttgtaatgttaggagaaatattttaaaaataatagcatgccacataattaatgtcaggtagttgacaacaggaaaagaagagagaaataatctagagcttcaaatccttggccggccaaaatgtttctttgttgagctgattacgttagtgatgttcatatacttgtactatatttatgttgagcaaatcaaccgttagatacattggctgcatatagagtacc

SEQ ID NO: 23572 - DNA, 408 bp, Glycine max
ttccatcagctactaaacctttctttagaaaatcattccttttcagattttttatgtcgcaaggacaagcagttccgtttgctgggaaatggcaccgttttacagtcaggaatgacggagagaaggtggtcccagaaccacatggtgacgccgaacaaacagaaacctgtgaatcagaggtgatgatcccttttgcagtggaaaggacagtttacgctttcggtggacctctgccagaccaagagtcactttcgagttcaatgaacaaagtatttccctgctacccaacttgcgaacctatgatttttgatagtgagccttacaacttcaattgtttaagcaaaccccacaaactctttcgatccgcccggtcaatagcccataaggattacctaccctggcttgatc

SEQ ID NO: 23573 - DNA, 393 bp, Glycine max
  unsure at all n locations
agcttagctacacatacctctctaatagctaagctcacctccttgagatgagaagctagagcttagctacacaccccctataatagctaagctcaccccatgagaaaaaacatgaaaataacaaaaaaaagtccttattacaaagacagctcataatgccccgaaatacaaggctaaaaccctatactactagaatggccaaaatacaaggcctagacgaaggaaaaacctattctaatatttacaaagataagcgggctcatacttagcccatgggctcgaaatctaccctaaggctcatgagaaccctanggcctttccttggatctctagcccaatctacttggagtcttctagccaatgcccttacggggtaggattgcatcaagtagc

SEQ ID NO: 23574 - DNA, 420 bp, Glycine max
tatcttcacaaacaaatcaaaatgaattttgtgatcttcaaaacctagctccagcttcctcttccccatatcaactatacagcttgcggtcaacacgaatggccttcccaatattacagggatgttagtatcttcggagatatccattaccacaaagtctgtcgggaagataaaatgttttactctgaccaaaacatcttcaattactccatatggcttggtaatggagtagtcagctaattgtaaagtcattcgagtgggcattatttccaactctcccaatcttctgcacatgtagagtgacatcaaattgatactgactcccaggtcaataagagcttttcccacattgacttctccaattgaacaaggaatagttacactctgaggattattatgcttgggtggaaggatcttcta

SEQ ID NO: 23575 - DNA, 387 bp, Glycine max
  unsure at all n locations
agctttggaaaatgatttatgtactaaggttagtcatatggagcgactaacacacaatcttaggacctgacagaacatgggtggtgaatggccaaagattgaaactataccatggtggagagtntggaaaggaaaacaccatcttaaatttgatatcacccaactctgatttctttcattgtgtttttcatgcattgcataagttggaatttgctttatgatcattgaaaaaggggtatatcagcttatactaagttatagatattggggtttgatctatatgttttgagaaaatggactgaaattaacttaaaaacattttcttgaaaatagtccactcgctaagcgcatatcacacgctgagcgcatctcctccatgcgctaaac

SEQ ID NO: 23576 - DNA, 418 bp, Glycine max
  unsure at all n locations
tagcccaagaggggatggacctttntgatgcaatcctatgccgcaagggcattggatagaagaccccaagtagaatgggccaaagatgcaagagaaggccctagggttcttatgagccttagggtagattttgggcccatgggctaagtacgagcccacttatctttgtaaatattagattaaggtttcattatttttgggccttgtatttagggctccataatgtaggtagggtaccctagaaatataggatttttcagcccttgtattttagggcacctagactagtttttgtattaggggtagttttgtaatttcacatgcactaagtggatatttgatgtgtgtgggtggaaataaatttaattgaattggcagaagcccaatccaattaaattttagagagggaggtgagcat

SEQ ID NO: 23577 - DNA, 322 bp, Glycine max
agtctgagctggatggtcactttcccaaacatatatttgctcttagatccaaatccatcacctgcagtgttcaaaataatgtcacatatatagctgaaaaataacacattctgcaaggctgtcaaatggactaacaataatctgatctaacataaaaaaagtgcaaaattagacataaagggctattaacaaataacattactaaaaatgcttcaaaggtaagaacattatgcaaatgccacaaccttgtatcatgacaaggcaagaaagtttgagatttggaatgatcaattaccagaatagttatcaagtttgagtttga

SEQ ID NO: 23578 - DNA, 327 bp, Glycine max
tgcttgtttgtgtacacatgtaacatgcattgagatttttgtacaatatagtatattaatcattctgcaataattgagatgatgttttcgtagatcatatttcacaatttagaacttctaagccaagcaataatcctctaaatactatgtacatccttttccgacctacgcttacacggtccaattaagccataattgatctaggagtcgattatcataccacggtcccattgtgtcataattgatcttgaagtctattatcataccataattgtggcagaggtcctatttcagttataaaaactctctggggtcatatctttcatg

SEQ ID NO: 23579 - DNA, 154 bp, Glycine max
agcttattgtcctacatatttaatctcacttacacttcaccacccgaatagagaaaagaattaattctaaggcatattttttttttcactctcaaattaatgcacatgaacacctactttgaagccaccacatttcaaccaatgccacccacca

SEQ ID NO: 23580 - DNA, 366 bp, Glycine max
gacatattgtgtactcctcggccattttttaacccaatcacttgagacaagcatgcggtcgagcctactttttgaatgatcattcaccctataccaagtgaacttccttcccaccataggtatgtcctccacctccatatccccaataaatttgttaaatgcctccatatccccaataaatttgttaaatgcctccatatcccttcctcccatcaaatttcttgagtctcttctttcttgtgttgtccatgccgaactaaaatcacccattagacaccaaaccccactcttgccatttattcttgagttcaacaattttctcccaaaggttcttggtacgttcgtttcatgacatcaaggtgccac

SEQ ID NO: 23581 - DNA, 384 bp, Glycine max
  unsure at all n locations
agcttatgctaaaaacatttataatagacctcctcagcagcaaaaccaacaacaatagaataattatgacctctcaagcaatagatacaatccaggttggaggaatcatacaaatctgagatggacaagtcctccacaacaacaacaacctatccctccatttcagaatgctgctggtccaagcaagccatatgttcctcctccaatacatcagcagcaacgacaatagtcataacaaagacaacaagcaactgaggttcctcctgaaccttccttagatgagttagtgagacaaatgaccatccagaatatgcaatttcagcaagagacaagagcctncattcagagtctgacaaatcagatggggcagatgactacttagat

SEQ ID NO: 23582 - DNA, 391 bp, Glycine max
tctatcacatgcactctcttggtgttgaagctccttcttccatggcttattccctagtggatgacgcttcctctcctctcttgtccattatcttccgctgcatctccatggaggaaagccaccattgagggacctcattgaagctcaaagatccagcctacatagaagcttacatcaagcggtaatcagagcacaaaagctttaagtaggtgctccttaaacctccattaatttttggctttaccttctcctccattgtcgatccttcatttttctccatgcatctcctcacatgtcttctgctaaatggtgttaacagtgattctttacaatttccaccaagtaaacttgctatagaagctgaatttgaagttctacaggtcaaatttat

SEQ ID NO: 23583 - DNA, 322 bp, Glycine max
ttcttctgttcatatggaatcttccattaagttcaagaagacttatgttaactactataatgtagcacatggtcaaataattaatatgcacgctattcatcaatataacagcaaaacatcatttataggttaccagtgttgcaggtccttaagaaagtgtatatttacaacatgcaaatcaaacatatatatcgacaatgtacgtagcatataaaatgctacagattccattcaaacaaggtactaatacagagaagtcagatagctatatatctttagatgcaagttcaagaatgtgatatctgtacttcggtcatgtgta

SEQ ID NO: 23584 - DNA, 383 bp, Glycine max
cgagataatatgaagtttgtgattttagaacctatctccagcttactctttcccatatcaactatacagcttgcggtcaacacgaatggcctttccaatattacagggatggtaatatcttcggagatatccattaccacacagtctgtcgggaagataacatgttctactctgaccaaaacatcttcaattactccatatggcttggtaatggagtagtgcgctaattcgtaagtcattcgagtgggcattatctcctactttgagcatcttctgcacatggtgagagacatctaatagatactgactcctaaggcaataaaagctgttcccccttgacttctccatatgaacaacgagtactaagactctgaggattatta

SEQ ID NO: 23585 - DNA, 355 bp, Glycine max
agtcttttggagtagaaacatgggaccaactcattatatttcaaataggaagtcatatctaatcaaggtctaagagaccatacaagtttcctaacgatttctaattatgtgggccattaagtctatcatatgctgacaatagctgagaagcccatgaatctcttcaggggcggagtatgtgtctgtcatcgtcttggccttggctaacaatcggggaagttcttgactcccgttcaaggtaagagcagaccgatccatccacatggttgcctctaggtgtaaagagtcgatcacccttcctctagcctctgtttacgcatatacttgagtgaacatctgatactgggggacaaat

SEQ ID NO: 23586 - DNA, 409 bp, Glycine max
ttgcggatttggtcttcgccagtgtatggatcgatgtgggtccgaaaaggggcaaatttgatcatcctactatgacgactgagaaaactggggcatatgaagagggtgagaaagagggagaaacccatgctgtgactgccattcctatacggccaagtttcccaccaaacccaacaatgtcattactcggtcaataacaaacctcctccttacccaccacccagttatccacaaaggccatccctaaatcaaccacaaagcctgtctaccgcactttcaatgacgaataccacctttagcacaaaccaaaaaaacaccaacaaaaaggaattttgcagcagaaggcctgtaaggttcaccccaaattccgtggtcatatgctaaacttgatcccatatccactcaatat

SEQ ID NO: 23587 - DNA, 381 bp, Glycine max
agtttgcactatccagtgatggaatgaatccatatggcaatttaagcacttaacacaattcatggccaattctactagtaatttacaattttcctccttggttgtgcatgcagtgaaaatacatgatgttgtcgatgatgatatcaggcccaagacagccaggaaatgacattgatgtttatctaagtccgttgattgaaggcctgagaaagctgtgggacgagggggttttagtgtttgatgggtttcagaatgagacttttctaatgcatgcaatgcttttttgtacaattaatgactttccagcatataggaatttgagcagttacagtgttaagggtcatcatgcatgccccatctgtgaagaagacacaagctaca

SEQ ID NO: 23588 - DNA, 407 bp, Glycine max
cggtggtactatagctgcactaaattgttgttgtggttatcaaatgcagatgcaatgcagtagaagggggtaaagacaatatattactacaattatatgaaattgagtaggtaatactaagaatagaatattagtagcatgaccgaaaataaaatagccgttgtgtcaaataacataacaattgtctcaaatacaggaaaaaaaatactccaacgccatcattagccgttatgacttattgctgtctttaaaaaaaatgttgcccatttctttcgaattgtggtgatgatgccgatgtccaacggtgtgtcattagcaaaccactgcaagtattcataattgtaagttagtactgcaaatataaaaagtcagttccaattgtactgaagtttatgcataccatggac

SEQ ID NO: 23589 - DNA, 376 bp, Glycine max
  unsure at all n locations
agtcttacaacttttggaagacacccatcaaaccattttttgcagccatcacttgcctaacgaagagggttcttttggtttcaaccattttctgcttttagcttcaaaaggatcatcatagatgatagccagctccttctgcaatgctgattctatgttttcagtaagttttttaaactaaaatttagtaccatttgtctattttggtctttcaagtgttatcttgtgctcacacttttcatgaaggctattagtgaatggactttctcaatgttgttcttgtgcttggatggtgtcatgggaaattctgagaatntgtgttcaaaattgatgttgtttcaactatttaatcctcatccctgcactccaattccta

SEQ ID NO: 23590 - DNA, 399 bp, Glycine max
  unsure at all n locations
taattattttctctttctaattnttcaagcacactctttaagacactagcacttagtgttgttttatctttccccataatctcatcaggaagtgcaagaaaatcattcaggaactgacaaaaattataatttttagaagtgtttagctaccataaattgaagatttttatctttgaaactaacttatctaacacgcttcatgtgtttcatagaccaattttacaatattatctaatatggacatcaaatcttattggagtattgacaattgacacgtatgatttagtcacttatttattttactaaattttgtaaatgaattattttttgaatttatagtttaaattattttatatgaagattaagataatgatgattcattttaattaatttcatttt

SEQ ID NO: 23591 - DNA, 377 bp, Glycine max
  unsure at all n locations
agcttgttcgcatatcatctgtgtctatgatatccactcaacaaagtttgaagtagaggagaccttcaatccttatgacacaacgtggcggacaaaagtggacagttaacttaaatgaccattattgtcaatgcggaaagtattctgcacttcactatctatgttcacacattatcactgcttgtggttacgtgagcctgaattacttgcaatatgtagatgttgtttacacaaatgagcacatcttgaaagcttactccgcataatgatgacctcttgggaataaagcggcaattcctcattntgatgacgcatggacacttattcttgattcaactacaattcgtgcgaaagatcaaccaaaatcaacaagttta

SEQ ID NO: 23592 - DNA, 402 bp, Glycine max
caccttctaaactttatacaagaattaagctctgataccacttgttagacaagtggcctcagatatcttaagaaggggggattgaattaagatattccaaactacttgccctaattaaaaatctatttcactttttattcaagttatgaattcccttaatgacaatcttcttaaatattaattcaaataacacaatttgaatatgaatataaagcaataataaataaaggagattaagggaagagaaaatgcaaactcagttttatactggttcggccacacccttgtgcctacgtccagtccccaagcaacccgcttgagagttccactatcttgtaaattccttttacaagtgtctaaacacgcaaggacaatccttcctttgtgtgtagaattccttta

SEQ ID NO: 23593 - DNA, 375 bp, Glycine max
agcttttttggagtagaaacatggtaccaactcattttatttcagagagtcgtatctagtcaaggtctgaaagaccatacaagtattctagcgatttctaattatgtgggccattaagtctatcatatactgactatagccgagaagcccatgaatttctttgggggcggagtaggtgtccgccattgccttggccttggctaacaatcggggaagttcttgactcccgttcaaggtatgagcaaaccgatccatccacatggttgcctcttggtgtaaagagtcaatcacccttcctctagcctctatttccgcctatactagggcatactcgtgcgcgaccctattctcgtgggccgtggctagacctaactc

SEQ ID NO: 23594 - DNA, 334 bp, Glycine max
accctcacgtcctccattcttgcattctctgacaaaacctatacttctttattgtcttgttcctttctggtacaatgaaaatctttgttaccttcccccattttttaaaaacaagcaatagatcctccaaatttttttctaaaaaatcaataaaatagtaatcggtgatatcctccctcgtcttggatgatcacagagccttgtccctctacgatgattctctatctaaactactttctctctccaagctgtctttctactttatctgcaccttgtcattcgatctctctgcaatataaacttatttaagttactagaatttgctaatgagcta

SEQ ID NO: 23595 - DNA, 463 bp, Glycine max
  unsure at all n locations
gtgatcatctatgcatgaactgatagcgtaagaacacctcgacccgagatcctctaagtctaaccgtagcatgcaatcttgnaggatnatgttgtacccatcacatgtggaactaagtggctgctaaacgatagtgcacaacaagcatttcacaatccataatcgcacatatacctccactccactgctgcccaccttcaactgaaacacacgtacttccacgatatctatatcatcgtttctttaagcacctggactcctgcaaccctcatctgctacccacacatccaagtaacttgatatatcgacatctcataccatatcgctcatataatatggcatatgccaataactatacccagatcccaaccaatatcacaattatgctcactatacctccatcatcatttcttcgatcattcaggaccattgatacataccaatataacaggacacactatcc

SEQ ID NO: 23596 - DNA, 419 bp, Glycine max
  unsure at all n locations
actcacgcttnttggagtagaaacatgggaccaactcattttattttataaagaatgtcgtatctagtcaaggtctgagagaccatacaagtttcctaacgatttctaattatgtgggccattaagtctatcatatgctgacaatagccgagaagcccatgaatctcttcgggggcggagtaggtgtccaccatcgccttggccttggctaacaagcggggaagttcttgactcccgtccaaggtaagagcaaaccgatccatccacatggttgcctcttggtgtaaagagtcgatcacccttcctctagcctctttttctgcgtatacttgagcatactcgaccgcgatcctatgctcgtgggccgtggctagacctaacttttcaggttcttggcgatgaagctagcatgttggtct

SEQ ID NO: 23597 - DNA, 372 bp, Glycine max
tcatctcgacccgggatccttatagtcacctgctgcatgcagtttctacaatgcatgatctgtctctttgcgagaggcaccattgtgatacaatttgactgaacatgcattctcacctaacttttagtctactttattgctgccattctacattcatagatcctattcaaagaaatgatatcgcatggcatgataaattaatcattagatacggatttaccaaggaatcaattttcttaacgggaaaagcaatgggtattatatctaatctggaaacctcttcaacaataaaatttatagatgagctttacccaagatctagcatttacagaatggcgagaaattgtcgtatagatgcccgagtatgacatg

SEQ ID NO: 23598 - DNA, 404 bp, Glycine max
actcccgcttgtcggcgtacctgaagatgctattacgctcggccctttttcattttctttagctggggaggctgagagatggttgcattcattcaagggcaacagtggaaagacctgggatgaagttgatgacaagttcctaaaaaaatatttcccacagtctataaaaatattttgagtgaggcattacaaagatttcgtatcttgctgtggaaaactcccactcatggtttttcagagcctatacagttggacatcttcattgatgggttacgactgcagtcaaagcatatactcgacacttctgcaggaagaaaaattaagttgaaaacacctgaacaagccatgtaaaccttatcttacttgacacttattaaattgccaacaggatgcgtgctatctta

SEQ ID NO: 23599 - DNA, 311 bp, Glycine max
atcttgtcttcagtatttctttgtcgctagtaacagaatattacaaagtgacggctttctgagtggagcgcttgatttcgtgtggtgggtcaacttccagtctcgatattgttcattcttctctcgtcgattgagaaggctcagctgcagagacagtgggggtgggacggttatagcttttttgcccatttattgttgctgaaatggttcagatcggtctgacaatgcttcattggtctctactttatataatcttatcaatattattgtttggatcagatgtgacatatttgcctcactcatatcacttt

SEQ ID NO: 23600 - DNA, 414 bp, Glycine max
tctgatcccacaccccattccccattaactgattataaacccccttatggtggacggaaccagacataacatcccccatgattatcaagtaaaccaccaaaacaccagcattgttgacaatgaatcaaatttcagacaaaatcctggcaggccttcccataacatgttgaacaacctcaccataggaggatgccttacacaaaacagaaaacctcaccaacaattcgacgctaatttcagacaaaattcccataagaacgatcaaaacaatccccaaaaccacacctagaactttcatagtggcagggagggccataatccctgccccgataacagtggttgttaaattgaaaacagccccaggtatcccagaaaggtgattgcgccccataacaataaggtgattactatcga

SEQ ID NO: 23601 - DNA, 382 bp, Glycine max
agcttctccaactgtttgtgttggtgatccttcttctcaatgtgaaacatcccagcctaccatgtgagccaaattttacgacgatttctttttatcaccacagctgatttatgaagggaaatggccaaggttaatttatggggtagaaataatgattcagttctattcagccgaatttttattttgatactattgctaatgtcattatttgatttttctaggtccacagaaattcctgtcttagattcaggaattactgataccttgcacgactcacccttgctgacatatccgggcaacctaattgaaagtaaccatgagtctacttcttcacttgcggacactacacttgacaaactaacacctgattccagagcgatag

SEQ ID NO: 23602 - DNA, 403 bp, Glycine max
tgctcactagctcttcactttcatttgcttttgaccttgttacatcaacacactttattcttttattttcttttttttaacatacaacttgtgtgttgtgtgtgttgatgctttctctctttctttgcatcccaattagttccactcccccaaatttggggtaaatttgctttgaactatatgctctcctagaatctaaacaaggtatcatgagataattatttaagttcagggttcaatttatgacaaaatcattcagctcaaaaagggtgcaaaggatataattatcattcaaggtaagctttttggtcaaaaggcttgtgtatgtacgatcatggccttcatcatgttctcgtctatacatttcattgtaaatttagagattcatgcaaagatattactc

SEQ ID NO: 23603 - DNA, 377 bp, Glycine max
atcttgaactttaactacatcaagtttatgtgatcaaatatttcacgccaaacatgactcatcaattttaacaataaaatcatgacatttcactatatccaacttcttatgaaaattgtatccaatcatttcaaccttattcattattgtttcatgttcatcaaatgataaaacatattttcgaaagagactacatgtatatttctcaacactaagaaaattttgatctagtttccaaacataaataacatctttgacaattatcttaccttagaatatataaaaattacctctttttctttggcttgcacaatgtcaccatatactaacttgactttaggttgaattgatcccatgaagattacaattgaaagaca

SEQ ID NO: 23604 - DNA, 233 bp, Glycine max
gctagagcgaatgcttctatagacgttattccaagtccaatttagggtcatcggcgcttgattctttggtccggatctatatgatttcgacatctctccatggtgctgcgagctcacacacctcgccattgctggtgcgcaatatcacctggattaacctacattggctggtcagaatgtccccgagtgcattattaccggtgagcaactctttgattattaagggacatttg

SEQ ID NO: 23605 - DNA, 318 bp, Glycine max
  unsure at all n locations
agaatgatctcaagaatgagtcaacaagttcaagatcaagattaaagaaaagacatcaagaagaatcaagattcaagagaagatgaattcaagattcaagagaagaaaccaaaaagcaacaagttaagacttcacaagggaagtattgaaaaagatatttcaaaaaccaaacatagcacaantttattttacaagaaaagtttttccaaatntttctaagttaccagagtatttactctctagtaatcaattatcaattacctgtaatcgataatcgattacaatattttggtaatcgattaccagtgtatctgaacg

SEQ ID NO: 23606 - DNA, 402 bp, Glycine max
atctccttttagtagggaatctatccttctaagatagagccaaacccagtctccctcattaagaactagctcatttcttcctttattgcctttagttgaatacacctttgtttggttctctattgtagaagcaaggcttcatggtgaatgtgattcaaaggtgttttgatgataacaatgatgacaacaaaagataatgacaaaggtgatgaacaaaaggctcaaagatcaaagaacaactcaagtgaatcaaagaacatctcaagtgaatcaagaacaagtcaagagttcaagaatcaagaagaattcaagactcaagaagaaagcctagaatcaagattcaagattcaagatctaaagaatcaagatcaagattcaagactcaagattcaagaatgaaga

SEQ ID NO: 23607 - DNA, 368 bp, Glycine max
agtttgaggaggctagttttttggtggagagtgaattgaacatgaagatagatttgaaagagcaattttggatattggcaaggaggaatgagtcatttctaagacaaaaatctagatctagatggttagtggaaggagacaacaactcaatattcttccatggtactattaattggaggagaaggaaaaatctacataggggtctacatattgatgggatttaggaggtggatcctaagaaagtaaaatgggaggtgaagaatttctttcaaaaaatattcttggtggaggatttggatcggccaaagcttgatgggacaagattaaaacatatctctcaacaacaatatgagagtttcatcgcaaga

SEQ ID NO: 23608 - DNA, 368 bp, Glycine max
atttttggagaaaaagaatgattgtagggaacatgagtgtttcggtaactttttacacttaataaattctgttgtgagtcaaattgattttgactgaattttttttagctgttttgctaaatagattctttgtgtgggaccctaacaaaaatattctatatttgcacgccaagagtaattgtatttttttcatcccaaatattcaattcttctgaattcatttttaaaatatcattcgttatcacaaataaattttttaaccttaatttttccaaaaatcaattgtttcaacattacttgtaacacaattgagatcaaatcaccctttatatgctttctcaaataataaattttgttaataactacct

SEQ ID NO: 23609 - DNA, 395 bp, Glycine max
agtcttacaacaaactatgtattgtagaacttcattactattattcagaatatactgtagcaacctacccttcggcgggagggtgacgcgtgactcgcgggtgcgtgttccaagaaaggaatacgcatggagtcaccaccaacgtttatttgaggaaaacgtcggaaaaaatatgaaaagatgtgatctacgaactttaaatgaaaagcttcgggagttgtatttacgcacggggaaggtatcagcaccccacgtgtctgtcacaagatacggcagcctttaataaaatgtgaaaacatgacttcaatatttatgttcccttttacgtctgtatttctttttataccttttatatttcttatctttctgcggtcgacgagggtgtctcccttgct

SEQ ID NO: 23610 - DNA, 363 bp, Glycine max
gctcttgctgcctaagtgtggaccctctagggctatttccattctcctcttttttcggagcctcatgaatgtcattgcctaacactgttcatgtgtcctccaccttcgagtctggagccccgcgaatgtcatcgcctaacactgatcgccaattctccattccccactatcattcggagccccatgaatgtcattgcctagcgctgttcatgtgtcctccaccttcaagtttggagctatgcttcatgattgcctaaatgtggaccctcaagtgcaatcctccattctccacttttttcggagccccatgaatgtcattgcctaccgctattcatgtgtcctccaccttcgagtacggagccc

SEQ ID NO: 23611 - DNA, 398 bp, Glycine max
  unsure at all n locations
agctttgagccaaaatcctgactcaccataaaccttgacccagggtgagaatgccaatccttaccctcggaagcaaaaaaaaagaagagaaggaaaatttccaatcaaaggaaaaaggagaaggaaaatttccaatcaaaggaaaggaaattcccaatcaaagagtgggagaaagcaaaaagaaaagaaagaaaattcccaatcaaagaatgggagaaagaaaaaaagagaagtaaaaaagaagaaagctcctggtcaaagaaaccagaagaaatgtgccgagaggtccttggactagacgatatctgaacaatacagaattgtcaccaaatgaacaaaagaaagaaaaggaaaccatgacctanaagtggtcttctcccttngattaccaaccaaaa

SEQ ID NO: 23612 - DNA, 415 bp, Glycine max
taaacattcaattccgagcgtctcgatatattacggtactcaatcaaacatccgagaaaaaagttattgtcgtttgaatttgctcagaggttcaacgttcaatttcgagcgtctcgatatattacgggactcaatcagaaatccgagtaaaaagttattgtcgtttgaattggcacagagcttgaacattcaagttcgagcgtctcaatatatgacggaactcaatcagacatccgagtaaaacattattgtcgtttgaattggctcataggttgaacattcaatttcgagcgtctcgatatattacgggactcaattagacatccgagtaaaaagttattgtcctttgaattggatcagaggttatccattcaatttggagcgtctcgatatattacgggactcaatcagacat

SEQ ID NO: 23613 - DNA, 399 bp, Glycine max
  unsure at all n locations
agcttgtagtgcagctccagatttcataattggctcaccaacaggatgatagtcacagcctgcttcaaggatttgcttaccagatgacagtaaagttggaactttgtcatgacgaacctgcttctgattctcttttaactcaaaatcattagcataaggaagattagtatgtccattaaaataaccattgtttattgcggaagcgtcaagaagtgggttaaagaactgaaaaataaaaccagctgccaaacttgaacggtaagtggtttttgaggtatcatctttaggtacaatagtggctgtaaccaagatgacagcatcgtatagaatgctagcacttaaaagctntccagctaanaactcctcaacatattttgctctgattgcatgcttactccg

SEQ ID NO: 23614 - DNA, 413 bp, Glycine max
  unsure at all n locations
tgtggtttgttggatttgtcttgctagtgcgagaaatgggatgaggttaccttgtgccatgagaggtaccatcacgatgtggcctttgtttggtgtctctgccattggagcgagctcgatcgaggaatgatgtgctacaccctgcgctgtctgtggtacaagaacactatactcaactcttgttgtcttggtttctgctaagaagtgtacaaaagaagtagcaaagagacagagatgatgaagtaacgtgaaactcttgttgtcttggtttctgataagaagagtgcaaataaagcaaaaagagccaaaaaagcaatctgaatcactgcactcaactacctatgcatgttgaaccagaccaggttttcgatgctgcgggacctgactacccaagaagggaaagatnagtcata

SEQ ID NO: 23615 - DNA, 250 bp, Glycine max
tccttaacgggtacgactgttggagagcgaatttagacttggcacgtcaaaattggtcttgagattagaaattatggctgctaggctcttgacaacttatgatgacgcttgaaggaataaatacacatggaggttatgaaaattgatatatcaaagacgaatcataactcatccctattttacgagatgactctacctaagttagctaataaccttagggattactctatagaaaattctcttcaatgac

SEQ ID NO: 23616 - DNA, 319 bp, Glycine max
ggcgggctttttctaaaattttcattagggaagtaaatgtcaagaatgatatttcagaagagatgttctagaaaacaatattgggcttatagaaatcccactccaaaataagtacctgcactccagaataggctttcctcaaaggatttttggtttccagaaatgtgtttcgaaaggcttatttggaagacaaatattccagattctggaaaaggtgttactttcagagtaggtgttctagaaaccttttttcggaaaggtcattctagagaacaaataagaaaggaggtgcagtgtgctgaaatggacttggcatgga

SEQ ID NO: 23617 - DNA, 385 bp, Glycine max
agtttgcatttggaattgcgaaagcccccctccaccattaggatttgttcctgccatctcaaacaaacaaatcaaacgtaacaagacaattatagttgttgtttgaatacctcacccactcaagtgtatcacacaattatggcttttctccaatgaaacactcttgccttttaccactctaattccccttgagttcttaggcaattcaagagattatggccacaacaaagaacaattcaccaatatgtgtaaggtaaggctagagagacaaggaaaaggttaaccaagaaaaaggctaacaatgtttttaggcacaaatgaaggaaataaaattcagaatttaggaattcaagtaacaatccttcatgcaaccaatatattacct

SEQ ID NO: 23618 - DNA, 407 bp, Glycine max
tgaggatcaaaatcttttctctctttttctctcaactattcttcattcttattcttttcacttttgttcttcctttttacttgcaaaaattttgtggcttttacactggtgatgattatggaaggatagacacttgatcaatccaaggattcactccaagcaaggctgaatttgagttctagtttagtatttctaatctgtgtgaatgctcatctttttcttcaaacctattttttattttgatgattatgaatatgattaggatagaaaatgaattattttagggattcctttcctaatttcaactttaatcacagattgtttggatgatatttcaacctaatttgcgatctcaatgaatttatggattaattcgattgaaacaactctaatgatattgattgaac

SEQ ID NO: 23619 - DNA, 382 bp, Glycine max
agctttgcataccccaaggatccattaggaaattacttatgaaagagagccatgagggtgggctcatgggccactttgggatagacaagacccttgtcttactcaaagaaaagttttattggccccatatgaagaaagatgtccataagcattgcactaggtgtgtggcttgtttacaagccaagtctagggtgatgcctcatgggctatacacacccttacccatcccctctgtaccttgggtagacattagtatggactttgtccttgggcttcctagaacccaaagaggtgtagactctatctttgtggtggtggataggtttagcaagatggcacacgttataccatgccataaggtggatgatgcttcccacatctc

SEQ ID NO: 23620 - DNA, 408 bp, Glycine max
  unsure at all n locations
ctcagctntatagtgcgggtctgggagactaaggtcaagtgttcgcgatatgtgaagatgatgttccaagtacttcggatttggtccgaccatgccctcctgatttccagctgggaaattggcgagtggaggaacgccccggcatttacgcaacaagcataatgtaaacctttacggttttaaaagctctatagttgggcctaggctttagagttttcattttgttaaggctttgtgtcttttgtttttgaatttataatacaaggatctttcttcatctgttcctggtctctacccattctcattcatttgcatgtttacttctttttctgaaacggcagattcgatgacgagtcccccgaaggtactaatacctgggacccgtctatcaacttcgagcaagaaatg

SEQ ID NO: 23621 - DNA, 385 bp, Glycine max
agcttgggaaagatctaatagactcagcctaatgttcatgagaatgactgttgcagacagtattaagacagctctccctaaaaccaatagtgctaaagagtttatggggttagtgggagagcgctctcaaacagctgataagtctcttgctgggacattaatgagtacactaaccaccatgaagtttgatggttcgcgtactatgcatgaacatgtcattgagatgacaaacattgcagcaagacttaagaccttgggaatggctgtgaatgagaacttccttgttcagtttattctaaactcattaccgtctgagtatggcccgtttcatatgagctataataccatgaaagataaatggaatgtgcatgaattgcacagtatt

SEQ ID NO: 23622 - DNA, 400 bp, Glycine max
tcgtcgtcctgaggatgctttttttcaaagaaacgattgcacatgtaatggtggcattcttccacattattggggatttggagtagaatcacgaggaacaacctcaaaaattcctgatccttttgctatagaacaaggtaacccaacaaaaattaaaaatggatatgaggagaaatggttgctcaacatcatggtcattgatacacgtggtgcacaagataagaaagcttgcactcaatgtagatgtgaccagatgaatctcccgaaggacttttataatgtcacaagggatatacataaccaaaaattgactacaaattataaaggaggtctattttgttgtcaggacaacttacaatgcaagcaaatagaaggttttcaaggttcaaggagaatggtt

SEQ ID NO: 23623 - DNA, 368 bp, Glycine max
agcttgactggtctttaactcaagaagaaaaaaatgctttaatatttaccttgttgatcattttatccagcatatacttatcactttttatcaattagtaagccattttgattcctgtatacaatttgtattctattctttagtgttgactcttgactcattttttttattctaattgtagttactccattatacttctgctttataaaaattctcatagatacattaattaaaaaaaaaagccaatgcaataccttaaaaaaaaaggcaaaatgaaaagtcaagcaaaaaataaataaaaaaagattaaaagataagcaatactacgacggttattgtataaccgtcttagtatgttacacctacta

SEQ ID NO: 23624 - DNA, 383 bp, Glycine max
taaagaatatactacataaacatattgcaagtgtattttagtctcctcatattaagatgatttggcacaaaaaacaatttttccatttgatgatagaatggattacactttatatgttatatcactcgcacatttatttacattttccctcttctttcccaaaatatatactaatatgcactccaatggtgtgaaaatatcttctttttttccagcaaaacaccgcattatcaattatgcttttaagttgaggccctgctttttgtgcttgtgatgatattatttggtgcccactctagtttattttacctaaactgtgcttaactacattgttgagctttagccattccttaaccgttggcataagcttaaaaaccaacagc

SEQ ID NO: 23625 - DNA, 368 bp, Glycine max
agcttaataaagtccttggtgatccatattatgtgtgtgtgtgtgcgcgcgcgtgtgtgtgattgcattgaataagatgatgtgcaaagttggggattataacttcagacgaaataaatgaaatacacataactgaaacacttgtgtgcttgagagaaacactagccttgggaggagtgaagcatagttgatttttctttgatacctgtcatgggggagtttgataatttctatgcttacgtaatttgaatatttaaatcacatagcaattatctaattttcctctattctattgcttcttttgtgttataacattaggaatctagcttcttctgagttgttgtctagtagatactaaagttagttaa

SEQ ID NO: 23626 - DNA, 220 bp, Glycine max
taaacctcgctgtgtctgagagcttttttcaaaaactattgcacatgtaatggtggcattcttccacattattgtggaattggagtctaatcactaggaacaacctcaaaaattcctgatccttttgctatagaacaaggtatcccaacaaaaattaaaaattgatatgaggagaaatggttgctcatcattatggtcattgatacacgtggtgcacaag

SEQ ID NO: 23627 - DNA, 390 bp, Glycine max
agcttcttgttattgagtaattattacatgttctgaaaccaccacatgtttatgattccggtcaattttcacgttagttgaagtttattaattttctagtataaattgaaaatttaagttacgcattacgtaaagattgattatagacgcagttctagacaatacaataatttccccactatttgtcactatcataaacccatcactcattttttaatatggaaatagagaattttaaaggggttcacgtgagttacatacaagggaagatgtccaataaatgaaaggcaaagaatgtgtcacaagattccccactttctaccgagcatatgagagcaatattaggttcatgagagcaatagtcttaaataattcaacaatacacaaaag

SEQ ID NO: 23628 - DNA, 224 bp, Glycine max
caacacatgcacagtggccaaggatgcatgggagatcctgaaaaccactcatgaaggaacctccaaagtgaagatgtccagattgcaactattggccacaaaattcgaaaatctgaagatgaaggaggaagaatgtattcatgacttccacatgaacattcttgaaattgccaatgcttgcactgccttgggagaaaggatgacagatgaaaagctggtgagaa

SEQ ID NO: 23629 - DNA, 401 bp, Glycine max
agctttcaacaagagtctttacaaataaccatcatgaagcagagaactaacaaaactacccatcatatctcccaaaaccccatacccacgaaatttaagagagaaagaagtccacccaaacctgaaatttcgaagtcccactcgtagccacgcacttcacgactccaaaaatgccctcctttcgcgatttggagcagaaatgagcaccaaaggttgaagctttgtttggagcttcaatggagaatgagggagaaagaaaggcaacgtgaggaagagagagagctatctgaaaaaagtgtgggggctgagtgaagagagagaaaagctttttggttataaaataaagggtgttctctatgtctattattttattcaagctctgccatgtgtccctatttgag

SEQ ID NO: 23630 - DNA, 418 bp, Glycine max
  unsure at all n locations
tgtagaattcaccccaattccagtgtcctatgctgacttgctcccatatctacttgataattcaatggtagccataaccctagccaaggttcatcaacctccatttctccgagaatacgactcgaacgcaacgtgtgcttgtcacggagaagccccggggcgttccattgagcatggtagggctctgaagcgtaaggtgcaaggtctaattgatgcgggctggctgaaatttgaggagaattgcgtgtaaatcctgacattgacaagagatgccacacatggggcaattttgaaagctgttgttaggtgtccctaatgactcatcagggtttccaagtttatgccattattgtaaaccacagctacaatgttaaatganatggataaagttgatatctttgtccctcatcctctcaca

SEQ ID NO: 23631 - DNA, 394 bp, Glycine max
  unsure at all n locations
agtttgcattaattccaatcttattcctcactgaatgcagaatgaatcactaaatgggggtagaaagctttttgtggacaagcactctaaccttagggttcgtgatcttttgatgcatgtgtatttcaagttgaatggattatagtcttgtcaaaatttggatgtgctaattacatgtggtgcttgagtctaaacacaaacctatacgcatttggtaaggctaagtgtttttctttgagagatttctatcaccatgatacattcttaattttgacttgactacttgtccactntgcattntgtgatcatgtgttcatggattgcttgttaccttgaaaccattcttccattntccatctctcttaattttgtgcattgttaggatccattgaaa

SEQ ID NO: 23632 - DNA, 405 bp, Glycine max
ctcagcttaacgaagttctttccttaactatttttgcgcagtttactagaagaggatctaacccaaccctaaaatagcctctattcaaattgggtcctaccactcaaaccttggtattcccctttggttacctcttggtgggaagaaaggaatggaattaggagatcaaaggagaaaaataaaggtgttcgcctaccaataattagttaaaatgctcttggagggagaaaacaagtctcctatgtgtgtagaacttcaagcctctacctcaagagatgagagaatcttggagagaaagagggaaagaggatgtggggaaagaacactgtgtctcacgcttttgaagcttgtggggtgtgtttttgggaggtttcttgagctttttgtaaattgcctaaggttttc

SEQ ID NO: 23633 - DNA, 384 bp, Glycine max
agcttgacattaatatttatttcttttctggaggccatcaattgtttataatgagagtaacttacactattctatatcttctttgttggagttggtgggtcgaaactaaattaaagaataatagtggtctcaaaatatatattattatgcacaaaaaagaccaaactaaacgtgcaggtaaaggttgagtttaattatcataaagtgtttatatatagttggcctttgttggtcgattttgccagtgtcatataaactagtattaaggagctagaggcaatgggaaagagcaatgttctcgttgagggtggaactgggtatgttgggatgaaaatattgaatgcaagtttattacatggccatgaaacctatgttcttcaacgt

SEQ ID NO: 23634 - DNA, 415 bp, Glycine max
  unsure at all n locations
ttaaaatggataaaaggctcacattcactatcttttacntcatatttaactggtccaaatgaataataaagtcatctcgactcacagaaaatcatataagtctcatacaattaatatagaacctatatcctaatgtcacatcctatcagagcgtggtgttcccgtgtcctctagcatgaggttcttcatagtcatccatctattcatctgctcccccgaacacaagttcaagatcatcacaggatccaaacacaacaacacacagggagtgagttatcacattcctagctaatagagaaacaagacaattaaatatacatattatataaatgagataccacttgcttaaacatagctcatgttacttcgccacttagtcgnttcaaattcacttttcaattatcaatcacattac

SEQ ID NO: 23635 - DNA, 154 bp, Glycine max
  unsure at all n locations
catctgtgcggtatttcacaccgcatatggtgcactctcagtacaatctgctctgatgccgcatagttaagccagccccgacacccgccaacacccgctgacgcgaaccccttgcggncgnatnnaatataacttnnataatgtatgctatacg

SEQ ID NO: 23636 - DNA, 382 bp, Glycine max
agcttcgaaaaaatctacaagcttcgtatggtctgaaacaggtaaaagggcatggtataaggaaattgacagttattttctaaaaagaaggttttaagaagagtgaaaatgaagtcactttatatgtgaagtgataaaaaaatgaagtgcaactcattgtttccttatatgttgatgatttattttttatatatagggaatcaaattccttaaaccaattcaagaatagtggaaccttggagaatctttatgatagatacaattaatgtataagaaaatgatggagagctaccatgtcgaagatcaatacaataaatataaacaacatttgacagcttctagaaagagaaaacaatcaaaaggtaattggtgttaagtgggt

SEQ ID NO: 23637 - DNA, 374 bp, Glycine max
ctgaccaaaccccagcagcagttgtttccttagagacttgcctcagcaccttatctccgagactgaggataattgcactatgtgccttctacagtaatgctttcttatccccatcacccatcatcttttcaagtttggcttctccatcaagtgcttccaccaggccctgctgaacaagaagagttctcatcttcaatcgccatagcccgaaatcattttgccctgtgaatttttcaacctcatacttggctgagcccatttcttgaatcgaactcaaaattgctctatgctcaccgcaccaatttgttgtgccaagatcagattataattcacaaaagaatgagtttcttgtatgaacaagaataagcaaaatg

SEQ ID NO: 23638 - DNA, 382 bp, Glycine max
agtttgtaaacacaataggcaaaatcttctcttgttacagcatttgcacctcacaaccctgcctttatcatttctcttacattgatggcacgttaaggggccctcttcatcacactgataattgagaaacaaaaaacatgatctcaaatacaatgttgtatgtaaagacaaactcaaacatgcattcatatttgaatgataaatcatatcaccttggcctttctcctgttggcttttggctccatctcttgtttacagcccctaagaccatattttttctcagtgccagacatttcagattcagccatttcatcatatctctttctttttctactgggtctctgctcggaaaccccaccttccatggcggtagcatctaaca

SEQ ID NO: 23639 - DNA, 510 bp, Glycine max
  unsure at all n locations
cgacgctagtctttggattctgatnctgaanactgaaancnccgctgttctaaaaccactggacattttggagtctttttatcaattcatattttagttctcgcgtatccatctttggacgttctcgtctttccggcctttttatcagggaagatgcatacaatgatcctcccggtgctcgttacgatagaaagacagcggtgtctcttcaacttgagctatccgcaacagcatctggatacgctatacgtgcactggtgctaacttgatgacgggtctggctctaaatgctaggcgaagaatccgctgtgatatgttctttgcatcaccacagatgatgccacaccttggggcacaatctccaaatcctcatgtaggggaggtcctaaatgactcattcacgcgtgctcatacttgattccgttacatgtataaccatccacgtccaactgttcagatgaagatggtttgccctccatatatattgtccctcattcctattacaagccg

SEQ ID NO: 23640 - DNA, 383 bp, Glycine max
agctttcacttaaatcacccacccaaagaaaatcccttacaaccaaataaccacaacttcttaacggcataaagtgtaccacgacctcacgaaatggacccctatctatgtattggtatcaaccatcatctactcatacatgttaatctgtgaaactaacgtacaactcaaagatgaaagaaaaaaatgtaagttgttctttcactcacttgaggaaatttcaaagattgtgcttgtgtgaaacaatttatcttcgattcagtcaatgcattttaacaatttttatcttccttacaaaaataggaaataaaagaaacaattattattcaattgttgttacctgaaaatgatgcagagtcggaaaggacacagtagcctccgcg

SEQ ID NO: 23641 - DNA, 193 bp, Glycine max
gcgtagtccaccattttccctagtagaatactggaaatgtgtctactatcattgccatcgattttttcgtcattgaggtgccacttaagttgccaggttctctccacctttgggcgtattcttttgaaagaatcgtgccccctttttgcacatgttctgtagttgcaccctattcgaagacattattccgaca

SEQ ID NO: 23642 - DNA, 517 bp, Glycine max
  unsure at all n locations
agaagcagaaacgttgancctttgatttgatncctttgagacatacnaangccaatngggcgcaatgcaccccgggaccctgggaacccnactttccggcccgcaggctcagcaagtcttatcgtcgataataaagagagactccttgtggagaacactaactcacgcaacctaaatcgagaccatgtgtgttccatataatataccatctcagaacggcagaatctgatagtgtgatctctaagccagacatgaagaactcactcggtacaattgtgaaatgtgatcaaggtgatctatcaggcacgcttggattcatgatgatcatgagtatccacgcactcataagtattatcagtccacaggcttactaaaccatctgcatctgaaacatgaagtggatctaacatgcaaccaatatgtcataaagaacaaagttagtacggatagcctcataccacaagaaacaattagtgatgcacgagttacatacaatgctcttaacatcactgacgcg

SEQ ID NO: 23643 - DNA, 362 bp, Glycine max
atctttggtctgtgtggatcttcacagaacaaaatctctcaaactctctgaatcttggaccttactctctctagaactctctagacatgcagaagcttcaagataaggccaaactccctcaaaaatctgatttcaggcttaaataggtggctttgttcgtgctcgtgcgcttatcacaattctgaaccgcttaacgcgcattagtgaatatcggcttagggcggcttttctcgctcagcggatggactgaagcggtgcgcttagtgggatggcccttagctcaacgaacaagcacaatctatccatcgtccatattcttcctcgcgcttatacgatgaatgttgcgctcagctaatggctcg

SEQ ID NO: 23644 - DNA, 374 bp, Glycine max
tgcttctattatctccccttttaggatgatgacaatcctgaaagcaagaaacacatacacattctttgtcctagtcgatcactcacttaattctccatattctcccttttttgagtttaagcttcacttgaaattaagttatttaattatgtgagttctggatttaattcctattttctctccgcctttggcatcaacaagaagccaaagtgggtaacaattataaaacatacataaatgactaatcatacacaagacattgattgaaaaatctaaaccaatcatgaagcataaacatgaataacccatattaatatataaaccacatagtcatataacataattcataccaaagtagtcatactaagcaaata

SEQ ID NO: 23645 - DNA, 375 bp, Glycine max
  unsure at all n locations
agcttagaaagtccttcggattcaattttgtgtgttcattgttgtataacatgagatgaaatgcaaaggttgggacttatgttagttttttatgatggaatgagcctaaacacttgagcatgagtgaaacaatgactgtgaggtttggttaatgatccttccttgatttctgccatccatactagcttatttcagttgtgactataatgtgcatgattctatctttgaaaaactgcatgtttgtgaaaattaattgattgaagcagtccatgatattcagttcatatggttgaattttgttttctgtgaagcaaacaccatttttgagtgatcactgtagctngtcacttgaggacaagtgaactgttctttctt

SEQ ID NO: 23646 - DNA, 395 bp, Glycine max
  unsure at all n locations
tccatcaagtggtaatcagagcacaagagcttcaagtatgtgctccttaaacctccattaattttttgctttaccttctcttccattgttgtttcttcatttttctccatgtatctgctcacatgtcttgtgctaaattttgttaacatgattcttgagagtttccaccgattaaacttgctataaaagctagatttgattttctgtggttcaaatttcttgttcttgttcttgaaccatgaattgtgttgagtttaagttcctttgagttttgtcattttttgtggctgaaacctaaaccataaaattcttacaaaaatattaaagtagaagaaaacctcaaaaatctagagtgacttgttcacctatcngtagtttgtcatagaagtcatgtc

SEQ ID NO: 23647 - DNA, 380 bp, Glycine max
agcttcttattaataataaaagaactcctttggagaacattaagcaagcaacaaatttaaaccatgtttttccatatatatacatctagaaagtagaaaagaagtatgatattaagtagaaagaaaaatcatcggaaaataagaaatatatcaaaggatcaacaggcaccttgtcttcatgatgatcataagtagcaacacattcattagtttttacagtccacagctttactaaaccatcagcacctgaaacattaagttgatcaaacatgcaaccaaaatgttataaagaacaaaatcagctacagatagcctcataccacaagaaacaatttgtgttccacgagtaacaaacaatgctcttaacacacttgacgtgt

SEQ ID NO: 23648 - DNA, 391 bp, Glycine max
ctcagcttgttgcttgtttagagcattaacacctccctctctcaacagtggaaggataacatgctactgcaatcactgacctcaatggcctgatgagcctagttgtttggatcagcacttcttttgttcaacttttagattatttttttttatcattcagaaagagaaatcatttaaatttgtttctaataagttttgctatgtgattgaaaattttaattataaactctcgttgagatttgaataaatatgtctccagcagcaatccacttatacaactaaagggttatggatttggtgaaattgcttaagttgatttccttaatgcctcttaagtcttatcacatcagatttgaagtgtttggatttgcaacatccattagtaaaaaac

SEQ ID NO: 23649 - DNA, 385 bp, Glycine max
  unsure at all n locations
agcttacttgtattaatataattagcacattatcaagtactcattggatttaggagattcaaaggattgtaatttctcatggttcattgatgtttttttcttttgtctaatgttattttttcattcagcaattgtgcatctaattggattttaatatctagtgtcaaacattgaacgaagaagaaatatttgaagttcagacagcttatcactttttcctttaggttggatacatgtaagtggtccactaatgttggttgttacttattcattattttaattatattcatgagtaaatgttattcttccctgngtggtgactgcaaaaaacttaatatgaagcattgatttttcggcaaaactcacttggttagaactatcctat

SEQ ID NO: 23650 - DNA, 408 bp, Glycine max
ctgaaccattatatcaataaacacatgttgagttttatttagaaaattagagtttatctcttttatcttagtgagagtgattctcctaaattcttgagtgattcaagaacaccttggctgtatcaaaggactttcacaacctttgtgtgttgccctcgctggaaagagtgattctttccttcctttcatcatcacccttgttctttcaaaccacaattccagaaaatccacctctgcccagaattatctcgtggccataactcccattttacgcactcaaattaagtgattcttgagcctaaattgaatttcaaaacgagacctttcacctcgttttggaatcacctcatttggagccctgttgcttcagagattgccatttctatatttctgtccagccaccactta

SEQ ID NO: 23651 - DNA, 280 bp, Glycine max
  unsure at all n locations
agtttgccgacgttcttaccgctgcaagatgctgaaagggtggcggcagctgctatactcaatgagaatgctaataatgatatacttgtgaggagtgctgtcttgtgttgtagactgtataagttataatgtataagtctttctcacgtatattactgctctagttttgttgtaaagactctacttatcctatgctatggatntctttggttataacttaatcttgtgtttcaatcttttataatgtcttatttgcaatctttcgagatcccataatgac

SEQ ID NO: 23652 - DNA, 414 bp, Glycine max
cttgagacattgtcattagtgaaaaccacgtagtcgtttcctaactgacttttaaaattaccataataatgacttttggtacatagtgatgaccaaatatttggtcgtcacttttcattgataatcttgtagaggatgcacttgaattactcattgttgtatataaatttattttaaacagaaaacgaaaaaaaatatattcaagagtttatattttttataagtaacaaaattactaaagaatatcttttatctaaaaagtatatttgaatggtaatttaactgttactgtctatttacttttcataaattatatatgataatattttccatagaagttaaagaacgactatattatcattatttaaatatttatcatagagaataaaaaatgtttcacataatttctaatga

SEQ ID NO: 23653 - DNA, 381 bp, Glycine max
  unsure at all n locations
agcttgtagtgagcttcataacaaggaaagggaaacatggctcaaaagggctatcaaaggaattaattcaaggtaagtccatttggctaggagcttataagaacaaaattgcctaaatcatttccaaatatgcatgtgaattangaagcatcaacaagaatcaagccaagactattgtgcaagcaatcaatggggcaaaacacaccaaatgattatgatgatggatggctcanattcttacaaaggtaaactcatcactttcaaattgagctttcaaaactatcatgacatgtagaggaaaagcaaggatttcaaatcgcataatgtcaagatttttgttaaanaaacaattacccattccttgaacatatcctctaattc

SEQ ID NO: 23654 - DNA, 406 bp, Glycine max
ttacaatcaatctgtctactgactaacaattgttattgcaagttcacattcctgttctttctttgttcgacatgcacacttgctcaacttcgtgaaaggaaacacgaatattatcttaagcatgcattcaatttaaaacaaagtcacacacccatttttcacaaaaagataaaagtgtttcactgccatgtcatctaaaataagttaaactgttcaaaatgcttccggataagcatactaactattcatatataaaactagtagtatatataaacatataggaaatattatatgaaagccaaaatcataataataacccaaaaagcaaaaagtgacattaagaatcacaatgtcacaagtgtttagactggagaatcggagagagtaatagcttctacagatgatg

SEQ ID NO: 23655 - DNA, 390 bp, Glycine max
agcttgacatttatagctacccctatgccttgtttcattttaaaagattaaatcccataagaaaatgaagtgaataattcaaaataaatatttacccattttttactatgaaatcctcaaaccattctagttatataataataacgaaaaaataatatattttggcttaagatttagaaaatgttaaaaagttgatttaaacttataaaagtgacttataatttttaaatttggttttagtactgttttaataaattttatatcatatttatgatttaaaattgtatataatatgaatttattaataagtattttatttaagttatttatttaatcattcccttcaaaacagcttgtactttataaagctattgggttatgaaattgctc

SEQ ID NO: 23656 - DNA, 414 bp, Glycine max
tgtactttcaagctatgattttaatgcggggatattcttgatgttgtaccaggtaattttgatttggtgtactttgaatcttttttacccttttgtgtattgtgtagtgatgtgggagttgcttgaactggattggttctgacacttttttgtgtggatgcagaatttaatttcagttgctattgtttccgtgttgagccttctgggtttagtttcaactgagccgctgacgtggagattgatcaaggtctggttgcctgtgaattttatatttgttggaatgctcgttacaagcatgtttaggtatgcagtcttctacattgtggctattgttatgttttcattctctcttttagttggaatatattgactgatggtcttaccaaaggggatggttgtggcagatgctttgtg

SEQ ID NO: 23657 - DNA, 374 bp, Glycine max
  unsure at all n locations
agtttataagacaatcaagaagaagaataggtaggggcatagagtagttcaactatctttttggttctcagaagcaacatttgcaaacctcctgaagcaataacaacactcaattaatttcatttcaacatacgctaaaaatattaaaattcacaatataaagtccttaccttagaaaggtgtttacagttggatttcccatctcaaactttaaggtcgtgagcatgtcagcttccatctttacaacctatatataaccagttaccatgtaaacaaaagtgacggggaaagatccaacaagtaaaaaaccataacataatccggtatcacatcataaataagagaatactanagcatatctatttacctctgcc

SEQ ID NO: 23658 - DNA, 394 bp, Glycine max
tctgccttttctatttctgtgacctgaactgtatttgtcttcttctctttatccagatccttaaactgcagtgattgtctgtagtcacttgtggcagtgacgaacactacaagcaatatgcttgcaacaataccaattccatcctgtgcacccttgggccacccttccattattataccaaccaccaaagagaccaaggcacagacagcaagtatcatgagggttgtatcttgaagggattcccatacataaacccaaaatccacgggctggactttcagcgaatttattaactccataaatttcttttctctgattcaccaagtgctcagatgttgatataccatcatcaactgaggtattgagtttgtttgtgatagcatcaaccccaccat

SEQ ID NO: 23659 - DNA, 373 bp, Glycine max
agcttggacaatcctcaccttacaagccaattgtgtagaattgagttagatcctaatcccaaatactaagatacaccataactaacaactgttctttgatgaaaaatatcataatgttcacacacatctcttagatggtccatgcctcataatgatgtagtcaaattaaatgtagatgacagctgcattaatgggggaaagcttggaagagatgtaattagatcaagtaatggtgattggtttgatgacttcacagctttctatgaccaaggtgacattcttttagcataatttcttgctacgagagacaggctcaatatttgcttggataatgggttgcaaggtgttgatatgccagttggattcttggatg

SEQ ID NO: 23660 - DNA, 316 bp, Glycine max
cttttgggaattcttttggaatatttaaggacttattacacattcctctcagaatagacatattgtatactgaaatcagacatatgaatcaaaatttatgcctagtcaaagaaatcaacaagaacacgatgttgttgtatatgtatacaacaaaattgggtttccattgcatatatatggggtggaaaaagtagaagggaacacatgatttcattatatactcttacaacataattgtgtttccattgcatatatttggggtggaaaaaatgcaacagacagacaactttattgtatacttttatgataaaatcgt

SEQ ID NO: 23661 - DNA, 381 bp, Glycine max
atcttataatatatcgatacgctcgaaattaaacatcgaaaactctcgtgaaattcaaatggtcataacttttcacacggatgtccgattcaggcaaatcacatatcgagtcgctcaaaactgaacaacggaagctcttgagaaattcaaatggtcataacttttcacacggatgttagattaaggcgcatcacatataaagacgctcgaaaatgaacaacggtagctctcgagaaattcaaatggtcatcacttttcacactgaggtccgattcaggcttataatatattgatatgctcgaaattaaacatcggaagctctcgagatattcaaatggtcataatttttcacatggatgtccgattcgagcgcataatatg

SEQ ID NO: 23662 - DNA, 403 bp, Glycine max
tgaatcggacatccgtgtgaaaagttatgaccatttgaatttctcaagagcttccgttgttcaatttcgagcctctcgacatattatgcgcccgaatcggacatcggtgttaaaagtcatgatcatttgaatttctcgagagtttccgatgtttaatttcgagcgtattgatatattgtaaccctgaatcggacctgagtgtgacaagttatgaccatttgaatttgacgagagcttccgttgttcaatttcgaatatcactatatgtgatgcgcctaaatcggacatccgtatgaaaagttatgaccatttgaatttctcaacagctgtcgttggacaattctgagtgtctcgatatgtgatttgcctgaattggacatgcgtgtgaaaagtatgaccattt

SEQ ID NO: 23663 - DNA, 382 bp, Glycine max
agcttccacagggatatctatcgtgatacagtaacttgaaacaatcattaagcttttccataatttctttagttcactgtgacctatgcatatatttatatctcaaataattcacacactttcattagtgggagatgaattatttgcacaatccttatctaccttttggcagcaccataagttgctttagccaaataagtgagcaagcgctatataaatcatgcaaattaacccgataccttaattatttatctgttgtatataaaagttggggcgtgaattttttaaatgttacctatatttatgaacttttgtcgctgagagttcgtttgatggtcagaataggacttgataagataaaataattatcatatcaagttat

SEQ ID NO: 23664 - DNA, 374 bp, Glycine max
tattctcctttaactgttttgcctttcgtcgcttacccaaaaagacttttgcctctcatcgctgacccaaaaagatcgctgtctcgctttcgcctttgtctctgtcacaaccttcctatgctgacaaaatttttggtggtttaagcgagattttgtgttgatgttgtttgatttatatcatgctatattttttattttttcagatctaaaagagattggatgagataataatttttttagttgtttttttaaataaaataaagatagtagcactttttaaccgtcaacatttaaagttaattattttaaaagatttaatgtcattattaatctattatattttgaaattattttggtttgatatatgaagtttt

SEQ ID NO: 23665 - DNA, 369 bp, Glycine max
tgtttcaatcttgtttggtatatgagatttctgtccatacaaggaatcaactcttataatcgatcatcacagaccttaaaaaagttaaatgaagagtataaacatagtctgaagggtgtcaaaagtagtaaaaactagaaacttacatgaacggaaaactaataactttatcatttcaaaatcttaatttaactcactggaatgctctttggacaacactgccctctcctccaacaactgtggaggaagattcaccatcatctatgtcccctcccataccagagtggctcttagatttatcaccatacactacagacgatgaatcactattctgagaatataaatagataaatccaccaactatcacca

SEQ ID NO: 23666 - DNA, 356 bp, Glycine max
tataaaactcagcttgatgtctaccaaatttttattgtaagccgagctgtgcctttgaaaagaaccccatgataaaagcatatgacaggaaattagtcaagtcttacatattcaactcaagccgaactcaaacttaataaaatttgagttgcctcggctaatttatggagtataggatgagactgattggatgcaacaaaaaaataacctttaaagaatcgagccctatgaaatgctcatttcctaaaaagatgtgtaattaaaattaggagcccgtaattttaacattggttgccctctaccctttgatatcctatcgttaaaaaaagttgtccttcatggccaataaaaaatgt

SEQ ID NO: 23667 - DNA, 374 bp, Glycine max
agcttgaccggatgtaagatacatcttcttcaaccttaatcattcttgactccatttcattgaagcgcatatccacttgcagttccaaagtatcaaacctctcaccaacaaaggtttgaagaccatcaaacctttccaatatcttagaaagaagagatgaatcttctccctcatgtccttcttcaccaacatttctagcacccttctttatccaagatccatcatgctctttaacatatccaaaggatgctatgactgaagcgcctataaggaattatctcttgattagaacataaggttcagaatcaatagggatgttgaagtgttgaaggaaaagggtaacaagatgaggataatgtaatggcgcattcaat

SEQ ID NO: 23668 - DNA, 384 bp, Glycine max
tgcatttttaattgcgaaagccccactccatcatttggattagtacctgacatctcaaacaaacaaatcaaacgtaacaagacaattatagttgctgtttgaatacctcacccactcaagtgtatcacacaatgatggcttttctctaatgaaacactctttccttttaccactctaattccccttgagttcttaagcaattcaagagattatggccacaacaaagaacaattcaccaatatgtgtaaggtaaggctatagagacaaggaaaaggttaaccaagaaaaggctaacaatgtttttaggcacaaatgaaggaaataaaattcagaatctaggaattcaagtaacaatcctccatgcaaccaatatattaccttaaa

SEQ ID NO: 23669 - DNA, 378 bp, Glycine max
  unsure at all n locations
agcttcaactcttaaagtaccaccctaacaccctttccaaggaccactccctaactccaaaccccatgtgtctcttccctaccttttgtaacaccccatttttttcgtaaaataaattaaaaaggattatatttaaaaataaagagttttaaaaaaataatgaagattttggaattaaataaataaagaagcaaataaaataaatatatgttattaaaaaatgttttatttattcatttgataggtagtaaaatagagtttatttttataaaatgataaaatcactaccacaaaaatgatcttctacgatgcacgtnttatgatggttctacaaaaactgattgcataagtaaagtggtgaccattttgtaaataact

SEQ ID NO: 23670 - DNA, 385 bp, Glycine max
tatcttgtttctaaccaagccctctggtatggtaatcgattacaaggaagagtaatcaagtatcaaaccctaaaacatagttttttctataaaaacttactatatggtactcataaaacctacacactcattgtaactattatcaacaacaattaaagatccaaaatagacattgaaaaacaagcatcataaacttcttaactaccatcatcaagcacaatcaaaaatacaaagaccatcatcaaaacacaaactaagacaatctacgacgatcattaatcttgaaacagctattaacatgactatccgaactcaatggtagacgatcgttaaaccgcaattaataataaccatcagaaacaaactcagatataaagaaagaaaa

SEQ ID NO: 23671 - DNA, 432 bp, Glycine max
  unsure at all n locations
taatcttagatcgaagtgtgaganttaagttttaagtgaatctttcttgtgagaagaagaactgttatctgcacagttgaatcacagacccattttctataaagtccagtagtagctggaagaagataaatctagtggtgtagttggtctagcagatgctaggtttgaagtccaatgaggaactaataggttattgaaatccattagtttgctagtctaattgtgaattggttgtgttagtgaaatctcatctttaagggtggaaactatgcctagcccaagattggggtgaatcaatataaaaatcctttgtgcactctttcattttcctttcctttcctttgctttggacaaatctgaaaactatctttgaccaaatcattaaatattgtatcttaccaaacttaacaacagaaccaaacattgttttac

SEQ ID NO: 23672 - DNA, 247 bp, Glycine max
  unsure at all n locations
tcgggctggctgagagataattatgaccaagtttactttagccattnctagggtaaaatggggtgttgaggatgtaaattttcgaccagcggaattttatgtgtaaatctagtttgagcaagtctaaattgatgttatagacctgggtgacgagagagtttgctccaaacttatcccattctcaatttcgcttcttataccttgataatccattaaattgatgggttttggatacctagattttgtg

SEQ ID NO: 23673 - DNA, 560 bp, Glycine max
  unsure at all n locations
agacattgagtttgatacgtagnattcactgngacactacacnaatacttagagcnaactatgcgncacagnaananagggaananggagatcttancgactatttgatttatncttctgttacagtccactacaagatagagccggactcgaagggattatggcgtatgataccatctattgctcactcattaagagggtntgttcattgcacactgcatccacatattcggaatgtgtatgttccattgatctctctttaagatcacattatccctcgcgcacgcgataggcaatgcaaggcataacgacaatttaacttcataaagcaaatcacaaggtcaaacgtctcaatcgtatggagtaggacaataaccttaattaaacattcaagatccttatattctcgtcttcacagtcttaaactagataataacacgtgggtatactctttatttctcaacgcaattaacctctatttaaaatatacgtgcggagattttcaaaattcacttgatattcgtataaagttgggtaattaatgtatttcctcacacacn

SEQ ID NO: 23674 - DNA, 373 bp, Glycine max
tacttctacgagataatgaggtgtcttatatcataaaagttcgctatatttaaaagcatgttatctcttaagtgttacttgggtaatatggaatctatttgatacaacatggaattctatactcacgaaatatcttctttcacccatgatgccatctaccttattattgaaattaaaaaaagcatctatacatgcgtttagttgtaaacagttctaatctttattagttttgaaatatacaccaatgagccatccaaaattttgggtcaataaaataactatatctaaatatacttatcttataattactattacaactactactcttgtcattaaaataattacccatctggcttgcgaatttgacactata

SEQ ID NO: 23675 - DNA, 133 bp, Glycine max
gatgagtatgctcaaatatatgcggagaaagaggctacaggaagggtgatcgactctctacaccaagaggccaccatggggatggaccggattgctcataccttgaacgggagtcaagatcttccccgcttgt

SEQ ID NO: 23676 - DNA, 435 bp, Glycine max
  unsure at all n locations
tcaacgttcattntcgagcgtctcgataagtttctgtattctatcagacatccgagaaaaaaggtgttgtcgtttgaattagctcagaagttcaacattcaatttcgagcgtctcgatatgttacgggactcaatcagacatccgagtaaaaagtcattgtcgtttgtattggctcagagcttcaacattcaatttcgagcgtctcgatatattacgagcctcaatcagacatccgagtaaaaatttatggtcgtttgtattggctccgagcttcaacgttcattttcgagcgtctcgattagttacgggactcaatcagacatccgagagaaaagttattgtcggttgaattagctcagacgttcaacattcaatttcgagcgtcttgatatgttacgggacttaatcagacattcgagtaaaaagtattgtcg

SEQ ID NO: 23677 - DNA, 300 bp, Glycine max
caaaatactgaatatataaactaaatgttctggagaaatagatgtacttaagtaaaacataaggcgaaatacatcggtgtgaatatcaaatataataatagatctacaatctatgaagaatggtggtgtgaagggtcgaacgcatcgacgaagataactcacatcctcctcaagctgagtgatgtgggtatccattccttcatagcgagcatcaatggcatcgattcggtcattccaggattcaaattgttaccaacataggtgcggaggtctcagaactcataaagaacttcatgcatg

SEQ ID NO: 23678 - DNA, 409 bp, Glycine max
  unsure at all n locations
acagtntacttatagtcatccgcgaaactctttnttttcttttatggaacatcaacaatggtggggggaatgtcctccaaattaatcaatgttattaatatagataatgaccaaaactcagataatgcaactgaggtaggatcagtatcggaaaaagacataaattcaataaattccaaacactggaaaacagcctccatactatattatcaatgaccaactacccctgaccttctactataagaaaatgtgagaataacttcaaatttttttagtgcaaataacatctatgagtggaatatagatgcccaaatggagtacaatatcatgaataccctccaatatatgaccatggtagccacaacctaccaaacatcccatgagtgttcagaagacacaattattgata

SEQ ID NO: 23679 - DNA, 321 bp, Glycine max
ttataatcatcaatcatccttgaatcatctatctttcaaactttttcaacatcatctctcaaacatctttcaatcaatctttcaatatctttctacagaattctatgattcattcctcttcatccttctaaaagctttttatcaacactttctcttccaagaaaagtactttgttcaaaaactcgtgttattcatctttttcattctcttatccctttgccaaaagaacgaaagactaaccgactgatatctttgtgatcttttttcccttacaagaattcaaagcactaaccgcctgaatatctttgattcttccttccc

SEQ ID NO: 23680 - DNA, 403 bp, Glycine max
  unsure at all n locations
ctccgctttactatttatggcccttcatcttatttgtttgttgtctctaaaggaaagtgtttacttgatctcacatctgaagttttgatcgtgaacattaatgatttcattaaatgtgcgtccttcttcatgctcgaaaaccactattgtttgctntcgtgtagagcatctacaacaaaaaaccacttattttgagacaaagcaagtctatcacggaaagtgtgtcttttgatgtgttgacaacttttaaatttgatcttatagattcgacatatcctaaagaatgcttggagacagttttacaaaagaatctcaatacatagtataaatgaagcttcatgtatctttatgttgatcaaatatgactactcatgctttgccaacttagaccatgatacaacat

SEQ ID NO: 23681 - DNA, 317 bp, Glycine max
ggcagcatattcacacagcaataactattctctcggtttttggattgagtctcgccatatatcgagacgctcgaaagtaaaaatggtgaacccgatcaaattcaaacgacaatgactttttacactgatgtctgattgaggcctatcatatattgagaggcgcaaaattaaaaatggaagctccctgcacattcagacgacgatgactttttattcttggattagcgattgagtacctttatatatcgagaggctcgaaatgtgtaatcgaaagctccgatcaaattctaacaacaataaggatttactcggatgtc

SEQ ID NO: 23682 - DNA, 446 bp, Glycine max
  unsure at all n locations
tcaggaacacgtaatggaactaatgagactgaatcatcatgtggagaatgataaganaaagaaaggaagtttgaaccatagacaataaaatctagcctctatagcaagtttaatcgggggaaactctaaagaatcatgttaacaacatttagcacaagacatgtgaggagatacatggagaaaaatgaagaaacaacaatgaaagagaaggtaaagcaaaaaattaatggaggtttaaggagcacctacttgaagctcttatgctctgataccacttgatggaagcttgcttgtggagcttctatggaggctggatctttgagctttaatgaggtcctttaatggtgattttccaccatggagatgcagcggaagacaaagaagaagaggtaagaggtggcgccatccactanggaataagccatggaagaaggagcttcaccacc

SEQ ID NO: 23683 - DNA, 440 bp, Glycine max
  unsure at all n locations
tgtccttgttttagacatgattggtacatgatttgtgtcttgtaggattcaatttgggcaaaattggatgagggaaagagtggttttcgaaatctgcactttatgcagaattttgttgttgaaatgtgcagcagaatcttgtataagtgcagaaaaatgcttgtgtatggctggttgtgaaaaggatagtacatatggggttctggacatttggtagcagatcccaacggtcataatgtagacttatgtactagagacttccagtaaaatttttgagtcaatccaacggttaacgaattggaacgaaggaaatgttactggggtatttgtatgtgaaaagctatgattntgagttgtgttttgggcagagttttctgcctttgccctgttttgcttggttttgttagtccatgatgattggatgtggactcacctggatg

SEQ ID NO: 23684 - DNA, 434 bp, Glycine max
  unsure at all n locations
tgatgttacgctaagtctcgcatctcangctaagcgcatattgcagaaagatttttggtgttgcagaaagcgctaagcgccgcctgtcgcgctaagccccaaatgcttacgggattttacaacttcaagttgggcttagcacgaggctaggctaaatgctagtgttttaaacttaaacatcacgttggcacgctaagcgcgccatacaaaattcagtttttaaaaagcaaaggcagaggcacttgggtccctacccttgcacccaaacctctccaccttctcatctctaagcattcttttgctttctattgtgtgtgtactacttctctgcatcatttntgcttcatttcaaagacaatccaagtaacttagcatacttctattttttacttttcatgcttcaaaccttangatagttgatttatggttttcgt

SEQ ID NO: 23685 - DNA, 424 bp, Glycine max
  unsure at all n locations
gatccaacattgaatactgaaagtgaacagcaatcttggttttatgattgttgcagcattttatgaaacaatctgacttctgaaatactatttatctagtgcttcatgattgttgcatgtatgtattaataagtaatcttcctttgttttaggtggaacgatctcttctagtgacaggctctgggtatgatcatgatgatgcatgggctacgaacatatacttattcaaagaatttaccgatgtcagcagggtatttgtctganatctattaaattgcacctcatttctctgccttccacttcatattcttgactttgatgtttagggtgtaagacgacttggcgcatctgccgtggacatgtgtcatgttgcattgngaattgtagaagcttatcgcgaatatcgtctaaagccatgggatat

SEQ ID NO: 23686 - DNA, 444 bp, Glycine max
  unsure at all n locations
ccgcataatttccttcagattgagctgacattcgtttctgtcgtcattcggttcaaagaagctgcgctccagaaccgtacgtgagattttcatctcatacggctcctcccttatgtgtgtaatgataaaaatacatagaatcaaaaaagattgcagtattctcattattaactgaacagggctagtgtttttacaaaaaaatatctagccaaccttcctgtaaaaaatgatttcttaacattaagtatgttggtactggataaaaaaaacagtaactccaacaatttctttgtcctcaacgctgcttaatttcgcggaattagtcacctcaataatcttcgatggttatatgggtatccaaaatatgaacgagatggatatttattgtcccaaccattcttgtttgtcgcaatctcgataagacatggatatctatctctctan

SEQ ID NO: 23687 - DNA, 426 bp, Glycine max
  unsure at all n locations
tgcagcattggacatcaacccaacttcaagaccatatttgctttaataccatattacaaatgaaccaaacttaactcaacctcaaagctaactcaaggggagaggattacccagtccttaaaagttaaaacgaaaattttgcccccattcctatagctgattcaaattctgttaaaactgcactgacacttgtaatatttcattcataaaaaaatagtcattgacatccactcancatgctgtttggggaaggctcatcaattgccttccgtgtcatgattgtcatctactgctatttacccttttttaacttatatttactgatcttacggactagctcctatgttatcatctggtggaatctcagaccatgtaacttatgctgatgcctgcacgcacataaagtggatttatgtactccattct

SEQ ID NO: 23688 - DNA, 415 bp, Glycine max
  unsure at all n locations
ngaanatgcatgtgggtacctattntgaatctcctatgctgtctctacatacataaaacagtcccaccatcccaattttgcaaaaccatattcatatatcattggggcatttcaccgagcacttggtgggcgcacgtttggacataaattgcaagagaatgagggcaatgtggcatgccccattgcttcagaacacaacataggcctaaggccttctcattcaaatccttaactcaagaaatcaagcataaaaacaacccaaaactgccccacaaatataagcacgttctcacaatttagagcaccaaaagatgaagaaaatactccaatgggaagcaaaaaactcaaggattggatacttacttgttggagtgagtagaaacaccaaanatgaaagcaaaatgcaaccaaaagt

SEQ ID NO: 23689 - DNA, 432 bp, Glycine max
  unsure at all n locations
tattcanaactttcttgtttaatatttgcatgatattttcttcatgcttgctcgttttaagtgcattntatttgagaaatttatttatttattttattaaagaaagtctgaagactgaaagtgaacagagaaatatatatcatggcagaacgagaagtttttgaaggacgcatccggttaaatttatttcatatatataattgaaactctttttacaagtttagaaagtttggagtccagcacgataaagcagtgtttaatttggatcttgtttagttaaaaaaatggtttttttaatttaaaatttattttaaagttgaagttaaaaaaaattatttaaaatttgaaactattatttaacttattaaatttataaattgtacattttaaaagtggtttttaattaatttttcttaagtagtttatttttag

SEQ ID NO: 23690 - DNA, 428 bp, Glycine max
  unsure at all n locations
gcttgctggaagatcctcngttctctcttcttggtatgttggaaatttccatcctaggtcaaggtaatggccaaaaagttgatgtttggctcaaaaaagcctgcaaatggcgggacatgatgtatgttggaatatctgtttagcaaatggctcacaaatgaaggaatgcccaaatcacttccatgaaacacatattatgataataagaaattcatgcaaaattaatcattgcacacatccatgtggacactcgaatataaggctttgtgaccatgcaaacactaaggcttagggtttgtttccccatttagatcaaaccagtgtttcaacgattgctctttttatcaagtcatacaaacatccgagtccactttggcattcggaataatctctcgttgcgttcaccctctangtgtacatttcttttt

SEQ ID NO: 23691 - DNA, 437 bp, Glycine max
tctgtgacattttcgtgatcaaatccgtggactttcttcatcgctcttcattcgttcttcatcgtttatcgatcttcaaccggttagttttcgattttgaagctttaaattcattctatgcacccttaagggtccattcttgctttgtatgctttcatcttcattcttctactttcggtattcttttctttcattttaagcgagtttcaaccgaacgtttaagtcataatcgcacttaatcaatgtttaaatgaatttcaaccgatcgtttgtgttgtaatctcgtttaatcgcctttaaaataaaattcaaccgatcgttcatgtcgtaacctcggttaatcatcaaaaaggcaagtttcataccagacatttactttgaaaatgagttgggaaataaccaagtgaaactaaggctaatatcaactcacaaatcaa

SEQ ID NO: 23692 - DNA, 397 bp, Glycine max
  unsure at all n locations
ctataaaactccgctttatatagctgaccatttatcaataaactcagtgngggctattcacaaagtagagtgatctcttttatcttagtgagagcgattctcctaaattcttgagtgattcaagaacaccctgtctgtatcaaaggactttcacaacctttgtgtgttgccctcgctggaaagagtgattctttccttcctatcatctccacccttgttctttcaaaccacaattccagagaatccacctctgcccaaaattatctcgtgaccatgactcccatttcacacactcaaattaagtgattcttgatcctaaattgaatttcaaaacgagatctttcacctcgttttggaatcacctcatttggagccctgtagcttccgttattgccat

SEQ ID NO: 23693 - DNA, 396 bp, Glycine max
  unsure at all n locations
gagtgttagattacatttatctatacattatcttttatttattattacataaaaacatgtgatgctgattgatatgtaattacctaataatcacgaattgattgatatgtaaccagtattgattctgatttctccattataaataaagatgagattcaagacacacaacattacaataaaacactgttatagtccccaaaagtgtcaactttntaacaaattcacactaccattttgtcaactagcaaacaatttcatccctagaatgaccaataatnngtataaatgaaaactttcataaccaaagcaacacaagatgccactttctgaatcaacttttatagtatcaactaacatcataacagagcacgaaaaaatatcactgaaggcttatat

SEQ ID NO: 23694 - DNA, 220 bp, Glycine max
ccttgcgtagccgctcttgctgctcagaaaatcccaataactaatccctcttattactagctattttgaattctttagttcctgaatgtacaaccttcaaattgttgctcgttcccctctttgagaacgaggaggatcttcataggacttcatctagctgatgtttatcgccaatttcatcatccaccacccttttcttctgtgccttctctcgtttgtt

SEQ ID NO: 23695 - DNA, 421 bp, Glycine max
  unsure at all n locations
tagatgtatgcaattntggctgcttaagaagcaagtggtcaatgattaattagctctaagtgctcagtgtatgtgggtttcgtttctcgtttgttttgattaataaaagtagcaaactggtttgaatttgcggttataagacaattaggtaagtatcctctcttaatgaactgtgtgagactgtgacgtatgtagtcactcaccactactccgatgagtagtccccggtaaattattggcacttttgctggcttagctccctttgtcccttgtctgccagttaatgtagcctataaaaagaatataagacaaatttaaaaagatagttaanaacaaaaaatatttactagttgtaatttaatatacggcaactaatattttagactgcctttatataattagaagttatattagcaacatg

SEQ ID NO: 23696 - DNA, 419 bp, Glycine max
ctacaaattcaaatataattctgaaatttcttcacaataattatgataaaaaaattgtaaaaaggtttgcacggtccattatcatatgcgcagggtggcaaatctacaaatttgcactatggaaaacccatgtgacccaagctcttgttagccactttaatagcctatatcacaaaatggtatataagccaatgagccaaatgtgttctaagaaatgtgagactttgccttttgtaatacccatcaaaactacaacaatcccccacatattacaaaagtcttcaaaaatattttcaaaaggtttaaaaaggataaaagaagaggaaagaaagtgtcggacctggtgtaataagctatgtgaaccattcttttactggtaggacttaacacatagcgtagttggtgtggcaagctatatg

SEQ ID NO: 23697 - DNA, 438 bp, Glycine max
  unsure at all n locations
agccacccagctcgcccaggcgagccaggtttcctagtaggtccaagtgcgcttggtttctatttgcaccccccatttactaaatacaccacttcctttntttgctgattcttttttcgtaacgttatgaaactttacgaattttgtaacgatacttgttttctttccgtaatgtcacggaaccttatgtattatgtattcatccctttttgggcttccggaaagttacgaaacctcacgaattgtgcaacaatgcttccttttgacttccggcatgttacagaacttcacggattgtgcaacaatgcttccttttgacttccggcatgtcacggaacttcatagattgtgcaacaatgttttcttttgacttccggcatgtcacggaacttcacggattgtgcaacaatgctttcttttgacttctgccatgtcaca

SEQ ID NO: 23698 - DNA, 443 bp, Glycine max
  unsure at all n locations
ntaacaacaatgaaggttaaaaataaaccctcatggtatgagaaaaatatatatcatttattaatttcccctccttcccttaatgaatgtttcttgtgttttcccagagctttacactattttggttccactaggccatgtaattaactattattggtttaatgtttagaagtaatcgttggatcataacagctcattgatttgttctaattaacagaaagtagtgttaaaggtggacttacatggggatagaatcaagcaaaaagctatgaagacagcatctggcctttctggtaaatcaaaattntcaccaaagtacatatcatgcagcatcaaggaatcaattaatgattcattcattaacaaaattgtgtttgtaattactttgcaggggttgaatcagtttatgttgacatcaaagatatgaaaatgatcgtgttggg

SEQ ID NO: 23699 - DNA, 367 bp, Glycine max
  unsure at all n locations
tcttcagcttctgccgaccctttttcaagctgtcaattgattaataactcttgccatgcacccacgcgacatagtttcactagtttgctaagttcaatctcgacctctttcctactagcatcaatgcacttcaatactctgcagtcagtcacataattacaccaacagacaacaaggccagggaaataatagacagtaaatcaatggaacaataggtgaaaagaacttacattggtaagaactgcgcataaaatccaaagatattgtataagaagggggnnngntcnactgactanaactgtttaaaatgagaaaaagccttcagatnntaaacttnnaaggaggctnaanntttctctcttttata

SEQ ID NO: 23700 - DNA, 423 bp, Glycine max
  unsure at all n locations
tctacttatgtggcagggcgggcttccttcactttcttgtttccaacgcgagctctgaccactgtccttccttcccgcgatgcttcttttcatgtccgcctgagtgggcttatagcctaaaccatacttcccacgatttccttgggtttttatcaggctagttatgccgccattgtctttgcctaaacccatcccgggttcataaccgttccccaacataactcgggccatcattaccgccgcatcggacagacaaggttgcccaaagagggagtccacggaggaaatgctgaccacctcaaaagactgganagcggtttctaacgattcttctgcggcttccacataaggcatggaggatgggcagcttaccaagatatcttcctcgcctgacacgatgaccaagtgcccctccactacgaa

SEQ ID NO: 23701 - DNA, 439 bp, Glycine max
tccacaatatccaagcaaaacaacattcacacagcacttgctatcacagccaagcaaaacagagcagaggcagaaaactctgccaaaacaccaaccaaaaatcacagcttttcccactcaaagaccccagtaacaattccttcgatccaattcgtaaaccgttggatcgactccaaaattttactggaagtctatagtgcataagcctacattttgaccgttgggatctactagcaaacatccagaactcattctacattactctttccacaaccagcaaatacatggatttttctgcacttgtgcagaattctgctgcacaattttacagcaaaatctgcacaaagagcatatttcgaaaaccacacttcccctcatccaattttgcccaaatcaattcctacaagtcccaattcatgtatcaatcatgtctaaccca

SEQ ID NO: 23702 - DNA, 422 bp, Glycine max
ttcaacattcaacttcgagcgtctcgttatattttgtgtttctattagacatccgagtaaaaaggtattgttgtttgaatttgctcaaagcttcaacattcaatttcgagcgtctccatatattacgggactcaatcagacatccgagtaaaaagttattgtcgtttgaatttgctcaaagcttcaacattcaaattcgagcgtctcgttatattataggactcagtcagacatccgagtaaaaagttattgacgtttgaatttgctcagagcttcaacattcaatttcgagcgtgtcgctatattacgggactatatcagacatccgagtaaaaagttattgtcgtttgaatttgctcagagcttcaacattcaatttcgagcgtctccatatattacgggactcaatcagacatccgagt

SEQ ID NO: 23703 - DNA, 383 bp, Glycine max
tgttgacaaagctgaaaagtgtgtctttgttgttgtttgtgaaacatcaaaagcatataagttatttaatccactaacaaagaagattgtgaccagcagggatgttatttttgatgaagacaacacatgggactggaatgagcagcaacccaattcaattattgttgacaatgaagatgtaaaagaactacagctactcgtaaacattgtcttaacatctccaaatgaagctcaaatagctcctgagacagagatttcaacaccaacaaatgctggaacaacagatgcaactagacatggcaatggggcgggtcgggtacaggtattgtctccccaatcccttaccccgacgcctcgacatattcccatacccgtacccgata

SEQ ID NO: 23704 - DNA, 439 bp, Glycine max
  unsure at all n locations
ctgaattcattctatgcagccttaggggtccattcttgctttgtatgttttcatcttcattcttctacttttggtattctttttctttgttttaagcaagttttgaccgatcatttaagccgtaatctcacttaatcaattttaaaatgaatttcaaccgatcgtttgtgttgtaatctcttttaatcattgttaaaataaaattcaattgatcgtttatgttgtaaccttggttaatcatcaaagaataaatttcaaccggtcatttacattgaaagttctcttttgacgagttgagaaataaccaagtgaaactaaagctaaaatcaactcacaaattcgaaatttctcttttaacgagttgacgagttntgttttttctattagatatataatatacgatcttttcttcatttgttcttgcaccttcatccattct

SEQ ID NO: 23705 - DNA, 438 bp, Glycine max
  unsure at all n locations
ntaggctgctcaattgctccaggttgctgcatggaatgtcaatggtctgtatggtggtcagcagaggagcacaaaccacaaacccttgcgacaggtacagatttctgattcaaggccagctgggttaccaagttgaccaacgcatccagtttgccttcaagctttttagtttcagatgatgcagatgggtttgtagctacctcatgcactcctctaatgactatggcatcatttctggcgctaaactgttgggagttggaggccatcttctcaattaaatttctggcttcagcaggagttatgtctccaagggctccaccactggcagcatctatcatacttctctccatattactgagtccttcataaaaatattggagaagaagttgttctgaaatctgatggtggcggcaactggcacatagtttcttaaatctc

SEQ ID NO: 23706 - DNA, 434 bp, Glycine max
tctacttatgtggcagggcgggcttccttcactttcttgtctccaacgcgagctttgaccactgttcttccttcccgcgatgcttcttttcatgtccgcctgagtgggcttatagcctaaaccatacttcccacgatttccttgggtatctatcaggctagttatgtcgccgttgtttttgcctaaacccatcccgggttcataaccgttccccaacataactcgggccatcattaccgctgcatcggacagacaaggctgcccaaagagggagtccacgaaggaaatgcttaccacctcataagactggaaagcagtttctaacgattcttctgcggcttccacgtaaggcatggaggatgggcagcttaccaagatatcttcctcgcctgacacgatgaccaagtgcccctccactacgaatttcagctttt

SEQ ID NO: 23707 - DNA, 417 bp, Glycine max
atgaggaagtgtaaaagggtgaaacttcttgcttttattcgttgaccacagagtggtacctggagatatgtcacggtggtcaagagatcttggggacgtcaggtggggtgctattgcccaaaaccaagcttgaccaatcccgacccaacccgggcatagtcagccagtgagaacctgtgatgtacctaaacaggcgaggtcctgacagtcaacagataaaaggaacaaagaccacaaagcaaggaggcttgtgtggtggctggccagctgtggactttgattgatatatgggatatggcctctggtaatcgattaccaagggtgggtaatcgattacaaggcttaaaaatgaagacaagagactaagatggtctctggtaatcgattaccaagggagtgtaattgattaccaggctt

SEQ ID NO: 23708 - DNA, 436 bp, Glycine max
  unsure at all n locations
tcataagtccatcctattatttaatcttcaggtcttctaagataattttcaaccaaattaattcacaaataccttgtgccatagttttaaactcagattcagcactagattgaaccacaacattctgttttttaactctccaaattactaagtttcctcaagaaaggtgcaatatccagtagtggatctcctattagttactgaccctgcatagtcaggcatttgtaagcttcaaggattgtattaacatttcctttatataaaattcctcttcctagtgttcccttgattgcaaaatcctataagtgccatgtaagtgaacttctcttggacaatgcataaatttgctaaccaaacttgtagtgaatgcagtatctggccttgtgtgagagtcagacaagatatntaatttcccaaccaaacattgatacatctc

SEQ ID NO: 23709 - DNA, 404 bp, Glycine max
  unsure at all n locations
ggtcttcgccagtgaaaggatctattttgttctaacaggggcaaatctgatcatcctactatgacgactgagaaaactggggcaaatgaagagggtgagaaagagggagaaacccatgctgtgactgccattcctatacggccaagtttcccaccaaacccaacaatgtcattactcggtcaataacaaacctcctccttacccaccacccagttatccacaaaggccatccctaaatcaaccacaaagcctgtctaccgcacttccaatgacgaagaccacctttagcacataccaaaaaaacaccaacaaaaaggaattttgcagcaaaaagcctgtatggttcaccccanattccgttgtcatatgctaaacttgatcccatatccactcaataattcaat

SEQ ID NO: 23710 - DNA, 432 bp, Glycine max
actcagctttccaagctacggtaaatctagaccttccatgctagaagtctccacagaggccattgcctccctcgcccagtattatgatcagccgttgaggtgcttcacctttggggacttccagctatcacctatggtagaagaatttgaagagatcctaggatgccctctagggggaaggaaaccatacctcttcacagggttttatccctcattagctagaatttctaagatagtccaaatctcggcgcaggaattagaccacagaaagcaagtcgaaaatgaggtggttggaatactgagaaaatatttggaggcaaaagcaagaatcttggcaggtaaaggcgaatgggccccgttcatagatattcttgcactgttgatcttcggaggagtcctctttccgaatgggatgggttggtggacctagca

SEQ ID NO: 23711 - DNA, 438 bp, Glycine max
  unsure at all n locations
tggactcatttatttaaatgagtcaaatttaaagcttgtgtttggcttgcttaaatatatgaagctttagcttgatttgttttcttatttataacttaaaacattttttcccttgaggagtgctaggaatactctctctaacacactccttcaaacacactctcacttattgggtaaaatttattgaaaattacaaaaacaggagagagagagagtcattaaataggatatgggatccgcaatttttttttatttccaataaatttcaaccaataggagggagtgtgttcaaaatagtgggttagagagcatattcctagcattgctcttttcccttttatcaaatctcttgaagtattttaaagtttattatctattagacattntaatgcaagatgaagtanaaataataaacagagagtaaaaagatcctatgtt

SEQ ID NO: 23712 - DNA, 431 bp, Glycine max
  unsure at all n locations
tcggcattctagtccaagcgtctcgatatattacgagactgtatcagacatccgagtaaaaagttattgtaatttgaatttgttcagagcttcaatattcaaattcgagcgtctcgatatattacgggactcaatcagacatccgagtaaaaagttattgtcgtttgaattggatcagagcttcggtattcaatttcgagggtctcgatatattgcaggactcaatcagacatacgagtaaaaagttattgtcgtttgaatttgctcagagcttcggaattccattttgagagtctcgatatattacgggactcaatcagacatccgagtgaaaagatattgtcgtttgaatntgctcaaagcttcggaattccatttcgagcgtctcgatatattacgggacttaatcagacatccgagtaaaaagttat

SEQ ID NO: 23713 - DNA, 434 bp, Glycine max
  unsure at all n locations
tgtgatctcaaagtccaacaagaagaatatgatgaataatgagaacccttcaaccctttcagtctcattgaaatctcgtacaaggatggttctttgaaatctctgcatcatgaacattctttttttggattgtgaggggtcttagcaatctaagactagacgatctctcaataatagttgcttccttagcaatcccaattctctatttgcaattctactttttttctcttgaatgtgggataacatctttgtttttagttggttccttttacatatttataggttttgtttcatgggtttggtgttttccccatgtgtcttttcttgtaccttttccttttaattaatatattttcagtgtgcagtctttgctactgcatggtcttttgcccagaaaaaaaaaatcaaaataataactaaatgttntaaatata

SEQ ID NO: 23714 - DNA, 428 bp, Glycine max
tcgctaattctcgaccattaatgttgattacttgtgttggtatgtccaagcgattgagtatcgagcaaatagtttagtatctacgaccatgcgggagctgaggtaaaattcattaatgagttggggatgagcaagagatataagtagtgaattgtgaatttatagtggatcgagtgaattataagtcaaaacatagacattcattcatcaataccgacgtccccatccaagtctagtatttctatctttatttaattattttattgtaatttaatttttattgcactttattttatgttatttatttcttgacaatcacaaaataaaaataaaaaaacctagttcttagttaaataattacatgaaattcctcctttatttctttatgagacgacctagacgatagttccttactacatcatgattgg

SEQ ID NO: 23715 - DNA, 446 bp, Glycine max
tgtcacaggataacacacaccttcaatacacagaatatatattaatgaaacgatattgtgtctcattaagataaaaacattgatcgtaacttttatccaaagtttctaagggatcaaatccaaccttgttgttagtaccttccttttgacccttgcagagagaccaaggggtggggtttctgctgcatgatttgaaatgaatgtccacggagtgagtgtgactgtgtgactgacatgtgcgtgaattaaaaaaaaaaaatctaacaaaattctaaaaatatcctacgcgaacttttaaaagaaaaatgttgtttctacccacaatttatacaacactttttataacaaaaagaaagtgtgatataaaataaataatatgttgaaaaggcgagaaataatatatttgtaaaaagatgttacaaagtttttaaatgaaaataatatct

SEQ ID NO: 23716 - DNA, 424 bp, Glycine max
  unsure at all n locations
tcttanganacctctagagatgttgctatttctgttgtactacacagtgagcccacttagagataatggatgagtttatcacaattgggtttagaatgaacatgtgtagggatccttaaaggatcaaattgcagtttattttggaatgtttattgtattgtaatttttcctttatcattacaatcatgagattgttatgttcgacgggccaattgatgccctaatgtgaattggttgataaaattgagtgctcttggtgtttctgtattttctaacctatgattttgattctgatatgattatgtgaaattgtttgaggggttttactccccatgttatgagaattatttctgtataattcatgtatatttcgaacaagaattactatattaacgtgagaactagattgttggaaacattattt

SEQ ID NO: 23717 - DNA, 525 bp, Glycine max
  unsure at all n locations
agacggatgtnttttgatacgctagnatnncnactgncacacttctagtttaggtnaccgcagcggctactctcactctattcacatacatactaagatatgcaccgctgttttgtattctttcttntgagtgctgaccatacgtgggggaggtgctatcatgactaatatacttcacgcctacatgtggatgggctaataccaggaatgtccgccagtgtccattctattgccttcctatactttttgagaactgacatcaacctagcctcttgctcatctacaaaggtggctgatataatcaatgtaaaactcttcgcttcataccattcaacctatatcaaatttgatggcagatgctaaaattcttgagcggtctggtccacagtgttataaggagatggcttcccaacctatatctcataaataaaggcataggcttgtgtacctcctgaaacatcgcgtcttctatgttactctacagacataaccttcagtatgttcacaccgctctgaatctcggcg

SEQ ID NO: 23718 - DNA, 425 bp, Glycine max
attctcactagtcctcaactctcatagaccgccctcaccattaccatcgccaacaccatgctgatttcttcttctttcatcattctcagctttgagattacttatttcaatcccatggcttacacccaaagaaaccaattgtctttgttttacctctaaagcatgcctgacttgaaactcattttctaatctttgtgccaactctttgtccttctctactatggctaattcagattccttgagatgccattgaaggtgatcttttatgttgctcctcttcagtggttgctctcacgaaagctgctttcagtctctacatgagcaatgcttagacaaccttcaggttgcatcactgctagctcatataactttgatatctcatctcatcgttcaacgactcatgtttactccttcatcttctcttg

SEQ ID NO: 23719 - DNA, 435 bp, Glycine max
tctttttataaatgacaagttctggactcatctcgttatctaataaccctggcgtggatccaagtgctcctatcatacatttgcatactcatgttatggaggcatactcaccgctgtttatttctttacgaattccatcataactaagaaaacaccatggcacccctataacactcgatccacaaaaatggataatgaagagggcgagctagaacagatgaaggccgatctatcgaccttaaaagatcaaatgctccaccttacgaagactatcccagatgatttaagccatgcccttactatctaggggcaacttccaccttatgaagactatcccggtcaagacgaaggtgaaggagatacccatcttggccacctgttcacctcataatattgtgcgcacatgaactaccccaaccaaacatagtacggcat

SEQ ID NO: 23720 - DNA, 358 bp, Glycine max
  unsure at all n locations
tgctccttcctgactcattctctagtggatgttgncttctctaccactcctcctttatcggtgggtgcattatcatggctacaaaccaccattgaaggatcttattgaagctcaaagatctagcctccatagaagcttcataagcaagcttccaacaagtggtatcagagcacatgagcttcaagtaagtgctccttatacctgcactaattttcagctgtactttctcctccattgctggctcttcgattctctccatgcatcttctcacgtgtcctgcgctgaatgttgtctacatatatttttataagttccaccgatcaagcatgctatagaagctaaattagactttctatgg

SEQ ID NO: 23721 - DNA, 425 bp, Glycine max
  unsure at all n locations
tgacaataactntatacacggttttcttattgagtcccgtaatatatcgagacactccaaattgaaaacggaagctcttataaaattcaaacgacaataaatttttactcggatgtccgacagagggccgtattatatcgagacgcttcaaattgaaataagaagcacgtagcaaattcgaacaacaataagttttcacttggatgtccgattgagtcccgtaataaatcaagacgctcgaaattgagaacagaagctcttggcaatttcaaacgacaataactttatagtcgaatgtcctattgagtcccgtaatatatcgagatgctccanattgaanatggaagctcgtaacaaattcaaacgacaataacattatacacggatgtccgactgagtcctcgtatatatcgagacgctctaaa

SEQ ID NO: 23722 - DNA, 430 bp, Glycine max
gaagttagaaaggtttagagagttaagagattcaattggaattgtatgtgtaaatgcaactttgaattaatgaggagtgttaggaataattcaaagattgaaagttagttaaataacaatattcagttaattacctattaagggagttagttactcttaaccaatgtttgttacctactatataagcaaggttcataatattgtatatagagtattattaagtttgctatcaatatagttttttcattcattcaattatgtgctttacttttgaatgcattcgagtgagtttaacaacataatgtaatgcccctatctttgcaaaggttggcaagatgttaatgactataatgaagtcaactctagtatcgctcaacttcaatttgaagaatagagatagagcctcaagaggctagtcatgcattacaca

SEQ ID NO: 23723 - DNA, 386 bp, Glycine max
gatagcacgcagactctaacgtcgtcttctgtgcctttctttaatcgcggccgacaagcgcggtggactcatggagatttacgtcatcttccgcgctcacaagatctgtcatattgactgttgagtcacgctgacaggcggaagttcccgagtggttatccgtataaaatttatgttgcctgtaagatgaaaagcctgatagcacgtagagactaacgctgtctattgcggtcttcatcaatagcgagcgacaagcccgtggacacgcagagatttacgttatcttcctggcttacaagaactgtcatactgactttagagtcacactgactggaggaaatacccgaatggtactcgtataaactttttgcattttgtagactaaa

SEQ ID NO: 23724 - DNA, 477 bp, Glycine max
  unsure at all n locations
aggaggtttgtgttcgatgatngcggtcgttagatacgaacactcgaccgtataagggtctagctagggtacttgcttcctttgatccaggcactcnctggttggactggttatgtgagctaagggaggctcacaatctaggggtgcatgacacgttgcacgacaaatcattgtagacagagatgatccgttaatggcactgtcgaatcgctctgtaatggaagatgtcactgacactggcgagttgtccttgtactaataattacgaatggcgagaacgtctgctttatataagcgcactccttcgacatttgatgtgcgtgctttgaataatgactcacttattggaaatgcttgctattcacaatactcgtgatttgctgaacctttaggcggtgaagtcagctgtatcgtatgatgttcataatgaaatgtgtgcggggtgacagaagttattatgatttaattatttgaccg

SEQ ID NO: 23725 - DNA, 482 bp, Glycine max
  unsure at all n locations
agaggaattgtgcttgatagctgtanancgctaactagnacactccgcgccttattacaaatcaaacaaagtttatttatttgagcnnacncaacaggggaggtgtggatgagtctagtgacatcgcagcatcacttgaccagctctccggttatgagtatcttctctttataaataatcatattcactaatatcgtttttataaatacttcttatggtggagttttttctatctacaaatgtgaagactcgtatggggtgattgagagacttctgtcctcggccttaaaatgcaattctcaaaacaaatcgcatctgacggaaaggcaactacaatgatttttaaccctgttccgaaacactntgatattcattgttcaaatcacgaacaaacgtcttgcatagtgagctagtttataaagaacacattttttacatttgacaattgcagttttgtgtaccaccatcaccagtctatcacc

SEQ ID NO: 23726 - DNA, 433 bp, Glycine max
  unsure at all n locations
tgacagttagtggacaatctatgagctgttataacttcttacagagaaacactacgtgattacagaaagctcataaacagaatacagagggcagtttatagattttggacatatttctttgaggcagttatctagtcacagaatacagaaagctcataagatcagctgatacctgngaatctgatagccgaaatccacgaccaatcttctgattaaatccaagcacaacaatcataacaacagtcactatgttgaccgcaaaaactaaaacagtatgagatattaagggaaaccaattcatatatatatatatatatatatatctgtatataatcaatggactagctgaaagctaaaatctcgaaatgaataaggatatatgtcttcaaaacagtcggaaaatctctccccatcccatacctgtaaaccatga

SEQ ID NO: 23727 - DNA, 445 bp, Glycine max
  unsure at all n locations
ctcacatcaaccatgctagatgttacaattgttattaagtgttgtgtcttatcaccaattccaaggtgtattacatttgcatgtggatacatgtctaagtgcataagcttgtgtgtctctcaatctgatactatcaggatagttataacctataagtctttagcacatgcatcgtaagattctaggacatgtcatatgacaaagtgatcatgaatatccaaaggagtaaaaagtcttgactagtcatgtatatattgttattgtatttatacatcccaattntcttctactttcactttcactccatttttcttcccatcttttcctttatttatttatttatttatttttatcacattcttatatctatcaatttctctctcttagcttcttttatctttctctctctcttttatatatatatatatatatatatatatatata

SEQ ID NO: 23728 - DNA, 453 bp, Glycine max
  unsure at all n locations
aagaacgtggttgatgcctgctngaccgccctttagtatgcaacactccgcccaaggnccanacgtagcgtgcgatacgcgntttctctggtatatttcacgacgaaccttgggcggtgtgctgtatctgttcgacacgcatggatacccgcgattcttattgacgagaggacaaaatggaacagcacagaagataagcagtgggcttgactaagatgacatgacatatgaatgtgcgacaatctaactccttgtggcaatatttacattctactgaggattctcttgggagcggacgtacagacaagcgtgtgactctaatactaaaaaaaatggctgaacttgaaggcttatcctgggaccgtcagtggagtattgctggttagagggatggaaaaaaattcactgcctccatactacctaggactgcattgcgcatttcaaagataaaan

SEQ ID NO: 23729 - DNA, 436 bp, Glycine max
tcctccatatattattcgcctgaatcggacttccgttttatttgttatgaccatttgaatttctcgagagcattcgttgttcaatttcgagggtgtcgatgtattatgcgcctgaaccggacttccgtgtaacaagttatgaccatatgaatttctcaagagctttcgttgttcaatttcaagcgtctagatatagtttgcgcctgaatcggacttccgtgtgacaatttatgactatttgaatttctcgagagcattcgtggttcaattgcaaccttctcgctatataacgcgcctaaatcggacttccgtttgaaaatttatgaccattcgaatttctcgagagcattcgttgttcaatttcgagcgtctcgatgtattatgcgcttgaatctgacttccgtgtgacaatttcttaccattagagtttcttgat

SEQ ID NO: 23730 - DNA, 437 bp, Glycine max
  unsure at all n locations
tgcgagccaagttcaaaggccctacaatttgtctcagtataaatcttatgtcccttaagcggatgttctaccaaacaagtgatttcgatcaactaatgaaagatctaattcacatttaaaagaattcaaagttaatagtttggcacttcaaagagaaagaaccattgaaggttccgggaagagatattatgacaaccaaaatcctccatgggttaatagaaatatgtcaaaaacctagtggagaaggcatcanaggatgaggagagattgaatattggcaatgcaatagaaaaatggtgtcagaccttcaatctttgatagaattagtgaagggccaccccttggtttaaaaagaagatgcaatcaaggatcaagaggaaaggaaatgataaatgactctttcgaatatggcttttacgaatcaatggaagccatat

SEQ ID NO: 23731 - DNA, 394 bp, Glycine max
gctgaatattgcctagaggacttggttgattatgtcgttggtaaagaggcttatgatgggcctttacttcctttagcaaatggcaattttgcatctttttcagaagcatcaaaaggagtctcttatttcatttgtgatgaatttgaatataagctgatgcagccagtttctgatagagtaattgatcagaacattcctcccaatatattgaacaaactcactggtattgcgatgtcctcaaagaccaatgttattctttgtagtattcaccattttgctcagctattccctgcatttatgtcagctgactggaaatataggagtaaaagtgttctgggaccctgaatcttgtcgaaagccaacgtcatcatggtttctgctattctggcaatat

SEQ ID NO: 23732 - DNA, 433 bp, Glycine max
  unsure at all n locations
ttacatccaaacagctctttagaaaaaaaaaacttctttttaattagtctcataatctccttcaatcctcgtgcataaaattttccaaaccatttctttttcttttcttattggaaagggatttaatttggctgaaccattcagtgaaaagcattgaattgcaaagtttatttatagtgaatctatacactctaaaaatagaacctaggaaaggataatgaaactagttactctatactaaataatgaaataatgatcccagtaatcagcacactatacatagattctatttctacattaataaaagaaaattcaaatattntagcgaagaggacatgagagactccaagagaatatacaagaagacattctcaaacggaaatggaaaaagcaaaagaatgtaaagaacaaatgcccaacaaaaacaaataaa

SEQ ID NO: 23733 - DNA, 390 bp, Glycine max
tatagcttccataacatgcttaatgtgtcgtttatttaatttttagtttcaaatgtatttcaatgtgtggaatctttcctcaatttaaggataagcaggaatatttatgacataagttctaataggtaatagcactgtaggataagttattggcttgtattttagatgtcattagattatgatttttcgagaattctagcttctctatggaataataatacatttcaacttatctttttttttttggggcggcatggcgagaatcagcatttcagcttgaatataatttaatcaatggctgaatttggaagttctcatgcgtgggaccgattaatggaattatttgcttgatttaaggataggtagaaaaaaaatcaaactgcctacata

SEQ ID NO: 23734 - DNA, 423 bp, Glycine max
  unsure at all n locations
tgaaattgacaacggaagctctcagaaattttaatgtcataacttttcacttggaggtgcaattcatgtgcataatatatcgagacgctcaaaattgaacgaggaaagctctcgagaaattcaaatggtcataacttttcacacggaggtcagattcaggcgcataatatatcgagatgctcgaaattgaacaatggaagctcctgagaaattcaaatggtcttaacttttcactcggaggtccgattcaggcgcataatatatcgagacgctcgaaattgaacaatggaagctcttgagcaattcaaatggtcttaacttttcacatggaggtccgattcatgcgcataatatatcgagacgctcgaaattgaacaatggaagctcttgagcaattcanatggtcataacttttcacatgga

SEQ ID NO: 23735 - DNA, 491 bp, Glycine max
  unsure at all n locations
ggtaggtttatgcctgcttcgactgcgntcagttaagtaacanccgctcgcattctanaaatatattataataaataaatttttgttcacttctgaattccgaataaccggaggagccatccacaatggagttcctccaacgtctgtagttatcaaacaatattcatatccagccaaaatgaattgcactaatctatattatcattaatccattgtgggtacctttctccattatatagatcttgataaactgtgcaagatataaccaaaatctgcgacctgtacataagtgattaagtctaaatgtacgctgtgcgattaccatttcacattgatggaaaagaatagtgctacaatatcaatatgagaaagatgatcgataagtcataccattgggaattacagaagttatccaagaagaggatagctagatcaggttaataagcccgactcctcggatatatatatgtnctacatccgctacccataag

SEQ ID NO: 23736 - DNA, 370 bp, Glycine max
  unsure at all n locations
taaaaagcaaagtagtaagatacattgttaatgaaacgtataataaagaataatggcctcncaaacttctaatgctgatggttttctgtttggttatccaacaacatttggatccatggtttctcaatttaaagcatttttagaagacactataagcctgttgtggcttacacaggcactagcaggaaaacctgtagggttcttctctagcactagttctcaaggaggtggacaagaagagaccccatgagttatattaattattactgaattcttcaatattcatgattaaggtttccatcaattaatggttattttgtatatatccactcaacatgcgagaagtcagatcaaactattagtcactact

SEQ ID NO: 23737 - DNA, 418 bp, Glycine max
cttgagaaagaaaacaccttagcggcgttagcttagtttggagctaggtcatgaaaggagggctgtctactagtgagggctttcaagtttcaatcttatacgatgacgaggaccagcagtccagcacaacaacacgacatcgatgacaaggaccaccacgatgcgagtagctcagcacccgaaccaaacttgaataaggcagagtgagtgagtagacagagtcgcgagagtcattttctgggggttttcgtacgatgctatattcggttttcataaacccgcggattcggaacagactcgcgagtctacccaaactcgctcgagtgtgcgctgaatcggacgagtctacttcgtttttgattttgctatcgatttaactctgcgaaccttattagaatcgtagaattgtacgatttta

SEQ ID NO: 23738 - DNA, 437 bp, Glycine max
  unsure at all n locations
atccttatggcctgcctccggacttcaccccccgtgtctaccccggaagatttaagccaagcccctactttcgaggggcaactcccaccttatgaagactatcccgggcaagatgatggggaaggagatacccatcttggccccctgctccacctcaaagatctgtccccacatgaactaccccaaccgaacatagtccgccataccccggcctcacccacacctttaaaagaatctgttcccttcgcggaagataagggaaagattgaggcgctcgaagagaggttaagagcagtcgagggccttggcaattacccattctcggatttagcggatttatgtctcgtgcccaatatcgtcattcctcccaagttcaaagtaccggactntgataagtacaaagggacgacatgtccgaaggggcatcttcngatgta

SEQ ID NO: 23739 - DNA, 435 bp, Glycine max
  unsure at all n locations
actaagctccggagtttccagtgccaatncgtcttcttctttagtccattcttcttctggcttcaattcttcagtgggctttccttctgtgtccagcatcttgggatgttcccagcctttgatgacagctttccaagttctgctatccagtgatttgaggaaggccaccattcttgctttccaatattcatagttgcttccatcgagaataggtggtctgttcactggtccgccttctttctccatgttcatcagaatttatctccctagatctcactctgtgatttcgagtgttggctctgataccaattgaaattctgataccaagggacagatgtcgtacaggatgtcacgacatcacgcttcagaacatgcagattatatgtgtgcgtatgaacagattaaacaagtgaataacacacgagaattgttacc

SEQ ID NO: 23740 - DNA, 430 bp, Glycine max
  unsure at all n locations
tgtgaactatctttgaattcactaaatgtatatagaaatctagtttacttcctagttttatgttcttgtgaaaatcaaaagcatatattgtgacatgcatttgactatacatgtcatattttatgtcatattttaagtggtgcagaagacgaggaataagaatggaagggagaaagatggtaacattttatgctaatgattcaaatttaacgtgagacttaatataaaatttaaattacttttagaatcaaaatgattataaatgataaaatttaggaaccaaaatataaaaaagtaattcaattcgataactaaatttaggttgtgatgtcataagtcctaaaaaataaacaataaaaaatcaactttcattntagtcatggattgtcatgtattcaaacaacatttcacataaatacgaacattaacc

SEQ ID NO: 23741 - DNA, 441 bp, Glycine max
ctcgagtggtgtagtagcaaaatatagttgctcttgccttctattttaattatagaaattcaaggggcagtgtttttaggataataaaataatatgaagaatccttttgtagtcttgcatttcttgactttcttttatccttattagttattaattactatagtacctttgatttaatttacttgattcggtaaagctatgctgtcttggtttctgtgaggcgaaatagctattcctctcctgatagcagcaattgcaaaggcaattgtgctgtgagttcatcactatatgaggtagcacagtagcaccttatcaatagtcttctcaagaaaaccgtttatgaacctttttcactgcgcctcgtagctatggagtatggatagttgcaattacatatcatacaatcactgcacctcgtttatgaaccattttaactcctat

SEQ ID NO: 23742 - DNA, 428 bp, Glycine max
aagaagattcccaaagaagatagagcttagctacacttacctctctaatagctaaggtcacctccttgagatgagaagctagagcttagctatacaccccctataataactaagctcacccccatgaaaaatacatgaaaatacaaaaaaaaatccctactacaaagactactcaaaatgcctcgaaatacaaggctaaaaccctatactactagaatggcgaaaatacaaggcccaaacgatggaaaaacctattctaatatttacaaagataagcgggctcatacttagcccatgggctcgaaatcaaccctaaggctcatgagaaccgtagggccttcccttggatctctgacccaatctacttggagtcttctatccaatgcccttgcgggtaggattgcatcagtgtctcccctcccctcttc

SEQ ID NO: 23743 - DNA, 431 bp, Glycine max
tatcaaggtaggttgcatatccatgttcatcattgatgttgtgacattgtagaggcaatgggcatcattggaatggaccttcttagccttattccatatctcataacaagtaagaaaagcctgaaattgttgttgaagattaggaccaagagtgaaccagagaaaattacacaatgaagtatcaattgcttcccatgggattgttctgaggtgggaatatccttcacctaagttgtcaagtgaccagcacaaccttagccttggaaccaaagctcaacaacgacggcccatgtattgtagttggttgtctcggttaatttttcacatggaatcaacgatacataagtgaaagtcataatggaggaagtggaagcaagattggaagcatccatgataaaagtaggaaccaaacaaggctaaacaaaaataga

SEQ ID NO: 23744 - DNA, 430 bp, Glycine max
  unsure at all n locations
tctaaactntatacaagaatgaagctctggtaccacttgttggaaaagtggcctcatatatcttaagaaggaggggttgaattaagatattacaaattatttccccaattaaaaattgtatttaactttctattcaagttattaattcccttaataatgaatttcttaaatattgattcaaatagaacaatttgaatatgaatataaaacaataataaataaaggagtttaagggaagagaaagtgcaaactcatatttatactggttcggccacacccttgtgcctacgttcagtccccaagcaacccgcttgagagttccactatcttgtaaattccttttacaagttctaaacacacaaggacaatccttcctttgtgttntgaattctttcacaacaagagaccctcggtctcttaatcccttttc

SEQ ID NO: 23745 - DNA, 421 bp, Glycine max
tcattaagagacttcctcaagaggcttctttgttaatctagatccttatctacccacacccttctattaactaaattaacctccctgaaaataattacggataaaaaataacataacaaataatcaaacatcaaacataattactaataatatatagatatatatatatatgagggtgttacattggttcctaagttgtggttctttattgttggaggtttgaaaacaaaaggtaaaagaaactatggttgaaactagccaaaataaacactaaaagaggtgtgaaagataaggtaaaaaactaatcggtaaaaggaaagctatctaagcggtttgacagtggaaggtaaaggaaataagctacgaaagtaagcaagaaatgtaaactatgcgaatcctaagagtgtgtggatgaccacat

SEQ ID NO: 23746 - DNA, 412 bp, Glycine max
  unsure at all n locations
tgtgcaaatcaaatcactcctacatttcatctctagcttgcattntctttctttacccactcctcacgtttggttttttagggaaaaacaccataactaaacgcgccgcaaccagatccaaatctagaacgatgggtgatcaagaggagacgtaggaacagatgaaagccgacatgtcggctctgaaagaacaaatggcctccatgatggaggccatgttaagtatgaagcagctcatagagaagaacgcggccaccactgccgctgtcagttcggctgccgaagcagacccgactctcttggcaactacgcaccatcctccctcaaacatagtaggacggggaagggacacactgtggcacgatggcagccctcacctgtgatacaaccgagcggcttacccttatggatt

SEQ ID NO: 23747 - DNA, 436 bp, Glycine max
  unsure at all n locations
tgtgcaaatcaaatcactcctacattttatctctagtatgcattgtatgttggtctcgtcctttgtcacgggaagccggaaggtccatatcaccttcttaattgtacacatggggcactgcgcccccaaatgcacaagtaagaagagataattttccgggctctcgtgtccgtaaaatgcattcatatcatgcatcgcataagcatctcttcataacatcataatggacatatcctgcatttgtccgttatcatattccagcctcatattttgcatgagtcatggcatcatcatgcatatgcgttcaacaaactttttgatctgcaaaattgcataccatttgttttcatgtttgctcatcctcgcgtnttcctctacaaaacanaaacaaaaaagggggaagcgtgaaacttcacactacattcttagtttcatg

SEQ ID NO: 23748 - DNA, 420 bp, Glycine max
cttcttatctaaggctcatcttggtggtgattcttcttcttccatggcttattccttagtggatggcgcctgctctcacctctactcctttgtcttttgctgcatctccatggtggaaaatcaccattaaaggacctcattgaagctcaaagattcagcctccatagaagccccacaagcaagcttccatcaagtggtaatcatagcacaagagcttcgagtgggtgctccttaaacctccattaaatctttttctttaccttctcttccattgtcgcttcttcatttttctccatgtatatcctcacatgtgttgtgctaaatgttgttaacatgattcttcagagtttacaccgactaaactcgctatagaagctagatttgattttctatggtacagatatcttgttcttgttcttg

SEQ ID NO: 23749 - DNA, 428 bp, Glycine max
  unsure at all n locations
tgaaggagcgactaggcatgatgganaagagtatgcttgtaattgtcgatcaatatgaggtaaagatggtgagggagaggcaagttctggctactatacatggacaagcggaagtgctagccttacagggtgaaagagaagcaggggaggaagtgatagagctactacatcaagaaagtaggaagtagatgaataagtttgcgctcacgctaaatgagagtcaagagcccttgaaactgctagctagagccaaggcgagggctgatatatactctgctctcgacgaaattcatagtctcttcgataactactagctcatggttgaactgatgactcacataattaagaaccgctgatgcacttgttatttatttttggttgtaccctgatgcgatgtaatgaacccaattntggtttcatgaaaaatg

SEQ ID NO: 23750 - DNA, 441 bp, Glycine max
tctccttccttttcctataaataggggaaggagggaataacataaaggttcaacccttctggtatctgagattcacttaaaattagtgagaaaaattgtttccgttgttagtgcttagctctactgagctttaaaagattggctaagattttgttaaaacataagcacttagacaatgaaggaaagctggagttgctgcacatgatgtccaacgttatgtcaaagaataagatcgggctgcacaatgcacaaggcaagatgaaatgtcaaatgaagaattgaagctgcatgattcacgatgtcggatacaatgtccaggacatcctgcccgaaaatactggagttgctaaaagcattgaagctgcaggatccacgatgtcggatacaatgtccaggacatcctgcccgaaaatactggagttgctaaaagcattgaagctg

SEQ ID NO: 23751 - DNA, 431 bp, Glycine max
  unsure at all n locations
gtgagaaagacccaacatttctacctactactatcacttttactttgcattntatagtttttagcataaaagttagtttaaattctgtttgaaattatcaatcatacatgttctctcaacaatgcttcattcctggacttaattcaagctaacattagttccctgtgttcgatactcagattcatctgttttaatttttaaatacttgacgatccggtgcgctttgcggcaaaccggatttcccttgaatatatttgaacgaagaaacaatggaacaaaaagcaactgtaggggaaatccaacaatcagaatttgttttgatttcatcaatgtgaaaatcttcattatttccatctcttttgcctttgtgatcttcttcatgaatatgcatttcttttaatgattctgaaacatcatctatttttctaact

SEQ ID NO: 23752 - DNA, 416 bp, Glycine max
ctgatgatagaggatgcacgaacagagcttgcaatctattttggggctccggactcaatggtggaggatggatgaacgacaatcaattcgtggggctccgaataagatttgatgatggaggatgcatgaacagcgctaggcaatcaattcatggggcaccgtactcaatggttgaggatgcatgaacgacaatcaattcaaggggcttcgaataagctttgatgatagaggatgcacgaacagagtttgccaatcaattcgtggggctacggactgaatggtggaggatgcatgaacgacaatcaattcatggggctgcgaataagatggtggaggatgcacaaacaacattatgcaatcaattcgtgggtctctagactcaatggtggaggatgcatacacgacaatcaattcat

SEQ ID NO: 23753 - DNA, 440 bp, Glycine max
ttttctcttctaaactaataggcttccttcctgttatgtttccttttctcttctaaactaataggcttccttcctgttaggcttccttttacccttcaccaattgcagttgcaaaccacaatttaaaaccatgtttgcaatcttatgcttcaatttccaaatttatgtccatttaatcaaagcaaagtgagtattacctgtaagtaggagacactctgaggcctaagatacaacccattttcaagaatggcccagaaagagtgaccacattcttaatgattcgctaaataattctaggctacaatccttaccaattgaaattgcttaattgggattaagatagaacgaagcagcatgaagattactatgtaattgcaaatcccaatgagtatcaattatcttccacactttcttatattgtgactcttgattcttgaaat

SEQ ID NO: 23754 - DNA, 433 bp, Glycine max
  unsure at all n locations
tgtccaaaatctcactaatattaggcaactgtatctggatggtgtaagtatctcagttgcaggacatgaatggtgcagcgctttatcgtcgatgcttgacctgcaagaaattcgcatgtccaagtgcaatctctcgggacccctggattcttccctggcaagacttgagaatctatcagtcattgttcttgatatgaactatctatcatccccagtgccagaaacatttgcccatttgaaaaatctcaccatcctacgcctttctgagtgcagattgactgggacatttccacagaagatcttcagcattgaaacattgtctgttattgacatatcactcaaccaaaatctcaatggtttctttccaaacttcccattgagcagatcacttcagaccttanaagtaagaaacacaagctnttctggagcattt

SEQ ID NO: 23755 - DNA, 434 bp, Glycine max
  unsure at all n locations
gaagttagatatatcttattattataatacatgtttatctanttgntaagtatantttgtaggtagttaatttgtgggatgttaaattacggacataggatatgattgtaaataagtgtgtgattaatatttgatgtgatattacttgtgttgtgagttgtgaattatataaaaacttgattggtgtttatcttggaaaaaatatttatgcgtgaagtgttaaaaaaaagtgtagagttccaagttaagaacctgaagtgttaaattgtagcgcaatgtgttaaacgtgtttaaaacacaagtgtgaggtcgtaggtattgtataattcatgaacaatgtccgcgtgcaaaaattatttttagggttggacctgaatcangaaggtgaggccctaacgaattcttcggagtctaggtcttgggggtaaagacac

SEQ ID NO: 23756 - DNA, 431 bp, Glycine max
  unsure at all n locations
ttcattgatggagaaatatccaaggctatttgcttatttatagcaaaataaggctttggtggaggaggtgggtttatggcggngagaggaatggacgtgacaatttgagtgggagaaggtgttggtagatagctttaggaaggaggtagatagggtacgtacaattgatacaagatggggaggatgtgaaaatcttgaaaaactgcattacagggcaatactctctcaagaatgctatgattttttgttgttatataattttgaacaggatgaggaacatgttttcaagcaaatttggcatctacccgtaccttgtaacacacaagcttttgtggagattgtttaagaaaattaattttctcttcaaatttgacaataatttggntttatttatttatttatcatccaatcatctatttattactttatat

SEQ ID NO: 23757 - DNA, 430 bp, Glycine max
  unsure at all n locations
tctattattgttgcagtatacaaatggaagcttatatctataaaatacaaggcatccttgccttatattagcagaggacaaaacagaaaaataacagaaaaacttccatatggatttaggtcatagcccaacacatagggacctcaagcctgagaactttctctttgatactgttgaggagggtgctaaggtcaaaactactgattttgggctctccgtgttttataacccaggtttggttgctctctcgttagatttgttttttgtggaagatgccgagggagagggcttggtcgtgggttttggtggaggtggngattctgatgatgtctttgagttttccttggcggaggagctcgccgatgcagtcgcttggcagtggagccaatgccgaggaccatgccggacttgacatactcgatgaccttgt

SEQ ID NO: 23758 - DNA, 435 bp, Glycine max
  unsure at all n locations
tgagagatcttcttcaacaatggaataccaaatcacatccccaagtgaccaccaatattccacaggctatgtgaccaaaaagtcccctcctccacctgtggagtttcctacctcaccacaactcatatttggggaggagattcttcacttcagccaccctcagcaccctctctcaatggtggatctccctgacctgttcaattgtgtggggtgcaaagagtatggctctggaaagaggtttgtttgccagcaatgtgattttcagctgcatgacttctgtgccttggctcctcctgctctcaaggcacacccctttcactcacaacactctgtcttgttccattccaaaccaggtaaaccacgtacatacatacatatatatatattcatgagtacaattgtacaaatgtaatnttttatttaaatattatatta

SEQ ID NO: 23759 - DNA, 432 bp, Glycine max
  unsure at all n locations
tgtgcttgttntattcaaattcctaggatcatgagcttctangtgtgtcctactataacttgtgaaacaaaaggtgatcaaataacaagcagaaatttaaaagttactaggttgcctcctagtatcgcttctttaacgtcttgagcaggacgcatgatgacttgtcggtcacggacctagaactttgcttacctttggctttggacttggttgcatattggtcggccatgtgtcgtangcaatactctaacctttttgtggatgagctgagggggtctggaggtggcggctgtgcatttgttgtctgttgttggccatcccaaggttgttatggtgtctcaccctctgcctgcatggnggcacaatacttcttgatgaaagctcggttagtaggaggcctgatgaccttgctgggggtgacgggcactccgt

SEQ ID NO: 23760 - DNA, 434 bp, Glycine max
tcatgattaagtttatgatataagctcggatgtcattatcttatttaataagggctttagttgtttacccaaacatgaccttaatgtcgcccatgaagagagaaataaatacaattttttcacatgacaaaaacttgtgaaatttttacaagagaatccattcctctgtgcgtgtgcgtgtgcgtgtgcgtgtgcgtgtgtgtgtaaatcacatgaaaagctatggatctacattcaactttaaagaatacatataagtatattacttacttcaaagaattgatctctaagatcagatggctttcttgtatgttttcatgcacagccctgagaaaggttgcttcaacctgcaaatgatggagtatttaaaaatctgatatccatgcaatgcatctgacatgagtttaaaggtcaaaatcctaacctctttatca

SEQ ID NO: 23761 - DNA, 351 bp, Glycine max
  unsure at all n locations
gcactcagacagaaaaagcccacacataactataccgaaacgcaaaacgaatcgatacatcaatgataaccgccgcatgcaataaacctagaaggaaccgctgcagggcatacatagatcgaccacgcatcatatgcaccaaaattaagcaacccattataaaacctccatggcaagtctatacgagcacactttacaacctactatcacccannaannnanaacnnnttaagcacaacatcagcgacgcagacaatggagggaaacaagagaagcatctacactgaagcacagctacacaaccataantaagagggaaagtggaagcccttccacacaatagaaaagcct

SEQ ID NO: 23762 - DNA, 509 bp, Glycine max
  unsure at all n locations
ccccgaaaccccaaggcgaacggcaaagaaaacacagaacacggaacacccnccaggggngnatgacctggacacgcaaccanaaancagcagagaccaccaacaaacagagcagcacgacaatgtatacataaaaaccacaaacgaaagaggccaagaggaaaccgacaaagcgagagccacacacacccgacaaagcacaaaaaaggcagacacaggcgaacaacagaaggagaatggcaacccgagaagcaacacaaaaccaccaccacaaaaagaaacccgagacgcaaaagacccacacagcagcaaaggagcaacacccaaaaaagacaaccataccaccgacgaacaagaggaaccaacgacagcacccaagagagcaggagagcaccaagagaaccaacacccagaacccaaccgcaacgacgccaaaacaggcgagacccaggacgccggacaggacaccgacaccacagagcagggcactcgggacaacccaccacacg

SEQ ID NO: 23763 - DNA, 538 bp, Glycine max
  unsure at all n locations
gagaggactgaaaagtttgatgccctggtagnnccttgcanacaactacganaanaagcncanncggggtatcctggttgaaggcttacttgaacgacacggcaagtcttgttacgtttttttcncattcttccagaancacagggagtctctgcgcggcgctcgagaataaacacctcactcaacactacaggccaaatggcgctcagggatgtgatctcttatcggtacacccaatgtggccgttacgaccgaaaaagcgggctaggagacaagttaccgcatacgatacccacacagagaggccgatgggcattattcgcggaacaatgtcgagagataatatatcctggcatacatgcacctaagctggagtgagagccaatacaaaaggccagacgcggtgacagagtcatgatgtcggggaggccaagaaagcataacagcattggtcctgaatgcacgggaatgcagcaagtgggaggaaaacccttgatagagaaacgtgcacaagagagaaaggtccacccgccactcg

SEQ ID NO: 23764 - DNA, 222 bp, Glycine max
ctgcaaaaaaaaaaaatatcagtgataaatggacaaaaaacagagcatagaaagtgaataaaggacaattcaacagtgaaaacatactcaaaaattttggccagacaattccatcatgagtagaccattgatgccccactggcttgcccgggaacggcttcacctacaatctagataggacatggcactgtatcaacccattgcattcatgcaagacatgca

SEQ ID NO: 23765 - DNA, 317 bp, Glycine max
cggtgctctctatcaaaattgattcaactaaccctgtagacagagttctactcaaaaggccttttgtatcacataatgtatgaatgtcacattggatttgctcaacatgtgggatgctctggccatccgtctagagatttgttccattgggattaatgccacatgccatgatcctaacgcgggtgcaaatattcctaactccaccatgatggaagctgcaacaagttcatgtaatgcatgaccataatcaaatgacatgtttacaaacgttacaaatgagagtgcttcatacatggacgactagcctttgcatggaa

SEQ ID NO: 23766 - DNA, 513 bp, Glycine max
  unsure at all n locations
cacccccgcagatcccacatacaatagggcacatcaatccaactcccacccccaagagagacctttgaacctggtgtaccttgcaanaccggaagcattaatcaaagcgacacccagcaggcaaactatatgtaacgcggttccagcgcacaacagccgcaaagcgagacgcagaacaatccactgggcgtaccattacactccaacgacaggggaaacgacgacatgtccaccccagatccgcgagaagccaaacccccaatcggcgcatagggtacaactcaagacgcccgaaccgtctggcctggcgaagataggccaagcctgacaacctcaaggcaccggatgccgctagtcgacgcgggacaaaacgccagcattgaagacacgaataaagggcacccncaaagacgacggatctgagcagactaagggagaccgcacccaacgcacgtcaaccaccagggccacccaaaccaaggacatcaacttggtgatgatcgcaacaaacgg

SEQ ID NO: 23767 - DNA, 372 bp, Glycine max
  unsure at all n locations
catacaacccccccacacgtaagaacacaagaggggaagcaaaaaaaaaggagaaatgacctgacccgaaacaaaananaagggaccgaagcaaccgagccaaagttcaatttcacaccacacggggaggaaacgacagccaacacacacacaagaccgggaccaccccaccaggcagcccgcaccacggagaccaaaaacaacacgaccgagacaggaacgaacagcgagggcgcagaaacagaaccaccccagggaggcaacccggccaacgcgcgcggacacacccaagcgacaccggccgcaagcccaccgccggaacagcgagcggcaaaacaaagagccacacgccagcaagcaaaaaaagaaacg

SEQ ID NO: 23768 - DNA, 451 bp, Glycine max
  unsure at all n locations
ccccgcgcagaaggaacaacgagcagagaaaacaaaccccccaggaggnatgaccgaacacaaccnnaanaacgcgcaccacgacaccaaacaaaatttaatacacaagccgccacggaacagcaaagccacaaccgacacacccgggagacgaaaaaaagcgcgaacacaaagacccggggggacacaaagcagcccggaccgaaacggacgaccgagaacagcaaggcacccacagcacgcaggaagagaaagacaagcggacacgaccgccatcaaccgcaaaacacacacggcagacccagcccaagaccaagacgaaaaccgcagaggcacacgcggtaacggaaccaacaacgagacgggacggaaaacgagagaacccgacgccaacggaaagacacagggcagaccgcaggaggaagacaacaggaaccgaaacagcgcgacc

SEQ ID NO: 23769 - DNA, 363 bp, Glycine max
agcttgatgtcattcaattcacactatgtagacctaaatgaagactaaacatacattatttatgtaattgtattcattatgcgatataatttgttgtaacccgttactaaacaattaatattatcaactactcgtttggttaagcaaggaaattgttggtccaacaaaattcatttacacgtgcagcatacattattgtcataattgacaacacataatgacatgcatgcgtattacagtttgagcgcgacaacacattggctgacttcagtacacattctgaaactagcagtcgcttgacaacacattggctgacttaactacagattgctgacaacacatatggtgacttgactacacatt

SEQ ID NO: 23770 - DNA, 428 bp, Glycine max
  unsure at all n locations
actcaagcttgagttataaaagatttgcttgatttgaatattcagttggattttttgtataatacccantaatgctcactaaatatattaatacttaaatttaaatttaatttataatcaaatcaaattattatgaattattaaatggtaacatgtgtcatccaaactttaaaaattacctgccacacatctcatccagatttatttataaattctcaaatttaatattatagatatgatttgaacttgtggacttttcttttgaattttttgtgtagatttttttttattaattttgtcatttttttgtaaatttttccacaaaatttttctgcatagttagttatgatttatggtttggacaaaactatgatcatttttccttaaatatgtcggaaaaatatcatcgaattctatttttgtgtatt

SEQ ID NO: 23771 - DNA, 349 bp, Glycine max
  unsure at all n locations
caggcgactgagtctctcccttctgtgccctgcagccacagttcgtggatacagggagatcttaacactctacctctatagcctttcaaccacctacaaaccgaagttcaatggcctaaaagccgcagccctatatatcatgtacccttatttgagcaattggctctggatcaggctcttcaatgtaagaagaaatggatgaaatcggctgctggaacttgatatcatatgaggaagaactcatatgccatctgggtttcttgcattcaaggcggactatctgagatgagaatgaaaccaccttcttcaattggagaagaactctgtacaatctcgaagcatgaatccn

SEQ ID NO: 23772 - DNA, 506 bp, Glycine max
  unsure at all n locations
ccccacaacacaatcaacaatgaccgaagatcggaggacaacatatcnacacanacacnnccccgagcggcnnatgagccgtggactacgaancnnnaanaannacccggaaccgagaacgaaaccagggagcaaaccaagtgatcgaccagccaaccaacccacgagagacaggagagaacgcgggacagacgcacngcgaccgcagcaaagacaaagaccagtgaaaaaagcgaacgaaagcaacaacacagccatccgcggacaacaacgcggagacaaaccacccagaccccacagagcaacaaaggaaggcgcagaaaccaagccgccgatgcaagcacacaaaaaacgaacaggaccaagagagggaaaaaaccccaacggagaaacaccaccccccaaaaaaagcagcccacgaaacagcgcgaaaacaaagaaaacaaagccgacgcgcagcaagcacgaaaccccgaaggataccacaccggccaaccaggagaacg

SEQ ID NO: 23773 - DNA, 85 bp, Glycine max
tttctaatagtatatatatcttgaagacacggtctttcaatatgctcttatttatgaagcaaataatccaagaatgattttgtct

SEQ ID NO: 23774 - DNA, 527 bp, Glycine max
  unsure at all n locations
cgcaccacccacgtcctcatagacgaaatggcgacgacacacaaccaaactnncacccncnncccagcgccggggnttggaactgagacggtcgacccacgngacaccanaccaaccgcacccgccggggncaaacaaaggaccacacacaattctagttagattgccaaaccccacaaaggccgacgggtcagacagaacccactccacgacagagaagaaagcctcaagcgtccaccacaggaaaaaaaaacgaccaatcgcaccaaacaacgcggcgcgcaaaagggggcaacaaacccaagccaacgcgcgagggcagagaccacgcgacaagaacagcatgaggacaaaaacggaacggaagatctcaggcgagccactaagcccacaaagcactaaatgaagcccgaatcaacaatgcaacaacagagaacgagaggctcgcacaggagaccgccctgaaaagcccgacaaacgcctaagagcaacatcagggacacccaaggcagaaccaaggcagaacn

SEQ ID NO: 23775 - DNA, 303 bp, Glycine max
  unsure at all n locations
agagaactggctgactgaaaccgnaagaatggaccggaaccaaacgacgcgtttcatttgatacgcagcggacgggcacctaagaaaaaaccgaacctcttccaggacagacgccgaattcgcaaactcagactctacaaagaaaacgccggaaaacaggacacgccacaacaactcgatcgctcaactaaacgccgcgttaaactgtaacaggaggacggcacacaatcggcggcaaaatacccaaacgatagcacagagcgaccacatagagaagcgacatcagacggacggccagcaccc

SEQ ID NO: 23776 - DNA, 489 bp, Glycine max
  unsure at all n locations
ccccgccgcgctccaacggacgcaggaagcgaggcacaaggataacacaacaccnnccccgaggggccaatgaaacgagtacatgcaaaccnanacannnanaaagaaccgacgaagaaaaagcgggacaacagttgtactgtacgccaaacccgcacggggacgaggagcgcccatcgcacaaaacgaagcgaacaagcaacgaaacagcggaagacctcaaggacgacccacagagcgacgggcagacaaagccacgcacgcagcgaaaggaacccggcagacgcgcagagccaccgaccgggcggagacgggagaccagcgaacggagaggggacaccgaagaggagaagacacgacgcgaagaagagaagcgggagcgaaaagaggaacgccgaggaaagatgaacagagggcgggggaggaacagaacgaaaaacgccaagcagggccagagaccagggaaagaaacgcgaagcaccccaacct

SEQ ID NO: 23777 - DNA, 311 bp, Glycine max
  unsure at all n locations
tttgcaagttagtccttgacacagacatgatcggtacatgatttgtgacttgtangattcactttgggaaaaattggatgggggaaagactggtcttcgaaatctgcactttatgcacaattttgctgttgaaatgtgcagcataattctgtattagtgcataaaaatgctcgtgtatggctggttgtaaaaagggtatctacatatggggttctggacatttgctatcatatcccaacggtcaaaattcatacctatgtactagagacttccggttaaatcttagagtcgatccgacggttaatcgaatg

SEQ ID NO: 23778 - DNA, 501 bp, Glycine max
  unsure at all n locations
tctcccacccactcactcccataacaaacgattgaacacaaagagaaggagaccacccccccaagganaaattgaccgtagacaggcctacaaaccgaanacacgcaccgccagccaaacccccaagggaagttgacgaccgaaccagccagcagagcaccgccgacccaagaaaaaacgcacccaccgacacagcggaaagacggagcaaaacaccagagcgacggacaacccgaccggacaagcgaccgcgaacccaacgcgacatagcgagccaaaacaaaaccgctccatacccacgaacccaaacatcatagaaaggccagcccgaaatcaaccacaaagcctggggaccgcacacccaacgacgagcaccaccagcagcacaaaccacancaccacccaagacaagagaattcgcagcaaaacacccgcagagaccaccccaagcgccgggagcaacgcgaagcagcacccacacgcaacggaaacacgcaggcg

SEQ ID NO: 23779 - DNA, 362 bp, Glycine max
agcttggccaaactcgccaatgacttctgcgatttgcatggtttttacgtaaaaaatagccccatagtcccatatcgggaattagtttcgaaaaggagcccatgttgagaaatttgccaattatgtattctttacatgtttgccgttaatatgccctaattttacctaaacatgagataatttccactctctaaattaattataattatctaagagcaatattgttttgtctttaaaatagtttatttataacttatttagacttattattatacgacaaatattagtgtataaaaatagctaaatatatgttaagttgtttttatcttattccaataaatttctaaactaacttataactt

SEQ ID NO: 23780 - DNA, 414 bp, Glycine max
tctcatggtcttgtgtcatagtcatatttatacatgtttgcggtccaccccattgtgtcactttccatgcatcagttttttttggataaaattgccctcatataaaaagggcaaggagactcttcggtgttgttgggggcaacaaacgatatatttgtgtgatttcgtttcaacaaccttaaaagtttgatgcaccttcatcacatattgtttagtgcattttttaccgcatctttactgtcaaaatccatgccaacatataattcttgtccaacattaaaagtcgttggtatgtccagatcacaaatgtcctcctcgtccggatgactccaattgatattattataatgcatagcatcattccaaaatggattttgaatttgtggtacacctaataattaataaaaaatcatg

SEQ ID NO: 23781 - DNA, 358 bp, Glycine max
agttttgaattgaccagcctgtggctctgtgctttcctaatgtagtatatatcttgaggacacggtctttcaatttgctcttatttatgaagcagataattcaagaatgattttgtctcttgcacagtactagcaaatcagcatgtgctgaagttaaatgccatgagctgatgggtcttagagtctaatgggttataaattatagtgattcgagttacttatttattttgagacaattttttttttaaatgtttaagtttaacacactttttaaaaagtataaaaacgattaaccaaaaaggaaaaaaagaaattcccaaactatgctgttaaaatgttaatcacctcttctttccat

SEQ ID NO: 23782 - DNA, 376 bp, Glycine max
ttagattcttggactgactatttattatgatttaatctcactcaaaatctattgtcttttcttgagaatgtattatgtaaggttgaatctagatattctccaagaaactcaaaatgtgttgaattggtaacatctggtattcaattccattaatttaataatgtcattccctctcctgtgccctttcttgtaattatctccacttgttatcttgatttcttcccatttattatggaacacaaataggttcttacattcatacgtcaaaacaatttagtcctactgcatgaatataattctgttgaatttgttagatgccaattaggacctatttacttgtgttattatttactgttcttattcattgattttactc

SEQ ID NO: 23783 - DNA, 352 bp, Glycine max
agcttctacttatgtggcagggcgggcttccttcaccttcttgtctcaaccgcgagctttgactaccgttcttccttcctgcgatgcttctctttatatctgcctgagtgggcttatagtctaacccatacttcccacgatttcctttggcatttattacgctagttatgccgccgttgactttgcctaaacccattccgggttcgtaaccgttccctaacataactcgggccatcattactgctgcatcggacaggcaagcttgcccagagaaggagtccactgaggaaatgcttaccacctcataagactggaaagcattttctaatgactcctctgcggcctccacata

SEQ ID NO: 23784 - DNA, 335 bp, Glycine max
  unsure at all n locations
ggtgatgaacttgtgaacatgaanacggcacctgatgcacttgtcacatgaggctgtatggtcatttcaggcggcggaccccagggccccgaataaatcgcctaagacacatgccggcgagggaggcctatccttgagagcgaacgttgacggatggtacaacggaacctctttttgagtaacacttagattgtcgtattaatggatgaactgattatttatcgttcggatggtgcaaccatgtaagaacttaacgtccaaagtgactatatctttggaggacccctcatttatcctccccagggccagtatccacttgagtttgtcgagcgaag

SEQ ID NO: 23785 - DNA, 374 bp, Glycine max
agcttcgaagagatgaagttctaattgaagcactcatattcaagtgcttttagtacaaaaatccgtgtaaattgcttgaaagtttaaaatagcattcaaaacaccttgattatcttgagagaacaaactacatgctaagattgtctatccatttgtaagacgatcgagtgttaatcattgtacaatcgaataaacaaatacttatgtgtgttaaagccaacaatgacttgataggacaaataatactctctgcatttaaaatctcaaattgttttataagatctaaaactatcatctgaattgttttgcgaaaatctgatatctactttctttcgtaattcaccatcaaatgatactgctgttgttttagaaaa

SEQ ID NO: 23786 - DNA, 419 bp, Glycine max
  unsure at all n locations
tcaattggagtcttgtcttttacagacttagttggacatctgttgagtatgtaagcagcagtgtagactgcttcagcccaaaatgtgttaagtagtcccttctccttgagcatcgatctagctatttccataactgtgcgattctttctctcggacactccattttgttgaggagaatatgagactgtaagttgtcgctaaatgccttcatcctcacaaaatctttcaaactcgcgagaggtgtactctntgtcgtgatcacttcttagtacttttatccgttttccactttgatttttagcaagggccttgaactttntgaatactccaaagacttctgattttttcttttagaaaatatacccatgccattctagagaagtcatcaatgaagagtatgaagtacccgttgttctcat

SEQ ID NO: 23787 - DNA, 347 bp, Glycine max
tgtacaagtacttggtgctatggcataccgtgctcctcaacatttgtctcggggtcttcttaagattgttcccaaattgactgagatataatatgaagcacacattatttttcacttctaaagttcttataagctatagattgcattaccttaacccatctcgtaattcgaaggttttgactgatacacatcctatagttagtcagctgggcaaatggccccttcaacacgttagtcttgacttacgaactattctatccatttgattcctgcttctgtgattaatgttttttatttcatggttttttcaagttgggaatgtgatcaaaagtctataatattctgtc

SEQ ID NO: 23788 - DNA, 416 bp, Glycine max
tgcactatggtttataggcggacaaaataatgtgatttattgaataactgcagtaaaatttcaaggatcaacctagcacaaagcttgaaaatcgactaaaagtagcaccggtaatagttttcttttgtgccaaactaatttgaaattcctagtacttcatgaaaatgaatctaattcctgtgagattgagacaggtttgattgcaattttcaataataaactcttatccgatgcaaactaactgaatgttgtttaattaaataagatgccttgccaacagggttggagaaaaacagtagttttaggagtggacaagccaggatccacgttgggccttagttgtagtgagtcctccatagtgggaattgaagagcctcgtggggtgcttatttggaggactgatgtatctattctcc

SEQ ID NO: 23789 - DNA, 353 bp, Glycine max
agcttttgagcttttcatatggtcatagcttttcactcggatgtccgattcaggcgcataatatatcgagacgttcgaaattgaacaatggaagctcttgagcaattcaaatgatcataactttttactaagatgtccgatgcaggcacataatatatcgagacgctcgttattgaacaacggatagctctcgagaaattcaaatggtcataactttccacacggatgtcagattcaggcgcataatatatcgagacgctcgaaattgaacaacggaagctctcgagaaatataaatggacataacttttactcggatgtccgattcacgcgcattatatatttagacgctcg

SEQ ID NO: 23790 - DNA, 413 bp, Glycine max
tccattgttaaatttcgagcgtctcgatatcttatgctcctgtttctgacctccgtgtgaaaagttatgaccatttgaatttctcgagagcttccgttgttcaattttgagtgtcttgatatattatacgcctgaatcggacctccgagtgaaacattatgaccatttaaatttctcgagagcttccgttgttcaatttcgagcgtctctatatgtgatgtgcctaaatctgacctccgtgagaaaagttatgaccatttgaatttctcgagagcttccgttgttcaatttcgagcgtctcgatatcttatgcgcctgaatcagacctccgagtgagaagttatgaccatttgaatatctcaagatcttccattgttcaatttcgagcatctcgatatgttatgcgcctgaat

SEQ ID NO: 23791 - DNA, 368 bp, Glycine max
  unsure at all n locations
agcttgctattttgaaagctgganaatcaaacttgccgcttctcgaacccaattcgatcctttcgccgcgaaaactaaatcagcaaagcttgaaggtgtgtaacccaccatcttctcatagtagaacaccggtaacgtgtccactatgattgctatcatctccttctccgtcattaggggcgctacttgagctgcctgtttgctgatcggcaagtgtaccaattttcacaagtagtatttaaacgataaaatcgagtatcgtatccacaagaaatttgtttcacttagatgatgtatattcagtatggaaacacttttaacttttggaaatgaaataaaagattcaataatggttaaattatctgcaa

SEQ ID NO: 23792 - DNA, 402 bp, Glycine max
ttctatagtgtgaaggacaaattaggctcttaccatcttatattatagtttggggtcagggcggtcaattctttgaatgtgtctagatccatggttgacttgccaggatattatgttcaaagaaagaagaaaatgttgagacagttggattgttgtttcaacaattaaccatgggggaaacaactacatgacctttgatacattgtagaatgctgatatgtcaaatagttaataaagttgttttagtaatacttggttatcctccattcttgtccgatgaccctataaccacatgcaaaaaggtaccatccttaattgttttaatcgctcctgattaaatcgtaataatttcttgcatttcattggagaaatcatttaagatttgtagatgaggctaatgaa

SEQ ID NO: 23793 - DNA, 362 bp, Glycine max
agcttgtggaattgcacaacatcggatatttggatgaattaatcgactaccttatttcataattgattagatctgttgtaactatcataaattataaataccgttatgtgttttctttgacaatgactctagataagattaatcttgaagaaaagcatgttgagtcttctataatgattgcactacatttagtttgaagattcaagataatcaaagaatcgttcattctaccgtcatgaatagatcatcttatgaagacaatttgaagatagtgaacatctacacattgtacgtgtattcaatccttaactttcaatcgtttagattgtgattcttggttacggttactaagaaggttatag

SEQ ID NO: 23794 - DNA, 413 bp, Glycine max
  unsure at all n locations
cgcatgattcacattctccccctttgtcaagcaaattttttntttatcatcaaaacctgcatgatttacattctccccctttttgatgatgacaagcattatccacggcttgatctttctgacatcatcaaaatcttcatgatttacattctccccctttgtgatgatgataaccacctataaggtaggagcaacaacaaagaaaaaatatctattggcatatagtatactcccccttggttttggaatgcttgcttatatgagacaattgaagatttcatatttttcatatataaaaagttgtctcataaagaatagacattgttacttactattctatcttgtatatgactctcccactttgtcaacatcaaaaacaaatcatgagtagagaggataaaaatgttaccact

SEQ ID NO: 23795 - DNA, 354 bp, Glycine max
agttttaatattttctgaattcacaacgtgtgcgcttagcaccaccctcgcgcttagcgcgattaagtgaatttgagcttagcgccagttgtgcgctgagcctggctgaagacaactgttgtgcataatgcacagatctcgcgcttagcgcgcggacttgatattgatgctctgtcaaattcttttgtcgcgctaagtgcgctgaagctacgcttagaggtggatgtgcgcttagcccactgatgagctaagttcaattgcactattaacacttcatgacttatcctctttttcacctgaaattgtacatacttcatcattaaatccaatggacatattctagatcagtcttaa

SEQ ID NO: 23796 - DNA, 449 bp, Glycine max
  unsure at all n locations
gacggcttttnatgatacctagaacntgcgaacacgtgacactatcaagtctgcaatcttgccttatacgctcactgaaagatgcgatttatggctatcctaggacgaaacagccaggctcagactagctccagaccgactcaaatgaaaactaggaccggctataacctgactttgtgcaaaactacacttgaatttcggaggggaccatcaacacgagtagactctctgatggactgaaaagaggtgattactatgattgagtataccactcctgtaccctagcatgcaaatgactgtggtcatgccctcaactccccgacttagggttgccaaaaaacgattaagtggaaaggcagacacgatccccgggagcgccagtggagaagaccgcacagcggggccagaacaagagggggctacatgcggactgtgatcttcctgccaan

SEQ ID NO: 23797 - DNA, 325 bp, Glycine max
agtttgaatctgacatccgtgtgaaaagttgtgaccatgtgaatttctcaagagcttccgttgtttaattgcgatcctatcgacatattatgcacccgagtcggacatccgggggaaaagtcatgatcattcgaatttcctcaaagtttccgatggataacttcgagcgtatcgatatattattaccctggatttgacctcagtctgaaaagttatgaccatatgaatttgacgagagctgtcgatgatcaatttcgaatatcactgtatgtgatgcgcctgaattggacattcgagataaatgttatgaccatgtgaatttttc

SEQ ID NO: 23798 - DNA, 368 bp, Glycine max
ttataagtgcgggtctgggagacgaggtttttgtttggatattgtgaaaatgatgtgacgagtacttctgatatggtccgaccatgccctcctgatttccagctgggaaattggtgagtggaggaacgccccggcgtttacgcaacatgcataatgtgaacctttacggctttaacagctctataggtgggcctaggctttagagttttctttttgttaaggctttgggtcttttgtttgtgaatttataatacaaggatctttgctcatctgttcctggtctctacccattctcattcatttgcatgtctacttccttctctgaaacggttgattcgatgacgagttccttgaaggttctaatacct

SEQ ID NO: 23799 - DNA, 345 bp, Glycine max
agctttagttttcaattaccagcgtctcgatatattacgggagtcaatcagacatccgaattgaaagttattgtcatttgactgttcatagagcttccgttttcaattatgagcgtctcgatatcctacgagactcaatcggagatccgtgtcaaaagttattgtcgtttgaatttgctaagagcttctgttttcaattacaagcgtctcgatatattacgagactatatcggacatccgagtcaaaagttattgtcggttgacttttcttacagcttccgttttcaattttgagcgtctcgatctattacagggttcaatcggacatccgagttaaaagttatt

SEQ ID NO: 23800 - DNA, 352 bp, Glycine max
  unsure at all n locations
ntgagcanattcaaacgacaataactttcgaatcggttgttcttatgtgtcccataggatatcaagacgctcggaattgaaaacggaagctcttagaaaaatcaaatgacagtaacttttaactcgaatgtccgattgagccctttaatatatctagacgctcgaaatttagaacagaagctctatgataagtcaaatgacagggactttcaattctgatgtctgattgagtcccgtaatatatcgagacgctcgtaattgaaaactgaagatctgagcgaattcaaacgacaataacttgtgactcggatgttcaattgcgacccgtatgatagcgagacgctcgtaattg

SEQ ID NO: 23801 - DNA, 362 bp, Glycine max
agcttagcacgtaacagtgagatcctaaaactataatcccaaagaaaatcaagcagacgtgactcttaaggcaacacattcacccacaatgcatttttaagaaaagacgagaaatatgaaggtgaatgtattttgattagtgatgaattgaagtggcaccttgagttttgaaagcaacaaaaagataaaaatcatggcgactttaccataaaagcaactatttgctgctttaaaaaaccatggcaagttcaaccaatagtcaatccaacccgcactagactcaggtcaaagattagtctcttaaccgcggaaagtcaaaaagataattaccaaaaacagaagatcagcatttattttactaa

SEQ ID NO: 23802 - DNA, 417 bp, Glycine max
tgtatcttttatgatgaagcagctatgaagtattttttactaggtgaggctagctgcataaatcaaaagacaccattgttttctatcttcaactaaaccctttgctagtccatttagataaaatataaacataaaaaaaaaatccaggttttcatgtctactctagtcatgatgatcaggttttgggtaatgaaacacaaataactctgaaattttttgagagaactaaataagaaaaatcctaacaataaggggaaaaaaataattaagaaaatcaagagatgtacacattacagatgtacaagaaagcaggatagtgagacccctagatcaaccaaaaaaaggatatttagatttccaaatgtttttattatagggtttaggagactcagatttccaaatgggtgtgcccctgat

SEQ ID NO: 23803 - DNA, 361 bp, Glycine max
agtttacatatattccccatgtgataatctgaacaagagagaattatgggaagcactaagccagctaagacaccaagatcctgagggattatggtgcttcttcggagattttaacagcattagacaccagtccgagagagaaggggtggctcacaggggtatggaagcaaacaacataactgattttagtgaatggctagccgacctagaggtagaagaaatacctagtgtggggagaagattcacatggtttaatccaaacgggactgcaaagagtaaactagatagaatttttgtctctcatgaatggctcaacaaatggccaggctgcacccaattcatcttggatcggaacttctcg

SEQ ID NO: 23804 - DNA, 285 bp, Glycine max
  unsure at all n locations
cattcggaccttgatactagctgtgctagattgatgctcagctgaggggattgtaagttgggagtttggtaatgactgttggaatcactttatgagaaaacgctgatggtaatggaacactgctcctccttttgacctattatatattataagagcatgaaagagatgattgggaaataccacaaaatcaaatctagactgcattcttactcacagccatcaccttgtttgcctgntgctagttgaaccaacaccttaacactattggcgttcctggttatggct

SEQ ID NO: 23805 - DNA, 358 bp, Glycine max
agtttgtaatagatttgaagtcaaaatgcaattccaaagcagtatcatttaaaatatttaacaaaaaatattattaaatgagctaattaagatattaatataaaataataatgaaaaaatcttgctttctaattttacgacaatttaaaaaattataataagtaaaatataagtcgcatatataatttaataaactattaatttggcctttttaaatatttatttgacattgattttgcttttaatttttagtgagatggagtgagtcttttaaacattgaaaagtattaaaatctttttgtgatatggagtaagtcttttattttaattatgtaagtttgctccttacatataatag

SEQ ID NO: 23806 - DNA, 407 bp, Glycine max
tcaatggtaaaaaaattccctcagcactaataacttttcttcctcttccctctgtcacccaagtgttctacaaggtttagacgagaacaagacttgtatgacgctggacggtctaggttcgaagctaggaggggctcttttgggatcatcgtcattctcttgtgtgtcctgatgggttcaagtttaaagaaggaaaggggccctaccattattccaaagcaactatattagaataggatagttttcagaataactattttgaaataaaaaaattgtattttaaaacaactattatgtaatatgaaaaactattctcgaatagctattttgaaaatgtattctattcaaggtgggggtgtagggtaaagtagtatttttatagtcttttgggaggtgtaggatgtaaa

SEQ ID NO: 23807 - DNA, 218 bp, Glycine max
  unsure at all n locations
agtttgntaatgatgagttcttagttatgagaggggtgagtgtctgtaacctatagcattctaaggaagttttctcaattaagcctcccaaagacgtagggtctagaaaacttcttctggaagcttcctagcctatacatacaatcctgagaacacttggtgtcactttgatgaatgagagtatcgcgtgacatgctttaatgtatcgcttctctacc

SEQ ID NO: 23808 - DNA, 492 bp, Glycine max
  unsure at all n locations
ggccggggnttatactgagactgacgacttcaanancgcgaagcangnaacctcaagcccggagcatgagatttgggagcttttacgtgttgggttttgctaagaccagaggagctacgcggattggaacctagttgtaagtcatggattgatgagagacagttcactggtgcaagcgaagtctacgtacctaactccgtgctataccctcatttattatctaaaaggagaggaacgaattgcaggataatttgtgggaaagaggcaacattacctcagcataaaaggctgtgagttcttttattccgtgtatgcctaatacaaccatcatgtatataagtcagtattagacagacttgatacaatgtatacgctcatctcgttacacaccactcatgatgccgcagtccacatacataccctagctcttaaccttggtatttatacggagtgacaataaagaaacgaccccgccttcacttaggaaataac

SEQ ID NO: 23809 - DNA, 374 bp, Glycine max
agcttgtagggttaaagtctcacgattgtcacgtgctcatgcaacaattgttagccgtggctatacgagacatctttccaaacaaagtcaggttagcgataactcgcctgtgctttttcttccatgctatatttagcaaagtcattgatccagtcatgtttgttgagttggaaaatgaggccacaattatactgtgccagttggagatgtattttccccctgctttctttgacatcatgattcacttgattgtgcatctggtcagagaaatcaaatgttgtggtcctgtttatctacagaggatgtacccggttgagcgatacatgaagatcttaaaagggtatacaaagaatctatatcgtccataagcatct

SEQ ID NO: 23810 - DNA, 418 bp, Glycine max
agcatgttggtctctgtctcgcataaatgctgagactttcttcttttggaccttgaacaagcaatcaactcctctttcagaaccatgctatgtgttcgcgactggtctctttcttcccttcgcaacttgagttcactattgctaccccatagagctccgcgaaatttgttccggccatactcttccttgcgagccctcttggtctcttgttcaagggctcttgcggtaattgcattctcttcccgtaacccggcacactccttccgaacgtgtgtagcggccaacttgaacttctccttggcaagtattgcctttcctaactcgcttttgagatcttggacttcctcgtcctctttcggtgcttcaaaactctcttcgttgacgacttttaacttggcgagccaatctaaacctcgta

SEQ ID NO: 23811 - DNA, 365 bp, Glycine max
agcttgtccttgactcattttctccttgaagtgacgtctccaatcacctttcctccttctccattctgctgccattgatcttcaagaagcaaaggatttcattgatgaagaagatccaaggcctacaagctctacatggagctacatcatgtggtatcaagagcatcttcatctaagtgatgttcttttgcttcctctatcttttgcttggtcaattcactttaattccttgttcttcatcatattctccatgtatctcctccattatcttgtgggttggttctgatcatagtagattcaaaaatataaatcgattaaatcctagatctatacttgttcttgcatttctatggctcaaattttat

SEQ ID NO: 23812 - DNA, 431 bp, Glycine max
  unsure at all n locations
tatagacaactcaagctntntccacgttatacttgatacctgtgtggttatgcaatttcaaaattctgttataacaacttagcaaaatatcttgtatgaaatggctataaaaaggggtaatgatgaaataaaaagatatgagaattattccctgcaatttagcttttcttttattctagttagctatcaactgttccgaccttagcttttcttttattctagttatctatcaatagactaataggaaagaacaaaatactaaacatttatttaattaaatctaataaaaaatttacttcaatcacattatttaacaaaatacttgcaaggtctgtaacttcatgaactaaagagcaaatacaaacgaacaaaatacaaatacatccagcaacatcaaatgactcatatccattacttcaaaatacaaatac

SEQ ID NO: 23813 - DNA, 363 bp, Glycine max
  unsure at all n locations
agcttgagatgcttaataataacattctaggactgcaacacggtacgctttttgatgagaagcttcatgataacataccatgagagggatgtttctctacacttggagcatatagaggaactgtggaagatcttgggttgcaaagagatcccttcaaggcttttcattacagggaggtacattggaggagctgatgaagttgtcggattgcatgagatggggtggcttggaaagcttttggaaggaacaccaatggactttgctgatggtccttgcaaaggttgtgcctgcatgaggttntccatttgttccaatcgtaatggtagttgcaaagagtttaccaccaatggtgacaacacgaat

SEQ ID NO: 23814 - DNA, 416 bp, Glycine max
ttagtcatggttatggttcaaaattagcatttatgaatcacgttttgaattaatgcagactgtcacaactatctatgggagaactagcttcatatattctaattataacattctacaaccatttctctctttctttctctcccagatattctaaatgaataacaaatgaaaggaaatcagatgcagttactgtacaagtacactgtaaatacacatgcagacacatttagaaaatgcaacaaattttgtaaatatagcaagcaacaaataaacattgtattattgtatcacacatctgttaatatgtatcataattctgccgtggtccaaaatacagaaatataaccatgtagctgtattcaacagttataaacatatagtttcttcccattgcgctcaactctctatttaaaaca

SEQ ID NO: 23815 - DNA, 367 bp, Glycine max
agcttggagctttgatccctcttgatggactagacttagaccaaacaacattattgtaacaacatatttaaaccaaaacttaatctgtagatccctcatttaagacaaagtttcaatcctgcttcaatcaagttctaaggcaacaatacattttccaatgctaaagtcacctaactatgcacacaaatgggtgatcagaccaagagcatatagaatttaagcactgaaagaagcattgaacacaataaacacaatcaattagatattaaagtaatcacatcagttgttctttagaaatccccaacaagagtatttagccagccattacagaaaaaccctaacgataatgagattaagagtagagaat

SEQ ID NO: 23816 - DNA, 420 bp, Glycine max
tctacttatgtggcagggcgggtttccttcactttcttgtttcctacgcgagctctgaccactgttcttccttcccgcgatgcttcttttcatgtccgcctgagcgggcttatagcctaaaccatacttcccacgattcccttgggtttttatcagactagttatgccgccattgtctttgcctaaacccatcccgggttcataaccgttccccaacataactcgggccatcattaccgccgcctcggacagacaaggttgcccaaagagggagtccacggaggaaatgctgaccacctcaaaagactggaaagcggtttctaacgattcttctgcggcttccacataaggcatggaggatgggcagcttaccaagatatcttcctcgcctgacacgatgaccaagtgcccctccactac

SEQ ID NO: 23817 - DNA, 348 bp, Glycine max
cgacagacacgagcggatgcaacaaatgttaaccgaggctttacgatacatctgtcctgacaaagtcaaggcatcgatcactcgcctgcgcttttatacccatgctgatcatatcgtagtcttagctgcaaatatgtttagatgcgttggaaaatgaggacacgcttctactgtgccaatctgagagtgataacaccaccgcttcccttgacatcttgagtgactgtgatagagctgaacccaaagaattgagacagtgtgactcctgtagatctacagagggtgtacccggatgaacgagtgtggttaatctgaactaggaatacatacttcgataatggcattgca

SEQ ID NO: 23818 - DNA, 396 bp, Glycine max
tgtgcctcgtacttacgatcattggagcattaaatgtttatccttctttgatgcaaaaaaattactctgattggcttttgtgttgaatactttagtataaaaccacttttccttggtcaaagcaagtttttcataacagattttgaactatagcttcatttattattcataggatttgtccgatcgtaggagaatatctctgcaaaatgaatctcacacacagaaataaatgaagtgtgaaatattattctttaatgttgtatcagatcatgattttgtcttattttcgtctgatactttagacgcattatgtatgtacaacatgatctgatttcacataagacacaacttttaacttttgtatttatttgcatcgaataaaaataaggagtcttg

SEQ ID NO: 23819 - DNA, 312 bp, Glycine max
agcttgacatttgaatataggatctttcctcctcaagaataagggtgtgattgatattctatacatcgtgccaatattatattagaatgtgttgacgggctcaatcatttcacaccaagctaagggactcgcaaagttatatacatatatgtatatggatatatatatatatatataaagaattctgccccggaaagataggatgtctttactggctttgaatggaaacatcattgtggcaacagctcatatgcttatagcaagaaacttgcgtgtcacccccttggtccaaagtagattgccccctaagct

SEQ ID NO: 23820 - DNA, 413 bp, Glycine max
  unsure at all n locations
ccactgacacggatattagtaatagtcagtggcgtttataaatctacctatnnctaggggacattgacctgagatgacactccaacaccncanctaagctgagacagccggagagcatacttgtaatttcttggaacacaatacaacatactgcgaagagcgaagaatggacagctatatggagacaggatgaccgacaagaaggccaagaggattcacccagggagagggaagataatatacataactccttaaatctgaccggatggacagggggtttaacatgaaccaaaaatcctcgactaggatacagagttagaatacatctaagaatggcttgcactcaataggaagggcaggcagcataagtcgagaatttccttaggcggactaacccagggggaagagaaacc

SEQ ID NO: 23821 - DNA, 360 bp, Glycine max
agcttatgcttctctttttaacctatatttgttgagtgggccaacccattgtgatctattttttacaagtagaaagaatagcaagccatatcttattgagccatcctgtttgacatctctaattgtatcaatgatcttatcttacaatatattgttttctttttctattatactttttatactacaatataaaatttctcttaaagaatatagggtaaactatgtttttaaccactaaactttttcaaaatttgatttttagtacataaataaaaggttttttatactagaaaacttttttttatattctgaagcgtattttgtagaagtaaagatattttgatgttttgatgatgccaa

SEQ ID NO: 23822 - DNA, 396 bp, Glycine max
tctattgctcttattcatctttacttgggctatctcataccttttattttttttgtctaagattttgcatacacctccttcaaagtgaagtgtgtagcctctctccatcatttggccaatgcttagaagattttcttttaggctgggaactagtaagacatcatgaatgagtcgcgtacctttatctgtctccaccatgacagtgcctttgccttttgattcaaccacacttccatttcccagtcgaactttgactttgacagactcatcaatgcttttgaaaatagtctcatccttggccatgtgattgctacatccactatccaagtaccagcttcctcccttttcttttattgagtcttgagtggcatagaacatacattgttcttgatcatg

SEQ ID NO: 23823 - DNA, 357 bp, Glycine max
agcttccaattttcagaaccagggagcatcaaacacggctcgaggtcgattcacaacaagaaagcctacctctgtgagcatagtgacagcgatcctcctaaatcctagagagattcgagaacaccctggctgtatcaaaggactttcacagaccttgtgtgtcgccctcgctggaaagagagatactatccttccttacatcttcacccttgttctttcagaccaccaattccagaaaatccacctctgcccagaatgatctagtggccataactcccattgtacgcactcaaataaagtgatccttgatgctaagttgaatttcaaaacgagaccctccacctggactggaatcac

SEQ ID NO: 23824 - DNA, 386 bp, Glycine max
cgcttgtgactgtctcgatatataccaatcatggtgaacgtttgtattgtgaagggggaccggagctgttaactttcatagttgagtgaggctcacatgagacactcactacctattggagaaactctcttgagttataatggaatatcacagtcgtctgttcaatcttaaagtaccatattatcactccaatcttatgtctctccttccgtttctaataacatatttgggttagcttgtgcaccttataatcatgtccctaactgtcctcatagctcacatattcacgaagaaaacttcatatatagaacacagtacggctagagaagattgagcagtccctccataccttagttggggcactagaaatatgatgaatatgagtg

SEQ ID NO: 23825 - DNA, 361 bp, Glycine max
agtttgcttctacagaaggaaattaaaatcaaagcaattcaaattctaggcatttcaaatttcccaaaattttgaaattcctaatccaaatacaagattaatgattgcattaaatccccattccgtttgtactagaaaaaccactctctttagctttcatggtgagcacgtcagtaggaatccacttcctttgcgttaaagcaagtatgtcacaacatagcgtgtctttttatgatgtttggaaatttcaacgaacatttttggttggacaattagttgttgtttcctttataaggagctttgtattctaagttcaatgagctttagagtgctttgaaccccttcattgtaaattctgtta

SEQ ID NO: 23826 - DNA, 415 bp, Glycine max
tctatagaaggttcgttcctaattgctctactattgtatcacctctcaatgagatagtgaagaagaatgtggcatttacctggggtgaaaaacaagagcaagcctttgctttgctcaaagaaaagcttactaaggcacttgttctagctcttcctgacttttctaaaacttttgagctagaatgtgatgcttctggagtgggagttggagctgttttgttgcaaggtgggcaccctattgcttattttagtgaaaaacttcatggtgcgacccttaactactccacctatgataaagagctttatgccttaataagagcactcagaacttgggaacattaccttgtttccaaggaatttgtcattcatagtgatcatcaatcacttaagttcattagagtgcatagcaagttaaa

SEQ ID NO: 23827 - DNA, 353 bp, Glycine max
agcttgcttgtggagcttctatggaggctggatctttgagcttcaatgaggtccttcaatggtgatttttcaccatggagatgcagcggaagacaaaggagaagaggtgagaggaggcgccatccattaaggaataagccatggaaaaaaagagcttcaccaccaagatgagccttggataagaagcttggaaggatgcttcaatggaggaaaagaaagagggagagaaagagagaggggggagcacgaaattgaaggaagaaaaagggagagaagttgatctttgagttgtgtctacacgactttcattcttcttcacttaccacaagtgtcacctgtgcttactttatata

SEQ ID NO: 23828 - DNA, 257 bp, Glycine max
tgaaactaagaatgtagtgtgaagtttcacgcttccccctttttttggttttgtcttgcaaaggaaaaacccaggatgaaccaacatgaaaacaaatggtatgccatttctgcagatcaaaaaggttgttgaacgcatatgcatgatgatgccatgactcatgccaaatgtgatgctggaatatgataacggacaaatgcacgatatgttcattatgatgttatgaagagatgctcatgcgatgcatgatatgaatg

SEQ ID NO: 23829 - DNA, 354 bp, Glycine max
agcttgatttatactggttcggccacttgccgcgcctacgttcagtcctcaagcaacccacttgagattttccactctctttgtaaaactccttttacaaagtctgaaccacacagggacaacccttcccttgagttcaggaatcctctacaacaagagacccacgatctcttaatcccttttcagaaataagaagaagaaatctctcttaaaagagatagattgtacaatgaagatcaataaaaattccttattgaatatgcaagtggttgaccaaggaatctttttgagaggataaaactattgggcaatgaaaactctctttaaattcgtgtttccaagtcacctttgatg

SEQ ID NO: 23830 - DNA, 406 bp, Glycine max
tcaaaaggagccataccaatactggcttggttgctattgttgtaagtaaactcaatcaatggcagacaatccatccagctaccttgttgctctataatacacgcccgaagtagatcttccaaagtctgaatagttcgttcagtctgaccatctgtttgaggatgataagctgaactaagcttcagctttgtccccaaggcttcatgtagacttgtccaaaatcgcgaagtgaacctcggatccctgtctgatacaatactagaaggaattccatgcaaccttactacttccttgatgtacaactccactagcttctccattctatacttcatattcactggaataaaatgagcagatttggtgagtcgatctactatgacccacacagcatcgtgtccacgactag

SEQ ID NO: 23831 - DNA, 371 bp, Glycine max
agcttatttgtctaccaatataagattctcactttgattcgtagtataaattattctttcaagaatttctcttacaatacaagaacgctctctaattaaaaatttaattttgtttgacataaattttcgtcatacattttttgcatatatatttaataatgcgagagtatatcatttaataagtggctcattaaaacgttattatttaataaattcaatattttacggaacttgataaaaaaatatattttttggtacatttattaatatttatttgataaaaatataaaaatttagttaattatgtaaaaaattacattaataatgtatcaaattaaaaaatttaaagtgtgtttaatttgtaaaactat

SEQ ID NO: 23832 - DNA, 433 bp, Glycine max
gaccttagaaactaagcttacaagggctttgacatttggagtaggcatcaagattagacctagcatccactatatcatgagtcacaccagctttacaagcttacacatgcttttgcttaacaagttcaacaacgagcaaaccactggctgcactcaaattataaccaccagcaaacccatctccttgaacaccattcctaaccattgcactgaaaagattcaccgcttccacctcctaaccatgggacccataacctgaaataatcgaattccacagcacagcacacggttcaaccttactatcaaaaccactttttgcctccctcattctggcagcattggcataaccagatatcatagctgacaaagagaactcatccacattcgttacaaaactcacaatgcgagcagcacttttcaaatcaccacactt

SEQ ID NO: 23833 - DNA, 372 bp, Glycine max
agcttttgaattttatctgtttaagcgtcccatgttaatgcgagctaattctattatgccatagccatggatcattatctttgctaagacaacattgactattacctaaattttgacttaagtctatcatgtaaacattattgactctaaaccctatatgctttatattcgtatcatgtccatgttcaatgacacattgttgagaaccaaatgataccagatagccgttgtcacacacttgactaacactaagcatgttgtgcttaagacctccaactagtagatcattttcaatggaggttgaagaatttgacctatttttccaactccaagaattctaccttttgtgttgtctccatacgttacatgccc

SEQ ID NO: 23834 - DNA, 401 bp, Glycine max
tgctctaaatttacattgatgtttgtatttattggatgaggttgtatgtcgcttttgtactaagggtagcatttcttggtaaaactaactctccaaatgtttgccttcgcaggaaatggccccgaggaagctttcctcaaagaggtccagtaaggacaaggcggtcgaatgaactagttccgctcctgagtatgacagtcaccgctttaggagcgttgtacaccagcagtgcttcgaggccatcaagggatggtcgtttctccgggagcgacgcgtccagctcatggacgacgagtatactgatttccaggatgaaatagggcgcctgcggtggacatcactggttactcccatggccaagttcgatccagaaatagtccttgagttttatgccaatgctt

SEQ ID NO: 23835 - DNA, 361 bp, Glycine max
agcttatactatattgtttaatcttgagcctttgttctcaatgattaagtcggtcttatcatagagggggtctttatgctttcttccaatatcgagaatccattctgtaagtacaatgtttttcctaatgatatgatcgaggcttcacaccagtaatgtggacttatcatttactaaaagaattaggattccagacaaggagaaattaccaccatatacatcttgtataacacccaattcttgcgtaatataaattaaaaaagattctatttaaaaataaatagagttttaggaaaataatgagattttcataattaaataaataagattaaataattttattaattaaaataatgatttt

SEQ ID NO: 23836 - DNA, 425 bp, Glycine max
actcaagcttttacatgcatgttcacaccatatttactatactttgatcaacttatgctatctattcgatcgaaaagataatttatattactcttctaatgtagtcgacaactaaaaaaaatataacagaaagtaatgcttaagccaatcaaatcaagtcattgtgaatctcatcattactatcatgcatctcaaagagaaggagaatcaggcatcgtaatgcatagcacaacaaaacattaaaagaaaacatgccttctaaagccaaccaaggtaaaaatgtatttatatttgtgaactttttcaaaattataacacatatataaaaacatggtggaacaatctgaccacatgcacaacacattccacacattatttctgaaaatgagtggtaagggaatataataaagcattgttattaaaac

SEQ ID NO: 23837 - DNA, 364 bp, Glycine max
agcttatatcctatggcctaaatagctttcgcataatgcaagacctatttaactgacgcacagtaaaagcagttacatttgatatatatttgatgaagaaattttatgtctgatcgaccacctatccaaaattcttaaagaatcttgattcttacttgtctaagatcattgtttgacctttgtgcaggctatctttctgatttttccaaagactttttttcccctgattgcttttcttgttcttctcatacacttttgttccttaatttttatatggcagaaacgaaacctagatatatttcgtacatagttttgaacgtgggacaccataaaaaaattaaaacattgtgtgaacaaaagcaaa

SEQ ID NO: 23838 - DNA, 418 bp, Glycine max
tgcatggtgatggtgctctaccattataagattatgttcattgtacatgcctggctaggcgcatgatactccactataaaaaaaattgtcagtagttattatttactaacagtttaatattagatcgccacttgtagtatactccctccacgtactctcgaacataagaaaaacaaagcacacattattttacattaattaaaaaagttattgatatatttaatttttattagacaaaatttgtatcaacggaagcagtcttgacattaacaattttgtacgttagcaaatgacaattttttaaaataaagatccagtttcaaacatgtttgtttgagtgtaaatagagaggaaagaaaaatgaaataaaagtataaatagagaggaaagaacaatgaaataaaagtacaaagaaaga

SEQ ID NO: 23839 - DNA, 360 bp, Glycine max
agctttgaaaagtgttgtttttcaccttctcgctaagccaatctgttggcttagcgagcgtccgctaagcgcaacactcatgggctaagcgtgaggaagactctggaagaaaatgagctgtacaggttcgctaagcgcaccgcttcatctcactaagcacaccgcttcagtccatccgctaagcgagaaaggcacgcgctaagacaaaattcactaatatgcgctaagcggtccataattgcgcttagcgcacaagcatgaacaaggccacctatttaagcctgaaattagatttttgagggggagtttggactgggatttatagctttgcatgtctagagtttctagagagagaaagat

SEQ ID NO: 23840 - DNA, 418 bp, Glycine max
  unsure at all n locations
tgcttcctagtctggaccttgcccttctgctccttgttaatcctttntacctatttagcaaggccaaaggtttcttgagccttgtcttagtcagcaacagtcttggccatcttctcctagtttttctgttggatgtcatcttggtccactagaggaataggcatgttcctcctgatgtctaccttcattgcttttaggttgataacaataaagtgtagttgtttggcgatgaaaagacctttacttatgattgattgcttggagtcctcatccattctttcaaagacatgaaagacctagtattccaagatgagtttgttgatgagggcgacatagtagatgtcatcctcttctcccagtgtattcatgtttctcanaatattgatgtagatagtgtgtggaaggtggaaaggaatat

SEQ ID NO: 23841 - DNA, 338 bp, Glycine max
agtttttctcgtactccatttggaaagtgatctgtaacagccatattatctaaagtcatgtggataatgaattacacatggttagaatacagtgagatcaaggatgcaacttattgtctttattgctttctctttaagcaacccgggagggccgaacactttggttttgaagtcttcactacaagcggatatagagattggaagcatgcatctcatggcttgaaagatcatgttggtagtcataatacattgcacaacttatgtgtcaagcactacgatgattataataatcaaagacaaagtgtgacaagttagtttgctaaagcaaccacggaatc

SEQ ID NO: 23842 - DNA, 561 bp, Glycine max
  unsure at all n locations
acgcgcatcactactgtgcctcttaataactaaacccgtaaatactatctctgtgttgcgtttcgtcgaaaanaccannacnaccagcggcgtcggaattgaaacctgtagcacctacgaagcaccnnggaanncncaaacactcaacgcggcaaacgacataaggaggcggcgactgcatatcgatcttataacggccgaaacgacatggcgacaggaaggtatactaactcactggccaaaccgctgccatcccccgaaaatgcccccgacgaagcaagtcaaaatgaggtccactgaggacctcgcatccaaatgcatcaggtccggtactgtgattgccagtgacaaacctatgtaggcgcggcaccggcgacgccttacggacatcatgaaaggtagcaacaatgcagcaaatcatccatggaatgcactacaaagagactcatgatacaaaagaagaaccgatcctgatgggaaccataatgcatggcttcacggccgaattggagcgcaaaaagcgcacggagcattgccgatgtccgcaaacaaacagcgcgg

SEQ ID NO: 23843 - DNA, 363 bp, Glycine max
agcttcaagattaagatggcctcagcaaattccttatttccagaagggaattctatcaatagacctccaatctttaatggagagggttaccactactggaaaacccgaatgcaaatttttatcgaggcaatagatctaaatatctgggaagccattgaaatagggccttatatacccaccacagtagaaagagtttcaatagatggtagttcatcaagtgaaagcataaccatagaaaaacctagagatagatggtctgaagaggatagaaaacgagtacaatacaacctaaaagccaaaaacataataacatctgccctatgaatggatgaatatttcagagtttcaaattgcaagagtgct

SEQ ID NO: 23844 - DNA, 400 bp, Glycine max
tgcgggccctcaggcaatcctgcattctccctcttttttctgagccccatgaatgttattgcctagcgctgttcatgtgtcctccaccttcaagtttggagctatgtttcatgattgcctaagtgcggaccctcaaggcgatcctccattctccccgttttttggatccccatgaatgatgtagcctagcactgctcatgtgtactgcacctttgagctagcggctatgcttcatgattgcctaagtgcagaccctcaatgcaatcctccgttctccccctttttcagagccccatgaaagttattgcctaccgctgtacatgtgtactccaccttcgaggttggaactatgatacatgattgcctaattggggaccctcaaggcgatcctccattcttc

SEQ ID NO: 23845 - DNA, 355 bp, Glycine max
agcttccatcagactcctatgcacatttggaaacattcattgaaatctgtaacactgtaaagattgcaggcatgccagatgaagccatcagactcaacctattttcattttccttggcaggagaagccaagaggtggctccattcattttagggtaacagtctatgagtgattacaggtagtgatcacaccattctaggtgataaattgcatcaacccactaagaagagtttactagagttatcatcacaagacgctgtgttggcaaaaaataagttgctctctaagcaacttgagatcttgtcagaaaccctgagtaagttgccaattaacttgtctaatggtcaacctttaca

SEQ ID NO: 23846 - DNA, 408 bp, Glycine max
ctcagcttgtcatgagagtaatttcggacaaattcttaaaggtgggagtattgtgacatcctcgaaatttctactcggaatttttgtaaacggtgcattttgtatgattatatatatatatataagtattattcagtgtatatgcatatatgttcctggtagaagtaggaaaagtgggggcaagatacgtgggttaggctgattaaggaagagaaatccataactggaaggttataggttaattctcaattaattagtctaaaaatcatcgttttgcgtgtaacttaaaatttaacaaaaccagcctctgaaccacgctcggggttttattcagagcgttttgatatatatatatattgcttactttcgaaaactggccccgacgggcgcagagaaacgcgagggact

SEQ ID NO: 23847 - DNA, 338 bp, Glycine max
agctttgatttataaccctgtatataacaagcgagtctcacagtgtcgagaagctgcacaaactcttcttgagtaagattatcttttttcttcttttgcaaatctattactgttgtcattcattttatttttaataagatcttggctttacatgcattgcaaaatatttgacatttctaaatcattagtgtctaactctaaagagctgttgccaaatgcctaactttacacttacaaaagggcgtcaataaactgagctagaggatggaagtggtattaccaaaacggataaaataccttatactcctcattaatctcacttagatctctcacgaatc

SEQ ID NO: 23848 - DNA, 362 bp, Glycine max
  unsure at all n locations
gacaccccctaagaatgaagatatcattacagagaagaaccnacgatcttatagcgaaattctaaacaacaatacgaatgaagttctgatgcccctctattgctttcgcttgataacttcccgcatacacatgtacatgttctactgtatcacacgaaattttgaattgatcatgcatgcgaacatatccaaatttattttgctcattgtcatgcttattacgtttagaagtataatcatggtacacagaatatctacagaggatgctctgcaatcagctttttaactctctgaggatctacccttctacgtggttaacgccgtctccaatatatactgncactatttgctgcatccttccg

SEQ ID NO: 23849 - DNA, 362 bp, Glycine max
agctttctccactaagttgcctgatgcctaaaatgtcttttctgatggaagtggtcctagatgcaaggaataatttctccaagaacaccctcttaaggtcatcccagctgaaaatggacctgggagcaaggtagtataaccaatcttttgccactccctctagagaatgaggaaaagcctttagaaagatatgatcttcctggacatcagggggcttcatggtggaacaaacaatatggaactccttaagatgcttatgaggatcttcacctgcaagaccatgaaacttgggcaacaaatgtattagtccagtcttaagaacatatggaacaccctcatcaggatattgaatgcacaagctt

SEQ ID NO: 23850 - DNA, 416 bp, Glycine max
tgtaactcttggcaatttatttaaaaactaatcacttataaagttatgacttttgaaaaaatcttcagaaacaagtcacttgaagaattgtgacttttggaaatgtattttttgaaaatagtcagtggtaatcgattacaattaaggtgcaatcaattacacatcagcagatgtgactcttcattttaaattttgaaaatcttaacgttttaaaacaatggtaatcgattactacattttggtaatcgattaccagagagtaaaactctttggtaatgattttgtgaaaacttcttgtgctactcaatgttttgaaaaactttttaatacttatcttgattgagtcttctcttgattcttgaatcttgagtcttgaatcttgattcttgattcttgaatcttgaatcttgaatctt

SEQ ID NO: 23851 - DNA, 357 bp, Glycine max
agctttctccactaagtttcctgatgcctgaaatgtcttttctgatggcggtgatcctagatgcagggaagaatttctccaagaacaccctcttaaggtcatcccagctgaaaatagacctgggagcaaggtagtatagccaatcttttgccactccctccagagaatgaggaaaggcctttagaaagatatgatcttcttggacattagggggcttcatggtggaacaaacaatatggaactccttaagatgtttatgaggatcttcacctgcaagaccatgaaacttgggcaacaaatgtattagtccaatcttgagaacatatggaacaccctcatcaggatattgaatgcaca

SEQ ID NO: 23852 - DNA, 397 bp, Glycine max
tagccctagaggggatggaccttttaggtcttggataggatcaataaaaatgtctataggaggagttagtaccacttttaaatattgtgatttaattccttttgcaggtggagctgatattgaagaaaaagaaccaacagatttaaggtcaaatcctcttcaagggggaagggatgatgcaatcctttctaagaagggactagttaccagagccatgagcaagaagctccaagaggatatggctagagctactaaagaaggccctagggttctcatgaaccttatggtagatttttgagcccataggtcaaggttggatccactcttctctgtaatattagaataggtttttcctctttgggccttgtatttggccattctagaatatagggtttag

SEQ ID NO: 23853 - DNA, 331 bp, Glycine max
agtttgtgacaggtccacagcacaggatgcagaagcatatataaataaatattaaactataatagctaaccctttccaaggtcatactcaagctcatggaccaccaaggctattccaactactgaatcggggccagagaggggaatgtgcatgttagacgccatacaatacactcagattagctactttcaaaatggaattataggtcaaaagaggttcggaattatgacccacaggcttaacaaccatgattcgataaaaacatatcaaaagatcaactagtcgactactactattaggtaaaacgcaaataaaaaagagcacctgaata

SEQ ID NO: 23854 - DNA, 488 bp, Glycine max
  unsure at all n locations
gcggcgaccacgtganacttggattgagaccatcgcannaccgcgacactanngaacactcacgctcggtcaaaagcacgcatcacacatctgtaacattgttcttatcaggcgcacacgacaatccaaatagcgcattcttgatgacaacaagtgtcacgccctaacgggaatattctattatttgcattctaacgtgtctatagtgacctctaatgagaaagcgagtgacacatcccgcgtgagcaaacggaggaacgattatattcctcaatgtcgcccggcattagaccaactgcactgggttagatatggctggaacactataccctgtgacgcgcatctgattaagggtccgcagatcacacatatctgcacgtgagagggaaacgcatatatcgacaaaggtcctttcttcaaaacgaggttatacatctcaggagagccatctgcaacctgtgatgggcaagactcgacacaaaataccc

SEQ ID NO: 23855 - DNA, 373 bp, Glycine max
agctagtagaacaaaatttccttaatcattggcaaatatgcatgtgaattacgacgcatcaacaagaatcaagccaaggctattgtgcaagcaatcaatggggcataacacaccaaatgattataatgatggatggctcaaatgctcacaaaagtaaaatcatcactttcaaattgagctttcaaaactatcatgacatgtagagaagaatcaaggatttcaagtcacaaaatgtcaagaacttttattttcaaaacaattacccatttcttgaacatatcctataattcaaagaaaaacatgcaaagtcgtacgtgcacacaaaattgacccaaaatattaaactgaaaatccgacgaaactaacaacatta

SEQ ID NO: 23856 - DNA, 374 bp, Glycine max
  unsure at all n locations
cacaaaaactcaacttctaagaaagtaggtgctaccatatgcctatgttttgtntacgatgtggcgattgaaccatcgtttcagtaagaaaataaacatccgaatgctcacaatcaaaacgtttagaatgaccagcaacaaaatgctcacaatgcacagaatacacggaatgctcaacatgcacagaatgatcaggatgcgcactatgactaactaatctatgaaaagtcctatctattttaagaacgcagggttgaaaaataccaagattgcccctagtacaggcactatatgttgcaaatcatgtatgtctaaaacaaccaccaaaggtaaaactaagggtcaaactactatgatatccaaatgagctgaaa

SEQ ID NO: 23857 - DNA, 515 bp, Glycine max
  unsure at all n locations
acgagtgagcctgaatccttgtaacntcgaancactncngaacacgacccaccggggganccagcaaagncaatcctgaaggcgangctatgtttttgtttatatatataaactacgagagcacattcgaggaaccaagtggcgacactgcccaacatcacaccctctcatctagtcacgccgatatcgcaacagcgaaagctcacgaagccctagctacatccccacacacgaagcagaccggctggagacgtggtgcgcctgctcaagtactcacaaagcgagagccaactggggaacgaaccgacaagctcacgccggtcgcagaagaaactgcgatggatcaggcctggggaccgccaaggcaccgaagccggcaacgtcggagatcatgttcgcgcgaacgaacggccggcccaacaaaacgccgtgacaaaccagccgagtcctgcgccacgagcgtggagaagccgacgggatcgcggacctcaggcacacggttagggagcaccgcg

SEQ ID NO: 23858 - DNA, 448 bp, Glycine max
  unsure at all n locations
cccgcatcgaattgggaaaagcagaaatatgccgacacgaaaaccacaggggagctgaactggactcggacanaaatagagtgttacacaacacacaccacgcaggacactttacattaagcggaaatgccaacggaccacatgctacaaacgcccacaaccccggctcccgcacaggaaccgcgaaccccagtgaacagaacagcgtactcagaaccgcagagagccagcatggaccctaaacaggcacgccgacgcacaatgcacagacctggaacaccagaacacacccgcgagccaaagatcagatcgcacgctgcgtccagcgcccgagctcatctagatggcgaatcaagagcgagcgaccacaggaacgaggacctacgaccccgtcatcaggtgacgcaccattccaggacggggcaggcaaaaagcaccacagcagacg

SEQ ID NO: 23859 - DNA, 240 bp, Glycine max
ggaatgactgatagctgaacgccggactaacgacgagcgcgttggtacatttaaccccacgctcgcaaatcgcctctttcagggactaacagactgcaagatgctatgccttggcaatgcaatttagcaacgaattcccatagatacggtgacttggtctgaggcagtcgtatctacgtgcaataactcattcttgcgcacactacccaatactgacctcccatgagtcgacggcacccc

SEQ ID NO: 23860 - DNA, 251 bp, Glycine max
gtccctgactgtgacctgaacacaacgacgacttgcagcctagaactttcttttttgacacacaacacgccacttctagacacctgttagacggaccgtgtactgcaaatgtacgatttccaacttataggatagtaacgactgccatctaaggaaactcttactccataactcgtacgtttagaactactcagtatgacatgtaatcaatatatcagggtggatgatattactttcttgtccatcctaac

SEQ ID NO: 23861 - DNA, 370 bp, Glycine max
agcttttgactgactataccaagctctaggaaccagggacggagaaagatctatatataggcttgctaagggtagagagaggaagactagagatttggatcaagtaaagtgtgttaaggatgaagaaggcaaagtcttagtgcatgaaaaagatatcaaggaaaggtggaaggtgtatttccacaacttatttaatgatggatatggatatgactctagcagtctagacacaagagaagaggaccggaactataagtactatcgtcggattcagaaacaggaagtaaaggaagcgttgaaaagaatgagtaatggtaaggcggtggggccagacaacatacctattgaagtgtggaaaactcttggagat

SEQ ID NO: 23862 - DNA, 418 bp, Glycine max
  unsure at all n locations
tgtnttagaattgtgatgtaaaggtgagtaggaatgcctgcatgttgctgagaacggaacagcagccattgctgcaagtttttattcaatcagtgtgtctcagaggaaataccgaaatagtaacacacagaacagaaataatatttatgtaatgttgctttgacttgtgaagggagaagataagaataatgagtgaaagaggaagtgtgtatgtgtctctgagtttgtcttcttatcttcattaaatatctcatttcgagcacgagccaaaatattggggtgtcactatccccattcatttttttgcgacactggtaggctggtcctcctttttcctttcgtgatcaacaataatcatgactgaactgcatgtccatgaaactagttgatgaccgaatcacccctcagatattttctg

SEQ ID NO: 23863 - DNA, 377 bp, Glycine max
ccgggatcctgtagacctacctgccgaccgcaagctttcaattttttctagtacccgtagggtgcctcattgggcttggctcattgatatggtcctataggctacgtatatattccccatgaacacgggcttaaggcatttgacttaaatcatggctcgcttaacttagtaattagattgatttccaccgaacatttgaattatatgatccgttcactttggataatataaattccgaccgctcgttcgtgccttatcgacgttcgaaacatatgtgacgtcttaaaatgtttaagaagatctttgactgcctgaccatgaaacggcggaaaatcagtcggacgttgtttctttgggattactcaatcttaatcgaa

SEQ ID NO: 23864 - DNA, 200 bp, Glycine max
  unsure at all n locations
aactcgagcttctcccccagttatctataagtagggggagaagtgatttcnagttggtgtgacccccttaggcgctactctcgtctttctaccgttcttcgacattcttcattcgtccttcatcgggcgtcagacttcaacgggtagaggcgggggccccaaacgatatattcgtgcgatgtccccgcggcgaccctcaa

SEQ ID NO: 23865 - DNA, 310 bp, Glycine max
ggtccttatctgaactgaatcagagatcacggactgagatctctaagcaccgatttgcatttaactggaccaccgggtctggggttcatatagaccccttaagctctcacaggggtaacacgtttccttacagagagtaagctaacgggctgaaaaccggaacgcattacaaataccccagcccaagattatatgcataaccaaagtgacagacgcgcctgaaggagctaagcgtttaacttcgataccttgtgtcaaaagaatgcatatccgctgaagtaatcgatatctcggatattccaagaacctc

SEQ ID NO: 23866 - DNA, 757 bp, Glycine max
  unsure at all n locations
tctccactccgcgtcgcacatctagtgtacacaatagtcgatactactgatgcaaatagtcaacatttctccncncancaagagcggtngantttgagaccgtagcacataccgagacactnananaagacnnaaacgcttgtgcaatcgagtaatacacagcgagcnagagcatacaactcatancgctataccgtctacacagagagtcggacgatctgaaacgcatagtacctcctgctgagagaacaactaaccaccaccatacacgcgtaataaactacagaacacagtaacacatactctatctgactagactaatgatagctgcaacaaccgcaacatgacaagcatcccgtgcacatgctaacaactatgcgcacgagctgaacgacgcacggcatgtcgatagcataatcatctataacataactcgcatcgcacatacgtagcctagacgccataacgacatcgaatcatgaatagagtctcgtacaacaataancaccggacattgcgcacgctacgcgcactgcacgctgccgagtcgtatgtcaacatacaatcgacctcatccagcaacaacatggcacccgcaganagcgtgacgaaacttatagcgagccacaatacacatcatatatcactgcatcgancatgcacgtctgaaactatgcctgncgaatcatatatccgccgaaacactcaatgaacatacgaccatcgccatacaacatcgtatagtaccaacatccgt

SEQ ID NO: 23867 - DNA, 253 bp, Glycine max
agaatactaactgaccgacctcatgcacggacttagcacgagtgagtttaataaggacacaagagcaaggggcatcacgccacgtccaatcatagctctaacccatccgacgaccacgactatacccacacccaccatagttaccggtgcacagtctccactcaacacagcaacacataacaccacatacccaagccagttcgcaaaccaccacccacaccagtatctaaaccgacatctaaaacttcggata

SEQ ID NO: 23868 - DNA, 485 bp, Glycine max
  unsure at all n locations
ccacacctctcatcaacagcgaggtaaggatgcactcctaactcaccacaaggcgacttgaatgagtctgtccctccnaccaganacacttacaggatctggaatgcacacagtagtattacaatttaatatgcacacagagacatgaaacgcatatgacaaaacagccctcgaattacaaagagaaccacttgcccacaaagaacggaatacttacaacaatgcgtaactagccgagtacgatatgacaaagcggcgcgcaatgggatcggcaaggaaaatgcatcagacatatctagtgtgaactaaccagcataacgcccgaaccaagacatgaacagatacaaagaggccgactcccatcactggaacaactaacagcagatgtgacgaccatcgaaaggatcacaactcgaaagatagacacgcatatgatactcgctcacgataaacggagngactagatgggtatcaagcgatgggct

SEQ ID NO: 23869 - DNA, 255 bp, Glycine max
gataatgatctaactaacctaactcccggacctgatacgggcagctttgctttatttaccaggccgactaatatattcccacacggattaaggaccagaattaacactttgcggaccgcacccaaatatctcttgctttgaggacttagttcataagtcagacatactaactgcattgagccatataacttcaaatcgaagttctaaaacgcactggtcatagcatgacccgacgatacacttacttagcatagt

SEQ ID NO: 23870 - DNA, 234 bp, Glycine max
acacaaaaacgaacgacacataaaggccagaaacatattattatggacacacacgcacaaagatggcagcaggcacaaaaaacgcactgataccagcaagaaaggaatagaatacgaaaacgtgcgactgcgaatacctaccagaatacgcaacgaaaacacttccgcattaagaacagaaacagggcgggcaacgatcggggagcggactacacgagcctgaaaagaccacac

SEQ ID NO: 23871 - DNA, 430 bp, Glycine max
  unsure at all n locations
cacatctctcactataccaggtcacgatagtcaatgggaacgctcccaaaaaagagaagtgagcctgaacatgnacacccgactctagcaagcacgcagagaacgccagcagccacaacttggatttttaatgaagcacccgaaccacgacaggtacgatccagacaaggccgcccaaggagaaagaagaaacagacacatgccaacaccctggcaaggagaacacgcaggggcgaggatgacaagaacgaggacacggggaagcggccccccagccactaacgcgcttaggaagggcgtagcacgcaacaccgagaagaggaccggacctaacgactctcgccggaacacaacagaggcaacgacgcgagagaaaaaaagcagagaagcgaagggacgacaagcccagaggctgaggacaccaagaaag

SEQ ID NO: 23872 - DNA, 571 bp, Glycine max
  unsure at all n locations
cgcgcatgcnnntttgaacccttgattgccttcgactcactctangagcgacattggagcatcggccacgccgcgagactccgtctggtagctcgtaccatgcagagccttgcagagtcttgcatcactatacacacgagtgagtagtagtagacactctacatattgttagagtatgaatagcactacgtcataacagttacataacttatttcgccatacatagtctgctgagagatttaggaactggaaactatctatgaaatctgagaatatgcatcgaacggtggtcagcatacactagtctctttcagagcgaggacggtgctgaacgacgtagacatcgtcgtggtatgccgtggttctcatcgataagagaactacgctgcggnaagtctgctcaccacagccgtttaatttcgagagacaaacagtctggaaataacacggacaaagacgcagatctatcgaacgtttttagtgaataggttccgtagttgtatttacacacggcgaacgtattatcaccccacacgtccgtcccattggacggcagcctttattcgatgtg

SEQ ID NO: 23873 - DNA, 415 bp, Glycine max
ccgcttttatccatggactcctatggaggcgagcttcttcatactcatcttctccttgaagtggcgtctcctctctctcttacttatacattccgctgccattcatcttccaagaagcaaaggaatccattgatgaagaggatcctatgcctacaagctccaatggagcatacatcatgtggtatcaagagcatcttcatctaggcgatgttcttttgcttcctctatctttttgttccgagaattctctttaattacctgttcttcatcttactctccatgtatatcctccattgtcttgtggtttggtgctcgttagagtagatccaaaacaaatcaaccgattaaattttacatctacacttgttcatgcatctctatggttcatacttttgaaatctactcttgaatcatg

SEQ ID NO: 23874 - DNA, 353 bp, Glycine max
agtttgcctcaaagagggccaggaaggacaaggcagcttaatgaactatttccgctccggagtatgatagtcaccgctttatgagcgcggtacaccagcagcgcttcgaagccgtcaaggggtggtcgtttctccgggagcgacgcgtccagttcagggacgacgagtatactgatttccaggaggaaatagggcgccggcggtgggcaccactggttactcccatggccaagtttgatccagaaatagtccttgagttttatgccaatgcttgttcaacagaggaaggcgtgcgtgacatgatatcctgcgttaggggttcaggtatcccgttcgatgccgactctatcggc

SEQ ID NO: 23875 - DNA, 200 bp, Glycine max
aagggttatcctctttttctattattttattgaagctatgccacatgtctccctttgactggagcaaatagggcccactttaccttttgactgtgacccatactcatcctcaaaagtggggataatctgccctttgacacgctctaattctgcctcggattgcgtgccatttctatggttacacctactcgcgtttcttt

SEQ ID NO: 23876 - DNA, 350 bp, Glycine max
atcttgctctaaatttacattgatgtttgtatttatgggaggaggttatatgccatttttgctttaagagtaatgtcccactaaaactaactttccaaatgtttgccttcgcaggaatggccccgaggaagcttgcctcaaagaggtccaggaaggacaatgcggccgaaggaactagttccgccccggagtacgacagtcaccgctttacgagcgttgtacaccaacagcgcttcgaagccatcaagggatggtcgtttctccgggagcgacgcgtccagctcatggacgacgagtatactgattttcaagaggaaatatggcgccggcggtgggcaccactggttact

SEQ ID NO: 23877 - DNA, 406 bp, Glycine max
tgccacccagctcgcccaggcgatctaagttgcttcctccagaagcaacagccttctggagggcccaagtgggcctggttgctatttgcacccccatttttactaaatacaccccctgctttttttggtgattctttttcgtaaagttacagaaacttacgaatttcgtaacgatacttgttttctttccgtaatgttacggaaccttgcggattacataatcatcccctttttgacttacggaatgttacggaacctcactatttgtgcaacgatgcttccttttgatttctggtgtgtcacggaaccttacggattgtgcatcaatattttcttttgatttccggcacgtcacggaatttcacaaattgcctaatgatgggtgccaagcacctcataatgacca

SEQ ID NO: 23878 - DNA, 371 bp, Glycine max
  unsure at all n locations
agcttgttgttctccattgcactgaagaccgtgacaggtacgtttcatctacctgtgttgntctattgaactaaagaccgtgaccgtgctaggtctgtttctggaactcgtggttaagctaaggactttttttggtttttggtgcaaggattggcaaactggtggtcacctgaggtacatttgactggtagtacgtggtctttgtggtcagctgaggtacatttcacctaaggtacaatctcgccggcattgttgctgttgggttcgaggtaagcttcatgtcttcattgtaactttgtgcttccgcgtatgtggtctttgtgctctttgttcttacagattgttagatagttttttaattagttattact

SEQ ID NO: 23879 - DNA, 478 bp, Glycine max
  unsure at all n locations
agagcatgttttnttttgataccatgctatgtacgcgacactatagaatactaccgcttagcatcactcttaatnttatcaatttgagctttatgtgctaatggaggaaaaacagaagcaaccaaataattcacaatattggaaaactagggagtggggaaggaatcagaaatactatacagaatgtacaaatggtcatccagaaaatcatcccgaataggtgagtccttagacacacgctcaatcctactcaagtggtcaaccacaaggttctgtgcaccgctccgatcacggatctccaaatcaaactcttggagccaaagcatccacctaatcaatctaggctttgattcagccttcttcaacaggtacttcagagctgcatggtcagtataaacaataacacgagtaccaagtaattatgaatgaaatttctcaagaggaaaaacatngctaatagctccttctcatggtatgn

SEQ ID NO: 23880 - DNA, 351 bp, Glycine max
agctataagtattgaaagaattaggatgggcataaatgtctccgcattgattggaaaatctgttccccaaatccctgaaaaatgtaaagatccaggtacattcagcataccttgattatagggaacaataattttgacagtgccatgctagatttatgagcttccggtagtgttatgcctctgtctatttttaattctctctctctaagtgcattgcagacaattgatgtggtaattctctctaagtgctttgcagacaattgatgtggtaattcatttaactaatagaagtgttgcctatcctgctggactcataaaggatgtcttagctaaagttggcgaactggatat

SEQ ID NO: 23881 - DNA, 319 bp, Glycine max
aaactaagctttacccataattccactaaattagggcaaatatgctttgaatttaatttcctcttatgaatgatgctctcctacaacctaagacaacgtataaggatataaactgtacatgctcaaggttcaatcgagcaatcatactttcatctcataatgggtgcaagggataaatcaatcatgcacaaggtaagctttttagctaaatggctatcttgaatcaaaacatggccttcatcctctcaaactcatgtttcattccatactcagagattcatgcaaaagccattacttactgctagtcttctctacaatt

SEQ ID NO: 23882 - DNA, 368 bp, Glycine max
agttttggcttcttgattaagctcactgatgaacttcaatggagactgccagacaagaggttctgcagatgtaagatttagcaatgatgcacaggctccatgtttgtgtttcagagcaaccatatatggtatccgcctgcataaacacaccaatcaggaattcttataatatacaatgaggaaaagatgcagggctaaacataaaagctatgaacccaatctaccaataaatggccaaatcgttaaatgaggaaagttgcaataggaaaatgccagatatgagtacaggaaagggcccatcaaaacaagggatggaattatcatatcagagattctagaataacacagataaaataatcaataaccaa

SEQ ID NO: 23883 - DNA, 418 bp, Glycine max
  unsure at all n locations
ntgggagggcacatgagatagcatagaactgctatttttgatggtttgttgtgtggtaaaccttcttcttcgttgtccatcttgaaggaatcatcgaaagatggtgatcaaaagttgaatttgcgcttggacttgaacttgacgccattggaggaggatgatcttaagctcaacctaaggacgcccgtgctcaattgtttcatttgattggaaattaattttgtactaaaccagattctttttttcttattaatatagttaatgtgtatttttcgtaatttattattatacgtacgacctataggtagctcattttgtagtcatattgtgttcataatacgaaacttcttagttcttatccagttttgctgactgactggccggctaccgcatataattcttattttctggaaaatgg

SEQ ID NO: 23884 - DNA, 368 bp, Glycine max
agcttatttcttattcattcattctcttgaattgcttgttgttggttactttgtaaaattgggaggtttgcatgcaaggatttcctatgcctagctaattcatcataaatgatttgaagtgatgatattgagtgttgctctaagttgcaagtagaatgaacaaaatgaatgagttggtggtatgacctataagtgaattgttgttgtgaaatgcccttgtatttgggtaagattctgtgaaccactgtgatctatatactttttagtttgatttagaaattggttacaatgtgtggctatgtgtttaatttcaaacaaaacaagagtgaacattttttcatgtagctaacatttttggtgcatttttt

SEQ ID NO: 23885 - DNA, 416 bp, Glycine max
  unsure at all n locations
ntataagcgcgggtctgggagacgaaggtcaagtggtcgcaatatacaaagatgatgttccaagtacattggatttggtacgacctcgccctcctaatttccagctggggaattggcgagtggaggagcgccccgacatttacgtagcgagcataatgtaaacctttacggttttaaaagctctatagttgggcctaggctttagagtttttcttttggttaaggctttgtgtatttttttttttttataatacaaggatctttcttcatctgttcctacgtctctacccattctcatccatttgcatgtttacttctttactttttaaaacggcagatccgatgacgagtccctcgaaggtactaatacctgggacccgcctatcaacttcgagcaagaaatgaatcaagcggaa

SEQ ID NO: 23886 - DNA, 368 bp, Glycine max
agcttctagctctataatattatattctatcttactttcctttctcctcctcccccatgttctcttcactttccttcctcctcccccatgttttgtctttctttcttttctgattacgcactcactcacatgcatgtgtaacaactaaaataattaatataactattttaaaaccattactaaagctttttttcataatagcgtttttagcacttttattaagacaaccctaacactacaatctatatcccgtgcatgtcatcccatatgtggctagaggtttgtattgtgttgtggtcaaggctgcttacgcactagtgttcctgatgaaacactacaatttctacagttgccactttagaattttg

SEQ ID NO: 23887 - DNA, 344 bp, Glycine max
ttgaaaatttctcttgatgaaaactatgacttgcatccttttgagttcaaccattcccacttctgcaccatggggtttgttacctcgggtgaaaaatattattcgacccgttcgattggagacactactgccatgatctccacgcttgagagtggctttgcgcaaccaacggtcgaaaatattcgctcaagccttcaagctcgaggtataaattacttttgactttttaaattgatatgtatttatgccctttctaatattattactttcaggcaaagcacccatgacgaagaggagtgctgaaacgtcttgagctgacgtgagacccaagaaacccactgggg

SEQ ID NO: 23888 - DNA, 370 bp, Glycine max
  unsure at all n locations
tgttgtcaagcttgtgcatccaataccctgatgaggatgtcccatatgctcttaaaactggactgatccatttgcttcgaaagtttcatggccttgcaggtgaagacccgcaaaaacatctaaaagaattccatattgtctgatccaccatgaaacccctagatgtccaggaggatcacatatttctgaaggattttcctcattctttagagggagtggcaaaggactggctatattaccttgctccaaggtccatcacgagctgggatgacctcaagagagtattcttagaataaattctccctgcttctangaccacaaccatcagaaaagatatttcaagaattaggcaactcagtggagagagctt

SEQ ID NO: 23889 - DNA, 522 bp, Glycine max
  unsure at all n locations
cgcgacgtcnnnattgatncctganacnnttcnaanancgnganaanannanaccancccacgtctngtactaagatctcanacctnctgatgcgtangagagtcacatactctattagacaacaagcggcatccacctatgccgagtggatctaaagtgtatcaatagcacaatactgtaaagtggaggactgctgcacatctgatccacttgccgatattgtaacccaaccctctaaaggggataaggtgataaacatgttacacggcacaagaattgcgatttgatgataccttatgacaatcagaattatatggaacggcgccagaaatctaatcttcgaattcgagtggcggtagactcgattgtacattgaatataagagagtcacagatttttcacaattctgctataagtgccaagcctaagtgcgaacggttgcagctcattctgcctgtataaaaggaactacatacactccagggaggaaagctctccatattatacattttacggcttcc

SEQ ID NO: 23890 - DNA, 361 bp, Glycine max
agtttgtgtcgctaagcgagctgtgcaacaaatctttgaggtgctccaattcaactccttgtggcttccttcttccttgcctttgatgagtagttcatccttgattctcttggccatttcttcttatagaagcttggctttggaccttgtcattagacccttcaactcatgaagtgcttctaggtttgtatgctctttggatagtcctctatcacactaactcaaaatatctaagcatacatttcaaaatcagggcattctttatagtaggttcccccaagaatatagcattgtctacgaactgcaacaaaggaatggaaatattcttgttccctactttgatgctaatgaaaagctcatt

SEQ ID NO: 23891 - DNA, 257 bp, Glycine max
  unsure at all n locations
ccccccatttccaaagtgcataacacctccacgatcacccacccacagaagngttgattgagacttcctcggaccaaaactcactcccccancataaaggggatttgattaaatggtacccctagcctctcctcctcaatgctagaaatatcccggaaaaaacaacccagcctccgaacttcgaaccttcagagataccaaagattcaccgctcacgactcatcgctcacgactcagcccacggaaaacctcgacca

SEQ ID NO: 23892 - DNA, 354 bp, Glycine max
agcttgtaggattatggggtacccatcacatgtggtactaggtggaggtcggacgatggtgcaaaacaagttctccacatccacaaatcacgtacaaacccaccatcccctgttgcccacctccaactgagctcacgtactcccacgtagcccttaccctcgttcctctcaatgccgagtccccatcaatcctcccaagcttacacaacatccaagtaattcaacatccactcatcacaaactaacaaaaccaagcaaaacagggcaaaggcaggaaactctgcccaaaactcataccaaaaatcacagccttttctcacttaaagaccccagcaacatttccttcgttccaat

SEQ ID NO: 23893 - DNA, 410 bp, Glycine max
tttgaatgaaacaatgtgactcttcacatttaaatttttatttcagcgttcaagggcactggtaatcgattaccaaagcattgtaatcgattacagccttttgaaaatatttggaacgttgtaaattcagtttgaaaacattttcaaactcattttgctactggtaatcgattacaacaatatggtaatcgattaccagagagtaaaaactctttggtaaaggttttgtcaaaaactcatgtgctattcaaagttttgaaaaactttttaatacttatcttgattgagtcttttcttcattcttgaatcttgagtcttgaatcttgatcttgattcttgagatcttgaatcttgattcttgtttgtaggctctcttcttgagtcttgaattcttcttgattcttgaactc

SEQ ID NO: 23894 - DNA, 336 bp, Glycine max
agtttgtatatttttgcatgtatagcatagaaacacagaaaataaaaaacatgaacaaaagtgcatttaaaaaaaaaagtcaggttttacattggaacttcccattttttgtaacagaaattaaaaatgactttatttaaaaatcaatatagttttaggaaaagaatgaagtgtttttagttgaataaataaaaagaaattgttttatttattaaaataatggttataaggtaaataaaataaatatatgttcttaagaaataaaatggagatcttatttattcatttgataaggtgtaaaataaagtttctttttataaataattaaattaatta

SEQ ID NO: 23895 - DNA, 407 bp, Glycine max
  unsure at all n locations
tctcccncaattntctataaatagggggagaagtgaattatattagggttcagccccttaggcatttctctctctttcgaatttgcttagaaaaattgtttccgagaagaaaatccaagccgaggcgcttccgtaacgtttccatgagtgattttgcgaaggttttcgaccgttcttcgacgttcttcattcgttcttcatcgttcttcagtcttcaacgggtaagtacctcaaaccaagcttttcaattcattctatgtacccgtggtggtccacacttggtttcatgtatttttattctcgtttcatttattttttatacccccttttgacgtgcttaagccattttatttaagtcatttctcgcttaaactaaaaataaaataaatctccaccgatcgtttgaa

SEQ ID NO: 23896 - DNA, 348 bp, Glycine max
agtttatcatttattacaacatccttcaaactacagactaagctatcgtataaccactccatcccttcttccacgatctcaaccacccacgcctttcatgcctctattccagcactgatgcctcatagttgtttaagtctctattggcttagcacgccactcatcccaactacatctcttgctttctcatgcaagttgttcttgttccttctcgcctctgcatatttaaaacatagaacactaggaacttgcttaagatgagaacctcctacaccattccccactgttcttgcagatgcgattggacaaccatatactgccttatagtgaggcctatttgcatgtgac

SEQ ID NO: 23897 - DNA, 412 bp, Glycine max
ctcaagcctaaagctcaccctatagttgacatggataacacgaactacagactctgttgcggaacggaccagctagctacaaaattgttagctctacatagacagcctcatctacctcaccttcgaacctctctcagcttaattccagacgcaatgatctggtcctcagactgtattctcttgttttttgacatttatgagccttggctacatcaatcagatgatacttgcgactcttctcatttttttgctcttgaaaaagaaaatgatatttctcacccatatttcatactctctcttttcacgggggttccatcatcctgtaccttgtgaaaaagcaaactgcgtcaaggagactggaatatgcttttctttcgctaagatctagagccagagatatcttaattcacct

SEQ ID NO: 23898 - DNA, 363 bp, Glycine max
tatctgcttgcaagcttgcttctacaaagcatcttaattcggttagcaagaatcaaaacgttagcaaatgaaggtccccagacgaaattagggtatgaaagttgcccctctttacttatcttttattggaaataaaagggaagtaaagacaaagacactaatttcattcgagcgatctcaccatccgaccggccactagaggaggcccaagcagtgaaactgaagaagcatgaagacattgaagttcttccttttcgatttctcctttatttatattttcattctctattattttgatattttctttttaaaagcatagacacagaggacgtcgagtcctatgaagcacaaggacaaaagaca

SEQ ID NO: 23899 - DNA, 458 bp, Glycine max
  unsure at all n locations
tgcggtacnnttttgagttcttggactgacacgcncgacannccgcgancactctgaatactgagctggtttgccgaccatcaggagatttcttttctactttttcgaaatncaacggcagatctgtccagagaaatcctgtttgagactcctggtttgcacctatgcgggaacttacctgcctgtatgagaaaattgtgtgacattccactgatacttatcatatccgataactctggtcttcttaaagattcatattttcatggaacgcatttgtcggggacttattcttgaaagtagtggatgattgcgccgatgttctcgtcatggatcccggcatccatcctgggaccgtcaagggcacactgctcctttagttgtgaacctacgagggctcgatagacgtcggactgtataccgactggccttaatgtgtggttacagtgacttaatcgtcg

SEQ ID NO: 23900 - DNA, 349 bp, Glycine max
agctttcaagcttgttataataagagaaaatgagagtcacagaaattatggaatggaaatgacgacagtgatgatgactattgagaggatagtgagagagacagtggaaatgagaaaccgacgatgatgaaaaaatggtgatgatcattgactaagacacatacccacaccgtaaatttgaccgtgaccttggaataatcatatgaagttgttgattggatagaacttgcattgatcctaatacaaccatcatcactacgatgattagacttcatcaccaccatataatatccatcaccattagtgtcattggaatttaacaacctccatatttggtactgacactatt

SEQ ID NO: 23901 - DNA, 407 bp, Glycine max
tgtgcgctcttggcactgccatttgtttgataaattttgaaggagacctattccggagatggattaattgatgatgacatacctgttagtaacagcatacttatagctagctgtatagaagaaaagggatgataaaggtttaaataaaaaataagaatgtagaattatattctatatataacttaatgaaataatgaattttatatgcagataaaacgtaataatggtacaacttataatattattaaatagataaaatatatagtcaaaaaattctgatatatttagacatcttaataatatcaataccttattgagatcctcaatttctctctattatctgtttttaacacatcatattaattatttatcttctctttttttagatcttttatttttttttctat

SEQ ID NO: 23902 - DNA, 370 bp, Glycine max
  unsure at all n locations
agcttatcaaaaggcatgcgaagtgggtggaattcctagagcaattcccttatgttatcaaacataaaaagggaaaaggtaatattgtagccgatgctctttctcggcgtcatgcattactttctatgcttgaaacaaaattgattggtcttgaatgtttgaaaagcatgtatgaaaatgatgaaacttttggagaaatttttaaaaattgtgaaaaattttcagaaaatggtttctttagacattaggctttcttttcaaagaaaacagatgagtgaataggcaatttagtccctgagattgtaaccactttgcatattagtccctgacttanattntaattcataatagtccctaactttacataagt

SEQ ID NO: 23903 - DNA, 417 bp, Glycine max
tgaaataaggatttggcttgtagaacataagttgatgtataaaataactgtttctcttttcaatggcagaacttaccaatgaagttctgtaggagtcaccttgatttgcacaagaagcggagacttatcagccttcacgtgttaagtgggagaatttggcctgccaagtatcagatccataaacaaaagactgctataagatttaaactctcatggaacgcatttgtcaaggacaataacttgaaagttggtgatgtttgcatctttgaactcgttcatggaactaaactaaccttcctggttcacatcttcagagagacagatagttcaaattgttcaacgtctcaaggtaggattgatgtttgcttttctattccaacaattccttatatgtctggtaaatatattcatctatct

SEQ ID NO: 23904 - DNA, 370 bp, Glycine max
agttttggcacattactcctgccgccaccaagccacgttgaactctgctttagttttaaaaagaagaggtagcaacatcatagtacaaagaactacccaatgatagtgaattaggatttcaagggtgtgtttaatagaaggagaaaaaatagaaggagaagaagtatgtaggcgagaaaagaagagtaaataaatgttgtttgaatgaaaagaaataaagtgtgaataaaggggaaatatttgaattaaagttatttaataagtaaaactttataattaaaaaaataaaaaggcaaaacacaattttaacaaacaataataaccaatttgcaagcagggtcagtgggttgaggcagcgtagcaagtaaag

SEQ ID NO: 23905 - DNA, 415 bp, Glycine max
  unsure at all n locations
ctggtgatgagggagttgaatattacaatccatgggtttgtcatttganaggtcagccaaagtgtgtgtggagattgacttgtgccattcagtaacggggcaggtttgattttgcaattacataggttgacgacatcacctacttttgtaaattacaggtgtttttatttttatttcattgagatattgtcagcattagtcaaactaaggaaaagaatttttacactggctaaagttgacatggttgaaaggatgtttaatcaatgtgatataatttataattttatatattggtaacaatttctttaatgtgtttgtgtgcgcccttctaaggtgatgtacagtggtgaaaattttataatatgtagcattacttttatatacttatattcatttatacatgtgaaaggcgaat

SEQ ID NO: 23906 - DNA, 370 bp, Glycine max
  unsure at all n locations
agcttgtatcatctgttgtatataatnattaattttttaggagttttgatactttcctccatttattaaccctgtcgcttttacttctgattgtggggaaggagaagataacggaaggaaaaacattggttttaaaaaatatatatattgccaaggatgaggagatttacccacactagagggtttgcgttctgaaaagaagatgaaaatgtcaaaattgattgtcaagcaatctttatttatttttatttttttaaaaaaaggcagatgaaaagattttattagaacacatcactatccttctcaaaaagtgtttaaaagatactacaaaatagttcataaggacagtagcgattttactaatataatt

SEQ ID NO: 23907 - DNA, 420 bp, Glycine max
tgaactgcatgccaccttgagtttttcaccagcagctcaaatattcattgcactgaccacatctgcaatcacaaaaaccaaactatatccggaaatgagatgattaattactgtttaactacctagtaagcaatatacaccaggaggaaaacaagggtgaggaactacatatacaagatacaatggcaatcggcgttacatgtaaagatcttaccatttctttttttgttggtgctactacacgcatgttttctcgtcaacaacgacggatattactattgagcaagggagatcacagcaattatgattcataagctatggaaataaacaaatgaatagatactaattatatgtaaacggcgaagaaagttacctgcataaaagatgatcaggttgtccttcaattctgtatcatcaaca

SEQ ID NO: 23908 - DNA, 343 bp, Glycine max
agcttgctatgttcgtactgctgaatttcttgagaataggagttgaaaatgaagagctactttcgtttttactcttatactgatactgactaaaacgatgcctttataactattagtacggagttcttggcagacaaaaactgttgtatatagcaaaggtggttgatagtgatatatcagatgaggagaatgtgatgaattatgaatattcagaaaacactactaactgtatcatctccttaatctctttaacacataataggcaaaatatacaacatttatcaagtctcactatggccgtggcattcaacaaagtcctaagccaagaatttcaatctttctt

SEQ ID NO: 23909 - DNA, 423 bp, Glycine max
ctggaggtactctcctagtaatagcatcaccacctttttgcctttgctatctagaagcgtgaacgcactgtgatcgtattcaatatacgcaattgtgctctttgatacttgaccaagcccacactttatttattaattaactatatgaaaaagcgaagttagactgaagtaaccagggatctagagtcttatacaaatctatgaatcacactccgaaaaaatgaataatcatgtgaaaattttgtaattatcagtgagaacaggaaatagaaattggaaatgtcttctcagaccaacacacgctcttagttgtaatgctattagggaataagctatagatattgactaagatgctgaaatcgaacaacatctgactgcgatattgactacttatgctatatatgcctctttagtagcctatgt

SEQ ID NO: 23910 - DNA, 370 bp, Glycine max
agcttcccaatttacgatcctcttacctgcacgctttatcacacaatcacgaccagctaaacaaaaaataaaagtaaaaacgatcaaaccacataacaaaaaaaaaaacgagatcgcggcaaggaaaactcaaattccaaacacgaaatccacaaatcacaagaacgcaagtcgcaaacgcgaaatccagctaatcaaaacaacaaattcccaaataatcataagaaaaaaaaaccaacaactttccaaattgaaaatcatttttccaaaaattaaaaaaaaaaataataacaatccgcaagcagatagatcgagaagagaaacgaaagcaagctcgtgatttctaaaaacaatgagcgaatcagatttc

SEQ ID NO: 23911 - DNA, 423 bp, Glycine max
tattgcacacctcaattttgacatcaaaaataggatccactgcatctgaagcatgaactaaaccacgtaaaccccctggtaaactaactacaaggtctttctcatttacttcagcaacaactccccaaagcttcattccaggagttatattctggaatgcatacaagagtgaaaggtttaagcacagcacacgggcaacaggaatctaaactccaaaggtgtatgatatcaataagctaaataaaaaaaatgcaacaattaaagctaaaagcatatcataaagaattaaaaataatatcataaaaaataaaaaacttttaactgttaattgaactcatcgtgacttcatgacatgaatatacaaactcaaccctaaatcatgaaaccaaaaactacctagttctataagctatgcacattaac

SEQ ID NO: 23912 - DNA, 365 bp, Glycine max
tttgctagcttggagcacacaatttatatgctccaactagaggggagtgttaaagttgctgcttgataatgttttatatttctagcttgctgtacaagcttgtagtgttttatagcttgtttgtagaagctcttagaagctgtcctgtaatctgtcgccataggctaggctgtagccttcatcatgaattattatatatatatatcagcaaactaaggctgaggatcctttttatgtgcatattttcatactcaagcatttcaagtatgtaacaaaaaaaaccactctacaccaattgcctacatgttctccttagtacacaccatacacttgtcagtgtactgtctatcaaaagcattcttaaa

SEQ ID NO: 23913 - DNA, 363 bp, Glycine max
gtatgaaagcctgcagtggattatgattgagtctgcaattctatataatgtaactctaggggttcaagatgcaagatcggtgtaatcaattagtgtttgaatgtaccacagaatcactcctcacaggccgacatttgatattgaccttgatttgaactaaactgttatatcatttgcttgcccacaactcgattttattgcaactatttgctgacataaattccaaaactcatgtttggtaacgctgaatatccaattattttatatttagcataaatgttggtccttgcttcttcagctctaagtacatatactatgtgcggaatggattcagatattcctattatagattgttccatgata

SEQ ID NO: 23914 - DNA, 366 bp, Glycine max
ttttgcaagcttcaagagattcgctaacacccaagctgtaatttttgtaattagtatctacatcaatatcctgaaacaacaaagagagatgtatgagcattgtatatacattaagtgacaataggaagaggtgagccaatgagtagcagaagcaggtagcacatatcactaatttaaaagacaagttaatgtttaatttgccaggaagattaagcccctaaattctagacaaattttcatcaagttttagttgtttttttttctttttgataaatttttcattagaatgatgagagatgcattacatacgaaagggggcattataattaactgccaacaagacattaaaggaatacatcccaaaac

SEQ ID NO: 23915 - DNA, 484 bp, Glycine max
  unsure at all n locations
cccctccttacctatattcaagctccttaatagtattcnccccccggagcnttgattgaacttgctcggaacaaatccaactaggcctaatggtaacaaaggtgtaattttgaaatacaccctaatataaaacctttaataacttcaattaatggaactggggcaaatggtggcttttaacggtaaaaaggccttggaaagaagcacttttccacatcaaaaaaggacccccgaaagttggaggaggaggaggaaaagaaaaaaggctttcccttgagggaaaaaatttctaacctaatactcccacaccaagtacatattagaaaaaccttttggaacaccttttgggtaaagtttttcttaataaaggatttgcatgaaattaaccctctttaaacacatgttaagtctaatacaaaaccaaacatgttaaaggggtacgctgcatggcctatggcaattaccttattacacacctacaccn

SEQ ID NO: 23916 - DNA, 363 bp, Glycine max
atctttatctttgactcaatttacttatgtaaaagctgtgagagaagctcccaaatcccccacgacaatcatttataaactgcaaaacgattgctactatgccacacattacattcaccattggaaacaagtcctttcccctctctccagaacaggtttgttgtttaacatgaattctctgtagtttgtacatcagtgccttagcactagaaaagtgatcatgcataacaatgtatttatatctaatacctacctcaattttatttggctctctccaacttctcatatttgcttctatccctttccattaaaaaagtctgacaagtaaaaataaaagaaagctggtattgtttgttgtaatcc

SEQ ID NO: 23917 - DNA, 415 bp, Glycine max
tattgcttaagagcaagcactcatgccttttagactttgcacttgaagagctatgaacggcctgatgaggttgcctcttaacacgagtaggcttctgatcattggaccaataacactcaaaaaataggcatggcctccttggtcatgccaagttatgcattaaaaagttgttgatgattcttgtattcttaatcgactttaagactccctagcatccttatactaagacattaataatagttcacaattgcaattgcaaatgttaaggttaaggtttttggggcctcacaaccataattgcagtcatcctagtcacgtttatcctcgttaatttttcacaatatcaaagatcttaataaaactgtaaccttgatcagtgtgatcacaattatttaaaaccttcatagagcgcatt

SEQ ID NO: 23918 - DNA, 361 bp, Glycine max
agctttaaaagtttggctaagattatgttaaaacataagcacttagacaatgaatgaaagctggagttgctgcacatgatgtccaacgttatgtcaaagaataagatcgggctgcacaatgcacaaggcaagatgaaatgtcaaatgaagaattgaagctgcaggattcacgatgtcggatacaatgtccaggacatcctgctcgaaaatactggaattgctaaaagcattgaagctgcaggatccacgatgtctgatacaatgtccaggacattctgcccgagaatactggagttgctgtactatgcaagattaaagtcaagtagtgaagctgcaggatccacgatgtcggatacgatgt

SEQ ID NO: 23919 - DNA, 410 bp, Glycine max
tcaagagatcatcctctcgacaacattattgttgatattttatatgggcaacaactagacactctcttaaagatttatgcaataatatggcttttgtatccatgattgaacctaaaaatataaaagaagccataatagatgataattggatcattgccatgcaagaagaactaaaccaatttgaaagaaacaatgtgtggaaattagtagaaaaacctgaaaattatcctgtcataggaacaaaatgggtttttagaaataaattagatgaacatggtataattattagaaataaagcaaggttagtagcaaaagggtataatcaagaagagggaatagactataaagaaacatatgctcctgttgcaagattagaagccattagaatgcttttggcatatgcatccata

SEQ ID NO: 23920 - DNA, 349 bp, Glycine max
agctttgctccttcttataaaaagagaagttctgaaactcatcatgttatctaaaaaaggcattgaggtagatccaagtgctctaatcattcattagcatattcatgttttggcggcatactccccactgtttgtttctttagggaactcaccataactaaaaaagcgcaaaggcacccctataacactcgatccagaagtaagatggataactaagagggagtgcaagaacagatgaatgctgacctatcggccttaaaagatcaaatggcttctatcacggaggccatgctaaagcttcaaaaaactatagaagataatgctactgcggccgcttccaatacggcta

SEQ ID NO: 23921 - DNA, 408 bp, Glycine max
tgtaagtaagttttatgttaggaaacaaagtttgaatttcaaagtgcatgtcctggtgtattcagaagctaaaaactaggaccactcaaaggtttttgtttccccattatttatcagtataaaaaaattgttgaaagtgtatatataattcatgctcaaatttaattttcatgttcaattaaaactttagtcaacaaaaattaatggtgatattttcaatattggaggaccaatagtacaatgaaaattttaagtgtcctatatcttttgtaggcaataaataggatgttatgtgtctaatacttcttttttaatgagaacacgattcctactcattccatgaccattgatcaaagaagagtttaaataaatttaatacctcttgaagatatcctttatatacagtaa

SEQ ID NO: 23922 - DNA, 357 bp, Glycine max
agcttgaatacaatgaaactcgcaaacttagcaaagctaagattcactcaatttgctcaagtttctttcatccaatggactaacaacattacaacacttgttcatttcgtctcagaatgttctcttataatgcgatttttttacatgaacgccttcaagctttatatatacttcagagcttcaatccattgagagatcccaactggtcgttgtctaatagctttagtgcttgacacgaggtcgttactgtacagagagagtgaggaccacaaacactttttgcagcatatcttcacagaagtacaatttgtcaatgtcacctagtgctcagagctgattatcatcgtatgaatcgaa

SEQ ID NO: 23923 - DNA, 376 bp, Glycine max
cgtccgcataatcttcgattggcttcgaatctttcatccactacatctcaagttctcgaaccagattcaaagcttgcattcctttgattttttcactgccttcatactctaccttcaaaaaattatagatcttgtgtgccattatcatcgacattattctgttaaaaatgactagagatacaactgtgaacaaaattgatttggctttggactttcgaagccttctttctttgcgacttttcatttgggcaacaatgagattattcggcaaaggaggaacttcgtaatcctcttctactgcttcccatacatcattagcatcaagatatgcttccattatgacaacccacattggatagtttattccatccaatac

SEQ ID NO: 23924 - DNA, 82 bp, Glycine max
agttgtcaagaatccgagcaggtgctgatgctggcgtaggcaccttacacagcgcagaaaacctaacagaggcgacactctc

SEQ ID NO: 23925 - DNA, 392 bp, Glycine max
tcactatgagacatgaggggcacttataacccttgatgttcacacacggggtggcggatggctcataggttaagaacgcttcatgctaccctgcatgatgatcccaataatccaatgctgaggacgctattgaagcaccaacacttctgtgactaaagagagaaatgactatcgattcaagatcaagtgtaggattcagatggattgacttctgatctaatctcagtactgcgagcaccgatttctgacatgacttgctcattataatgatgaacaggacttctgctaccctgagttgctcttggattgacttgaaaaccttgtgaccacacagatattacgctgttgtgatcgctcaccagattacttgcgtcgattaccagtctcactat

SEQ ID NO: 23926 - DNA, 371 bp, Glycine max
agcttgccgcccaactcgcccaggtgagctcaactcgcccaggcgagcaaggttgcttcctccagaagcaacagccttctggaggaatcttctggagggcccaagtgggcctggttgctatttacacccccctgtttactaaatgcacccccctttctatttttttgtaattctttttccatagcgttacgaaactttacgaatttcgtaacgatacctattttccttccgcaaggttacgaatccttacggattatgtatttactcttttttagctttcaaagaagttacggaaactcacggattgcgcaaaaacacctcttttcgatttccgccacattacggaatttcacagattacgcaagcctgct

SEQ ID NO: 23927 - DNA, 419 bp, Glycine max
  unsure at all n locations
tctaaactntatacaagaatgaagctctgataccacttgttagacaagtggcctcagatatcttaagaagggggggttgaattaagatattacaaactacttccccaattaaaattctatttcactttctattcaagttataaattcccttaataatgaacttcttaaatattgattaaaatagaaccaattgaatatgaatataaaacaatgataaataaagaagtttaagggaagagaaagtgcaaactcagatttatactggtttggccacacccttgtgcctacgtccagtccccaagcaacccgcttgaaagttccactatcttgtaaattccttttacaagttctaaacacacaaggacaatccttcctttgtgtttagaattacaacaagagaccctcggtctcttaatccc

SEQ ID NO: 23928 - DNA, 368 bp, Glycine max
agcttgtagaatttccagacatgatacatgtcagggtttggtttggttcaagggtaaaagggatgccccacattatttccatgacacaaatgcaaaaatgatgatttggaaactttatgcaaaactggtcatgcatgcacctatgtggacactcaagtgtcaaatttttatggtcatgtgatgctagggctcaggattcattccatctattttagtcaacccaatatttccaaaatatgttcttttatccatttgtgcattcatccgagtccattttgggcgtccgggaaaattttcacagcattcacccctcaagtgtatacacattttttcaaaaactagctatgatcaatgaatttttttgaaag

SEQ ID NO: 23929 - DNA, 396 bp, Glycine max
tcttatccaaggctcatcttggtggtgaagctccttcttccatggcttattctctagtggatggcgatgcctcttacctcttctcctttgtcttccgctgcatctccatggtggaaaatcaccattaaaggacctcattgaagctcaaagatctagcctccatagaagctccacaagcaagcttccatcaagtggtaatcagagcaccagagcttcaagtaggtgctccttaaacctccattaattttttttctttaccttcccttccattgttgtttcttcatttttctccatgtatctcctcacatgtcttgttctaaatgttgttaacatgattctttagagtttccgccgattaaacttgctatagaaactagatttgattttctatggttc

SEQ ID NO: 23930 - DNA, 367 bp, Glycine max
agctttggatttcttcactttagaactttgagactcggtgtgtattttccttaagcttcctactctttttataggtctaaggtagcttatttttttcacgctaactgtgcactaagcatgcactcctgggcttagcaagaatagtggtttaatcacgcgcttaacacggtgttcacgttaagcacgaccttggactttctcgtgagtcttcttcgtgctaagtgagtgttgatcgctaagcgagcacgtgtgctgggcctgtcttgtgtgttgggcagttatcaacaagtgtaacacaagtttatatataggagtttaagatgacaattaataaaaaattaaacatggcatatccacaggcaaaatt

SEQ ID NO: 23931 - DNA, 420 bp, Glycine max
tattgaagaaggctattatgtgcagttgaactgttttttttgtttatgtatgtatatttgcattgcttgtaccaatttgcttatatattggcgaagtacgaagatggtgagtggaaaaaaataatataactaacaaataaattaacgagcattaagctgaacgcgtgataggggattaatgcaccaaatggtcgaagcacgatactttctacagactaaacatttaatgcttctaacttgtctttctattgcaaagtcaagtgacgaccttatatgaatttccaagagcacaatattgttaaccatgcgcggagttattataggctccaactccatttgttactcatccttacaaacgtgagaagaaacctttttactcctcagctctcacttccccttctccttttcacccccatcacc

SEQ ID NO: 23932 - DNA, 370 bp, Glycine max
agttttcactcctttgtcattgtgatgaagaggtggggttagggtttcaaagtagggaaaagggaaaatttcaagtgaaacgatcacaagggagctggaaaaagagggtaaattgaaaaagaaaaaaaaatattaacttttagtttaaaaaaaaattggtgtatgtaattgtaatttctttcccacgataggagacttacaaaaatctcccacactagaattcatctacatgccagttggtagaacataaagttaaaaccaacccatgcatcacgctagtaattaaaccattattttaggccttcaaaataaatatttttatttacaaataatattttaaaaataaaaactaatcattacatgatacata

SEQ ID NO: 23933 - DNA, 422 bp, Glycine max
ctttgggatatgattatactatcaagtataaacccggcataggccaatgtcgtcgctgatgccttatctcgcattgctccggcgggaacctgtttatcattatcagtacctcattatgatttcttggataaattgcatgctacactcctgcaggatgcacaatatgttgaccttataagtcaaattcgttcagaccccgcttcttaccctgatcttttgttgcataaggacctcatcctcaggcagggtcgtatctggcttcctttttcgacacccttttcctccatgctcttggaggaatttcactccctccctctcggcggccacaccggaatctcgaagaccctccactgcctgcgtcaaagcttcgactggccattaattcgagcggatgtccgctgttttgtttcacaatgcccaac

SEQ ID NO: 23934 - DNA, 352 bp, Glycine max
agtttatagaaatcaaacacgataataaattatcctcatattataatagaagcatgtgcataaataacaaataagtcataagtcatcaaaacacaaatcatttgtctaagttagaaagagtatttggttagtggttttgtgaagatgtctgtaagttgatttttagtatctacaattttttttaaatacagttactttttttttaagactaagtgctaattgactaccaacacttaccaagatgagtttttgttaatatagaaggttctatcatatcaaaataattctgtttgaaatacaatataataattttgaaaagcataaataatattttgaacaatcaatcaagtaa

SEQ ID NO: 23935 - DNA, 414 bp, Glycine max
cagcttctaaactttatacaaaaatgatgctctgataccacttgttggacaagtggcctcaaatatcttaagaaggggggttgaattaagatatcacaaactatttccccaattaaaattttatttcactttctattcaagttataaattcccttaaaaatgaacttcttacatattgattcaaatagagcaatttgaatatgaatataaaacaataataaataaaggagtttaagggaaaagagattgcaaactcagatttatactggttcggtcacacccttgtgcctacgtccagtccccaagcaacccgcttgagagttccactatcttgtaaaagcctattacaagatctgaaccacacaaggacaacccttcctttgtgttcagatttctttacaacaagagaccctc

SEQ ID NO: 23936 - DNA, 364 bp, Glycine max
agcttttagaaagcttcgatgtagagtgtatattgtttttcttccatgcttcagttgtacatagcttgtgtcttcttcatagatagggcatgcatgatggcccttaacactatatccactcaaattcctgtatgctggaaagtcattaatggtacaaaatagcattgcactcaacttgaatgacttatttcgatacccatcaaacataacaaccccctcgtcccacaactttttcaagccttcaatcaagggactgagataaacatcgatgccatttcctggttgtcttgggctcgatatcatcatagacaacatcatgtatttttgcttggcgaagcattccatcgcaatttctctgatttgc

SEQ ID NO: 23937 - DNA, 385 bp, Glycine max
  unsure at all n locations
ctaagcttctagctttatagggtatttgaccttctttttgctctaaatgggggaatgtgctcgaatatatggagcaatattggtttgactacttgcttgattaagatgaattangggtttgtatgggatggccctangcctataatgcattttgaaaacaatgggacatgccacattgacccccgtctcttgctattgttacctaaacgcgcgcccaccaagtgttcagtgaaatgcctcaatggcattagcgcgtgacttttgtaaagaacaacccatggtgcattttggtttggacatagtttctttttttgggacatgtattcattcccgaaaaggctatataattgcccacatatatctcaggctaggaaccgacttttta

SEQ ID NO: 23938 - DNA, 365 bp, Glycine max
  unsure at all n locations
agtttcacatgtttaagtggactcattcaatgaaacatatacttgatcctgaaggattttcttagttttaaatgatcttttgatagattcttgaaatcttttcataggttttgtaagcgtttgagagaatagataagttattgtcgcaacctacccttcagcgggacggcgacacgtgactcgctggtgcgtgtcccaagaaaggaatacgcgcggagtcaccaccaacgtttatttgaggaaaacgtcggaaaaactggaaaagacgtgatctacgaactcaaagtgaaaggttcgggaattgtatttacgcacggngaaggtattagcaccccacgcgtctgtcacaagagacggcagccttt

SEQ ID NO: 23939 - DNA, 387 bp, Glycine max
  unsure at all n locations
ttgtgtggagcttcaatggtgaacgagggtttaacataagcttcgtgagggagagggagagagagcttctgaaaatgtggggctgagtgaggagagagagggttgctttttggttttaataaaagggtcttctctttntctattattttatttaagcaatgccacatgtctccatttgagtggagcaagaacggcccactatctctttttgactgtgacccctactcagacacaaaagtgaggaaaatctgacctttgaaacgctaaaatcctgcctcggtttgcctgccatttctctggtttcaatttctcgcgtgtctctgcgtccgttcgggccagctttccaaagcccccactatatatttcaaaacgctcacattaaaaccc

SEQ ID NO: 23940 - DNA, 339 bp, Glycine max
ttttcaatcttgtggcacctttcatggacgaagaaattcagaaggcaatttttaaagctgcagcgaagttttttatgaaggaaggcaattcacataaggattgcatggattaaatggaaatcggtatgcttaccaaaagaaaagggtggcttgggcatcaaggatattgaaacattcaatctcgcactacttggaaaatggaagtggcaattaatgcaagaaaatggtgagctgtggaccagagttctgaaatcgaaatatggtggatggaggaacattgaagaaacaggaaactcagcaaagcaatctgtttcgtggatggatgtaaaacacactttt

SEQ ID NO: 23941 - DNA, 413 bp, Glycine max
tcagaacacagcatcacagaatctaggtgtttaacacccctccattcaatgggttttctaggtttgagaagtgaaattgagaatgaggtaaatttgaagcagactctcacctcacaccagtccataacatcaatctaaacttgcccaaattggatttacacctaaaattccaccgaatcaaaatttgactcttcaacacccaattttgccctagaaatggctctttattcactttggtcatttgtttttccctctagcacagcctaacctttctcacatgttctaaatgacatttcaagctaggattaactcattttaatctccatttaccacagaattcagacttagcctttcaactctcaaagcctcactctttttccactcacaacaccacattctcactttctaaccct

SEQ ID NO: 23942 - DNA, 359 bp, Glycine max
agcttgccgttttatctgacccatgaactgccctaactcctttagactggaggtccctaagctcttgaccttgacttgatagaacctttttttaagcgaaggcgtttgacttgatcccatgttttactaaagtgaaacaaaatttagtgcgaatcagaactccgacatccatcatgggtggaatggatgaatgcatgaagaaatgcttatgacatacatgcaatctatgaatacgggagcccgggaaattgtctccttcttcgatacaacatcttggggtagcaaagtgcccgacgtatgtatttaagaaagtgacacggaccctccgttggtttgccaaagagagtggatcaaaacat

SEQ ID NO: 23943 - DNA, 419 bp, Glycine max
  unsure at all n locations
taaagcattgattngatactgcttccctcatcatgtggcttatgatgtatacaatttaatgatcctttgctaccctgctatgagacacacacacatagagacaaacacacgcagacacaaacacaaacacaaacacacacacacacacacataaagatacacacacacacacacacacacagagacacgcacacataaagacataaacacactgaaccacagacacacacagagacccacacacaaagacacacacactgagtcacaaacacacacatacacaatcatactcacacacatggacagacacacacacacataaagagacaaacacacacacacacacacacacagataaagagacaaacacacacacacacacagttaccacatataaagagacagacaaacacacaaat

SEQ ID NO: 23944 - DNA, 261 bp, Glycine max
  unsure at all n locations
agctattcaagcttcanaattcaatttccagcgtgccaatcaataatggggctccatcatacatccgtgcaaaactgattttgtcgatgcatcagttcagagcttcataattccatgttgatcgcctcgacttatgccaggattcatttagacatgcgataataatcgatactggcgctcgaatgggttagcagacccacatttaatttaagcggcacggagagatcgggactcacactaaactccgacgttaaagtattt

SEQ ID NO: 23945 - DNA, 409 bp, Glycine max
tcagaattcaatttcgagcgtctcaatagattacgggactcaatcagacatccgagcaaaacgttattgtcgtttggattagctcagagcttcagaattcaatttcgatcgtctcgatatattacgggtctcaatcagacatctgaggaaaaaagttattgtcgtttgaatttgctgagagcttcaacattcaattttgagcgtctcgatgtattacgggacttaatcagacatccgagttaaaagttattgtcgtttgaatttgctgagagcttcaacattcaatttcgagcgtctcgatattttacgggactcaatcacacatccgagtaaaaagttattgtcgtttgaatttgctgagagcttcaacattcaatttcgagcgtctcgatgtattacgggactcaat

SEQ ID NO: 23946 - DNA, 354 bp, Glycine max
agcttgtgttcatgggagcagataactaggtggataactttaaagaatcttgtgttatgggatgttcggacacaatgctctaataggatgtgacattggagcatgagtttgcgtttcaattgcatcatgttctaagcatattgttttactttattttattttgctgtttaatttgagttcttttgtaaacttggacggtcttgttttgagccggagatgtttttaataagttttatttggtaaaagtgaatcgaatgtgaccgttttacccatgtgaatttgtttaagtgatttgaataaaattgatttaattaaattctgcatttttatatgagtttcttatttatatgcata

SEQ ID NO: 23947 - DNA, 409 bp, Glycine max
ctgtcatggaggctactgctatttatcctgatcatgtctgtctatgctcggacttatctgggggtccattattgccatttcagtgaattatgctctctaggtgtcgcagttctttaaaaccacatctctttttgctttttatatctatggttgttggtgctctcaaaccgtatcaataatacaaaatcccgttgaattgatttcattcttttttatacatcttagattgattttaagaaggttaattgaaaatgggatttggaaaaatgaaagatacggaaaagatataggcccatatctgaaatttctcctttagctgatatcccaaaagtgaaaatgtaagaaagtacctacaccaaagagtccatttgtacactatttaagttaatgctatgttaccctttatctt

SEQ ID NO: 23948 - DNA, 323 bp, Glycine max
atgaaatagtatcttcccttcttgccacaatccttgttgactacgagcatgaagagctccaatgaatgtgatgtcattatggatgacccctagtgcttccatatcttcagagatgcaatgctgcctcaccatgaccatgcatggcgaaaccagatatcatggcattttacattgaaacatcacggtccatggccgcagcaagcaaagcatctatgtctacacacttggcatacgtgtccaccaaagaagtcttaagaataataattcccttaattccttgcttgtctatgtaagaatggatccacttacccatttcaagtgat

SEQ ID NO: 23949 - DNA, 440 bp, Glycine max
  unsure at all n locations
actcagcttacaaatcctaattccttaaataggcctaactcactttaatagtcccaagtggagtcgccaactgtcgcaatatgcccttttgcgggcgagcgaaggcgtggctcacgggtgcgctttccaaaggaggaaagatgcgcggagtcgccaccaacgtttatttgtgggaaacgtcggataaaccgatggaaaccggtcgaaataaaaattctaagttcgggagttgtatttacgtttgaggaaggtatttgcacctcttacgtttgtctcaaaggacaacagcctatttttcagaattgtggaaatggtgttatcttaacttttagttctttttattttttgaggtcgacaaaagcggtgctcttactcctacgtaccctccatcgaagagganatcagacctacgtagttctttcttaagggtgaatcacacg

SEQ ID NO: 23950 - DNA, 415 bp, Glycine max
  unsure at all n locations
actaagctcctaggccttttgcaagcaacatggatgttaatttaccaaaaagctattctaaaacgaaaatggcatacgacctcccccaataacacagacatcaatgtaaatttagaacgaactcatgcacatatttcctttcgaacattcactcgcaccagatattcttctaactaagaaaaatgcacccaggcacaatcaaagcaccttcgttacctagatcactcatatgtacttccaaggtgtatttgctacctacatcacatgcactntctttgctaaatttacatacatgcatagctcaagcattttggctaccaaaaattgcatacgtgcacattctggtatttccaatacctatacatatacaaactttgtgatgaatcttggctacctgcacaataaggtgctacat

SEQ ID NO: 23951 - DNA, 433 bp, Glycine max
  unsure at all n locations
aaaactcacgctntcgagaaattcaaacggccataactgtgcactcggatttgcgatacatgcacattaaatatcgagacgctcgaaattaaacaacggaagccctcgagaaattcaaatggtcataacttttcactcggaggtccgattcaagcatataatatatcgagacgctcgaaattgaacaacggaagccctcgagaaattcaaatggtcataactattcactcggagggccgattcatgcgtataacatatcgagacgctcgaaattgaacatcggaagccctcgacaaattcaaacggtcataactattcactcagaggcccaagtcaagcgaataaaatatggggacgctcgaaattgaacaacagaagctgtcgaaaatacaaatggcatcactattccctcggaggcccgatcgagcgtata

SEQ ID NO: 23952 - DNA, 293 bp, Glycine max
atgggcgacccgaaccaaacatcaacttgacaacatgcttcataacacaaaagctgtatggccctcgacttgttacaccctgacaccataatgttatcatcacgagaccttttatgccaacatggaagaagacatgttggggtgacctcaacaaattcattatcagtataggcaaacatatcaggaggttgccccctttctaccatgggtgtgtcgacagcagacgatggcacaaccctatcatcatgttcaacctgcttgaccaagggcctccaagagaatccgccattata

SEQ ID NO: 23953 - DNA, 556 bp, Glycine max
  unsure at all n locations
acacactcacgttctctacgacaatctccggctccgttgtaaannntctctcncntcttcccccccagcaggggcgcttgaaccntgttgagaccatagaacntcagaacactcgatgaactcagcctatgtggattctatacacagaaagcttctcagcccttagattgtgctgaacaaaattacaagaggtaactctctcggacgcttcttgacatactaacattagttttacgccctttctagacgatcctctcacattatcaatggctctctattgccatacacggacagtatctaacagcaatgcttcgatattcttttcaatacacttttatactaatccaaataatcctttacaagccttgaatcgatgtaatcttcttcgttttatttgcaccaaaagcattctaaaggtctctggttttctaacnctcgaaacatgtgctaaacatcttctccttactatctccttggccataaaaatttggcaagactaacgtctaaaactgtcgtttcccaatctcccttttcacaaaaaaatgactaccgcccc

SEQ ID NO: 23954 - DNA, 563 bp, Glycine max
  unsure at all n locations
acacattttccacacagactcgtacatactgtgccgtgcgctcgtcgatantnaatattanncccaggagcaggcctggagcgtgttgataccgtagcacctcagcganactatagnaaattcccggccnntggtcctctgttggatccacttgtattaacttcctttccgtttccacaaccacaacacttcgaggtcttcgctctctttcgaagaagctgcacgtgtcagtgttgctgtcgctcttcacgtcacctcctttggatgaagcctcaactatcgctaccgaaagttccttcagtttttggcgactctttatccccatatatacttctctatcgaacaaaaataatatcaaccgctctgtcaccaataagtttcgataactcatggctaaatccatcacgtttcatagataggtaaacctaggggaagacaccctaaagaccggtcaaatactcaatcttctaactcctcttctaatgaaaagcttctctctctccctaatatatctatcgcaatatgctacaacgagacataggtgtgattatctttgaccaacn

SEQ ID NO: 23955 - DNA, 396 bp, Glycine max
  unsure at all n locations
ccagttatggagagctaaatcctctgttggttcttctttgtaagtacttgatgtaaatatctgtatatctatttaatgatgttttgtgtgttcactatgctatcagaacttcattctaccatgcttttgacttgatcatgtagatgcatgtgtttttagaatcattcaacagtggaaaatggtctgattcttagaacttgataggacggggctagtttatcatattatcacaagggatcgaggtatgataacctagtggttgtatgtntggcttaatgcggttctaagtcgatttagttcaacaagaggaatctaacgacgatgcttgatcgggattatgctagactatcatgatgaattcgggttagcattgcaagagacaccatagaacacatg

SEQ ID NO: 23956 - DNA, 427 bp, Glycine max
actacccaacacaattcagatgggaatttgtttgttattaaaatataagtaatttacatgtaagataatatatatagccatggcactagaaatcaaactttaaaagtataagaaccaaaactataatagaaaagaattagggtaggtagaaaaaatatattagaatcaaatatatgtgtgtgtagtttcattacaccaatttaaatacaatatcttctcaaatgattaaatatttttgctaagtattttcacatcaaagtttcattaattcagaccaacctcatggagctacaggtaccatcttgcccgagcagtatcaaacccaatagaataatcatgttcctgcaaagcaacacatttagactttatcataatatttcaagtttacaactaataaataagaaagatctagacatgtgacacaata

SEQ ID NO: 23957 - DNA, 458 bp, Glycine max
  unsure at all n locations
tgtcagagttgcgaaccagattgctaagtgcacctgctgcatttgccttattcttgtcttcctctgccatttgtaacaaatttgccaattgaggaatagatttcctcagctcttcatacaacaagtcattgtggtaggccgcgtttccaatctgagttcaagtatggtacagcagattaaaagagaggtgaacaaagaagaaaatgtggcatatatagggtatgaaaaagcataagcatgacatcagttctaaaaacgagaaggataaatttgtgctagacacatctctgtaaatttgacaattaaaaagtaaagtatttgccaagtgaaacattaaatacaaataatttattgcaaaaattcatcagatgcagtaacaataataactagtagactggcattttattntatnntttatttatgttcacatccatatctntgnganatcatataccaca

SEQ ID NO: 23958 - DNA, 456 bp, Glycine max
tctaagaatagccttgataactctaacattatccatataagcttcccctattaagattgtatcatccgcaaactgaagcatgtttactgggaccttattctttcctaccaaaaagctgtgaaagaagtttgtagagactgcttccctcatcaaacctgataacccttcagcagccaaaacaaataaaaaaggggccaaaggatccccttgcctcagacctctttgaggcttaaactcctcagttggactaccatttacaaggatggatattgaagctgaagaaaggcagcctttaacccaaccaatccacctttcatggaaccccattctcctcaacatatagaaaataaattgccaggacacagagtcataagctttctcaaagtccactttaagcactaaacacgatttcttttgcctcctagcctcctcaacaacctcactagcaatcagaac

SEQ ID NO: 23959 - DNA, 404 bp, Glycine max
  unsure at all n locations
ntgagccaaaatcctgactcaccatatatcttgacctattgtgagaatgccaatccttaccctcggaagcaaaaaagaatggaaaggaaattttcaatcaaagaaaaagagaatgaaaatttccaatgaaagcaaaaaagaaatgaaggaaaattccccaatcaaagagtgggagaaagcaaaataaaggaaaagaaggaaaattccccaatcaaagagtgggagaaagcaaaaagaaaagaaaggaaaattcccaatcaaagaatgggagaaagtaaaaaaggaagaagaagaatgaaagaaagctcctgatcaaggatcgaaagaaaccagaagaaatgtgcagagaggtctttggaccagacaatatctgaacagtacagaattgtcaccaaatgaacaaa

SEQ ID NO: 23960 - DNA, 424 bp, Glycine max
gtgttaacgagatatttgtggataagttcttgattaagcctaacaacaatgacatcaattgcctgctacaaattggagaggcgcggtggtttccaagtttgttgggttctattgattgcatgcattgggaatggaaaaattgtccagttgcatgactagactaatatcgtaaaagtgatcattgcaaacccacattaatacttgaagtcgtcgctgatcgaggccgtacccgaatcaaataaacattataaatgtagtatctatgaagtgatcctatgtcgtctcccaacgagcaatgatctactcaacgttcataacaaatagtaatagaacagtacctaattggggggggtgtatgctttcggatattaatagccatccaatttgagttagaaaataaccatttacaacatgttgttcccct

SEQ ID NO: 23961 - DNA, 412 bp, Glycine max
actccgcttataataatagtgggttataaaatttagagttccctattgcaacagagatactgctttgccatattgagcaaacatcaaagagcctttaagacattggaattgcttaacttttcctccactgcaagtcaaccccaccctgtatgtaccatataactcatctcaaccgaaaggaaaaaaatagtatagagtgcggatggatagagagaaatggtgtttttgacagttctaagacacagtttcatggatactactactactaccttggctattaatgttgcagcctgtctactctagagggagagattccctcatataatggcggtggtcttttctggttcctctatgacaaccagtatcgccatcatcatgcccaacctcgttcttgccctattgccactcttga

SEQ ID NO: 23962 - DNA, 438 bp, Glycine max
tgcatgtattacattattcccctttctcaagcaacatttttcttgatatcatcaaaatcttcatgatgtacattctccccctttctcaagcaaattcttgttgacatcatcaagatcttcatgatttacacactttaatcgattacttagataacctaatcgattacttcattgaaataatcgataatcttatagatgtaattgattataggcagttataactattttctctataaataattagttggcgttcacatctaaacaatctagaaatcaagagagcattagagaatactcattacatctcgaaaattacttcttagcctcagaatgagcaagattttgtgctttcattagtgaacaagagaatagaagacaatagctctatagtaactcacaatttcttaatctttcgattcggaagatcttttcttgaaa

SEQ ID NO: 23963 - DNA, 432 bp, Glycine max
tgcatcttgagcatgtcactctaactgcatgtgaatgtgactgtgccgagcccttctcaacttgtcacgtgttgaatactttggtccttgaccgttgtaacttgcatcatggtgcaaaattcctctgcatatgtaattccaacctttctagtttgaccataggtagtaccactcaagaaactccttacaaatttgtgctttctactccgaatcttagatctctttctgtgatgcgcgatcctattcaccaactctctgcatgtgatctttcttttcttgaacaagtaaatattgacgttgaagcctattttaatgctcattttcaaaggacacatttagcccttataagtttgctgcaagtgctcgcagattatgtaaagactatgatactctcttcaagtacccttaagattctaaatgtaagttacttaa

SEQ ID NO: 23964 - DNA, 438 bp, Glycine max
  unsure at all n locations
ntgaagaacgattatgctgttcttgcataacatgccatagaagtgcaaaatataatggatagtactaagtagtagctcttgtactcaaagttctgttgccattacattagaaagagttcatgaaaaattaacaaccatatataattaaggagcaacttttcagcaactcaaagagagaaataacaaagaaaagaagaaaccagcacaaggctctgctccattcataggcttacttttcttaaaattctcctcaattctacattgtaatagatgactttttctgttttcagctatatttcaatataaatactattttcttcatatccaaattctggtgcctatcagatttatctattcttctgtccagctatagatttgaacaaacagtggcattttttttgtacataanatagaatcttgaggctcttacagaagtat

SEQ ID NO: 23965 - DNA, 393 bp, Glycine max
  unsure at all n locations
ctttttcaaagccaacgatggtgtttattgacatcactacaattatgccatagtaataaagacttgtattctcacttcacaaaattgtcacaaatttgacatatatcaagcacattcctagcaaaatccaaaaaatagtgctgttttacagatatagcactctagcctaagaaaggaattgaaactcgaatatcangttttgagtatctttgtgacataaggatagtcatactatagaaagccaaaatgtatttatgttgttattcattttccacaatgaaatacatctattaatctagatgcagttattaattttgcatagaatgtaagaaatcaggttcaattttactcaaaccatcacgatggtctacagaagtgcactttacctgaaaa

SEQ ID NO: 23966 - DNA, 459 bp, Glycine max
  unsure at all n locations
actcaagcttattatctacattntcaaggattaaaacctttacatgaagcattagttttctattttaagaaaatgtcttataattaattagcatttcctttaatttttataagacaaattatttgacaattaatccttgtttttcaagacatgaaattaagaatagtataaaagcttatagctacatgtattttattggctcgtattggtttaattttgattttcaaagataggagaatcatactatgtgttcttccattatatatatatatatatatatatatatatatatatatatatatatatcttgatgttacctctgattgatgtgaagtttacgtcttgtctaatgccttatgtttgtgtatgaatcagcttcacacctgcatatgaactacgtattttntttctgtgtgtgtgtgtgttgtgtaagcagtttcctcaacatgtatatatcat

SEQ ID NO: 23967 - DNA, 450 bp, Glycine max
  unsure at all n locations
ntaagtttggatatgggtttaaacattcgatcttgaagattattttattgttgctgcttgctgattcagcacgccaaatgtactcaagttaatttaattctgtgttttgggctattgcccctttattccagaaaagagttaaatcaacaacaagaaatgaaagtacactaacactatacaaaggacctttttactcaaattgtattacactgcatctgcaaggaatattgaaaaaattgtaaagatagtcatatcgtgtactagcacaacttcaaaaaacctgatggagtatacaatttgtaatatttttcaacatgaatttaatgattatgaagaaatttgggtgatatggtctttaaagtaaaaactctcaatttagttctagtttatatcttgggtctgtaatacaggatgatggggaaagtgaaggggatgtgaatcatcacattc

SEQ ID NO: 23968 - DNA, 440 bp, Glycine max
  unsure at all n locations
tgaggganaacttgatgccttggtcaacctagtaactcatctggcaatgaataaaaaatctgcacctgttgcaagagtcggaggtctatgttcttctgaagatcaccatacagatctttgtccttctttgcagcaatttggaatcaatgagcaacctgaagcttatgctgcaaacatttataatagccccctcagcagcaaaaccaacaacagcaaaataattatgatctttcaagcaataaatacaatccaggtttaagaaatcatccaaaattgagatggacaagtcctccacaacaacaacagcttgtccctcctttctagaatgctgctggtccaagcaagccatatgttcctcctccaatacagcaacaacaacagtcacaactaagacaacaagcaacggaggctcctcctcaaccttccttagaagagttagt

SEQ ID NO: 23969 - DNA, 455 bp, Glycine max
  unsure at all n locations
tctcaaggttcacgcttagcggcaccatacacttcagataatacactaagtatgggatttgccgtaacgaaatgcgcttagctcaggtaagcttggcttagcgtgcggcttccaacaaaaaatttgactaagttacctgggcttagagattcagcttcgcttagccatatgcatcttagcgtggtaggcgcgcttagcgagttcttccaagaacgcgtatattcaatgaatactaatgaactctcttagcgtagcatgctcgcttagcaagttcatcgcgttttccagaaaaaacgcagaaaacacagttcattttcttgcacttttttgagcctctaaaaggcaaatcaaacatgcaaaccaaccaaaatgacttctacagtacaaacatatataaagtcctaatctttaactacttctaanaacattcaaaccttaagaantctaaagtaaat

SEQ ID NO: 23970 - DNA, 439 bp, Glycine max
  unsure at all n locations
tcacataatanaataagcaaaacataatcgactattgtctgtggactgcaacattcaagtggactcgtcatgttcatcccatatgggctccttcctgaagatgatctcccacacatgttcgttaggccggtaatagaagacaacctcatctccacccatcaagtcattgtccgttaagaatctgtgccaagggtcatccacatattgttcaccattatgcatggagatggtccatatgtgacgaacgccactcgtatgttgcacagtcatacatggtcttgaagcatcaacaaaatcgatagcctcagtaggcaacaactacaggacaacaaaggaagtcacatttcatactattgttgacaacaaactacgacaacttcatcatatgcataaagtctggccaatgctgtaaggttggagatgataccatcggctacat

SEQ ID NO: 23971 - DNA, 438 bp, Glycine max
  unsure at all n locations
tgcatcttcttgaacattctagatctacattntagatctaaatatattagagtgacttgaaaaaacgagttacaaaacaagctatctttcccatctttgtaacccggatctgggtttgatttctttgtaacattattccccatctttaaagtgtcttgtaactttccaatctagctagatctattgatttcgtttatgggggtttgcattatgaagataattagactggaactcaagatagaggaaggggacaccgtcacaacattctcaacgaagatattcatcagagtgaaatctggattgaagggaggaaagaagaggtttacgatcgggatgcattggaactccgacaccgaccggtggtgcatgatgatgatgatgtgtctggacacaaccaaagaaagacagcttgtggcgttgctgccagggcattatgac

SEQ ID NO: 23972 - DNA, 423 bp, Glycine max
  unsure at all n locations
tgttagaactatcatcacatgacgctttattggcacataataagttgctttctaggcaacttgagattttaaaagaaacacttggtaagtttccaactaaactatctattggtcaacctacacattcttctattttgcaggttacaggttgtaccatatgtggtgaggctcatganacaggccaatgtattcccattgaagaaaacactcaagaaattcactatatgggaaatcaacaaaggcaaggatatactcggggaggattctcaggcttccagtatggtccttataattaacaaggacagtggagatcacaccttggcaatcaattcaacaaagactagggtggaccttctaacaagccaatccgtcaagggcctaacatctttcagaggactactaagctggaggagacattgactc

SEQ ID NO: 23973 - DNA, 378 bp, Glycine max
tatatgcattcggtgacaatttaaggtctgcatattttaaatgagtaatttagctcacaaatatgcaagtattataataaattagtgcaattacaaattagtgcataacatacataacttataacaaataatcggattaatttatcataatatttatatatttgtgagctacattgttcattttaaaaatggtaaaactaaattaccagcaaatgcatacttaagaactaaataagctagttatttatatttttattcataaaagacgttcctatattaaacaatactatatgaatatagcttaaaaaatgaacattgttaaaagtctatgatacaaatttaataaaagttatttattattggaaagagctaatattt

SEQ ID NO: 23974 - DNA, 438 bp, Glycine max
gtctatttattactctatgcatgttttataactctcattcgcatatacgtgtttgcgtatgtgtgcatatcacgtgtgactacatgttgtactttataatgcgcaggatgtacgattccataatgctcaatgtgtacgtatgatgtgttggggatcattcaaattacaactttaatttgcacctgtgacatccttgtggttcactagctagacaataatttttggtgtcaacgcatcattgaacgagtcttgaacatctcacacacacaaaaatacaaagaaccctctgaggaaaggaatattaggaataatgtatatgagagacagatacagctgaaattgagagggactatataaaataaagtgttaataagtaaagttcagtaattgcttggaaacataaactacagtagcaagtgaaaattgtagtctgactta

SEQ ID NO: 23975 - DNA, 407 bp, Glycine max
actcagctttctccagtccaaatgacttcaagctttatttttcacttaacctccattaccacagaattcaaacttaaccttgcaaccctcaaagcctcactctttgtccactcgtaacaccacattctcactttccaaccctaggttaactctacacttcatctctaacagttttccatgggcaatttcagcatacaaacatcacaaacatcatcacaaaaccctaaaatagaatgggtatgtctaactcaaccaaacatggtaatttcaacaagctttcaacaagtttcttcacaaataactatcatgaagcagaaaactagcaagactacccatcatatctcccaaaacctcatacccacgaaatttataagagaaagaagtccacccaaacctgaaatttcgaa

SEQ ID NO: 23976 - DNA, 457 bp, Glycine max
  unsure at all n locations
cttataagaacaaaattgccttaatcatttccanatatgcatgtgaattaagacgcatcaacaagaatcaagccaaggctattgtgcaagcaatcaatggggcaaaacacaccaaatgattataatgatggatggctcaaattctcacaaaggtaaaatcatcactttcaaattgagctttcaaaactatcatgacatgtagagaagaatcaaggatttcaagtcacaaaatgtcaagaacttttattttcaaaacaattacccatttcttgaacatatcctataattcaaagaaaaacatgcaaagtcgtacgtgcacacaaaattgacccaaaatattaaactgaaaatccgacgaaactaacaacattaacaaattaacacaactaacaaattaacanaaccaacataactagcaaaaccaaagaacactccctccccccctctcccatactta

SEQ ID NO: 23977 - DNA, 406 bp, Glycine max
tgagatgaggaagtgtataagggtgaaacttcctgcttttattcgttgaccacagagtggtacctggagatatgtcgcgggggtcaggagaccttggggacgtcatgtggggtgctattgcccaaaaccaagcttgaccaatcccgacccaacccgggcatagtcggtcagtgagaacctgtgatgtacctaagcaggcgagctcctggcagtcaacaaataaaaggaacaaagaccacacagcaatgaggcttgtgtggtggttggccagctgtgaaacttgattgatatatgggatgtggcctctggtaatcgattaccaagggtggataatcgattacaaggcttaaaaatgaagacaggaggctaagatggtctctggtaatcgattaccacgcttgaaaac

SEQ ID NO: 23978 - DNA, 454 bp, Glycine max
  unsure at all n locations
tcttatccaagacactctcttggtggtgaaacttctccttacatggcttattctctagtggatgatgcctcctctcacttcttctcctttatcttctgctacaacttcatgggtgaaaatcaccattgaaggaacttattgaagctcaaagatccagcttccatagaagcttctcaagcaggcttccatcagttatcaacggttttttgacatgaggcacaaagatacaagtgttgacatcatagatatgtgtttaaaataagttgtatacttgtaaaaattatgtaagtcaatcgtgtagaagcaaagcttcatggtgaatcanaggtgattcanaggtgttttgatgataacaatgatgataacaaaagatgatgacaaaggagatgacaaaagctcaaagatcaatcaaagaacaactcaagggaatcatagatcaatcaaagaacaactc

SEQ ID NO: 23979 - DNA, 288 bp, Glycine max
ttttctgattattttattacaatatagtttttgattataatattattattttgcctctttttggtatcagacatggttatggcatgatagatcggtcggattttattctatcagaaatcaaaagatgttacaactcaaatgatcgcgggcaatacattttattgttatgcgagaccatgacttagatatctgactacagcacgtcaaaagggggtacagaacgcaaaccgtataaaaatatcagcacgcgaaacaagtggggaccactatgggtacatagaatgaatt

SEQ ID NO: 23980 - DNA, 434 bp, Glycine max
  unsure at all n locations
gggactataagaagggagagatcagttggaagactttgttctctggacaagtcttagagattcaagcctataataaaatctatctgttgaattttcatgaactttgtcttaatttactttagacacaatttgaagcaacattcatgttgaagaccttgagagataaggtcagtttaaggcttatctatgacaaacaaggtgtctgtcttgttttgcgagctgtgtctggtagtgcatgtttttatttaattttttgcttctgtggttttcaaattcaaaatacggttacattntattaaactagagagattttnttttcaaccatgtatattataaaaatctatcttcattttctaaaggcctaagcaaaatagagtggttgcagtanagacattngtgaagtatgggaaaagtgttgtaaagaaaattttatt

SEQ ID NO: 23981 - DNA, 449 bp, Glycine max
ctaagctttctaagtgaaatcagatgcaaccatctccctaagagtcctctcacgaggtggaggttgagccatgttctcagtatgaaaattagtggtggaatgctcaaaatcagaatattcagaatcaccctcaacagaatgctcaaaatgctccaaatgcatagaatgaccaggatgcacatgatgcctaactaatatatgaaaggctctatctatttcaggatcaaaggggtgtaaatcacctggattgcccctagtcatgcactatatgcaacaaataatgtgtttctcaataaacacctaacaagggggtaaaactacagctatactcaaacgatattaaaatgagctgagattttgtgaggaacaccctaaaatcatgaaaagatagcacaaaaaatctcaaaaacaaaattcaaagtctaactatgaaaactacctaagcaaag

SEQ ID NO: 23982 - DNA, 274 bp, Glycine max
gggaagcttgaagttaacttcccacaccccttttattacttagctcaccttcttgggaagctttctttagaagaattcttaagaagcttgagcttaacttccccttcctctttaatagctaagctcaccttcttgggaagagaagcttgaacttagcttcccaccccctattatagcttaactcacccccctggccaaaaatatggaaataccaaaaaaaaaggtctttctaccaagaatacttcaaatggcccaaaataccaggcttaaaccc

SEQ ID NO: 23983 - DNA, 426 bp, Glycine max
  unsure at all n locations
ntanaggatgttntatcagtacaaaaatatatgtgttttcactggtaattgattaccaaatattgtaatcaattactagagatacattaccagagacaaattacataaaggctttttcaaaaagaagtttctcttttgaaatttgaattttaaatgctgtaatcgattaccacttgtatgtaatcgattacctgtgatgaaatttcagaagttaacattgaaaagtcgtgacctttcaaaacataactatgtaattgattaccaagaagctgtaatcaattaccagtgagagaatttttgaaaaatattctgaaaagtcacgtgtcttcaaaagtttttgaaaagccaccaaggacctataaatacgtgacttgtctacgaaaaacattagagtntttcattagaacctaagtgacatattctctc

SEQ ID NO: 23984 - DNA, 529 bp, Glycine max
  unsure at all n locations
tgagttgangtgacnccnttttgaaacctgagacnntcgagacnccannganaactaagcttttagacttattcgaggcttaagtatatcgtagtgagtctttatctctgtgtacatataggtcaaagcattgctctgcaattcatgtaatcctaccaggtaccacaactcgctgacaatagtctgtccatttactggccaaatagatgacaatgtgtattgaacagatattactacggacacctttgagctcagcaactttctttctttcattgagactattcattagtcatttggatatctcaagcgtgggaagatactttatttgcatttgtgtgtcatccagcggcaattcttcaagtgactctggcgccaagagagcgaacaacagacccaccactgcatgcgcccactgtgcagcactctataagggacagacctttgatcacttcatacaataatccacttgcaaaaagatctcctgcccctgtgcatcagtcgcccttgctctcctaatgccggacccact

SEQ ID NO: 23985 - DNA, 436 bp, Glycine max
tgaagggtcattgacccagataaaacctgagtcatcatctcaggaatccccaaaatcaacaacaaaacagactgtggctgactatgcctggtcaatacaaactctcctggccttagaagacataggcctcaccagagtaccaaaattggccaaaaagacctgggcaaaaatggcttcagaatcagacaatgattctgaaacagacctacaaaaacaaatccaaaaagccaaacagaccaaaactgtctgtaaccaaaaaccaagccaatcgttgactcaacaagaatcaacaccacaacccagcaatagctatatttcaaaaaacaaattcttcaatgttttacaaatggaaccagaatactgagacaagaatcctttcaaggcaaccgccaaagtattccccccaggattccattataggccaacagccacaaat

SEQ ID NO: 23986 - DNA, 331 bp, Glycine max
gtgagcatagcaagaagagtatatagtgagttctaacattgacatagcattagcgagggattcaaccattctagctatacaacctctagctgattatccttccccatatgaaatacctcatgctagattcagctgatccaccctcacaacataataacccttctaatggctcacctgaatacattgagttatactcaacgctattccaatatttcgatctgactcgatctggaggacgtggtgatgggaggacagattctagctctgttagctcttgaattgcctctaagaactggagttatatgactctgacccaatactactagagatg

SEQ ID NO: 23987 - DNA, 436 bp, Glycine max
taccagttactaatagtcaaggttaattgttttcttttttctctaggttttagtctttgcaaacattgatgacttcaagaatcttcttgatactcttcaagatgttgcaaaaacattcaagtcaaaggtgattagttactttagcctacatttggagctttcaaaccattttcctgcattttttagaacttatggtctaattcctttgtttaaatgcagataatgtttatatatgtggatattaatgacgagaaccttgcaaagcccttcttaacattgtttggtcttgaggaatcaaaaaatactgtggttagtttatgagttaataacagtgatttgttcagattgcttaattagtttagatatttttggcaactgatttgatttacttcttggtgtgccaaatacgtaggcgcgtttgataattaatgagctc

SEQ ID NO: 23988 - DNA, 245 bp, Glycine max
taatattcgagcgtcacgaatattacaggtttactcagacttccgagtggaaagttattgctgttcgaatctgctacgagcttctgttctaaatttcgagcgtctcgatatatcacgggactcaatcggacttgcgagtgaaatgttattgacgtatcgaatttgctacgagcttcggctttgaattactagcgtctcagtatattacgggactcaatcggacttccgagtgagatgttattgtc

SEQ ID NO: 23989 - DNA, 433 bp, Glycine max
ctccgcttaaggactcgtttgtgttttctgagataggatttcttatgttcttctttaagggttcaacaagcttttgtgatttccacttgaaggattctagctggaaaggaagtttttgaatttctttgtatgtgcatttttgtctataatactttgagattcataatgaaaataactaactaaggtagttgtgtataattggatgtaggtaaaaaatgattgaactaatataaattgttgagtcattcatctccctttccctaatctctcttatgagttttgtgatttgcgtattctacataactgaatctttgttcaattgattctacatatttatatgatgattaaagttttccagggcatttccatcacattttagactttgattttaagatttcattggttcaacaatccaacaagagatggtggttaa

SEQ ID NO: 23990 - DNA, 389 bp, Glycine max
cctatagaatactccgcttgaggaatcttagggaactactaaatatgccgctatttttgccatactacacacgtgaacccgcttagaggtaaggaataagtctaccacaatcgcggttagagtaaacatgtgtatggatccttagaggatcaaattggggttaaatttggagattatttatgtgcttcaatttttcatgtacaatgataactacgaattgttcatgttagatgagtcaattgatgccttgatgtgaattagatgtgttaatttacggtctagccttgaatgttaaacctataaatctgagaattcttgatatctacatgtcttctcgaaattgattgagaggttctgttccccctgatgtgaccacatattctatgcta

SEQ ID NO: 23991 - DNA, 443 bp, Glycine max
  unsure at all n locations
tgtggagccaatgcaagcagaacgcatggacgaagttgcccggtcccccttccctacacaacctcagcctccaccatacttttgatcaattgcaacaaataataaatatatacaagaaaattagtaagtattgaaatttttaaatttaaaaaaatatcatttttaagttttatccaaacatgatcatatatcacttagtggttaaagaagaagaaaagaagaaaaagataggagatttaatttctcccgttaacaaataataatgaaattatttattcaaggagcaactggccatggattttgccaaatgaagttttgaaattaattagaggaatgggaaggtgcaggaatgagaatggccccgccccacctttgggtcatatttctccaaccaattgaatgaatagtgatattnttggtttgagtaataatatataaattat

SEQ ID NO: 23992 - DNA, 514 bp, Glycine max
  unsure at all n locations
cggagcaagcctttgaaccttggttgagaccttgagacactcggagacactcatgagaactcatgctgaatgcactgcaatttatgcatgtttcatatgctttctatctcctaaggnggagatagctccctctaacggtttcctattcctgaaatacctcgtgcatgcatacaccagtccatgaccttgaaaggcttaggatcccattcaacacttttggatcttacatggatacggcgatgatctgtaaaatacctgctattacaaactgcgtcgagtcaggccactgaaatgaaactttgctactctgcaatgacacacacagctgatccccaccactctcacatatatgactacgcacactgacataatcatcaacactaacacacacgtcctcccccataatgattcactcacacgcacacacacactaaggcatgcattcctctggctctggagagtcacaatattcattgcttggctcaatgattgcatacttctactcgcttgaacg

SEQ ID NO: 23993 - DNA, 550 bp, Glycine max
  unsure at all n locations
tgagcagcntttganccgtgttganncctgagaccnctcgaacnccngcgacactataaaccactctcgctatatagctaccatcgatttattatctgcaatttctgcgattccaatgacaggcaacgcgtgtgatntggttcctgcttatctcaatgtaccgacgctcatagaatgcagcttattgctaaattatttgttcgaatgagcatcacttagtgtgccattgccagaccgttcggctaacatacctctgtattgataactcgtcctgacctatgttcacttctcagttgttgctactattacgtcatactctatatctttgcgtcattaagcaaatatcatggcgcacatatggtatgatcgcgccgaatcctatgtttatagtggctattgattacggttcactgtgttcgtgaactggtcagaatcacaatagtgtataacatccgccaacattctaactttgtacatcgcggaggcattggaaattgaattcgtaccatatgcgtgctgatcgtgacgctcctgttatcaagacctcagg

SEQ ID NO: 23994 - DNA, 362 bp, Glycine max
  unsure at all n locations
tgaaggcacactggatgcattggttaactnggtaacccagctggccttgaatcacaaatctgtacctgtcgcaagggtttgtggattgtgctcctttgctgaccaccatacagacctttgcctttccatgcagcaacctggagcaattgagcagcctgaagcttatgctgcaaatatttacaatagacctcctcaacctcagcagcaaaatcaaccacagcagagcaattatgacctctccagcatcagatacaaccctggatggaggaatcaccctaaccttagatgcgccagccctcagcatcaacaacagcagcctgctccttcctttcaaacgcttgtgccccacgataactatacat

SEQ ID NO: 23995 - DNA, 449 bp, Glycine max
tcgtacgcatatccctcatttaagactacacccgatttagatagcactcttaggtttagactaacataaactgagtttcgttcgcagatccctcatgtaagactactagactcagctcaagtagcttactaaagtttatcctaatttagcccaagcttcgttcgcataaccctcatgtaagattaggcctaaactaaacaacattattgtaacagcataattaaaaccaaaacttcacccgcagatcctcatgtaaggctaagttgcaatcctacttcaatcaagttctaaggcaacagtacatttcccaatgctaatgtcacctaattgtgcacacaaatgggtgatcagaccaaaagcatacaaacattaagcattgaaggaagcattgaacacagaaaacataatcaattagatattaggtatttacatcagctggtcattagaaa

SEQ ID NO: 23996 - DNA, 448 bp, Glycine max
tgtccattatactcacatttctggttcctcaaattctttataaacgccttagtgacctctggtctcacatatttaggtgggtgcaagccaccctttgaccagtcaacccaagtcaaactcctattagaattcttctccggaaacattatgttaacaaatgttggcaagtagtgttcatcaacatagcatggtctcgtgcagcgctcttgaaaaattgggaagtaggttttgtctgacaccacttctaaggcaagttctctgtccatttcgaaccattgagacccttttctccattgcttgagggtgaccatatgggacatgcgagggttgtaacgtccacgtgcaactagactatcttcatcataagccatcacatagctgtgggtggagtccatcacatatgagtagattggtgagaagttgatagagggatgcatgatctgatatc

SEQ ID NO: 23997 - DNA, 394 bp, Glycine max
tgccactgcagcaatcaagtgaacgactgaagtgtcctttgacattggatggttgcttggtagaggtacatgctaataactaataagatttcctgtgcagggtatcattgtttttgcatgagtgatggctaccttggggctggatattttggttgaatctgcctcacaagttatttcgaaggtaattgacataatctattgctcttgtttgtttattatatacctaaatttgggttcaagactagttattcaacacgtggattatctaccacaagattgttctaataagtgattttatcatttgagcagttcatattatcattagaccttgctgttgctttgattccgctgctaaagttcactagcagcacaatgactagcagcacaagcattg

SEQ ID NO: 23998 - DNA, 420 bp, Glycine max
  unsure at all n locations
ctcagcttagacagcttgtcataatcgattatgctaaacctgtattcaattaaaataaagaggttttgcatcttgaagaaacttttctaacttagaaaatttttctttacactaaccatgatgatgaatgatgcaagacaaatatcatatgtactaagatgcaacataaaagataacaatgaatacaaatgccactcaagggagttagacatgcaaaagtcaaaacatcttcaagctntggcctttatgttgttcatcatgtttctcattntgctccatctatctctaacacatgtcatctntaatgattttgtctttgatctctcaaagaaggattaaagatacttcaaggaccacattgagcaactacatgaagtgtaaaagtcaacaagagaagagtatgananagcctatgatcct

SEQ ID NO: 23999 - DNA, 444 bp, Glycine max
  unsure at all n locations
actggtcagccgaatggagacttctgactaatgtttcttagatgtttgngtactaccacatggctacttggcttaaagaattcttcgccaattttgagctcagacacattataagagaaaacaatgagagccaacttgttgttaaaactcgccagtacaaagaagaaaggttaatacataatagttatcaaggaaacaatcttggaactaggcttggacaatgtggtagcgagtgtaactctcatttattgagcgtggataattgagatttacgacttcctgganaaaaactcactctcgaaatatctagtagcgacaagaaagattaagagaaatgccagctattatgtgatagcgggaggatacctatacaaaagaggctctactacccctctgttgaaatgcctaagtcgggatcatgtcgagtatgtgatgaaagacatg

SEQ ID NO: 24000 - DNA, 422 bp, Glycine max
  unsure at all n locations
tgtaacctattatgactntgacgaagtgcaacgcgtattctatggccattgaatttttttccttatcttccaatgctgcccttaccgccgttagcccttggccaaaagaatttgagtatcatatttatatgtttgataattattattattgttattattttttctcttgatgcacgtaaaagagaataacctaaacttttatatatgcgcattcaaattaaaactaacatacataaatggtcaattaatggatcttacataatgactcgttttcctttgcttctttcaggagagatcatcatcaattgatatggaatcatgtgtgcctcctggatttagaattcatcccacagaagaggagctcgtggtgtattacctcaagaggaagataaactcgctaaacatcgatctagatgttattg

SEQ ID NO: 24001 - DNA, 439 bp, Glycine max
  unsure at all n locations
tatttatagtttgtntaaacccaattatgttatgcttgttaaatcttaaggttaagaaaaaaataatttttaaataaaaatttaaaagatagtactaaactaaatttattgaattggaagtgcttcataaaaattagttattgaatcaattagttttttttttggtgtacattaaattaattagttaataataaaatgacgtagaaaaaaatgtttatatgatttttatacattttttaatttctagaaaaaatacttttaattaataataattaaaacttttgtagttagttgtaaattgatataatttttaaaagataaatttttttattaaaaattaagaataaataatataatattaaaagagggaatttattgaaacacagtgcttcagcttagaattaagacaactttattaggttgaacagacaacaatttc

SEQ ID NO: 24002 - DNA, 409 bp, Glycine max
  unsure at all n locations
tgtaagcttgcggctattntctcccattaaagtataattataagaaacatacacaagaagctttcttgttctggctggccattttgacatattcgtgcatatttacatagagactaacccattgctaatagtctatattgagacgggtcattgggggtttatataactatgttaattgctaatagtcaatgcctatcagtatcatcacataatccaatgaccttagacttcattgtataatagtaacacaatcatattaacataataatttacataatatggttgtcattatgaggatcaatctctcagacaaaagtcataaggaaggtgggacacaatgacagatgccatctagaatccaattttggttttatatctttccaatgagaaagagatgatatttcatcac

SEQ ID NO: 24003 - DNA, 455 bp, Glycine max
  unsure at all n locations
atagaatactnacgcttgcagacaagactatacgaggtatcttccttgggtatatcaatatctctaagggctaccgtgtctacaacttgcaaactaagaaactcgtcatcagtcgagatgtggaagttgatgaatatgcttcttggaattgggatgaagaaaaagtggagaagaaggttcttatacccgctcaactacctcaagaagaagctgaggaagaagacccaggtgaaccaccttcacctccaccacaacaacaagatcaagaactatcatcaccagagtctactccaagacgagtaagatctttggtggacatatatgaaacctgtaacttggccatacttgaacctggaagctttgaagaagcgtcaaagcaggaagtatgggtcaaggcaatggaagaagagatgcagatgatcgagannaacaacacatgggagttagtaaatcgt

SEQ ID NO: 24004 - DNA, 440 bp, Glycine max
  unsure at all n locations
ntaataagatattatctatgaaagtaaactacaagtttcaaaaggattccctttatgggaaaaatatatactacaatccaaaagactatcacaaggccctaagttggtcccctctaacattatatacgtaactagcaaaaagagagagtggtcttgactcctagtccatcttctagatctaggtcttcaagaagctgtatgatctcttgtaatatcagtattatctgctctcgtaccaaacatgatcatcacagccatacaacacaacatagacatgaaagcaagggtaaatttttataaaagaatcatgccataaaaaagtaaagggataatgagatagcttacaagagaattctgaataaaacattcattaccaaatcaattcaagcatatgatatgataatctcaattcacactttaatctcatatgcatatgtatc

SEQ ID NO: 24005 - DNA, 423 bp, Glycine max
atttagaaaatacaaattaactcttttatatgctaattctgttttataaaataaaattaataaatagacagcttattaatggaaaaaattgtataatatgcatgagaccttagaatcaatttttttataatcattgtacacaaaagggaaataaaattaatttgatgtataatacttttcaattctaaaataagtatcgtcctaattattttacctaaataaagaaaaattattagaaatattagaaagaaaggtccaggaaaatgatctctttattcccatgacaaaatgtgtttatatacacatattgtattacaatcgtgatcctataattaagttaggactaattacactaaatatagaaatgaacatatatggaaagaattggtcttgatagctacacaccggcagatactaaatcat

SEQ ID NO: 24006 - DNA, 351 bp, Glycine max
gaagagagaatggaagagatccctgctgttcttccatgctttataatcagcggcgaagatcccgtctccgaaggcctgaaaaatgtgacgaaactcgggtcccttgacgtacgtgtggaaattcttgctcagcatgtggtggacgttgatggggtcgcaagtgaccaaatagtccatgttggtaaaccaaggtccaatgaactcaccagtgccaccatgtcgttgcaacacctgagatgaataatcatgggcacgccataaattgaacagtaattgtggtagcatgccaatgatacggtattctgtccaaatgggttgttgcaacatcgtctcctatggaagaaatattgg

SEQ ID NO: 24007 - DNA, 454 bp, Glycine max
tcaggttgctcaattgctccaggttgctgcacggaatgtcaaaggtctgtatggtggtcagcagaggagcacaaaccacaaacccttgcgacaggtacagatttctgattcaaggccagctgggttaccaagttgaccaacgcatccagtttgccttcaagcttcttagtttcagatgatgcagatgggtttgtagctacctcatgcactcctctaatgactatggcatcatttctggcgctaaactgctgggagttggaggccatcttctcaattaaatttctggcttcagcaggggtcatgtctccaagggctcaaccactggcagcatctatcatacttctctccatattactgagtccttcataaaaatattggagaagaagctgttctgaaatctgatggtggaggcaactggcacatagtttcttaaatctctcccagtactcataca

SEQ ID NO: 24008 - DNA, 444 bp, Glycine max
  unsure at all n locations
tatgcgcatatttccttacgaacgttcacttgcacaagacatcctatcatctaagaaaaatgcacccatatacaatcaaggtagcttcattacctagattatttacatgtacttccaaggtgtatttgttatttacatcacacacgcctccttggctgaatttacatacatgcatactcaaagcattntggggtaccaaaaactgcacatgcgctcatcttggtatttctaatacccatacatatacaaacttcacgatgaatcttgactacctacacaataaggtgctacatttcatgctttttttcaagtttttgctacctanagccacatgcaaattcaagcatattttcctttgctgactaaaattgtattcaaattagaaggtatatattntttttgtaatgtggtttcttcacataacatgcaacatatttatatata

SEQ ID NO: 24009 - DNA, 439 bp, Glycine max
agccgctagcagacgagacttccgaagaattttctgtgcttgaatatataaatggctcgatgtacatgggcaaaccactgaagataaattgtcaaaaggcgattctgatgatgaaatgctcatctctgttctcaagtaatgttcctttaccttctcgtttataggatcaccactttactgatcaacgataggatcaataatgatgttcacaaatttactttgatgctgatgctgaacgacctttgtctactatccctaatcagatacacggtgacaaaataacaggagctaccaatcataaatccgtgaatttggagggaagcctgttggttcagcacctgtaagtatatactgaactcttatgcttattaattattgactggatttatttcttctattagatctatgtttcctctacgaaatgaaatgttgtcattat

SEQ ID NO: 24010 - DNA, 442 bp, Glycine max
  unsure at all n locations
ttaagacattntgcaacatcattntgtacattcaacattaacattctatttcttggcattggtaccttggtgattagattgtttctcccatctctgatggaaagattgaaatctttcatgtgaatatcatagcctttttcgagtaattgtcccaaactcaaaatattgatcttcatatttgggacatagtagacatttgatatgaattcatgtcttccaactttcaaacgaattaagatctaaagcatctatagtagacatttgaaatgaattcatgtcttccaactttcaaacgaattaagagtcttataattatcaccaaatgaaacactattctaaagcatctatagtcaagtattattggtgactatggcgacgataatacattaatgtntttgtatgagtagatcgactaatgaccacgtctcataggtcatggata

SEQ ID NO: 24011 - DNA, 435 bp, Glycine max
tctatcaagatgataatcagagcactatagcttcaagtatgtgctccttaaacctccattaattttcaactttaccttctcctccattgttgtttcttcatttttctccacgtatctcctcacatgttttgtgttaaatgttgttaacatgattctttagaatttccactgattaatcttgctatacaagctagatttgattttctatggttcaaatttcttgttaatgttcttgaaccatgagttgtgttgagtttaagtttctttgagttttgtcttgctattttttgtggttgaaaccaaaaccataaaattcttacaaaaacattaaagtacaagagaacatcaaaaatctagagtgacttgttcaactattgtagttctgtcatagaagtcatgtctagtcatgaaacttgtcacataagattttttatg

SEQ ID NO: 24012 - DNA, 370 bp, Glycine max
tctattaagctggaaccatttatctttaaacacaagttgagttgtattcagaaaattagagtttatctcttttatcttagtgagagtgattctcctaaattcttgagtgattcaagaacaccctggctgtatcaaaggactttcacaacctttgtgtgttgccctcgctggaaagagtgattctttccttccaatcatctccacccttgttctttcaaaccacaattccagaaaatccacctctgcccaaaattatctcgtgaaaggactcgtgttgaattcaattgaggctcatgaatcacttaatttgagtgcgtaaaatgggaattatggtcacgagataattttggccgaataagatggaaaatgc

SEQ ID NO: 24013 - DNA, 399 bp, Glycine max
  unsure at all n locations
ntaacctcatcgtctctcacagtcgttatatntgggagttaatccaatccttgggtcggactctcagccacttatgatagccgccgatgatcccattactgcttccgctaagctctttgtcctttcttcacgccgcatcccatgccttgcgaactccttggagtaccctcgcgttgtggtcaccgaaaccccgtgcgatgaaaggcgtgatgctttcgtctgatggcactcctctcatggggtagccaaattgtcttatggcgaggacgggattataattaatacaacctcttgttccatcaagggaacattgggacatccttcgcatgaagatagaatcctgattcttccttccttctagcgagggaacanattaacagacgcccctccatgctagcc

SEQ ID NO: 24014 - DNA, 415 bp, Glycine max
tatctccagcatagtcaacatcacagtagcttgtgagtccaaaatctttccttcttttaaagcatagaccaaggttataagttccaataagatatctaaaaatgcatttaataacagataaaaggactttccttggttctttttgaaaccttgcacataagtaaacactaaacattatatcaggcctatacgctataaggtataacaatgatccaatcattgctatttattgggttttgtccaacttttttagattcttcgtccaaccctaagtatctagttggatgtataggtgtctccatttcttttgcattgtccacgttgaacatatttagaagttctttcatatacttggtgatgcaatcctaccccgcaggccattgggtagaagactccaagtagattggctagagat

SEQ ID NO: 24015 - DNA, 413 bp, Glycine max
  unsure at all n locations
tgagctcgttactgctgccttacaaagcccctcataacttgttcctgcttcattcttcctttcgggccctttntgtttcccgctctaacgcttcaaccgtggtcatgttgatacctttcagctcatcacactccttcctaaccctaatgactgtcgtctttagcttctctttcaccactcttgtctttttaagctctgttttcaaagcttgcacttcttcactttcctcaagaatttcagcctctttcccacttagactttttagctttgggagccacgttatcccttgcattctagacttcaaccatatgtgatagctgctgatgacaccattgctacttcctctaagctccttatcttttcttcccactctattccatgctttacggattttttgaagtatctttgcatta

SEQ ID NO: 24016 - DNA, 395 bp, Glycine max
tctcaggaagtctctcttatagcttctatggaatctacctagtctataaatagaagcatgtgttacacttgttgtaactttgatgaatgacagtcttgtgagacatacttgaaagttccacttctctcccacttttattccttcaatttcgtgctcccccctctctctttccgaccctctttcttttcctccattgaagcatccttccaagcttcttatccaagtctcatcttggtggcgaagctccttcctctatggcttattccttaaaggatggcgcctcctctcacctctttggctttgtcttacgctgcatctccatggtggaaaatcaccattataggaccccattgaagctcaaatattcaacctccataaaagccccacaagcaagc

SEQ ID NO: 24017 - DNA, 434 bp, Glycine max
  unsure at all n locations
ctatgaaactcagctgaatggtcacatattgaaggatgatgcgtaatatttctgctgggctacgcgtcataatatggaataaggatgcgacattcctttccattcctggtctaccaacatcagggctgagtcttgtgctaaggggggatggtgacatacatctattgtggctgggatcctagtgtaaacatatctatgggctgcctaatacctgctctcaagctctgcaaggcgtgtataattgctactatggctacacccaagttctcagtatttcatggctagcgntttgaatatgctgcatacccagcctctatatgaatgttagtacctctgcgacccacctattgtatatgacctactattgctgagcgaagaataaaactgcactatagcttatcttatgacaccatgcctctgcacgaaatgactct

SEQ ID NO: 24018 - DNA, 407 bp, Glycine max
  unsure at all n locations
tcttaagcatagggacatctagtgctaaccttttttcactcaactgtgacaatgcttgatgatgataatgcccaagccttttgtgccagatttctgtgtgattctctatgagagagaaaacagcttgctccttcttcaatggatttagagcaaaactntttcctttcattttcacctcgaagatttcttgaccagctacatctttaattaagcaatttttgttttcaaatacaactttaaatcctcgttcaattagttggctgacacttaataagttttggtcaatttctagaacgaataggacatcaacaatacatcttgtgcctgcagaacttgtgattgcaactgtcccctttcctttgactgagatataatcaccattaccaattctgactctggtgactttt

SEQ ID NO: 24019 - DNA, 421 bp, Glycine max
  unsure at all n locations
ttagcatggtctctgtgatagaagccattgatcttttttgccgattgtcggccttcatctggtcttgcactccctcttcattatccattcttctggatcgagtgttataggggtgcctttgcgctttcttagttatggtgagttccctacagaaacaaacaatcgtgagtatgccaccaaaacatgaatatgctaatgaatgatcagagcacttggatccacctcaaggcccttttttagataacgtgatgagttgcagaacttctcgttttataaaaaggaacanagcttttatctagccaagatcatacaaaagtgttacaacagaacctaacggtttctaattatatgggccatcanatctatcatgtgttgacagtaattgattagcccgtgaatttcctcgggggctgtacacact

SEQ ID NO: 24020 - DNA, 394 bp, Glycine max
caagtgtgtaaagtgtgaatatatattggatttaggggttacacacgaatggataaaaataattgtttgtgttttacaaatgcagggttaaatttgcacattgggccttaaagagactactaccgaatagccttggagacctatgtagtgtttgagaagccatgaacaatatgatcactctacaacatattgaaattaaagcatcgtttgagacaactacacatgtggttgggcatgtttttaaagttaccttatacaagaaactatttggcatggtatcaaggtatgtgttaaaccacattgttgctgagtttgagcatgtaaattatgctagcattgatagttctcattatatatatataatgagaactactcacgggcttccatgtgcacg

SEQ ID NO: 24021 - DNA, 420 bp, Glycine max
  unsure at all n locations
taganatcaagtgataaaagttatattttcagtgatcatatattccataatatagggggagtaaatgcacattttatctatatacaattggttgttgcttgcttgaatcttgatttcaggtattgtattgtcatcatcaaaaagggggagattgtagatgcaaatgcctttggtgttttgatgatgatcatgatgaagaaaagcaaatgatgcatatgattcaagaatacaagccacaacatcaagatgatcactagtacattaggaaggaaattcataattgatatagcaaaaggtttggccaagtaatgcatgttaaaaagtgtttttcagaagatctactctctggtaatcgattaccagaggatgtaatcgattaccagtggccaaaaatgctttacaacagctactaaatatttg

SEQ ID NO: 24022 - DNA, 437 bp, Glycine max
  unsure at all n locations
tgttatacaaatttataaaaattcaagtaccacaattgtgttaaatccatgattggctgatattgagaagaggttgtccttaatgctcatagataattgcgtgatgataacaaacaaaatctaaactctacatgagtaattcaacttcttcttactcgtcaaatttgcttgcataacatctaatacactgcaaacattctcacggcatctaatatgttgtttgcctcctatatttaagtcatttgattattctgtcaacccanaccttactttgaaccaacaatgaaaatgctcaatattttgagatggcttaacttgacaatatttatgacatctctactattgaataacaacttttagatctaaaatgtcttacattctgtaatcatgtcaatttcttggacaacaaatgaccaacaatatttcaattgtaacat

SEQ ID NO: 24023 - DNA, 437 bp, Glycine max
  unsure at all n locations
ctttttccatggcttcctatggtggttatctntntcttgactcatcttctccttgaagtggcatctctaatcacctttcctcctactccattctgcttccattgatcttcaagaagcaaaggactccattgatgaagaagatccaaggcctacaatctccacatggagctacatcatgtggtatcaagagcatcttcatctaggtgatgttcttttgcttcctctatctttntcttcggttaattcactttaatcttcattttcttctccatgtatctcctccattgtcttatggtttggtgttgtttatagtagattcaaaaaaataaatcgattanatcttagatctacacttgttcttgcatttctatggttcaaattntatagatcaactcttgaatcatgnttttgtgttgattttaaggtgtatctttttt

SEQ ID NO: 24024 - DNA, 437 bp, Glycine max
tcacctttttgtcctcctcagttgttgcatgagaatacatgctctattttcatctcccactccaagtaggcctccggatcattctttcctttaaatggaggaatgttgagtttaataccatcaattcggttttgtctaagaacaccatcattccctcttctcctcctttcttcttcattatgatctctattctccatttgatccaacctctcatggagcgcatcatctcgttgcttcattaacctctccaaatgttgcatcaaagcttgcatttggaattgcgaaagccccactccatcattaggattagtacctgacatctcaaacgaacaaatcatacgtaacaagacaattatagttgctggttgaatacctcacccactcaagtgtatcacacaattatggctcttctctaatgatacactcttgccttttac

SEQ ID NO: 24025 - DNA, 432 bp, Glycine max
  unsure at all n locations
tctatagaaggttcgttcctaatttatctacaattgcatcacctctcaatgagctggtgaagaagaatgtggcatttaccttcggtgaaaaacaagagcaagcctttgctttgctcaaggaaaagcttattaaggcacctgttctagctctttctgacttttctaaaacttttgagctagaatgtgatgcctctggagtgggagttggagctgtattgttacaaggtgggcaccctattgcttattttagtgaaaaaattcatagttcccccctcaactaccccacctatgataaagagcgttatgccttaataagagccctccaaacttgngaacattaccttgtttccaagggaattgtcattcatagtgatcatcaatcacttaagtacattagagggcaaaacaagttaaacaaaaggcatgcaaaat

SEQ ID NO: 24026 - DNA, 409 bp, Glycine max
tgagatgaggaagtgttgaatggtgaaacttcctgcttttattgttgaccacagagtggtaccgggagatatgtcgcgggggtcaggagaccttggggacgtcaggtggggtgctattgcccaaaaccaagcttgaccaatcccgacccaacccgggcatagtcggtcagtgagaacctgtgatgtacctaaacaggcgagctcctggcagtcaacagataaaaggaacaaagaccacaaagcaaggaggcttgtggtggctggccagctgtgaactttgattgatatgtgggttatggcctctggtaatcgattaccaagggtgggtaatcgattacaaggcttaaaaatgaagacaggaggctaagatggtctctagtaatcgattaccacgggatgtaatcgatta

SEQ ID NO: 24027 - DNA, 396 bp, Glycine max
  unsure at all n locations
agctttctagtgccttcatttcccttcatttcttcacttttctctatcattttcctcgagaaccaacctcttcactactccagatccttcccccatcacatccctcactccactttcaacctaatggcatactttagtggcttctcgcaaagatctcatcatcactggaaacacgaagcatgtaacgactcgcctcgtcgctatgatatcaccattctaaaccgtgaaaatttcaatttttaaatgaaaactctgttaattttcttatgaaaaaaaagtaatttttttcacgatatacattcaccaaacaacgcataattacttaaatgaatacatatatagatatagtaactcaatacacatcatccacataattganagtaaattagcttatac

SEQ ID NO: 24028 - DNA, 388 bp, Glycine max
agcttctattttagtgtaccagataaccacgggcccagccaagctatcttggaagaagtgcagcaacaacttctcatccctggaatgcgaccctatcttgcgacaatacattttgagatggcacttaggacaagttgtccctttgtacctatcgaaaccaggtaccttgaatgatgcaatcctaccccccaagggcattggatagaatactccaagaagattgggccaaagatgcaagagaaagccctagggttctcttaagccttatggtagatttcaggcccatggactaagtatgagcccacttatctttgtacatattagattaaggcttcattaatattgggtcttgaatttatggctctataatatatgtagggtaccctat

SEQ ID NO: 24029 - DNA, 399 bp, Glycine max
tgaatcaagtagcccacaggaagacgaaaatccccaaacagaacggccacacagactcgagtcgaacgaagttcaacgagcaagcattaacttgccagagtcaagaacagacattcagaagattcaagagaaaatgacttcaagatgccagagaagaaatcaacgaagcaacaaggcaagacttcacaagggaagtatagaaaaggatattccaaaaacacaccacagcaaaaccttgttctacacaagaagctccctcatatgtctctaagataccagacgaatcactctcgtggaatcagaaaccagctccctgtaatcgattaccagcgaaaaaagcggatggcaaagagctcttaactgaatccgcaacggcaccaacgaactaaaatggcggag

SEQ ID NO: 24030 - DNA, 258 bp, Glycine max
agtttgtttatgttgtatgtgtagaagggtgaaactgcctgcgtttattgttgaccacagactggcacctggagatatgtcacgggggtcaagagaccttggggacgtcaggtgtggtgctattgcccaaaaccaagcttgtccaattccgacccatcccgggtatagtctgtcagtgataacctgtgatgtacctatgcatgcgagcttctggcagtcatcagattatatgattgctggacctctaagcatggatgc

SEQ ID NO: 24031 - DNA, 380 bp, Glycine max
ttgcttgtgtttgggcaatagcacctcacctgacgtccccaaggtctcctgacccccacggcatatctcctggtaccactctgtggtcaacgaataaaagtaggaagtctctcccttccacacttcctcacttcaagcatgtaagattatggggtacccgtcacatgtggtactaggtggcggtcgggcgatggtgcaagtcgattatccacatccacaaatcacacataaatccaccacccccagttgcccaccttcaactgagctcacgtactcccacgtagcccttatcctcgttcctctcaacaccgggtccccatcaatcctcccaagcttccacaacatgcaagcaatttcaacatccaaacatcatgaactat

SEQ ID NO: 24032 - DNA, 385 bp, Glycine max
ttacttatcttgtaactaaccaagccctcggggaggggaatcgacaacaaagaacactaatcaatcatcaaaccctaaaacatagtaatctctataaaaactaactattgttgacttataaaacctacacactcatcgtaactatgatcaacaacaattacagatccaaaatagacatcgaacaccaagcatcacaaacttcttaactacaatcatcaagctcatccaaaaatacaaaaacaatcatcaaaacacaaacaaagacaatcaacgacaatcattaatctacaaacaacaactaacatgactatcaaaacacaatcaaagacaatcattaagccacaattaacaataaccatcatacacagaactcaatataaagaaa

SEQ ID NO: 24033 - DNA, 294 bp, Glycine max
ctaggaaaatagtataactaactcacatactctgaaccgagtacaatactcacattactctcgaccactaatccaaaagagaatgtcagaagcccatgtagagcaattggaaccatcaaactccttcatggatagtgcgaagcttgaaagtaaggcctcaagtatagatgtgtcagaaactacggtagacgccataagacacacaaacagaaccggcaacaacaaagaacgatacagcgaaagttcagataaacaaaggagtgcaagcaatgcaactctgatggccactaaact

SEQ ID NO: 24034 - DNA, 372 bp, Glycine max
tatcttgaatgtgcgcaacccaccatttgcataggagaatactggcaatgcgtctaccatcacgacaaccatctccctttacatcattgggggtgccacttatgctgccagatacctccacctttgggtgtattcattgatagattcaagcctctttatgcacatgttctgtagttgcatcctatccggaaccatatcacaattgtcatgatacttgctaacgaaggcaaccattaagtcctaccaagaatggactcgtgaaggtacctaagtagtgaaccaggtaacagctaccgcagaaagactttcctggaaggaatgtattagcaatttctcatctgttgcatatgcccccatcttccaacaatacat

SEQ ID NO: 24035 - DNA, 294 bp, Glycine max
  unsure at all n locations
acccacagaagaaaagaaaagaacgcaaaacanaaaggggggtgtgctcagcaccnaanaangccggaaaaacaccaggttcttacaagacgacacggggcaccaagaaaccaccaccagagcaaaaaaaaaaaacaccacaaaaccaaacaaccacaacaaacaaaagaaaaaccgcacaccgcaaccaaaagaaacagccccaaagcaagaacacaaaacccgcaaaacaaaaacaaaaagaacaacagaacaaaaggacaacagaagaaaagaccacaaagccccaaaacc

SEQ ID NO: 24036 - DNA, 282 bp, Glycine max
tttctttatgtgatggatcgagtggcctcaaaatatttaacaatggggggctgaattaattattcctaaacctttaccaattaataaatcactcttttaaggcttttactaaattgtgaagagaatgaggagtataacagaaacttaatagagagtaaatacgtaaattagatacacactggaaagataatgagtatggaacaatgaattaaacacccacgagttttatactggttcttgacaacccggcctacatccatccccagcgacctgcggtccttg

SEQ ID NO: 24037 - DNA, 354 bp, Glycine max
tatcttattgacatacagtgtcagcctgagtcacagcttaagttcataactgaagcctggctacaagtaaattagtgttttgttaatgctttgtacagtttgctatgtaatgaattattaagctcttacatatgcttttttattacaagagtagaccagttctccccctgggatgaagtctcaaagcagttgatattcattttacatttgatttagaataaattacactaaccacccttgaggtttcgtgtaattacacaaacaccccatgctgtttaaccatacagtcacctcctttgtagcggtgttatgtaacatatgaggaggcgtaattgtatgttaaaacttataggg

SEQ ID NO: 24038 - DNA, 394 bp, Glycine max
  unsure at all n locations
agctttagctataccaagacaaattttcttccttgttggccagtctagttttgttttgtttggatccctccctgtatgtgattgggagaaggacaatcagttagttgattatatcaaatatttgattcaaatggcaagtatggctaaagtttattcatcatgaagcttaccaaaaagaatgcgagatagacaattattttccatgtactcatatatcagtattagctggttgccctccacacaacatccataaagcttaacaagattgggatgttgaagtccagatatcagtcccatctcattcacaaactcacgatttccctgtttagattttgaagaaagctgctntactgctattattgtaccatctgataataggccctgcatcatgaac

SEQ ID NO: 24039 - DNA, 389 bp, Glycine max
agctttcttcttactctgatgaatactctctccttgctctctcccactcaggtagcacttctgtgcttaatgacctgcagctcatgcttgattgcactgatggggtgcgccttgctttatagcctatgtcattgacgtggaacaagtctcaacgcttaaggaactgattgaggtactaggcgcaggataagttgtcttaacacatgtatgtatcatgtattggtatacgcctttagatgatacgatatgatgaagtggattcatgatacgccttgtgaaatcaattacctattatttatagagcagagccgctgctatgcttaatctctaatgaagaaactattatatatatatagactccgactatcatgactctgaccaattctcat

SEQ ID NO: 24040 - DNA, 396 bp, Glycine max
  unsure at all n locations
agctttgatgatttccaganattttcagtctcaaaccctgaggtgctaccgattttacattcatctgggatgttaataacatttgctagcacactttcaatgtcctttttcattaatgggtgaaattcttacgagttttcctcaaggttttaaattacatttagtgacggttatacagaactccaaaatcttaatatcccagaaaattgtaggcaaatgcagttgcagactgtaatttaaaactgtcacccccagtaaatgacgtgggccccacttaagttactgagtttcatctcttatcttgtgggtcctatgtaaattccactcaataagggtgttggacacaatttgtagatagtgtattggtaaccattatggaggatttgctttcatttt

SEQ ID NO: 24041 - DNA, 381 bp, Glycine max
agctttaatttttgggctacgtttcatattgattagagggtataataatgtgtcttacttccctcaattttcgttcaaagttagtcttatctatattttataaatcatgactttgatctttgtattttttataatcatctctctttatggaacatatgattctagagtcaaagacgaaattcaccaattatataaaatacgatgatcaaaattattttttttaaaatatagggattaaaacctccaacacaaattaaaggacttgtgacacatttgacccttggattagattatatatccagaaattctatgccactgaaatatgattctaggcacataatagatgattcatgacatacccaagtgactaagtctgctctt

SEQ ID NO: 24042 - DNA, 322 bp, Glycine max
agcttcgtgatctctatatcagattcaccaatgtctgcgggcatatgccccatttcttgacccaaatcaaaaccctcaaagtcatcgacctctcaaacaatagcaacgaactctacggcaacctccctgcctggctcccttctctgcccaacttcttcgaaatctccttcgacgcataccgcatctccggctccttctcgaagtcgctcacaggatgatgacgctcaccgacaaccgccttaccgggaagatttcggcgaaactggcgaagctggacttgaaggttgcgtacttgtgtcataatatgctggagggtgatgct

SEQ ID NO: 24043 - DNA, 395 bp, Glycine max
tatgcttgcttaaagatgtctttgattaattaattattttaaaatctagtgaaatactaactaaaaaaaaacataaaatttcgtataagtaatgtacaaatccaaaaataattgataaacaaaatcatattgaattcaagtcgttaaagcacaaagtatatataaaaaaagagcataatattaaaaaatgtatagattaggtcttcagtcccatagcttacaaatctattttaagtccaagcctataaacgaaataaaataaaatttggacaaaataagataagatttgatgaaatataatctggataaaataaaatctaaattgaataaaatctggataagataagatttgataaaataaatattattattattattgttagttaaacagttat

SEQ ID NO: 24044 - DNA, 385 bp, Glycine max
ttgcttcgttagttattattattctttaagcatgtctgtaacatggtttgtgcagtgcttgaaacttccagaattggcccatatgctttcgaagatatgataaagatgggtaaggatgctggagaggagcttctttctcgagccggacctggctttttcagtcgttaacaatccaccacattaaatggccaacacaatacttgatcagggaggttgcacggtcagctctttcagttgactgcatcccaagtatgtctattcttcaaccatgttgtatagactaaaatattcagctgagttggaaaaataagccactcatcatggtccaattggtgtatcttaaggtgattataaagccaaatttttgtattggtgtgtgtattat

SEQ ID NO: 24045 - DNA, 392 bp, Glycine max
  unsure at all n locations
ttgcttgactaggcgagttgattttagccttagtttcactttagttattagtcaattcaattaagaatgagaaatcccaaagagaaaatgtccgattgatttttcgctttattttactaaaaggcatttttttattattatattattattttacctctttttttatttccaacgtggttacggcacgaccgaatggtcggaattcattttaatcgaaattaacgaatgatacaattcaaacgatcggtggaaatttattntatttttagattaggcgagaaacgacttaaataaatggcttaagcacgtcaaaagggggtataaaaagcgaatgacaacgagaataataatacatgaaacaaaatgtggaccaccacgggtacatagaatga

SEQ ID NO: 24046 - DNA, 385 bp, Glycine max
tgtctgatcaaagagagtggaagccagtcatcgatagtctaccctcgccggcgcccgggatcgccctctttccaaaagtagacgggctagtggatcaaccggcgatcatatgctcgtcttgcttacaaccacagcacggaaagcccggtcgcagctcgattggtcgatgcctatgacacgcacgaccggaaacgctacaagagcagcacgagaactatctgctgcacacccgctcctcacgtatggctgggcacccacaccgcacggcctgacatagactcatctcgcccctagtacgccaccacatgtgcgctgataaagggatcgaaacgcgggaataacccctggcacgatcggaaggacgtccgtcaaaaggccccccgac

SEQ ID NO: 24047 - DNA, 306 bp, Glycine max
  unsure at all n locations
tatgcttcatacactcgnattcaatgcaaccatgacctacgtaaataagttgatattaaaaaggatcaagtcaaatctacaaccttcgatggctacataattgtattcattaaaccatcaagcagcatgtcctcatttattgagatgacttttgagaccctatgacattcaaacaaaatgcctttaaatgatgaaatcatttcaccatcataatatacaaaagcatatgcattctgtatttcttaagcaacatggtgtatatcaagcaaaggtgtcgagttgcatcacaccctactactaattata

SEQ ID NO: 24048 - DNA, 375 bp, Glycine max
tatctttatctaaatatatgcttagttatgacctcctgatcatttccaatgacttagactcaatgcatactttgaagtcacctatgccactgattggaagcttttaatctgttagaatcacttgttagaaagcatctcctcaatttgaccatcttggttgtaagaatccacatttttcttatcatatgtaagcatgtgcttattagccctgcattgcatcaattacatacaatatatccttaatatctaagtaatggttgccatatattatcctatcttgaaagacattgatgattctacaatactgagagatactatacatacaactaacttatgctaattgagagaaaataacgaaataaaattaatagattt

SEQ ID NO: 24049 - DNA, 383 bp, Glycine max
tagctttgcctaccatatctgaggttggatgattcatttggttgatgccggatggggacgtccggttcaccttatcaacagcgctggtagtggcaacttcaaccgcattggcttccattatcttcttcatgctcatcatggcctccatcattgcggtcatttgctctttcatggcctcctatgtcggcctccatctgctcttgcacctcctctacttcacctattactcttgctctagcataggttcggtaagggcgccgtaaagcgtgttctttctcttttttataacaatgattaagttcccccccccccccttttttcaaggaaagaatgcaatgagcaatgcaaccaatgaacaacatggatgtatgcgaatgatgcac

SEQ ID NO: 24050 - DNA, 392 bp, Glycine max
  unsure at all n locations
agctttagctataccaagacaaattttcttccttgttggccagtctagttttgttttgtttggatccctccctgtatgtgattgggagaaggacaatcagttagttgattatatcaaatatttgattcaaatggcaagtatggctaaagtttattcatcatgaagcttaccaaaaagaatgcgagatagacaattattttccatgtactcatatatcagtattagctggttgccctccacacaacatccataaagcttaacaagattgggatgttgaagtccagatatcagtcccatctcattcacaaactcacgatttccctgtntagattttgaagaaagctgctttactgctattattgtaccatctgataataggccctgcatcatga

SEQ ID NO: 24051 - DNA, 385 bp, Glycine max
agcttccacaacatccaagtaattcaacatccaagcatcatgaactaacacagccaagaaaacagagcagaggcagaaaactttgcccaaaacacaaatcaatatcacagcttttcacactcaaataccccaataacattctcttcgttccaattcgttaaccgttggatcgactcgaaaattttactggaagtctctattacataagtctacattttgaccgttgggatctgctagcaaatatccagaaccccatatgtactaccctttccaccaccagccatacacaagcatttttctgcacatatacaaaattctgctgcacatatttgacagcaaaattctgcataaagtgcagattttcgaaaccacacttgccctcatc

SEQ ID NO: 24052 - DNA, 397 bp, Glycine max
agcttttgtgtgtgtaattctgagtgctgatgcacagccttcttacaaggatggggtaattgttgtagtgactggctgcttaactggaagtgacaatctgaaaaggaagtttactcagtcctttttcctagctccccaggacaaaggctactttgttttgaatgatgttttcagatatgttgatgagtataagtcagttgatattgagtctgtgcctgcaaacgatgctgctgatgaaagtgctccaacagatgcttttgtccccgagcctggtaaatctttacatctgctggttatatatgatcgtattcctgttgtttttcattttcttcctctaacattttgcttatctttgtgtaacttgtaagtgtgagttttgaaacttttactttgatta

SEQ ID NO: 24053 - DNA, 369 bp, Glycine max
agcttgttttgaggtacttacccgttcaagactgagagaaacgaagaacgaacgatgaatctttgaagaacagtcgagaatctttgcgtaattactcacggaaatgttacggaagcgcctcggctcggattttcttcacggaactaattttcctcagcaaattcgaaagagagagaagtgcctaaggggctgaacccttttcttcttcacttcttcccctatttatagcaaaataggggagaagcttgccgcccagctcgcccaggcgagcaaggttgcttcctccagaagcaacaaccttctggaggaatcttctggagggcccaagtgcgcctggttgctattcacacccctctgtttactaaatgc

SEQ ID NO: 24054 - DNA, 391 bp, Glycine max
agcttttttttttattcaaagacaacaaattaaacatggcattcttgaattaagaaccctagcacatattcgtggagtgttgggttatttattttaaaaaagggtcagtttggtactgtatatcttaaatttgagttaagattatcttttcaaaataatggtcttttggagtatgagacatgattttgaaattttttctgactgattgaagtatgtcacattaaatacatttatataaaactatagaactcgattaatgttccaaaaaaaaaatgttaaaaatgggatgaaaagtaagttttacaagccactagactattaagatctattatctgattttttttcagtggttcatgaactcactttctactgaattttaccatgtaattta

SEQ ID NO: 24055 - DNA, 334 bp, Glycine max
tagcttcaacattcaatttcgagggtctcgatatattacgggactcaatcggacatccgagaaaaaagttattgtcatttgtatttgctcagagcatcaacattcaatttcgagcgtgtcgatatattacgggactcaatcagacatccgagtaaaaagttattgtcgtttgaatatgctcagagcttccgcattctatttcaagcgtctcgatatattacaggactcaatcagacatccgagtaaaaagttattgtcgtttgaatttgcttagagcatcaaaattctattttgagcgtgtcgatatattatgggactcaatcggacatccgag

SEQ ID NO: 24056 - DNA, 391 bp, Glycine max
ttgctttacatcagattttagtaatgatccactaacctagaattaaaagaacttaatgccactaacctagggaattaaaagaacttaatagttgagtgtaactgaaattgtggcaaccaaaagtcaccccaacagccatcaagtctgccaccatttggtctcccaaaaggcttatgcctaggttgccaattgggcccttattacaacttgaactaaaccaaactaaagccgttttagttgattaacccacaatatatttttggtcagccaactttacaaggattggaccattatttagacaaattaaacactctaaaattgagacaaagttgtgtcatttagtcctcctccatttgggtcatggtacaactcacaacctttgacttttctc

SEQ ID NO: 24057 - DNA, 390 bp, Glycine max
ttagctttgatgcaacatatggagatgttaatgaaacaacgagatgatgcgctccatgagaggttggatcaaatggagaatagagatcataatgaagaagaaaggaggagaagagggaatgatggtgttcctagacaaaaccgaattgatggttttaaactcaacattcctccatttaaaggaaagaatgatctggaggcctacttggagtgggagatgaaaatagagcatgttttctcatgcaacaactatgatgaggaccagaaagtgaagcttgctgccacggagttttccgactatgctcttgtgtggtggtacaagcttcaaaaggagagagcatgaaatgaagagtccatggttgatacatggacggatatgaaatagatcatg

SEQ ID NO: 24058 - DNA, 393 bp, Glycine max
tagcttagctcttcctatgtttccggcatggtgccgtcgggatgcctccgcgaagctcgctctatctcgccagactctcttacctctcaacctatctctcctccacccagtgtttctctctctactcactctctctctacacattctctctattattcgtgcctaatctaacattccatataaggtatattaggacaggagcagattactattggagtcaccccaatatgactggttcagtgttcttctcgccataacccaatccttaaaattaatgggtcttattcccaatagatatgtccaagttcgtgtgccttgtctaatcaaagtttcaaaatgttcagcctacaaatcaatttactatgctatcaaatgtgccactgatagcaagaa

SEQ ID NO: 24059 - DNA, 395 bp, Glycine max
ttgctttgaaaggttctcttgcatcattatggaggccaataaaaaattaaataaatcatttaaccttccatgtgaaggtttcaaaccctcaaactaatcagacttttctctccttttatcgtttgaaaaattcgacatatgaagggaatgccaaaccaagtccctaatttcttcaattatgggaaacaagaatgcatatccgagtgaatagaacaaaaagtcagtgcatatgaatcaattaatcacagagcaagaatgaaacaatatcaaaacgaacatagggttagaagatccaaagaaatagataatgctcatgacaagttatttactaaagatagtgaaaggaaagaaaagaataatctcatccataataataacaaaacgtgtatgagaaa

SEQ ID NO: 24060 - DNA, 377 bp, Glycine max
tagcttatagagtgactcatttgtcagactccagccttgagtgtattctttttattcaatacagtccctacagctaacttgaatatgtgaagcaatgaatcactatcatcaacaattgtattaagctaacttcaactgcaaagagaaatcacattcactaattggcctattctagagtaactaggctaaaaaagctatgtaaaaaaaaaagataaaatgttattatcagataaacttatttttatttgccaaattcaacatgaactacatgcacatgaatcaaggcctttagcttttgatctagccccctcaagaattgatcggaaaatggatcccaaacatgaccttaactggctaataatttattagttctatta

SEQ ID NO: 24061 - DNA, 386 bp, Glycine max
  unsure at all n locations
ggaggggtgtgtcgtacactgacannccngntttngaanngcgcgtggtcctactgagcgcagcagtttcttattttaacccccaacgactgggcgggggggtttaccccaatcccctctttatcccaacactatgacctgctaccggggtctacccgccactgatcgctttcaccactggtccttacaagtcgccgatattcgtgctaagccccaatcacttacgttccaggaccgagcagaatccttcgaacccccagatactgagcatgtcctctgccgatccaatttaaattatgggctaatttacggaacgccatgctcgcgctgctaagaaggtcaaagggacggaaaggatttactactccgatgcgacggaacaaacg

SEQ ID NO: 24062 - DNA, 390 bp, Glycine max
agcttgatgataagctttctatagagctagaagtgacagtgaaaatacttgtaactttgtgaaaaggcttgtggaaattttgaaaatcacaattcaactctcattcttatgatatttgcctttacaaagtttatcttgtgaaacttgtcaaactcctgaaactcttttattgtacatagtaattaatggatttgatagttcaccttttgaatcaatcatgtttggataccaccgtggtaaaatctatctcagtaaaactacgatcccggactcgtcaaccgtgggaccattgtgaaatttggaccaccaccttcaaaacccattttcgcacatcacttgccgtgggatttatgaaataattgttttgcagagagaaattagtctcgcacg

SEQ ID NO: 24063 - DNA, 361 bp, Glycine max
agctttattttctacattcacgactacacacaaaataagggagttaagtagtcatgtgtttacacatcaagaaagacacactcatccaagatatatatatggtccaaaaggttcttgcagcactaatccacgcatcaaaggagaaataagctaactaacaacatacacacaggatgatagaggtttgttaacacattatcaatcaatatcaagactacttgcatcacccaatggcttgccataatgtccaactgcacttcgcaaattatagagatggctaatctcataactcatgattcaacagtggatttatggtatagcagacattattgatgcaaagcacatacaagcattattatta

SEQ ID NO: 24064 - DNA, 483 bp, Glycine max
  unsure at all n locations
ggaagataaaaagagaaaggagaagggattataaaacccaagggtgtgatgatcgaganacncgggtgagnantggcggggggatagaagagggagggaagatttagttaagaaagaaanaagaaaagggagggaaaaggaagaggaatgaagaatgaaaggaggaaagagaagagaagaggggaaagaggatgaaggagaagggggagagggaggatgagatgaaggaaagaaagagaagatgaagagagagggagagggagaaagaggaggaagggaaagagaaagaaaagatatgaaaaaagganaaggaaggaggtggataaagagaaggaaangaagagggaaggagaggagggagagggaaggatagatgaaagagaaggaggagaagaaaaaggagggaaagaggagaaggatagaaaacagagtagagaaggaaaagaaagnaaaggaagaagaaggaatagagaagagaaagag

SEQ ID NO: 24065 - DNA, 399 bp, Glycine max
  unsure at all n locations
agcttgcctcaaagaggtccaggaaggacaaggcagccgaaggaactagttccgctccggagtatgacagtcaccgctttatgagcgctgtacaccagcagcgcttcgaggccatcaagggatggtcgtttctccgggagcgacgcgtccagctcagggacgacgagtatactgatttccaggaggaaatagggcgccggcggtgggcatcactggttactcccatggccaagtttgatccagaaatagtccttgagttttatgccaatgcttggccaacagaggagggcgtgcgtgacatgagatcctgngtaaggggtcagtggatcccgtttgatgccgacgctatcggccaactcctangatatccgttggtgttggaagagggccaggaatgtg

SEQ ID NO: 24066 - DNA, 385 bp, Glycine max
ttgcttatccgtagaggtgatggaccttttcaggtcttggagaggatcaataacaatgtctataggttggacctcccataagagtatgcagttagaactttataggtggagctaatactgaggagcatgaaccaacagatttgaggtcaaatcctcttcaaaggggagtgggtgatgcaatcctccctaggaagggactagtcaccaaagccatgagcaagaggctccaagaggattgggctagagctgttgtagaaggccctaggattctcatgaaccttagggtagatttctgagcccatgggccatgttgtgtccacttatctttgtacatattagattaggatttcattatttttgggccttgtatttagggctccataat

SEQ ID NO: 24067 - DNA, 392 bp, Glycine max
  unsure at all n locations
tagcttcaagctgcttaggttgtcaccctatatatgtacactgacatgcttttctatgggaccaccaaccaactaaaacttgtcatctctcaacatcaccttttttttttctcttcagccaataaaaatttcccagtttgaccactcaatttccagtaacagtcaactatgacttgattaatgagaggtaataaaagtaattttttttataggggaaacaaaggtacattttcttgccaaagtcaagaactaattcctttaaggatttaacctcttcaaacaaatatttattcatatacgttgggcagaaacagannataccaaacaccatataccttgngcaatggacatgtcttanaatgctttccaaggacaatgtagtaatttaatct

SEQ ID NO: 24068 - DNA, 394 bp, Glycine max
  unsure at all n locations
tagcttataccaaaacattcacatcaacactaaaaaggagcttaagtcactcttaccccttaaacgatgaagcttataccaaagtccaaaacattcacatatttttcccctttttcaaaatatgaaactacttattaaattattataattattttttggttttttatcgtaagaattaaagataatattaagatatttataacacttatgcaccatgttgaaccaactaaattatacctcatttctaattatttttgtttgatatcaattttttaatcttaaactatattttaattcttaaattgattattaaatatatcatatttataaaacaaatctccatacattgagtcaaattctntaaataataaattttatctttcaatatattagt

SEQ ID NO: 24069 - DNA, 382 bp, Glycine max
  unsure at all n locations
tagcttgagataaaaacaagatataatataaatcttaggattgttctggttacgatggaggtgagtggctatagtagccatgctgctagggttttggaagaggtttagagggaggttgagtctttggatcctcagccatgacaaagctgggtggtttcgagatccagtcagcgtgaattgaggagatttgctagtgttccaactactccgagggttgtggatcattttgatgaagtagtgacctgacgtgtgtggtcgatggtgagtgcttgnggtttggaggctaatggggcagatgagaagtggattatgaggatccaggagcaggaagccagagagcgcgaggcaatggtttctatggtgaggccaatggttccccatg

SEQ ID NO: 24070 - DNA, 383 bp, Glycine max
tagcttgtaagatttgcaagatcatcttccttgacaactccttgaaaattattgccatcaatacgcagagatgacaatttagagagtgatccaatactttgaaatggatttccactgaatttattaatagacagatagagatatcttaatgatgaaagttttcaaaatgatcttggaagagcaccaccaattaagttgttggaaaaatctagcatgtcaatagttttaaaagccccaatttgatctgtcagattgcctgaaagttgtgaactccgaactgcaagtgttgtgagtccatgggaaatacaaggagcaagaatttctaaaagttgattaacctgttggtttagtttgagatatgataaacctatcttccttaagtt

SEQ ID NO: 24071 - DNA, 383 bp, Glycine max
  unsure at all n locations
tagcttcataagcaagcttccaacaagtggtatcagagcacaagagcttcaagtaagtgctccttaaacctccactaattntcagctttactttctcctccattgttgtttcttcgtttctctccatgtatctcctcacgtgtcttgtgctgaatgttgttaacataattttttagaagttccaccgattaagcttgctatagaagctagatttgattttctatggttcaaattccttgttcttgaaccatgaattgtgttgagtttatgttcctttgagtttacattgtcaatttttttggctgaaacctataccataaaattcttacgaaaacatttaagttagataaaaccctcaaaatttaggatgacatattcaccta

SEQ ID NO: 24072 - DNA, 345 bp, Glycine max
  unsure at all n locations
agcttcaacatcagaccacttccagggtgctggaactacttcacatggacttgatggggcctatgcaagttgaaagccttggaggaaagaggtatgcctatgttgttgtggatgatttctccagatttacctgggtcaactttatcagagagaaatcagacacctttgaagtattcaaagagttgagtctaagacttcaaagagaaaaagactgtgttatcaagagaatcangagtgaccatggcagagagtntgaaaacagcaagtttactgaattctgcacatctgaaggcatcactcatgagttctctgcagccattacaccacaacaaaatggcatagttg

SEQ ID NO: 24073 - DNA, 388 bp, Glycine max
agcttgcttctacactaacacttttcgaaaggggagtcatcatattaccatgttcgtgctgagtgtatcatgtgttggatcaagtggcctcagaataattaagaaaggggggttgaattaattattactagacctttactaattaaaaattacctttcttaggcttttactataatgttaagaaaataaagaacagaaatagaaacttaaccaaaagtaaaagagataattaaagtgcatagcggaaattaaaagagtagggaagaagaagacaaacacacaagagttttatactggttcgacaacaacccgtgcctacatccagtccccaagcaacctgcggtccttgagatttcttttcaaccttgtaaaatcctttacaagcaaa

SEQ ID NO: 24074 - DNA, 544 bp, Glycine max
  unsure at all n locations
aagcgagcatcagccgtacacgtttaaataagaatngtgtgtacacttcatacaaacaaaaancacnaaggagtccttgatgcctcgntcgacnancncaanncttacgcgacacccgcggaacctatacagtcaacccgcacgcatgccaactttgtgttggatcaagaagagccatacgaagccgcccgtgcctaagccaccacaacctggaaggccactcatcttatacatgacaatcttagacgagtcgacggggtgtaagcagaagcaacatgacgaatccagaaagaaagagcgcgtcgtacactacctgagtaaggagttcacgaccggtgaaaagagccactccttgctcgaaagaacgcgccgcgccatatcaagggcatccactgcctaacgcacgacatgctgagccatactaacccggcgtatccaagacggacccggctaagtacatctctgacaagacagcactcacgggacaaagcacccggtggaaaggcctgccatccgagtccgaaagatccgacgccaccacccg

SEQ ID NO: 24075 - DNA, 391 bp, Glycine max
  unsure at all n locations
agcttagcttatgtacctgggtgttgcccaatttcatcatatcttctgtaatactcaccacctctatcatatctaataatttttacatttatgtctaattgcctttttacttcattgtagtaaatttctaaagcatccattgcctaagatatctcgggcagtaagtagacataaccgtaatgtgaataatcatcaataatggtgataaagtatcattccttttcgaaagaactaacatcaaaagatccacaaatatcagtatgcacaatttcaagaagctgagtgcttcttgtagctcctttctttgtatgttttgcttgttttcccttaatacaacccacacaaatatttagatccatanaatctagataaggaagaaattgattcttta

SEQ ID NO: 24076 - DNA, 303 bp, Glycine max
  unsure at all n locations
atgaccaataaaaacaaaaacaacatgaatnnancggggtgtctctgcacaacacggccgcgcctaagcacgagcacactgtcaaaaaaagacggcggagagaaaagcccatcacaagaagaagagcaacgacacgaaaagaccacacgaaaaacgaacacaaacgaccgcgaaccgaccggcgacgcagacggagaaagcggcgaggaaccccacaaacacaaggctgaaagaccagaccaaagacaagacgcccaaccacacaaccgcaccacagagaaagaaaccaaaaccgccaacacg

SEQ ID NO: 24077 - DNA, 335 bp, Glycine max
agttttatatgatgaaccaagcaattttgatgatgccaaatgcccaagtgattgattcaagacttctagatcaatcatcaagaatccaatccacggtttaagattcaagagaagaaatcatagaagcaacaagccaagacttcatattggataagtattaaaagaattttccaaaaaccatatagcatagttttgttttacaaatgaatttatcaaattttctaaggttaccagagtgattactctctggtaatcgactacatgttggcattaatcaattaccaatgactatattggttttcaaaatgtcgtcaatgatttgaacgttccaaaat

SEQ ID NO: 24078 - DNA, 180 bp, Glycine max
ccccccggtcatatagcacccgccgctgcagctttttgtcacaacacccccgaaggggagcttgcattcgatggacccctttactatcaagccagggaagatgacgcccaacaatgccatgtggagtactatttataatgtaagccgcatgatagatcagtgcacttcttcaccgcctac

SEQ ID NO: 24079 - DNA, 394 bp, Glycine max
tatcttctttgcctaacaagccaacttacaacagcaagccccatgagactcatcataacgatgcacaggttaaagttgagtatgtgaaaagattgtatgaccaagtaaaggtgcaaattgcaaataagaatgaaagttatactaagcaagccaaatagaagcttcaccggatgacgccgatcgaacatttcctaatcgattgaatagaataaacaactgctgacatcgtgacgtgatatagccccgactgatattcttctgtcgacattgtacaattttctttacatacgctaaccgattatgtttattatggtagaggaagtctcttggtttggtgttgcataaaaaatttacaacgtaagtcggctgggttttttcgtgcgtgctcaacccg

SEQ ID NO: 24080 - DNA, 134 bp, Glycine max
gctggccctctaccaataatcatagtggacagctaatcttcgtattttggcgtacctcctgttatccttatttatacccgcactcaacttagaatcgtaagctcctataacggcattttgatcttcactctccc

SEQ ID NO: 24081 - DNA, 382 bp, Glycine max
tatctttttatacttgcatagaaagcaaaagagaaaagaagaataagcttgatctgttattgaagtgtgaaattggttaataacatattgttattgcaactatatatacacaagttacttgaaataactaactaattagagttctattcattaaccatgatcaagttaaactactcatctatcgatgcttatagaaaagatcatgtaatcaatgaaatacatcataatttttttatagtggatgtatcctaccactatcgaactattatgtgtttaaagctagaaaataaactatatatataatggaaatcaatttactagtacagattgtaaaagaagtattgtttcattatagttaaaaaggaaattgatgaatcatctt

SEQ ID NO: 24082 - DNA, 325 bp, Glycine max
tgtctgtttatattgccatgttgggacgagtgagacatatcctttctgtcttacggctattgagatgatgtctgggatgtttatatgctgaaatcgctcatggaaaactgttagagatgaaaggtagagtttacctatgcttggaaagcgaaattgctgggttatgaatggataaagagcgacgctttgatggttggaaggtttaatctggattcttgggcaaacggagttctatagcgagttaatcctatctcgaaatgtcatttaggacttatgataaagcttggactgtgctagagataacatctatgatcaaagtgaaccc

SEQ ID NO: 24083 - DNA, 227 bp, Glycine max
  unsure at all n locations
tttgctttcttatatnatactaaacgtaatcgagaacgtgggtgaaagtgtccttcttctaaagggtgtgacaagcttgcgggaggctagaaatcttggatatcaaagtggcaagatttatgactgctacaacaatgtggttttaatgttctatatataacccgctgtgcattacaacaaattaagataagattatgaattttgcatagaatgaaatccctctcctt

SEQ ID NO: 24084 - DNA, 371 bp, Glycine max
  unsure at all n locations
tagcttacctcactttccatccatcgagattatggataagctaatgcacgattgttttggttttttgagtntaaattttgagtatataattaagttaattgcttgaaggtaaaattgtattgtttatagtgtttacatgcagttgaaacaattgtctgatttaaagaatactttatgatctacaacaggagtgtacatatagatcaattcagatngaattgttttctaattgtattatcttttgaactgaattagttggattaaataacactgaattgttttttttaaataagttcaatttgaaataaacttattttcaactgatnttaaaacaagttcgattcaattaattaccaaatatgttttttata

SEQ ID NO: 24085 - DNA, 393 bp, Glycine max
  unsure at all n locations
agcttccatcatgtcaagacatttatagtagtcaagaggagactacttttttcccttcttctagtgggagtgaagatgaagcaaggggtgaagactctagtgaggaagtctacctcaatgaagaaggtgacgtcctaatggttagaaggctccttggaggccaaacttgtgatctatcccaatcccaaaaagagaacatcttttatacaagatgcaaaattgtagataaaaattgttctgtcattgtggatagtggatcttgttgcaatttttgtatcacaagattagtttccaagttgaacctcactatcattntccacccaaaaccttataaccttcaatgcctcaatgagcaagtggagatgatagttaaccaataagcaccccattcct

SEQ ID NO: 24086 - DNA, 287 bp, Glycine max
agcttggtttactctgtgtcggacggtcctcgcaccgctatttcatcctcctgcgtccacttttatatatcaccctatgttatggaaagtactggaagagaataagatccactgttggacaaaccttcgcttatgggatgatagtctactcgaccagcaatctactatctctctcttgattatcggacatcagaagagtaccatcttcttcatagaaatcttctgtcaaggcaatatctgttggagcttattgtggagaatgcatctattgaccatgagctcctttt

SEQ ID NO: 24087 - DNA, 399 bp, Glycine max
agtttacatatattccccatgtgataatctgaacaagagagaattatgggaagcactaagccagctaagacaccaagatcctgagggattatggtgcttcttcggagattttaacagcattagacaccagtccgagagagaaggggtggctcacaggggtatggaagcaaacaacataactgattttagtgaatggctagccgacctagaggtagaagaaatacctagtgtggggagaagattcacatggtttaatccaaacgggactgcaaagagtaaactagatagattttttgtctctcatgaatggctcaacaaatggccaggctgcacccaattcatcttggatcggaacttctcggaccattgtcccatacttatgagagctaagaacattgg

SEQ ID NO: 24088 - DNA, 381 bp, Glycine max
agctttatgtttttttctcgtctctcaactagcgacgtattatctccccctttttcgcttaaaaacctttgctgagtttgaaattttgcgactatgcgctgagcgcgtatgcgcactaagcgctagaagtgtctgggtgctaaccaagccatggtggctaagtgccatttcgccaggctataagttctctatgttgcttctttacgctgagtggacacccttccactaatcgacaacaactcgctaaacgagcctggtgcgcttatcacgaaccatcaggcttcaacttcgctctttatcattacatgtgtctctgctaatataaccttccaatagatgattagtatggatggacctctgcccaaaactagatgccaaatt

SEQ ID NO: 24089 - DNA, 387 bp, Glycine max
agcttgtctcagcgtttatgcgagacggagaccaatatgctagctatcatcgccaagtaccaagaagagttaggtctagccgcggcccacgagcataggattgcggacgaatatgcccaagtatacgcggaaaaagaggctagaggaagggtgatcgactctttacaccaagaggcaaccatgtggatggatcggtttgctcttaccttgaacggtagtcaagaacttccccgattgttagccaaggccaaggcgatggcagacacctactccgcccccgaagagattcatgggcttctcggctattgtcagcatatgatagacttaatggcccacataattagaaattcgtaggaaacttgtatggtctctcagaccttgactaga

SEQ ID NO: 24090 - DNA, 388 bp, Glycine max
tagcttcgttgcaagccagtggttggaggagaaggctggatggtgaagttgatttgtggagtgcataatcatgaattggtcaagtcattaattggacatccatatgcggggcgattgactaaagctgaaaaaacacttattgctgatatgacgaagtccatggtgaagccaagaaacattctgctaactctgaaggaacacaatgccaatagatgtacgactattaaacagatatacaatgcaagaagtgcattctgttcttccataagaggaaacgatcttgaaatgcaacatctgatgtaagcttttgaacgtgatcaatatatttattggctcagaatatttgatgaagacgtggtttgagatatctttggtatcaccctgattc

SEQ ID NO: 24091 - DNA, 329 bp, Glycine max
tatctctttttctaacaggccaacttccaacagcaagccccaagagactcagcataaggatgcacaaaccaaagttgcgtatgtaaaaaaattgtatgaccaagtgaatgtgcatattgcacagaagaatgaaagctatgccaagcaagcccacaagataaggaaggaagtggtacttgaacccggtgatgatcttggacatttgaggacaaattgtttccaagaaggagggaatgatgagaatcctgaaattggccatatacaggctaaaggcccatgtggagaatggcgaatgcccaagttgagaacgatcaagcccccgagtggat

SEQ ID NO: 24092 - DNA, 168 bp, Glycine max
ttgctttatcatctgaccactttcagggagctggtgctacctctcattgacttgatggggcctatgcatgttgataaccttggaggaaagatgtatgcctaggcatgtgcggatgatctttccacatttacctggggtaactttatgtcagatagatctcacaccttt

SEQ ID NO: 24093 - DNA, 389 bp, Glycine max
ttgcttgggtaatcttcacctgacaaaccaatgttgaggttgagatatccccatagtccaaaatctaaatgatctaagaaatagcacgcctccaattcgaggactaggaggcctcctaatcacaaaagaactctgtccttcctatcagatattgacaaggtgccatcttacgtgacctatcacatcccagttccaccaccatggtaataaaatatggaatgctttacgtttccaaaacccaatattacatttgcctattcatctatggttagtcgatcctatattacatttgcctattttttctacaagggtttatttataacaagcttaaaactcagttacatttatcttgggggtaagtgttagactatccacatatatcacatgtt

SEQ ID NO: 24094 - DNA, 378 bp, Glycine max
tagcttttttcaaatcaaaaccagatgtggtggtgttctttgctggagtcatgccaactttgtctcattctgagtcccgtcgctcgtattcttggtggtgagatagccacctaccaaagaattcaaaatggctccaggaaaaccttgcaagtcactctctccctgtatttatgtgtgtttctacaattatgctagaggaatctgaatatattgtttgaacttgttacattatctggttaggaaattgagaccacaatagaggtccatcaaatttgtatgaaattgagaccacaatagaggtccataaatttctgaactacgcatgcgtgtgtgtattgtattcatcatactttctattcctccaactctcttggattg

SEQ ID NO: 24095 - DNA, 357 bp, Glycine max
agcctatgcatccggaattcccggatgaggacatcatggccttgttcgaggaaaagttggacgaagatcgggacaaatggactgtatggtttgacggagcgtcaaacattctatgtcatggcgttggggcagtgttgatctctccggacaatcaatgtgtacctttcacagccaggctaggattcgactgcaccaacaacatggccgaatatgaagcatgtgccctagccgtccaggcagcaattgactccgatgtcaaactactcaaggtgtacggcgactcagcgttggtaatccatcagctgagaggagaatgggaaactagagatcccaagctgataccctacaaagcctaca

SEQ ID NO: 24096 - DNA, 297 bp, Glycine max
  unsure at all n locations
agcttctcaaggaagnantcttgaganaactgacttgataagcttctttgagacaacttccctgagaagctagagcttatctacacacacccttctaagaacttagctcgcctccttgagaagccttcttgagaagagtcccaaagaagctagagccttattacacacaccctcttatatagctaatctcacccccatgctttaattcatgaaatatattagcaaaagcgcctttaccaaaactacgccaaatgcccagaatactaggcttaaaccctattactactagattggcca

SEQ ID NO: 24097 - DNA, 388 bp, Glycine max
  unsure at all n locations
agcttgttattaattcttagtaattatgggggattggaatgaagttgtagctaaattctaatagaaagcttaagaatggaaacataactagcatggaaatatttttcatatgaaaatattactaattaaaatgtagaaaggaattaagtccagctatatggggcctactagatatcataaattattgaataaaattgtaaatttctagccaaacaaggttaatttatagataataatacatatctttccatgtatttaaaatttagtttaatttttctattgttttgaaaattgggctagacccatccatccaactagtcaaattgggaaccaatntatcaacaggtctattaatagaacaaaaataaatcaatatcaataagttaat

SEQ ID NO: 24098 - DNA, 391 bp, Glycine max
agcttatttcttcaattccaatgcattgtgatagtcaaattgctatatctaaagtgactagcaaaattttaatgaaaaaagaagacacttaagagtgagacataagtctataagaaatttgatttctcatgttatcatttctcttgactttgtcaggtcagaaaataatattgcggatccgcttacaaaagggttgacgcgtcaacaagtatttgagtcgtcgaggggaatgagattaaagcccattatttagttacaacaatggacacccgtctccgtgtgattggtgatcccatgaatggagttcaacgggtaacaacgaaattgtttgttgagtaaagtacaccaaaatgaaatttggcggagttgttccgtctctcattcctatgac

SEQ ID NO: 24099 - DNA, 392 bp, Glycine max
agcttgaattatcgttattaacacgattttttaatcaattgagttaatagatcaattatgttataaaataattaatgtcattatatataacactaaattttttaatgtatatttaatgtacatataagtttacataatatatattgtgacaattaattttgatctaataatttttttacatatataaatttttattaaacttgtaattcttatttaaaaaatatattgttaaatcgaaattaattataataaggtcaaaaacagaaatttatttactataataattataaaaaactataactaaatttattaatttttttaatcttttactaaaaattttgagtgatacagattgacaatccgtatacggattataaatctatatgtttatt

SEQ ID NO: 24100 - DNA, 390 bp, Glycine max
agcttttcttagtccattaagcatggcaaaaagctctgctcttatgctgagtaccctgagaatcccgatatccagttgccacaatgatctcgaaataaacctccaaatccaactcgtccagggttaccaaatgagctaccatcaatgttgatctttattctcggtggtggaggaggctcccagctaacatgcttgcaaggtctaagtcgaacttaatggtgcatagttctacaaatatcattgaagagagaatgaattttacttaatacatgttagagattccattgttgatctctaaaaattcctgtatttctagccttccacaaagtgtcgtaagttgttgcaaatagagtctcgttatgtcccttaatgttggaaatgagctggtca

SEQ ID NO: 24101 - DNA, 394 bp, Glycine max
agcttgtatgttataatcataaagttatcatgagatgctaacaacacactcttttgaatacactctctacacttgcagaaatttattaaaaatcatgaatttttatggatctcacttcttatttaatgagtttctctccttaatttgtagtttttaacaaattttaatcaataacaaaatacgtgttaaaaagagtgtgttgctaatccttctcagattatcataatcaatttattgggtacaaacatttttgtggatcaggtgtggctggagaagcgttatgttgggtcacgtcacacatctgaatggttcaatacagcaggaagaaatgttaagacggggcttattgcaagtgtcattgtgtctcacgtaatggattcaaatagcctcatag

SEQ ID NO: 24102 - DNA, 391 bp, Glycine max
tagcttgagaggattgatggggacccggtgttgagagaaacgaagatatgggctacgtgggagtacgtgagctcagttggaggtgggcaacaggggatggtgggtttatgcgcgcattgtggatgaggaaagcttgttgtgcaccatcgcccgaccgccacctagtaccacatgtgatgggtaccccataatcctacaagcttgagatgaggaagtgttgaagggtgaaacttcctgcttttattgttgaccacagagtggtacctggagatatgtcgcgggggtcaggagaccttggggacgttaggtggggtgctattgcccaaaaccaaacttgaccaattccgacccaacccgggcatattcggtcagtgagaacctgtgatgtacc

SEQ ID NO: 24103 - DNA, 391 bp, Glycine max
agctttggggctgaggacctatataacaacaccaaggttttagtttggagggttttcagagaggacaataattctagggttttagaattccagtttttactgttcatgcgcactgttcacgtagaataaaattcattttctgaaattccgtttctgcttcaatctacaatttcattttctactaattaatggaaggctaagtcttcagcgttgttttctcttgaggaccaaaaatagctctctttgaggttttgttattactattgaattctgatcaatttttcctcttcaccaattactatgtattttttgctattaatccatgcatgcttagtgcttgattaattgtctctgcacataatttacgttcatgcttaatgatcagtttcgt

SEQ ID NO: 24104 - DNA, 333 bp, Glycine max
tgcttttctttgaatggatgactaaaaggtcggatgtaactacacatgcaaccgtgacatcttacatggagtggctccatcgctaactcattgatgattcaaggcgatctggttcagagtcaccccacgatttgatgtatcgcgccaaccaattccgagctcgctaatggagagaactatgtaagtgttgaataggctctaactaaacgtaatggaaaataagagggaccacctctttatcgatagcatgtaacttacttaagacatgttagcaaatatatatgcatgaccagtgaacatcatgtgattttatacctacacatagtcatcaat

SEQ ID NO: 24105 - DNA, 384 bp, Glycine max
tatcttggtttaaccaaagtcccctaatgtccgtgtcatgtcggcgtccaacaaaatgttgctcgatttgatgtccctgtgaataacaacctggtcccaaccgtggtgaatgtagctaagcccctctgccacgtagacaaggatacgacggcgttgctcccaccccaaagacttctccgacttatctaaaacccacttgttgagactcccgttgggcatgtaatcataaaccaacataagctcgctcccctttctgcaccaccctctcattagaaccaagttcttgtgctgaagcctacccatgcttgaaatctcctccatgaattcccgcaaccctttgcttgaatagtggttcacgcactttaccgcaatttgcgtatgggt

SEQ ID NO: 24106 - DNA, 387 bp, Glycine max
ttgcttgagacttaattgctttgttcttcccataagcagtagtcagcagtgcactctcacccatctccattacaagcctttcttcttcctgaacacacatggtcattaattcattgatagaccatttatctttatgtgtgttgtaggaaatcttaaatggcccatattcatgtggaagggtgttcaaaatgaaatgcactatgaaggactcagacatatcaacctctagtttcttaagttgagctgaaatatctcgcattttcatgatgtactcacgcacacctttcacactggtgagccgaagagaagaaaacttcatgatcaaagtgcttgctaaagtcttatctgaagtgatgaactgggcatcaatggccttaagcaagtctc

SEQ ID NO: 24107 - DNA, 345 bp, Glycine max
tatctttgtggcattccttcgcgtcactttaaggctttattggatacaaacactcattaatatgcaggatcatgcacgtcgttgtgtactcactagaacaaggtacacgctgcatatcgcataattaatgcagtcaaatctcgagatgttacgtcataaaagttatgaatgagtgtcgaggattctacataatcaaattaacataatacgtctaccacatatcacaaatctggattgacattacacatgattaataaaatcatacttatgagtattcgtttgattttatctgactgttacgggtaatatacgaggtgatcgaaatgagtgcggatttttactgac

SEQ ID NO: 24108 - DNA, 371 bp, Glycine max
tagcttagagagattcccgatctgagagggtactgttccgttggcaacatatctcatgtcaagatacaccaaatttgagagattcccaatctgaggaggaatcttcccacggaatccagtatgagagaggttgaggtgagtcaaggaagtcattgtcccaaggaaagaaggaattgacataccttctccaagaaatctattgccgctcaagtccaagtaattcaaatgctttaaatcagccaaacaaggacttatctctccaccaaagctccatctctggtaagcttcccaatcgaagtgatagttgccatcatataaagcagaatgtgaagtgttgaggtgaagctgaagaagatgggaagtgacgttgt

SEQ ID NO: 24109 - DNA, 395 bp, Glycine max
  unsure at all n locations
agctttaggacactgaagcataaccagcaaaagtactcatgtatttggccaagctaaatacccgagtattattgttccatatcatccaaggtgaactcactactagaaaatagacttttaacatcggttattaactgatgttgaaactgtcaacgttaaaagtctcgacgttaacatcggttttgaaaatcgatgttaagtaaattacacaacatcgattttgtacaaaatcgatgtcatatcataaaatattaacaaaaaaataaaatatgaagaaaaccacatcattnttttttaaaatcgatgttgtcagtctaaaacatcggtttttcaaaaaatcgatgtttttttactcacaacatcaatttcccaaccgatgttatgaatcaattttc

SEQ ID NO: 24110 - DNA, 395 bp, Glycine max
  unsure at all n locations
agcttcttatccaagacacattcttggtggcgaaactccttctttcatgacttattccctagtagatgaagtctcctctcacctcttctcttttatctttcgctgcatctccatgatagaaaatcaccattgaaggacctcattgaagctcaaagatcccgcctccatagaaacttaacaaacaagctttgaaagaaaagtgtctttgtgtgagagtgttatcatttcttgtaatcattgagtgaggtactcgagtttgtagagtgatatactatttggagtgagttacaatcttgtaatcatttttgtgatagtgaaatatttttttgagacggttctatgaacgtangcaagaggtgccgaaccacgttaaattctcttgtttgttattattt

SEQ ID NO: 24111 - DNA, 395 bp, Glycine max
  unsure at all n locations
agcttttcctcattctctggagggagtggtgaaagatgggttgtactaccttgctcccaggtcctttaccagctgggatgacctcaagaaggtgttcttggagaaattcttccctgcatctaggaccattgccatcagaaaagacatttcaagcatcaggcaacttagtggagaaagcttgtatgagtacttggaaagattcaagaaattgtgtgcaagctgtcctcaccaccagacttctgagcaactcgttcttcaatatttctatggggacttancaacatggagaggagtatgaatgatgctgccaatggtggaactcttggtgatatgaccactgctgaggctaggaatttgattgagaagatggcttccaactcccaacaattcagtgc

SEQ ID NO: 24112 - DNA, 399 bp, Glycine max
  unsure at all n locations
agcttcagtttgaacacacttgattgcatctggtgaatccttcaaaaagataacaactacgaggtgaaaagccataaaagatgatgagcttcaaatagttcatttttttagcaagcaatagtgtaggctatttcatgacaattttatatatgttaggagatttgtgtttttaaattgaagagtatgtgaattgtgatattgcagaaaagatatgcaagctcgtgtttgacaattgaaaattaagagtaaatttttttttgaaaaaatgaataaacattaacgaatatcttcttattgggttattaccatatagggttattaccatatagaactgagctaactcatgagatgaagttgagttcattccttcttttaaagttactgaactatnttatcgag

SEQ ID NO: 24113 - DNA, 393 bp, Glycine max
agcttaagaaaattgttttaaatattatttaataaaatattatcaagttatctgtcagtgcatatgtattttttgtcaaattttttacccttttataattttattgaagtatacaacaatattttaacaagttgaaataataatatatccacattattgtttcctttaattactatttaatcttaaagaattttcacaccttaaactaggacaccatggtctctcttttttaaaaaaacatttatgtgctaaaaaagataattttatcactgtataattttaaatcatttaattatgaatattaaattattttttatcattctacttgcttttttataaaaaaattaatattaaattaaaaaaaattgtgtcaaaatttgataattaaaaaaa

SEQ ID NO: 24114 - DNA, 336 bp, Glycine max
tcttctttcctaggaagctatctagtctagaaagagaagcatgtataacactcgttgcaactttgatgaatgaaagtcttatgagatacactacacagtaccacttctctccttctctaattccttcaatatcctgcgtccctcttgtctctgtctttacctccattaaagcatcctcttcaagctacttatccatggaaattttcggtggtgaagctccttcttccttggcttatattctagtggatggggcctcccgtatcctcttctcttttccttccgatgcatctccatggtgaaaaatcaccatcgaaagacctcatttgagcttaacca

SEQ ID NO: 24115 - DNA, 395 bp, Glycine max
  unsure at all n locations
agcttcatggtgaatcaaaggtgattcanaggtgttttgatgataacagtgatgataacaaaagatgatgacaaaggtgatgacaaaaagctcaaagatcaatcaaagaacaactcaagtaaatcaaagatcaatcaagaacaattcaagagttcaacataagaatcaagaagaattcaagactcaagaagaaagtctagagacaagaatcaagatctcaagaatcaagatcaagattcaagactcaagattcaagaatgaagagaagactcaatcaagataagtattaaaaagtttttcanaactttgaatagcacatgagtttttgacaaaaccctttaccanagagtttttactctctggtaatcgattaccagaatgtcgtaatcgattac

SEQ ID NO: 24116 - DNA, 379 bp, Glycine max
ttgcttaagcacgagtaaattgctacatgcttaagcggtgtttaaggtgcatccttatagtgtatgcttaagaaagttatgcaaaatgcttttttttttaaaaaaatggtattccaagtgtgataaaatgaatattggttcatgatatgagtatttatatatagtatggagttaattttatgctaatatcatgcacttcacattcatatgacgattttgatgtggagattgtaaaaattcaaggagttggatgtcttactatgcttaacaaactattgatggattcataagtgtgatgaatatatgaatggttaatttatgatatgagcatttgatgaaatattgatataatgaatagataattatattgataagataa

SEQ ID NO: 24117 - DNA, 393 bp, Glycine max
  unsure at all n locations
agcttctttgagaaaacttccttgagaagctagagcttagttacactcacccctctcataactaagctcacctccttgagaagcttccttaagaagattcctaaagaagcttgagcttagctacacatacctgtctaatagctaagctcacctccttgagatgagaagctagagcttagctacacaccccctataatagctaagctcacccccatgacagaaaacattgtgataccctaatttcgtccggggacctttgcttgatgacatgcgacctttctttggtccttgtgaggtgcttggcatccatcattaggccatntgtgaaagtccaggacatgccggagaaccaaaaaatattgatgcacaatccgtaagtgtccgtgacacacc

SEQ ID NO: 24118 - DNA, 370 bp, Glycine max
tagctttaaaataatatatggcacttttaaggtgggggtgggggtggaggaaatagaatatagacatgcatgcatttaatttcctactaagataaagtaacaagctaatcgttgaatctatattctgtatagttatgattaccatgtagaaaagcatccctgcctccctattggctctcaataaaatctgatcatatatcttgctcagtgctaaaatcctcttaattaaaatttccccttttagttatagacagtaaacagccaaacttggcacttttgctgcaattgatctagacaatgccttttgttattaaccatttatttaccgtgctagatatgaaacatgtcgttatgtgggccatggctgaac

SEQ ID NO: 24119 - DNA, 386 bp, Glycine max
  unsure at all n locations
tagcttgccacccagctcgcccaggcgagctaggttgctccctccagaagcaaccaccttctggaggaatattgtggaaggcccaaatgggcctggttgctatttgcacccccatttttactaaatacacccccttgctcttttttggtgatttttttccgtaacgttacgaaactttacgaatttcataacaatgcttgttttctttccgtaatgttacgaaaacttatggattacgtaatcatccncttttttgccttccagaacgttacgaaactatatggattgcgcactaacacttccttttaactttcggcatgtcacggaacttcacggattgtgttacaatgctttcttttgacttccggcatgtcacgaaacttcac

SEQ ID NO: 24120 - DNA, 344 bp, Glycine max
tagcttgcctcaaagaggtccaggaaggacaaggcggccgaaggaactagttccgctcctgagtatgacagtcaccgctttatgagcgctgtacaccaggagcacttcgaggccatcaagggatggtcgtttctctgggagcgacgcatccagctcagggacgacgagtatactgatttccaggaggaaatagggcgccggcggtggacatcactggttactcccatggccaagttcgatccaaaaatagtccttgagttttatgccaatgcttggccaatagaggagggcgtgcgtgacatgagatcctgagtaaggggtcagtggatcccgtttgatgccga

SEQ ID NO: 24121 - DNA, 392 bp, Glycine max
agcttgataggtggaaggagatgtatagaaggagcacgaaattttgtgcctcaattgaggtttaaactttgaagtgtaattctcaaatgatcaaagtttaaaaaatgcacacacatgacctctatttatagcctaagtgtcacagaaaattggagggaaatttgaatttctatttaaatttcacttgaatttgaaatcgaatttgtggagccaaaatttcactaattatgattagtgaattttagctatgattcaacccactaatccaagatcaagtccaagattctccactaagtgtgcttaagtgtcaggaggcatgtaaagcatgaaggacatgcacaaagtgtgactatatgatgtggcaatggggtgtagcaagcaaatgctcacct

SEQ ID NO: 24122 - DNA, 415 bp, Glycine max
  unsure at all n locations
ntcaactgaatntacaacgctccaatcaatttcaaattggtgtaatcgattacaatatattggtaatcgattatcagtgtgtttgaacgctgaaattcaaattcaaatgtgaagagtcacatcatttcacaaaaatgctttgtgtaatcaattaccagtgataagttttaaacaaaaatcaaaagatgtaactattccaatggttttcaagttttttctaaaggttataactcttctaatggttttcttgaccagacatgaagagtctataaaagcaagtccttaacttgcaattttaagaacaattgattacaatattttacctcctttgaatctctttgaacatcctcttgaatctcttcttcttctgagcgttntatagattaacgaaggttagactaattaacgagaaata

SEQ ID NO: 24123 - DNA, 394 bp, Glycine max
agcttctttgagaaaacttccttgagaagctagagcttagctacacacacccctctcatagctaagctcacctccttgagaagcttccttaagaagattcctaaacaagctagagcttagctactcacacgtctctaatagctaagttcacctccttgagatgagaagctagagcttagctacacaccccctataatagctaagctcaccccatgacaaagtacatgagaatacaaaaaaaaaatccttactaaaaaaactactcaaaatgcctcgaaatacaaggctaaaaccctatactactagaatggccaaaatacaaggagcaaacgaaggaaaaacctattctaatatttacaaagaagagtggatccaaccttgacccatgggctca

SEQ ID NO: 24124 - DNA, 408 bp, Glycine max
  unsure at all n locations
tgcaaaccaaatgctcaccactactagaagagaagttttcaggttgtttcatataaacctcctcctctatatcaccattaagaaaagtcattttcacatccatttgttgcaactcaaggtcaaaatgagcagctcatgccaagataatacgaagagaatatttcttagatactagacaaaaagtctctctatagtcgattccttctttctgagtaaatcccttagcaataagtcttgccttgtatctctcaaagttgcctaatgaatcccttttggtcttaaagatccatttacatccaatggcctttgccccattaggcaactctacaaggttccaaactttgttactctgcatggaattcatctcatccttcatggcattataccatanatntgacactttacaac

SEQ ID NO: 24125 - DNA, 356 bp, Glycine max
agcttctccaatgtcatcagatgtctaattgttaacctcttgaacctcttctaactcgaaggatagaatccgagtaacagatggatcaaagcagcaccaaacatgccataacacgtaaattcagaaggacaaatgtggcggataacataaaaggcaccatctaactagggcacatttaaatagtcaaacaacaatccagatcctcacgggattagacattccatgcagattttatgacttgctgctcgatcggccaagtgcacaacctcgaagagatgaattaccatatgatctataaacagctctccactgatttctgctgatatgacagatgggtgatactgagcatccacatt

SEQ ID NO: 24126 - DNA, 431 bp, Glycine max
tgtggattatgaattcacaagtttaaagattacggttccataagtttgtcatggtaagtttggaaaaaatgaaaaagtgctgggtacacaagaaattttctgtgtgcgcaaagcaatttccctcttaccatatcattctgggcttattatggatatgggcctcaagaaatcgaacccaatccaatggtttgaacaaatccatcattctaaagtttcactttcttctattgcatagtatagttaatagtatgactcttcctccatccttatcggagccaccctcactttccgattcattctcaccgttaaacccaaccctagccatggatagtctccaagccacttacaaagacgaagaagaagatgacgaagacgacccacagccgcaaccaccaccaaccaccgacgccgattcactggaagcccctccc

SEQ ID NO: 24127 - DNA, 206 bp, Glycine max
aatggcgaatggcgcctgatgcggtattttctccttacgcatctgtgcggtatatcacaccgcatatggtgcactctcagtacaatctgctctgatgccgcatagataagccagccccgacacccgccaacacccgctgacgcgaaccccttgcgtccgcatacaaataaccttccatactggtcctgtacgcatttttaatcact

SEQ ID NO: 24128 - DNA, 394 bp, Glycine max
  unsure at all n locations
acttagagagagtagagagagaatatgtaatttgataggtgcgataaaatttaatttaaatttatgatgtgattaaaaagaagagataaaaagaaataaaaaatatttagtgtgtttaaaataaatgatctttcgtgtatcattactcttaaacaattgttgggcactcttctgcatatgtatacgtggtaattgatgatagtgaatgggattatatggcatgtgctgcaactttatatgtatccaccttttctattgtctctgctttggttataagttatttatgattctggtatcataaatataaaataaccaggtgtattgtatgtttgaggaggataggaagcatatncggtccttctagtacctctttcattaatatatatatatatat

SEQ ID NO: 24129 - DNA, 428 bp, Glycine max
  unsure at all n locations
ntgaataaaaaaaatattttgattntacaatgacaaaaaatataataaaattttacaggataaatttcaaacattttaatatttaaaaaatatattttaaccatttttctgtcttgattcatattttgttgcaagccccattttcttgcttcggatcaaccgtcccattggaactttgttaaatttattaaattgtggtacaagggattatagtagttaaatggtgggcacttttgtttgactcgatttaactatagtagctagctatttgtctaacactaatatttgcttgagtatgacagcttaggttatgaattaagacgaatnttaccaaatatgtggatagtttaggagcatgacagtactaaaggccaaacatatataatattggttagctgacttccttcaccttgtatttatgtacacaa

SEQ ID NO: 24130 - DNA, 374 bp, Glycine max
agtttggatcagtgttatgtgcatggccttcctcaatttgagaaaggaagactcgtcctcttctaattgcacaatatttcaggtcaagtaaagggctttgagtttcattaatgggggaagtacagacattcttgttggtgcccttatcaataatgacctctttagtttcactagagcttaaagaactaacatcctgttctttgtggagatgaacaggtaacacaaaatcacgtatgatagaattgtatcttgatttccctgacaaagtcaatttattttagaacaaattacttaaccacgttcacacaattagcagagtaatcaatcaaatatagcacacaatcactgtatcaccttgaagacacccacctctt

SEQ ID NO: 24131 - DNA, 380 bp, Glycine max
  unsure at all n locations
atggcnagataaacgcagaaccacacttctgaactacgagtgctgatccagcaagtgcaacgcctcaatatgcgttatctctgaatccactactggtgtctacaatgccggtctatgcagatgatattatagagacagggaataatcctacctctgtcaagtctgtggtttccaaacgcaattacgagttctatgtcatagatgagcgagatcttgaagactatctaagcattgacgtcacttctcatcctgaaagcacataattctcactcaacctaagtatgaatcaaacatataggctcatactactgtagatgttctgagcgttggatagaataacgaaggttagactaattaacgagaaatacgccagttagact

SEQ ID NO: 24132 - DNA, 364 bp, Glycine max
tgttttgcctttatggcttgtacctcatcactttcttccgaagctttaacctcattgtctctcacagtctttagatttgggagccaatccaatccttgtgtccggactctcagccacttatgatagccgccgatgatcccattactgcttcccctaagctctctgtcctttcttcacgccgcatcccatgccttgcgaactccttggagtaccctcgcgttgaggtcactgaaaccccgtgcgatgaaaggcgtgatgctttcgtctgatggcactcctctcatggggtagccaagctgccttatggcgaggacgggattatatataatacaacctcttggtacatcaggggaacatttggaca

SEQ ID NO: 24133 - DNA, 322 bp, Glycine max
  unsure at all n locations
ngtacaatggccaaacatgatacatgtttaggatttgtatgtttcatagagcaaatggatgcctcacattatttccatgacacataggcaaaaacgaggatatggaaatggtatgcaaaactggtgatgcatgcacctatgcgagcagttaaccgtcgaattagtacggacatatgatgctgggcgctaagatttatatgactttatatccaacgacccaggggtcccgctatctgatgatgtataagaccgtgcattcagccgagtgcattataggcgccccgggaaatttcacagcattctccctggaggggttgacaca

SEQ ID NO: 24134 - DNA, 370 bp, Glycine max
tgtttagaaactttactgttggaaacttggaaaagcaaagtaaagaccataaataataccagaccctaaagcttaatttaagaaatagattctgaaatccattcaaagaagacaaaactagaatgtgaaagtccaacaatatatatagataaaattacccatctcaactttgaaaataaattaagaaaataaaaagaggaaactagctgattttcttgctttgccacacaagtataaaaaagcacagaaacaagggtataaatatagaatatataactaaaatgtagcaatataacttacaattaaagtgattgctcttgtatcttcatccatcattatgttaccatattgtagatcattgtgacaaaaa

SEQ ID NO: 24135 - DNA, 420 bp, Glycine max
  unsure at all n locations
tactagatcttttcaaatttccgtcattctagcctatctttctgaagatgacttaaggttctgtttggataaacttttctaattattactaattgcagaataaaataagaaggtaacatgaattgaaattctcttataagttacaatcaacttatccaaatcaactaagaaaggaaacagaggaataaaggaaggacataatctgaataaagccacatgtttgaatgatctgctgaaggaaatgcttagacaaatttgaaatagattaaatttagaaaagggttttctacattgtaagataacttcaatttgttttcataaacttgagcttcttaaaaataaaattcagtctagacctcgttgtaataagcctctgctaaaaaanttacacctagacttgtacttgttgtcatttntaaa

SEQ ID NO: 24136 - DNA, 348 bp, Glycine max
  unsure at all n locations
agtttgttctatatcagaaggctagttgctacaaaggcaatgagttgctaattgaagacggtgacaatgctccactaaccatatatgccaaagcttgtcctggtcaacttttcaaacatgagcttgaagatttaaagcaaaaggttgagctcactaatatggaccggtatgccatgaagaggttctaaagactgaaggaatgtttctctagtatagaacctgatgaaaagttacctgcagatgcagttcattatgaaattgggtgatgctatcaaaccctgaagcacacttgcttctctcaagaaactcttttcaaacatggtgngtctgatcatacctttcatttat

SEQ ID NO: 24137 - DNA, 325 bp, Glycine max
taaaatatgaattaaaacgtccagattctgctggttatcgattaccatatatgagtcatcgattacaccgtgcaaattatgtattcaaatggtaataactgacgtaaatcagttatagccactggtaatcgattacatcctctggcaatcgattaccatagagtaaatttgttggaaaaaaaactttttaactttaatttcttggccgaacccttagcttcttctattggaattccatacctatttaatataccttttctaagactctagaaattggctagatcatccatcttaaatatatataatttctttgtcttaataaagc

SEQ ID NO: 24138 - DNA, 333 bp, Glycine max
tgtttgggcttggaagacatctgaacagaattcatttattgaagaattctaatggtagcaccaagtgcaatttgatttgactgaaaatgaaaatagatacacaatcaagataattaaacagaatatcactagtaagcagatttatatacttgattataaaatgaccaaaaatccctctatttaagtaacaaaactcagaatgtcaacaaaagcaaaagcagacagaactcaatttcaaattagcatagaaatagaggatttaaaagttaggacaataggctgcagaaaccttcaaaaattatattacattctcatgatgaatcaaacctttgt

SEQ ID NO: 24139 - DNA, 385 bp, Glycine max
taagatgatgtttctgatagaacagattggaatcattcataatgtttcttttgacatccttttttttcctccttttattgttgatatgcagtagatttgactgattcggaaaattatggtcaaccagttgatgataacttgctaacattagataaagttcacaaagaggatgagggacacgatccttttgatgactttgaaaccaatgcaattggaaacatgcttcctgatgatgaagaggaccttttagctggcattatggatgattttgacctcagtaaattgcccagtcaactggaggatttggatgaaaatgatctgtttgtcaatggagggggatttgagatggattttgaaccccaagagagcctcaatatcactatgt

SEQ ID NO: 24140 - DNA, 278 bp, Glycine max
ttttgcaagcttctaagaatcaagatcaagattcaagaatcaagagaagacttaatcaagataagtatgaaaaggttttttcaaaaactgagtagcacatggatttttctcaaaacatgtttaccaaagagtttttactctctagtaatcaattaccagattattgtaatcgattaccagtagtaaaatggatttgaaaaagttttcaaatgaatttacaacgttccaattgatttcaaaaagttgtaatcgattacaatgttgtggtaatcgattac

SEQ ID NO: 24141 - DNA, 409 bp, Glycine max
tcaacgtggcaccagccaattggcaatgttgccatattcttccaaggaggccaatactagagacattattgcaaatttacaatggggggtagaaaatattgcaacaaaaaaaaatgtttgtatacctattattaatcacctcattggaagaaccattaaaagtgtcattaataggtattgattcttgtaactgtgattctgaaaggccagtgttctttattttattggtctaaaaagtagctgaggtgtttatatagcacccgctggacacttcgcatataatatacatatatggagagagttacgcgttatcttgtgtgcggtggagctacttttcttcattcaagttaattaataattatattcatgagagaatctttttgtttgaatattcgctcatatattcata

SEQ ID NO: 24142 - DNA, 372 bp, Glycine max
agcttccatcaagatgttagcctcttgaggctttctttccttttatcttctatgggagtgaggtctaagatgtgacctatgccttccttcgtaatagtcacgaagttcttcacttaggctcttgcaagagttatgactactataggaggcatatttttctcttttcatttctttcattatttttcttctttcttcctctgttattttctttctttcatcttgacttatttattccactcttttttttcctttttcttttctctcttggttttctttccataacttgagggaactcaactcatctaagattctagataaagggtctttatgactagtaccctcgccattaacactagatgaatgatgactcat

SEQ ID NO: 24143 - DNA, 390 bp, Glycine max
  unsure at all n locations
agttttattcaagacaaagaaatcaaagatattcaagatggatgatcaagacagtctctagagtcttagcaatagaatataaataggaagggaattccaattgaagtagcaaaaggtttggccaagaaatttaagttaaaaagtctttttcaagagatttactctctggtaatcgattacgacagctattaaaatttgaattcaaaatttgcattgagtaatcgattacacatatatggtaatcgattaccagcaattattgaacgttttaattcaaattttaaagcttgtaatcgattacacacatactgtaatcgattaccagagtagattttcagaaaatattctcaatagtcacatctttntatttggttcttgaatggctatcaa

SEQ ID NO: 24144 - DNA, 448 bp, Glycine max
gacactctgaatactcagcttgtaagattatggggtacccatcacatgtggtactttgtggcgattgggcgatggtgcacaacaagttttccacatccacaaatcgcgcataaacccaccatcctctgtagcccacctgcaactgaactcacgtactaccacgtagcccatattctcgtttctctcaacaccaggtccccatcaatgctgccaagctttcccaacatccaagtgaatcaacattcaaacagcacaaactatcacagccaagaaaacagggcaaaggcagaaaactctacccaaagacaccaaccaaaatcacaacttgttctcacttaaagaccccagtcacatttccttcgatccaattcgttgaccgttggatcgactcagacatttactggaagtttctagacataaatctacattttgaccgttgggatctact

SEQ ID NO: 24145 - DNA, 412 bp, Glycine max
  unsure at all n locations
agaaacttnttgaaagctaattgattttttcacttgagatgttcgagcttaggtacacacacccgtctattatctaagctcactctcttgagaagcttccttgagaagattgctaaagaagctagagcttagctacacacacctatctaatagctaagctgacctccttgagatgagaagctagagcttagctgcacatcccctatgatagcgaagctcactcctatgaccaaatacatgaaagttctggaaatgccctactacatagactcttcacaatgcctcaaaatacaaggctaaaaccttatactactagaatgggcaatatacaaagcccaaacaatagacgaaaccattctgatatttacacagatgagcgggctcttacttaacccatgggcttacaatctac

SEQ ID NO: 24146 - DNA, 392 bp, Glycine max
agtttatactttgtagaagcattctacacatggattgaattatgtttttagaaatttaaatttttttcctagacttacaagctctactccaagcttgatttaaacccaatattctttatcttaccaaatcatcgctggctctaaacaaatcaactagattttttaaaagatttcacaccgattaaaaagtatgattatcttacagatgtatatatcacttcacacttttattatacaagatgttttgagaggactttgtatctttacaagaatttacaagaagctttacataaaagaatgacttgtatagatgattcgtgtcttggtttttcaaagcttcttctatatatagtcttcatctcgaagtatccattgtctctcaacggatggat

SEQ ID NO: 24147 - DNA, 417 bp, Glycine max
taggatataggagagcattcattctcccaatgcatgtattaccattactcaaatttgtctcactacaccaaccttattattttgctactcttttcagcacatgcactttctttgatcatggtttacccgagcttttattcttcataataacaagatattcatttatttattttgaagaagtaatagacattagtacttggctggagttataccatatactttgacttacattagcttgagttgtttattcatattcctgctataaaaattcacccaaaaacactcccccaaatttgggacaaatttgtctggattcatgatcaatctcctacaaccttataaaggggagttagtcaatatcatattcattaggcttggattctaatgacaaataatttacattaggcacaacaaggg

SEQ ID NO: 24148 - DNA, 378 bp, Glycine max
  unsure at all n locations
agtttgcttctacaaaanacatttatgcccttgtattaatnnctttgaccaaattaggtaaatacctcttcggaaagctcctttacattgataaagtcattgtcacattctctagtcctgattttgacactatgatgccaatttccactatggagatgtgagtgcagattgatttcattagtgtggtttttttcattttcctcatcccaagtattgcctgtaaaagtgtggcgatttagttggtgtttctgatttgaaggttggtgtgacattcacattctaagtaagggttttgttcctaaattacaaatatggtgtatgtattttctctatcacagtcgaataggaatgaagggatgactggatttggttggtcat

SEQ ID NO: 24149 - DNA, 405 bp, Glycine max
  unsure at all n locations
cttgttntattcaaatacctaggatcatgagttactaggtttgtccttctatgactcgagaaacaaaagtgatctaataacaagcagagatttaaaacggactaggttgcctcctagtagcgcttctttaacgtcttgagctggacgcgtgatggcttgtcggtcattgacctagtactttgcttacctttggctttggactaggtcgcctattggtcggccatgggtcgtaagcaacgctgtaacctttttctggatgagctgatgtgaactctagaagtgatggcggagcgtctgttgcccgctgtcggccatccctaagctgctcgggtgatatgtcctgcacctgccttgggacgcagtacttttcgatgaaagctcggctagttgggggcctgatgacct

SEQ ID NO: 24150 - DNA, 371 bp, Glycine max
agtttcacaagagggtatgttttctaattagaggagctttttctcacatttttatctcccattgttacttttaattaatggaactttttatcatgtttatgagttttttgccttctctttcactcctttcaatgatttcacagtttttgaatgactgcaatggtgcctctgtaccatggaagctacgtacaggtgcgtgcctttcaaattccaaatctacgtgtttaaatgttgttacgcataatatgcatgtcataccctatattcgtctggggactgtcattcattgatgtttttgattctcactagccaaattgcatggtttgacactagttaccacacaaaatgaaggatcattcaatgttttgatc

SEQ ID NO: 24151 - DNA, 321 bp, Glycine max
  unsure at all n locations
tgagatgacgaagcgtagaaaggggattcttcttgtttntattcngggaccacagagtggtacctggagatatgtcgcacgggtcacaagaccttggggacgtcacgtggggtgctattgcccaaaaccaatcttgaccaatcccgacccaaccctggcataaacagtcagtgagaacctgtgatgtacctaagcaagctagctcatgtctgtcgacagattaaatgaacaaagaccacaaagcaatgaggcttgtgcggtggctggccagctgtgaactttgagttaatatgggatgtggcctctggtaatcgactacca

SEQ ID NO: 24152 - DNA, 348 bp, Glycine max
agtttgtggtttcttatatctagagcaatccttttggtgatccagcaaagcttctcatagagcagcttgtagctagagcagctgattctgccggttattttcaacatctaattctaaatttaattttattttcatcagtgtaaatgcttatttgtcgtatactatgattattggatagctaagtaacgctcatgcaggtcttatcatggaagagttgatgaatattccagctgggaggagaaggacgtaccatgacgacgtgaccgcaatgtgtaatcatgctcgcgatgaatcagcgaacttcaaaggcatcaacttgcatataagacttgccacttcataaaaaaa

SEQ ID NO: 24153 - DNA, 327 bp, Glycine max
  unsure at all n locations
tgtttgcaaaccattgatttggtagaagattcaaaccctagaagttgttgcatgcacacctcctcttcaagaatgccattacgaagtggtaacccataagtgatagctaaggagagaagaagtcttactattatggacttgataataggtgagaaagtctctatataatcaattctatactactgatgaaatctcttggtcactaatttggctttttactttntgaccgagccatctaggttttctttaaccttgaaaattgacttacagtcaataggaactctattatggggcaagggaacaagcaaccaagtgtcatttttaatc

SEQ ID NO: 24154 - DNA, 413 bp, Glycine max
  unsure at all n locations
aaactcagctgcacaacatatactaaaatgtttttggtcattataagtactaactaactaacttccactaatatatacagttactactccgaatgaaggtatgaaccttgattaggctcatctaatctacctaattgaactaattacacaaagccatgcccaaattctcagcccaattattcaagtgtagttttgacttccaagcccaatttgacaaaattgaagctttccagggactactcacatngagcatttggagttttgtagtattctataggccctacacaaggcagataggttaagtaagcataaaaatccaaaaataagccacaattatcaattgagctcaatcatcttcctatgacgaaaactaagctaaagtgagaatatatgggtcaaagagatgtctaata

SEQ ID NO: 24155 - DNA, 158 bp, Glycine max
agttatgcttgtttagactgatggcgagactacggacttatacgcgcgagctccccgactaaccggagccgggccccgactttcgaggggcttctcccaccttatgacgactatccccggctaggacatggggtaggagatacccatcttggacccct

SEQ ID NO: 24156 - DNA, 412 bp, Glycine max
  unsure at all n locations
taaggttntattcttaggagtggacatttataactttcaggaaatctcccaaggacttatactctaacccatagtgatataaccgctaagctcaccttggcaatctctcaaaccataaataattctcaggtatttttcatctttgatcttacaattgtgatttcctattcttttggaatcgttgttgagcaaaaatatactggaaaagaagatgcacatgttgtcacaaaacagaggaaatcaaggtatcttacaacattcttgctgtgtaagagaacattttttgggccaaaagggtaggaaatcatgatagatggtaacatgtgaatcatactgccgaccaattagatgggtgctagtgtgaattcattgaattttattctgtataaatagccgtctgagaaagtgatta

SEQ ID NO: 24157 - DNA, 360 bp, Glycine max
tgtttgcttgaacagtgaattggttgaaaatgatatgcagtggattgttttgtatgaaatgagtgtctacgaatgatttgaatgagcaattgtataatttgaatggattgtaatgattagataattgttttgatcaagcttgtagccattagaagagaatgagcatgtgattggaagtatgactaaaaatgttagtcagtttgtcagattgattgtgaaggaatgcattgaccatatcccggtgagagtgtgatccttaaattttgatagaaacaactatcatttagtactgatttttgcatgaatctctgaagtatggactgaatgtatgaaattgaggatgatgaaggctatgtttga

SEQ ID NO: 24158 - DNA, 392 bp, Glycine max
  unsure at all n locations
tgccatgcgatagcggagagtttggagagccatctttacctangggtggtcacgccaggcacatcgacacatgagctgatcgaagaatgccttaggattgccaggagtgtcacacaagacgagctagtatatgttagttcccgatgcaggcagcgcacagatcagtcgtagtttatttgcacattttatattgaaatttgatgtatatgttaggattgcctaatctaacttaatggatgatattaggattgtgatcaactcgctgcctattaaataattttttgaaaagtgtttttttaaatatgttttaaaatttaattattcgttatactaggtataattgtaagcacctggttgatgttctctatatgaatcgatccaatcatgaatca

SEQ ID NO: 24159 - DNA, 333 bp, Glycine max
tgtttatccttatggcttgcctccggacttcaccccccgtgccaccccggaagatttaagccaagcccctactttcgaggggcaactcccaccttatgacgactatcccgggcaagacgatgaggaaggagatacccatcttggccccctgctccacctcaaagatccgtccccccatgaactaccccaactgaacataatccgccatatcccggcctcacccacacccgtaaaagaatctgttcccttcgcggaagataagggaaagattgaggcgcttgaagagaggttacgagcagtcgagggcccttgcaattacccattctcggattt

SEQ ID NO: 24160 - DNA, 398 bp, Glycine max
  unsure at all n locations
tagcccacactccagacatcttcttgatgttccctattgncagatcatggacaagtgtcttgcgaagttgtgaaccaactctcgagaagatccaacggttaatgaaagctgggaagcgtctttaccgatgcaacttcatgtagctacctcaagaagcttcattaaaatgcttcctcaagaagcttccccgtggcttctttgagaaacttgctcatgaaactacatacttatctatccacaaccttctattaacttaattaacctccttgaaaataattaccgatccaaaatggcataacagattatcaaacatcaaacataattactaattagctatctatatatatatatatatatcgcggtgttacaaatgctaccttcataaagggttttatgtc

SEQ ID NO: 24161 - DNA, 231 bp, Glycine max
  unsure at all n locations
gaataagccatggaagaagaagtttcaccaccaagagagtgtcttggataaaaagcttaaagaggaagcttcaatggaggaagagaatgagaaagagagagagagagagagagagagaaaatgacgtgggaatgaaggaaagataaggagagaagtaaactttaaaaagtgtgtctcacaagactctaattcatcaaagntatgacaaagtgtaaatatgtgtctatttat

SEQ ID NO: 24162 - DNA, 402 bp, Glycine max
  unsure at all n locations
gcttaggtnctaggagagcattcatccatagataaaccttttctttttcattcattcactccccatacttgccttttatttaggcactcaacttcatttcattattttgcagcatacacacttattaatttcatttgtacttacagtttttctttttgacacaagatatacagaaatagcgtgtgtatgctatttactttgaccatttcaattcttacccagtgcttcccccagatttggaacaaatttaccgtgataattacttccccaaatttgggacaaatttgctttgaaccacgcttactatggatgatgctctcctacaacctaagccaaagtagcatgagataacactgtataagctcacggttcaagtcatcaataatacattcagctcaaact

SEQ ID NO: 24163 - DNA, 259 bp, Glycine max
  unsure at all n locations
attttattggattatgggacattcgncatatgtggaactaggtggngaccggccaatggtgcaaatcaactctctcatttccacaggccaggcaaaagcataccatcccagttgcccacctttaacttgagctcacgcactcctacgtagaccttatactcgttcctctcagcaccgggtccccatcaacccctccaagcttcctcaatatccaaaaaattcgatttcatttaccatgaaactaccctaaaccaagaaa

SEQ ID NO: 24164 - DNA, 430 bp, Glycine max
  unsure at all n locations
ctaagcttctatgatgtggcgggtggggcctctntggcttgttgtcccattcgcgggccttggcctttgttcttcttttctgagatatttttccttatgtcagcttacgtaggtttatagcctaacccaaacttcgcgttgtttcctctggtgcttaccaggctagttctgccaccgttgttcttgcccaaacccattccgggctcgtagccgtaccccaacatcacccgggccaccatcattgtcgtatcagacaggcgaggctgcccaaagtgggaatctacggaggcaatgcttactacctcaaaagattggaaagtcgtttccaacgactcctccgcggattccacatatggcatagaggaagggcaacttaccaggacgtcttgctcacccgatactatgaccaaatgtccctccactacgaact

SEQ ID NO: 24165 - DNA, 372 bp, Glycine max
agcttccatcaagatgttagcctcttgaggttttctttccttgtatcttctatgggagtgaggtctaagatgcgacctatgccttccttcgtaatagccacgaaggtcttcacttacgctcttgcaagagttatgactactataggaggcatatttttctcttttcatttctttcattatttttcttctttcttcctctgatattttctttctttcatcttgacttatttattccactctcttttttcctttttcttttctctcttgtttttctttccataacttgagggaactcaactcatctaagattctagataaaggggctttatgactagtaccctcgccattaacactagatgaatgatgactcat

SEQ ID NO: 24166 - DNA, 429 bp, Glycine max
tagcccacactccagacatcttcttgaagatcccattggtcagatcatggacaagtgtcttgtgaagttgtaaaccaaatttcgagaagatccaacggttaatgaaggctgggaagcgtttttaccgaggcaacttcatgtagcttcctcaagaagcttcattaaaaggcttcctcaagaagcttccccgtggcttctttgagaagctttctcaagaaactagattcttatctatccacaaccttctattaactaaattaacctccttgaaaataattacggataaaaaataacataacaaataatcaaacatcaaacataattactaataatatatatatatatatatatatatatcagggtgttacaaatgctaccagcacaaagggtttcatgtcaagcaaagacagatttcacaataaggaatct

SEQ ID NO: 24167 - DNA, 324 bp, Glycine max
agcacggagagcaagcttagagtgagagcacagtgcagagaaaaagcaccatcgaaatgccataatgcagtttaatagcacaaacgataatgtaactgccataggcagttatgccttatttttggcagttttgaatgcctcgcttaacgtgtcaactcgctaaacgagcatacatgatgtttaagtttccaaacacatgcgcttagggggcaaactcacttagcccaatgccaaaattcatatgttccagagtagactttgggcttagcgcgaagagttggcttagcaagttttgcatctcaaattggcctgcaactctcgctt

SEQ ID NO: 24168 - DNA, 414 bp, Glycine max
tgaaggcaaactggatgcattggttaactcggtaatttagctggtcttgaaccataaatctgtacctgttgcaagggtttgtggcttgtgctcctctgctgaccaccatacagacctttgcccttccatgcagcaacctgtagcaattgagcagcccgaagcttatgctgcaaatatttacaatagacatcctcaacctcagcatcaaaatcaaccacagcaaaacaattatgacctctccagcaacagatacaaccctggatggaggaatcaccctaatctcagatggtctagccctcagcaacaacaacagcagcctgcttccttccttccaaaatgctgctggcccaagcagaccatacattcctccaccaatccaacaacaacaacagctccagaaacagtcaacagttg

SEQ ID NO: 24169 - DNA, 431 bp, Glycine max
ttcagcagctgaagatgccattaaatgcctcatcgatctacaatttctcacttccaaatgttctatgtaactgcaagatactatggatgatgctaaatttgtcaattttatacatcgataaatgactaagcgctctatcctctgaagaagtgggtcatgctcgaatcctatctcttctaaagacaacaaactctttaattccaactccttaagttgcataacaacacctattttatcacgtgaaatgaggctggcaagagcccaaatacttttcaagtgacaactccccaatgttaagctccttaaattgggaagtctatgaagaaaccaaaagagaatttcagtattcttcaattcatacaagacaagtctctgtagtttgtgcattctgtgaacactaacaatgtatttctgcaaccactctgcttcct

SEQ ID NO: 24170 - DNA, 326 bp, Glycine max
agttttttgaatttgattgtggttccaaggtgaattttcgtgcgaggaggatgagacataacgaaacgcgtaggggcgagcattcgcacatgtgcgcgggctagtggcatctacaataacgtgtactgacttacaatgcgctaggtattttgattattcaaatcttggaggtgttctctcatatggaccagtagcgtttttcttttttctgaattggaccactagctcgtctctctggtctaaaataatgatgtttatttttgttatagattatctacatatattatttcatgcataaacttataacgcatgcatgcacgctcatt

SEQ ID NO: 24171 - DNA, 329 bp, Glycine max
  unsure at all n locations
agtttgagtataattcattctttgnggtgtgagccaacatcaaacatttggattattgatgtttctgtcacaatcaagccattattaacgccccatatggggtgcaatgtgggccaggttttcgttctatagaatatatggaaatattgctgttgattctgaataagtgatcatttttctttatttcaaaattattgtctcctaatcaatcgagtgctcatcttattattggtttctcatatttcaatcatgtcttgttaaactgcttgatatattgtgatgatgatatttttgttacgaatagagaaagactcactgttgtaatcaca

SEQ ID NO: 24172 - DNA, 398 bp, Glycine max
gtgaatgaggctgaagaagctgctgcttatgttcattaagatcaggtggagattaatttatctcagcctcatttgtcacaagatagtgacatggagttgatggtaaatatttgtcacaacaaagtagttttatctcaacctaatttgttgcagcactccatttttatatattacaattattcatgtttgacatttacatgtaggtccctgcaactattgttccaccaatagcaaggaataagctaaccataacaagagccaaacaaaggaaggttgctgataaagatgatgcagaaaactgaagaagcattttttgttgcattttgaaggttgctgaatgttgctgaagacccatttttgttgcgcattttgaatgttgctgatgaagaaaactgaag

SEQ ID NO: 24173 - DNA, 116 bp, Glycine max
ggcttcccaacccaaccctgtacttggatcatggcatgtgtaacttccacttcctttagtgtgtgactcaatggatccatctatggtcactgcaaagggcaatgccagtcttaaca

SEQ ID NO: 24174 - DNA, 383 bp, Glycine max
tcttggtctttaatacgctgcaaaatttttgacgtctttgaatgcgtatttagagcatatttgtagctcatcaaaaatatgggctcacaaattgcccccaaaaaatgtctgcttcgatccgagatcgaaggaagatgagaagttcacatcttttcttcttctaccacttttcctgaaatggcgacatgattgcacgtattactggtaaccgtcgcctcgatctcccactacccatcattaattccacttttctaggcacaaggggacacttgtcacgctggggagtccgaaaggaaatctgattcgattgaatctcgaccatcgattattattaaaatggctttttcgcttaagagtgaatactccataaatagcgcaaagaa

SEQ ID NO: 24175 - DNA, 256 bp, Glycine max
tgtgtaacattctttgtcgagcggtccgatatattacgggactcaatcgatcatccgagtaaaacgttattgacgttcgaatatgctcatagactccgccttcaatttagagagtgccgatatattacgggactcactggaacatacgaggaaagccttattgaccgttgaatctgcttagagcttcgttattcaatttcaagcgtctggatatattaccggtctcagtcttacatccgagcaaaatgttattgtc

SEQ ID NO: 24176 - DNA, 287 bp, Glycine max
atcttgccgccacggagttttccgactatgctcttgtgtggtggaacaagctacaaaaggagagagcaagaaatgaagagccaatggttgatacatggacggagatgaaaaagatcatgaggaagcggtatgtgccggctagttactcaagggacttgaaattcaagctccaaaaactaacccaaggcaacaagggggttgaggagtatttcaaggaaatggatgtgctcatgattcaagcaaatattgaagaagatgaggaggtaactatggctcgatttcttaat

SEQ ID NO: 24177 - DNA, 343 bp, Glycine max
tataatatattattacgctcgaaattttacatcagtagctctcgagaaatgcaaatggtcataacttttcacccggatgtccgattatggcgaatcacatatcgagacgctcaaaattgaacaacggaagctcttgagaaattctaatggtcataacttttaactcggatgtccgattcaggcgcattacatatcgaggcgctcgaaaaagaacaacggaagctctcgagaaattcaaatggtcataacttttcacactgatgtccgattcaggatcataatatatcaagacgctcgaaattgaacatcggaagctctcgatatagtcaattggtcatcactt

SEQ ID NO: 24178 - DNA, 365 bp, Glycine max
tgtttgtcttgatgctgaaaaagtaattagcctttgcattgcaactgatagctcttaaaacttgtattctgcatcacaccatatttttgtttatttttggatatggtggtcgagtcatactggagaatttcacttgatgcaacctaatacacatggtatgtagagtcagtttttccacaaaagaacggaactgggttgcaaccttgtatgcgtgattgcattagatatggaaaggaaaccaatttgaataaaaatacgtcttgcgatcaaatagcataaaaaaaaagtatcacgtatctgtaaagatctatgacaaagattagtcagaagttcattagcgcaaataaattcaagtatatacttat

SEQ ID NO: 24179 - DNA, 406 bp, Glycine max
atgctctctcctcactcagcctaagcagataaatttataagctctccctcttcctcacttttctttttccttctcctccattctccattgaaaccccaacaaagctccaacctttggccatcatttctgctccaaatcgcgaaaggaaggcattttcggggtcgtgaagtgcgtggctacgagtgggacttcgaaaattcacgtttgggtggacttctttctcctttaattttcgtgggtatggggtttggggagatatgatgggtagtcttgctaggtttctgctgtgtgatgattatttgtgaagacatttgctgaaagctggttgaagatgccatgtttggatgagttagacatacccattctgatttagggtttttgtgatgatgtttgagatgtttatatg

SEQ ID NO: 24180 - DNA, 362 bp, Glycine max
  unsure at all n locations
acgtgagngancggcggcanaccagaaacacgaaggagaggaaagagacacggggnncaaggcaacaaaccgaggaagaganangaacagccancaaggggaggnngggngagcagcagaaagaaaccaacccagaacaaaacggngagccagacacactcagaacaaaaaaatgcttcttgcttttcctgcatgagatggaatgctcatcctgcactgtatgcactagtcatacagaacatgatagtactgcatatattgagtgcacgacctcttattgcttgaantgatccataatcgactgcttatgacaaataaatgtcttacatggattttcaatatctcctatgctacacgactcg

SEQ ID NO: 24181 - DNA, 391 bp, Glycine max
  unsure at all n locations
ntgatttcctctgttccggaaacctttcttttctcatgtgcacccaaacccaatctccgggttcgaagacaaccttctttctccctttgttggcttgtttagcatagcttttacttttcctctcaatttgatctttgactctctcatgaagcttcttcacatagtccgcctttgcttgaccttctttatgcttaaaaacagaaacattaggcaaaagatcaagaggagttagtgggttaaaaccataaacaacttcaaaaggagaacaattagtggtgctatgaacagctctattgtaagcaaattcaacatggggtaaacaagcttcccaagtttttaagttattcctcaaaactgtcctaagcaaagttcccaaagtcctattaacaac

SEQ ID NO: 24182 - DNA, 388 bp, Glycine max
agcttgaaggtaaactagatgccttggatatcttggtaacccaactggccttgaatcagaaatttgtacctgtcgcaagagtctgtggtttatgctcttctgctgaccaccatacagacttttgcccttccatgcaacaacctggagcaattgagtagcctgaagcttatgctgcaaacatttacaatagacctcctcaacctcagcagcaaaatcaatcacagctgaacaattatgacctctccagctacagatacaatcctggatggaggaatcaccctaatctcagatggtctaaccctcaacaacaacaacagcagcctgctcctttcttccaaaatgatgctggcccaagcagaccatacattcctccaccaattcaacaact

SEQ ID NO: 24183 - DNA, 432 bp, Glycine max
actcagctcaacataaccacttcgggtgctggaactactttacatggacttgatggggcctatgcaagttgaaagccttggaggaaagaggtatgcctatgttgttgtggatgatttctccagatttacctgggtcaactttatcagagagaaatcagacacctttgaagtattcaaagagttgagtctaagacttcaaagagaaaaagactgtgtcatcaagagaattatgagtgaccatggctgagagtttgaaaacagcaagtttactgaattctgcacatctgaaggcatcactcatgagttctctgcagccattacaccacaacaaaatggcatagttgaaaggaaaaacaggactttgcaagaagctgctatggtcatgcttcatgccaaagaacttacctataatctttgggctgaagccatgaa

SEQ ID NO: 24184 - DNA, 393 bp, Glycine max
  unsure at all n locations
agcttcttatccaaggctcatcttggtggtgaagctccttcttccatggcttattccctagtggatggcgcctcctctcacctcttctcctttgtcttccgctgcatctacatggtgaaaaatcaccattaaaggacatcattgaagctcaaagatccatcctccatagaagccccacaagcaagcttccatcaagtggtaatcagagcataagagcttcaagtaggtgctccttaaacctccattaatcagagcataagagcttcaagtagcttccctttggttctcttggggtcttgtatataactctatgatgnttttagtgtatttttgctttaatgtatgcatgagataaatatttattcatttgatgcacacaaacacctacacttt

SEQ ID NO: 24185 - DNA, 422 bp, Glycine max
  unsure at all n locations
tcttagtctcacctgatngaattgtggctacttcatgcactcctctaatgacaatagcatcacttctagcactaaattgctgggagtttgaagccatcttctcaattaaatttctggcttcagcaggggtcatgtctccaagggctccaccattggcagcatctatcatacttctctctatgttgctgagtccttcataaaaatattggaggagaagctgctttgaaatctggtggtgagggcaactagcatataattttttaaatctctcccagtattcatataagctttctccactgagttgtctaatgcctgaaatatcttttctgatggtcgcggtcctggaagcagggaaattgttttctaagaatactctcttgaggtcatcccagctcgtgatggaccttggagcaaggtaatat

SEQ ID NO: 24186 - DNA, 393 bp, Glycine max
  unsure at all n locations
agcttttatttatgaacaccatggacagaccttaatatgtgtggcaacagacatggcaatggatggcagatgatatcatattcaatcatagaaaagaaagtgattntatatattctaaataaatattgtttgttcataatcattatgtttattattttgctaatcacaggtattcgccttactgaaaaggaaacaattcatttatgcttaactgagattgagaatatgctacaagcaaacagaaggagcttgcgatattttccatccatgccatacccaataggatatgcacganaccaacatcataataatctgatccataatgaaatgacatatgacaaagaaatgttagcagaacaatacaacacgacataccaattgctcacaggtact

SEQ ID NO: 24187 - DNA, 429 bp, Glycine max
  unsure at all n locations
taacaaactntntttatagtttgagtttgattnttttatctaaatttttttaaaaaaacttgaatttgacctttatagtaaacaagtcgagtcgaacattaaataggccaaaacaaagacatttgacaaactgcttgactcattttcatccctaattatgacattaattacatgttataaaagagtcaaactttttaattatattaaatctaatacgaaaaataaggaaaatgaaaaagaattatcatttttaacacatgtggtgattaatttgtatataccattcaaaattctttgtctaaaatgttagctataattcaaatagaaaattaaatnttgtataactcacataatgcgtggatttaagaagccaccgtattcatcttgcaaagcttggggaagatcccaataaaaaagagtcacaaatag

SEQ ID NO: 24188 - DNA, 389 bp, Glycine max
  unsure at all n locations
agcttctatgatctccaaacttgatgccaatctcctgaaattgaatattatggtacccaaccatcgccccctgttttcttctactgtgtagtcaccatcaatagacacccccatgtcgactcctcttcctatgtcgactccgattccatgcccacacctatgccacctactctcgcacccaagccagcaccactccccatggtagctacccatggaagctttgtaatgaagtcacgcatgctcgagcatgccggctccatctctttccattgccaacaattttgtttctcctctctcaatttctctccctctcactcctgtgacgaccagaggaatgttcatagtcacagttgtggaagcaaagctttccaagtttattnttgatgatg

SEQ ID NO: 24189 - DNA, 415 bp, Glycine max
gttgcaaagcacaaggaagcaccaccagatgagtgatttaacctgttaccaggttcaaatgaaactttaaatgattgtatgttagctacttctctatttcacaagaccaccacggtcctacctctacatcgacaaggttttgcttcctacaccctcaaaagattccacacttatgatcatgatggcctattcatacttccacaagtgacggagcgttgcatagacaaaggcaaacaagacatacataaatagcgcaaaatttgtcatcgaaggaaagcaaatgcattgaagaaaaatatataatttcatagttgcaaagtctatacaaccaaaatgcagtagtgaagaaaagaataaaataaacaaaaggcaacctaaacttgggcttcatcaacaccctactcctccctagaac

SEQ ID NO: 24190 - DNA, 385 bp, Glycine max
  unsure at all n locations
agtcttgcttgtggagcttctatggaggctggatctttgagcttcaatggtgattnttcaccatggagatgcagcggaaggcaaaggagaagaagagatgggagacaccatccacaagggaataagccatggaagaaaaagcttcaccaccaagaatgtgcctcgaataagaagcttgaagaggatgctttaatggaggaaaagaaagagagaagggaggagcacaaaattgaaggaataaaagagggagagaagtggaactttgaagtgtgtctcataagactttcattcatcaaagttacaacaagtgttacacatgcttctatntatagattaggtagcttccttgagaagctagagcttagctacacatacctctctaata

SEQ ID NO: 24191 - DNA, 430 bp, Glycine max
  unsure at all n locations
ntagtcttcatgttgttcatgttgttcccctatctctaacacttcttcttcttcttcttctgtgaaactagtttagcatgagggcatataggcagtttgtgacatatgattgtaaggtgaatacctggcatatcagatgattggcatgtgaataggtttgtgttcctgcgtaggacatcagctatacatttgtacttatgactggtaaggttcgtgttaagctgtgtacattgcctaggtttgggtccgagctatagcttgacaagttcctcaataggctntgggcctntgttaatagtgtcgtcacgcaaatccacatcgaatatgttatcttgatctcccatacttgctttgtaaattgtcggggttcggattggggacccgtcgtccacgctcatgacttgactgctaccaccagatgtgagataag

SEQ ID NO: 24192 - DNA, 324 bp, Glycine max
agtttgtaggattatggggtacccatcacatgtggtactatgtggcggtcggtcgatggtgcacaacaagtttttcacatccacaatgcgcgcataaacccaccatcccctgttgcccacctccaactgagctcacgtactcccacgtagcccatatcctcgattctctcaataccgggtccccatcaatcctcccaagcttccacaacatgcaagcaaaacaacattcaaacagcacaagctatcacagccaagcaaaacagagcatatgcagagaactctgctcaacacatcataccaaatcacagctgttctcacttaaag

SEQ ID NO: 24193 - DNA, 521 bp, Glycine max
  unsure at all n locations
cccgccacacgagaggagggcgaagaatgggtgacgccccccccccacagcggatagacttgaaccctgaacncgngaacnaagaaacncaagcggcaacaacgagaagcangacgcagagtgtgcacaccttgtngcaaaacccggcacgagtaacaagctcaaatgagaaaaagatgaagcccaataactatcaacagtgaatgagaggagggaggtgagacgctccaagaagaacaacagaactccgacaaagataacataacgccgacgcgctaaacgctgacaccaacaaggccacggaaggacctgtgtacacaggcacgttgacgccggtgtcagaacaacacacagcgactccgacggactagtgcgcgcaggcactaggaatcagatgtatgcacgcacacactggtggaagcgggcgactgcgaggaaccagcgcacactttgacaacaaagacagattggtgcacacccacatgttaggaagcccataaagcgcgagtaatcaatagggg

SEQ ID NO: 24194 - DNA, 278 bp, Glycine max
tggcaatatacaaatactacaaggctaacaacatagaatatgaatactttgctatccgtagggtattcaaaagataataaaactaacgcagagaaacactcgaacacaaggagtgctcaccttgtatgaggcacactcagtatcccttataaaagcgagagcagaaatgactagctgcaattctgtgatgcgggaggctccccatggcgcaagatattacctagcatatgcgatagcttgtaaatcgtgcgcagctgttactaactctatgaactctt

SEQ ID NO: 24195 - DNA, 463 bp, Glycine max
  unsure at all n locations
ctgaccatagaacttagacctcgggaacngagaaactcagctcgcgggagtgtagcgcggacatgcgtttaggctgttcatatcttggaacgagacgacgcatagtccaccgtcttaatgtaccatgttatcgaaagagcgaacgtaacatgtcgttcactatcgcattctgtccatgcctacactcttagcgctggatcacctttgctacccttaacttccaagccatcaatgcaattgttgaactgacagactcctgtgataattgaggctctggcgcaagaaggtttaaatgtgagctgtggcctaactgaaccccaaggtctctcttgtgccatgaaggatgtcctgacttatctactcgataatggacatgcccctagcttatgatagacttgcgtgtagacgactcggccgctgatccccatgaagtttgaccttggtgcctggacatatggtctgg

SEQ ID NO: 24196 - DNA, 307 bp, Glycine max
  unsure at all n locations
ttcttanggatttcatcagcttataaaccgttatttcaggttaactagtacacaagtctaaggcacaaatatttggcacttttttgtctgacattatgaaattagtgctgtctaagcttaaaactttggcttgtaactaagatagtattatggactactagttggattaagcttacaatgtataaggatataacagaagagttattgtgtaacataaattttttaaaaaaggaaattaaaatatagctctgcgaaatgcaaatataccacctatgtgtctgttcaagaagctccttcgtctttttta

SEQ ID NO: 24197 - DNA, 421 bp, Glycine max
tactggcatacaaaagttcgagcagtttttatctcttcttgattcagcatcatccgccttctatctgccaagagaaaaaggagaccaatgaatgtgtaagtcaagatctgttgacatagtcagtgtacatcagatcaatttacaacaatgactaaattttaaaaatattttgcaaaatttactgctagactgaaaagttgcattgtacatgcaagttaatgtaaaacagaaacctcagggtgtgttaggtatgtgttgacattttcagttgatatattttcaataaatttttcattttaatttcatttcactgcaaatgcattggagttctattatggtataattctgttactgtcactgataatcagatgctgacttcagcaatgagtcacattgcccagctatatatatccgggtcttt

SEQ ID NO: 24198 - DNA, 281 bp, Glycine max
agtttcccatgtttataagttcttactcaaaactgtcctaagcaaagttcccaaagtcctattaacaacttacatttgcccatcggcttgagggtgacaagaggttgaaaataacaatttagcgcccaacttgctccacacaatcctccaaacatggctgaggaactcagagcccctatcactaacaatgctccctggcaaaccatggagtctgacaatctccttgaaaaacaaatcagccacatgggaagcatcatcaatttttttacatggaataaaat

SEQ ID NO: 24199 - DNA, 421 bp, Glycine max
  unsure at all n locations
ctatatcaaattntagtaatgatccactaacctagtattaatttaacttaatgccactaacctagggaattaaaagaacttaatggctgagtgtaactgaaattgtggcaaccaaaagtcacccccaacagtcattaagccagccaccatttggtttcccaaaaggctgatgcctaggttgccaattgggcccttattacaacttgaactataccaaactaaagcccttttagttgattaacccaaaacatatttttggtctaccaactttacaaggattgggtcattatttagacaaactaaacactttaaaatcgagataaagtggtgccatctaatactcctccatttggaccatgatacaactgacaaccttggacttttctccttgaaacttgtgcttgtactcaaatagtatgga

SEQ ID NO: 24200 - DNA, 322 bp, Glycine max
  unsure at all n locations
agtctttggagaaagcttcttaatgaagcttctagagaaagctacatgaagctgccttggtaaaaaccctgtcaggcctttgttagccgttggatcttctcgacatttggtttgcaactttacaagacacttgtccatgatctgaccgttgggatctttgagaagatgtttggagtgtgctagaagcatccgttcccgagagcatctcttatttaagcatttcatcctttgcttttgtgtagctgaggaaaaacatcatttcttcttctttctttcttccaaagccatntctaaagttccaagaactttctccatcacacac

SEQ ID NO: 24201 - DNA, 413 bp, Glycine max
  unsure at all n locations
tgcctatccgatgcagcagtaatgatggcccgagttatgttgtgggaacggttacgaacccggaatgggtttaggcaaagacaacggcggcataactagcctgataaatgccaaaggaaatcgtgggaagtgtggtttaggctataaacccactcaggcagatataaagagaagcatcgcgggaaggaagaacggtggtcaaagctcgcgattgagacaagaaagtgaaggaagcccgccctgccacataagtagaagctttataaacgcgggtctgggagacgaatgtcaagtggtcgcgatatacaaagatgatgttccgagtacattggatttggtacgaccatgccctnctgatttccagctgggaaattggcgagtggaggaacgccccggcatttacgcaacgagca

SEQ ID NO: 24202 - DNA, 526 bp, Glycine max
  unsure at all n locations
tgcncgttgaaaccttgagaactcanggttgatccctttgagngccctcgactatctataggagcgaattacagcgtcggtacccgcgagatctctatcaagtncgatcctgcagtgtatgcagagcatatcatcaggtgactaacatcgtgccactcattatacctatagatgtcctgctcgacgaaggagtgagcgttgtgaccatgtatctcatcaatgtgcaagaaactataatgtctcataaatcagaacatgcttcaagactcagcgatgattcaaagattcaccgatagacagaatgcacatgatatcacccgtctatggaatgctcagaatgatcaaaaggtataaaacgatgcctaactatatctatgaaatgtcctatctatctcatgatccacggagtgtcagccagatggatcgcctctagtcatacactacatgtctcatgcacacaactaagtgacttgtcatggtaataaatgtggatgattgaactaccactaccctcaagggtatcccn

SEQ ID NO: 24203 - DNA, 412 bp, Glycine max
tcacaacctctgacattggtctaggcaaccagattttccaaactttaggaggaaaagttcagcgacttctgccgtttgtttcgcgataagccgccctccccctccgtcttagcatcgtcttatgtccttccctccactcagagcgcttcatcacctttgctacctttccctcccaagccaccattgattcctttcaaatgactgtctcccgagaagttagcgactcacagtgagaagggtatctatttcaactgtgacgagaagttccgtcaaggtcacaaatgtgcctccaaggtcttcttgttgatcgtcgaggaagatgatgatgcgtaggagtatcacaacctttcgggcaagaggactcgccacccgacccacaggaggctttcacctcaaccccagcccaaatcag

SEQ ID NO: 24204 - DNA, 319 bp, Glycine max
  unsure at all n locations
agtttacatctgaaatgtaaaaaatcacttttgaaatgtgaaatcaaacgtattaagtactaatttgctaccttcgtacataagttttatctaaattccaacctctttttctcgcattatttggattgcatgtgatatttctagcattcatgcagtcaactaatcagaattgttggatgataattagatggctcattttatcttgatgaattaatccaacataaaacatgcatctgagatgtgaataactagatgtacgaaggtagcanattagatgataattagatgcctcattatatagtcccgatttcatccaatg

SEQ ID NO: 24205 - DNA, 415 bp, Glycine max
  unsure at all n locations
tgttagagattgctgaaaattgtgggagattntggtttggattacaagcctacaagtgcagataaaaagaggattactttggaaaggaaagagaaatgcttagctcgtttacaagggcgagaactgcgggtagagagggtccttatctaccacatcaatgagagctttgtgagtgcagggtggatgtacgaagattaggttgctatgctggatgaagataccgatcaggatcagccgaattgggtgcagccatgtcccccagactttgaattgaaaaattggcagatcatagagcaaccggagatttatgtttttaatttgatgtaattaaacaatttaggatcctattactatgcgtaaggcttgaggattcacatattgtcaagcgtactttccttttcaattccaatgatcg

SEQ ID NO: 24206 - DNA, 337 bp, Glycine max
agcttcaacattcaatttcgagcgtctcgatatattacgagactcaatcagacatcagagaaaaacgttattgtcgtttgaatttgctcagagcttcaacattcaatttcgagcatctcgatatgttacgggactcaatcagacatccgagaaaaaagttattgtcgtttgaattagctcagaagttcaacattcaatttcgagcgtctcgatatgttacgggactcaatcatacattcgagaaaaaagttattgtcgtttgaatttgctcagaggttcaacattcaatttcgagcgtctcgatatgttaccgggcttaatcagacatccgagtaaa

SEQ ID NO: 24207 - DNA, 431 bp, Glycine max
tggatgcactaaattatcataataaaagactgacccttatatacatagagcattccgcatgtctccagaagttgcagctactttctgcaaagtgcagttctaattacgctttacatggtatatatattcaagatgaattacaatagcactttcttaagctcctcttttcattaatttatttaaaacataataaaatgggacttgatgcaccttacatgagaataaaaatgattgcaaagcattattttttcaaatatataaatggactcaccctagcacatagttccagggctagctgttggaaaacactgtaaggaaattcctggtgatgaaacacaaggatattaacaataatcatcaacaagaagaaatgcaacatttggctcacattctttatgccacgaagtcagtaaactatttaacaaagcatc

SEQ ID NO: 24208 - DNA, 483 bp, Glycine max
  unsure at all n locations
tgcccctgtcagtgatgccttgaaanncnnnttgatgccttgacgctctacggcgaattcaactcgctacctgggatccctcatattgtcctgcaaacatgcaattgtttcgtatgagaagcctcgcactccaccacccaggcctaatattggtagctataccaaaccgcgcattttaggccctaccatactctcttagtgcctcatatccctcatccatgacgaaagatcaagaagcagatacctcactaatgttagaaatagttcttcataaggcaaaaatctatgttgtaatggaccacctgctcatcgtactcgattacacaatttgaccgacgctagcaaagttatgtctcgccttgcgttaatcaaatacaaccttatcataactgagtaagacgaacctaccccccaacggcattgtcaagccccattcacnggtatncttccttataacaaatgcccaacatccccccctccccg

SEQ ID NO: 24209 - DNA, 471 bp, Glycine max
  unsure at all n locations
acacgtagctccgattactccattgaaatctttgacactctacnaaactcaatgctagcataatacatgttaatgatgtacatctacaaaattttagcgtgtattttatcacccgacgcgatatgcaacagtattgatatccggatctcatcttcatgacactcgttactgatgcaacaaataccttactctattttggctaaaaataatagggcgtactacgtgacctcggctcgtagactgcgtctgatatctaaatagcattatattctaccgctgtcatgctacccttagaattcgaggagaaacctttacctagatagatacttggctcggaaaattagaggcttacacgtattcactgcaaaatcgcattcactgtccgacatgaaatccagacattgctaagaagaatattctttttacaagactcatactcatgctctccttctgttcaaaatctgtaatatt

SEQ ID NO: 24210 - DNA, 467 bp, Glycine max
  unsure at all n locations
ggagcgtaanctgatgcatgaacactctgggtagtncagtgagacctcgagaacctctagagncgacctgctggcacgcgggcttctatgagttctacctcgtgcagctattttctgccgaacggaagaacccttctgtactgtgaaagatgacgatataagcactgacttgccccatcctcaataagaatatgcacagatcccactcgttctctagcagtattggattgaatggatgatcagtgacagagatgccttctcccatcatgagggtgagcaagacgagcaaaggtatacttagttggatgaagacagccaatcgtacataatgcgataggcatgtgaataacctgatgtacgattgtcgctcacgatgttgaaagcgacaggcctggctaatgacacgcattcactccaatggcctcgcgatctgacagggcccatgcctcgagattatgccgtacaan

SEQ ID NO: 24211 - DNA, 355 bp, Glycine max
  unsure at all n locations
tctgaattctgtggtcaagagatngaagtgtgtggctcattccaattatattctgaccattgactttgctgactttaattaatcggctctttatcatattttgggcaattgttaattatatattgttgcgatactaagggtacctcgttcagcaattctttctccctaaaagtatcccttgtatgaaaacgaaattttggaatacattttgattttcgctacaaaacaaaggacgaccgacaccaacaaaggttgaaataatgaaaccacagttgcttgctgaagaagataagcttcaaatctttgaagcctgttctgtattattttattacattttcagacaactaggtcatct

SEQ ID NO: 24212 - DNA, 332 bp, Glycine max
atctttgatataaagcattctatttgttatgatcctacttcaaacaatggaattactgatgtttttgtcacaatcaagttattgtcaacatctccatatggttgtacattgcgatcatgttttcgtttctagaattcatttgaaatgcatgttgctaattctaaataagtgatccttcttgatttaaaacttaccgtctcctaatcatttaagtgtacattttgttatgggctgctcatcttccaatcatgtctagttaaactgcttgataatctatctcgttgttacttctactaccaatagagagagacttcattcttgtctatcacgtt

SEQ ID NO: 24213 - DNA, 441 bp, Glycine max
  unsure at all n locations
gaaactcaagcanggagaggatgcttcaatggatgaaaagaaagaggtttgatactgtgtgaggggggagcacgacatcgaacgaagagattagggagagaacttgaactttgagttgtgtctcacaagactctcattcatcaaagtgacaactagtgttacacatgcttctattcatagactaagtagcttccttgacaagctttcttgagacaacttccttgagaagctactttgacaaaacttccttgagaagctagagcttagctacacacacccctctcataactaagctcacctccttgagaagttttcttatgaagattcctatagaatctatagcttagcttcactaaatgaacgcactataaaattatgtataattgtcgatatacaaaacaagttatacttattatatgtgaaacacaaactactattaat

SEQ ID NO: 24214 - DNA, 314 bp, Glycine max
agtttatccttatggctagcctatgcacttcacacctccatgccatcctggaagatgtatgccaagcccctactatcgaggggcaactcccaccttacgacaactatcccgggcaagactatgaggaaagagatacccatcttggccccctgttccacctcaaagatccatccccacatgaactaccccaactgaacatagttcggcatatccaggcctcacccacacccgtaaaagaatctgttccctacgctgaagataacggaaagattgaggcgcttgaagagatggtaacagcatgccagggccttggc

SEQ ID NO: 24215 - DNA, 228 bp, Glycine max
agctcggagaaaaacttgaagtttttttgtattttacatgctcgaatcccttgaagagcattattattggatgctatattaaatgtagcatcttagtccatatcatatctttagtgcatcatgcattactatgagtaagacatagcagaagtttctatgttagaaatgattcttcagaacgcacaaatctatgtttaaatggatcacaagcttatcgtaatcgattac

SEQ ID NO: 24216 - DNA, 363 bp, Glycine max
  unsure at all n locations
tgaacaactatcttgtatgagtcctcatggctcgtttatnttactnggcgnngcagngcaacgatgctggccgtagaggtggtgaacgacctgtacttcagaacatcgtcccttacctattcaaagccaacaatgacaggggggacgatggcgacccaacactatggctacgacgcacgtgtagggacgccataacatccctaccacttctccttgctcccccagaaatacaaggagggtgaatcacagtgaccgagataggttcctcggctatggaagcagtatgaggctgcgctcttttgcgaatgcgagaaatgcagtcaccattaccacatgaaatcctcaacctctcataggaagaag

SEQ ID NO: 24217 - DNA, 307 bp, Glycine max
  unsure at all n locations
atcttattatgtttactatncaaaaatcaatgccccaaacctatcataaataattgactcaactattattggattgcgaaaaagctcggataaacatcaaactaaaacattttttaatgaattgaattttaaaattattatatataatcttaacaagtccttgtttcaattaactctaaattttgatacaccatatgaataacgattatgtgtcccaactgaaacattttttttatagtttcctcctcatgttaaaaagtattatcctaaatttacttatatctaactaaaacaaatactcatcatt

SEQ ID NO: 24218 - DNA, 193 bp, Glycine max
aactcagcttgagtagagggcctaaagattttgaattttgaattggcctgaaggaatgagatggactgcgggatcagtctatgaacagattcctattcgagtattctctttgccaagacaccagctggaatccgctgtccatcaaacatgtagcaaatcctcaccctctcttgttcttccaggaaaaaaatga

SEQ ID NO: 24219 - DNA, 168 bp, Glycine max
agtctctcatgtctggctcatcgagcgggagaagctacttattccatgggacaccccttagaggaaggcacctcctcatacctgtacaactttgtcttgcactggatgtccatggtggaactgcaccattaaaggagctcacggcagctcaaagagccatcctacata

SEQ ID NO: 24220 - DNA, 153 bp, Glycine max
ccggcagttatgccattttgaaaacactacagcctatgacctactacagatagtatatttgcggaaggacactatgttatgcttgctgcgtaaatgccggggcgttcctccactcaccaatttcccatctggaaggtgatgagagcacggtcg

SEQ ID NO: 24221 - DNA, 149 bp, Glycine max
gtgcagaagaaaatgagaaatgccacattacaccgtttttttttttcacacatctcgaaaagagatgagagctctagggggaatgtacttcatgtaaaatgtgtcatatcagctattgatattgtaatcatcgccttgctgaagaattt

SEQ ID NO: 24222 - DNA, 367 bp, Glycine max
  unsure at all n locations
tgaagaaagtttgtctttcatatgaccatttctnttagtgacattngtattgattgctgtattgatagttgaatcttactctctatattttcatatgtacaccatgcatcattatgtagaagaaataagatgtgttctaaagttagaaacttctttaccacattaaactctatgttttaattgattaccaagcttatcgtaatcaattacacaagtgtttatagccggcagagagattctagttgaggtttaatcgattacatagtttagttgagacaacgactggattttcatgagtctatgctttaatcgattatcatataatcggaagcgattacttctttgttaaaagtgtctctagaagtga

SEQ ID NO: 24223 - DNA, 317 bp, Glycine max
ttatgcaatctagtatttttgagctcgatcggtcatctatcctggccgacgccgactgtcatttatttcgatcaatatcggtgaataatatttttttgccgaggtgggctaatgttttcctggccgaataaatgggaacacgccagtttcggccgaaacaaaacatcggttgagctcgcacgaaaaaacctagccgacctacattgtaagttttttatgcaacaccgacaaaaacaaaactttccctgtcataagaaaaaacattatcggccagcgagcgtttttttaaaaaaaaaatgggcaatgtcggctgaaaa

SEQ ID NO: 24224 - DNA, 398 bp, Glycine max
aagcttgagccactaaacgacattaacgttttctcttatgtctgatcgagtcccgtaacatatcgagacgctcgacattgaacgttgaagctctgagccaatacaaacgaccataacttttttctcagatgtctgattgagtcccgtaacatatcgagacgctcgaaattgaatgttgaatctctgagcaaattcaaacgacattaactttttactcggatgtctgattgagccccgtaacatatcgagactctcgaaattgaatgttgaacctctgtgcaaattcaaacgacaataactttttcctcggatgtctgattgagtcccgtaacttatcgagacgctcgaaattgaacgttgaagctctgagccaatacaaacgaccattactttttact

SEQ ID NO: 24225 - DNA, 386 bp, Glycine max
agtttatgaggatgaaactgagttgaatgttatcttggtgaaattgtgaaaaaattggaagtcatgaagctgttaaaacttataatgtacttaataactctgtagttaactacagattttgtagtacttccttgaaaaccacattggttgttgtatttagtggttttccttctttatcatgaataagaattttcaatctagtttttctctgaactcttgacacaacgacaccagaaacttgttagacttttgacaagcataccaattgtcagtgcatgttacacatttataaaaagagtttgtctccacaaggacttgagttacttgactcatttggataaagggtatcagttcaatagttatgtacaaatttaatcaaatgtcat

SEQ ID NO: 24226 - DNA, 382 bp, Glycine max
atctgctagtgtgtgtgcatgggcaatcaattgtctgtactttagaatatgcttcatcggaggctgcccaacaatgcttcaagttctgtgtaacaagcaattcaaagtttcaaattgcggttcgcttttaactgctaccaatgcaatatgtaatcacctgcaaatacagttgctgctgcatctactgcaataagaatgttgtggccatagcagattaaatgtcaggcaacattagtgtgttttaatcaatgaaaatgattatttactaacgacagaaccttttttttaggaatcaaaccaatgaacctaatgcatagaaaaacagattttgtcatgtgatatgcctgttaacttgcttatatagacgcaccatgaacacttt

SEQ ID NO: 24227 - DNA, 389 bp, Glycine max
  unsure at all n locations
agtttatgcgtcaactggctattatgtttgagcatctgaactcatggaatactgatgaagagttccaaaacaagaagagaaccaggtgtcaaccatgtccagcttatctcttgaatttgagttgcccccgatctttgtatgatttggcctttgagccatcaaaaactgttaaatttaaggtatagcttttcttggcttcccttttcatgacttattttatcttttcagtacatcaatgaggcgagactgcattcttgtttccataaatgatttttgtagggttttggtctagattcangcttttatgttatacatcacgtactctgggtggtgtaaatttatattaactccaagaagcaataatgatcagagattttgtttcccatatt

SEQ ID NO: 24228 - DNA, 383 bp, Glycine max
  unsure at all n locations
acacctgaaactaagcatgtaactaagttgagttgtaaattaatgcttttggatttttcgcatgataaagngaaaccaaattttgaagtaatatttacggcttacattcaagtggtctatcaaaagaatagtgattatttagacaatttcgaataaaagattaatgttttgcaaaaatatattttaatggtttcggtctggatcatcaaagaacaatgttaaaactaaaacttgtaatcaaatacaatctatgaacacaaaatcagagttcttgtgagaatgagtgatatgactagtcatgggtgaacttaatgttcctcttttaatgcgataaccttaattaaactagatatttatgtaatttttataaatgtctaattata

SEQ ID NO: 24229 - DNA, 358 bp, Glycine max
agttttgtcctcagatccctcttgttggactttacttagaccaaacaacattattgtaacatcatacttaacaccatgacttaatccgcagatccctcttgtaagactaagtttcaattctgcttcattcaagttctaatgcaacaatacacttgccaatgttaaaatcacctaactaggcacacagatggttgattagaccaagagcatacaaaatttaagcactgaaagaagcattgaacacaagaaacacaatcaattagatatgaaaataattacattagttgttcattagaaatgcccaacaagggtgtttagccagccattacagaagataccctaacaatgatgagcttac

SEQ ID NO: 24230 - DNA, 426 bp, Glycine max
tctcatgtaagatcctgagtaccttctggagtaggttatccttactgctgattcgagctttctgttatgaactaagactaagctactctactaaactacactaatggttatcttcataattcttctatgtgccttttcattcattgcttcatatttataggcttacattgctattgatacttaacaaactaacaattctgttgtaacagaattgaaggagcactatggctatcccctaacaaaatagtgggcttagtgcaattccttattggtctggtagttgctaggctgctattgctatcaatacccaccactagaaaaccaaccttgtccttaaggttgagcaataaaaacaagctgaaacaggtggtgggtttagaaaaataagagaggtacatgagtcaagttgcttttgtttgcgggctt

SEQ ID NO: 24231 - DNA, 392 bp, Glycine max
  unsure at all n locations
tgtctgacctgtgtgcttagcgtgttcataattntttggggtttatgggtttttgatgaactctctaagcctgacctatgtgcttagcgagttcatgcctttcttagaatatttgctgggttttgatgaactcgctaagcctgacctttgcgctttgcaagtttctgaattttcttcgtaattttttggtgttctagatgaacttgctaagcctaacccgtgtgcatagtgagttcatgatttttcttcatattttctaggttttttataaactcactaagcccgaccttgcgcttagcgagttctttcatgtgttcatagtctctaggttntttgtgttttagtgcctgagttaagcgtgtcaagtcgtgctaagccccaatgcctttttg

SEQ ID NO: 24232 - DNA, 412 bp, Glycine max
  unsure at all n locations
ttgaccaaacccncagcagcagttggttccttagattttgcctttacccttgncnctgagactgaggataattgcattgcgtgccttctgcagtaatgttttcttatccccatcagccatcatcttttcaagtttggcttctccatctagtgcttccaccaagccctgttggacaagaagagctctcatcttcaattgccatagcccgaaatcattttgccctgtgaattcttcaacctcgtacttgggcgagcccatttctagaatcgaactcaaaaaatcgctccacgctcaccacaccaatttgttgtaccaagatcaaatcgtacttcacaaaagaatgagtttcttgtatgaacaagaataagcacaatgcagaaaagaaaaaaaaatgaacgaacactgcactgtg

SEQ ID NO: 24233 - DNA, 386 bp, Glycine max
agtctttatctagccaagattattcttaggtgttacaagagaacctaacggtttctaattatatgggccatcaaatctatcatgtgttgacagtaattgattagcccatgaatctcctcgggggccgtacacacttcggccatggcttttgctttggctaatagacgcgggaggtcttgacttccattcaaggtcaaggcgaacctatccatccacatagtcacttcttgatgcaatgcatcaatcaccctccctcttgcttcttttttggcatacacttgtgcaaaatcctccgctagcttttgttcatgggtcacagactggttcaactcttccttgtatttccctatgatagctagcatgctttgctccatggcttccaagtg

SEQ ID NO: 24234 - DNA, 427 bp, Glycine max
aactcaagcttctctcaaatgagatgacaatcaatctctatatgctttgtcctcttatggaagactgggtttgaggcaatataaagagcaacctgattatcacaatacaacttcatttgcaactcttcacaaaaccttaattcttgaagaaattgtttgatccacatgagctcacatgtaaccatagccatagatcgatactcagcttctgcactggaccgagcgacaacagtttgtttcttgcttttccaagagattagatttcctccaatgaagacacaataacctgatgtaaatctcctatccatgggacatccaacccaatcaacatcacaatatcctgatagttgcgtactacccttggcttcatacaacaacccttgtccacgagctttcttaacatacctcagaatacgcatgacaacat

SEQ ID NO: 24235 - DNA, 370 bp, Glycine max
tgtttgtgcacactatcatctctaatattttagcgaatattattagagaacaaaattatgactttgtcaacattcactttttggtctgaactggtacagaaaatgtctagtattttctttatggcattagtttgctccaagtttatttttgcaaaaagtaaaagatcatctacaaaggcaaggtaagaaattaatatcaagggatataataaaaaaatatcaagggatgcaaagaaattaatttgaataaaacctaattcaagggattggttgagtgaagtaaaacaacatcttggatgtgacaaattgtaagtttgaattttcgtacatctctttttttctttttttgcttctttcgttcatctctttg

SEQ ID NO: 24236 - DNA, 518 bp, Glycine max
  unsure at all n locations
ccgcccgcacccncacaccaagactcgaaataggaaaatactcaccctccccncccccccacagagggggataacctgagacctagaancaggacacaagaaacncaacgnncaaagnnccacaacacacacaaatatggcagatgtggacgacaacaagggcaacggaaaggcccaacagcatacatgaacaacgcacacgaaggggcgccaagggtgaggacacacaaccgcactccaaacccctggcacagacacaagcaaccacgacagccccagccgcaacgcaaacacggaggcccaagcgccaaagacaccacacagacgagtgacgatacatcaccccacaacaggaagaacgcgaaaggacaacacggcgacacacaacaagagcgaaagggcgcgaacaagaggccacacacacgcaagcccgatcgagaagacacgcaaaaacgacacaaaaagaccacacgacaagcaggagaagaacaacacaacgaccagacaggcgaagagcg

SEQ ID NO: 24237 - DNA, 375 bp, Glycine max
agtttatccctcaattttctataaatagggggagaagtgaagtagaaaagggttcagccccttacgcacttctatctctttcgaatttgcttatgaaaattgtttctgtgaagaaaatccaagccgaggcgcttccgtaacgtttccgcgagtgatttcgcgaaggttttcgaccgttcttcgacgttcttcattcgttcttcatcgttcttcagtcttcaacgggtaagtacctcaaaccaagcctttcaattcattctatgtacccgtggtggaccacatttggtatcatgtatttttattctcgttttcattgactttttctacccacttttgacgcgcttaagccatttatataaggcattcctcgcttaa

SEQ ID NO: 24238 - DNA, 430 bp, Glycine max
gacctataaaactcagcttaaccccttttaaagaaggctttaatgcttatgaagatttaacaatcaatttaataattttctttaaacgtgcaagataaaattgattgcaataaaataaataagataagggaagaaagaattgcaaactcgatttatactggttcggccacttcatgtgcctacgttcagtccttaagcaacccacttaagattttccactatctctgtaaatcatttacagactttgaacacaccttgggattccttacccttgtgttcaagattttcacactccaagagacaccccgtctcttgattacaactgagtttctgagatgaacagaaagatctctctcctttagagtggatgatacaaattgaagatcctagaggaaatttcctcttttagagatgataatacagattgaag

SEQ ID NO: 24239 - DNA, 371 bp, Glycine max
tgtttgggaggattgatggggacccggggttgagagaaacgaggatatgggctacgtgggagtacgtgagctcagttggaggtgggcaacaggggatggtgggtttatgcgcgcattgtggatgtggaaaacttgttgtgcaccatcgcccgaccgccacctagtaccacatgtgatgggtaccccataatcctacaagcttgagatgaggaagtgttgaagggtgaaacttcctgcttttattgttgaccacagagtggtacctggagatatgtcgcgggggtcaggagaccttggggacgtcaggtggggtgctattgcccaaaaccaagcttgaccaatcccgacccaacccgggcatagtcggtcag

SEQ ID NO: 24240 - DNA, 499 bp, Glycine max
  unsure at all n locations
agtggtacatgaactttgagacgtagaagncagagacacatagaatctcaagcttagatcaattcaaatggccataacgttacactcttttgtancgaccacgcgcatgatatatcggaggctcttcgatatttatcaacaagcagcgctctcagaatatcataatggtgcataactttctacttcagaggtgccgatctcatgcggcattatatatcagacgcttctcgaaataagagtcacccgaatgctctcgataagatctaatacgggacataactgtttacctcgnaggttctgattcaccgtgtataatagattcgacaccctcgcgacttgaacctccggaagctccttgagaaatttcacatgacatacacgtctaactcagaggcaccactcaggcgcatactatttggacacgcctggaactgaaccggcgattcgctgcgagaatcccaatggtctaacctctcactcgagattccttcccgcgcac

SEQ ID NO: 24241 - DNA, 447 bp, Glycine max
  unsure at all n locations
cgtcattgagctttgaacactnnttgatccctgagaccctggacnccaagagnncacgagcacgcacgcaggttgctccgagcgcacagcttttgcatgtctgagaccntaaacgacaccagaggcggggtaccgacacagccctgagagctggagcccaaacaagcaggcgatgaagaacgacatgaatcaaagacaactacatacttctatcacctgcgctcaagaacagagcagaagcctggtcagtgaatccaagcgcaatatatgccactaaaataggaaaccagcgtgaacaaggaaaggaggacctctatcaccatgtggcatcctgggtagcacgggaaacaacaacaccgactggaggactaggtccgtaaaaggtccaccagaaggaccgtgaaaacacgagataaaaccagaaagaaacgacacctcagcatgacn

SEQ ID NO: 24242 - DNA, 190 bp, Glycine max
ggcggcgatatgcgtgcggaaatcatgatcatcgtatatacactggtttaatagtgtcctgaaccccattctgaagatcctttaatggccgcaatgcggactgtgatataatctagcaatccctgcaaaaccacaatctaatggcagtagggatacaagacgctaaggtgttataatctcaccggccttg

SEQ ID NO: 24243 - DNA, 303 bp, Glycine max
agttttccgatcaaatacagtagcatgcatttttttttttaatttttttaaccagcaaatattttgttgttaattagttaatttttttagtcagaggactagaattcatattcctccttatagcatgcatttttttattttttaacccgcaaatatttagatgctaatgaggaatgttcttttttttctgtgagatgattgaaatgtatattactcctttacttcgtcttttagcatatatgcatgtaatgtaagtgggagctggattccacgaatgaatggctatgattctgatggatgtgg

SEQ ID NO: 24244 - DNA, 407 bp, Glycine max
tgtgcctcgttacgtttggaatatgaatgttgcatttatatttaaagacccttaggtgctttgttgatggcttcttcctgtttcaagcttcaattggagtcttgtcttttacagacttagttggacatctattgagtatgtaaacagcagtgtagactgcttcagcccagaatgtattaagtagtcccttctccttgagcatcaatctagccatttccataactttgcgattctatctctcggacactccattttgttgaggagaatatgctactataagttgtcgctcaatgccttcatcctcacaaaatctttcagactcgcgagaggtgtactcttcgtcgcgatcacttcttagctctttgatccatttccactttgattttagcaaggccttgaacttttga

SEQ ID NO: 24245 - DNA, 362 bp, Glycine max
  unsure at all n locations
tgtttgccactgcagcagttaagtgaacaaatgaagtgtccacagtcattggatggatgcttggtagaggtacatgctaataactaataagatttcctgtgcagggtatcattgtttttgcatgactgatggctaccttggggctggagattttggttgaatctgcctcaagtgttattttgaaggtaattgagataatcttttgatgctgtttgcttattatatacctaaatttgggttgaagactagttattcaacatgtggattatctaccataataagtgattctatcatttgagcagatgatattatcatttgaccttgctnttgctttgattccgctcctatagttcagtagcagc

SEQ ID NO: 24246 - DNA, 368 bp, Glycine max
  unsure at all n locations
ttcctctatcaacctccattcttcatcaattgcaattatgacgacncaaattatacaaccttcgaaaatatcttcgaacacaatgacatgatcaaacggcattttgtctatcaagagtatcattgtgccataagagagcgccatataatctaagcatgtgttaattttaaaaaaaaaattactcttagctatagcacgtaaattcatacataaatttgctcatacaattatgcgattctaaaggttgtaaatccttgagtattataaatgaacttgtaagcataatcccacttttatattacagacgagaaaatatcatgactctagtgatctttttgcattcatggggaaaagagtgagctaataga

SEQ ID NO: 24247 - DNA, 278 bp, Glycine max
  unsure at all n locations
tgtttgtagactctagaactacaccaatatcgnggtacttatagattcatgaaatttggatcttaaaaaaccaggcgatgatgaacgacatgaatcaaaaacatcatacatacttctatcaccttctttcattntctgagcataagcttggtaattgaatccaatcgtatttttttccactaaaataggattccagcttggccatgtaaaggtgttcctctatcaccatgtggctccttgggttgtcacggtaaacaaatatcacctttttggaagtc

SEQ ID NO: 24248 - DNA, 419 bp, Glycine max
  unsure at all n locations
ntntcagtttgactgtaacaattttcatatctctattagagctaaattttgaatatcctcattgtttagctgcaaatctagggaaaagatagattattttgaaatcagagttgtaatttaaaatagttaattaaattataacataccatgtatgttgcacaactaactttttagtagagaattccgtctaaaagtcatccccatgttttattccatacatttatggtctattaatgttgttggataagagcatcatttcaaaaaacttcctcgaatagtgtcctgaaccccaatccttggcttctttaatggccttaatgtattctctatcattagtcaagaatcccanagcaaaacattcttcttggcaagtgggataacatgttgctaacagttctaatatcctcacacgacaatgg

SEQ ID NO: 24249 - DNA, 384 bp, Glycine max
agtttggccccataatcaaagatgacccatgccaagttgtgcactatgtgaagattgtggtaaaggccaaagggtttgaggagttagatgtggaaccgagaaccaatgatgacaatatgattaaaccaattgaagaaacatataccttttagctcaacattaaagaggaatatgttacccaacttggcaaccaagtcttaggtgaagataagagcaacttacaacaagttattcggacgcatgctgacccgttcgcatagtccgcagctgacctgtcaaggatagatccaatcttccattgttaaagattatccatatatcaagatgccaaacccataactcagaggaatagaaagatggggaaagaaaggtgttaggtagtgc

SEQ ID NO: 24250 - DNA, 352 bp, Glycine max
actaagctgctcggggatctactacgctttagaacttggtatgctgcctagcaatttacactaccacagagaatgagctattagcgatagcttttgctcttgagaaatttcgatcatatttgcttggtactcgagttattgtttatactgaccatgcagctctgaagtacctgttgaagaaggctgaatcaaaacctatattgatcaagtggatgctatggatccaaaagtttgatttggagatccgtgatcagagcggttcacaaaacctcatggctgaccacctgagtaggattgagcgtgcgcctgaagactcacccattacggatgatttttcagatgaccatttgta

SEQ ID NO: 24251 - DNA, 321 bp, Glycine max
agcttaagctccttcaactgcttatggctcttaatatttgaagaggatacttgaggaaccttcaccggacgaagacactgacaaaaacttatcttctccttcttggacaaagtatggcaggctgggggcaagtaaaatttcttacaatcagaccttggatgcagctgagatcgcatacccatatcagctagatcttgacgagtattcaagccatccttcatcttgccttgaatgttaaggagcgtcccaatcacactgtgacaatacattctccacatgcatgacactcgtacgatggctagcgccgagatcacgccagta

SEQ ID NO: 24252 - DNA, 377 bp, Glycine max
  unsure at all n locations
catctatcctncactccatgtagaattatcctcatcggntccccactgcaccttcaccaacgcgatctcctttcctttcaacgacttcattcttcggtcagagatcttctgaggttgtgctttataggtgaggttatccttcacctgtacctcgtccactgcaagaatatgtgatggatccgggttgtaccgtctcagttgagagacatggaacacagggtgcaaattcgataaactcggaggtaaggcgatatgataagctacaggcccaatcttcttcaaaatctgatatggacctagatacttgggtgtcaacttcctagccttgagagctcttccacactccgttatgggagaaaccttcacaaaccatgttc

SEQ ID NO: 24253 - DNA, 377 bp, Glycine max
  unsure at all n locations
agtttcattgttgcgacgatgatcttttctcttatggaactagcattcaaactcattttagaaaggacataatccaaattaaacaggagatggaatccttgagggcttgtacaaactcaaccttctgagctcgtttcttagacttgcataatcaacttagttctctccttcaccatanaaaggtcttttggagacaacatgaaaagcttcattggctctgtgatggggactccaattcgaaatatttccacaattcatcttcagccagaatagaaatggatgactagattggtatctcgtatattgctaaaagatactttgagaaccttttttcaagccatggtggatatcttgacaccgctatccctcacttatct

SEQ ID NO: 24254 - DNA, 430 bp, Glycine max
  unsure at all n locations
gcttttaactgaagttgcaacgttccaaatatctggaatatgatctaatcgattacaatatattngctatcgattactagtgtatctgaacgttgaaatgcaaattcaattgtgaaaagtcgcatattttcataaaatgctttgtataatcgattacatggttatgattatcgattatcagtgacaagttctgaataaaaagtcaagagatgtaactcttccaatggttctctcaatattataactctactaatggtggacttgaccatacatgaagagtctataatagcaaaaccttgacttgcatttcactaacttttacaatttgagaacttctttgaacaacttttgagatatcatgaaaccttcgcttcatatctttcttctatttccttagccagaaagctttctaagttttttgtttccaaac

SEQ ID NO: 24255 - DNA, 380 bp, Glycine max
cgctagcttatcctgctcaatggcgtgttcctcaacgccttcctagagaccccggtggtcttggagcctggggaacactacagcacgtactttagattcatgtccagaccctcaggagttcgtcgccagattatgtattctaaggcgcggttttgtacttaatgctgagggagcaccctggaagctcctgaggaaggacctcaccaccctcgcccatacatgaagtgtgttatcatactccaacctcgcccccacctcttatacgttcgatcttaacatggacaaggcgaggttagtctacgggcttgtgatgaagatggatatggacttgggctcgctcatttcaggacaaatatcacagacggggacctgacacttct

SEQ ID NO: 24256 - DNA, 441 bp, Glycine max
aaactctagcttgtctcctctgtaatttgtaaactgcaggcttcccttgctctattcttagtgacattttatgctacgcagcttcctggtccaaactatcattgccgggaggtatacttattttagaatgtgtgctttttaaacaaacatcatttcacttgcagttaaactgtttcttttctttctaggtgactgagtagtaaactatgcaagttagatttttttttctcctttcaaataatcttttaatttaactacatttcatgtattgtgcaggggtctaaacttgctacactgcctcgtccggatagtgtctttgaagtcctcttgattaattgttagtatactattgtactcgagttctttagctttgaactccttttggttggtttggtgctcatttggttttcatcatgcagttccacaagatgcgatatatgg

SEQ ID NO: 24257 - DNA, 336 bp, Glycine max
cgcgagcctgcagtgtctagctgcatgcatgcatgtcttctattcttgacatggtcgatgtgagtaaagctacccatactgctttaaggatttatgatgatgcatgtggacacatgaatgcttaaagagtatgtgaataaaccgattaaaaaaacgtgtaccttatacctcagcatgaatgaggaatatgttacgccgcttggcaaccaagtcttatgtgaagatgatagcaacttacaacaagttattctgacgcatgctgacccgttcgcatagaccgcagcttgacctgtcaagatagattcgatcttccattggtgcagattatccatatat

SEQ ID NO: 24258 - DNA, 260 bp, Glycine max
tagactcagttcaacctaccatcctttatctgattgtttaacttaacggaccataaaatcgttggaggaccttttgagggcgtgtgtcttagagcaaaatggaagttgggagagttttcctgccattgatagagtccacttacaacaatatgtttcactctaccattggcatggctccctatgaagatttgcatggtataaggtgtaggacacctctatgttggctagatcctgcagtaaaccttaccttatgaccttga

SEQ ID NO: 24259 - DNA, 375 bp, Glycine max
  unsure at all n locations
agtttatttttccttactaaaaactcattttttacccagaacaagttgattgatcaagtgtaaggtacaattgttggaaccaataagacttaaaatcaagaagccggagtttgaattcaatagaatccaagatgcaccaccaaacatgaaaggatttatattttatttttcagtagttaataattatttatcataattttatacctgngaaatccttaaaagttagtatacagcaacttacttacctgtgaactagaccatataatagcagtaaaacataattatctcatctatgataaaggttgcataacatgctaaatttaaaattggcaaaagtatctaattaacaggaacttttgagttttgaagactatg

SEQ ID NO: 24260 - DNA, 364 bp, Glycine max
gccacttaatatatacttatttcgaattcttctattcgctctatgggatgagcgctttgcaaagtgtgaacagtttgcaatgtctactataatattatgtacactttcttgaagatacgggctaaagatattcaaaaagaaagttggaattaatagtcattctctatatgtaactacatttccctctttgcatctttcatctgcagcgtctgattattcaacaatcaccttatggtagctctaagagatgggctgagagtggagtcatataaaataggatttcacattcgatacattaaatatttcaaccctagtcattcacattcttgaagaggagtcactagacatgtgatcataagatggg

SEQ ID NO: 24261 - DNA, 352 bp, Glycine max
  unsure at all n locations
agtttgcatttctcccatccccccagcaaagtcatgtgatagttctgctggtacgaggtgaggtttaaacaacaataaacgcttattccaccaagtggagctaatatacatgtcaaaatcactaattggcatacacatttgagaatccaaagagcataaattttattgattactaagttactaacttgctttacttacaatattggcaatgatcgttctatttcaatctcgntaacctatgctctgctcattcttatttttccctgcatgatttccttgagactacagatactgatgttattttagctgcataattgaaacgttataataatgctgcatgcttttgaaggtt

SEQ ID NO: 24262 - DNA, 547 bp, Glycine max
  unsure at all n locations
ccaccccggccaccagcagtccactgggacaaaaagttgttggtagaacgaaacccncnccccccccccccccacccccttgaccccttgagactagannacntcggaanaacnanagcanacncaagcacngagcccaaaagcgacccgacgcatataacgatttttcgtgggaagaccaactccgacacgcagaagcgaaaatacaaaaagggaatcacgaacgagaaaacaaaggaaaaatccaatgacaagcccaactatgaggcagacaatatccgaatcggggaaagggagaaagctaaagggtaagaaaggaaaactaaacagcaaacaaagggacaaagaaaaaaacggcgaagaagaccgaaataaggcacctgatcaacgaacgacaaaaaccacaataaatgtgcacacagggaaaccgacaaacacacacacgacggcgcaaaagagcgaccagacgaacaaaatggaaagcaacgaatccacgacctgaaaaggaagaaaacgctaatgaccaaccaaaaacgaacgcacgccg

SEQ ID NO: 24263 - DNA, 365 bp, Glycine max
  unsure at all n locations
atcttgtaaatactacaagtatatgacctatacggctagtagatttgtgtaaggacactatgtattaatgtcattttatcgataaatattaattattaattattaattttttattagtaggggattgaaacacaatttttttctttttgttcttccttaaccatacaattcacctttggagggttttcatgacttanatatttacataattataaccataactaattattaactagattataaagtatgtattataactataaccataattaattntatataactagctagttataatttggcataacatgatataactggatattattttcaaattatgaatatataaaaggttatgaataaac

SEQ ID NO: 24264 - DNA, 330 bp, Glycine max
acactctacaatactcacgctcttattgctcgtggaagtgattgaccacatttatgttgtctccgatcactcatccgccaaaatgggaaagtattcatcacgggtgattcttacactttacaaattgaaaacctagatgtttgaatctctctgttaaatgtttacatcttcaagcagctgtctccataattcgttcaaataatgtactttttcttcaaatcagtccaacatgcactagatgtaagctatccacggccatcaacatattggcatcataaacacctcaaatggtgctacgtatgtgaatgattaactagacatctttatcaa

SEQ ID NO: 24265 - DNA, 296 bp, Glycine max
  unsure at all n locations
atctttatcatcaccccgaatttcaaattattcaccaaaatatgacctgtaatgttcattgtggggataaggacagattctggcaagattcttggctgtgacatggaggcagccttcagcagaagctcaatcaattatttgtgagtagcagatagcagaacctttccatctctaanatgggatagttttatcacaatactcggaattgggattataaatggagaaggaacctctntgatcacgagaatgagctagcaatagccttcatggacgatatatctgctatatctattcat

SEQ ID NO: 24266 - DNA, 417 bp, Glycine max
cttaagcaactagttgcatttgaactatgttttattgttggacaaactacgaaaagtagaaatcaattttacagagatttatttttatgattggggtaattaatatttttttaatttagttacaaaactaactatgatgcaaagtaaatttaaaatgtgaaaaaataaaataataaagtgtaagtaataaatcttaaatagtaatcaagtgtatgttattttttttccgaagttaactgtaatgtgtcaaattattagtatagtccagatacgaaaataaattgatacaaggggaaccctaaaataacacacacaaagcttaaaaaaaataattgaactcatctaattataacaactattcacgtgaacgtaaaaaaaaaaaaacactattcacgtgtcgtagaattaagttcactt

SEQ ID NO: 24267 - DNA, 363 bp, Glycine max
agtctttcagcaataacatgatcttttcagcttctattcaagtgatcaattcttttcttccaggtcatgtacattgcagtctaaatcaagtccatatcagcatctttcatatgcaccatcaacaatttcagaacttcacacacctgttcattggaagagacaaatctgtctccaacaacaaaactgcaaatctggtctttcaattcaatccagctcctccccgagtcacttttatttttaatgcctctcctcagcttcgttgagctggcaaaatcatcccagtttccttcagcggcataaatatttgatatcaacgcataagttcctgcactatatggcttcatatccaaagctctcaaagct

SEQ ID NO: 24268 - DNA, 432 bp, Glycine max
tgcatgaattagtagcaacaaattcagagtaattagttaagaggataaactgaacagaatttaacagtaataatagaacctcaaagagaattgtgcttgatcctcaagagaaaacaacgctgcggacttagcctttcattaatcaaatagagaatgaaattttattgataaactaaaagtctaaactggaattgtaaaaaatgaaaaatagaagagagagagagagagagctaaactagaaccttggtgctgttatatagtttttcagccccaaagcttacaaatctattttaaatccaagcccataagtaaagtcaaatcaaatctagataagataagatctagatgaaataatatcaagatgagatcaaatctaaataatatctagataagacaagataagaaaagatctaattttgtagaataaattag

SEQ ID NO: 24269 - DNA, 464 bp, Glycine max
  unsure at all n locations
cgaacttgaaaccntngaaaagcctngtttgacgccctcgtancacctagggagaactcagcgccgaccggcagacacgctagattagacctgaggcctgaattttagaaccagcccagnagtaacaatgcaacgaacgacttggaaatactcttatccttaacagaaagatgagcgcgacgggttgttggatatttgggactttgaggaacacatttggcctataatcacttaagagaggcatctcaagagcgaaccaataagacatgactttatgacgctaacaatgtgacacacactatgagaaagatggggctgacctgagtaaaagaacgatggctatatgattctgtgacaacgtctgccatagacagcatgaaaacacatggggaatctgacggactgacaatccctggcagataaggcggaagctgtgatcagctcccaaacgtgaagtgatacgc

SEQ ID NO: 24270 - DNA, 377 bp, Glycine max
  unsure at all n locations
cagcttgtanggttaaagnctcacttttgtcacgtgctcatgcaacaattgttagccatggctatacgagacatctttccaaacaaaggcaagttagccataactcggttgtgctttttcttccatgctatatgtagtaaagtcattgatcctgtcaagtttgatgagttggaaaataaggccgcaattatactgtgccagttggagatgtattttcccctgctctcttagacatcatgattcacttgattgtgcatctagtcagagaaatcaaatgttgtggttcggcttatctacggaggatgtacccggttgagcgatacatgaagatctntaaagggtatacaaagaatctttattgtctaggagcatctatt

SEQ ID NO: 24271 - DNA, 431 bp, Glycine max
  unsure at all n locations
tgaggagactntgaatcaatttatgcaagtaacaatgtcaaatcataaaagcattgagtcaaccctgaaaaacgttgaggtccaagtgggacaaccggccaagtagatagctgacaagtcatccaacagtttcgtgtcgaatacagaaaagaatcccaaggaggaatgtaaagctgtgatgaaaatgagtaagaggtttgtgaaggtggaggatgaggatagtgttgtatccaagaagaaagctgctgaaaagaaaggtaatgatgaaaagaaagatgatgtgagaggtgaaagaaatcaggaaaaagaaaaacaaataatggtcaagataaagaaattaaatgaccaagaaaaagataaagaagtagaaaaagaaaaagaatatgaaaaaaatgaaaaagatgaaaaaataagaatgaagagaggagtag

SEQ ID NO: 24272 - DNA, 371 bp, Glycine max
  unsure at all n locations
agcttcatgcgtcgatcattttgttatattattgcatccacacttcttgtataccgggttctctctcctcttctttatgcctttgattttgcatgtggggaggcctatgcaagttttgattcaacccctgcttgtaattctatccctgatggaagttgttgttgttaaagaactgctcatagtgattgttcctccctctcacataattaagctcatccatggcttgagccaactcaccttccacagtgcattctcctagaccatgaacacatccacacctatcacaagtgtgattgggaggtgtagagataggcacttgagacttagctntcattcaactctgaatttcttggacaatgctnanatctatc

SEQ ID NO: 24273 - DNA, 376 bp, Glycine max
agcttacggtaaaatctgggacctagctatggtagatgtctccacagagaccattgcctcccttgcccagtattatgatcaaccactgaggtgcttcacctttggggacttccagctgtcacccatggtagaagaatttgaagagatcctaggatctcctctaaggagaaggagaccatacctcttctcagggttgtatccctcattagctagaatttctaagataatccatatcttggcgcacgaattagaccacacgaagcaagtcgaaaatggggtggtaggaataccgattaaatgtttggaggcaaaagcaataaactcggcacgcaaaggcaaatgggcctcattcatagacattctcacactgttgatc

SEQ ID NO: 24274 - DNA, 270 bp, Glycine max
ttttgcaagtttattcactgacaccacggttccattaaccagtctggccctgtgaactatcccatatccaccctcgccaatgatgctctcgctagagaaacgataggtggccatttccagatctctacgcgtgaaccagaggccccacccaagatgagaaaaatcaggctagccaactaactgagaggctacggccaccccatcatgtgacaacgaagcatgcttcttatcgttcccagagcttccttgttaagcagacattgaactcaa

SEQ ID NO: 24275 - DNA, 415 bp, Glycine max
  unsure at all n locations
tctccaacatctacttttgatacgccttcttgtctttaacctggactaggagacatacatcagcgtgtgatatacatatcagacgtgtaaatatttgctattgacattgcacaaggacatcctaccacttcaacctcgaagttaagcaaatcaaaaacacttaaatcccaaaaattaaaaagaaccacccccaacctaaatgagcacaactaaacaattcccaagtatcctatagttgctatcaaactaaataaactacaactataatgatcctcaaagtacaggctctttaacaggtcacaagattaacaactatgtggatatgctgtatntaagctgcttgaacatctcacaataacataaaacatatccaataagtaaagcttattccatgtttgtccatatctaagaagct

SEQ ID NO: 24276 - DNA, 376 bp, Glycine max
tgtttcccaagtttttaagttcttcctcaaaactgtcctaagcaaagttcccaaagtcctattaacaacttccgtttgcccatcggtttgtgggtgacaagtggttgaaaataacaatttagtgcccaacttgctccacaaagtcctccaaaaatggcttaagaacttagagtccctatcactaacaatgctccttggcaaaccatggagtctcacaatctccttgaaaaacaaatcagccacatgggaagcatcatcaatttttttacatggaataaaatgagccattttagaaaacctatcaacaaccacaaaaatggaatctctaccattgcttgtttttggcagccccaaaacaaaatccatggataaatca

SEQ ID NO: 24277 - DNA, 417 bp, Glycine max
  unsure at all n locations
tgctctaaatttacattgatgttcgtatttatgggattaggctgcatgcccattttttttagtagtgtcccactggtaaaactaactttccaaatgtttgccttcgcaggaaatggccccgaggaagctngcctcaaagaggtccaggaaggacaaggcagccgaaggaactagttccgctccggagtatgacagtcaccgctttaggagcgctgtacaccagcagcgcttcgaggccatcaagggatggttgtttctccgggagcgactggtccagctcagggacgacgagtatactgatttccaggaggaaataaggcgccgacggtggacatcactggttactcccatggccaagtctgatccagaaaagttcttgagtttatgccaatgcttggccacagatgaggcgtgcgt

SEQ ID NO: 24278 - DNA, 334 bp, Glycine max
agctttttcaaagtcaagtttgaaaaccatgcaggggttatttttgaatttagcttcaactaagacctcattagctatcattacaccatggaggatatgtctgcctttgaggaaagcaatttgcctttcatcaattaagtgaggcagcacaagagccagcctattagccaggactttggacattattttgtaaacacaccctatgagagagatgggtctatagtcattaagagattgggggctattggttttggggatgagggctatgaaggatgcattacttcctttggggaatctgccattaatgaagaattcatcaaagaatatgataaaa

SEQ ID NO: 24279 - DNA, 410 bp, Glycine max
  unsure at all n locations
tctacataattggagagttctagagtgagaaaggttcttgttctagagagtttgagagattttgttatgtgaagatctgtaaagaccagagctggaagaggaagccgtcctgagagcttaagatgagtttgtgagtgattgtgaggttctagaggtggaggagacatccccactacttgtatttctgcaatctttcatctttctcttctctttgttgtaaaggaagtttcccagttatggaaagctaaatcctctgttggatcttccttgtaggtacttgatgtaaatatctaattttatctatttaatgatattttgtgtgttcactgtgctatcaggtcttcattctaccatgcttttgccttgatcatgtagatgcatgtgtntntaggatcattcaatagtggaaa

SEQ ID NO: 24280 - DNA, 369 bp, Glycine max
  unsure at all n locations
agtttttaggatgtgttcatttgtgtaaacaacatctacatattagaagtaattcatgctcacgtaaccataagcagcaataatgtgtgaacatggatagtgaagagcagaatactttccgcattgacaataatggtcattcaagttaactgcccacttttgtccgccacgttgcgttctaggattgaaggtctcctctacttcaaaccttgtcgaatggatatcatagacgcggacgatgtgcgaacaagcttgttcttgatttttntgaagttctttaacaaccttaaaacaatatacttggccttcatttaatttgctttgggcttgacgaccacgatcaacaaagtactttcgaacctactatat

SEQ ID NO: 24281 - DNA, 401 bp, Glycine max
ctcagctttactttttcttggggagaagcgtcttgatgtttaaaatgctctacatcttcggatgactaatggttaacgccaacaaaagttagtccaattggtaaagattagactcattatataaggacagtgagttaaatagggagtccttgagaccgcacctaaaattttattcacaaaaaagaaaaagaagaatgatggctaacaattaggttactgcttcttcgacataatatctctatttaaaaatgttccatttcacctaacaagacacttgtgtgttatgcatgcttccatcggtgagactattattagtttcttgtgagacaccaaggattcgtgatttctttaagtgattggatattattgcatggcttattattaatgcagtaatgattgat

SEQ ID NO: 24282 - DNA, 358 bp, Glycine max
  unsure at all n locations
ttttgtattttattttgaacgtcctggattatcaaatgactctctccgatattcgatgccaaagctattgcccgttgaatttgctcagagctgttgtatgaaaatccatggtcgcgatttaataccggactctatccatcatccgaattaaaaggtattgacttttggatctgcctccagacactgttatcaatatcgtgcatgttgatatactgcacgacctcactccactttccaagaaatgataatgtccttcgaatttgagagagctcgatagtcattagcagcgacttgaatataaatgactcatccgccatctgatgacagtcacattcttcgatctctacgacgtttgtgn

SEQ ID NO: 24283 - DNA, 416 bp, Glycine max
  unsure at all n locations
tgaaattaanaacaaaggctctaagcaaattcgaatgacaataacttttgactcggatatccgattgagtcatttaataattcgaaacgctcgaaattgaatacagaagctctaagcaaattcaaatgacaataacttttgactcagatattcgattgagtcattttataatttgagacgctcaaaattgaatgcaagagctctcaccaaattcaaatgacaataactctttactcagatgtccgattgagtcccgtaatatatcttgacactcaaaatggaaaacagaagctctgagcaaattcaagcgaaagtaacttttgactcaaatgtccgattgagtcatttaataattaaagacgctcggaattgaatatagaagctgtcacaaaattcaaatgacaataactttatac

SEQ ID NO: 24284 - DNA, 363 bp, Glycine max
  unsure at all n locations
tttatgcatgtttatagtcattacttgttgagaaccataagccaaagttgaatgttcctttgatatagtaaataatttgttttgtggccttgagatgagtagtggttggagtctccatgtattgactgatgagtcgagtaccatatagaatgtctggtcttgtggacgtcaaatatcacaaactacccaccaaactcttgaaatttgtagcacccatcttttttgcttcgtcaaactttgataacttcattntgcactccaccggtattccaattggcttgcatagttttgctatgaaatgaagattcaatcttcctttngctttacctcaataccaagatagtatgacattaatccaatatc

SEQ ID NO: 24285 - DNA, 418 bp, Glycine max
tccttaagaagattcctaaagaagctagagcttagctacacatacctctctaatagctaagctcacctccttgaaatgagaagctagagcttagctacacaccccctataatagctaagctcacccccatgaaaaaatacaaaaaaaaatccttactacaaagactactcaaaatgcctcgaaatataaggctaaaaccctattctactagaatggccaaaatacaatgcccaaatgaaggaaaaacctattctaatatttacaaagataatcgggctcatacttagcccatgggctcgaaatctaccctaaggctcatgagaaccctagggccttcccttggatctctggcccaatatacttggagtcttctatccaatgcccttgcgggataggattgcatcattatgtacatatt

SEQ ID NO: 24286 - DNA, 347 bp, Glycine max
caaacgaccataactttttactcggatgtctgattgagtcccgtcatatatcgagacgctcgaaatcgaatgatgaagctctgagccaattcacgtgacaatatctctttactcggatgtctgattgagtcctttaatataacgagacgctctatattgaatgttgaacctctgagcctattcaacgacattaactattttctcggatgattgattgagtactgtcatatatcgagacgctcgaaattgaatgttgaagctctaagccaattcaaacgacaataactaattactcggatgtctgattgagtcccgtcatatatcgagacgctcgagaatgaatgttg

SEQ ID NO: 24287 - DNA, 349 bp, Glycine max
tcaacattcaatcttgagcgtctcgtgatattactgtactcaatcagacatccgagtaaaaattgatagtcgcttggattggctcctagatgcaacattcaatctcgagcgtctcaatatattacgggactcattcagacatccgaatagaaaggtatcgtccccgaattagcttagagcttcaacattcaatttcgagcgtctcggtatatcacgggactcaatcagacatgcgagctaaaagctattggcgatcgaattggctcataccttacacatacaatttcgagcgtctcaatatataacgggcctgaatcacacatgccagtaagaaggtattgtcgcatga

SEQ ID NO: 24288 - DNA, 258 bp, Glycine max
atcaaatcactcctacatctcatctctaacatgcattttctttctttacccactcctcacgtttggttttttaaggaaaaacaccataactaaacgcgccgcaagggatccctatcgcaccagatccaaatttataacgatgggtgatcaagaggagacgcaagaacagatgaaagccgacatgtcggctctgaaagaacaaatggcctacatgatggatgccatgttatgtatgaaacagctcatggagaagaacgc

SEQ ID NO: 24289 - DNA, 151 bp, Glycine max
tgtgacagacgccgctttgagagcgctatacaccaccaacgcttcgaggacatcaaaggatcgtcggatctataggatcgacgcagctctcttacggactacgactctccggatatagccgacgagataagccgccgggatggggcatcac

SEQ ID NO: 24290 - DNA, 338 bp, Glycine max
agcttatggatggaatacttacttgttgatgatgaacaaaaacgcaaaatggaatcaaaaaatgcgaaaaaggatgaccctagggctgcaaactcgtcaatcccgtgggtatggcttttgaaaggggggaagggaagtttttgaatgcaaaaacgccccccctttcgtcattcttatattttggtgcagaggtggctcgcccaagcgagctcagctcgcccaggcgagctaacctgcaccccccccttttttttttttttttttttttatttcgaggggaacattaaccatgtcccctgccttatcagggattagcattttgcctaacttgaacttac

SEQ ID NO: 24291 - DNA, 406 bp, Glycine max
ttgaaggtgcgtagtccaccattttccctagtagaattctggtaatgtgtctactatcattgtcatcgtttttttcgtcattgaggtgccacttaagctgccaggttctctccacctttgggcgtattcttttgaaagaatcgtgccctctttttgcacatgttctatagttgcatcctatccgaagacattatactgacactgcctaacgaaggcaaccactaggtcattccaagaatggactcgggaaggttccaagttagtgtaccaggtaacagctaccccagtaagactttcttggaaggaatgtatcagcaattccttatcttttgtgtatgcccccatcttccgataatgcatctttagatggttcttggggcaagtagtcctctcgtacttgtcaaag

SEQ ID NO: 24292 - DNA, 384 bp, Glycine max
agcttataagatttaaattgcctcaatcatatccaaatatgcatgtgaattaggaagcatcaacaagaatcaagccaaggctattgtgcacgcaatcaatgggacaaaacacaccaaatgattatgatgatggatggctcaaattctcacaaaggtaaactcatcactttcaaattgagctttcaaaactatcatgacatgtagaggagaatcaaggatttcaagtcacaaaatgtcaaaaacttttattttcaaaaaaattacccatttcttgaacatatcctatgattcaaagaaaaacatgcaaagtcgtacatgcacacagaattgacccacaatattaaactaaaaatccgacgaaactaatcaacattaacagaataa

SEQ ID NO: 24293 - DNA, 381 bp, Glycine max
agctttcaacatgttccttcacaaataatcattacacagcagaaaactaacaaaaccacccatcatatctcccaaaaccccatacccacgaaatttaagagagaaagaagtccacccaaacctgaattttcgaagtcccactcgtagccacgcacttcacaatcccgaaaatgctctcctttcacgatttggggcagaaacgggcactaaaggttgaagctttgtatggagctttaatggagaatgagggaggaagaaaggcaacgtgagggagagagaaagctgtctgaaaaaaaagtgagggttgagtgaagagagagaaaagctttttggttttaaataaaaggttttcctctttttctattattttattcaagctct

SEQ ID NO: 24294 - DNA, 523 bp, Glycine max
  unsure at all n locations
ccaccctcgctgccgcattgttagatagtagtaagagtgtaaatcttgttcatgagactacatactatacataactctctcagcgccacccgactttganactccttttgagctctttatacaccacacaagcccgcagcggaacngagaaaaacatggggaataagctcccatttcgaatatgtgtaccatcagacaaagcgagcgcacagcttggagaaaggagcataacaactggttctccctttttcgcctcagctatgtgctgcataattggatcaaatgccttttaaacattccacaataaatctttaatcccacgaagggaagaaagccagcattaacacttaacaatggactctttcagaacaaaccaacattttccatttcacaaaaattgtcaaaattaatttgaaatcccaatggattaaactttctgccctcactggaactcggtccaatactacattaagagaactacatatgcccgacatttaagaaagctaaaaagtcagtccggacg

SEQ ID NO: 24295 - DNA, 384 bp, Glycine max
agcttgcttgtggagcttctatggaggctggatctttgagcttcaatggggtcctttaatggtgattttccaccatggagatgcagcggaagacaaaggaaaataggtgagaggaggcgccatccattaaggaataagccatggaagaaggagcttcaccaccaagatgagccttggataagaagcttggagaggatgcttcaatggatgaaaagaatgagggagagaacgagagaggggggagcacgaaattgaaagaataaaagaggtatacaagtggaactttgaagcatgtctcacaagactctcattcatcagagttacaacacgtgttacacatgcttctatttatagactatgtagcttccttgagaagctttattg

SEQ ID NO: 24296 - DNA, 394 bp, Glycine max
tcttttctggaaagttccttccctggttggtgttttgtttggtattaggggtggtgttaggccttggatgtgcatcgattggattttgtggccgatttggcgatggcctttgtggatgattgggcgttcatggctggtagggtggtgggtaatgagaaggactgatattggccgagtattgatattgttgggctaatggaaaatttggccatgtaagaatggtaggcacaacatgagtttctccctccttcttattctctctattttccgcaggctctctattcatcaaagcaggataatcaaatttgccttctcttagacccactttgatccttatgtcggccaacactaaatcaacatagcttgaaggcatgtacaccaccatcttctcata

SEQ ID NO: 24297 - DNA, 255 bp, Glycine max
catctttggatgtgtatacttacctgttgatgatgagcagaaacgcacaaaggactcataaaatgcgcccaaggatgaccctatggctgctaactcgtcaatcccacgagtatggcttttgaaaggggggaagggagaattttgaatgcaaaaacacaccccctctcgtcatacttatattttgatgcataagtggctcagttcaaacgagctcacttcatacttgcaagctgacctgtagcccactctttatta

SEQ ID NO: 24298 - DNA, 390 bp, Glycine max
tgagagacctgtctgtcctcctactctgctgccattgaggttcatgttttggttcgcacaggctcgatgagttcccattcgtgactgctgcgatttaggtacgtggctgtagaagcaaagcttcatgatgaatcaagattgattcaaagatgttttgatgataacaaaggtgatgacaaatagctcaaaggtcaatcaaagaatgagttcaagatgttcaagatagaatcaataacacttcaagattcaagaggaaagttgatttcaagaatcaagaatcaagattcaaggatcaagcttcccagaatcaagatcaagattcaagactcaagattcaagaatcaagagaagacttaatcaagacaagtatgagaaggttttttgaaaaac

SEQ ID NO: 24299 - DNA, 373 bp, Glycine max
  unsure at all n locations
cttttacacttcctcatctcaagcttgtaagattatggggtacccatcacatgtggtactangtggcggtcgggcgatggtgcacaacaatttttccacattcacaatgcgtgcataaacccaccatcccctgttgcccacctacatctgagctcacgtactcccacgtaacccatatcctaggttgtctcaacaccgggtccccatcaatcctcccaagcttccacaacatccaagcaaaacaacattcaaacagcacaagctatcacagccaagcaaaacagagcaaaggcagaaaactctgccaaaacaccaaccaaatcacagcttttctcacttaaagaccccagtaacaattccttcgttccaattc

SEQ ID NO: 24300 - DNA, 379 bp, Glycine max
tgtctttggatatgatttatacatgatttaggacttgtatgatccaatttgggcaaatttggatgatggtaagggggatttctaaatcttcccaatttgtgcagcaaaaagctgtcaaattttgtgcagcaaaaaattgtgtttgtgcaaaaaatgttgtgtattgctggttgtggaaaggggagtacatattgggttctggacgctttctagcagatcccaacggtcaaaatgtagacttatgtactaaggacctccaataaaaattttgagtcgatcctgatggaagcttgcttgtgaggcttctatggaggctggatctttgagcttcaatgaggtcctttaatggtggttttccaccatggagatgcagcggaag

SEQ ID NO: 24301 - DNA, 319 bp, Glycine max
agcttgtcaacgtatatataagacgctcccaaggattataacaagaacatcactgagcatcaaagatcctagtatgaagcttgtgtaattataatctccaatacttcggcggagatgtgaagcatttcataaactttaatttcttatgtcaaccataagattaattccttattcaaaacttattcatatctaatgacttaaatctattcttttaaagtagcgttttgtgaatattgaactcgatgaatgcactcattagcaaatggctccataattcatattcttttatggagcacaaacgaaatatacatttctatat

SEQ ID NO: 24302 - DNA, 235 bp, Glycine max
  unsure at all n locations
gccctatagtgagtcggattacaattcactgggcgtcgttttacaacgtcgtgactgggaaaaacctgggcgtacccaactaaacgccttggcagacatccccccttcaccagctggggtaatagcgaagaggcccgcaccgaacggcctttccaacaattgcgcagactgaatggcgaatggcgcctgaggcgnatatttctccctacgcatctgtgccgaatttcacaccgcg

SEQ ID NO: 24303 - DNA, 382 bp, Glycine max
tttgcaagcttccccaacatccaggtaattcaacatccaaatcatcacaaactaataaaccaagcaaaacagggcaaaggcagaaaactctgcccaaaactcaaaccaaaatcacagctttttctcacttgaagactccaataacatttccttcgttccaatttgttaaccgctggatcgactcgaaaatattactggaagtctctagtacataaatctacattttgaccgttgggatctactaccaaacatcaagaactcattctggactactctttccacagccaaccacacacaagcattgttctgcacaaagccaaaattctgctgcacctatttgacagcaaaattttgcataagtgcagattgtcaaaaaccactc

SEQ ID NO: 24304 - DNA, 394 bp, Glycine max
ctatagaaggttcgttcctaatttctctacaatttcatcacctctcaataagctagcgaagaagaatgtggcatttacctggggtgaaaaacaagagcaagcctttgctttgctcaaagaaaagcttactaaggcacctgttcgagctcttcctgacttttctaaaacttttgagctagaatgcgatgcctctggagtgggaattggagctgtttttgtacaaggtgggcaccctattgcttattttagtgaaaaactccatggggccaccctttacttacccccctattataaagagctttattccttaataagagcactccctacttgggaacattaccttgtctacaaaggatgtgggcttgatagcgatcatcaattccttaagtcattt

SEQ ID NO: 24305 - DNA, 395 bp, Glycine max
  unsure at all n locations
ntgaataattgttgccaaaatgtgctgataaatattctatctttgtcagaaacaattgtttttggaaaaccatgaattttgacaatgttggcaatgaaaacttcagccacaaccttgttattaaactcaaacttcaaagggataaagtacccaaatttggacaatctatcaactactgtaaaaatggttgtaaatccttgtgaaggaggcaattaaacaataaagtccattgctatgtcttcccatatttgttgaggaatgggaagaggctgtaacaacccagctgacaaaacatgatcaactttagcttgttgacatatggcacattccctcacaaatttactaatatcacttctcataccattccaatanaattgagcaccaattctagctac

SEQ ID NO: 24306 - DNA, 321 bp, Glycine max
tgctttaccggatgacgccgatgcgagcatttcctaacctacgtcctgcaaagttcggtcagggatcgaattgatatctcgcttgcgacatctgtcgtgaattatctgccgatattattcatccgacattgcacgatcctatctagaaactgtgtcaaatcgataatggttttcttacgcacaagtcatactacccggattgctgaagcataaaagcctgacgaggctcttgagggagctttctcacgctagtgcaaccgactcactgcccccttacgaacacgatacctgcctgcgcactgcattatgagttaaccgact

SEQ ID NO: 24307 - DNA, 385 bp, Glycine max
  unsure at all n locations
agctttcataagtgaagtcaggtgcagccatctccctaagagtcctctcacgaggtagagtttgagccatgttctcaatatgaaaattagcagccgaatgctcaaaatcagaatgttcagaatcaccagcaacaaaatgctcagaatgcatggaatgctcataatgctcaaaatgatcaggatgcacactatgcctaactaatctatgaaaggttctatctatttcaggatcaaagggttgcaaatcacctggattgcccctagtcatgcactatatgcagcaaatcatgtatttctcaaacaagcaccaggggtaaaaaggggtaaaactacaactatactctaacgatattgaaatgagctgaanatttgtgagcaacaccct

SEQ ID NO: 24308 - DNA, 404 bp, Glycine max
tctcccccaattttctataaatagggggagaagtgatgtgaaaaagggttcagccccttaggcacttctctctctttcgaatttgcttggaaaaattgtttccgtgaagaaaatccaagccgaggcgcttccgtaacgtttccgtgaggaatttcgcgaaggtttcgaccgttcttcattcgttcttcatcgttcttcgatcttcaacgggtaagtacctcgaaccaagcttttcgattcattctatgtacccgtggtggtccacattgtgtttcgtgtatttttattctcgtttcatttactttttatacccccttttgacgtgcttaagccattttatttaagtcatttctcgcttaacctacaaataaaataaatttccaccgatcgtttgaattgtatta

SEQ ID NO: 24309 - DNA, 463 bp, Glycine max
  unsure at all n locations
gaccccanttgatgccttggatacccttgagaaacccagcnaantctagctgagacccggagtccacctgcgggcacccgagcttgtgctagatatcnataagcactactcggctgcaaggaagatccgttagaacctcgaagcttatcaaatccttatagctttaggcaatggggtatgacacaagttaagtttttgttcactgtaaagtggaggagcgagcacagctcatctgtgatcgaacgaattactgcgacctgattaggtaaacagcactacaatgccatatagtagaagttgaacacgacagctggggttaaagcagaggagaccaacgaattgcacaatgtgaaaatgacaatataatgtagaaggagtgtttctacctgtagatgagcttatggatcctagacgaacactagacagattcttactgggagaaagccaccagtaacactgaact

SEQ ID NO: 24310 - DNA, 404 bp, Glycine max
tgaggagcatatagcctaagatattcatgttaataattttacatgagtatgagacaataacaattttaaattattcatttatttttatttttatttgtctctttttatcacgtcataaatcttataatatttatatttgttattctctcttcatgtgtcttattcaagtgttttatattataatgagtatcaataaaatatttttatttgttatataacaacaaatctaatatagataacattcccattaataattaataactaataataataaagataaaactgacacaaggcacatagtccttagaaataaaacgtctaaacctaaattgaaacaataacttatgcaatgattcttcattagtcaagacacagagaacaaagaacgtaaacttgaacatcat

SEQ ID NO: 24311 - DNA, 383 bp, Glycine max
agctttcaccccataattcccccaaatttgggcaaatttgctttgaaccaaaatttccttttatgaatgatgctcccctacaacctaagacaaggtagaaggagataactgtacaggctcaaggttcaatcaaacaatcatactttcagctcaaaatgggtgcaagggataaatcaatcatgcacaaggtaagctttttagctacgtggctatcttcaatcaaaacttggccttcatcatcttcaatttcacgcattcattccatactcagagattcatgcaaaaaccattacttaatgttagtcgttctctcacaattaaagatcacactctcaccgggttgtggctaatgcgttctttcacaatcaaactgtcaaactgac

SEQ ID NO: 24312 - DNA, 317 bp, Glycine max
  unsure at all n locations
tccttattntcaatagggaattctatctatttatctcccatccttaatggaaaaggttaccactactggaaaactctaatgcacatctttattgaggctatagaccaaaatatttgggaagccatacaaagacggccttatatacccaccacagtagaaatagttacaatacatggtccctcatctagtgaaagcgtaactatagaaaaacctaaaaatagatggtctgaagaggatataaaaccagttccatacaacttaccagcgccgaacataataacatctgccctcgaatggatgaatatttcacggtttca

SEQ ID NO: 24313 - DNA, 384 bp, Glycine max
agcttatgaagaattgttgacaaggctaggtgtcaagcacctcgtgacttttgtcaaacatccccagaccaacgattaggtagaggcagccaacagagtcatccttaaagccttgtgcacaaggcttaacaagtccaagggtttgtgaaaagaaaaacttcctagcatactttgagcataacactgttcaccccagtcaacaaccaatgaaactcattttcgacttacatacgacacaaacaccataatccccgtcgaagttgaggaaccatcaacaaagaggttgtttttccaggaacaacaaaacaaagagaacatgtgggtggaactagagacaatggacaaactccaagagatggacagaatcaaagaagatgccaccaa

SEQ ID NO: 24314 - DNA, 325 bp, Glycine max
tatcttctaaacactgcagccttcacgttatccaagcctattccgccagcttcaatgccgcaacctgaacctattccgccagctccaatggcgggactgcccacgtatgcatgtcctgccaagaagaatggcggcatgcactgaagccacttttctcgctcctactcagccctataccgccagacgaatggcgagttaagttgagttaccccctgtcccccaaatgctaatagcggcattacctgtccccccattggctctggcggttccaaacttcacgccattgataatggcgaacaccacttaccaaagagacccccctgga

SEQ ID NO: 24315 - DNA, 383 bp, Glycine max
agcttgccattagttaacactgttccattataattaaccgaagtgtcaaacattttcattcaaatcttgttactattactattttaagcctcccctttgttttcattcaaatcttgttactaaaaactataaaaactacaaaaacaaaggtcaacatgtaaatactatacaactaggcaaacaattttacctctttttgttcaagtatcttatccaattctttgagctctttatccaatttttcttgaagggatgagtgttctagctcctttgtgtcttcttccatttcatctacaaacaaggtacatacatttaaaaaccatcaataattaggataaaatgccaatgcacaaagagagaaaaatgaaaattaaggagcccaa

SEQ ID NO: 24316 - DNA, 401 bp, Glycine max
cttgaggagtttattgatctctgaataaaagagcctctttttttggtgttagttttgtttcaaaaccaattcaatgagacctttggttgtggtttgaatggttcaattggctaacttgatggttcaaccaaggacaaaccaaacaacattaaaagataccaaaaatctgcaactttggttaaaatgtgatcttgaatcttcatttctgttatattgctaactcatctcatgtatattaaacttgtatttcacaaaccttgtcttacaagctacactacttaaccggaaatcctttgatcctcaaacatcacaatggttttaaaaatagtataagtgttaaaacaccactttggaatctaataatgggcttgtgtagttgctgaaaccttcacatctggctg

SEQ ID NO: 24317 - DNA, 350 bp, Glycine max
tcaattcaaatctcagagagcgaatcttgggttattctccttcacacaaaggttacaagtgtctagctgttgatgacagaatgtgtatttctaaaaatgccatcttcaatgaaaatagctccccttatcctaccctatttcttgagccattcttagcaacttgaggttcctaattctacatccacccttactgtgttaccttcctctcagcttgcatcatcatctagtaacacaaataacaccttatcctcacttcatctcattcatcatctgtttcacctgatcacagtgaacagcatgcagcttcctagcacttttcattcacaacccttgaatgtcactgatataga

SEQ ID NO: 24318 - DNA, 373 bp, Glycine max
agctttttataaatcactactaaaatctaaagatgatctgaagttcaaccaaagttctcagtcgccttttttcttttggccatgttcttatttacgtttaatgtttttgtagactgtgagtggaaggcgcacgccggtaacatatgtgttgcatcatttgattggagctgcagtggaatctgtaagtcagtggagaagattaaatatgtccactctaagtgtggtgaaggaaatggagcagtttggagtgctctatcttagattgtttctaaaagggagatggttttttctggttgggagaggatataattgcagctgggacaaagacaaagacagttttcagatttgagattgagcacataggtataacatg

SEQ ID NO: 24319 - DNA, 402 bp, Glycine max
  unsure at all n locations
taggtcagtctgactgtgacaatccattttattataatgaagcatccattcccaatgcaactgaaatggtaattttatttctgaaatctattttcctttgattctttgagtgattaaatagtattctaatacctaattctggatgattgaatgttttaagtgtattacaaagggtctgaagtttgttttgggatttggtatttagattagataggctaaattttacctgatcatataagtttgatacctaattaacgactcaatactatccatgctatgtatatttgcctgttcccatttgtttctttgtcaaccttgaacaacatgactaatgttgntttcttcttttctctccttctgatttctgttaaccctctacaagaacattgttatcatttttgc

SEQ ID NO: 24320 - DNA, 381 bp, Glycine max
tatgcaagcttgaaagagcccgggtagtcaaagagaagttcaagtctatagccatcaaagtctgaagagagtatgaagaactatgggacgtcgatatggccaccgatgaagccttgtaatgggaaaccaagaaggcccgaatggaagaacacaaccaaaacaaagttttgaggggctttatagggcatcaatagtgagctcacgctccgaagaggtgaaaggaatcatcacgggtcaaaggcatgatcttgaatgacgagctaaaggcttgccttatgtcgaaaagaaatctgtcccaacagttaagcgagactgtaaggaatatgtgggccatcatcgatgagtgcaaagagaagctaaatctagcagcgactcatgagc

SEQ ID NO: 24321 - DNA, 341 bp, Glycine max
ggaaggggcacccatatttcccactcccagtatctcttctaacaaaatcattcttcctacacctatattgaccattcctttcacaaccaattaacacatatgaactccttgctctactactaatcaaggtgtgagacctcataatgattgcaacaaatacattttcatgagcaactgatcaagcccattgcataacatcatctcggataccaaacacctataatgcaacctaaacaattttagtcttctacaacacattcattttatcaaatccctcacaataatgaacattattactcgagaagcattgaacgcattcgaacaatcaacatgttgttcat

SEQ ID NO: 24322 - DNA, 381 bp, Glycine max
tgtttgcaagcttaatcccctgagaattgagggtaggggatttgccctggattcaactagggattactttccttatcacccttatgttcaatatgttcgataaataaaaatagtgttttcttttttgatatgtgcatgagagtttcaatgctagttgtcacacaaatgtattacacaaaagtacctatcacataaagagtggctatgcaattcagaatgcatcaagaagtctaagattgcgtggctacattctttggaaccaaaggcattgcatggaaaaattactacatacccatatctaacgggaatttctatttacctgcttgccttttgtgagggagatgtcaccacatgttatgctagatggtggaagtaccccat

SEQ ID NO: 24323 - DNA, 550 bp, Glycine max
  unsure at all n locations
tctacagccatcattantattctanantangtatttattagnagtactgtatgtatctcttgtaatagcaccgantacgccantataccacccacacatagacacacacnccgccncttttgaaccctngttgaataccgttgctatctacgcgacactatanaatactcaaacttttggcggttagaatggaggggcccaagaataccctgtgttaaccctgggaaaaccggaaccatgccataggccttgcactgcaggcagacttagtccagcactgcctttcttcatgtgattatcaatgattacttctggggcactcacctcctgaccctctggtttctgattcttgacatcaagaaaaaataaatgctggattacaatcaccatctcttttatctaagtgtggaataactactatcttccattcatttccctaaaatatcatgaaatatatctctctctattcctttaatacctgttaaaatcaaagaataagactaaatccgcctataagaatttaaaactcaattcacctgaaataccctcc

SEQ ID NO: 24324 - DNA, 375 bp, Glycine max
atcttctatgtctctcccagtggggactgtattcgatcaccattcaattctaacatgtcattagcctcagtaacttaacataacataacattaacagccaccaactcatcaacaccatccatctctctctctctctctctctttgagtgacattagcttcgatatgacaggtattaattcacatctatttggccatcatcccggtcaaaaagagagaataaatgacccattatcatttattatttattaatctactttaattctatagcagtactagtattcctatagagctctcaacttgatatttagagagcaacgtcactggtaaatcttttcctttatcaattctttattgggtgggtaggtatttctggg

SEQ ID NO: 24325 - DNA, 279 bp, Glycine max
gaccaagaaataagcttgtctgttgatatgcgactttattgagtttttcttttaggacgaaagcaggctttataccaaggcatgaacattgacctcctttgtaatcaatgagtacatgactgatatatcactccttaaagggtaagatatcataaaaaatctctgtgtgatacgaacattattgatattacacatctaatttatatgtgatgtaatgatattacgaataataatataagttgtgaaaaaaataattaatttttatggaacgattactct

SEQ ID NO: 24326 - DNA, 508 bp, Glycine max
  unsure at all n locations
acaaccgccccgaaccaccacatggcaaactgcgatgcatacctaacccccaccaggcnncncttgagccctgaagcctgaagcacccggcncannngcgcggccccggggccccacagccaacagcagcccgcagcctgcagaaacccaccacggccatagaggagcgcgagggcaaccacaaagacccaaggccccttattcttctgggcaggcgcttagcgacaaacaacgcgtgcgcagactaagaaaggaatgcgcaggccaccaacaaaaagaggagcgtcagcaaaagagagcggcagcggaagaagccacccaccggagaagaccaaagaggatcgcacccaacgcggtggcggaaaagaagccacacgcagcgctccattccaaagcgaacataagaaggagatagagggccgcgcttggaagaagagaaaacccaggcggaagggagacaaacacagtcatcatattggagaacgagcgaccgcgataacatggatag

SEQ ID NO: 24327 - DNA, 371 bp, Glycine max
tataaagaagtttggcagttcttgccttactttttggttttgtgggattgaattaatcaattacgctctaagtccaaattctaagatggtattaaagcttatcctagatcaattgttgggctacctacatttgccacgctctatgctagtaaccatgggcgtgagagggggtgatgaaaagctgccttaattgtggtaaaccctagcagggccggccttggtggttgttttccgatgcgaccgcccagggcccatgactaaagggggcccaaaaagaaatctagatagctatagtgtgaggaggaaaaaaaattcaatgacttttagtggcaactctatctcgtcggctttctaatactcctttaattctt

SEQ ID NO: 24328 - DNA, 368 bp, Glycine max
agcttaagaaatagaaacaatgataaacatttatatctaacattgataaatatttatcatttaaaatcacatacaacacatcatttatatctatgcacaatataaacattttaaaatttcaaaataagatttcacaaaaaaaaaatatcagaataggacaatgaaacaaaatctgatttggttttaggacaacgaaaagtaacaattccataagctgaaaatttaagctttaagaaaaggtctactgagagcttttacttttgtaaaagctaaaaaaaattaataagcaaacactcttaagaaataaagaaaacctttttttagaagataagatgccggaaggtcttttgggttgcatccaaacggat

SEQ ID NO: 24329 - DNA, 340 bp, Glycine max
tttaactgaatttgcaacgttccaattgctttttaaatggtgtaatcgattaccagtgcatctgaacgttgaaattcaaattaaattgtgaagagtcatatcttttcataaaatgctttgtgtaatcgattacatggttttggtaatcgattaccagttacacgttttgaatagaaagtcaagagatataactctttcaatggttttcagttctttctcaagggtataactcttccaatggttttcttgaccacacatgaagagtctataaaagcaagaccttgacttgcatttcaaagagacttacaactcttacaactttttgaacatctctttgaac

SEQ ID NO: 24330 - DNA, 380 bp, Glycine max
agcttgctcaatatgtgtttactacaaccaatgcatatacctattcattgctttgaactatcaaaacatattcaacctaccttgaatataatattctatgagtagcttttgaagtagtgtataagagtatttttgtatggttattattgaaaaactattttatgaaaaggatattgttctctctcaacaactcttcctgaaattggatctttgatatatcttacaacttcaaatgttgaatgctcttttgcaagagaaaagtatcatagtcaattaagtgtcactattcaacctcattttctagtgaccttttgatccacttcacttagctggtgtaattgattgataatgtatgaatatgcccaaccttataaagactt

SEQ ID NO: 24331 - DNA, 427 bp, Glycine max
  unsure at all n locations
ctatacacaactcaagctttgtaacaatccaattttcaccttatagaaatgaatcttttatgtcgtctggtgtattntaagaggtttaatcattttaatatttttaataaaattgaaattataatttttttaaaataagattgtttggtatgaggaaatcaaaatgcatgcaattgaggttatgtcttgtttgatattttaagcatactaacttttgatgtgattgcgaaaaattatacatatcttcgtccttaaatataacattatattaatttggtttgtctttttttataaaagtctttctaagttgacttttgcattaatttttttacccagatatccttagttattctatagtacatgttatgtactactgaacagataaatgtataatatctcatcactactataaaaaagatcttttaca

SEQ ID NO: 24332 - DNA, 429 bp, Glycine max
  unsure at all n locations
ttcttgtaatccactcttttctgtcctcattcacacttattttttccnccccaagcgcnnttgagcctgaacctggcaaccagccagccggatccgaagaccaccgcagagcagctgtcaaatcttaaaaaacagaaaggcggctcacatgtcggtgatgacatccctcctctggctgaagtaagagacttgatctttaccaccgtggggcgcaaaggcaataacttgatggcatcactgcatgcgaaggtatctgcgctgactatcatgtgacatattatgcagctgtggtacgtagcctgactacaccaattaacatgggtgatgctatgagccatttacaagcttactcccacatgagggccctaggaatgaacaacatcctcttgtatgcgcaggacaagtgcctgaccaattcaatcgtgcaag

SEQ ID NO: 24333 - DNA, 418 bp, Glycine max
actcaagcttataaactttctgcgatgaaatctaacaaataatattttttattcatttctcttattctcatctcactttgttttatgaccacaacacagacaaggagtgaggcatagtcttaaaaaattaaaataaaagatatatggtacgtaaaagttaaatagtatgcatattcggctaaaacataataataatgtagtttataatgttagtcaaggaataaaatagttcaattgtaaagacaaaaagtaggcatatggttataataagtatacatgatatttttcgctatatgttccgaatgtgaatggttaggatgatgaactaatttatataattaaggggtgtgtatcttctttttcacacaaagagatttaaattaaaattctctattatttaattaaattcctttgatat

SEQ ID NO: 24334 - DNA, 375 bp, Glycine max
agcttgccttgccccttgatatatttgagggactcatggtcactatgaatgacaaattccttgggataaaggtagtgttgccatgttttcaaagcccgtactaaggcatacaactccttatcataagttgaatagttaagggtaggaccacttaacttttcactaaaataagcaattggatggccttcttgcatcaacacagccccaatcccaacatttgaagcatcacactcaatttcaaaagatttttgaaagtttggcaacgcaagtatgggggcattagttagcttttgcttaagaacattgaaagcttcttcttgtttctctccccatttgaaaccaacatttttcttgagcacttcattgagaggtgct

SEQ ID NO: 24335 - DNA, 382 bp, Glycine max
tcttggcaatcctcattccagcgatcagtttggtttttgcgtaagagtttgaacaacggctcacaaatggcggtgagctgcgatatgaatctggcaatataattcaagcgtcccaggaaacctcggacttgcctctctgtacggagttctggcatctcaaggatagccttcaccttttcggggtctacctctatccctttctggcttacaacgaaaccaagcaatttccctgatttgaccgcaaaggtacacttagcggggttcaaccttaattgatatttcttaagcctttcgaacaacttccgctggttgacaaggtgttcttcctcggatttagatttagcaattatgtcgtccacgtagacctcgatctcttgatgca

SEQ ID NO: 24336 - DNA, 337 bp, Glycine max
agctttgagtagtgacaagcacttattggcacataaacacgtgcccacaaattggtctctctgttgatcataacatctttggcagtgacaccacgttctgatgccactgtgctggatacactaggcacaatctaaggcctttctacacgttcatcactgtggactcttatgagtacttggatttcttcagtgatgatttcacgttgctggttagtgttgtcagcttgatggatgtgcctgagtgaaacggcagccatgttaagatattgataagagtgaaacctcgaattctccttacgtctgagtgatgacatagtggggttatgatttgctcctt

SEQ ID NO: 24337 - DNA, 370 bp, Glycine max
agctctgaaagcatgcgatctttgacacacgatatgtgaacttagaacaaccttgctactgcctcgacagtatcctgcgagacattcggaactcgtgctctctgacactaactgatgacgatgacagcgactaaccacctggaccatggaaggagatacaggaatgcctctcctatattaacatgccctatgaagcttaccatctctagcccctactcatactcgtacaacttagcagcgcatactgatagctagagcgatgaacacaacgcttataacttctgatgtacctcccttgacgtgaatcacgcacatatatctatgaataccatacagactatctaacagggatgaagacctatcatgaatc

SEQ ID NO: 24338 - DNA, 291 bp, Glycine max
actcagcttattatattattgttaccaacatgccgaagttgtctttaatttttattcttaaaacaaatatcttaacaaacatgcctcgacatgtaaattgtaatgcacccacacgcgcgacccttgaatttgtcaaacaacgataaaaacctgatgctgcttgctagttctcggtacatcattctggcagacccatttgattattatggcttacgtatattttagtactagcaatgtaatactgattagctttaattactttttttgaaagtcaaataagatatattcatt

SEQ ID NO: 24339 - DNA, 385 bp, Glycine max
gctatataagctgaaccattttatcttttaagacatgtttagttctattcagaaagatagagtctatctcttttatcttactgagagtgattctcctatattcttgagtgattcaagaacaccctggctgtatcaaaggactttcacaacctttgtgtgttgccctcgctggaaagagtgattctttccttcctttcatcttcacccttgttctttcaaaccacaattccagagaatccacctctgcccagaattatctcgtggccataactcccattgtacgcactcaaattaagtgattcttgagcctatattgaatttcaaaacgagaccttccacctcgttttggaatcacctcatttggagccctgcatcttcaattatt

SEQ ID NO: 24340 - DNA, 539 bp, Glycine max
  unsure at all n locations
ctctactctccgtacgtctctccgcttcacgcacgatttgcgctgaatcttagattaaatcttgntacttcacacccacaacgccacacctgantctttgaagcattgatccctcggcgaatctcactcgcgcccggagatcctctagagtctaactgcaagctatcttatcttgataagacgaattgaaaaaggcgaacttcttagtactcttgacacaatacggtacctgaaatatgtcgcgggggtcagaaaccttgtggatgtcatggggggtgctattacccatatccaagcatgaccaatcctgacccaacccggacatagccaagcagtgagatacctgcgatgtacctaatcaagcagagcgtcttgtcagtcaacagataaaacgaactaataccacaagcatggaggcttgtgaggtggctggccaactgtcaatcctgcgtgatatatgggttatggcctctggtactcgattaccatgggtgggttatcgattacacgactataaatgaagacaggaggttcagacg

SEQ ID NO: 24341 - DNA, 281 bp, Glycine max
atgctattcgtatcttgcgaagggacatgatcattttagcgatattcaatccgagaaaatccaggcagagacaatcaggtaactgtaacgggcccaatttgttgcgcatgtcattttctgctttaagtacttggggccggcactaggaggctagccctgatcaacagatgccatttcacgttctacaagcggaagcgctatggaggcacctagttcctttaatccctacttatttagtgttgttctttaggtgatggcggatcctaattacctagggcttt

SEQ ID NO: 24342 - DNA, 355 bp, Glycine max
gcgcggtttgcatgcttcacaacacacatacagaggcccatcggggaatagaaagacgctgtcactgacaatatagttagcgcaacggacgacgtgaacaatcagcctatacctagcacacataaccatctactgtttaaaatactagccctcaaagctaaaagtctggataacaatacatgcaagcgtatcatgtgatcatctttatttacaaaaagggattctattcaatgacctaacacctcaacccctccaggagaatacgaaaagcgtcggatccgaagcactttgaaattatttcgccttcggatgcatgatactgaggcatggacatacatggggcacaagagtacga

SEQ ID NO: 24343 - DNA, 374 bp, Glycine max
agcttatgcattgctgcttaataaaagaagagaaggatggtaagccttggtacttcgatatctaatgatatagcaaaaacaaggaatacccgcgggaggcctctggcaatgacaagagaacattgcgaaggttggcggttggcggttggcttcttcctaagtgggaatatcctatacaagaggaaccatgacatggtgctatttcgatgtatggacgtcgaagaggctaagcaaatgctggtagaggtgcatgaaggatcatttgtaacacatgccatgtcccggaaaattctgagagcgaggtattattggctcactatagagagtgattgttgcatccatgtgagaaaatgccataagtgtcatgccttcac

SEQ ID NO: 24344 - DNA, 524 bp, Glycine max
  unsure at all n locations
ctcccacaacactatatatgaaattaaggtcantcgtatctcgattctctgcgccggcacaaactcccacgcccgacgcccctggacccccgttgaaaccgttgctacaaccgcgacaccatannaaactcaagccttgtagatatagtggtggctagtgagatgatccaattttctttgtgaagaagaaaattcgattatgctgctttcatgaataagaagcctgcgacccatggacagaatcataaggagggggaaacccatgttgtgactgttgctcctacatggccaaattgcccactagctcaacacatatcaatacctagccaatatcagtcctctttattaccccccacccctccagccaagaacacccaatcattcccgaaagccaacccctaattaaccaccaaacccgcctggttgccctttcaagccctaacaccaccctttatatcgaacccactacacccaaccacggaaaggatatttccacaaagaaaccttgtagaattcactccctc

SEQ ID NO: 24345 - DNA, 374 bp, Glycine max
agcttgccttttagaggtccaggaaggacaaggcggcggaaggaactagttccgctccggagtacgacagtcaccgctttatgagcgctgtacaccagcagcgcttctaggccatcaagggatggtcgtttctctaggagcgacgcgttcagctcagggacgacgagtatactgatttccaggaggaaataaggcgccggcggtggacatcactggttactcccatggccaagttcgatccagaaatagcccttgagttttatgccaatgcttggccaacagaggagggtgtgcgtgacatgagatcctgggtaaggggtcagtggatcccgtttgatggccgatttgcttgacttcttgggagggagtggaga

SEQ ID NO: 24346 - DNA, 370 bp, Glycine max
  unsure at all n locations
tctatctagccaagatcatacaattgtgttacaacatttcctcacggnatctaattatgtgggccattaaatctatcatgtgttgacagtagttgactagcccgcgaatttcctctaaggctgaacatacttcggcgatggcctttgctttggctagtagacgcaggaggtcttgacttccatttaatgtcaaggcgaacctatccatccacatgtgtgcttcttgatgcaatgcatcaatcacccttcctcttgcttccttctcagcgcacgcttgggccaagtcctctactaatatttgttcatgggtaaaagactggtttaactcttctttgtactgccctattataactagcatgctttgcttcca

SEQ ID NO: 24347 - DNA, 547 bp, Glycine max
  unsure at all n locations
tcgcgtacacacgtcacanacatcncagtactgtgttactactgctgagacgactagctcgantttaacacatcgncaccactacacacgagaagagaacgttttgacacctggnagcttgaaacatagtagcgcattcaaccgctcacggcgaaccatcagagccgaccggcatgtctgcacgcttcagcattgacggcgaattaaagaagagaaggatggcaagccctagaacttagatatcacacgatccagcaaaaacatggaatacctgcgggaggcctctggcaaagacaagacaacatggacaaggcctgcagaacgtgcgaaggcatacccacaagcggaaacatccataacaagaggaaccatgacatggcgctacacccacgtatggacatcgaagacgtcaagcaaagctggtacaagggcatgaaggatcaatcggaacacaagccatgacccagaaaatcgcgaaaccaagcatattggaccactataacatgatcgcagaccaagcaaatacgccatagcgtacgcctaaccg

SEQ ID NO: 24348 - DNA, 385 bp, Glycine max
agctttgtcatagtgcatgtgaatcctaggaacacactcttttaaacaccctttctctaattggttaaaatctattgaaaactacaaagttgggagaaaatcattaaatatgatgtaggacccacaaaattgtcagtttcaataaatttcaacttatgagagtgtgttaaaaaaagtgttgcatagtgtgttcccaatatttctctgcttggattactgtcactctgaaacaaaataatgtgcagcatggctgatcaaaatgtggttttaggtagtggagcattttgtcgccagtaagctaaatgctggtgatattccaatttagttcgttggtaatttaagtccatgtattggtttagtcacttggttgataattttgaagtac

SEQ ID NO: 24349 - DNA, 407 bp, Glycine max
tcacattgtacaactcctgttacgattaaaacgaccattaaattcaaaatattgccaaaaacaattaaataaagacaaagcgaaacgaaataatttaacttacttcttcgagcaaaactttttgtttcttcaagtcttctatactttcaagaaaaaattcttccttgagtttcttcagttgacacaaaacccaaaaatcatataaaacatttcgaagaagaagaaagaaaaaagcacagccccaaaaccctaaaaaaaatatagttatgtaaaccattttccttttggtttcaatcaaaaaaggcttgtagccggcgcggaagagaatgtatggggcggggggaagactttttgtatcagtacaatgcacataaatataattctgatatcatcttctattctcacac

SEQ ID NO: 24350 - DNA, 395 bp, Glycine max
  unsure at all n locations
ctcaagcttgcaaagttatgtctcgtatcggtttaattgattatattcttatcgttatcgattacatagtttttttttagacaatgattgatttatttaggagtctctgctttactcgggtatcatgagatataatcgattacttctctctctataagtgttttagaagtgaacaagaacactttaatcaattactttgagtatctaatcgattacattggtcttgagttgtttccagtttttgggaataacactttaatcgattaaaaagataatctaatcgattacttcattgaattaattgattaccttatagatttaatcgattacaggcagttataactattttctctataaataaccatcttgtgttctctcctanacactacagaaac

SEQ ID NO: 24351 - DNA, 383 bp, Glycine max
agcttgccacttaccagtagaaatggagcataaagcataatgggctttgaagtttttaaattttgatgaggctctatcaggggagaaaaggaagctgcaactcttggagttggaagaaatgagactaaatgcatgagtccttcaaattgtacaaagaaaaagtgaaggcttatcatgacaagaagctgctaaagaaatacttccgatcgggtcaacaagttctattattcaactcaagattaaagctgtttctaggcaagttaaaatctaaatggtctagaccattcaccatcaaggaggtcaagccttatggagcagtggaattatttgaccctcaatcagaaacttcagatagaagctggacagtaaatggccagagattg

SEQ ID NO: 24352 - DNA, 358 bp, Glycine max
tctaaactttatacaagaatgaagctctgataccacttgttagacaagtggcctcagatatcttaagaagggggggttgaattaagatattccaaactacttccccaattaaaaatctatttcactttttattcaagttataaattaccttaataatgaacttcttaaatattgattcaaataaaacaatttgaatataaatataaagcaataataaacaaaggagattaagggaagagaaagtgcaaactcagatttatactggttcggccacacccttgtgcctacatccagtccccaagcaacccgcttgagagttccactatcttgtaaattccttttacaagttctaaacaca

SEQ ID NO: 24353 - DNA, 379 bp, Glycine max
agcttggcgccttaatgtcagaatgaagtcactcatgaagtacgtttcataagagattgtgttggcagtaccttgaacctgattgttaattttacattgaagaatatgtggggatttaaaaataataacacttgtttaaagcttattgagaacgtgaattcaatatcaaaatattaccacatttaatcttgctaaaacacctatagactagagattagagattaattcacatttcacaatcattgttaccaactcttggactgcttgtggattgatagaaccaatgtaatgtaaaggcagaaagaacttgcactactaaaaaattactttgttacgacgcacattcaaagacggttatacataatcatcttagaatgtc

SEQ ID NO: 24354 - DNA, 405 bp, Glycine max
cactatacacaactcaagcttaaacacaattatgcaacataaaatagaagttgccattttatataatatatttaaaatgtgctctctaagttgatacctaacatcataataacataagctgattgcgatttcaaagttctttatactcttagaaaaaaggtccatacactctcaatttctccttttctttcatatcttatgattaagagaacacattctcaaatcaagaaaacaaaatcatatgactgaatcgaatacttatcttctaatgatgtttctctgttcacaaataaaaccaaatggttgaacttagttaagttataatcactaccatgaatagcagaaaaaggtcagtcatcataaattgaattaatcatttttacaccctaagaagtaatcataaca

SEQ ID NO: 24355 - DNA, 382 bp, Glycine max
agcttgacagacttgcaattctcacacctatcgaggttaccattctcgacatcggacaacattcgtccatgcttgggggcttgaaaaactcggcactctcctacttgtcaagactgccacccccggcatcatgcaatctcatttgacactggacaacctctttcgctcgtaagccggctcatagcttgggggacttatgtactgaccagagatcacaaaatacacgagacatcttccatggtactttgagacacacgtaaaccctccatgttagctctagcacaagagcacgggcacctagcccttaagagtcaagcttcccgactgataggttatctctgacctttaattgttataatataatgtcatcccttcatctctt

SEQ ID NO: 24356 - DNA, 409 bp, Glycine max
  unsure at all n locations
ntctctttccctatatattccccttctccttcacctttacctccccaatctgtttctgtacctattaaccagccaaacactaaccacacctcctctgcacccactcctcgtagaactgacagaattcaaactagacccaccaaatacattgactatcaaaccagtttcacatcagccattgttaccaatcatccaggcactaaacaccctatttcttctgtgatttcctataacaagctctcttcatcttatcacagcttcattcttaatgtctctgctaattctgagcctaagtcttataatgaagcctgtaaacatgattcttgggttcaagctatgcatgatgaaatttctgctctagagaggaataatacatgggtgctcactgatttacctcaacataaaaatg

SEQ ID NO: 24357 - DNA, 441 bp, Glycine max
  unsure at all n locations
agcccattgaccttgatgctttgaaaccaggcaanaccagcggagtcccgggatcctctagagggacggcaggtttgcatgtttatataggaacctgagtaaacactcttttaagatccttcttccttgcgttgaacactctgccaattttataaggggagataaaaacgttatattgcttgcacgcgcgcccatatacgagaggaatggagatttctgaatgctgtgtagtgcatacagataaaaactctggggattgcctcatttagccatcggtgcttgctgacacactgagccatacattctactcgtcgatgattgcgtactatgggtgacgagaagctaatacataacatggattgtgactactccctctgtgagaacgagattacaccgtttatgaattaccatggatttaaactgcattgctatgttgaatgc

SEQ ID NO: 24358 - DNA, 104 bp, Glycine max
gattctcccagaattgaaatgggttgcgagttacaactaaccttcttcacattctcggcaaggtcaatcattggaaattcacctgcaagaatgaagtatcaaca

SEQ ID NO: 24359 - DNA, 546 bp, Glycine max
  unsure at all n locations
ctaacactctctcacatttctgancctacnttcttgtgctgggtcatattagattccttancnatttcgaactcancaacctcctcccgcagcnnnntttgatcccttggagtcgttgattcctataaggcgaattcgagctagttcccgcggatcctcgagagctacctgcagtctgcagctttgactttaactttacttactaacgtgacttttaatttctaactcaacaatctatcaaatcagagccgctgatcaataatacgcaaacaaggcatatttctctaactcgtcaggctgtctcacaccatactcattcttgcctatgggaccagaaattgattttttaaacaccatgacgatgataacttctgtaataagatatataaacatgtatttcgttttatcatgtattaacacatattgaagtcctataaactgcccaccacctcaaaatgtacctcacttttgatgtataataagcgttttcatcgacaggaaacagaaacccggatggtttatgccacataaaaaaagcttggcctt

SEQ ID NO: 24360 - DNA, 467 bp, Glycine max
  unsure at all n locations
gtgcgcccccctttgaaccttgttgaacgcgtggcataacgagaccnnntnganaantaagcttatcgccaatccactagcccctactgtaacttaaaatattatgttcacaaagcctcgacgagcttttgcataaattggcccttctagaggaccaccaccacttccgatatttttcttgcacacctacactattcatctccatttctgaatccgcaccatattaaacccgaggtggaggcgctctgatgggtcatacttcctttgggtggaatcttcaagatcacccacattctgttaatatcacctccctttaaagacatgaaatggcccaccatcgccttcttttacatggagggacctgtgttggctttgttacagtggatgacccccaaatggccgcttacctcaagggctggtctccttaagcattggaggctcgtttgtgcccgccacatatgaagatt

SEQ ID NO: 24361 - DNA, 361 bp, Glycine max
agcttgtgtttttggggtgtaagagagcacacaagtgagagcatattaggtgggactccccgttaggccaacacttgataagcgctgtgcgataattgtttctttgtgcctaaatgatgtgaaatgcttgctgataataagtatgtgtattgggtaggtagtaaagcactttgccaatatgcatgggcgctggaaatggcatgaaaaatgcttcttaaacgggaaactatggcgagaaattactctttaaaatgtgaacaagtagtggaaatttctgcctttcccctgaatgcgtaattgcttttcaagtgaatacacatcagtacgcgggcgcaccaccaccaccacctcggcaggccga

SEQ ID NO: 24362 - DNA, 371 bp, Glycine max
agcttatgctgcaaacatttacaacagacctcctcaacctcagcagcaaaatcaaccacagcagaacaattatgacctctccagcaacagatacaatcccggatggaggaatcaccctaatctcagatggtctagccctcaacaacaacaacagcagcctgctccttcctttcaaaatgatgctggcctaagcaagccatacattcctccaccaatccaacaacagcaacagccccagaaacaacaaacagttgaggctcctccgcaaccttccctcgaagaacttgtgaggcaaatgactatgcagaacatgtagtttcaacaagagaacagagcctccattcagagcttaactcgccagatgggacaat

SEQ ID NO: 24363 - DNA, 368 bp, Glycine max
tgccgcccagctcgcccaggcgagctcatctcgcccattcgagcaaggttgcttcctccaaaagcaaccgccttctggaggaatcttctggagggcccaaatgggcctgggtgctatatgcacccccatttttactaagtacacccccctctgctgttttttggtgatacttttttcgtaaagttacggaaacttacgaatttcgtaacgatacttggtttctttccgtaatgttacggaaccttgcggattacataatcatccgctttttgacttacggaatgttacggaacctcacttaattatgcaacgatgcttccatttgatttcccgtgtgtcacggaaacttaccgattgcgcatcaatat

SEQ ID NO: 24364 - DNA, 370 bp, Glycine max
  unsure at all n locations
agctttctctttgcaaaaattcattttttggttggtgtttttggtttgtgcgaaaggtggagttcgtcattggaagtgcggtaaacagactttgtggttgatttacggatggcctttgtggataactgggcggtgggtaaggagaaggtgtgttattggctgagtaaagacattgttgggttggtgggaaacttggccgtacaggaatggcagtcacagcatgagtttctccctcatcctcaccctctgtatttgccctagctntctcattcgtccaagcaggatgattaatattgcctcttttcagatccacttcgatctttttgctgacgaataccaaatctgtaaaacttgaaggtgtgtaacccac

SEQ ID NO: 24365 - DNA, 400 bp, Glycine max
  unsure at all n locations
cagctntttgaatcaaagattctaattatgattgatacaaatacatatttatacactaaaatctttaagtctttgcataataagaatgtgtttggatgagagaatttaaaattttgaaaaatttaaaattctaataatttcaaatacttcaactgaaattcttttattttcaaatttttgtgtttggataaaaaaattaaatttgtgagagagaaagaaaatgagtcgcgagtttgagaaagagatttcgaaaacttttatgttggaagagaagatgaatgtttgttataaaggaaatacagaaactttntagaaggaaattaaaatttcacatttttggttgttaaaattctgttttaaaattccaaaaatttaaattcttcataaaaaatatccaaat

SEQ ID NO: 24366 - DNA, 330 bp, Glycine max
tgagctatagaaatagcccaaacaactccctctagttcatgtgcgaagaaagaaagatatccacatataaaacatatcctccttataaagcaccagagtaatcatgaaataacctaccatatctaagggaaccatgaaatgattttaccaaccttgggtgcatgaatattgatgttaaaagctttgatgacctgaaactcactcaaagaggatctcatacagcttgaagtaagataaccggcccacaagcaacatatgagcaaacataaggatcattgcttgctgctatgagacaaaaagattatgaaagcaggcttgattgtggaactt

SEQ ID NO: 24367 - DNA, 401 bp, Glycine max
  unsure at all n locations
ctttacattcattaatcaacaatttaacacgtatatgatatcaaatttcctttttagagctatacttactaaaatctaaagttgtccctttgtacggtggacgtggccaaagtaagctctaaaaactcgcacgtcgaactgagagtagccctttgttaaaaggacaagaagggggacctgcaaaataaaggacttctgacccttgaataaagtacgagagttaacgtgagaaaaaaatattgttaaaagagtgagataaaacctggtacttatatagtggaatggaagctgcccgtccttattggttgggattgttaccgtgttgtaacaacccctgcagataatgactagcttgtagataattgtagcttacagataatgtgtaccttgtagataattcn

SEQ ID NO: 24368 - DNA, 366 bp, Glycine max
agcttcaatttacaaccatattgttgaagctgttaataaagatgaaggtggtatggtttttctctatggatatggaggtacaggaaaaacatacatttggaaaacacttgcaagttcactgagagctgacaataaaattgtcataatggtagcctttagcgccatagcgtctctgctattgtcttgatgtaaaactgcatattcacaatttaaaattccagattgagtttttgaagactcaacttgcaagatccatcatggaactcaattagctgaactattaactcagacaagtctgatcatttgggatgaagcacgcatggatcacatattcagtgatgaagcacttgatcacagtcttagaga

SEQ ID NO: 24369 - DNA, 377 bp, Glycine max
  unsure at all n locations
ntgagggtgcgtagcccaccatcttttcatagtagagtatcgataatgtgtctaccatcacgattatcgtctccctttccatcattgggggtaccacttgggccgccagatccctccaccttttgggcgtgttctttgaaagatccgtccccctttttgcaaatgttctgtagttgcatcctatccagaaccatatcaaaattgtactgatactgcctaacaaaggcaaccattangtccttccaagaatggactcgggaaggttccaagttagtgtaccaggtaacagctaccccagtaagactntcttggaaggaatgtatcagcaattcctcatcttttgcgtattaccccatcttctgacaatacatctttag

SEQ ID NO: 24370 - DNA, 379 bp, Glycine max
agtcttatgcacatttgagagttcacatcaagtgtgaatgttattgaaatttcactctcaagctactatactatgtcttcctatgaacgagctaattaatgctaataggtactacgcagttataatggcgttaagttttcgttcacaagacacacgcctctgcattgtcatgaatgcactgatctaagtagttatacggatataatggcagaataaatatgcatgtcccaacatcgatctaatctatcaattttattaaatctaatttaaaaaagcactgttcttaatttcactatcatatttatttagttaaatatagttaattaatgtggcaaggtctttgaatacttgctataatgatagaaattataatactgac

SEQ ID NO: 24371 - DNA, 335 bp, Glycine max
tggtagttgatatgaaatcacatgtaagcatcatcaaagatgcggagaaggtaatagttgtgtacttgaggggtgaggatggatgccatcgaatatatcttagcggaaaaagcttcaatattacatcggattataccacgcccagatctaagatataagatgtgggcaacacctacccttgatttaccttgtgaggatgagtgtcatccaaagcccatgttatcgatggcctctacgtgtaatctatatccaatggtctgaacgcgcgtcatgtatcacacacactatattatcaaatgcgctagacttggggcggtgtaaagataaattttaaa

SEQ ID NO: 24372 - DNA, 322 bp, Glycine max
  unsure at all n locations
tgtacattagaatccctctgtcccgtgcaagagatattatcgttgntaagggaaaaaaacaagagaactcaagttatccactctatttttactaagaactacgtagggtgcaacattgcacccatagaataacacatgctagtatataaacatcatatataagcccacgatttataactgcgaaatagcaccttatgcccaagatatttattagctaacttgtgatggagaaactaaaaacaatcacatgtgaacttgtaatagattatgacacatagtaacgttttgcaatcaatctttgaaacatccttatattaatgac

SEQ ID NO: 24373 - DNA, 360 bp, Glycine max
gagttttgctggtttaacattgtgagggacaacatgttgtaggccaatagaatgcgcatccttcaagcgtgcgtaagctgtgatgacttctaatatcctcgatcatttctaggtggatacctaagatgagatacctgagatcgtggagccagagctgatgtgaattccatggttgtcacttctatcgcttacattgtagcaagtgatgaagaactcagttggattatgaatcctgcaaaacgaagacgttgtgacaggcaacgccagaataatatatgagcgcttttgagctgaagacgatgtcaaagatggatgatcctatgaagatccacataggagactacttccagctctatgagt

SEQ ID NO: 24374 - DNA, 381 bp, Glycine max
agcttcaacattcatattttgagcgtctcgtaattttacgggactcaatcagacatccgagtaaaaatttattgtcgcttggattggctcatagattcaacattcaatttcgagcgtctcgatatattacgggcctcaatcagacatccgagtaaaaagttattgtcgtttgaattggctcagagcttcaacattcaatttcgagcgtctcgatatatgaccggactcaatcagacatccgagtaaaaagttattgtcgtttgaattggctcaaagcttcaacattcaattttgagcgtctcgttatattacgggactcaatcatacatccgagtaaaaaggtattgtcgtttggattggctcagagattctacattcaat

SEQ ID NO: 24375 - DNA, 402 bp, Glycine max
  unsure at all n locations
ttgagcaaattcaggcgacaatatctttttactcgtatgtctgattgagtcccgtcatataacgagacgctcgaaattgaatgttgaagctctgagccaattcaaacgacaataactttttactcggatgtctgattgaatcctgtcatatatcgagacgctcgaaattgaatgttgaacctctgagcgaattcaaacgacaataactttttactcagatgtctgatatagtctcgtaatatatcgagacgctcgaaattgaatgttgaagctctgagcaaattcaaacgacaantaacttttactcggatgtctgattgagtcccgtcatacatcgagacgctcaaaattgaatgttgaagctctgaggaaattctaacgacaataactttttactcggat

SEQ ID NO: 24376 - DNA, 363 bp, Glycine max
tgtcttgcaagtttgaagacaccttggagaagttcatgcaagcctcattgactaataagaagaatagtgaggcttcaattaaaaacctagaaactttggtaggccaactaccaaggcaactaatagaccattttggaggttgattttgagaaaacacctaatgaaatcctaaggagcgttggaaggctattaatacaagaagtggaaggattattgggagtggtgtcgatgataacttggctaaagacgatcaagtggatggaggcaagttgtacaagggtaagaaaaatgatagtgagagtgaagaggaatccaattaaaaagatagagtgtatagagaataagactcataatatgagggtg

SEQ ID NO: 24377 - DNA, 227 bp, Glycine max
tggacatcctctgaggacaatatcctcatttcttgcactgaatcgttgggaattggaacccatcttttcaatcaaattcctagcctctgcaagggacaaataacctagagctccaccactggtagcataaatcatactgcacttcatgttgttaagacccttatcaaactattgaaggagatgttcggaaatcttgtggtgagggcatcttgcacacaacttcttga

SEQ ID NO: 24378 - DNA, 330 bp, Glycine max
gaccttagaaactcagcttgccttggtttagacatgaaggatatgatacgtttcttgtacgaccaaatggggcaaaattggatgagggaaagagtggttttcgaaatctgcactttatgcagaatttcgctgttgaaatgtgcagcagaattttgctttagtgcagaagaatgctatgtatctgctggttgaggaaagggtagttcctatggggttctggacatttgctagcaaatcccaacggtcaaaatgtagacttatgtactagagacttctagtaaaatcttccagtcgatccaacggttaacgaattggaacgatgaaaatgta

SEQ ID NO: 24379 - DNA, 578 bp, Glycine max
  unsure at all n locations
cttcccatccctctacctctccacattncatagcgaagacatattagtcctctcacatccatttcacaccaggagaanagtgaacgttgaanctgatgcatcgaaacccagggaantcaaccgcaccccgggatcctctacagactatctagcaggcatgcaatcttatgcccacactaccttacaaacgtgcacctgcccaagacattctattaaccgattaaatgcacccacactcaagctatggcagtcctgcgaatccttacaccatctatcacggaaccttcccaacgtcgcactttggttactgtaccatcacacgacaatactcacttcggcctataatattaccaatagcactgctataacctcaaatgcactttctggagagtaccaacaacaattgacacaccggtacaccctcatcgacatctcctaatacccaatacatacaccaaccttatgacgaaacctcgactatctacacaacgaggtgctacatttcatgctttgttcaagcgacagctaccataaaccggatgcccataccagctttaccaacattagctaacaaaaag

SEQ ID NO: 24380 - DNA, 366 bp, Glycine max
agcttgaatggagcttacatcactgccctccggcgggggcgcgaaaaggtctctcgcatgggccaaggggtgtgtcttccattgaaggaaaacacgtggagtcaccaccaacgtttattcgaggaaaacgtcagaaaaaccaaaaatgaaaaaggtcgaaggtttgcatattttgaaaatgaaggtttgggagttgtttacacacggggaaggtattagcaccccacgcgcccttcataagggacaacaacctctaatcaagtgtgcaaatcatgatttcaatattatttatttccctacctctaatcaagtgtgcaaatcatgatttcaatattatttatttcccttttatctttattttccctt

SEQ ID NO: 24381 - DNA, 212 bp, Glycine max
  unsure at all n locations
ttagagtttccttttgttaaagaattatgtcttntgttcttgaagctataatataatgatctgtcttcatctattcatgtgcctctacccattctcattcatttgcatgtttatttccttgttacgcttaaaaagatacagtcctgcgaaggtactaataccagtgaccccgccgtccatttctggcaaaaagcaagtctggtagagaatga

SEQ ID NO: 24382 - DNA, 380 bp, Glycine max
agctttggagattttcagtgccaattcgccttcttctttcgtccagtcttcttctggcttcaattcatcagtgggctatccttctgtgtccagcatcttgggatgttcccagcctttgatgacagctttccaggttctgctatccagtgattagaggaaggccaccattcttgctttccagtattcatagttggttccatcaagaattggtggtctgttcactggtcctccttctttctccatgttcatcagattttatctccctaaatctcactctgagatttcgagcgttggctctgcatccaattgaaattctgatactggggacagatgtcgtacaggatgccacgacttcacgcttcataacactcagattgtat

SEQ ID NO: 24383 - DNA, 486 bp, Glycine max
  unsure at all n locations
ccccccccttcacaacacaggatatgagagattcaatcactcaactactctantccccagccanccncccttgaacctgtattctgttcctcacaaccacnnggagaaaagatgggtgcagcccataagccgatctcgaaagatctctggttttccacagaagttcaagaccatagccatcaaagtctgaaaagagtatgatgaactaaagggacgccatatggccaccgctcaagcttttgaaccaaaaacccagaacgcctgaaaagaaaaacaccacccaagccaagctctgaggggccttaaatgggagaaataatgagctcaagcctcgaacatgcgaagagaaaccatcatggtcaacagcatgaacttgaaagacgaactaaaagcctgccttagtcgaaaagaaattggccaacagataatcaaactgacggaaatgtgggccgcatacagaaggcaagagaaacaacctaacggcac

SEQ ID NO: 24384 - DNA, 368 bp, Glycine max
agcttacatgggtttctagaagtccaaagcagatgacggacacctgttaatcacataggcaaccgctgtgcgcagcttccccccacatggaccttggcaggccagcactgagcaacatgcaccacactttatccaatacggacctaaacatacggtcagcacaaccattatgctgaggtgtgcgaaggactgtcaagtgccttaagatactcactttccctgcaaaacacattgaattgctctgaaacagactacaggccattgtcattgcttaaaactgataatatagcaccaagttgatttccaataagaggacgccactctctacatctttgaaaagcttctgacttatctttcaaaacatacaa

SEQ ID NO: 24385 - DNA, 380 bp, Glycine max
agcttgtatccatggcttcctatggtggtgagcttgttcttgactcatcttctccttgaagtggcatctccaatcacctttccttcttttccattccgttgtcattgatcttcaagaagcaaagggctctattgatgaagaagatccaatgcttacaagctctatatggagctacatcagtttatgagatataggttgaagttgtgtataatatttgattgatatcattttttgggggatcaaggatatcatgcatatgttacaatttagatgcaaacaaaatttgcatagactaaccacccaatttgggtgttgcaacaacattatgaactaaaagagaaaaatgtccaacaataaaaattacctttgaagtaagggtc

SEQ ID NO: 24386 - DNA, 382 bp, Glycine max
  unsure at all n locations
actcaagctttcaaatntattgaataaataagcaactaactaaaacttaaagttaattacatctactgaaaataaaatgtataaaaagtctaagaaataaatccaaatcctgtcatggctcatcctgtgtcgttgagggctcatccagaggtgaagaggaagcatcctgtgccggcaaaggaatatcttgagccataataggccatgggtcccaggtgctctgtgctgcggtcatatcaattgcataatccgcatcagcaacgccatcctcctctttagagaccttcaaaataggtgaagtaactggtgaagctggtgaagtagcctttggagtggcctttggaactacctctagatgaggttctgactgaagctcctgggc

SEQ ID NO: 24387 - DNA, 376 bp, Glycine max
  unsure at all n locations
agcttcttttgatctaaaatgataggaatttaacttgttttgagtttttatctagaggatgctaaagttagtaaatttacagtatttttgttctattttttgtaaagattgacacaataggaggtaaagatattgaagaactggaacaacgcgctcagtgcgataacacctactcagcgcaaagagccaatctgaaggccaactatatcgtgcaatagtgcacaattgacagcttagcacatgatcacttaagccaactagactttgcatatggactcagggagcacatgcaagcctagcgcacaatcattgtaaaaaaatatcattgtgtaacattntaaaaggaaaaggagggggaaaacactgtgccattaag

SEQ ID NO: 24388 - DNA, 408 bp, Glycine max
  unsure at all n locations
ctatacacaactcaagcttcgacggaagtgaagtgacgtgaattgcgggcgttattgttctttatatatatgggaatcgaaatgtaaaacgagggtttctgtttagtggtaaaatcgcaatttaagagtgtagaagcccaaaggttgaatgtcaatgagctaggttgtttgctttcagacccaatagaaattcagaggcccattgttgttgtcatcaataatattattaaaacttttcaaccacgccacatgttttttaaatntatttatttattttattcaattactcaatctattattcattattttactgtgtttcttttctttgaaaatatgcacaatgcatgaaattcaatgctagttgttcaaataacatgataaaagtggaacatatggaaacaacgaaaa

SEQ ID NO: 24389 - DNA, 365 bp, Glycine max
agcttggcattttatgtctcttatgtcatcagggtgacttaggctaagttactagataattcaatgagcattagatgcgacacatgagtgatgtccttggcacaatatttcacacttttaaaatatattgcactttcctttttgattcagaatgatgatggatgagcctaaaggttttgtaccctagtttgacgtgtcagtctaaattacgtgttcccaacatggcatgtcgagcattggtgggatattaaggtgtatatgatcattcccatatatatgttgtgatatgcatacataactgtcatattgatgataaccgagtgaagtctgggaagaccaaaatgcattttgatatgtcttacata

SEQ ID NO: 24390 - DNA, 407 bp, Glycine max
tgtatagtatatgtctaatgagtaatgactcagagcttatatgatgttatcgacaactcacaaaaggatataaaactatgtgcaataatatgttaattcataaggggacctgtaatttaacgtcatattccatttcaaacagttttatcttatatcaattatatgttttgtcgtcattaattagataaaggaatgtgattccggaaagaaattattattacaagaaaaaaaaaattaaaatgacggcgctaattttataaacccgtgcatctaatcagataaagcattattaagtaaatataaagtaagtatacgctttctgcataagtaatcgagagcaaatcaagaagaaaagactaagctaaacgcaacctaaattaattaaactctaagatgtcgacggttaa

SEQ ID NO: 24391 - DNA, 329 bp, Glycine max
tccactattttcttacgaaaataaaaatactttgaaaatagtttataatagctaagagttattgaactaatgagtgaaatacacttctaaaagatgagaaaataaaatacttacaatatttaattgagagaataaatatgctatttattttaatttatataaatacataaattagtaaataatatttattcgaagagaattgactggcatgttaatttggccaagtataccttaaaaaaaaatacataaactaagaataaatttacgacattgtcgccatcatttttgttactcaaatgttattttctgtcggaattggcttatctgct

SEQ ID NO: 24392 - DNA, 280 bp, Glycine max
cattctaaattagagattgatacacaaatcatagctctatgcttagcattctcataacaattaagttcatactctcaccgggttatgggtcaagctttgctttctcaatcaatctgtccactgactaacatttctaatcgtgatcctactttcttgttctttctcatctacatacatgctcattcaaagctcatgacttcaacacatgcttcaccctttcatgcaatccattcacaacaccaatttcgcacaaaaataattatgtttgcactgcataact

SEQ ID NO: 24393 - DNA, 357 bp, Glycine max
tggaggctggaactttgagccccaatggggcaccttaatggcgattacccaccatatggagacgcagcgaaagacaaaggaaaagacgcgagaggacgcgccatccgttaatgaataagccatggaagaatgagcttcaccaccaataagagccttggataagaagcttggagaggatgctcctatggacgaaaagaaagagagggataaagacagagggggggagcacacatatgaacgaagaaaaaaggacagaagttgaactttgagttgtgtctcacaagactctcattcatcaaacgtacaactagtgtgacacatgcttctatctaaagactacgtagcctccctgacacg

SEQ ID NO: 24394 - DNA, 372 bp, Glycine max
tttgcaagctcttggtgcgaaggtggaggctgatcaattaccacataataataaggaggctgacaataatgatgatattcatcaacactgctatggctacgatgagatggctgtggaggctattcctgtatactgcagaatggctgactgtacaccatgtgataataggtaccctgtgcttgcatgtcataatgagcctgctactccacagcctgcttctgcatatacaatcactgaaattatgaatgtattacaagttgacaataaggtggatgaaaagcaagtctcttaacctgcagatcacgggaattctaactcaatgcacatgcttttcttggatgccaaccattgctatgatgcgaatgagtcaag

SEQ ID NO: 24395 - DNA, 382 bp, Glycine max
  unsure at all n locations
tgcagcattaaaagtagctatagggtaaaccttccttctgaaattcccttgcttgcctaagaatacatttggcattttaataggtgtcttatgttgtttgttgagtctatcccctttgcttttgaaaacaatagttaaaacttaagatggagtcttatagacgcatccaacattagaatgatcgacgtctctgataatatcataaattaatttgattaattctcacggtgctttgcaggatttcgatgctatgcctctgcagctatatcacccttccattatatgctcttgtaactcaagtataccttcacgtttttctttccctagctttctgctgagacattcttgcaaagtttgatgatntcatcaaatcatatataat

SEQ ID NO: 24396 - DNA, 372 bp, Glycine max
agcttgcaattttcgcacaaagaatctcttcctctcgccttcctctcgccttcttttaaggatggtttggttgtcttcaaatagatgaaaaaaatttcaaaaatttgtatggatctgacacttccttttttctattttaattcaaatattttttctcaattacctttcattcattctttttcacacaatcaaactgccccttaattctcacctacctactacggcctcaatgatttgtgaatatgccgatgacaagcaccaaagtaaaaaagagaaaattaatttaattgataatcttattttgtcttaatcctatgcttcattgactaatctaaaatttgacctaaaatctaataaaaaattattcatatt

SEQ ID NO: 24397 - DNA, 363 bp, Glycine max
tagatcatttttttgttgagagcacgaaaatattttccatttactaaggaattattctttttctttttcactttctttttgctgataccagattctgcaaagttaaacttccacattgttatacttattacttattagatgtttcctcctttaaaaccatagaggaatgaggaccgtggtgggtgggaagaaccgaagaagacagatgattttagtgaaagacttattgcttccttcttttctcccattattttgtttgtatttttcaccaactgaatgaaataacaaagaaattccctatcaaagatcttacttattattttcgaagacatttctttcttatatgacgttgaatgttggccg

SEQ ID NO: 24398 - DNA, 373 bp, Glycine max
agctttgaatgtagtcatacctcacaaaatatatgtatgtgtgtttaagtagcgaaaataccttagatatgcatgtatgtaatttaggtagcaaaaaaatacctcacaaaagattattatggaagggtattactggctcactgttagtagtcttttacgactaacttttgtatataaaagttctcaaaaatgttaatatttcacccaatttatggttctttttggtaggatagtaaatatttcttgtttaatttttatatttgctcaatagaagctatctgttggatttcccctgtagttactttatggtccactgtttctttgtacaaatatgttcaaggaaaatctggtttgccggacagtacatcggatc

SEQ ID NO: 24399 - DNA, 399 bp, Glycine max
tgtcttcaacaaacaaatcaaaatctattttctgattttcattacctagctccagcttcctctcccccatatcaactatgcagcttgcggtcaacatgaatggccttcccaatattacaaggatgtcagtatcttcagagatatccattaccacaaagtctgtcgggaagataaaatgttttactctgaccaaaacatcttcaattactccatatggcctggtaatggagcagtaagctaattgtaaagtcattcgagtgggcattatttccaactcttccaatcttctgcacatggagagtggcatcaaattgatactggctcccaggccaataagagcttttcccacattgacttctccaattgaacaaggaatcgttacactcccaagatctttat

SEQ ID NO: 24400 - DNA, 315 bp, Glycine max
atcttttaccaaagggagatggaccatttcaagtgcccgaaagaatcaacgacaacgcttacaaagctgagctgccccgagagtataaagataactccaccctcaatgactcagaataatctctttttgatgcagacggagaatccgatttgaggacaaatcctcctcaagagggagagaatgacgatgacatgttcaagagcaagggcaaggatccacttgaaggacttggaggacctatgacaagggctacagcaaagaaagccaatgaagctcttcaacaagcgcttgccatactatatgaatacaagccca

SEQ ID NO: 24401 - DNA, 385 bp, Glycine max
agtctctcaggatgatgcctatcgaacatttgctaaccaatatcatgcaaatttcattcagggattgaataaaaaaactcattagccgacatcggtcgtgatgtagccccaactgtgatgagaatcatgaaactggccaaatacaggctaaaggcccaagtggagaaggacaaaggcctatgtggagaaggacaaagcccccgagtggagaaggatgaaggcccaagtggagaaagatgaaggcccagaggcagaggcactatcaagacaattaatgttgctgaaggcccaaactaatatgaaggcccaagttaaatatattttttagttataatttttatttatcggtaatttggcccaaactatttataaggcccatgtctat

SEQ ID NO: 24402 - DNA, 383 bp, Glycine max
agcttgtcaatacttttttctcttatgtttggctctaattgagacatggaagtacgcattattttcgtcctccaatttgagccagtcaagttttgatctctgttgtagaatttcctcatcaatctcgttccacctaatcacagtttttgtacacatattcactctatcaattttctctttattcatcctgtcatttacaagcgagtcttgagcttcagcaagatcttcccgagctttggccagctggagtttagtatgagcaaattgttttgacaaagtacctaaaaattgtcttaatcttttcaatttcttccacatcgctaccataggactaccatcaacagggctattccaactctatgcgacagcgtcatcaaaacctg

SEQ ID NO: 24403 - DNA, 362 bp, Glycine max
tggtaataaagtatgatgtgtttttggtttgtagtgatggagaaatggctcgttgaaaacgaaaatgtttgttcttttgctttcttgatgttaaatgggtgtatggactttgtgatgttcattaccagtatacatatatagtacgataaattaataacaagactatctttgatataactggactgtgataggatgcagtttctcatgttggtacacaaatttttttattatacgaattttaacaaaaattagccttagagtttaaattgtgaaacactcttagcgtgtaaatattatatatgatatcatgtttaactataccatcatatataataggatgacatataattaaataattaaat

SEQ ID NO: 24404 - DNA, 381 bp, Glycine max
  unsure at all n locations
agcttgatcaggtaacctcaactatatagcaatttgaagactgttattagaatgacatttaattcatgacttgttttctttatttttacttttttttccttttcataatcacacccaccctaaagaacttctaaaaccagaaatcatgccattacaatgcaaaaattctaaaataaacttaactgctttttgacagtttgaataaactagtataactggcttaatttgataactagatccaagttcaaagattttcagaaattctggagcttgggttttttttttttttgtctcaactttttactccagaattaatcatattctttcggnggggctttttatcttgacaggatttatttgcgatggccgtgtcacgctatt

SEQ ID NO: 24405 - DNA, 364 bp, Glycine max
actcaagctttagcatgtgctttactgagaagaaaatgccgtctagttactgggggttctgacaaccatttaatactttgggatttaaggcccctgggattgacaggtattgtatgagcatgccatatttttatgatatattgctaattgatttttttatctgtctaatgtctatgtgtccattagaatcaactagtttacatgttggctacacattgcattagactcaactagattctttgacattttatgccttcacatttacatatcaagatgggcatatggtttttatagaaagaatagggcttcctaggctttccccccaaacgtcctaggtgtgaccttgtaccaggcatgtgcttta

SEQ ID NO: 24406 - DNA, 382 bp, Glycine max
gagcttaatcagttattcttccctttcatctcaaatataaagagaaaaaaacacatttttttttttctcaaatactactttcaaaaaaatttcaacaaactttactttatttaatattattatctctaaatttcaaccaacgtgaaccacgtatattgaaccttaacaaaatttatttcttggtcgagatgatcataattcacgttggcaaaatgtggtaattggtcaaatttatcaaattttaacaacctataaaatcttcacttgttttcacaaatgaatatcaattattagatataaatattataatttgtaaccgagtaacactacttaaatattacaaataaagacaactaaattataaaaaaaaagaaacagggaa

SEQ ID NO: 24407 - DNA, 409 bp, Glycine max
  unsure at all n locations
taacagtagttagacccatatgaatcccggggcaacctcttcgaccgtttccaaatggtataactcgaaagtcacttccacgaatgtcaacattgcaattctcaaatctctttggatcaaacatcaaaggattatgccaaactttaggatctctccctattgcccatgcatttactatgatccttgattttttctttatgaaataaccatcaatagtaacatcttctcgactctcacgaggtacgagcaacggtgcaaccgggtgtaatcgtagcgtctccttcaccaccatattcaagtaagccagttnttctaagtcaatttcctccacgtgtctgttcatccccactacattntctagctcatcttgaagtctcttcatcacactttgatgcctcaagagttctga

SEQ ID NO: 24408 - DNA, 212 bp, Glycine max
tttcatacgggcttcaaaatcatatttcatacctttatctaagcgattgtagcataaagcttcttcataaccttttactttgtagatctttccttaccctattaaaactcatccataggccacgttactgacacagattatactacgtctctccactatatgggctcgaatagtgtgtaataaggatcatacttatcatactatgagtttat

SEQ ID NO: 24409 - DNA, 207 bp, Glycine max
gaggaaggagacactttctttgatatttcaccaattatattgtccacggagatgtctctttgagatatccattcccttgcgacgcctttacgaggtgtggcagagacttccttgctatgttcgaaaactataaaattgctttcatcttcaaatgtagcgtccctatcctaaagacctgcattcttattcttccaaagaatattcttg

SEQ ID NO: 24410 - DNA, 374 bp, Glycine max
tttgcaagcttgatatatatactacaatgcatccctacaccttacaaaccagacccgaccactatgtaagggaatattgaccaaaacttgccacatggtcaagataagcaacacattttagttccacattgagcaacataaccttaggaatatctttgttcctatatatacagaggaacaccaagaccttaggagcatcaaagaattaagtgggcttagcatcaatcgcgaaacccattatagttaatatttctatctatccctttgagtttcaaactcaatgcatgtaggcggcttgtgttcgtgttataaatcacactcatgtttgtgctatagttagagttgacgtggagatcatggtggacgacactatc

SEQ ID NO: 24411 - DNA, 347 bp, Glycine max
tgtccttcctagataacgtagtgccacacgagcactgttcacttgggatagtccccacagtgcttctcgggtgtcctcaaatcagaaagcacagagaactgtctctggttgcacctattgcacatatacatcttggggcagaggctcctcttgtaatggatctcggcacaaatcattgacttcaaaggttggaactcggcatgcctttggttccatctacacccttgttgagggcacgaatatctctttgtcacactatcttctgcacctaaaaacaacacattactctcctttctgtgcttttcttcatgggatgcgcaaagctgcacttgttttgactcttccca

SEQ ID NO: 24412 - DNA, 365 bp, Glycine max
agcttgcttctttttgatttcggagacgtctcgggacatcatttattgtgcaaccaaggacgccaagtgtctcaaagcggccaatccaaggttgtatatcatcaaataataatccccggacgaaattagggtatgacaggagccaccagaaccaccttagattgttttgtcttttttctcttccttccttcctactccttctccttaccttcttctctttcttaccttctttgtaacaccctgaaatttcatcttaaattatttcctacattgtgaaagactagatagtgtaagttcactctatgtaaatttactttgtgaatgtatgaatttaatttattggttggataattctaatccttgaa

SEQ ID NO: 24413 - DNA, 364 bp, Glycine max
tcaaacacctgcaaaacaaaacgccctcagttaagattatctatcaaaaacaagaaaaatggtgtaactttgtttcttcccaaccacaaaaaattaaaataaaaacgccgggaaagcaaaatatgaaaagatacaacctagttaatatttaaaagtcacaaaatgatcacacaaacgtgtttgcatcgaaaacgcgtttaaaaataataaaaacaccgacttcgtatggttttacccttcaaacaggtagcacccaaaagatatatttttgaataagttttctgtctcctcatcaatacaaagagaagaaacggaaacggaaacagccatagcgaataattgaaacacccataaaaagaacaaa

SEQ ID NO: 24414 - DNA, 316 bp, Glycine max
agctttgcagatttagtgtttgctggcgaaagaatcgaagtgggtttgagaagaggcaaatttgattatgctacttcgatgaatagaaagcctggggcatatggagagaatatgaatgagggaggaacccatgatgtgactgtcgttcctacatggccaaatttcccactagctcaccaatatcaatactgagtcaatatcagtgcttttcattacccaccaccctaccagccaggaacatcctattatgcacaaaggccgtccctatatcagtcacgaaaccccgctactgctcattcgaggcccaacaacaccc

SEQ ID NO: 24415 - DNA, 241 bp, Glycine max
tgcttgtggggcttctatggttgctggatctttgtgtcttttggggtcctttaatggtgattttccaccatggagatgcatcggaagacaaaggaaaatatgtgagaggatgcgccatccattaatgaataatccattgaagaaggagcttctccaccaagatgagcctgggataagaagcttggagaggatgcttcaatggaagaaaagaaagatggagagaaagagagaggggggagca

SEQ ID NO: 24416 - DNA, 333 bp, Glycine max
  unsure at all n locations
agctgtaacttgntgggatagaagactagaagctttgaacttttgtttttaaaaacttgttttacacttactttctttttagttggaacttcatcatttgtttatgtcagctggtgcctgtattattagtatttttttttaacggtcttgttgaagaacggtagctttcaggtttgaggaagagtaaatttgtcaatgttttctgagagtggatggtttcgttggaggccaagtcttggcattctgaatctgcagattcagaaacaaaatgttattccaatagtgattgaacctgtgaaacaatactatgtgatatttgttcaaggccttatt

SEQ ID NO: 24417 - DNA, 535 bp, Glycine max
  unsure at all n locations
gcctctcttcctcaagataatctatagttactatgacattatgtataatagttatacgntganatatctacatctttcttnnacctgacaaaccaccancttcanaaccncgtttgagttgtataccatagccaacacgcgacacaanagataacttagactccatctagtggtaatcagagcacaagaacttctgtttatgctccttacacctccattaattaacaggctaaccttctcgctcattgttgaatctttattttttttctccatggatcacctttgaagcttaaatatctcacctccacagaagcttcttaagcaagctttcattacgatgggtgcatggtttatagtgctacttgagtttagatttaagattgagcctagaggacccattaaagctcaatgtatagctgaactcatggaaaatcctcctcctataatgaccaacaggaacaaaacgaatgtggatgctctatgttgatgcgcccttaaatctcaaagaactaacaggacattcctttaaagaccc

SEQ ID NO: 24418 - DNA, 366 bp, Glycine max
agcttgttgacataactttgacagtatgcctttaatgttgtgtagtgatcttttgccatgcatttgtactatgttttgatgaatgcttttccaaatttagtgtattgactatcagaatagacatattggaatggtggtagtcaggtcaatattataatggtgatgcttaaaattggagaaaaggttttgtatgataatcagagatacagagagtaagagatactatgtaaagatttcccccagctagatgcttgtgaaatattgacagcatattctatcattgtcattcttgcattccttaatcaaactccaaccagttacctagaatctcttcccaattaatcacccttgattatggtgtaaaaa

SEQ ID NO: 24419 - DNA, 383 bp, Glycine max
agcttctagggcacgcttttttcacagtgtttcagccatgtcaatatacctgaaaaggaaagatccacaatttttttgaatttgaattcggtgaagaataaaatccaaaacgccaaccattatatacatcattgtgcttcttgatgagagttatcaagacagatttgaatcttctaaagcgagtaaaagtaaattaagtaatactagcgataagaaaattgactattaatattctaacacattcatgatttgttatatacagaaatattaataacacaccttcaaacacactcttttgaacattccgtccactattgattgaaatttaatgaaaattacaaaattttgtggatcctactattatttaatgagttccactcaag

SEQ ID NO: 24420 - DNA, 383 bp, Glycine max
tgactaataattatagcgttttatatgaaagaaaaaacttgcaaccttttatagctaacaaacttttcatggaaaagtaccgtatggtttgtcttattactaatctatgttacatgttttcatgcagataaacaaaccacatcttccaatagcatctggacaattctcctttaaaactggtgtcattgtttctgcatcatttttagctctggtgccacaaataatcatctatttctacaatgatatttttttaacatgagttttattataaagggaattattattctattcttttttccaaagtgttgggtttacttggattacaggctcttggccgttgatatggaatctcatagtaatctcttcaacgtggactgcttatt

SEQ ID NO: 24421 - DNA, 287 bp, Glycine max
agcttattgaacatgaatctcctcttttgaacattttacctacagggtgaaaccatatgtagctaactcttaaagcttacaacactgcttcttttatgattaggttcctactattaaagctgagttacaacgactgacagaggacaacaacactctaagaatgatgcttcaagttctaagcagcaagttcacaaagcttgagacccatcttctagacattaacatgacacaacacaagggcttgacttcaaatcaaatagggtcatgatcagtaccacctatgtttt

SEQ ID NO: 24422 - DNA, 355 bp, Glycine max
  unsure at all n locations
actatagacaacncaagctntataataggctntctcttcattgttactagcattagtaatagtagcttgcttctctttcaatatagcaagatcaagatccaaaacatcgagatgttttggattcctccttcgttgcaatcccttttatgccacccaggttcctcctcttctctttaattttggtagtatttgaagtgagtatctggtctccttaaagttctcttctttatccctcttgatgggtttcttctcctatctatagaggcttggaaacatttttcttatcacaattataatcatttaaattatcttcttatggcaatgacgacaactaccattgctaccacttgtggct

SEQ ID NO: 24423 - DNA, 380 bp, Glycine max
agcttcttttggtccttgttcaagcagctaactcctctttcaagaccatgctatgtgctcgtgattggtctctctcttcccttcgaagcttgagctcactgttgctgccccataaagctccacgaaatttgtcacggccatgctcttccttgcaagccctcttggtttcttgttcaagggctcttgcggtagctgcattttcttctcgtaacccgacacactttttccggacgtctgtagcgaccaacttgaatttttctttggcaagtcttgcttttcctagttttgtttttagagctcggacttcttcatcctcttccggagcttcgaagctttcttcgtcgataatctttagcttggagagacaatctaaccctcgt

SEQ ID NO: 24424 - DNA, 392 bp, Glycine max
  unsure at all n locations
tgagatgaggaagtgtagaagggtgaaacttcctgcttttattcgntgaccacaaagtggtacctggagatatgtcgcgggggtcaggagaccttgaggacgtcaagtggggtgctattgcccaaaaccaagcttgaccaatcccgacccaacccgggcatagtcagttagtgagaacctgtgatgtacctaaacaggcgagctcctggcagtcaacagataaaaggaacaaagaccacaaagcaaggaggcttgtgtggtggctggccagctgtgaatcttgtgtgatatatgggttatggcctctggtaatcgattaccaagggtgggtaatcgattacaaggcttaaaaatgaagacaagaggcttagatggtctttcgtaatcgatta

SEQ ID NO: 24425 - DNA, 382 bp, Glycine max
agcttgccaccctgctcgcccaggcgagcaaggttgcttcctccagaagcaacagccttctggaggaatcttctggagggcccaagtgggcctggttgctatttgcacccccatttttactaaatacacccctcttgcccttttttggtgattattttttcgtaaagttacgaaaacttacagatttcgcaacgatacttgttttctttccgtaacgttacggaaccttgcggattacataatcatccccttttttgacttacggaatgttacggaacctcactaattgtacaacgatgcttccttttgatttccggtgtgtcacggaaccttacggattgtgcatcaataccttcttttgatttccggcatgtcccggaac

SEQ ID NO: 24426 - DNA, 388 bp, Glycine max
  unsure at all n locations
tggagagattgatggggacccggtgttgagaggaaccatgataagggctacgtgggagtacgtgagctcaatgaaggtgggcaactggggatggtgggtttatgtgtgatctgtggatgtggagagttgacttgcaccatcgcccgaccgccacctagtaccacatgtgatgggtgccccataatcctacaagcttgaaatgaggaaatgtggaaaggtgagacttcctacttttattccttgaccacagagtggtacctggagatatgtcgcgggggtcaggagaccttgnggacatcangtggggtgctattgcccaaaaccaagcttgaccaatcccgactcaacccgggcatagtcagtcagtgagaacctgtgatgtacctaa

SEQ ID NO: 24427 - DNA, 362 bp, Glycine max
agcttaataagaggcatgctaagtgggtagagtttttagagcaatttccatacgtcatcaaacataaaaaggggaaagggaatgtagtggctgatgcactgtctaagagacatgctttacttgctatgcttgaaactaaactgtttggtctcgagtctttgaaagacatgtatgtgcatgatgtggactttgctgaaaattttgctgcatgtgaaaagttttctgaaaatggttactataggcataatggattcttgtttaaagcaaataaattatgtgtgcctaagtgttccattagagagttgcttgtgagtgaatcccatgaggggggttgatgggacactttgggattaaaagaccct

SEQ ID NO: 24428 - DNA, 329 bp, Glycine max
tctcgatatattatgcacctgaatcagactttcgttttataagtgatgaccatttgaatttgtggagagcttccgttgtgcaattttgagcgtctcgatatattatgcgcctgaattggacttccgtgtgattagttatgaccatttgaatttctcgagagcttacgttgttcaatatcgagcgtctcggtatataatgcgcctgaatctgacttccgtgtgacaagttatgaccatttgaatttctccagagcgtccgtttgttcatatctagcttttctatttattatgcgcctggattagactttcgtgtgatatgctatgaccat

SEQ ID NO: 24429 - DNA, 371 bp, Glycine max
agcttgccacccagctcgcccaggcgagcaaggttgcttcctccagaaggaacagccttctggaggaatcttctggagggcccaagtgggcctggttgctatttacacccccctttttactaaatgcaccccccttttctatttttttgtaattctttttccgtaacgttacgaaactttacgaattttgtaacgatacttattttccttcctcaaggttacgaatccttacggattatgtatttactcttttttggcttttaaagaagttacagaaactcacggattgcgcaaaaacaccttttttcgattcacggattacgcaagcctgcttccttttggatttctgagacgtctcgggacttcattta

SEQ ID NO: 24430 - DNA, 369 bp, Glycine max
  unsure at all n locations
tgtagaacggctggtcatgatatatgtcagggtttggtcagcgggtcggcgataatggggatgtcctacattatttccatgatacacatgcaacaatgatgattaggaaattttatgcaaaactggtcatgcatgcacccatgtggacactcaagcataaagtttttatggtcatgtgacactagggctcaagattcattntccctatttaagtcaacccagtgtttccaaaatatgctcttttatcaatttatgcattcatccgagtcccttttgtgcgttcgggaaaattttcacagtattcaccctttacgtgtatacacattctttttttcaaacaaactggttatgatagtgaaatcattttca

SEQ ID NO: 24431 - DNA, 371 bp, Glycine max
agcttttgtgttctgagaatagttacgtcacaactcgagtgatggggacatttgggttagtatgattaagctaagcattctcctatctctcttaccaaattataattagttcaagttcctgtatgattgcaatgtgtaagtggtccctaatgtttaaaggtcaaaagatattgattctctccttttttctttttctgtagttatgttgcaccagaatatgcatgcactggaatgctgactgagaagagtgatatttatagctttgggatacttatcatggagataatcaccggaagaagtcctgttgattatagtagaccgcaaggagaggttagaggccctcaccaataaaagaccatagttaacattta

SEQ ID NO: 24432 - DNA, 375 bp, Glycine max
  unsure at all n locations
tgggagatccacatcataaaagctacagtcatagggggaaaaccaagaaaaaccactttagtactccaagcatcccatactacttgatgtgggattacggcccccccataatacccaagtccttcattctaaagtcatcctatctacaaagaggtatgaatatacttacaaggtctacatctgagttcaatgctatagacagtgcagaaaaccatggcggcaagtcaactggagcaatagaaaacatcgagacaagtaagaccatccatatgtcatcaattccttatatatctgaaaatgagttgtttttaatctttactggtttgtaaaaaataacagaattcanaaccatataactaattgaatcaccaaaac

SEQ ID NO: 24433 - DNA, 378 bp, Glycine max
tttgcagttggagcctaactgtagaagggaggactgcaccatgcaaactacatttcgaaaccaacatagtttaaggtattaagatactatggaatttgcactcgaagacatggatcaactttgctactgaaaccacatttacacttgacatataaattatcatcttttgtgctgtttttggaaagaagaaaagaaaagggccatcaagtaagagcagaaatatgcatacataattaaaaaaaaaatacagttcccaaaagataccagttaacaactttgctcaaacttggaaaaatagaaggcataaatgtgagactcgtcagcaattattaataatctataatatatcatctgaaatgattttatctgcactatctc

SEQ ID NO: 24434 - DNA, 369 bp, Glycine max
ttatgacttaatcattgtacagatatgtaaccaatttttcttttcaaacccttttataaatcacttttcttattggtaataaaatagaaatgtcacgggatgtaacccatgcttgatgaatgttacaccaacaaatgttagaagagaagaaaattatgtaggtccttaaaccttaaaaatcaagaaataaaaaaataccacgccaaccaagagaatataaatcatatttgcattgtaccaagcttgaaaatgttcaatcatgtttatagacatcaccatatgtagaattttattatttgtaattgcaagtctgggaccatctacaaataaactaattatccataatttctaattaaattaatgaaatgt

SEQ ID NO: 24435 - DNA, 370 bp, Glycine max
agcttgtaagtatttgttggtataatttgcctgttccattaggcttttaatgtctctagaggttacttcctcgttgacatcttttgtcttgaatggaattgccatgacaggtttgttgttactgtctttgatatttggtagttgatattgtgttgtgggaggtaattccgactggattaactcaccatccttcacttgccaatttgttatgacatttgttgttggattacctatgatgtcttgtttccaagggtagtctatatcctttctgatggcataagcatgaaaccaatctaagaaaaggacattaattctgactctttcgacaaattcgtagaacttgtcttggatttgttctctgtttgtaccc

SEQ ID NO: 24436 - DNA, 550 bp, Glycine max
  unsure at all n locations
ccccgcgccgatgcttctaacacttatataantantattgtagtaactacaacactatacatctctacgtacaccatncttcggaacncccaccccccnccccctttganaccccgttgattaccttgctantcgcgaccnatgaaaacagaactttaggacacacctttcaactgaagtatgtcctaagtctatttcaaggacgaaacttcgccgagtgtcgcgcaatgaagagaccttttattcaaacctttcacaattagtgattaggctacaccataaattatggaacttacaaaaactaaatccttaattgaaggcgtgcgcgacaatcataccgaattactaaacaagattacgagttggcttaaagacattccttatactcctcaacctacagaaaatacttgcaaaatggtaaccggaagaacccacaaatttatcaatgttattagtgaagatagtgaccaaaacctatataacacaactgagatatgaccagcgtcataagacaatataatccattaaactccaaacactggaaaacccg

SEQ ID NO: 24437 - DNA, 368 bp, Glycine max
agtttggtcaaaggtaaggttagcttagaaaaaccctctatgaacctacgacagtaacctgctaaaccaaggaaactcctaatctcaaacactaacttatgactctcccaactcatcaccacctctaccttggaaggatctactgctatccctcccctagatataacatgccctatgaagctcaccttctctagccaaaactcatactcgtacaacttagcatgtagtctgttgtgcttgagggtttgcaacacaaccctcagacgctcctcatgttcctcccttgtcttggaatacaccaagatatcatctatgaagaccactacaaaactatctagatagggatgaaagatcctattcatgtagtc

SEQ ID NO: 24438 - DNA, 377 bp, Glycine max
tataagttcctcacaagccttatcatacatattcttctctatcccaaaatattagtagtcctaagttgttttacacataccaagaaaaaataataactagatgaaagagaatagtagttttataaaattaaccttatgtcatcattaattcatttataaattttgttttttttaccattaatattataagggatataagtgaaaaaaacataattagtgatacactaaaaagctaaaataacaattattatgggacaattttttttctcttatatgacaattataatgggacaaagggagtattaattttcttgggttatggtaaaaaacctacgatgaccatcatggctatgtttggctaaactagctcaaaggtg

SEQ ID NO: 24439 - DNA, 366 bp, Glycine max
agcttctccaaggtggtctgtggcatcacgtttaaacttgaaccattgtcgataagtacctttgtgacgacatggcgcatacatcttacaaacacatgtagagccttgttgcgccttctcccctcaacgggaatctcttcttccgcaaacgcgatatagatattggtgggcatatgattaacaatgcctttaaaaccctcaactgagatgtacggtgctactggggcttcgttgaagactattatcatcagtgcacgaggaggctcgaagtttatgatcagttcgagcagagagactcttgacggaggtttattcaattgctcagctactttaaactcgctttgttggatgagacgatagaactca

SEQ ID NO: 24440 - DNA, 536 bp, Glycine max
  unsure at all n locations
gcgcccgcagtctgccatgctcaaatatatggtttataagtaatctgagatatctatattcactcgatatactcgacaccncaagcacaccncgcacacctgtgagcccttttgtgatcgattacctctactangnacgcgacacnnaaaaaatactcaagcggttgtgacaagacacaaaaactcaaatcatattttatatgctgatgggcccatatatatgggggcccgacttacaaaaaaaagagatgggctatagagaaccccatcgcaaacgctctctaaccaatataggccacacacttgccaaccaatggagaaaacttctacgaggttcaatttgcataatctactctacaggcgagaaatctttctgtgtatcttataaccttagttgcaatcaagagactggctatctcttggattgggagaaatgtaaccacagactggttgtctcttggagaaacttgaacaccaggcagaggaatccaagagcgtcacaagcctgtacggacttatagagatagggaaaaacg

SEQ ID NO: 24441 - DNA, 368 bp, Glycine max
agctttaagcgtctttttgctaacgaagacgacgcaaaagacctaacatggcatgcaaatggaaggatttctgatggaatcgtctgtcatccggctgattgctcccagtggaagaagattgatggtttgtatccggatttcgggaatgagccaagaaatcttagacttggactagccagtgatggaatgaatccatatggaaccttaagcactcaacacaattcatggtcagttctgctagtaatttacaatttgcctccttggttgtgcatgaaacgaaaatacatgatgttgtctatgatgatatcgggtccaagacagccaggaaatgacattgatgtttatctaagttcgttgattgaagacct

SEQ ID NO: 24442 - DNA, 352 bp, Glycine max
  unsure at all n locations
tggagtcatttgttgtgttttgtttagtgggatggagctggacaggagcgattcatgactataacaagcagttattatagaggagaggatgccgaagataccagtagatcatcagagaaaaattcaattgaagaagacattgaaacttaaattgctgaagtgcaaacgtaagtttattatgcatataatttcagtaccatttttgttatatgattttggttcttgggtatggcagattttctagcaaaaaatggggaagaagagaaaacacagtgagataactcatgacgaggcacagccncaaaaggaacaactcatgatgatgcacaacccacaaataaatttctttgac

SEQ ID NO: 24443 - DNA, 285 bp, Glycine max
  unsure at all n locations
agcttatgcatggaaaatgtaattatgaaattgagatgcccgaagaaacaccatttcctagttaaccatgcattaggtaccatgttcaattattttgtttttaagtgaaacgggtttatgatcccaacatggttggctcgtggtgcctaacacatgaaactaagaatgtagtgtgaagtttcatgcttccccctttttgtttttgttttgtagaggaaaacacaaggatgagcatacatgaaaacaaatggtatgcaantttgcagatcaaaaagtttgttgaac

SEQ ID NO: 24444 - DNA, 437 bp, Glycine max
tgaccaatcccgacccaacccgggcatagtcggtctttgagtacctgtgatgtacctaaacaggcgagctcctggcagtcaacagataaaaggaacaaagaccacaaagcaaggaggcttgtggtggctggccagctgtgaattttgtgtgatatgtggattatggcccctggtaatcgattaccaagggtaggtaatcgattaccaagggtaggtaatcgattacaaggcttaaaagtgaagacaagaggctaagatggtctctggtaatcgattaccaacgggtgtaatcgattaccaggcttgaaaacgaagtcaggaaactaatggagcctctggtaatcgattaccagcttgtgtaatcgattacacagagggatgggtcactggtaatcgattaccaagtaggtgtaatctgatacacagtgcatttttga

SEQ ID NO: 24445 - DNA, 370 bp, Glycine max
ggcttgtattgttgagtctcgaagacggataatcgattacaatagtgccataatcaattacactgttgtttgagacaatgactgacttattcaagagtctctaccttaatcgattaccaagtggattaatcgattacttctttctcgtttagttgatcagaggtgaacaagaatactttaatcgattactgtggcgtccctaaattaatgactggtttaatagaaataatttaaataacaaaaaccatggcaaatttttttttcttctttttctttctcatttctttctcttttcaccataactagggctagaaggaagatcctcactataaagtcctgaatggccaattcacaactctattcggagtca

SEQ ID NO: 24446 - DNA, 310 bp, Glycine max
gcctacgttctgttgctcagcagcccactttacatgatgcactctctgtgctaaactccatgtacaaagcctgaaccacacagggacggccctggccttgtgtccacgaatgctctacaacaagagacccgcggtctcttaatcgcttcttagagcttacaaggatagacgaagagatctctctttaacgagatagatcgtacagtgaagatcaatccaaatgccttatcgaatatgcaagtgagggaccaatgaatctttctgagaggataagacgagtcagtgcataaaaactctgattcttttgaga

SEQ ID NO: 24447 - DNA, 218 bp, Glycine max
cgctgcatgcacccgtgggatcgcaatctcatacactgaaaacgatcagcatacctagaacttgcgaaaaatatgcgcaacggacacatactacctatgtcggactggagtggctatcaaaggcctatatgtatgagacgagagacacgaatgtgctctaagttcttcggaacacataggacatagactcttaaatagcattatggcaatatcctctg

SEQ ID NO: 24448 - DNA, 436 bp, Glycine max
  unsure at all n locations
agtaggattatggcgtacccatcacatgcggtgctatgtggtggtcatgcgatggtgcacaacacgttctccacatacacaatgcccgcataaacccaccatcccctgatgcccacctccaactgagctcacgtacttacacgtagcccatatgatcgtttctctcaacaccgggaccccatcaatcctcccaagcttccacaacatccaagcgaaacaacattcaaacagctcaagctatcgcggccaagcaaaacagagcatatgcagaaaactctgccaaaacaccaaccaaatcacaacttttctcacttaaagaccccaataacaattccttcgatccaattcgttaaccgttggatcgactccaaaattntactggaagtctatagtacatgaacctacattgtgaccgctgggatctactatcaaacat

SEQ ID NO: 24449 - DNA, 371 bp, Glycine max
agcttatgttcttatttccttacaaacgttctcttgcacaagacatttaaccgaaaaacatgcgcccatttacaatcaaggcagcttcgttacctagattatttacacgtacctccaaggtgtatttgttacttacatcacacacatctccttggctaaactcacatacatgcatactcaagcattttggggcaccaaaaattgcacatgtgcacatcttggcatttctaatacctacatacgcaaacttcatgatgaatcttgactatctacacaataaggtgctacatatttaagcatatttttctttgctgactaaaattgcattcaaatttaaaaggtatatttttttgcaatatgttttcttcatg

SEQ ID NO: 24450 - DNA, 431 bp, Glycine max
tgctctaaatttacattgatgtttgtatctatgggatgaggttatatgccatttttgctttaagagtagtgtcccactggtaaaattaactttccaaatgtttgccttctcaggaatggccccgaggaagcttgcctcaaagaggtccaggaaggacaaggcggccgaaggaactagttccgctccggagtacgacagtcaccgctttaggagcgctgtacaccagcagcgcttcgaagccatcaagggatggtcgtttctccgggagcgacgcgtccagctcatggacgacgagtatactgattttcaagaagaaatatggcgccggcggtgggcaccactggttactcctatggccaagtttgatccggaaatagtccctgaggtttatgccaatgcttggccaacagaggagggcgtgcatgacatga

SEQ ID NO: 24451 - DNA, 283 bp, Glycine max
aaattacctgaaacatcagctaagacatcatcactttttggcctgagctttcgatggtgtcgggacgcaaagataacggcgatacactcattggcaaatgcaccacgacttgcatagccaacattacctttcatttgtgaggggagggctaactctgccggatgatgtacactgtcaatggctagctagatgagaactcgtattcctcagaggattactagctcctattcttttggccacataagacattctgtagtacctaccaaatcagagctactccctc

SEQ ID NO: 24452 - DNA, 436 bp, Glycine max
  unsure at all n locations
taagccaaaactaatagtgcctgccaagtatctgagtaatcctttntattgctgcccaatgctgttcagtgggatctgacataaattgacagaccttgttggccaagaaactaatttcagttctggtgatggttgcatactgcaaagcacccacaacagatctgtatagagtgggatcagaaaaagactcataccctgatttggttaacttgcagccaccaaccattggagaggagatggaattagcttcatccatcttggttttagtcaacagatctcttgtatacttggactgagttagaataagagcacattaggctgaggtctgacttcaatacccagaaaataatccagattacctaaatcctttatagaaaactcagaattaagtntagtaaccaggatttaatgaaattaggattgttgcctgtgacag

SEQ ID NO: 24453 - DNA, 439 bp, Glycine max
  unsure at all n locations
tgggtcgtntttgtgctcgacttcaggccatcagctctgacccgggatccttaaagttacacgcagctggaccttctgtttggaatggcttaagatatgccttgcgctggcaacatcgttttctacctttatgtgtgacaagatgaacgtacttattttatgactcttgatgattggactcttgtactgaatccataaaatactcgcatccctagaactagaacatgaggggtcttcagacactagttggatgactgaggagaagctttactcaagaatgcgaggctaatagctcaaggctatactaagcccgagggcatagatttttgcgaaactttttctcctatagccaggcttgcaggcataagacacgtgcttggcttagttgctcgccaaaacattaatccttttcaatgaatgttaaagcttctgttatacg

SEQ ID NO: 24454 - DNA, 404 bp, Glycine max
  unsure at all n locations
gcttcgcactcgataccggagaacacatgaacattgctattcaatgacattcatggtgctgcgaacaaatgtggagtatggaggattgccttgagggtcctcacttacgcggtcgtgagactgagctcgccactcgagagtggaggacacattaacagccctagacaatagcattcatgtggctctggaaaaggaacagaatggaggattgccttgaggttcctctcttangaaatcatggaatacaactccaatactcgaatatggagaacacatgaacaggcctaagcaataacaatcatgtggctccggaaaaggacgataatggaggattgccttgacgttcctctcttacgcaatcatggaatacagatgcagactccaaaatggacgaccctgaatga

SEQ ID NO: 24455 - DNA, 358 bp, Glycine max
tcatgtctcatctacactgacaagatttgctcagcaaagctcacagcacaatcattctttctcttggtgatgaggtgcttctagaggtacctgaggagaaacctgcacctcagatgtggctgagacttgacagcctgtatatgaccaattccctaactaacaagcagtacttgtagaacatactacatcacctgaagatggacgagggctcttctatcaatgaacatgtccctttgttcacaactgcaggattgatctgaacagtgtacacgtgaggatacaccatgaagatccatcagtaatgctattgtattctcttgcatcatcctttgaaaagttggtagacactatgcttttt

SEQ ID NO: 24456 - DNA, 430 bp, Glycine max
tatacaaattaactattaatactgtattattaattattaagtgcgttgactaattcgtgagcattattgcttttgaaaaattaattatctgtcattaatccagctctcgccgcagcttcagattgatcgggcagttgtttccatgccattatttttcggacatcgaatggattcttctgtttattatttctgggtcaatatgtatagatcgatgaacaactttattactaacaaatcatattaggtttcacactttacaatggatatcagtttgaacgtcacattcacaactaggggctctcattttctagaacaacatatatcacgattgatttgttgaaggaaaccaaacctcttattcaacaaaatccaacaacgtacttgcaagcactagacaaattgttaaactataacatatttcccgatcctt

SEQ ID NO: 24457 - DNA, 332 bp, Glycine max
cactattgcacgagacatttaaccgaagaacatgcgcccatttacaatcaaggcagcttcgttacctagattatttacacttacctccaaggagcattgggtacttacgtcacacacatgctccttggctaaacatacaaacatgcatactcaagcgtataggggcaccaaaaattgcacatgtgcacatcttggcatttctaatacctacatacgcaaacttcatgatgaaacttgactacctacgcagtatggtgctacatatttaagcatattcttctttgctgactaaaattgcattgcaatttaacagggatactttcttgcaatat

SEQ ID NO: 24458 - DNA, 378 bp, Glycine max
agcacaacagagagctagattccttgcacttgaagtgtctattttatcagcatatactaaaggatcacatccatacagcttaacaaacagtgctttaattgtgccagaaattttcgacagactacaaaaatctgtcgatcaatattactgacgaccatttttctaacggatttgtgtccattggaaatctatcggaaacatccaattatcgactgatttttagtgttaccgacagattattgccgtcgcaaaaatgcttttttctgaccgttacgctcatgcattttaatgaatttttgggtccaaaaagcccttatattcatcatgaaaacactttgattctctaatttccacaaattcaataacatcaagaacacc

SEQ ID NO: 24459 - DNA, 283 bp, Glycine max
gacttcgagctcggtgcccgtggatactctaccggcgagctgcgcgccttctagtttgcacttactccacatttcatgcataagatactggtgcatattctaatttgacgatcactatctccactatccatcctcgtacgaccacccatctatcacttgtgcatttgatactcatctgtctatactaccaagaaaaccgatgtaactagtacttattgaatatgtttgccacatatacgaacgaacacgctctgcgtgcatttttagtgatacgatgtcatgt

SEQ ID NO: 24460 - DNA, 410 bp, Glycine max
tccatggatccaattataagcaagtttgttgttattctgaacaaattgaaccagagaaatatctgcatggctggtagaaccactcttattaatgttgttttaacaacattacctctgttttatatgtcttttttcaaggtcccctcagctttcattaataggatctctgccatccaaaagcaattcctttgtgagctctaatattgagactagtgtggacagtaagcataaaattgttgactgtgtatagagagctaagctcaagactggtgttagcttttttccttgtacgacgtatgagctcctcatagcggaataacactcgatttctagaattgtttcttgggttcctatcaaagcttaaattgaacagtttataatatttacttatgtacgagttatgtgctctc

SEQ ID NO: 24461 - DNA, 207 bp, Glycine max
gaccaaccctgcattaatcgtatggttgctccttggccccttccaattattaaacactgagttgacataagtggacaggtcatttgcgaccatgcacctattggaccattcataacgatattaaccttaacgggaagacagctacaccttcaataattgccattcttgcggccgcaataacctatgcgtgagtagcaaccacttgag

SEQ ID NO: 24462 - DNA, 367 bp, Glycine max
gtggcgttattcttaggtggaagatcaagcttgtattagtgccacaaaccgcgactgttttcacagtgaccaagaccttacaacaaggatggagcacgcttcttcatagatggcagcaagtggctccacatattgatgagaatctcttcattagagttatcattcaaccagggaatggcactgttcctggcaagagaacagtaacaacttcttacaatgctctctttcttggtggtgctaatacgcttctccaagtgatgaaccatggttttcctgagttaaggttgacaagaaaggattgagtggagactactgggatcgaatctgtgctatatattgctggctaccctgatggaacaggcccaga

SEQ ID NO: 24463 - DNA, 361 bp, Glycine max
agcttgcttctatagccaaacgttcatattcgattgaagaataaagaagagtcaaatcacatctaaacagcgttttgttgtttcatattgctgaaattgataagaaagacaaaggttgcagatctcaatgggaaatgaatcaatcagccataagacaacaatataggacaactatcttattttaattaatttatttcatcaatttgtctatttttacacttctagcgtctattcaagcataagacagtaaattggccataataggcatggctctaatatttaaaaaataaaacattgaaattttgacagtaaaattgtcatatgacagtaaattgcccataataggaaaggcactaatatt

SEQ ID NO: 24464 - DNA, 430 bp, Glycine max
  unsure at all n locations
tagtgtagttcttgaaagagtgcaccacgcacttgctcctcaatggtgtgcgcgctctgcacatcgtagtggtcggagaggaacagttctttcgcaccatggaactgtctccgaccaccaatcgactcttccggcctgtagtaccacctcacacgcaccttcacgttgttcctattatcctgctcgatcatctccacgcgcgccacgtaagggggcttcgacgtgtccgagggccgcatcagaacacagtctccagctgcaaaacccaaacattttcttaaacgatagctctcgctcttcaaaacgacatcagcatcatcatcatcatcgtgggcagccacaaaaacagggaaagggaccgtcttttaacgagacaacgcanaagggttggcgtgtgttacctcggacgatcttgttggttcctcttatg

SEQ ID NO: 24465 - DNA, 487 bp, Glycine max
  unsure at all n locations
atcgcccttggtcnatgatacttgcntncgaaacncctcggcncnnaactgggcgnatactatggtggaagatttaacttggnatcgtgcccgaaacccagacagttttcgcagtgatcaagaccccacaacaaggatggagcaacgctacttcatctatggcagccagaggctccacatatcgacgagaatctctccattagagttatcactccaccagggaatgcgcactcgctcctggcctagagatcagaagtcgacgttcttaccaaagctctccttcttggtagggctcaatacgctactccaagtgattaccccatggtctgcctgaattaagtatgacaatacacgattgtctgtgaaccacttggatctaatttgtgctgtataatgctgagcacccatggggaaccngcccgaaatttttctcccatggaatatcacatccaaggcttatttcaatgccaaacagattttgccagcc

SEQ ID NO: 24466 - DNA, 374 bp, Glycine max
agcttgcctcccagctcgcccaggcgagccaggttgcttcctccagaagcaaccgccttctggaggaagaatctagaaggcccaagtgggtctggttgctatttgcacctttttttttttactaaatacacccctttgctttttttggtgattctttttctataacgttacaaagctttacgaatttcgtaacgatacttgttatctttccgtaaggttacagaaccttacgaaacatgtaattactcccttttttagctgtcgaaatgttacggaaactcacgaattgcgtaacaatacttccttttgatttccagcatgttacggaatttcacagattgcgtaacaatgttttcttttgatttccggcatgt

SEQ ID NO: 24467 - DNA, 402 bp, Glycine max
  unsure at all n locations
tggcctacgtcagttgaacaaaccctcagctgccatttacatataacaaacttagccgatgtcaacataaaaataacaatgagtaacgttgaccaaaaacctagcctatttgaacaaaaaaatatccataaaatggctttggcaaaaaccctagcttgatgtcgaccaaaaaacctagcatatgtcagccaaaaaaaggccttggcatcgaccaaaaatagtcttgaccattgtcaaccaaaaaacatcatcaactgataagttctatcctattttattgtgtccttttttactcttaatgtcttttgtggccagtccaaccatttgaatgatgtgagaatagactgtgatgggaaagtcatgatnttatttggaattgaaattggatggttgatgtgttat

SEQ ID NO: 24468 - DNA, 369 bp, Glycine max
  unsure at all n locations
agcttccgtttccgagagcatttcttatttaagcacttcagtcttttcttttgtgtagcttaggaaaaacgtcatttcttcttctttatttcttccaaagacatttctaaagtttcaagcactttctccatcacccacaaccaccattagccaccacaaaccatcattgttctccattgaaaacccacaccgagaggaacccttcaaccgaagcggaatcttccaactcggcttgcggttttggcagagaacgaaaatcctaatctgaactttcgtcttgtttcgaggtaaccatggatctatgcttatttcttgttagttacatcttgtctttgcatcttttctgactntggaaccaccattgcatgt

SEQ ID NO: 24469 - DNA, 436 bp, Glycine max
tgtcggtgtacctaaagatgctattaggctcagcctgtttttattttctctatctggggaggccaagagatggctgcattcattcaagggcaatagtttaaagacctgagatgaggttgttgagaactttctaacaaaatatttcccagagtctaaaactgcaaagggaaaacttgcaatttcttcattccataagtttccccatgaatctttgagtgaggcattataaagctatagaaaactctaactcatggtttttcagagcctattcagctgaacatcttcattgatgggttacggctgtagtcaaagcagttactcgacgcttctataggaggaaaaattaagttgaagacacctgaagaagccatggacttaattgaaaatatggctgtcagtgaccatgcaattctgcatgatatagttcatattccta

SEQ ID NO: 24470 - DNA, 368 bp, Glycine max
agcttgtcgttattgattacatagttttttgagacaatgattgattcattcaggagtcttttctataatcgattagcatgtgctataatcgattacttctcttttaaaaagtgtttcagaagtgatcaagaacactttaattgattacattgaggatctaatcaattacattgttcttgaaagttttccagtttttatgaagaacactttaattgattgaaatgataatataatcgattacttctttaaaataattgattacattgtatattcaatcgattacatgtggttataactattttctctataaatagacacattgtgtgctcacttctaacaacttcagtatacataagtttattatagtg

SEQ ID NO: 24471 - DNA, 417 bp, Glycine max
ctttgcaagctggaatcatttatcctatctccgatgttaatgggtgagtcccgtccaggtagtcccgaagaagaccggcctcacagtgataaaaaatgagaaggaagagttgattcctactcgggtgcagaacagttggagagtctgcattgactacaggaggctgaaccaggttaccaaaaaggaccattttcccctgccattcattgatcagatgcttgaacgcctggcaggtaaatctcactactgtttccttgatggtttttctggttatatgcaaattactattgctcctgaggatcaggaaaagaccacattcacctgcccctttggcacttttgcttataggaggatgcctttcggcctgtgcaatgcccctggtaccttccagcggtgcatgattagtattttcagtga

SEQ ID NO: 24472 - DNA, 362 bp, Glycine max
agcttattcatgggatttttgatgaacgcactcaacgagcaggagatggatcacgacaggccaatcatatctatggatcaggctctggaataagcgtgctggccagaatctcaagtccctctggagagagcccataccagcgttcctcccggacctgtactactaacactgagccagcatcatgaagagccactgcctactggagtagatgcacactgcttcttcggaactcgagacattgtctcctacagcactacctgtgatagacatccctgatgacttaactgatgaagccggtgctccttttgatacaccatcttgcaacatagacgatggttgtgactattttgactagatagact

SEQ ID NO: 24473 - DNA, 435 bp, Glycine max
tgtcacttgaacacatcaatagccttgcaccatttttcatctcttctcaccattttctctccaaaaaccaaaacttggaccttcattcttctccatttgtgcgagacactcaaggagggagaggtcaccattttcatcttcttccaagctccatctgtgagacttcttctctcaaagccttggtaagaagcccttaaacctctattttcttcttatttatttttcatttttgtgcaaaattcttacttgaggttccaaaatttctttttcatcctttcgaagcttaagagttcaagatctaagttttttttccttgaccatttcgtggaagcttcacttaaggtaaggggagtctttccacttcttaaaccctaaccttgttgtctttggaagctaggtttcattacatgttgttttgatgtttaaaatttcatg

SEQ ID NO: 24474 - DNA, 352 bp, Glycine max
atcttatgctgcaaacatttataatagacatcctcagcagcaaaacaaacaatagtagaataattatgacctttcaagcaatagatacaatccaagttggaggaatcatccaaatctgagatggacaagtcctccacaacaacaagagcctgtccctccttttcagaatgctactagtccaaccaagccatatgttcctcctccaatacagcaacagcaacaacaacagtcacaacaaagacaacaagcaactgaggctcctcctcaaccttccttacaagagttagtgaggaaaacgacaatccagaatatgcaatttcagcaagagacaagagcctccattcagagtctg

SEQ ID NO: 24475 - DNA, 427 bp, Glycine max
tttggagtagaaacatgggaccaactcattttattttattttaagaaatcatatctagtcaaggtctgagagaccatacaagtttcctaacgatttctaattatgtgggccattaagtctatcatatgctgacaatagccgagaagcccatgaatctcttcgggggcggagtaggtgtctgccatcgccttggccttggctaacaatcggggaagttcttgactcccgttcaaggtaagagcaaaccgatccatccacatggttgcctcttggtgtaaagagtcgatcacccttcctctagcctctgtttccgcatatacttgggcatactcatccgcgattctatgctcgggggccgtggctagacccaactcttcttggtacttggcgatgatagctaacatgttgggttctgtctcgcatagat

SEQ ID NO: 24476 - DNA, 294 bp, Glycine max
agctttgatggtgtcgacaagagatcacatgtttgtcatcatccaaaaggcggagaatgggaatgtatggatacatgattttgatgatgtcgaagaataagccaacaaggctgcttcaaatgataagcatttgcttgaagaataattcatgattgcttcaacaaacaaagccttgtttcatgattcactatacaccaatcctttgcttataacaacatgctttcaagacatgcgaggctctggtaatcgattaccatgaagtgtgatcgattactcgcagacagggttgagaaa

SEQ ID NO: 24477 - DNA, 432 bp, Glycine max
ttgatggtgtcgagaagaaatcacatgtttgtcattattttaagggggagaatgtgaatgtatgtatacatgattttgatgatttcaaagaacaatctaacaaggctgcttcaaatgataaacatttgcttcaagaataattcaagattgcttcaacaaacaaagccttgtttcaagattcactaaagaccaagccttgccttaaaacaaagtgctttcaagacatgcaacgctctggtaatcgattaccaggaagtgtaatcgataaccagaagacaggattgagaaatagctgttgaaaaaggtgaatttaaattttcaacatgtaatcgattgccatatgtgtgtaatcgattaccagcaacagaactttggaaattcaaattcacaagtcataacccttcaaactataactgtgtaatcgattacaca

SEQ ID NO: 24478 - DNA, 358 bp, Glycine max
agtttttaatctcgatttaaaattacatcagaatgataattgtacatgaattatcaatatgaccattgttaataactcaattttgatagctatagatttacacattgcttttcagcagcaagtctgctctttttggattggctgtcatcaactaattagctttggtagcggtcagatctgatgcattcttcatttgatagatcatagtgccaagacaaggggcaatgagctggaaatacatctatacctatgaacaaaagtgaacccggacatgaaaggcagagccagactacatgtgaagcccaggcaataggatcttgatcttctatgcctatctctttgttggttaaacttcatt

SEQ ID NO: 24479 - DNA, 425 bp, Glycine max
taacatagactttcttattggttagattgttgacatattccattgctactgttaagttgctggttttctgtttctacattatatttttaataataattataaatgttgcctcttttcacttttgtttcttgttttcacctagtactaaaatgttgttttcaccatttctagtacaaattttcaaacaccagaaacaaactgaaaccaaagttgtggtttgtaattagttaaaagaaaagatagaatagaggtagaaaacatttccttaaaccaaacaggcccataagttgtcggtctttggacataattggtggtacttcccatctctaaacttcataagcctggatgtgcattggtcaactatagttaaatgatgaaagaaaaaacaaattctgagcttgtgattgcttgcacctttgtgaaca

SEQ ID NO: 24480 - DNA, 330 bp, Glycine max
agttgtgattttatacttgcccgtcatttatcagtgtttgcgctcggaggccccgctctacaaaatgctctggagctctactggacgactatttaaccaaagctggtatgggaatgttgcgagaacccttcaacagcttactgatacgatctgagaagtgtgcatggcacgtgggcatatcgacgtgcttatgtataacagcccatcgagcatgtttccttagaaactcgatcactccatgtggataagggtggacacagtgcactaaatccttctcaagtgtgatcaactatgtgcttgctaggagtgcacgctgcgtactatttttta

SEQ ID NO: 24481 - DNA, 406 bp, Glycine max
tgcatacaagattcttcctgtctgacacttttaatgtttgtggccgggtcatataaatgccttcctatacatccctatgcgagaatgcagttgtaacagctaactgctccacgtgaagattgtctaccgctattatgcttagaatagccctgatggtggtcatctttacaactggagagaagatttctgcgatgtcaattacttgtttctggtgagaccctttgaccacaagattcgacttgtgtcttcttgtaccgtcagatggttactttagcctatatacccacctagttggtcatgccttctttccttctggctatttatttaaagaccacgctttattgttgatgacggatggcatgtcatctgtcatcgctagcttccactcgagaatgacattcccctg

SEQ ID NO: 24482 - DNA, 350 bp, Glycine max
agcttttcttcgtgggttggcgggttctgtctcgtagaatggcatgatcattggctgacatgttctcaattagctctgttgcttctttcggggtcttcagttttatctttccccctacagaagcatctaacagttgcttggtttgtggtctcagcctatctataaacatattcaattggattggctcggaaaacccatgagtgggagtttttcttaacaagcctctgaatctctccaatgcttcactcagagattcattacgaaactgatgaaatgaagagattgcagctttcccttctacagtcttggactctgggaagtatttctttaggaacttttcaacaacttct

SEQ ID NO: 24483 - DNA, 433 bp, Glycine max
cgaacctccgttggagttgtcggttgttgttcacttcataaccgactccaccttgttcggatccaccgcaaccccgtctttagaaatcacgtgccctaagaactgcactttctccaaccaaaagtcacatttcgacagtttggcgaacaacttcctatccctcagaatatgcaacacaatcctcaagtgcttctcatgctcctccttattccttgaatacactaggatatcatcaataaacacaaccacaaatgggtccaaataatcatggaatatacggttcatatagtccatgaaaatagccggagcattagtcactccaaatggcatgactaaatactcgtagtgcccataccgagtccgaaacgcagtctttgggatatcttccttcttaactcggatatgatgatacccagatcgcagatcgattgtg

SEQ ID NO: 24484 - DNA, 346 bp, Glycine max
  unsure at all n locations
atcttcttatccaaggctcatcttggtggtgaagctcttttttccatggcttattccttaatggatggcgcctcctctcacctcttctcctttgccttccgctgcatctccatggagaaaaatcaccattgaaggacctcattgaagctcaaagatccagcctccatagaagctccacaagcaagcttccatcaagtggtaatcagagcacaagagcttcaagtaggtgctccttaaacctccattaattctttttctttaccttctcttccattggtgnttcttcatttttctccatgtatctcctcacatgtcttgttatacatgttgttaacatgattcttta

SEQ ID NO: 24485 - DNA, 418 bp, Glycine max
tgcggactataccttcgaccaaacacggccgtgtttctgtctcggcccggatttaaagcgggttgcggtaccggctccgcttccctaaccgtactggaggcggttgccgtggctttatcctctatggttttctggagttttaacatgacctccgagatggaagccatttgatcttttaaggccgatagatcggccttcatctgttcctgcacaccctcttcattatccattttcctggatcgagtgttataggggtgccttggtgttttcttagttatgatgaaattcctaaagaaataaacaacggtgagtatgccaccaaaacatgagtatgcaaatggatgatcggagcacttggatccaccccaagggttttagataacgtgatgagtccagaacttctcatttataaaaagac

SEQ ID NO: 24486 - DNA, 361 bp, Glycine max
agcttgggctaagcgagtcagtctcgctaagcccaaggcaatttagttgttctgaaatttgttcatgcgctaagcgagtcacactcgctaagcgcaatttcctctctgtttttgattgctcgctaagccaattaagtcccaatggtcaagttaggctaagcgcctactggcactaagcttgtttagtgtgtcgcgctaagcgagcctgtctcgctaagcgcaattagctctctgttggagaataaggcttagcgagccatgctcgcttagccattgtgttgtgttagctagggtgtctcgcttagccagagtctttattttttagtagttgtgctaagcgcgccttgcgtgctaagcgtgt

SEQ ID NO: 24487 - DNA, 422 bp, Glycine max
  unsure at all n locations
agatgattcaacttttcttctctagggacaacaagtcgaaccagttatcaagtcccatcaacttcagcgattcgtcgtaaatccccagattccactccgcttcctctctaaagatgatcgtcacgctggcattgagaatccagcttatgaaacttgggagcaacaggatcaagtgctcctcacatggcttcaatcgactctctctacgttgattttatcacgagttctaggatgcacccactcctatgaggtttgggaatgcattcacgattatttccacaagcaaacaatagccacagctagtcaacttcgcactcaactntgtgctatgacacttgcaggcaactcaatacgtgaatttctgtcacagattcgagcaatttctgattctctagcttctgttggaagccggattatgcttc

SEQ ID NO: 24488 - DNA, 345 bp, Glycine max
agctttgacttgagtcatcaagagattataaatatgtgaccatggcatgaatttaattaataatttatctttcaatcttttttcatcatctctcaacatctttgaactctttctacagaattttctgattcatttctcttcatctttcttaaagtttttgttcaatactttttctttgaagaaaagttctttgatcaaaaacttgtgttattcatctttttcattctcttctccctttgccaaaagaacagaaggactaaccgcctaaattcttttgtgtctctcttctcccttttccaaaagaataaaaggactaaccacctgaattcttttgtgtctctcttc

SEQ ID NO: 24489 - DNA, 315 bp, Glycine max
atttaaagcgggttgcggtaccggctccgcttccctaaccgtactggaagcggttgccgtggctgtatgctctatcgaattctggagtattaacatgacctcccaaatggaagccatttgatcttttaaagccgatagatcggccttcatctgttcctgcacaccctcttcattatccattttcctggatcgagtggtataagggtgccctggggttttcttagatatgatgaaatttctaaagaaataaacaacggtgagtatgccaccacaacatgactattcaaatggatgaatcgggcacttggatccacc

SEQ ID NO: 24490 - DNA, 375 bp, Glycine max
ggttgtctatttggtgatcttgagcttctcagttcttggtagaagtttaattgactcttcatgtttagattttaaaaaccaacgtttagaaacactggtaatcaattacaaatattgtgtaatcgattacacacttttgagaatattgtatcacaagttgcgactcttgagatttgaaattcaacgctaatatacattggtaatcgattacattaccatggtcatcgattactactttgtaaaacaattataaaactgtttgcgactttggtaatcgattactgtcttatggtaatcgactaccatagaataaaaactctggtaaaagatttttctttgaagaattcttttggacaaatagtgctattcaatctt

SEQ ID NO: 24491 - DNA, 433 bp, Glycine max
tactaagcttatcttcaagcatagaatgattgtacttctagctttagctatcatctctgatttctcctttgagcttagagattcagacatcttttcttctcctttaagagcttctgcacagccatgttgaatcaagattgcttccatcttgattctccataacccgaagtcattttcccctgaaaacttctctatatcgtactttgttgttcccatctttcttgatcttgatcctgtcccacagacggcgccacttgttggttctagttataaattctgctactcttaatctgcataagatcaaaaaacaagaaaaacacagaaaacagagcaaagcaatacacagcagagcaagaacccaaagatttacgtggttcgacaatgtgcctacatccacgggaaaacgtagttcatcattatcgcattgatcatg

SEQ ID NO: 24492 - DNA, 370 bp, Glycine max
agcttatactctgctttcgcttttctttaacatttgcttcttgcactttctggaaactcttcgaattttttgaagcttgaaatgctttagcagtcgacttgtcaaacacgacgttacaacaaagacaaagcataacctctttctcaactttttgtttcttcaatagaaattcgaccaatgattcctctgcaagtggaaactcttcttcctttttgaactcttccaaggcttggttgacctcctctctagataaaggagcactcacttttggtgttcatatcgaagctcccatcatcatgatttgcatgggtttgatatagatagcctgaatatggaatggatcaatatccaccttcattggtttctcttc

SEQ ID NO: 24493 - DNA, 423 bp, Glycine max
tgagatgaggaagtgtagaagggtgaaacttcctgcttttattgttgaccacagagtggtacctggagatatgtcgcgggggtcaggagaccttagggacgtcaggtggggtgctattgcccaaaaccaagcttgaccaatcccaacccaacccgggcatagtcggtcaatgagaacctgtgaggtacctaaacaggcgagctcctggcagtcaacagataaaaggaacaaagaccacaaagcaaggaggcttgtggtggctggccagctgtgaactttgattgatatgtgggttatggcctctggtaatcgattaccaaggaagggtaatcgattacaaggcttaaaaatgaagacaggaggctaagatggtctctggtaatcgattaccacggggtgtaatcgattaccaggcttgaaaac

SEQ ID NO: 24494 - DNA, 375 bp, Glycine max
agctttacatcagattttagtaatgacccactaacctagaattaaaataacttaatgccattaacctagggaattaaaaaaaaaaaaaaaaacttaatggctgagtgtaactgaaattgtggcaaccaaaagtcacccccaacagccaacaagtcagccaccatttggtctcccaaaaggctgatgcctaggttgccaattgggcccttattacaacttgaactaaacctaactaaagcacttttagttgattcacccaaaacatatttttggtcagccaactttacaaggattgggccattattttgacaaactaaacactctaaaattgagacaaagtggtgtcatttagtcctcctccatttgggccatgat

SEQ ID NO: 24495 - DNA, 434 bp, Glycine max
tgtctcagcgtttatgcgagacagagaccaacatgctagctatcatcgccaagaaccaagaagagttaggtctagccgcggcccacgagcataggattgcggacgaatatgcccaagtatacgcggaaaaagaggctagaggaagggtgatcgactctttacaccaagaggcaaccatgtggatggatcggtttgctcttaccttgaacgggagtcaagaacttccccgattgttagccaaggccaaagcgatggcagacacctactccacccccgaagagattcacgggcttctcggctattgtcagcatatgatagacttaatggcccacataattagaaatcgttaggaaaacttgtatggtctctcagaccttgactagatatgaacttccttttgaaataaaatgagttggtcccatgtttctactcca

SEQ ID NO: 24496 - DNA, 373 bp, Glycine max
agctttttgactcctgattctttggaacttgcttaactcttgattctttatcatcatcaaaatagtcttggaagtcattgcttccacaaatcattccaggactcaccaccatcacctgagacatgtgtgctttaaaacataatatgatgcataaatggaaataggacatatggaataatcgtaagtggcacaggaaaaacaaacatgacaaattgaaagcatctccaggctacaaaataaaaaatataatttttttttaattagatatgaaccccaaatcagagtgagaatctgtttgcaccaactctatcatgcatcttaaatatgactaactatctatgatggatgaggcctttatggtttatacagacag

SEQ ID NO: 24497 - DNA, 435 bp, Glycine max
  unsure at all n locations
ntagctntgtggggatagtttttgaatatctagattatattttcattaagagtctagtactaatataaaaggattagtactttggttttgtgtatcacattttatctatcaataataattccagtttatcagcctgagccatcgtctctcttttctttcttccctaaccctaaaattataattctcaacaagcttcatccataaatcatactggagggcctatcttcttgaggtaattttcgaggaatgagattcattttcattcaaaaggcataaacagaaaaaccaacaagttacaatttcaagaatcaagggagataaacatttgagttttaagatgaaattattggaggaaggtaattggaatttacaagttaatgctaaccttatttgtgatgagatgtcttanaagattaggaaggtttctagagcagt

SEQ ID NO: 24498 - DNA, 374 bp, Glycine max
  unsure at all n locations
cgctttcaagtcttttagtctcagaggatgcagctgagtgtgcagctacctcatgcactcctctaatgactatggcatcatttctggcactaaactgctgagagttggaagccatcttctcaattaaatttctggcttcagcaagagtcatgtctccaagggctccaccactggcagcatctatcatacttctctacatattactgagtccttcataaaaatatcggagaagctgctccgaaatctgaaggtgagggcacctggcacatagttttttaaatcgctcccagtactcatacagactctctccactgagttntctaatacttgagatacctttcctgatggctgtggtcctggaagcagggaaaaaa

SEQ ID NO: 24499 - DNA, 430 bp, Glycine max
  unsure at all n locations
tgtaatcgattacacacatactgtaatcgattaccttatgagattttcagaaaatattctcaacagtcacatcttttcatttggttcttgaatggtcatcaaaggcctatatatatgtgacttgagacacgaatttgctaagagtttttctgaacaacaagtgtttattctctcaaaaagcaaaatcgttttatcctcttaagaattccttggccaattcaattgcaattcattaaggaatcatttgagtgctcagattgtaaaatctatctcttcaagagagattcattcttcttctctttctaattcactaagggattaagagaccgagggtctcttgttgtaaaagaattctaaacacaaaggaaggattntccttgtgtgtttagaacttgtaaaaggaatttacaagatagtggaactctcaagc

SEQ ID NO: 24500 - DNA, 170 bp, Glycine max
  unsure at all n locations
tctgtgcggtatttcacaccgcatatggtgcactctcagtacaatctgctctgatgccgcatagttaagccagccccgacacccgccaacacccgctgacgcgaaccccttgcggncgcnttnaatataacttnnnatcatgtatgctatcctacgtattagccatgacg

SEQ ID NO: 24501 - DNA, 298 bp, Glycine max
gatttacatatgacccactatcctataattgacataacttagtgcctttcacctatgtagttattgtatcatgcttaatcttatgcgttggctgattctgatcatggggcagccagagattacccccttcatgcaacgaacatgacacctattggtctccaaaaaggcttgagcctaagctgccaaaagtgcccgttattacacacgaactaaacctagctaaagcacttgttagtgagtcacccagaacatattttaggtgagccaactttacatggattgggccattattttgaca

SEQ ID NO: 24502 - DNA, 370 bp, Glycine max
acactatctaatactcgagcttatgtaacgacgtctattgtatcttcgtgttacattgtttgctgcacaactagttatgcttttgcttttgcttttgcttttgcttttccacaggttcacgattctgacatttcttgatatatataattttctctttgaaagttctacgatttctccgccttggggcttccactattctctctctgcatgctctgacgttgaacgacatgccccatcacgcctttgtggtttacgtatcaaattcgaatgttgagtcgctcttgtgacgcatttagattgactactacttttgcttatgggatatagcaccttcttaatggtgcatccaacaagcataagtagtgaaaac

SEQ ID NO: 24503 - DNA, 365 bp, Glycine max
acctgcacactagattttaataatgacccactaagctataattaacataacttattgccattaacctagggattgatatgagctcatatgttcttcatggctgaatgtaactgaaattgtggtcgccaaaagtcacccccaacagccaacatgtgctccaccatttggtctcccaaaaggctgatgcctatgttgccaattgggcccttattacaactggaactaaacctaactaaagcactttgagttgattcacacaatacatattttggtgtagccagctttacaaggattgggccattattttgacgaactaaacactctaaaactgagacaaagcggtgctatttaggcgtactccattt

SEQ ID NO: 24504 - DNA, 413 bp, Glycine max
  unsure at all n locations
ttaacatccagcaacaacaatagtagagagatatattagtttgatggtctattgaaatgggttttgttctattgtccaaatttccctaatcggtatacaagtagtagagagaaatggaagtttgaaggtctatttaaatgggtgtaagttgtaacatttatttagggagaacattaggtttatgaattatggtcttcttcgtcatgcaatgaaacccaatcttgatacacaatagacccaaggaatgaagcctacatttctgctattttatgatttctttaattttctctacaacactaacattatctatggtagacagcagtaaaaatccaactcatcaaacaatagttcctttccttaagcttccctantacccattaaaattagaaaactaaccacagataatgttcact

SEQ ID NO: 24505 - DNA, 366 bp, Glycine max
agctttgctcatatttctcattctagacaaacttctcatttttacgggttagtttagttaggggtagtgctaatttagaaaatcccttaatgaatttcctataatagccagccaaccccaagaaacttcgaacttctgttggagttgtcagttgttgccactccataaccgattccactttagccgggtccatcgcaaccccgtctttagaaatcacgtgccccaggaactgcaccttctctaaccaaaatttgtatttcgacagtttggcgaacaatttcctatccctcaggatctgtaacaccatcctcaagtgcttttaatgctcctccttattcctcgagtacactaggatatcatcaatga

SEQ ID NO: 24506 - DNA, 402 bp, Glycine max
tagggatggaacacttacttgttggtgatttacaatagcgcaaaacggaatcaaaaaatgcgaaaaaggatgaccctagggctgcaaactcgtcaatcccgtgggtatggcttttgaaaggggggaaaagaagattttgaatgcaaaaacgtcccccctttcgtcattcttataatttggtgcaggggtggctcgcccagactcgcccagctcgaccatgcgagctaacctgcatataagctttcttaataagttgaggggaacattaaccatgttacctaccttcacatggattatcacttagtctaccttgatcttacttagggcagaatgaagtgacgcttccttgattgtaccatctaacacaaacactatagcttatatatagctgtatattacagg

SEQ ID NO: 24507 - DNA, 358 bp, Glycine max
atcttcctcgggaaaaatgctatgcaggctttgttaaccgttggatcttcgcgaagtttgatctgcaatttcaaaagacaattttccatgatctgaccgctcggatctttgagaagatgtctggagtgtgctagaagcctcttaatgaagcttctagaggaagcctcttaatgaagcttctagaggaagcctattagtgaagcttctagagataactacatgaagctgcctcggtaaaaatgctgcccagcctacgttaaccgttgaatctttttgaaatttggtttgcaacttcacaagacacttttccatgatctgaccgtgctagaagctttcgttcccgagagcatttcttatt

SEQ ID NO: 24508 - DNA, 431 bp, Glycine max
ctttggtggagattccactatacgaggataaatattgtctaacatggtacatgctaagactgattcagttagtccagcagtagaatcaactacagatttagaggaagaaaagattatggagaatgagtagtccaagaggacttcattggagaataagatggccaggtggaacaagagaaagagttgaaacaaattgaagaatcattactcgaagcatggttgaataaagacgacttactggaagtagatgcgatgagtttcttggctaatgctggttaaaatgaaagtgttgaggatgatatatgcgttgagaaaaccaattgtgctacaataagcaatgtagaagatgacaaagtagtagagacaacattcgacaagcctaccatagagattgtagaacatttgagaccattctacatgaaccgctcact

SEQ ID NO: 24509 - DNA, 359 bp, Glycine max
tgtttctacttatgtggcagggcgggcttccttcaccttcttgtctccaacgcggactttgaccattgttcttccttcccgcgatgctccttttcatgtctgcctgagtgggcttatagcctaaaccatacttcccacgattaccttgggtatttatcagtctagttatgccgccgttgttttttcctaaacccatcccgggctcataaccgttccccaacataactcgggccatcattaccgctgcatcggacagactaggctgcccaaagagggagtccacggaggaaatgctgaccacctcaaaagactggaaagcagtttctaacgattcttctgcggcttccacataaggcatg

SEQ ID NO: 24510 - DNA, 394 bp, Glycine max
  unsure at all n locations
agcctcaaagaggtccaggaaggacatggctgtcttatgaactagttccgctccggagtacgacagtcaccgctttaggagcgctgtacaccaccagcacttcaaggccatcaagggatggtcgtttctccgggagcgacgcgtccagctcatggacgacgagtatactgattgccaagaagaaatagggcgcctgcggaggacatcactggttactcccatggccaagttcgatccagaaatagtccttgaatnttatgccaatgctgaggccaacagatgagggctcgcgtgacatgagatcctgggtaaagagtcagtggattccgtctgatgccgacactatcggccagcttatgcgatattcgtacgcgttggaagaagaccactaatg

SEQ ID NO: 24511 - DNA, 376 bp, Glycine max
agcttggtttggcaaatattacagaaaagttcaataagataacaaatttgacatatgagtataaacaattcaaaaataggtgagattctttaaaaaaaaggaatgacaattatgggctaattaagcttattgggaaggacactagtcttggctgagacggagacaagaaaaccattgctcctagtgatgaatggtgggaagccaaaattcaagtgtgtactattcaactaaaataaagttagttctagttgcatgtcattgaactttcttcagtaggaagtatgttaatcaaacactcaatggaaattgcatgtaattggagagtaatgggtttctccttaagagtctctttgtcaagtccaagtgtgacttggga

SEQ ID NO: 24512 - DNA, 355 bp, Glycine max
  unsure at all n locations
tacatggnccatgctgagactgattgagttattccagcactagaatcaactactgatttagaggatgaaaagattatggagaatgagtagtccaagaggacttcattggagaataagatggccaggtgggacacgataaatagttgaaacaaattgaagaatcattactcgaagcatgggtgaataaagacgacttactggaagcagatgcgaagagcttcttggctaatgctggttaaaatgaaagtgttgacgatgatatattgcgttgagaaaacccattgtgctaacctaacgcctgtagaagattgacaagtagtatagacaacattcgactagcctacaatagacattg

SEQ ID NO: 24513 - DNA, 376 bp, Glycine max
agcttatgcccctctctttctcttttgctcatacgagctatttacaacattacttgctttagtctccttacacatattcttatttgagcgtcagagttctttgttttacaagtccccttcctgttaaaggcacccacaacgccgacgtgtgaagttcagaaccacacttaaccacgtcaaccctgatgtgccaaggttccagattttggtaagaacatccccaaaacattcattcttgtcccaacattgcatgtgaaatagttaccaactaaccaaccattatgacaatgacaaaggcatgcaccacaagcataagcatgtcctcccaatgaagaagccctatgttgttccacaagtatcttataccaggagcact

SEQ ID NO: 24514 - DNA, 378 bp, Glycine max
  unsure at all n locations
tntctttttcttcttntttttcctttctttntttttcaaactttcatttgttctaacaatcccccacttgaaatttgaaaagaagattttcgaggatttcataaaattgtgcataaacaaaggtgtcatacaacttgaacctttgcatagtgagtaagattcagattttattagagtgactcgaagtcttgaactctatctccgacatcaaaccacacacaaccttttcataggtgtattctataaagcccgtgcgttaaagaccatgcacgtctatcccggtatagtgaacgctctaganatntttgcccaaaatttcatatgaagcggcccccactttaacattcacataggtgagtctatcaagagtactcctgt

SEQ ID NO: 24515 - DNA, 374 bp, Glycine max
acctttggcttgcattttttacttatgtggcagggcgggcttccttcaccttcttgtctccaacgcggactttgaccattgttcttccttcccgcgatgctccttttcatgtctgcctgagtgggcttatagcctaaaccatacttcccacgattaccttgggtatttatcagtctagttatgccgccgttgttttttcctaaacccatcccgggctcataaccgttccccaacataactcgggccatcattaccgctgcatcggacagactaggctgcccaaagagggagtccacggaggaaatgctgaccacctcaaaagactggaaagcagtttctaacgattcttctgcggcttccacataatgcatggg

SEQ ID NO: 24516 - DNA, 372 bp, Glycine max
  unsure at all n locations
agcttaatatttctatatatggcttaaaacaggcctcccctcagtggtaccttaagtttcattggataatttcttcatttggttttgatgaaaatccataccacaagattagtgggagtaaaatatgatttcttgttttatatgtagatgatattttacttgcagccaatgatcggggtttgctacatgaggtgaaacaatttatctctaagaattttggcatggaggatataggtgatgcatcttacgtcattgacattaagattcatacatatagagctcgaggtattttaggtttatcacaggaaacctatattaacaaaattttagagagattntggatgaaagattgtttaccaagtgttgctccca

SEQ ID NO: 24517 - DNA, 436 bp, Glycine max
tgtagagagatctttgttctagtgtaatcgattaccccaaatttgtaattgattactttgttctgttgagaccatgttttttttcttaggtctttgctttaatcaattacgaagatataggaatcgattacatggttcttgaaagtgttcccagaagtgatcaagactactttaatcgattaaatcaagaatctaattgatcacattgttattgaaagttttccaagtgttgggaagaacactttaatcgattaaaatgagaatataatcaattacatctttgagataatcgattacaagttgttctaactattttctctatatatagccaccttgtgttctcactgtcaagcattcaaaacatacggttttgaatgaacttttaactcaagacttcaatgatcttttgttgaagatttcaaatgttagagtgagt

SEQ ID NO: 24518 - DNA, 367 bp, Glycine max
agctttatcacttttcattcttgagctgattgactatcttgccgtgtttgagatgcttggatgattttcatgacggccttcactctttaactctttacgtgttggatgttacccattcttttcattccttgagattcattgagaaatatgtaattgttgttgtgtttgtttgtttctctttaatgtctctggatttgtcccttgctttgttttttattttgcccaggagtgcaaaagcctaagtgtgaggggatttgatgtgtcatcattttctcctaattcttaaccctttttgtcaccattttaattactgattagccttaattgtcaaattaattatgcagctgtatcatttaggcatattgga

SEQ ID NO: 24519 - DNA, 433 bp, Glycine max
  unsure at all n locations
taccctcgctatcgttcaacgactttccccggttaaatcaatcgttcaatcgtgaataagacataaacatatccacaaatgctgttgtctcaagtgacaggtggcaactgcaatttcattcacgctcaccctccaatttctcttatttaccttcatacccctcacttttatccataattattaattatcaataagcacaaaatttaagtaagtgctgcagcctgcaggtcttccttttttttttaacactcatatccataagtgaaaatactaatcagaaatttgataaaaaaaataagtaaataatttaatcttaattttagtatattcatcatttaatgagttctgcgtgtttgacaaaacacaaccaaaatcatttgtagaataaaaaataaaaaatatttttttttcataaactcaaattaactntata

SEQ ID NO: 24520 - DNA, 367 bp, Glycine max
agcttgataatattagagcactacaagaaggggtctattgaggatgcagagagtgtgttatcagaaagccatgcaggcctctatggaaatggtagacaagggcatccttgatgaccaatttatttggaattcaatgccacttagtctgacccaacaagaacttccagtaagaatatgctcaacataaatgacatactctagtactcctcgagtggattgtgcaaattttgccccccaatcaatttcttagcttcacactcttaatactctctcacttgttaaaaagtattcagggtttcgggtattgtttatttggaggaaaaaggaaattggtgtagacttcaatcaattatttttaaatctaaca

SEQ ID NO: 24521 - DNA, 418 bp, Glycine max
  unsure at all n locations
tgaggagacactaaatcaattcatgcagatatccatgtccaactataagagcatagagtcattcatcaagaacctagagatacaagtgggacaattagtcaaacaaatggctgaaagacccattagcagctttggagcaactatagagaagaacgcgaaggaggaatgcaaggtagtgttaactagaagccagaggagagcgcaagaagaagaagagaaagctgaaagagaccagtctgaggaaggaaaggcagacaaagaagaagagaaggaggaagaagagaagaagagggaagaagaagaagtagagaaaatggtcttaacctctaagaccaaaagccaacaagcccaagaggctatgaaaaaagagtcaccaacccctctaaaggagcccctataccctntagtgccatcaaag

SEQ ID NO: 24522 - DNA, 360 bp, Glycine max
atcttgcaatattttttgtgagagttataaacttattgaatgctagcgtaaacttggcggattattacaattaaacataatcctaatggtgaagctaaattactatacaattttttgcacttatttctctataaacattcaatggctatattatatcccaactagactcgtaaaaattttaatttccacatctattgattttaaccatgatctaacgattattattagctgtgtctttcaaactccgtgagattaaaatcaaattacacttatgattaaaaagacattgagtttctaatgattcatatttcttaactaacgattatggatgtcctctaagctgccggatcatatattgac

SEQ ID NO: 24523 - DNA, 430 bp, Glycine max
  unsure at all n locations
nttagaggctatggaatgaaacttcaatctttatatatacactttgntntattactcttttcaaaaccaaacaaaaaactaaaacaaaaacaaatcaaaaagggttttggtatagatggatttcttatctagttcgaacagatggcatctaagatcatggttatattttattagtgctgatcaagcattccatgaaatattcataatattaatgtttttggtatacggctgatcctacaagtaacaaaatcatttccagaatatttaatacagtcttattgtcaagattcaaactcaagatcacttgttaaatcaaaaacaatttcataggagttgatatatccatttgatagtcataaaatactcatatataaagaaaaagtatatagatatatggttaagacatttatttccttatatagctagattc

SEQ ID NO: 24524 - DNA, 337 bp, Glycine max
tgcttgtatctttgatgaagaagcagctatgaagtatttttcactatgtgaggctatctgcataaatcacaagacaccattgttatctatcttccactaaaccctttgctagtccatttagataacatgtattcattgtaaatgaatccaggctttcatgtctactctagtcatgaggatcatgatgtgggtcatgaaacacatataactctgaaattgtttgagataactaaatcatattactcctatcactatggggatcatacttattaagatcatcgagagatgtgctcattacagatgtactatattgccggatagtgagacccatatatca

SEQ ID NO: 24525 - DNA, 417 bp, Glycine max
aggtagggaaaacgattgttcaccattagttggtcttgggtttcgctgaattcaaaattaattgcggccactacatacacattaaattattctctttttatttaccaagaagatatagaaggttcattattaggttgtaatttgcttaataatactatagcagagaagatatagaaggttcaacgcatttaatcttcgaaatttgtttgatacttgcttctttgtagttccccccacatgcaaaaccatatataacggatggattagcacttatttagcaataaaatatatacacttacactggattatgtttatgaagcatggacaattgtggttccatctatgcaagacaagatgcattacaggatcattgactaaataaagtcaactacaccatccgcaagtttcaagattctt

SEQ ID NO: 24526 - DNA, 364 bp, Glycine max
tgtttgccgtaggtccgcccccgttaactctggatgctttcgaataaataactacatagatggaaattgaattctgaccaggctcctagtaaataaaaggttaaaatacttcttcggtcctaacaattgagtattatgtacattatcgtttatgtaattttttttggttttttttcatccttagataggtttagataacactttaaatagaaaaaatatcatgtaaaagatgataaatacgaaaaaaaatattttgcaagaactaaataaaacaagagaagttatagaaatgaaaataaaaaaaacgttaaattacagataaatttttttggaaggactaaaataagccaaaatactgtttcag

SEQ ID NO: 24527 - DNA, 414 bp, Glycine max
tatataaggaataacaaattgtgtgttcaacagcctgagaaagattgcatatcaataggtgtaaacaaccacttttaactagtgaacattttgccatcaaatttatgaatcagatcacacagcacgaaggaaaaaacaaacacacccacatgtatgtgtgcacgaacagataagaaagcatattataatatacacaagaaccaatgaagcacaccaaaggcaaccaagaatatccaagttctgataggagaagccataaaatagccacgaaatattatttggaattgaagagacctagttatcagaaccgcctatagattttagtaaatagataagcaagtatgtaacacaaactttccaataggcttgaaaactcactgctatcacatgtgtcacagatggacggtacagggt

SEQ ID NO: 24528 - DNA, 366 bp, Glycine max
attttcctctaccacctcattaagaatcaaagtgccatgaagaatatgtctgtctttaatgaaagctgtttgtctttcatcaattaaggcaggtataacctgtctcaacctgcttgctagaagcttagctatcactttgtacatgcagcctatcaaggatattggtctataatcatttagggactgaggatggttaactttggggataagagccaagaaagaggcattgctgcctctagggaaacaaccgttgacatggaactcatccacaaatcttctgaactctggttttagcacactccagaattccttaataaaattgaaattaaaaccgtccggcccagggcacttatctccaccacaact

SEQ ID NO: 24529 - DNA, 348 bp, Glycine max
atgtgaaaggatgtgactcttcacattttagtttgtattgcaacgtacaaagggactagttattgatttccaaagcatagtcatcgattacaactatctgaaatctattggaacgttgtcaatccgtttgaaaacttttccaaatccattgtgctactggcgatcgactccactatctgctgattgactcccacatagtgaaacctatatggacaacatcgctttgagacaaagccatctggcacagacccactggcaaagacctactcattgagatatagactcacacttactcttgactcttgactcactaggattgactcacgcactcttaatgagacaaactcg

SEQ ID NO: 24530 - DNA, 309 bp, Glycine max
gttttggcgcggaacataccgcataaccggtgccctcttcattagctcccagggatgggctctgttcacattctcctaatgtgacgcgtgctcctctaacactgctgtgtgcacctagcttcacccttttaacaagccttcacttaaccttcttagaaaccagattatgcctgtcttcacgattcctccacttgtagcctgaatatttcttatatgcttatctatcattttgagccacattgatatatggcttcatattgacgctatagatagttacacgctttacatactatgcctgaactcttattc

SEQ ID NO: 24531 - DNA, 313 bp, Glycine max
  unsure at all n locations
tgtgaaggtgccttattgtgtgctgtcttnttttttgttagaatactttgggcttacaagcttctgacggtgccctattgtgtgctactcttattttaggcaaattcccttacgaatccctcaaatctaggacttatcataatttgaaacccttatgctctcttaaaaccctaaaataacgtcaaggatatcaaaattacgctcaagggtttattcaaacaaatcattattacctttagctcaacctgggtgcaaaggatcaatacattatatgttggcttttttaatcgaatgacttaaatgaaaagaaaca

SEQ ID NO: 24532 - DNA, 346 bp, Glycine max
  unsure at all n locations
agctttcacgtttgagatgacgcagtgtctatgggtgcttcttactacttttcttcgtagaccacaaagtggatcctgaacatatgcctagggggtcaaaggaccttgtacgacgtcggtgctgcgctattgtccataacccatcttgaccaatgctgacccatccggggcatagtcatccttagagaacctgagatgtacctttacatgcgagctcctggctgtcaacagatttaaggaacanagaccacaatttcgcgagagctgtggtggctggacaactgataaatatggtgatatatgggaagtggcctacggatatctattaccggaggggcttaattga

SEQ ID NO: 24533 - DNA, 322 bp, Glycine max
tgagatgaggaagtgtagaagggtgattctttctgtttttattcgttgaccacaaagtggtacctggagatatgtcgcgggggtcaggagaccttggggacgtcaggtggggtgctattgcccaaaaccaagcttgaccaatcccgacccaacccgggcatagtcagttaatgagaacctgtgatgtacctaaacaggctagctcctggcagtcagacagataaaatgaacaaagactacaaagcaaggacgctagtgtggcggctggccatctgtgaatcttgtgtgatatatggattatggcctcttgtaattgattacc

SEQ ID NO: 24534 - DNA, 371 bp, Glycine max
agcttattgctaatattaactagtaagagatagaaatcatagaattaagttccgaatatgacgtgaatggctgatgcttgatttggtctaagcaggaattccaaaacatatatgcgattggaccaaatttttaaagtatttacctataatttctacatatattgattggtactataagtagttcaagattacctggtaatttctcttagtatgaagtatggatcaaacccgtttaactatgctgatgatagtttagtttttttattacctgcttggataagttcttagttctccgtacgttatggccaatttgcgtcagattcattcataatggtatggttacattgctgtctaagctggtccctgatggt

SEQ ID NO: 24535 - DNA, 423 bp, Glycine max
  unsure at all n locations
ttctttatcgttggaactccagtatctttcatttgatctttggatngattggttaaatgtgttgtctcttatttaacccttcttttattatattgttatgttagcatatttgtgcaacatcatcgttaacctatcacaacaataatttttattaaaaaattgacaatatattaatagtgaactaaaattattaaaattttaaaatgtgagagatcaaatgtaaatgtgtagtataatatttgaataatcaaaattacacaatcataaaattacaaagagttttttaaacctattatgtattcaaaattaaagaataatattaaaaaatgttataatttactatactctattatgcacttcttctattttaaaataaaatataaacgtaaaaaaaacaacataatttgatacataacgtaataa

SEQ ID NO: 24536 - DNA, 373 bp, Glycine max
agttttatgttgctcaattgctccaggttgctgcatggaagggcaaaggtctgtatggtggtcagcagaggagcacaaaccacaaacccttgcgacaggtacagatttctgattcaaggccagctgggttaccaagataaccaatgcatccagtttgccttcaagcttcttagtttcagatgatgcagatgggtttgtagctacctcatgcactcctctaatgactatggcatcatttctggcgctaaactgctgggagttagaggccatcttctcaattaaatttctggcttcagcaggagtcatgtctccaagggctccaccactggcagcatctatcatacttctctccatattactgagtccttcataa

SEQ ID NO: 24537 - DNA, 370 bp, Glycine max
agctttgcttctacagggaagacttatctttggacttcatagggggattgtcgacccttaagggcaatacagtggtgctggtcgtagtggacaggttctctaaaggaatccattagggttcgctcccttcacatcacacaacattcaatggtgctcatctttttatggagatcgtgggaaaacttcatgggatcccccacagtttagtctccggtcgagacccattattcatcagccgcttgtggcaagagttgttccgattgagtggctcgaaacttcatatgagttcagcctatcacccgcaatccgacgggcagattgaggtgatgaacacggtggttgagcaatatcttcgagcatttgtgcactc

SEQ ID NO: 24538 - DNA, 436 bp, Glycine max
tcagccatatgtttagaatgactttttttaccacactacatcagtttctcaagctcactagaaaaaaggaaagtaaaagtaaaagctcactagctgaattactattcctcagttaggttcttaatgaattgaacactagcaaatgttgttactgtgtcaacaaattcattgaaaagcatagggagccaaatgaaaccttgttctcccatccacttccaaacttcaaaagggatatcatctagaccaacaactttaccctaaaataacgaaaacaaatattcccctgactatacaaattagaatcaaatagactattctttttagtgctgtaaatctgaatgaatctcctaaaattaaggtctgaaactctaaatgaatctcctaaaattaagcctcaatcactgacatatagtatcataaacaagaatggaaaaaa

SEQ ID NO: 24539 - DNA, 372 bp, Glycine max
agtttatgtgtatggaacacttacttgttggtgatgaacaaaagcgcaaaacggaatcaaaaaatgcggaaaaggatgaccctagggctgcaaactcgtcaatcccgtgggtatggcttttgaaaggggggaaaagaagtttttgaatgcaaaaacgcccccctttcgtcattcttataatttggagcagggggggctcgcccaggcgagctaacttgcacatttttttttttttgaggggaacattaaccatgtcccctcccttctcatggattagcatcttgcctaacttgaacttacttatgttagaattaggcgatgaatacttattttttttactttttaaaacaaacaaaaagtaaaagaaagctg

SEQ ID NO: 24540 - DNA, 427 bp, Glycine max
  unsure at all n locations
ntcatctagccaagattatacaaaggtgttacaagataacctaacggtttctaattatctgggccatcaaatctatcatgtgttgacagtaattgattagcccatgaatctcctcgggggccgtacacacttcggccatggcttttgctttgactaatagacgcgggaggtcttgacttccattcaaggtcaaggcgaatctatccatccacatagtcgcttcttgatgcaatgcatcaatcaccctccctcttgcttctttttcggcgtacacttgtgcaaaatcctctgctagcttttgttcatgggtcacagactggttcaattcttccttttactgccctatgatagctagcatgctttgttccgtggcttccaagtgttgggccaaactccttatggaccttgtgcaagcagccgattcttc

SEQ ID NO: 24541 - DNA, 375 bp, Glycine max
atcttgtattattatggggtacccatcacatgtggtactaggtggtggacgggcgatggtgcacatcaagtttttcacatccacaatgcgcgcataaacccaccatcccctgttgcccacctccaactgagctcacgtactcccacgtagcccatatcctcgtttctctcagacaccgggtccccatcaatcctcccaagcttccacagcatgcaagcaaaacaacattcaaacatcacaagctatcatagccaagcaaaacagagcaaatgcagaaaactctgctcaacacatcaaccaaaatcacagcttttctcacttatagaccacagtaacaattccttcgatccaattggataaccgttggatcgactc

SEQ ID NO: 24542 - DNA, 448 bp, Glycine max
ctaagcttgaaagcattgatttgatactgcttccctcatcatgtggcttatgatgtttacaatttaatgatcctttgctaccctacaatgagacacacacagatacacaaacacacacacatagagacaaacacacgcagacacaaacacaaacacagacacacacataaagatacacacacgcacacacacacacagagtcacgcacacataaagacacagacaaagacacaaacacactgagccacagacacacgcagagacccacacacaaagacacacacactgagtcataaacacacacatacacaaacacactcacacacatggacagacacacacacacataaagagacaaacacacacagataaagagacaaccacaaacacacacacccacacacacacagataaagagacaaacacacacacacacacacacatacac

SEQ ID NO: 24543 - DNA, 366 bp, Glycine max
agtcttacctttggcctctcttaatggatctagacgtgaccaacataatggtctctataagactaaataagggacaaatcaaccagtcctcctccaaatggaggtacaacaatcctaacaatagctaaccctggctgtggctttgcctttgcctccgcctactgatgttgttgacgcttttcatcatattgctagtgctccaatgtagacactctatgatgtctctctgcaacatcctcccctttgtacaaagggccttgatggaaactgtcacgtctaacaacgtacaatgtctgcttcgtgcaagccatctaaatcttttttataaaattaactcaataatcataataaaaaagtatatttatc

SEQ ID NO: 24544 - DNA, 364 bp, Glycine max
gaaaacaaattgagatggtgagatcagatagaggtggggagtactatggtagatacacagaggatggacaagcaccaggttcatttgcgaaatttcttcaagaacatgggattgttgcccaatacactatgcctggttctccagatcagaatggtgtggcagaacgaagaaatcgaaccttattagacatggtgagaagcatgaagagtaatgtaaagcttcctcaatttttgtggattgatgctcttaagacggctgcatatatattaaaccgagttctaaccgaggctgtctcaaagacaccttttgagttattcaaggattgaaaaccaagtttgcgacatatacgcgtttggagatgctc

SEQ ID NO: 24545 - DNA, 374 bp, Glycine max
tttcaagtttgatgtttaaagcgagaagtacgtgtttgtgggttacgactcaagatccaagggatacaaactctataatccaaatagtagaaagatcatcataagtcgcgacgtagagttcgatgaagaagattgatgggattggagtgttcaagaagataagtatgattatcttccttattttgaagaagatgatgaaattgaacaaccaatcatagaggaacatattacaccacctgcctcaccgacaccaaggctggatgaaacatgttcaagtgagaggacaccgcgactaaggagcattgaagagatttatgaggtaaccacaaacctaaacgacattaacctctcttgtctttgtggtgattgtgagc

SEQ ID NO: 24546 - DNA, 430 bp, Glycine max
cgcctaggagaaaccataaaatagtcaacaacctttagttgattttaggtggtacagagatactttcctaactagggtttacacaagagaagatagtcaacaacctttttggaaagaaaaatttctagccggtcttcccagatcattaggagataaggttagagataaaatccgtagtcaatctgccaatggagatattccatatgaaagtttaagttatggccaattaatttcttacgttcaaaaggtagccttaaaaatttgtcaggatgacaaaattcagaggcaattagccaaagaaaaggctcaaacaaagaaagattaggttctttctgcgaacaatttggtctaccggcctgtccaaagcaaaagataaaacaatcttcaagaaaagaaatccatgagaataaaccggtcaatacaaagagat

SEQ ID NO: 24547 - DNA, 366 bp, Glycine max
agtttatgcgcatacttcttttacgaacgttcacttgcacaagacattcttataactacgaaaaatgcacccatgtacaatcaaggcaccttcgttacctagattatttatatgtgcttccaaagagtatttgttacctacatctcatgcacttccttggctaaatttacatacatgcgtactcagagcatttggggtaccaaaaattgcacatgtgcacattccatgattgctaatacttatgcatatacaaactttgtgaggaatattggctatctacacaacaaggtgatacatttcatgctttactcaagatattgctacctaaagccgcatgcaaattcaagtatattttcttttgctgac

SEQ ID NO: 24548 - DNA, 421 bp, Glycine max
tgcaagtgtaatcgaattacttgacttatttacgcttcacaaagaataggttgccctagaatcaaaaggtaaggtcaaaagagtattctttatgaaatatatcttgatatgagtcatcgaactatagcgtattagcatcactaagaacaagaaatgacaaacaaccatactatctatgcaattaaggcaaaacaccatactacaagtgatgtagctccatgtggagcttgcaggtcttgaatcttcttcatcaatggagtcctttacttcttgaagaccatggcagtgaaatggaaaaggaagaaagatgattggagatgccacatcaaggagaagatgagtcaagaagaagctcaccaccatagtaagccatggataagagcttgaatgtaggagaagaatagtggagggagagggagag

SEQ ID NO: 24549 - DNA, 364 bp, Glycine max
ggtttttatttctcaatcaatctgtctactgactagcgcttctaagtgcaagttcacattcttgatgtttatttgactaacatacacacttggacaaactcatgataagtaacgcaaattccatcacaatcatgcattaaatccaaacgcaaaccatacaccatttttcacatatagataaaagtggtctacttccatatgatctaaatcaagccaaactgttccatatgctggaaaatgagccatccaactacccatatataggaatagcagtgtatataaacataaaagacatactgtactgaaaccataattataataataataatcccaacagagaacaaacagcatcatcatgaattta

SEQ ID NO: 24550 - DNA, 329 bp, Glycine max
tagggactaaagttcgcaggtgttgagcgtttggttctatgtctgctgatgttcgatcaagtggcctcataataattaagaagggggggatgaatcaatgattcctataccttgactaatcaaaaattactcttctaaggctcttactatattgcacacagaatgacgagtctaacataaactgaccagaatattctatccgtacttatatgcactactgaaagtaatacagtaaggaagaacgatactgacacataataggttttatactggttcagcaactacccttgcctacatctatggccaacgcgacctgcggtccttgagat

SEQ ID NO: 24551 - DNA, 243 bp, Glycine max
  unsure at all n locations
agtttgnagtatnaaggggaacccatcgcatgtggtagtagggggcaggcagccgatggtgcacaacatgtactacacatggacaatgcgcgcataaagccaacattccctgttgaccacatccaactgagctcacgtagttccaggtagaccatatgctgattcctattaacaccgagtgctcatcaatcctcgcgagcttacacaacttgcaagcctatccacattctatcagcgcaagct

SEQ ID NO: 24552 - DNA, 423 bp, Glycine max
tcaggctgttcaattgctccagattgctgtttagattgttttaggtctgtgtggtggtcggtggaggatcatataccacagagtctggcgacaggtgcagatttttgattcatggccagctgtgttaccaggctaacacatgcatctagtttaccttcaagcttcttactctcggatgatgaagatgaattcatggctacttcatgcactcttctaatgacaatatcttcactcctggcactaaattgctgggagtgtgaagccatcttctgaattaaatttgtggcttcatcaagggtcatgtctccaaaggctccaccataggcagcatctatcatacttctctccatgttactgagtccttcacaaaaatattgtaggagaaactgctcataaatgtggtggtgatggcaaatagcacat

SEQ ID NO: 24553 - DNA, 333 bp, Glycine max
tgtctggaccacaagtgatagtatttacctgtctgtctcttaaagcctcaacaaaacaaggtgtgtatctgacttcagtatcacctatccccagttggccattttcacctctgccccatgagtagacactccccccagaagtcaaaacagcaacatggtatgaaccgtttgatatcaccttaacaaactcttgtttgagatgttcttcagacatgactgctttatccgtgtcatgtggatttactagttgtgcatatttggcacttgccattgcaaaaaccttgccgatgttagagagagctacagtcgacattcttacacatgacacttgaa

SEQ ID NO: 24554 - DNA, 425 bp, Glycine max
tgtatagtatattatgactattattatttcgacaatattatcaccactaaacaaagaggatatatgatttaacacctgaaattaattaaataagttccctttcgattgaatactgggaaaacatgacttataattgttttttttatatataaatatgcgtgtaagagtgctaaaatgtaaaagagagagagcgcgatagagagagagacacatattttctaattattttatgatttttctgcttttagtatgaatgataggaatttataattcgaaagactatgttatactaatagatgaaattttgatcgattcacgattacgatgtgatgaggcatgcatttatggtttagtttcatttcggtttgtaccagtatggttgtagtatttgttcttgttaataaaataagctcttttagccttgt

SEQ ID NO: 24555 - DNA, 368 bp, Glycine max
tcggcttgcaagtttggaagaccactgtatgaggagtgttgtagcagaggacaacagcccaccccttattgtatccccacaaccccttatcgcagccccacagtatgaattattgcctgaataacaacgaaacttatacaataaaaacacttgataaccgatatcctcatcatggaaatcactaaatttgaaagacgaccggatgacacgctgaagttcaaacagatacatcaggtttaaaaagaatcttactaatgaccggttacctaataggcgatgtcttgcatgttatttcacttgcggtctggaagagtttattattgtggtggtgaaaactactaggactatgatcgacttctttcattcat

SEQ ID NO: 24556 - DNA, 374 bp, Glycine max
tgagaaatctcaggagaccactagatatgtctttgttgctgctggaatacagacatgagcccgcttagaggtaaaggatgagcttatcgcaattggggttggaatgaacatgtgtagggatccttataggattaaattgagattcattttggaatgtttattaaattaaaattctcctttaggattataaatataatattgttgtgtttgatggaccaattgatgttttgatgtgaattggttgataaacttgagtgctcttgatgtgtttgtgtttttaacctatgattctgattcatcgattctatatgattgtgtggaattgtgttgaggggttttactccccatgttgtgggaagcattttgtataaatt

SEQ ID NO: 24557 - DNA, 140 bp, Glycine max
atgttttggtctagcgttctggttgaggcttaatgtgttcatggaggatgtacagatgaacttgcatctcctcgtgtgctagcggatctgtttatacgtctcacatcaatgaattctacatctgtcgcgcatctgtaggc

SEQ ID NO: 24558 - DNA, 595 bp, Glycine max
  unsure at all n locations
gcagcgctacacacactacactacatccgtcttctgactgacactgaagaagtgntgcgcngtactgntaacttaacccncgncnncatccnccccccacccccgcggcgccnattgaaacgttttgactncngtgacactacacaanacnccagcgaggcacatagcagggacacagactgagggcccaactttcctacatctatgtgactaataacgaataggttaacacgataaatggaccttaataaattttgaagatgaacgcccgattgcaaattatacacttatacacagntaatgacttcttcttttttctaaggcagagggtggtgattaattcagctacatggagataggattagaaaccgagagccaaataatttgtccaaacacgattgaaaatgaaaaacaaagaaaaacactgattcctcattcaaattactatgatcaacacatagtacaaaatttattacaatgaatcctctacttgtgagtatgcttgttccattggaaagagatcaattcgcatgcaaccgtcatagtactacacttcttctatttcagaaattaacacgaatctcacactgcatat

SEQ ID NO: 24559 - DNA, 375 bp, Glycine max
agttttagatataaagcctaggaaatagcaaatctacgttggagtattcataaacaattacagaaaacacccactatgacagcaaaggcaatgaagttaagaaatgcatcaattatttagcacttacagaaaattatgatatctttgaaatcatataatcttcagctctgagattgctcatcatcaaaatctctcccgttagctgaagggaatataatagtcttaacttcactccctatggtggctatggttttctctttaacctacaaatttcacagcattgcatgagtgatagtttcagacacaaaatgtacaaaaattaaaaatagaatataggaaccaatgtcaacaattgaatgtttgaaccagcaagaa

SEQ ID NO: 24560 - DNA, 435 bp, Glycine max
gccacagggagaaagatgtccaaaaaatgaaatatttaattatataaaatcaactccctcttgttgtgtgtaacccttggccacaagcctagctttgtaactttggatggcgccattaacacaatgtttgatgtgataaacccacctataaccaattgaaacttagcttggggaaaatcagttagatacgaagtatgatttgcttcaagagtatgtaattcatccttcatagcttttcttaatacagtttcatacttaacagcttatgcatatgttttgggttcagaaatttttgaaatggctaaggtatatatttgagatgactaggagacaaatgatgataggacagaacagtggataaagaatataaagcagtacctgaagtagaagaaaggaacctgctgagttgagaagattgcatgtagtgaaaaatga

SEQ ID NO: 24561 - DNA, 369 bp, Glycine max
agttttttccttctcgacacgtatactctgaaccacaagagcaagagctcatgtttgatcatcacatgggtatagaatataaaaaagtattcacaaattttattatattatagtagatttcaaatttaaatttatctttttttttctttctctcttaattgtatattttgttatataatttatcgtataagtataatttctctcatgcaaaacaaaattttcttacgtacactaagtttgcggagttatataatatgatttatttaccattaaattcaatataaattgtttatcatatatacgtcagaaatatttatttattatgaatgttaatactactataatttatatatattaaaattattctta

SEQ ID NO: 24562 - DNA, 418 bp, Glycine max
  unsure at all n locations
nttcctctggttgttctactggggtttccaagagttatagttatatgagaagaaattgaagccttcattttgtattgtctttgtgcgattcacttttctctctccatgaataatactttgcaaatcccaatggtaaaggtgtgcgcaactgaatcttgaaccaagtatctcaatttcatgatgatcgaacggttaatgagtccgggatcatagatttactaggtaggttctgagtctctgtggaaaaagagaaatctacaatgcgaacgacatttctctaagctccaacattctttcgcaatttccaacggagaaaatgctcagaaattagtttccgaccaggtgctgagatatcacgacgatccaacgatcaaagaatctgagatcatcatttctactaaaatagatttgagcgtat

SEQ ID NO: 24563 - DNA, 354 bp, Glycine max
gctttgtattttagcctagaggcagcgaggcacttgtccattaagaatgaataaaagtaatgttccttttgctttaatccattctgaggtatggggggcatccccaaaatattctatctctggctatcgcaggttagcgatatttggtgatgagtgcactcgaatgacttggattaacttgttgaaacaaaaaaaatgacccggtacacatatttcaacaattccatacaatgattcagactcaatattcaaagaagattacgatccttcactctgataatggtggggagtttgctaatcaccaattccatgagtatttcgaaaaacaccgacttattcacgaatccacgtgtc

SEQ ID NO: 24564 - DNA, 430 bp, Glycine max
cagggaggaacctgcatagaatcaaggccagtggaattagagtgcgctactgccagtcttacttgcacgacaagttcatcataaaacataaccaaggatccaagataacataaatcccaacacttcacgcaatcagtgccattactagcataatccggatttctttacattactattattataaatagcagtatgatctccattgagacacactatatatgtggaatattccctcaaaaaattaaattaaccatgtgagtatattgtcacaacatgattgcagaggatgcaactaaaatcacaaggaaatattgtcagtaacctccttaagtactcgcatggagttcaagttcaaccacataagatacaaattcgtacatttcatataacataaattcgtcgcaggtttctatctatacaaacatgacca

SEQ ID NO: 24565 - DNA, 342 bp, Glycine max
ctctatactgcagctggcagctttcagtttgcttgctgagcttctatagaggatggatcattgagcttcaaagatgtcattcaacggcgattttacaccatggagatgtagcggaaggaaaaggataagaggttagtggatacaccatccactagggaatatgccaatgatgaaggagtcttcactctccatatatgttgcctttgataaagaatctcgaagaggatgctttgatggaagaaaagatagatagactgggtgagcatgatattgaatgaattatagactgagagaagtgcaactttgaattgtggctcatatttatagactaaggtgcttcct

SEQ ID NO: 24566 - DNA, 433 bp, Glycine max
  unsure at all n locations
tgtccaatcctctaataggatcatctccattttatattatcactttcatcaccatctccatcatcatcaatgccttcctcagattgtgcatcatcatcaggttccacgaaaattaaattatctagatcaagagcttaaaatagatatcaaagatgttatatcagaaatagttaaaacttaaaataatacacaagcacattttaaatttgagaaagttcataaattataccttctcttggtgttattaaaattgcattttatcttctcttttgcattttccatctcatatatgaaaagtattcagtaacaagattgatccaactccaacattgtanggtcagttgttgtgttctgtaatagactaatataaagtatgaactatgaactatgagtgtatcgtcattagtctgcaaataggtgcactttaaatata

SEQ ID NO: 24567 - DNA, 352 bp, Glycine max
atctttgaacgtgcgtagcccaccatcttttcatagtagaataccggtaatgtgtctaccatcacgattatcatctccctttccatcattgggggtaccacttgggctgccagatccctccacctttgggcgtattctttgaaagattcatgcccctttttgcacatgttatgtagttgcatcctatccggagccatatcagaattgtactgacacttcctaacgaaggcaaccattaagtccttccaagaatggactcgggaaggctccaagttagtataccaggtgacagctgccccagtgagactttcttggaaaaaatgtatcagcaggttcccatctattgcgtatg

SEQ ID NO: 24568 - DNA, 151 bp, Glycine max
tgcatggaattccttccagtattgtatcagacaggtatccgaggttcacttcgcgattttggacaagtctacatgaagccttggggacaaagttgaagcttagttcagcttatcatcctcaaacagatggtcagactgaacgaaccattca

SEQ ID NO: 24569 - DNA, 348 bp, Glycine max
  unsure at all n locations
agtttgngcatcacaatactcctgattgacgatgtctccatatgttcttaaaactggactgattcatttgcttacacagttacatgggcttgcaggcgaagacccggacaaacatttgagggaatttcacattgtctgctccaccatgaaacccccagatgtcgaagaggatcacatatatctgaaggctatgactcactcattagacggagtggcggaagactggctgtattaccttgctccaaggtccatcacgagctgggatgaccgtaagagagtattgttataaaaaattttccctgcttccaggaccacatccatcaagaaggatatcttacgtattagact

SEQ ID NO: 24570 - DNA, 425 bp, Glycine max
ctgcagatttggtcttcgccagtgaaaggttcaatttgggtccgaaaagaggcaaatttgatcatcctactaggacgactgagaaaactggggcaaatgaagagggtgagaaagagggagaaacccatgctgtgactgccattcctatacggccaagtttcccaccaaacccaacaatgtcattactcagccaataacaaacctccttacccaccgcccagttatccacaaaggccatccctaaatcaaccacaaagcctgtctaccgcacttccaatgacgaagaccacctttagcacaaaccaaaaaacaccaaccaagaaatgatatttgcagcgaatagcctgtatgattcaccccaaattccggtgtcatatgctaacttgctcccacatctacttgataatgcaatggtatccataacc

SEQ ID NO: 24571 - DNA, 364 bp, Glycine max
tgtttcatgttgctcattgactccatattgctgcaaagaaggatgaaatgtgtatggtgatctacagaataacactgaccacagactcttgcatcaggtgcagatgcatatttctgattcatgtgaagctgatttactaggatgaccatggcatcaagtgtttcctcatgcttgtttattttcaacacatgaagactaatctgcggccagcttatggactcctgtaaagacaataacatcatttcttgaactgaattgttgggagttggaagccatcttctcaatcaaattcctagctttagcaggggtcatatcaccaacagctccaccactggcagcatcaatcatactcctatccatgttg

SEQ ID NO: 24572 - DNA, 417 bp, Glycine max
tgctacacaaataacctgtgattgtgtcattctcctgtgtttgtgtgtacgaactaagaagtaggaaccattagcctacgtgacatctggtaaataactagattgagatagtttggtgtggccatgactatagttctaatagcaaccatgatattaaaagtccctttatgtcaacctaaattcagtttagttaaaaaaaattcagttcccttctccctaatttttatctcatgtttcccacttttttctccaatctctcttcattatctgattttatttcaatgattcaactctctccataacctgtcctgacatgttggaattttctttaacctagttagattgaagacaacgaatatcaataatgaggcataatatctttcctaaatatagttcattctatacttcaaattaaaa

SEQ ID NO: 24573 - DNA, 365 bp, Glycine max
agtttgtgcatagttgtcatagacaaagggatctaaagaattaataatcaaatagtattgatgaaaaaaatgtgcataaatcaagtacaaacccttcaaaacaaagtaaaatcaaatagtaattgtagctgaccatagaaggagatgaatgaaacggataggaaactaatgttcgaagctaaatgtatgaacaaaatctaaaacccttgaaatataacgtgagagagagagctgaatcgaatgaatcgtgacttttgaaaatcaagtcaaagtgaaaataaatagaagagggtgattattttgaactaagaaatcgagatccattgtaaaaccacatattgagtcgacttgtggaatctgaatgc

SEQ ID NO: 24574 - DNA, 426 bp, Glycine max
caagctccttcaactgcacaaggctctattatttttgagtatccttgtggaaccttcacccgacgaagacactgacaaaaacttatcttctccttcttggacaaagtatggcatgctgagggcaagtaaattatcttaccatcacaccttggatgcaactgcaatcttatacccatatcagctagatcttgactggtattgaatccatcctaagctttgtcttgaatgttaaggaacattctaatcacactgtcacaaacatttttctacacatgcataacatcaatactctgtttaatgtctatatcacaccagtactgaagatcaaagaaaatggacctcttcttccatatgcatctctgacatttatgcttcttttagagcttcccaaatacagtgttcacagcgtgaacccgcatgatatac

SEQ ID NO: 24575 - DNA, 363 bp, Glycine max
atcttccttaagaagattccttaagaagctagagcttagctacacatacctctctaatagctaagctcacctccttgagatgagaagctagagcttagctacacaccccctataatagctaagctcacccccatgacaaaaaacatgaaaataacagaaaaaagtccttattacaaagacaactcaaaatgccccgaaatacaaggctaaaaccctatactactagaatggccaaaatacaaggcctagacgaaggaatagcctattttaatatttacaaagataagcgggctcatacttagcccatgggctcgaaatctaccctaaggctcatgagaaccctagggcctttccttggatctc

SEQ ID NO: 24576 - DNA, 431 bp, Glycine max
  unsure at all n locations
ntcaacaagtttcttcacaaataatcatcatatagttgaaacctagcaagactacccatcatatctcccaaaaccccatacccacgaaaatcaaaggagaaagaagtccacccaaacctgaaatttcgaagtcccacacgtagagacgtgcttcacgactccgaaaatgtcctcctttcgcgatttggagcagaaatgggcaccaaaggttgaagctttgttgggcaacaatggtggaggaagaaaagaagaagaaggctgcgtgagagagagggagagcttctgaaatttcttttgggctgagtgaggagagagagagaggtgctctttggttttaaaaagggttttctctttctctattattntatttaagctatgccacatgtctccatttgagtggagcaaaaagggcccactctctcttttgattg

SEQ ID NO: 24577 - DNA, 227 bp, Glycine max
ctatgagccacggaacgacggcaaaatgtcttaaatggcatcagcagcggtgcccgggactagaggactaatgattaccacaatctggattcaccgttcaggcggtcttaaatcaagatcaggagtcaagactccggattcattaatcgagatctgactcaagcgagacacacatgcatcagctttgtcagatactgatcaggacatgtattgttcgcaacacctgt

SEQ ID NO: 24578 - DNA, 375 bp, Glycine max
agcttgccctagttaagtttaggaaagtcattcattaaatgacagtacatttgtttcatgttttgctgttttacaaaaagagctaaaactactctgttgcacttcgtctacatatacctcaacattactatgcttaataaaatttggtgatcttagtaaaacataaagcactttctcaaatattaagatcaaataacattcagcgtatccaagagatgcagccaaaataaataatgagaacattaaaaaactgaattacctcacttaaaatgagaacccctttcttggatgcttgacacgcaacaaattcatagctgacaagattcattccatcccttacagatgtaacaagtgctacatctaaattcgatgtga

SEQ ID NO: 24579 - DNA, 426 bp, Glycine max
  unsure at all n locations
tatgggccttgttgactcgggtgtgagtttaatcttgtactatagtgaaccctttgtgaagggttatgccattggttaatttggtcaatttttcaaaattgtaatatttcataacttttccccacttcaggccattgaattatgtgatatatatccacggttgtagggatttggagcattcatattcaccttagaaaataaggggcatgtcatgttaggcagaatccataaaggcgtcgcattaaataattgtctttttgaggtctgaagacggcgaatagactcggataactgagataataatatactaatcacataattacaattttttttaaaaatcaaacaaaaaaggttaaggttcggtctgttaagagttntgataagtaaaaataagtacatggtaatccatctatatgtctactatac

SEQ ID NO: 24580 - DNA, 371 bp, Glycine max
agcttccacttgtatattgcatcagtaataaaaagatttttgtttccctcccgtggatatagccatactcaagggtgaaccacgtaaatctgtgtgttattttcctcatatttctttctctctttttcaccttgctgcaaaaatcctgcgtatgacacagttttttgttgcatctgttactgcttttcttgcttgttcttcttcacttccataacagactggtattaagagctcacgttgcgatcaaggaaattcaagattcttgtctgaatacaaagatcaagctgcgggagtcttgtttctggttctttcgttgcttcactgtgatcaagaaaacttaagaaatcatgtcaaacacaatcaagattaag

SEQ ID NO: 24581 - DNA, 436 bp, Glycine max
  unsure at all n locations
tatggatntgttctacatgattatttttattttcatgaacactggttcattttcttgctttctctgtcaacgcttaaatttttttgtgttcctgagccttttctgacgttgctttctcttggttttcttgcattttgggttcagatatgtagcattgggtatctttgtgatcgacagcaacaacgaagacaacaaatagtgtccgacatgaaaagaacaggtttgtgatggttgagtattcttcttcttttgcaagacaaaagccacatatcatagtattcttcttcttatttgaccgtggttgagttttttttttttaggttcgttttccctccctgtctccttctgtgttttcattttacctatttttacatttgtatgtgtttnttttatttcggttttttgttttttcactgcatgttcattgcttcttcta

SEQ ID NO: 24582 - DNA, 371 bp, Glycine max
agtttcatactacttgttgtaattgattacaatgaggctataatcgattaaaatagaaagtttttgcctttgaagaaaattctctaactaagaaacttttcttcacacaaaccatgataatgcatgatgtaatacaaatatcaaatgtactaagatgtaacaaccaagataacaaccaatacaaatgccactcaatggagttggggatgtaaaaaccaaaacttcttcaagctttagcccttaggttgttcagaagctagctagttagttaagttgaacatcctttagattgctagctggttgaaatcaagcttaacgaggtggatatagataaataataggaggaaaaaagttttaaaatataaaattct

SEQ ID NO: 24583 - DNA, 434 bp, Glycine max
tcatgatgaatcaagattgattcaaagaagttttgtctattacaaaggtgatgacaaaaagcttcgtgatgatctcaagaatcaaagaatgagttcaagatgttcaagattgaatcaagaacatttcaaggttcaagaggaaaattgatttcaagaatcaagattcaaggttcaagcttccaagaatcaagatcaagattcaagactcaagattcaagaatcaagaaaagacttaatcaagataaatatgaaaaagttttttcaaaaactgagtagcacatggatttttctcaaaacctgtttaccaaagagtttttactctctggtaatcgattaccagattattgtaatcgattaccaatagcaaaatggatttgaaaaatttttcaactgaatttacaatgttccaattgatttcaaaatgttgtaatcga

SEQ ID NO: 24584 - DNA, 360 bp, Glycine max
gtcttcgtttcttacctaagaaacaaatgtaactgagattttacaacattaatagaaaactcctaacatgattcaattcacacattgtctcgaatagcatattcagaacatgcaatcaaggcaaaaaaggaaatcaacaccaacagagaacaaatcagtggaaactctgcatgcttcttcatgcctacactacataaaccgcacaaaagaaaaacctagaaaaaaaattagaaaatcctaacagtcactcattcacgattgtgggggtctatttagcataaggtaacacacaactgcactataaaaagaagcacgagaattagaattgagtaatagctatattgtataccttgtgataaa

SEQ ID NO: 24585 - DNA, 435 bp, Glycine max
tatctctatggaaaaaggggtgaactcggcattggttgttcttgttttgcaaatgaatgtgggaagttgacatatgcccaaacttaagtttgccacatttatgatataagtttgtttcatgagcaaaacaattggatctctatttgtgtgggtcaaggcgtcaagccatgacggatgcgaatgtttaccaacatctgtccacaaagcattaatagtaagaagaaccctactggatttaaaagagttttaatgttttattacacattttctgtcttttcttgttagtagaatttttgtcattatgaatattggccactgtacaccaagctcttctttcttttattttctcgatcatgatcaaggtttttttataaagaaaaattattttattgtaagccatctacgtattacaaattctcgcatatagaataagtg

SEQ ID NO: 24586 - DNA, 374 bp, Glycine max
agcttggttttgggcaatagcaccccacctgacgtccccaaggtctcctgacccccgcgacatatctccaggtaccactctgtggtcaacgaataaaagcaggaagtttcacccctctatacttcctcatctcaagcttgtaggattatggggtacccatcacatgtggtactaggtggcagtcgggcgatggtgcacaacaagttttccacatccacaaagcgcgcataaacccaccatcccctgttgcccacctccaactgagctcacgtactcccacgtagcccataacctcgtttctctcaacaccgggtccccatcaatcctcccaagcttccccaacatcaaagtaaatcaacattcaaacagcacaa

SEQ ID NO: 24587 - DNA, 437 bp, Glycine max
gcttattaagaggcttcctccagaagcttcattaagatgtttttagcacactccagataacttctaaaagatcccaacggtgagatcatgaaaacgtgtcttgtgaagtggtagaccaaatttcgagaagatccagcggttaacgaaggctgggcatcgtttttaccgaggtagcttcatgtagctttctctagaagcttcattaagaggcttcctctagaagcttcctcgtggcttctttgagaagctttctcaagaggcttctttgagaagctagatccttatctatccacacccctctattaactaaattaacttccttaaaaataattacagatgaaaataacgcaacaaataatcaaacatcaaacataattactaataatatatagatatatatatcagggtgttacaccgtgtggtgttagctggaatat

SEQ ID NO: 24588 - DNA, 419 bp, Glycine max
gaattcgagctcggtgatcgtcgatactctacaggcgagcaggcagctttccagtttaagagcgtcacgactactcttcagatgtctgcggatactataagatacaaaatccacggtaccagcagaaacgactccaagccagtgacaattgccgcataagcctaattctaccatccaatcggctggataatggaattctgcgacacagtcgcgcacaggcatattggatgtgatcgccgtgaataacattgtcgacttacataaggaggtgtgatagcaagtgagcatgaccctcgccgacaacctgtactctgttccgacgacagcgatgctcctcgaagccacgcacagcgccttcaccagcgtgatgacattgcatcccgacctcgacgacccgatggaatcgccggcgcaagaac

SEQ ID NO: 24589 - DNA, 392 bp, Glycine max
tgggctgctcctggtgagcaatatgtctttgaggtttttgaaacacatgttcatgggagctgcacttgcaaaaaacccacaattgttgatgcacgatatatgaccttcatgatgagctcggcacgcaatcgtgtcatgggacatatattcacaactgacctgcacagacgacattcaaatatacaacatataacatcgcgctttcactgatatgcagaataactcaatgcctcactatgaatataggccaatttgaggaatgcaaccggataacacactttgaccactgcaacatattgatgatactcgcttatgagcagacccatgcaattatacaacaaatgacggagaggtggtgcattgctccactttatgaatatgccaagttgcac

SEQ ID NO: 24590 - DNA, 371 bp, Glycine max
agctttcaacaaatgtcttcacaaataatcatcacacagcagaaaactaacaaaactacccatcatatctcccaaaaccccatacccacgaaaatcaaaggggaaagaagtccacccaaacctgaaatttcgaagtcccactcgtagccatgcacttcacgaccccgaaaatgccctcctttcgcgatttggggcagaaatgatggccaaaggttgaagctttgcttggagcttcaatggaaaatgaagaagaagaaaatggcaacgtgagggagagagagagctgtctgaaaagctttttggtcttaaataaaagggttttctctttttctattattttatttaagcaatgccacatgtctacatttgag

SEQ ID NO: 24591 - DNA, 423 bp, Glycine max
  unsure at all n locations
ntcaacatcagggttggggcagcagggacatgaatgtatccattctattccaattctctccttttgtctttttattagtattttttttaaattgaactaacattctatgctcttaagtttggcttcttttcatacttgtatataaatgtaaggtgtccctttcatacccccttttgtgttgcttggacatgcttgtgagttttttgttttccttttctctttttgataatttgattggacatgcttgtgagttttttgttttccttttctctttttgataatttgattgatgtgtgagcaatgatggttaggaggggagaagaagtgtctgaattctgagctatggcatgcatgcacgggccccttggtgtccctaccaactgcagggactcatgtggtttacttccctcaaggtcataatga

SEQ ID NO: 24592 - DNA, 360 bp, Glycine max
agtttgtaggttatagtgacgatgattgggctagaaatgaagatgatcaaaaaagtattagtggatttgtgtttttcatggggaatacgaccttcacttggatgtaaaaaagtactcgatagtcactcttttgacttgtgaggcagaatacgtagcagctacttcatgcgtttgtcctgtagtctggcttaggaatttgttaaaagagttggacatgtcacaagacgagcagaccaagacctttgtggataataagtcaaccattgctctagtaaagaacccagtgttccatgatcgaagcaaacatattgacactcgttaccactacataagatagtgcatagcaagaaaggatgtaca

SEQ ID NO: 24593 - DNA, 407 bp, Glycine max
  unsure at all n locations
agttggattatggggcacccgtcatatgtgttactaggtggcgattgggcgatggcgcaaatcaactctcccacttccacaaatcaaacatgaacccaccatccccagttgcccaccttcaactgagctcacgtactcctacgtagcccttatcctcgttcctctcagcacctggtccccatcaacccctccaagcttccacaatatccaagcaattcaatttccaaacatcatgaactaccctaaaccaagaaaatagggcagaggcagaaaactctgcccaaaacacattcacataatacagctttccttactcatatacccccgtaacattctcttcgttccgattcgttaaccgttggatcgacatgaaaatnttactagaggttcctagtacataaatctac

SEQ ID NO: 24594 - DNA, 368 bp, Glycine max
agtttatggtcaactcacaactagacagacccagagccacacagtataataaaatcaaaattaatttttttttccagtacggctatggaactcaatcgttgacaacagagaagagaaaaacaatgagtcagcattgcattggtaccttttcttcctatttttctcctggctctcatcacgcaggctcagtaaagttggcgggaccaggctttgtacacaaaccgttccttcaattgtgtttccaattccagaaggtaatttaacgcaactcacatcaccagttttgaggtcataccaacagagcttgctacggttgagttcgaacaaaaccctgtccccatcatccatagccaaaggcctcacatatt

SEQ ID NO: 24595 - DNA, 426 bp, Glycine max
  unsure at all n locations
taacaaactgtgtttcattnttactgttcttatctttttataaaaaaaagaaatctaactaatgaagacgaacactagtgagaattattgtcactcttattaaatatatagttataattatttaaaaaaaaatatagtttatatttattttattgggtggtgatgagtggttaggaaatgtctaaaatgtttgaaaatgttagtagtaatttgttattaatatttatggggatgagcaatgggagtcaaaagatggagcagatgatgatgcgatgtggtgagtgaattgcagagtcggcaatggtatgtgtatgagcgtagtcacacttgaattgaattgaagctctgttccttcatgtgacgacaatctccaacgtcgtaagtcgtaacactacaatacgtgttgtcatcgtattggttttagtg

SEQ ID NO: 24596 - DNA, 358 bp, Glycine max
tgtttaatagtgaatcacttattgtgaggacaagttgctatgacattaaatttaattgccattcttgttgcatatttctaaccatgcttttgattttgttgagctaaaaagttgaatgtgggcaccaccatacttagttgattgaagcacatgaacaaaaaaattgttgaatgaaggggaatgcaagaagagtgtgtatgtaacttgtctttgtgtatacttagtctttagttttaatttttcttttgtttttgagtccttactttttttaagtagttctaactgttttagtagttttagttagtcttgcttgaggacaagcaaggttctaagtttggagtgttgataaatgtcaaat

SEQ ID NO: 24597 - DNA, 406 bp, Glycine max
tctaccccaattgtctatgaatagggggagatgtgttgtggaaaagggttcagccccttaggcacttctctctctttcgaatttgcttaggaaaattgtttccgtgaagaaaatccaagccgtggcgcttccgtaacgtttccgtgagtgatttcgcgaaggttttcaaccgttcttcgacgttcttcattcgatcttcatcattcttcagtctttaacgggtaagtacctcaaaccaagcttttcaattcattctatgtacctgtggtggtccacaataggtttcatgtattttcattctcgttttcatatactttgcgtacccccttttgacgtgcttaagccgttatatttaattcatttctcgcttaacctacaaataaactaaatttccatcgatcgtttg

SEQ ID NO: 24598 - DNA, 348 bp, Glycine max
agtttgtgaagaatttggcattggagatgctcgcttggaggaaatgatccgagaagctgatcaagataatgcgagtatatacatatatttaatagtaacataatttattgattgtcacataatgaatgaaagaagaaaatgaatttagcaaattgacattggtatagctttcctccattagataacgtaattctggagtactaccgttggaaggataagtagatcaacatcttaatcataatatctcaactgtgttgaatatattaataatactacttatggaaagtactatgtggctataatacaatggttagatggatttctaaataattttatgccatgatgaaa

SEQ ID NO: 24599 - DNA, 444 bp, Glycine max
  unsure at all n locations
ggacctatgaaactcagcttgcagggggctgaaagatatgtaaaatgctattatctatactntttagttggatctatacaattcacccaacggttgtaaagagtccagggggctgaaagacgatgattatataatgcagaattttgagaatattgctgtatgattgtgctaatcctaattgtattgagaatattgctacatgattttgctgatcttaattgattctatttgtgttaattctgattgtatgtattaattcttattgcattttaattctatcttgtatcttgatctcttgattattgcgatcacttatttttaggatagatagttgtatcatatatgtcaggagaagctataggagaaatcttacttaggcggttggatgaccttgcatatatatgtatcgattgtttctaatacatgcagagcaacatattccat

SEQ ID NO: 24600 - DNA, 364 bp, Glycine max
gcacctttgagctttcatgtttcgaaatagacaactgaccagctgacgatcagcgaatgatgaataacggactgataatgttcaccgaaacgtcacggaagcattactgaagcgcctcaggcttagattcatctgtgcattatctttgttctagatagatttaagggtattatgaataccgatagtgtttaaccccttcaactaagccccccatgcccatttatagacaaaaagggggaagaggatgccgcccagctttgccaggcgagctagaagctatctccagaagcaatctactcacccaagcgagctggatgcttcatgttgaagcttgataatgggctagatgggcccatggctgagg

SEQ ID NO: 24601 - DNA, 291 bp, Glycine max
tctttactagaaaattccttgctgtattggttcttgtgctgagattggagttgttgacggggtgagactgtgtgggaggcctttgcgttgagtgggcactctttgctggactgtcaccggattggaagggtttttgacatgggcggaaaatctcggttggagtggcgaatattcggaagtgttgtgaggggtttgatgggatttatgccaagtaggagctgacggactagcgagggtatctgcttacttcttcttgaccccactggctctgaatattgtattgctcctgct

SEQ ID NO: 24602 - DNA, 357 bp, Glycine max
  unsure at all n locations
agctttntggagtagaaacatgggaccaactcattttatttcaaaaaaagaaatcatatctagtcaaggtctgagagaccatacaagtttcctaacgatttctaattatgtgggccattaagtctatcatatgctgacaatagccgagaagcccatgaatctcttcgggggcggagtaggtgtctgccatcgccttggccttggctaacaatcggggaagttcttgactcccgttcaaggtaagagcaaaccgatccatccacatggttgcctcttggtgtaaagagtcgatcacccttcctctagcctctttttccgcatatacttgggcatactcatccgcgattctatgctcgt

SEQ ID NO: 24603 - DNA, 433 bp, Glycine max
tcttcttagacctaaggatcggtcatctttcctggccgacgtcttatgtcatatttttcgatcaatatcggtgaataatatttttctgccgtggtgggctaatgttttcctggttgaataaatgggaacatgccagtttcggccgaaacaaaacgtctgttgagctcgcacgaaaaaacctagccggcctacattgttaattttttatgcaacaccaaaacaagaaaacttccactgccgtaaaaaatacaatcataggccagcgagcgtttttaaaaaaaaaattgtcggggctatttcatgaccgatgtcgactattgagtttttctattcaatccctgaatgagatttgcatgatgtcgattaggaaatgttcgatcggcatcatccggtgatgcttccattttagacctcgatcggtcatctctccacg

SEQ ID NO: 24604 - DNA, 357 bp, Glycine max
cagctttgggttttaaaaaaacctatttaccacccccagggttttagttaaggccccccccccttctttccttgggggaaaactctcttttctcctctctctcttgtatttttcgattttaagtttagactctcttctctttctcttttattttcgcttacttacaaatcccggtcagacactttggtttatcaataaaagttcattctctatttgattaatggaaagcttagtccgcatcgttgttttcccttgaggatcaagcacagttctctttgagggtctattattaccgctagatttttggtaaattttcctctctcctaattactttgaatttggtgcttttaattcatg

SEQ ID NO: 24605 - DNA, 379 bp, Glycine max
  unsure at all n locations
ttaacttaattatattacacttgtttatgtatgtgtttatctcttgacttaaatataattttggtcattttattttactcaatacgtaattttggtctctctattttaaaattaaaatatttgatactcctatttttaaaaatctacaattttggtctctctattttaaaatacaaacattttgtccctatattttagaaaattcataattntgattctcatattatagaaaattcacaattttggtttaatatataatttctcctatgtttcatttcttttattttttactttgtagttaattaaatcatttcttgatgatatcttaaatgaatatgtagatttaggatttaattagaccaacacataagatataaaa

SEQ ID NO: 24606 - DNA, 371 bp, Glycine max
agcttgatccttacgagtcaacttggtcaaaggcaaggctaacttgaggaaaccttctatgaatctctagtaatatcccgctaaactgagtaaacttctaatttcatacacagatgactctcccacttaagaaaaacttcattttagaaagatctacagctatatcgccttgggatatcacatgtcctaggaaactaagtttccctaactaaaactcgcacctggaatcttagcttaaagttgtcagtccttaagggtttgcagcacaatcctcaagtgcttttcatgctcctctctagtcttggagtacaccagaatatcatctatgaattctaccacaaaattatctagataagggcgaacaatcttat

SEQ ID NO: 24607 - DNA, 423 bp, Glycine max
tcatgttgaagtatgtatggaaaaacttcattactgttgtttaacacatacaagtgagcttgtaacaaatcttcagacttggagttataacatgcagtcctcttcaacccttaccacccactctgtcgtcatggtaagacttatgaagcccaataggttttgccttttcaatgtactctgaacaaaactcaatggctttttcttcaatgtacctttcaacaatagaagcttccggacgatgtagattcttggtatacccttttaagatcttcatgtatcgctcaactgggtacatccgccgcaaataaataggaccccaacatttgatttctcagaccagatgaacaattaagtgaaccatgatgtcaaagaaagtaggaggaaaatacatctccaattggcataatgtaattgcagcctcat

SEQ ID NO: 24608 - DNA, 374 bp, Glycine max
  unsure at all n locations
agctttgaatgaggctgaagaagctgctgctcatgttcaacaagatccggtggagattaatttatctcagcctcatttgtcacaagatagtgacatggagtttatggtaaatatttgtcacaacaaagtagttttatctcaacctaatttgttgcagcactccatttttatatattacaattattcatgtttggcatttacatgtaggtccctgcaactattgttccaccaatagcaaggaataagctagccataacaagagccataaaaaggaaggttgctgataaagatgatgcagaaaactgaagaagcattttttgttgcattntgaaggttgctgaaggttgctgaagacccattttttgttgcgcatt

SEQ ID NO: 24609 - DNA, 435 bp, Glycine max
tgctggtgaagattctatggaggctggatcttgagctccttgaggtccttcaatggtgatttttcaccatggagatgcagcggaaggcaaaggagaagaggagaggggaggcaccatccactagggaataagccaaggaagaaggagcttcaccactaagaattgccttggataagaagcttgaagaggatgctttaatggaggaaaagaaagagagaaggggggagcacgaaattgaaggaataaaagagggaaagaagtggaactttgaagtgtatctcataagactttcattcatcaaagttacaacaagtgttacacatgcttctatttatagactaggtagcttccttgagaagctttcttaagaaaacttccttgagaagtttctttgagataacttccttgagaagctagagtttatctacacacacc

SEQ ID NO: 24610 - DNA, 361 bp, Glycine max
  unsure at all n locations
agcttcttatccaaggctcatcttggtggtgaagctccttcttccatggcttattccctagtggatggcgcctcctctcccctcttctcctttgtcttccgctgcatctccatggtggaaaaccaccattaaaggacctcattgaagctcaaagatccaacctccatagaagctccacaagcaagcttccatcaagtggtaatcagagcacaagagcttcaagtaggtgctccttaaacctccattaattttttttctttaccttctcttccattggtgtttcttcattnttctccatgtatctcctcacatgtcttgttctaaatgttgttaacatgattctttanagtttccacctatt

SEQ ID NO: 24611 - DNA, 413 bp, Glycine max
tggattgattcagtccaactagggatcaaggtttattaatttacgctacaacatagaacacaaaagcatgattgattagagaaatatctttacatacctcagctggtctattagaaaggcccaacatatttacctattgctgtcaattttacttacttgcatttttattgtttttagcctatacttagtttaatcctgttctaaatcatcaattatcaatgtttctttcaacaatgccttatttttgaatttaacccggtcttagactcgttccctgagtttgatactcggattcatccattttaattttaaatacttgacgatccagtgcgctttccagaaaaccggatttcccttgaacatatttgtacaaagaataagtggaccaaaaagtaactgtagggaaatccaac

SEQ ID NO: 24612 - DNA, 367 bp, Glycine max
agcttgattcttacatttatttcccttttttccctttttttaggaaaaatatgaaggtgaggaggtagaaaccactaacaaagagcattcgcaccattgtgtcttcaaatgtcaactcaaccacactaggtgtagggagtttccactctaaacctcacgaatcatgtgatgtgggactgttttgggatcatatgggtgtttggaaacataaaaatgctatgggtttcatgctatgttgctaaaaatgttaaaaacgcgtgtttttttagctattgttgagcagagatgttttgatttttagaaaattacaggctacatattttcaaaaggttagacaattcctaaggtttttggagtccctagaatc

SEQ ID NO: 24613 - DNA, 431 bp, Glycine max
  unsure at all n locations
tccctggaccaatattaagttagcgttaattntgttgcaatatcacctagtaccgaatcagccaaatattatcctgtagtacacacataacaaattccaggtttgttggtttaccttaaaatacttttcatttgtcaaaggggtagaaaattaattcaaagaagcaaaatgcttaagatgcaaagaagaaattgatatgcatcataaaacaatttaagatatatctctgcaaacatgactcagatcaaccatttattctataacaagaagattcaggaagccaaataaaattgaatagactaattttaaccaactagatacaataggttgtcagttaggaagccaaataaaattgaattttttttataagcaaagtaatttatggatataagaatgcttgcaatgagaacaagagatgcccaaaacaatac

SEQ ID NO: 24614 - DNA, 348 bp, Glycine max
agcttgctgttttatggaaagaattctggacatccaagggaatagtacttgcaagggaactcaagtgattcagacaccttctccagtgccagacacctaatattttccaactcttggtacacaagggaacttggttggcgccctatattacatgggaaacactgtggtggccatggacactctaaaaagactctatgtgttacattttatcccccttatggaaatacactttgcagcttcaatcatgacaagatcaactttcggacaacttgatgaaaattaacacaagaattgcagaatcaaagattggctaaagatgggaagaaattttgggttatggccctctat

SEQ ID NO: 24615 - DNA, 171 bp, Glycine max
tgcccaaataagtgaggtgtgtgtgtgattagatcttttagtcccttactatttgaattgtaaagtgctagaaaaggcattcttatactaagtagttggacttggagcctataatttcatgtttacttttatctgctctctgacatcattgagggagcttccccccccccc

SEQ ID NO: 24616 - DNA, 361 bp, Glycine max
atctttctatcaatgtgattaacaaccacaatttaattaattaattaattaacataacgaaatcagagccaggatacctaagattgatttgattcgtcgattaaatgactagattgttcaattcaaaaaggaatttactactactactactactacagaacgtatgaacttgaattgctagtacgatcctgaacgatgagaaataaatgataataagaaagaaagtaccttcggatcttgttgccctggccgacctggtacatgccccaagagaaagcgccgaatgtggtgaggaagatggcaacggcgctggggcccttgttcgggatgcgccgggcgaaccggaccggagcgaacccgc

SEQ ID NO: 24617 - DNA, 424 bp, Glycine max
gtgcctttaaggcttgtacctcatcactttcttcttatgctttaacctcattgtctctcacagtctttagatttgggagccaatccaatccttgtgtccggactctcagccacttatgatagccgccgatgatcccattactgcttcccctaagctctctgtcctttcttcacgccgcatcccatgccttgcgaactccttggagtaccctcgcgttgtggtcactgaaaccccgtgcgatgaaagacgtgatgctttcgtctgatggcactcctctcatggggtagccaagctgtcttatggcgaggacgggattataattaatgcaaccccttgttcccatcaagggaacatttggacatccttcgcatgaagatagaatcctgattcttccttccttctagcgagggaaccaattaacaga

SEQ ID NO: 24618 - DNA, 324 bp, Glycine max
agcttctatattagctgaaccatcttatcaatagcgacaagccgagttctattcagaatattagagtctatctcttttatattagtgagagtgattctcctaaaatcttgagtgaatcaagagcaccttgtctgtatcaaacgactttcacaacctttgtgtgatgacctccctggatagatggatgggttccttcctttcgtcatcacacctgttgtttcaaacgacaattcgagataattcacctttgcccagaactatctagtggacgtagctcccattttacacactcaaatcaagtgatacttgagcctaaattgaatt

SEQ ID NO: 24619 - DNA, 427 bp, Glycine max
tcaacattcaatatcgagcgtttcgatatattacgtgactgaaccagacatccgagtaaaaagttactgtagtttgaagttgctcggagcttcaacattcaatatcgagcgtttcgatatattacagaacagaatcggacatcagagtaaaaagttaatgtcgtttgaattatgtcagagcttcggtattccatttcgagcgtctcgatatattacgggactcagtcagacatccgagtaaaaagttactgtcgtttgaattttctcagagcttcgataatcaatttcgagtgtctcaatatattacgcgactcagtcagacaaccgagtaaaaagttattgtcgtttgaattatctcagagcttcggtattccatttcgagcgtctcgatatactacgggactcaatcagacatccgagtaaaatg

SEQ ID NO: 24620 - DNA, 363 bp, Glycine max
  unsure at all n locations
agcttctatcacagtctcatgatctgaaatgcatggtctaatgacctgatcactgcacaatttccacaagtaggggtcatcccaaataaaatgcttagcatcacttttaattttatctttttgggccttagatgctaagggaggaaaaacagaagcaactaaataattgacaatgttagcaaaccagggagtagaaagagaatcagaaatactatacaatatatataaatgatcatccggaaaatcatcccgaatgggtgagtcctcatcagacacatgttcggtccgactcanatgatcagcaactaaattttgtgctccgctcctatcacggatctccaagtcaaactcttggagccagag

SEQ ID NO: 24621 - DNA, 448 bp, Glycine max
tgacactatgaatctcagctgctcaggaagctacctagtctatatatagaagcatgtgtaacacttgttgtaactttgatgaatgagagtcttaagagacacaactcaaagttcaacttctctccctttttcttccttcaatttcgtgctcccccctctctctttctttccctctttcttttcctccattgaagcatcctttccaagcttcttatccaaggctcatcttggtggtggagctccttcttccatggcttattccctagtggatggcgcctcctctctcctcttctcctttgtcttccgctacatctccatggtggaaaatcaccattaaaggacctcaatgatgctcaaagatccagcctccatagaagccacacaagcaagcttccatcactagtatcctgtaaattcccaggaattattactgttgtgtcttcaaagt

SEQ ID NO: 24622 - DNA, 348 bp, Glycine max
tgttttatcattggaaaatgtactgcatccttagaactggatagagtagggctaggttatcgaactaccggacacggagtgcggtaatttagttttcttaatatgttgtaattgtaatgttgttcggttaggctaagttcaacaagaaacatctgagaatgaagtttaatttgaattacgccaaactcgcaagacatcggggtttggtatttgtgccttcagcatagaacacagaaataatttcaaatagagaataaccataaattaaaggagtttgatacaatttacacaagttttatacacaaaagttagtagtattcatcgactaacaatgacccatggaaaaat

SEQ ID NO: 24623 - DNA, 424 bp, Glycine max
  unsure at all n locations
tagctcaataagcaatgtataatactctaaggtccacattaattatntcgctatcatccactaaaaacatgatgagaaacaacaaagattcgaaatcagttagaaaatgaaggctgtacttggtataacacttcatctgccacccaatttccaatacctgaaatatagctatgcaaagattgaaatttcagatctttttataacggaatgtaagcctgcgcgcggtcaagtacttagaatgccaagaaaaagaaaattcaagtatatagaaattgacacagcacaattcattaaattgaagaaaaagtttatgtcccttatttcgcacaagtagaggtattggaaagaaaaaaaataaataatgatcagggagcctactcgttaactcttcacagccgatgttcatcatggtcgtgttcaaaca

SEQ ID NO: 24624 - DNA, 360 bp, Glycine max
agcttggcagcgactcataagcaaaggctagaggacgagtacaccaaggtatcaatcctacaagcagaaagggaagcaagggaaagggtgatcgattcattgcacagagaagcaatgatgtggatggacaggttcacctttactttgaatgggagtcaagagcttccccgactgctagccaaggccaaggcaatgggagatgagaactcgactcccaaagaagttcacaggctcctcaattattgccaacaaatgattatctgatggcccacataattaagagctactatggcaattgtattgtcgctttgattgtgattagataaaccctttttgttccccaataaaatgaggctgatt

SEQ ID NO: 24625 - DNA, 360 bp, Glycine max
atgccagtaaaaagttactggtggctgaagttgctcagagcttccacattcaatatcgagcgtttcgagatatgacacaacaaaatcggacatcaaaatgaacagttaaggccatgcgaattatgtcacagcttccgtattccatttcgagcgtctcgatatattacgcgactcacacaaacatccgagtaaagacttactggcgtttgaattttctcagaacttccataatcaatttcgagtgtatcaatatattacgcgactcaggcagacaaccgagtagaaagtgattgtcgtttgaattatctcagagcttccgtattccattactagcgtctcgatatactacaggactcaatc

SEQ ID NO: 24626 - DNA, 405 bp, Glycine max
ctgcaattttaacatctattaccatagtatgaatttttttttttaaaagagtatgaactaatattttagtatcaaataaattgaatccattctgttgattgaagttcaccaagcaatcccttattcgtttgggatatgttccatgtttggaactgtagttttaaaggaaaaaaaaaaaaagaaagaaagaagagaaggccaatttaatagtttaaaaataaaagataaaaatcttaataatcatataattctcttaattttaaaacaaaaacttgccttactcttcctatccttttaaaattttacttccaagcaaaagggttaaactatatattctttggctatctctttctctaccccaaaaatactggatataaaataattgcaaaaatagttctgttgaca

SEQ ID NO: 24627 - DNA, 405 bp, Glycine max
agcttgtcgctttatctgacctatgaactaccctaactctattagactggtgattcctatgcttttgaccttgacttgacagaacctctttttaagttaaggcgcctgactcgaccccatgttttactaaagcgaaacaatacccaatgcgaatcaacactccgacatctatcatgggtggaatggatgaatgcatgaagaaatgcatatgacacagatgcaatttatgaatacaggagcccgggaaattgtccctttcttagatacaacgtttgtgcagcatggcgccctatgtatgtatttaagaaggcgacatggaccctacattggtttgacatagtgatgggatcaagacaggatccgtgcatgatgcatatgcgaaaagcacaacacatggatgtacat

SEQ ID NO: 24628 - DNA, 398 bp, Glycine max
agctcctacatttttctgacttctcacactataaacctgttcagatacaaatggattccacaaagctaatttcaaattgtgttcaatttcctaagaaccaccaatcctgaggttagtacacatgggtaatgctcacatctttgagagttgggataacacaagcataattaaacaaatattttaagtatttgattatatacaccaatattactttattataagcataaagagtgattactataccaattaaagaaagtaaaatatcgatcatgctcaaaggaattaagaaatttaagaggtcatatactattacatttaaaagaaatgtatggaatttcaacacatagacaaaatgaatggccttcacatttcttctgaataaagcatcacacaagttg

SEQ ID NO: 24629 - DNA, 430 bp, Glycine max
  unsure at all n locations
gactctagctaaatcgctaaccatatcggaagatttattgatttatatctnccccccgacgaaggcttttgattcgggttatgaccattcgctaaaacttctccttctgtttccacttactaattttaaattctcttgcatgaagttaataactgtgggacctgctgctgttcttgtacggctactttaaataatcacctctatgttcatgtgtggcattctttccatggtatggtgctgactagtcagatatggtcttgaataaacctaaagagtcacaaatgtcttataatggacaccaaacatttttgtccattgggaatgccgctatttggagccaaattgtctgatggagcttttctctgttcctttctatcatagcaatcaactgctgagctatgcttttgcatcattccctatacatatttgt

SEQ ID NO: 24630 - DNA, 403 bp, Glycine max
agtttgactatgttatgcaaattgtctcttatggccatgactaacaattgttgcatcaagatgtggcaatcatgagactttaagcctactaatttaagatctttcaactgcacttggctcttaatatttgaagagtatccttgtgggactttgacctgtcgtatacactgaaaaaaactgatcttctcctttctgggcaaagtatgacaagctggaggcaagtatattttttaccatcagaccttagatgtaactgcgatcgtatatccatctcagctagatcttgacaagtattcaaatcatctttcgtcttgccttgaatgttaagatgcgtcccaatgacactatcacatatatttttctccacatgcatatcattaatacaatgtctaacatctagatc

SEQ ID NO: 24631 - DNA, 313 bp, Glycine max
aataatatataacaataaatatattttccatgctgaacataaaattaaacaatatttactacttactatataatgatgtctcaacctacccttttgcgggcgagcgaggcgaggctcttttgagccttttccaaagagaaaaatgtgcggagtcgccaccaacgcttatttgtggaaaacgttcgataaactgaaggaaaccggtcataaacaatattccaagttcgggagtcgtatatacgtttgaggaatgtagtagcatctttcacgtttgctcaaaggacaccagccttatatttagaactgtgtgaaa

SEQ ID NO: 24632 - DNA, 391 bp, Glycine max
agttttagtagcccactcgctaagcacaaatcttacgctaagcgccaagtcttcacgcgctaagtgggcccttgcttgcgctaagcgcttaaacccctgactagtggctggatggtagcgctaagcgcgcttcactgtgctaagcccaaatacctctcaggattttaatttctcgtattgggcttagcgaggtgatgcgctaagcgcaattccctctctgttttgaaattctttggaatagcgctaagcgctagcaacgcgctaagcgccagccatcactgcattgaggagcatgtttatgcgctaagccccacctttggtggctaagcacaaattgcaggaccaatttgagctgcaggaagcgctaagtgcatatcctcacgctaagcct

SEQ ID NO: 24633 - DNA, 233 bp, Glycine max
actcaagcttgtagaacaataaatcccaacacaccacatcactggttgtctcttaatctgtttgaaaaagagtattccttcttctcccttcttgcatcgtcaataacctcattgaccaccaaggtactatgaaaaagatacctatctttcaagaaggtgttttgcttttgatcaataactccatttaataccttcatcaacctattggcaagtaattttgccaatattttgta

SEQ ID NO: 24634 - DNA, 396 bp, Glycine max
agttttgagccaataccaacgaccataactttttactcggatgtctgattgaggctcgtaatatatcgagacgctcgaaattgaatgttgaagctctgagccaatacaaacgatactgactttttactcggatgtctgattgagtcccgtaacatatcgagacgctcgaaattgaatcttgaacttctgagctaattcaaacgacaataacgtttttctcggatgtctgactgagtcccgtaacatattgagacgctcgaaattgaatgttgaacctctgagctaattaaaacgacattaactttttactcagatgtctgattgagtcccgtaacttatcgagacgctcgaaattgaacgttgaagctctgagccaatacaaacgaccataacttt

SEQ ID NO: 24635 - DNA, 396 bp, Glycine max
atttaaattatgtaagtttattttaacatgtaaattatttttattctaattatataaattaaaaaattaatatttatgtttttagaaaacttacatgttaatattttcattttaactataaaaaagttatctattgaagaaaattacattaattaatatgtaaattattttatgtaatttacaagagccatgtaaatttatttttatatataaataatacaaattcttattttaattataaaaaataataaattttcaatttcttatattatttaaatgttattttaatttacttaattcgtataacttacataaaataattttattaaataatctatatgttagtttatgtagtttttttaacatcataataaaataagaacaaattgttatata

SEQ ID NO: 24636 - DNA, 417 bp, Glycine max
caccaggtcgaggcaatatactatccccatttctgcttataaccttcatcttcattggtgtgctttcagaaacactagaagaggcagtaccatgaagtactcggtaactgtcttgattagatgaagttctaggaatggatcgagctgaaccataattacttctgtcctggtgttgagaagagttccttctgtcaaactcttttggacccttttcaacctttgtgagcacagaaatatctgatccactctcagatcctggatggcccaaaatgcctttcaattccatatagcctgttgaataattgggatcacccacaacatttggaaaggcaggcttcctgagattcaccctatctctcataaactcaagagcaaattcctcaccagtctgtatggagtaattaagtacaggtttat

SEQ ID NO: 24637 - DNA, 282 bp, Glycine max
tgttttatacccattatcacatctacaggaccaaggtccttcatatcaaaatttctagataagaaagacttcgcatcatcttcgaactacatatgatgatccagtatcggtatgtcatgcacatactaacatgacacgacgcattcattatcatcatgttgtgtcacatacacacatttatcagtgtgattgatttgaaaaccatacgagagaagaacttgatcaaattgttctgccactgctttgaagcttgattcaaactatgcatagattgaacaaatt

SEQ ID NO: 24638 - DNA, 408 bp, Glycine max
tcttgcgtagccgctcttggtgctcagtttatcccttaaacatatccctcttattactagctattttgaattctttagttcctgaatgtacaaccttcaaattgtggctcgttcccctctttcttttctgcaaaaaagacaatcaaatgctgtcaaaacatggatgaagtcctaagaaaatcaatatcacagaaaacatggatgaaatcacaattaaaaagcacaactacctatctttcagagtcctttggttaatttgtcttgtctccttatgtggcggggttctgattaataatcttatacttttgccttccaaaaaaaacttatcactaatcctcttttcattaatccaattttgtatgtcattgtataaaagatcatgggttctacacctgcctccactactcc

SEQ ID NO: 24639 - DNA, 386 bp, Glycine max
agtttgatccttgagatatatatatagagagagaatcttctttcaccaattaatgatgccatgccaacacgtccaaacttttttgggactacactgtaacggtatgttttctatatacaattacaatgtattcccagctagctaggatatgtctgcaagttctttaatattttatgtttacattttcaagttggtttttgtaaacaaaatctgagatcaaaatcaaatggaactgcccttatatcgtggttcctacctttggtgttgctgttgaaacctaaaaaaaaatccaaattttcatttcctaatttgtgaaagaattgaagcacttatttgcttccataatattcgtcatgatcaattattctttagaaccattaaatact

SEQ ID NO: 24640 - DNA, 425 bp, Glycine max
tgcatgatttacatctccctctttctcattcaaatatttcttgatatcatcaaaatcttcatgatttacattctcccactttttgatgatgacaaccacctgtaggttacgagcaacaacaaagaaaatatctatttgcatatagtttactcccccttggttttacaatgattgcttatatgtgacaattgaagattccatattcttcatatataaaaagttgtctcataaaacaatagataatctttcttactattttatcttttatctttctctcccccttggtcaacatcaaaaacaaatcatgaatagagaggagaaagatgttaccacttgttgcaatgtatgagaataagtgataccaaaaggcattaaaacaatcattcaatattaatcaagcaaaaacaagtacaataacacatcaa

SEQ ID NO: 24641 - DNA, 384 bp, Glycine max
  unsure at all n locations
agcttcatcttcttcaccacacaaccacaaccacgacctacacctccaccacactttccattactcttacctcttcctatctttgaggagcctgaaatggcggaagaagaacatcctaaaaggacacttggatactatattgcacatgttgtgcaaaggcacttcatattggaatgtgttattttggctattaaaggttgtagtgtcaatctataattaggattgctcccttcaattggtcttagcacatctctcaatttcatgtaaaaaaacttaatggaccggattgggtaatgctcaccactacttactaatatattcacacagaaaaaccactacttattaatatttgaaaatgtttaactatacattntcattcaatat

SEQ ID NO: 24642 - DNA, 421 bp, Glycine max
tgtcgagttgttttcttagccctattctctttttgtctttgcttcttccttaaggcattgtttcttctacaagttctttgaatctcttgatccaaagggactagatcttcttaagaaactctacctcacatacatggaacaaagcatctaaagaacatgttagcaaagtactcaagagtaatacaaaaacagaatttaaaagcaaagaattgaagaataatgaatcattgcatagaatatgaaattagcataagttacctaatacgagaaacaagtccccgacaacgatgccggaaaacttattacatcattgacaaaagtaccaattagtgtagtattttcaatagtaagtagaaagactgtctcctcaaggacttgtttgtactaagcttttttgtgtaaactcaacaactaagcaatg

SEQ ID NO: 24643 - DNA, 235 bp, Glycine max
tgcacgcagtttagatataatggagtttatacaggcaacgcgatattgaacctaatctttggctactttggacattcataagctccatgccaattaaaataaatgagtagtatcactattttagcaaaagcgaaatactcgaaactagaatacttattcatggattaattcaagatatgataaataaaggagtgtgggattggataaatagctaatatttattttaaaaccataa

SEQ ID NO: 24644 - DNA, 391 bp, Glycine max
agtcttaagtttgttatgaatggtctgaaacataagcaaaatttggtcctcaatggagttaagattgtatagtgttcgtatgtgatagttaatgcagcccaaacccttttcaattagatattgagcaactcttgatggactaaatttttctacacctacggtgattccgggaatgaaacggagctatgatgtcaatcatagacaaacgttatgtcttaatcaaaatttaagttagcctttttctccttctcatcatgaactaattgatgtggaacaatgaaatgatgtttttaagtttaaaaaagtcgtaagttaataacttgagaccgctgaactataaaaggcctattagatggcttgataacaaaagctttggccttttagtcggaag

SEQ ID NO: 24645 - DNA, 443 bp, Glycine max
  unsure at all n locations
agacactctagaaatctcaagcctatcaaatctcacagtagatcgggaaatctctgaggtgagacgtatcagataaggtncgaacacaaggataggaagaagtgcaagccacatggttgctattacaatcctgtagaatccctttagcatcaaagcaagtgcagcacaaaatgtacacatcatggatgccacagacaaaaataagggtacaagaccaatgagttacttcatgggcaaccacttgatgaaatcttgctcagcataacgcgatgtgagaattccaataaacatcaacaccgatgatgaagatgcgatgagggatataccgtctgatacgatgaagaacgtaaatgtgcttcacctaaaaagaccggagtgccatgattatcatcgttacccccttgggcaaggaaagctgcacatacataatggctatgatgaga

SEQ ID NO: 24646 - DNA, 393 bp, Glycine max
  unsure at all n locations
agcttgagacttcaagatctgaaactttgttccctaaccatttcgtttaagttaaggggagtctttttcactccttaaaccctaaccttgttgtctttggaagttaggcttcattgcatgttgttgtgatgtttaaaatttggtatctgctgtcatgaatggagctggatgatatgttgcttttctggaagtttaaaggttaaaaatgaattttttgagtgttaaaatatagggttagccttaaatttcacttaaatcagagttttctagccaaagtaatgaataaaacaagttttagaacgttttatcgaataaaatctgtcacaaaaataatctggcaatgagagctntgaggattaattntattaaattnttgaccttanaaatgagttt

SEQ ID NO: 24647 - DNA, 433 bp, Glycine max
tgtgctccaaacagatgcacagaacagaattgttttcacctaacttcatggtaatttacataaactcgtgtcattttttttaatttgttattgtgtacattagtaaaatttaactaagaaaatctaatttaaatttattttcaaattttctatcaaattaaacacttcaaaaacatgaccagatacaaggtaagattcactcactaaacctccaaatttgcctactcagtttcttcagctcagggtcaaactcatttctgaaatgacgcccctgctgaaatcaaataatattctgtttttttcactcagatgtttgacctctttcaaaagtctgacccaacttaagcttccggggaaggggtttagtatatacgatatttcaaattagttctagacgcgtcttactataatagtaagcttatacaactgtgtc

SEQ ID NO: 24648 - DNA, 393 bp, Glycine max
  unsure at all n locations
agcttgagatgtggaagtgttgaagggtgaaacttcctgcttttattgttgaccacagagtggtacctggagatatgtcgcgggggtcaggagaccttggggacgtcaggtggggtgctattgcccaaaaccaagcttgaccaatcccgacccaacccgggcatagtcggtcagtgagaacctgtgatgtacctaagcaggcgagctcctggcagtcaacagataaaaggaacaaagaccacaaagcatggaggcttgtggtggctggccagctgtgaaacttgattgatatgtgagatatggtctctggtaatcgattaccaagggtgggtaatcgattacaaggcttanaagtgaagacaggaggctaagatggtctctggtaatcgatta

SEQ ID NO: 24649 - DNA, 426 bp, Glycine max
  unsure at all n locations
nttcacaaagtttatggtaaaatctaagacctagccatggcagatgtctccacagaggctattgcctccctcgcctagtattatgaccagctgtcataccctaatttcatccggagaccatcgtttgatggcatgcaacctttgcttgaccgccttgaggtacttaacatccatcgttaggtaatccgcaaacttccgcgacattccgaaagtcaaaaagaggcattgttgcgcaatccgtaaagttccgcgacatttcggaagtcaagaagagccttgttgcgtaattcgtgaagttttgcaacattccggaaaggaaacaagtatcgttacgtaatccgtaaagttccgtaacgttacagaaaaagaatcagcaaaaaaagcaaaaagggggtgtatttagtaaaatggggagtgcaagtagca

SEQ ID NO: 24650 - DNA, 406 bp, Glycine max
agtttaacaggaattttgccttctttatctgtgacatatgtattgtctcccctgtaaatgtttggcattctatgtcaattttccaaagtaaaaaacaacttatcaatcatgaacacagcatatctgagacagtatatgaagaaaatatccatgaaactgaagtttaaaattgaaatacaataattaaagggtcaataatgaattacagaaatgatatttccatattaaaaaaaagaaacttaactagtgccattttagaggtaaacaaagaaaaacacattttaacgcactgtttctctctgcttccctcccccaagcaaaataaaaggtgtaactttttctatgaagaaatatgcatggtaatctgtttacagcttatgcttctaagcactactatgattccaat

SEQ ID NO: 24651 - DNA, 403 bp, Glycine max
tcaagcttcctaataatgatgaacgactatcaacatagctcctatatatatatagtcttatctcatatagccctaatatcactaataactaatttttaacattctatcattcaaaagtatttctacagaaataatgaattaactttcaaatattttacgaccatattgtgaaattgtgtctaaaatctttatttcatcttctaaatcacaaaaatgataataaagttcaaaactaattgttaatcacgataagaatcacccatgagggaaaaaaaacctctataaaggtcatttacattaaaataaactcagagataatacagattattataaaagataaattctatattttaaaatcaaaaggaggtggcttaattggaatgcaaataagacacgactttac

SEQ ID NO: 24652 - DNA, 385 bp, Glycine max
  unsure at all n locations
agtgtgcgnatttcatcagattccaaaactatcctttatcgagaaggactcgtgagagagaggataccattttttttttgtttttacttttgaagcatagttgataaatttcgtaggcaggaggtacatttggccaatcattacaggaaagaaatcattccaatggcattgttgatttcaaacaagctctcacaaataaaactctgtcctggaactacacgtgtcaactctctctggttattgacctttgtgtaggacagtgtaaaaaccaatgtgttaattcttaatgaagcaagcgtacgtgtgacgcgatcagacatcgtagaattttcttttgattacgcatagctacagggtaatcaacagcaacactcgcatgccaagt

SEQ ID NO: 24653 - DNA, 336 bp, Glycine max
tgctttataatatgggaacacgccaaagacaaaaggcgtaaatccctccataaacaggtaaatacaacaacaaccaagcttttctccactacgtgaagtcaaacaaagccataacgttgtgttggaaatcaagcctatacattatctaagccttcctacatctctagcaattagcgcaccctccatctgatctacaatacttaatgggggttcattaagtcttgtacacgcatgccctaaccacctaaagcaagattttaccatcttttctacaacaagagcgctaccccaactttgcctctaaaatagcccacccccccaacatcgctctcataa

SEQ ID NO: 24654 - DNA, 399 bp, Glycine max
  unsure at all n locations
agtttagcatgctttgctaagcctaatctgcataaaaatattttctggatctttaggctaagcgcgagtcagttgcgcttagcccatgagtaaaattttataaggcatgctaagcccagcctgctgcgctaagcgcctagttcaatttttagttttattgaaaataaccctaattaatcttgttgtttgatcatatatttttagatggcatcaaagaagagaaaggcacctgccacaccttcccaggtccgatatgaacgatccaattcacttctcccgaggcctgngaaaggtacactaacattgttgtacctaggaagctgcttcctgagcggaatgtggtaatctaccacattgagtttggtgagttcaaggaagaattggagagaagaaaatggg

SEQ ID NO: 24655 - DNA, 426 bp, Glycine max
  unsure at all n locations
tatgcgcatatttccttacgaacgttctcttgcacttgacattctattaactaagaaaaatgcacccatatacaatcaaggcagcttcgttacctagattatttacatgtacttccaaggtgtatttgttacttacatcacacacatctccttggctaaatttacatacatgcatactcaaagcattttggggtaccaaaaattgcacatgtgcacatcttggtattcctaatacctatacatacacaaacttcatgatgaatcttgactatctacacaataaggtgctacattccatgctcttttcaagtttttgctacctaaagccgcatgcaaatccaagtatattctcctttgctgactaanattgcattcaaattaaagggtatacatttctcttgtgatgtatntactttacataacatg

SEQ ID NO: 24656 - DNA, 313 bp, Glycine max
agtttttagccaaatggacttaccttgaattaattcctttgatagcccttttaagccttgtttccccttccttgttttgaagctcactacaagccttaaatgaaaaaccatgatatcaccatatctttaaggaattttggagctttggaattgttatgggaataagtgtgggggggttttttttgttacattggataacttgttttgttggctatgcttcgtgatgtatttcgggccatacttgatgtacattggatattggttaaatgttggacatgctgaatgaaatgtagtttctcataggttatattct

SEQ ID NO: 24657 - DNA, 528 bp, Glycine max
  unsure at all n locations
tcacaacgcacgcataatgaccgaacatgttaataaagtaatantaaaaaaaaagagannnanttganccttgatgcctcgatcacacaggcgaaacaagctcggacccgtagatcctacacaggcgacctgcaggtatgcaagtttgataacattggactgagcaaactccgtgatgaaatgggaatctatgacaatgagcttggaccggacatggagggaagggacgctggcaaagcttatagtagatttattatcacaaagcaacagcccacacggcacatcaacccccaagagaagaagcatctgctataaccaaacaactacactagcatgaacatagctggcccaatcaacatcacaagaggatatgaccccgagagagtcctgaggtgggaaaaatacacctcgggtagcagcataatagagatatgcggacgatgaggacaacatgcagcgaggactctacgtccttatatatgacgcaccggatcaaacaaggtgactcaggacgaaaaggggaatacg

SEQ ID NO: 24658 - DNA, 398 bp, Glycine max
agtttgtgaatcaagtttgctctggacgaccatgcactatttttttcttttatttattagtaatgataaggaacctaacatgcaggttgaggtggcgcacattgcacaagatctcagagacataagacactaattcttttcctttatttgtagaaaaagtcaaatttgaggatctaaccaatatgtgatatgtttctataaatacagatgaataaaaattaacgcatttatgtagattccagttagtagttatactagctactggcaccgaatgacataaagaaaaaggaattatctagaagaccattctatattgggtagcgaattttgaatccctgcattgttgcttgcttgttcacacaacatgatgttctccagctggactgttggcattattt

SEQ ID NO: 24659 - DNA, 426 bp, Glycine max
tggcaagccagagtctcttcggctggctctttgcttgttcataatcagctgccggaataagtaggcaccaccattcaataccattatagagaatcaaataatatatatatcatcagaataaaattaaatattttctattgataggaattgtatataagcattaagaaatttataagacttccgcaccatacttaactaagttataagaaaacctattggatgctttttttttggtgataggaaatcggatgttgaagtttaaatgaaaaaaagtaaaactttctcatattattggttaggaacattaatggtgtaaattttaataaattacgacatacaacaacataaataataaaaaacacttgtaaaattatatcatacgctgagataatcaaattcgttgagataactaaaaaaacatagatt

SEQ ID NO: 24660 - DNA, 381 bp, Glycine max
agtttgttaattagcactattagatgcaaattcaatttggggtgggtgtcatgacaggataatttcctttgccaatatagataattacatactaattactattagttaagctgagagagtacatagcttcgtgtggcttattaagatctaggttatactctagctatgttattctagaatctgtctattgccaaggcaagagcaaaacctttacgttatcaaaactactaattggacttgtcatgcacaatttttctttcaataattttcatttgcacttatacattacaattgagagaagttcgtgctctttaaaatgacatataagagataaagatctactggtgaagaattcttgtgatgtaaaatatggatataaca

SEQ ID NO: 24661 - DNA, 250 bp, Glycine max
atcgtattcactcctctaatgggtcaatactgaatcaatgtgacctttcagatatttagcagtttgagctacttgtttcgtgtggctaccaattgcatcaagaaaatcatgaatctgtcttgagccatgtaatatatgttctgatttctcttgagtgctatttaacttgtcctcaacatattgggctgaattttttaattcagtcacaagtctgtcgagttcatattagaatgcttgcgccctgtgtata

SEQ ID NO: 24662 - DNA, 375 bp, Glycine max
  unsure at all n locations
agctttagttgttaagcaaatatacatgaatgatttttaacaatatatctctaacagtaataaaaacttcgtaccccattgcccagatgctcttcgctatgcgaaggtatgggggagggacgtaacagtaatgaagcaagaaaaaaaaaaggcatgtacggacagagaaatataacgatgaaaggaaaaaggagggggaatccagaagaatataaatatttacatcctagaaaatctggntgtgcagttccaattgaactgggatcataattagaaattaaattgtaatcactaatccaaattgacactacattatattagagctcacatatttcacaggtcaatganaaaataacatggataatcaaacaattc

SEQ ID NO: 24663 - DNA, 416 bp, Glycine max
  unsure at all n locations
tcaccttgcttgcaaggaatgtgtgattcttccaggttggtctctttaatttcttctttttatccttctatttctttgtaacacatgactctgtttgcattagttgccagacaatgtgatttttcattttcataaaattgctatttactatttttatttagttatatgctattattggtcttactgaacaaagaaatatatatactaacaattaatgccaaggataatccaactgaaaaagttttccagagtgacatgacactgatggtttggactttggagtatcatccaaaaacctcaataaaagccttagctatattttttcgttcactttctggactctaaaatnttgttacaaataaggaaatcagttaatttcaatatttntaaaatcagaacaataataaaagaagtga

SEQ ID NO: 24664 - DNA, 403 bp, Glycine max
agtttgtcttgttcagaattaggatacagagggcacaaaatttttaacaacaattccaaagcacaccataatgcctatttttcgaggaaagagctttggaggcagcaagaggagcagcttttgcagagagacctaggttttgtaattagagagagattagtgagttgtagaataattgtgagatgctgagaagaggagtagggatccctcttcttgtttaaggaataattattctatactcttaatctcatttgtgttagggtttttctgtatggctggctaaacactcttgttgggaatttctatggaacagctgatgtaattactttaatatctaattgattgtgtttcctatgttcaatgcttctttcaatgcttaatttctacatgctcttggtctgat

SEQ ID NO: 24665 - DNA, 434 bp, Glycine max
  unsure at all n locations
taactcatccaaacatggcaagttcaacatgctttttcaaatttcttcacaaataactatcatgaagcagaaaactagcaaaactacccatcatatctcccaaaaccccatacccacgaaaatcaagagagaaagaagtccacccaaacctgaaatttcgaagtcccacacgtagagacacgtttcacgactccgaaaatgtcctcctttcgcaatttggagcagaaatgggcaccaaaggttgaagctttgttgggcaacaatggtggatgagagaaaagaagaagaaagctgcgtgagagagagggagagcttctgaattttcttttggctgagtgaggagagagaacaacttttggttntaaaaaaaagttttctcttttcctattattttatntaagctatgccatgtgtctccatttgagtggagcaaa

SEQ ID NO: 24666 - DNA, 406 bp, Glycine max
  unsure at all n locations
agcttgctgcttcattgacagatttacttaaaaaagaagcattcaagtggacaccagaggcagagacaacatttgttcaattgcagaaagtcatgacttcagctccagtgttagctcttcctaatttccagctgcccttcattctggaaactaatgcttccgacactggtattggagtagtattacatcagaatggccatccaatagcatttttttccaagaaacttgcacctagagtgcaaaagatatctgactaatttagagagatgttagcaattgttgaagctatagctaagttcagacactacttgctgggacacaaatttattatcaaaactgatcaaaattagtcagatgatgatgttgatggatggaacaaccnctacagacacctgaacaacaacag

SEQ ID NO: 24667 - DNA, 411 bp, Glycine max
tgtgagaccttccgctacaatgttgaagagaaaaggtgcaaggtgatcaccttgccttagacctctcttaggagtaaactccttagatggactcccattaattaaaatggatatagttgcagtatttagacaaccatttattcatttcctccagctttcacaaaatcccatccttttaagcatgtagtcaagaaaaccccaagaaaccgagtcatatgcgttttcaaagtcggctgtgaagaccatgcaaggtttacttctagatttggcctcagctatagtctcattggcaattaaaacaccatgaagaatgtgtctccccttcataaaagctgtgtgcctttcatctataaggtgaggtaatacagcagccagcctcttggccaaaactcttgccataatttatagaca

SEQ ID NO: 24668 - DNA, 403 bp, Glycine max
  unsure at all n locations
agtttgcttgtggggcttctatttaggctgcatatttgagcttcaatgaggtcctttaatgttgattttccaccatggagatgcagcggaagacaaaggaaaagaggtgagaggaggcgccaaccactagggaataagccatggaagaaggagcttcaccaccaagatgagccttggataataagcttggagaggatgcttcaatagaggaaaagaaagaaggagagaaagagagaggggggatcatgaaattgaaggaagaaaaagggagagaatttgaactttgagttgtgtctcacaagactctcattcatcanagttacaacaagtgttacacatgcttctatttatagactangtagcttccttgagaagttttcatgagaaaacttccttgagaagc

SEQ ID NO: 24669 - DNA, 407 bp, Glycine max
tgaggataagaatcctggtgcaccaaacaatcattgtagcaagtcaaatgtgaagaaacaacattgacaactgaagaaaagaacacaaaaaacaagaaaataagggaggaaagaagaacctcctcttctcttagtttaaccttttggtttttctacttcatagtcatagctgagccatgcattagcgccccctaacacacttatactctagggctaaaatggtttcaaccattttgttctttctgtaagtgaagggtcagtggtaacctatgggttcaaaacaaggctagatagggttaacccttaagccaaaacccacatcgacaactctacataaaaagagccaacatatatgagaaataagaacacctaagcaaatgtaccagctgagcaacacacgaataaaa

SEQ ID NO: 24670 - DNA, 388 bp, Glycine max
agtttgaacaatcttagagagctgctagagacactgctatcactactggaatacacacgcgatcccacttagagataagagatgagtttattgcaattgaggttagagtgaatatgtgtagggatccttagagaatcaaattgggaataattttggggcgttatatgcgttttaatttttcatgtacaattataactacaaattgactgtatttgacagatcgattgacgtcccgatgccgaaattgttgtgaaattgatatgttcttgtgttgagtgtgaacccgagaaattggaaattttctaattagcgtgaattgatgaaattaaataaggaaagatttcccataagagtgagatattgattctgtatttttcccttttcgtgc

SEQ ID NO: 24671 - DNA, 399 bp, Glycine max
tattcaacggacctctagtcactcaatctgccaacctaaacacccatccctaacgtgtttattatgaaagtaattttaggaaagctcattcttttttggtttaattaaaccgtggaggttatagacaggttaaataagtttcaatagttcatttagttttttgaaatacatgaattctttcaactacggaattgaatgctagctcctgcacctatgtactttgttactcatagaaaacattgttctatattcttctggtaaattctgttggtatgtagtattttgtatctgtctgattgctttacctctgttttgttcatatacagggacttgagaagtatgttctgacaaagttatttgttcgtgtatttgcttcacttccagatgtatttgctcttg

SEQ ID NO: 24672 - DNA, 398 bp, Glycine max
  unsure at all n locations
tgtcttttggtatatataggcctccttcaatcaagtatttgttgcctctaaatggacatatttcgtctcttaagctttctttttaagaaaatggtagttagggcattaaatgtgtgcatttaatgcatgcacttcttcatgttgagaaaccactcttcgtccttggcatgttgaacactacatcaggaaactacttccttttacgttagagtaggtttgtgcagtagaacttttcttttgatggcgattaaggaattttagaacttggcttcattcattattcataagattcaacaggtcctaggagaatgtatttgcaaaatagatctcagacacaaaatattaaataaagccttaaatgtcatgtttaatgtcgtatcngatcatgattctatctt

SEQ ID NO: 24673 - DNA, 184 bp, Glycine max
tctgaaaagagtatgatgaactaatggatgtcaatttggccaccaatgaagccttggattgagaaacccacaaggctctaaatgaagaacacaaccataacaaagttttgaggggctttatagggcagcaattgtgagctcatactccaaataggtgaaaggaatcatcacgggtcaaaggcat

SEQ ID NO: 24674 - DNA, 392 bp, Glycine max
agcttgagtgagccaccatagagtgagtcaattttgttaacacatccttgtaaccctactatcattttgtatagtggaagaatctccatattggagaattataattgtgtgctcccattattatctttaattactaagtgtctatcttaacttcacgaagcgggaaagtccaagtttttccaacactttttactagtgcaggtacaatgagaagtcacatacacaatatattaaatacttggtagggttggttctaaggaagacactaattgtacatctagagttgttcgagcatcactcattatttcaactcgttcacaaagagcgacatcagtgtaataagagctgaggtgtcagtgcttgctgacacaccattagtattaataataata

SEQ ID NO: 24675 - DNA, 427 bp, Glycine max
tgagctcggcttgagttgaatacgtaattcttgagctcggcttgagttgaatacgtaaagcttgagttgacataggctttttttaaggctctgctcgacttacataaaagtctgacttacgagcctatttaaaagcttgcttaaagacgtcttttattaattaattattttaaaacctagtgaaatactaactaaaaaaagaaacttataaaatttcgtataaataatgtacaaatctaaaaataattgataaacaaaattatattgaattcaagtcgttaaagcacaaagtatataaaaaaaataaaaatagcataatattaaaaaatgtatggattagagatgatttacactaatatagccaaacaaaaattattattagttaaattaacaatttttaatccaatttttttaatatataattata

SEQ ID NO: 24676 - DNA, 399 bp, Glycine max
  unsure at all n locations
agtttttgcagcttcataaagcttttggactaattaaattaatactttcaaaattaaagataaatatttcatatatcatcatttttatatttttattattttaaaaatgaccataatatttttatgtaaattaaactagttttctaggtttttaaccataatatatgtatttttcaaaacttccatttcaaagaaaataatatttattattttaagttcaaaactcaaagaggaaaaaatgcatgcaaacaaattcaaataataagtattggctaaaatatttttattatgaaattaaattttttaaggataaataatttcattntttggaatatttgatattttgattnttatttgatccttanaagtaacattgtaacaataaaataatatttttca

SEQ ID NO: 24677 - DNA, 426 bp, Glycine max
tggagaggatgcttcaatggaggaaaagaaagagggatagatagagagaaggggggagcacgaaattgaaggaataaaagagggagagaagtggaactttgaagtgtgtctcataagacttttattcatcaaagttacaacaagtgttacacatgcttctatttatagactaggtagcttccttgagaagctttcttaagaaaacttccttgagaagcttctttgagaaaacttccttgggaagctagagcttagctacacacacccctctcataactaagcacacctccttgagaagattactaaagaagctagagcttagctacacacacctttctaatagctaagctcacctccttgagatgagaagctagagtttagctacacacccctataatagctaagctcaccctatttcaaaataca

SEQ ID NO: 24678 - DNA, 512 bp, Glycine max
  unsure at all n locations
gatgagannntttgaagccttgattgatttgatatagcaacgtgcaagtacagctcggaacctgtggatcctatcgagtcgacctgcaattatgcaatgtgtctcgactgttttacaagtgaagagaactacaggttacattaattccttgacatatgaatctcggacgctagtcgctgaagctatatgcattatagagcgtcgagattctgaagacgcacttgacagcctcacttaacttactaatgaatagataacatatcgaaatcttcttttactgacaagctcgtaacagaacagggaggtagccaagactcgcgatttttgtaccacatatgcaatatgcggactaatttctcatattgatattcgagtctgctcaaataatgtcagagttctctgttcactgcaaaacttaggtagctgctatgtctagatgaaacggggatgttgcatagcttaatttgccactgatccaatttcatgtactggtggacgggctgaaatccacg

SEQ ID NO: 24679 - DNA, 388 bp, Glycine max
agtctttgacagaaaaaatggcttgttgccagaaaaaacccatatggattgatgatttgtatggttcatacagattaccaatccgtatgggttttatttactttataaaattattttaaattttttttccttttatttttggtaaaaaaaaatttagttattattaaaaataattattgttattattaaaaaaatttagttattattaattttttttaaaagtttattttgtgttgtggccatacgaatcactaatctgtatggtatttttttaaatttttttattaattcaaaatgataaactgaaattttttttaaaaatttccatatggatcactgatccgtattggtattttttaaattaaaaattagaaactagaaattatgt

SEQ ID NO: 24680 - DNA, 414 bp, Glycine max
  unsure at all n locations
tgtgtatnttgatattaaaaatattaaaaaatggattttacgactgaaagcaaatgtagatcaggaaactccctgtgtgttgttaagtgtgtggtatgataatataggtttagtggtcaagtagataggggatgggtgaatgctctcctagaacctatgtgtttgaatcctgagaaaaaccatgatttccttgttagcccagccacgttacaagccttataaaaatatagtccttagtgatccattttgtgtgcacgctattgtgttgaatgagattatgtgcaaattcaaaaatggtaacttcaattggtttgaatgaaatacacataactgaaacacttgtgtgcttgagagaaacactagccttgtgaggagtgaagcacggttgatcttctttgattcctgtcatacttg

SEQ ID NO: 24681 - DNA, 388 bp, Glycine max
  unsure at all n locations
agttttgagcaacttcaaacaacaacaactttttactcggatgtctgattgagacccgtaatatatccagacactcgaaattcaataccgaagctctgagcaaattcaaacgacaataagtttttactcgtatgttcgattgagtcccgtaatatatcgaaacgctcgaaattgaagaccgaagctctaagtaaattcaaacgacaataactttttactcggatgtctgattgagtcccgtaatatctcgagacgcgcggacttgaatgtcgaagctctgagcaaattcaaacgacaataactnttttcctcggatgtcgtattgagtcccgtaatatatcgagacactcgaaattgaatatcgaagctctgagcaaattcaaatgac

SEQ ID NO: 24682 - DNA, 408 bp, Glycine max
tcaacattcaatatcgagcgtttcgatatattactggactgaatcagacatcagagtaaaaagttattgtcgtttgaattatctcagagcttcggtattccagtccgagcgtctcgatatattacggcgctcaatcagacaaccgagtaaaaaagttattgtcgtttgaatttgctcaaggcttcggtaatcaatttcgagcgtctcaatatattacggaactcagtcagacaaccgagtaacaatttattgtagtttgaagttgctcagagcttcggcattcaagtcctagcgtctcgatatactacgggactcaatcagacatccgagcaaaaagttattgtcgtttgaatttgctcagagcttaggcattcaatatcgagcgtttcgatatattacgggactgaa

SEQ ID NO: 24683 - DNA, 406 bp, Glycine max
agtttgtaactttctcaaaactcctcaacattgccttaatgaccctcacattttgcattgatgcttcaccaaagaaaatggtatgatctgcatatcacaggatactaatttccactgagcttcttcccaccaagaggcctttaaactgattttttttagagcttctctcattagacccgttaatccctcagccacaatattgaacaggagtggggctaacagatccccttatctaagtcccttttgagggaaaaattcagctaaaggactcttattgatcaatatggagacaaaagctgatctaagacatcctttgacccaagtaatccacttagggtagaatcccatcctcctaagcatatataccagataatcctcactaactgaatcatgtgccttctcatag

SEQ ID NO: 24684 - DNA, 346 bp, Glycine max
tagcgcacacctatgcgctaatccaaaagacactgttatcctatttgccggcttactgtgctccctgcgctaagccctaatgcccttcatatttgtggtgtagcaagcttggtgcgtgaggcgcgctaagccaactcataaataaatgttgttacacctaggcttagcatgcacgctcgtgctaagcagctattcccctgggcaagtttgttgattgcctgggctaaacatttctcatgcgctaagcccaaaaacggcattgtcaaactattgtcacttattgggctttgcgcgttctacgcactaagccctaacaatttaaggctttataacttttgatttgggc

SEQ ID NO: 24685 - DNA, 398 bp, Glycine max
agcttaacattcaagaatttctttgatcttttgtgttcttcacattccacccaaagattatgtttgctcattatgaggtcttcataatgcttgtctgcttgtgcacattctctctgtagatcatgtctttcttctttttcataatcatgaagttcattaagctctgtcagatccttttgaagatctttcagtttgctttacaagtcttgaaagttctttagtagatttttccttggcaattatctcattctcaagacatagcttggactctttttccttaagagttccacaggctttacatgtctgagtggactcatctggtgaaacatctacttggtcttgaagggttctctcaagtttaaaatgatctttgaatagtttttttgaaatcttttcac

SEQ ID NO: 24686 - DNA, 432 bp, Glycine max
  unsure at all n locations
ntgatttcctttgtttcggaaacctttcttttctcatgtgcactcaaacttaatctccgggttcgaagacaaccttctttctccctttgttggcttgtttagcatagcttttatttttcctctcaatttgatctttgactctctcatgaagcttcttcacatagtccgcctttgcttgaccttctttatgcttaaaaacagaaacattaggcataggcaaaagatcaagaggagttagtgggttaaaaccataaacaacttcaaaaggagaacaattaggggtgctatgaacagctctattgtaagcaaattcaacatggggtaaacaagcttcccaagtttttaagttcttcctcaaaactgtcctaagcaaagtttccaaagtcctattaacaacttctgtttgcccatcggtttgtgggtgacaagtgg

SEQ ID NO: 24687 - DNA, 405 bp, Glycine max
  unsure at all n locations
agtttgaaatttttaagcacgtttgtttaatcatgatagggtatggattggttgttatctcctagcccaacgccccttagtatggttgtttcatgactcatgaatgaaaagggggaaaaattacttttcctatttataaaagttaatatatgtgttttctatttaaatatttttgagataaatagcaaatacatttatgaaattaccttttcaagttaagtcttattcaacttaaagtttaaatccatgctaattttgttttaaaaagttcacgagactatacacctttacagcatttttagcataacatgtagaaatatttgccaattagtaatatttctattattttaaaagatagtaatattntaaaaatacttnaaagtgtcaaattattaattagtaaag

SEQ ID NO: 24688 - DNA, 428 bp, Glycine max
  unsure at all n locations
tcaattntactgtctacgttcaatgggaatttctttctccattttcattatttntcaaatctaaacgatgagaatgtgatgagaatgtgcgaaaatgatttttgaactcgatgttcaaatttcacaatgatccaacggtcaatgagtctgtaatcatagttttattgagacaaatttgggtgtatacgaaaaaaaataagattttgggaaagaaagaatgaagaacatttgagagaaagagaaagcgtatagatgtattgtaaatgtaaaaagtgacctgatatgtctctatgtatagttaggttattctcaacctattatatactctatgtgctctattctattattttataagaatgaattntgattttactccctatcaaataaataaataaaatatcatcttctattttctaagaatatatatt

SEQ ID NO: 24689 - DNA, 404 bp, Glycine max
  unsure at all n locations
agcttcagaaacaaattcctattagccactgccttcaacttgcagaagcccactgaggtctgctgatggagttagctcatgcatttaggtaccatcaaaatatttaaaggtaacgggcaagaaaaaataatagcaactgtgtgtacattctctcaagccttctgaaatgcgcgggaagaaaccccatgcagaagcctgacaaatcccaagaaactaagctttccatctgagtgccttatccaatcctgaagtactacatgaacaggtactgatggactaagcccaagttcctgaaacgtgtcaattgtaaagagctcagtaccattatacatgtgatgaaggattatactatatgcatctgatagaaaatctcattagaggtatatctatcatgtngataaaat

SEQ ID NO: 24690 - DNA, 438 bp, Glycine max
  unsure at all n locations
ctcctatgcaaaaacatcaacagtgccgctgaacctgtctttgtttctctgttcattctatcacaaagacttaatcctcatgacagagaagcttaagggtaaagttcccttgaggttgttgaaggccaagtgcaaaacgtgcaagccagagataatattgaagaaatccgggagggagggagcctatgatgttggcagagttggcggagaagttctgaagtttggaagcttctcagagagtataaggaatctcccaagcctgatttttctgccctgaaagatttgcaagttttgagcttgagtcttaacaaactcactggtccagttccagcttctttgttgggtcttttgtggctcaaagttgtgaatntgaccagtaacttgtttcacgggccaatgtctgtgtttgctcattgngtcgaggtggataatgcccct

SEQ ID NO: 24691 - DNA, 394 bp, Glycine max
  unsure at all n locations
agtggggcaagcacttcacaccttccttgcttggccgacatatctggtcaagtctttatcacaacaggtactttactcttagtatatgtttcttctttttaaattaatttatgcagcgtgcctcaaatgaggccatttaactttgtttcatgaatagatagttgtgtctctgccaaaaccacctccaaagcccgatcaggaggtcaatgatccactttatctaatgacattgaccatcccagagcttttcttgaggccttatcaggttacatgggatgccaccgtgtttggggtctttaatccaaatttctcgctctacataaaacacanagacctctccggaatcgcatacggtggtcaatgtctcagcatatcagggaccagctagaggagt

SEQ ID NO: 24692 - DNA, 421 bp, Glycine max
  unsure at all n locations
tgttgttctccattgcactgaagaccatgacaggtacgtttcgtctacctgtgttgttctattgaactgaagaccatgaccgtgttaggtctatttctagaactcgtggttaggctaaggaccttttttggtttctggtgcaaggattggcgaagtggtggtcacctgaggtacatttgactggtagtacgtggtctttgtggtcagctgaggtacatttcacctgaggtacaatctcgccggcattgtcgctgttgtgttcgaggtaagcttcatgtcttcattgtaactttgtgcttccgcgtacgtggtctttgtgctctttgttcttatagattgttagttagtttcttaattagttactactactagctaggggttggaatgcangtagtcttgctcggaaagctgtataaaaata

SEQ ID NO: 24693 - DNA, 397 bp, Glycine max
  unsure at all n locations
agcttcctccttcttacttctgcagaaaggacacattgtgtcattcatctatatttgtctccttctcagattagctttggttggtagtttgtctctgatgagtcgccatgcaaagattgatgcttttgctgggatttttagcttccataggtccaccaatgcctcatccaaagtctcctctgctgtttcttcttgcagcaggtgataagcactccttgtaaagtaatggccactgggttctggttttcatatccagcagtctgttatttgttgatggtttggctccccatttgctgaatgactctttgttgttgacaggatatttggtacaacctgggatattntgtcattagtgcttcccctcctccagtccatcgatcctcactcaacatatttg

SEQ ID NO: 24694 - DNA, 397 bp, Glycine max
  unsure at all n locations
nttgttggtgtaaaagcaaggcgggtggagaagtattatcacgatctgctatcctcagaaagtgattctgaagttaaaactgatcagcaaagcatggagtcaactgacagtaatgggaaaacaggtgcagattttggacatatgccagaaaaatggaaaggagtcaaaagacagattgagaaggtatttgcttttgatatttcatccgtattgctcttaatactgtgatattattggtatgacactttaaacaagtttcttcttagtagtctattatcattgcttgtttgtgcaggatctgcctcgaacatttcctggtcatcctgctttggacgaggatggtagatatgctttgagacgattacttactgcatatgctcgacataacccctcagtt

SEQ ID NO: 24695 - DNA, 399 bp, Glycine max
ttttgcaagcttgtgattcctcaatacatccttattaattgtttaattcttacttcttaaatgtacgttatatacttgttataggaaccttataattctaagtatatatagttgtagtatggagttctgccttaattgcataggtagtatggttgtttgtgatttcttgttcttagtgatgctaatactctatagttggatgactcatatcaagttatatttcataaggaatactcttttgatcgtaccttctaattctagtgcaacctatttttttttgtgttgcgtgcttaagtcaaataaattgagttcacttgaaagcctaagtataattaattctatgttatgagactacatcacacaattggatcactgatgtttctatcacaatcaagtgat

SEQ ID NO: 24696 - DNA, 418 bp, Glycine max
  unsure at all n locations
tgactctagatcttgtcattggcccctttaactcattaagtgtttctaggtccttgtgctctttggatagccctctattagcattggtcagaatatcagccagttgatctatggcaggaacatgaacaacattgagttgtttggtgagaagtttctctcacacaaaaaataaatccagctccatatgcttggtttttgagtgaaaaacaggattatgagctaatgaaacaattctggtgttgtcacacaaaataataggagtagtgtaagctacttggagttcagaaagaagagactgaatccaagtaacttctgctgcaatacgagccatgcttctatantttgcctcaatactcgaccttgcaacaactgattgcttcttagaccaccaagagatgagtttatgtccaagaaaaat

SEQ ID NO: 24697 - DNA, 400 bp, Glycine max
  unsure at all n locations
tgtcttagaccactacaacacaaaatctaggtatccaaaacccctcaatttaatggattttcaaggtttgagaagtgaaattgagaatgggataaatttgaagcaaactctcacctcacaccagtctataacatcaatttaaacttgttcaaactggatttacacctaaaattttgccggatcaaaatttgactcctcaacacctaaatttaccctagaaatggctcttgttcactttggtcatttgtttttctctctagcacaacccanactttctcataagtcctaaatgtcatttcaagctaggatcaactcactctaacctccaaataccactaaatccagatttgaccttccaactctcagagtctcactctttntccactcacaacaccatact

SEQ ID NO: 24698 - DNA, 426 bp, Glycine max
  unsure at all n locations
taacatcgattntttgaagaactgatgttaagaaatgtgcggtggcattttcataaataagttgacttaattaacatcggttttttcaaaacccgatgttaacattgatttcttaatattggttttgaaaaattgatgttaacatcaagtagttaacatcggatattgaaacaccgatgttaactttagaaagttaacatcggtttttaaaagaaccgatgttaacattgacatgttaacattggttttgtttaagaaaccgattttgtctcattcataagttaaaaccccaaaatccattcccccccatgcgatcagttaccaaaatcctttctccctttcttcctcatcgctcacgctcgaaagacctatgtgtcctcctcactcaagctgccgctgaggttcgtgttcaggttcgcactggct

SEQ ID NO: 24699 - DNA, 395 bp, Glycine max
agtctttaatgttgatgatatatacactcttgtgaataaattttataatttaatttttagtgaacaagagaagattagtttaaaatttcaacttcaacattttattgtggttactcctactaatcagatttaaagaacttgtccacaatgcttgaattgtgtcaattattgagacctccttcaagctaccattgcactacattttttttctaattatacaaaatagctttaaaaaactacttatttctaaaaaatctgccacaaaacatgtccaaaaaaaacatactgatgactgaacgtcttgaggcacagatcgataacacagcatgcaagcgaaacaccaaccttcatcagtaaccaagtggcaaaaattagtttctcttgttcgcttattt

SEQ ID NO: 24700 - DNA, 315 bp, Glycine max
  unsure at all n locations
taagaaattgggcctggagttggagcggtgatgattttccggtgtgtcgcggcgacggtggaagttacggtggcatccacacgcggcgcacgttagcgagcgcggttcgttggggttggagaaagaggagggcatgaactcaccgcacccatcaagcgcgtggccaccaatgctggctgcatggtttttgaggcactctttgtaggcaaccgccgtagacggtggctgntgcggcggtgacacggtggtggggtggtgatggtgatggtccttgagggagccgttggtggtgaaaggttgtggtggggtatcgac

SEQ ID NO: 24701 - DNA, 380 bp, Glycine max
  unsure at all n locations
agcttctccgaagggcatggatatttccagtttcctgaaaatatctaagaatcttgcttatgtgccatcattttcttctattttctatacccttttagcaccattttaattactaattggtcttaattgtcaattaattaggcagttttattatttgggctcatttagctaattagatgtttttaatctaatttcaggaattaatgaaacattggacttaatccggattttggttgtggacttgaagagggcaaataaagcagcactaaccttagttaatttctaattaggaaatttcgcaattntattttatgtggtttagtgtttattccgttttgggccagagtattgtaatatggcttagtgactntgagtgactc

SEQ ID NO: 24702 - DNA, 410 bp, Glycine max
  unsure at all n locations
tctcaaggaagctacctagtctataaataaaagcatgtgtaacacttgttggaactttgatgagtgagagtcttgtgagacatacttcaaaggtccacttttctccctcttttattccttcaatttcgtgctcccccctctctctttctctccctctttcttttcctccattgaagcatccttccaagcttcttatccaaggctcatcttggtggtgaagctccttcttccatggcttattccctagtggatggcgcctcctctcacctcgtttcctttgtcttccgctgcatctccatggtggaaaatcaccattaaaggacttcattgaaactcanagatccagcctccatagaagccccacaagcaagcttccatcatcctctctctttctcttgtgcctcccacac

SEQ ID NO: 24703 - DNA, 387 bp, Glycine max
agcttcttagtctcggttgatgaagatgaattcatggctacttcatgcactcctctaatgacaatagcatcactcctggcactaaattgctgggagtttgaagccatcttctgaattaaatttctggcttcagcaggggtcatgtctccaagggctccaccattggcagcatctatcatacttctctccatgttactgagtccttcacaaaaatattggaggagaaactgctcagaaatttggtggtgagggcaaatagcacataattttttaaatctctcccagtattcatataggctctctcctctacgctgcctaatgcctgagatatcttttctgatgaatgtggtcctggaagcagggaacaatttttctaagaatactctc

SEQ ID NO: 24704 - DNA, 421 bp, Glycine max
ttcaacaagagtcttcacaaataactatcatgaagcagaaaactaacaaagctacccatcatatctcccaaaaccccatacccacgaaaatcaagggagaaagaagtccacccaaacctgaaatttcaaagtcccactcgtagacacgcacttcacgaccccgaaaatgccctcctttcgcaatttggggcagaaatgatggccaaaggttgaagctttgtttggagcttcaatggtggatgaagaagagagaaagctacgtgagagagggaaagaaaaggcttctgaatttctttcttttggctgagtgaggagagagaacagctttttggttttaaaataaatgggttttctctttttctattattttattcaagctctgccatatgtccctatttgagtggagcaaaagggcccactt

SEQ ID NO: 24705 - DNA, 402 bp, Glycine max
  unsure at all n locations
agtttctcttgtaccttgaacaagcaatcaactcctctttcagaaccatgctatgtgctcgcgactggtccctttcttccctttgcaacttgagttcactattgctaccccatagagctccgcgaaatttgttccggccatactcttccttgcgagccctcttggtctcttgttcaagggctcttgcggtaattgcattctcttcccgtaacccggcgcactccttccgaacgtgtgtagcagccaacttgaacttctccttggcgagttntgcctttcctaactcgcttttgagagcttggacttcttcgtcctcttccggtgcttcaaaattctcttcgctgacgacttttaacttggcgagccaatctaaacctcgtatgcgaactttcagccattcgt

SEQ ID NO: 24706 - DNA, 425 bp, Glycine max
  unsure at all n locations
tgaaagcaaactggatgcgttggtcaactnggtaacttaacttttcttgaatcagaaatctgtacctgtcgcaagggtttggggtttgtgctcctctgctgaccaccatacagacctttgcccttccatgccacaacctggagcaattgagcagcctggaacttatgctgcaaatatgtacaatagaccttctcaacctcagcagcaaaatcaaccacatgagagcaagtatgacctttccagcaacagatacaaccctggatggaggaatcaccctagccttagatggtccagccctcagcaacaacaacaacagcctgctccttccttacaaaatgctgctggcccaagcagaccatacattcctncaccaatccaacaacagcaacaacctcagaaacagccaacagttgatgcccctccac

SEQ ID NO: 24707 - DNA, 398 bp, Glycine max
  unsure at all n locations
agcttgtactttttggcctctagattagccaatcctgcagcacatcgtagctttgcaactgttactgcttcatgggcatctggtgcctgttctgccttgctaacatagcttgtaacatgagaaaattgacccatctcaatgctgaccagaattgcactcatacacatatgaataatgtgctttgatgtagtgcaataatcccgagtacggacataacttttaaaagcgtcccccaattgaccatgagcatagtaaaagtctccaaaatcattgaatcccatcctaatgctttccttaatcaagtttgtctgcaaaaaataaatgcgatgaacaaattgacaggataaggaatcaatgatanattacgaaaaaacaggtcttaccaaaatactcctcat

SEQ ID NO: 24708 - DNA, 433 bp, Glycine max
tatgcataatgaattagaagatgaccttctaatcagtggaaaaatgccgctgtccgacatctatcaaagatgtaatgtagcaatttatgaacttgctagctgtaaggaagcactaaaagatccaaaatggaaaattgcaatggaggaagagatgtctatgatacacaaaagaaaaacattggagctggttgaaaggcctgaagatagaaaaatcattagagttaaatggattttccgaacaaagctcaatgcagattcctcagtcaacaaacacaaagtgagacttgtggttaaagggtatgtacaaacttttggtattgattattctgatacttttgcacctgtgtccagattagatacaattcgattggtgttaatagtggcttcacaaaagggttggaaagtcttccaattagatgtcaaattagctttt

SEQ ID NO: 24709 - DNA, 397 bp, Glycine max
  unsure at all n locations
agttttaggatttatgtggctatagcacatcttaggagagacttagacttaactctcaagctaaaattagttagtggacatgggaaaaggttgaaaatcttggctttttaatttttaaaggctgtatgctaggtagtgactagggatggctgtggacagcaactttatcgtttaaacgatagcaaggaaaaatatgaaaatgaatgatataaaaaaacatgtatctgacattatacacaaaagtagttggcactgtattaacaaaagatatctaatcctaacctagggtttcagtgcctcctacaacttttgaatgctntcatcttgtcttgaatccttttgtccctcctttgaatcttgccgatctttttttcaatcttgtccttgagctcttgga

SEQ ID NO: 24710 - DNA, 419 bp, Glycine max
  unsure at all n locations
gaccaagtttccaacggaagcnggatttgatccttttagcttgncnctagacatggacaatgcattgatgtttgtcaagtatccaacagtggaaagaattgatccatgaagtttattaccactgagttgaagtgttctcaaattatccaagtctcctatggaagatgggattgacccaganaaatcattttttagcaatttgattattgtgagagaatgaagtcttcccaactcctcaggaatagggcctgagagaatgtttttaagatgataagttgttccaaatttgtcaagtttctaatagttgaagggattgcaccaaagagattgttggatgacacatcaagtttaacaagatttgtcaacataccaaatgttggcgggatgaaaccattacaaagattatgatccattttcaa

SEQ ID NO: 24711 - DNA, 355 bp, Glycine max
  unsure at all n locations
atcttgncatttttggtacactntggagaggaaaaaattttctctttgtgtgtcatccagtggctgcatctaacttcctaacagcccttttcaccattaagcataatcaaccctgcaatagcttccctccccaagctctacttccacttctctttcactgatttcagattcactggtgatttctcccattgccttcatgatcatggttctcctggttgggcatttagaagcaatatgtcctctgcctaagcatcttatgtttttggtaccatttgtggacgaggcagaattatgtttgagttcagcactggacacttgtgactttccatgtggagacgctactaatggactggac

SEQ ID NO: 24712 - DNA, 434 bp, Glycine max
cttgaacaactatctggaaaggtcataccccgaacatgttactcttcttatttgaagttttactacaattaactcttgttaaagttgcgtactctttttcctacctcgactttttatctataaaatgtgaaagggttttttctaagaaggttttaatgaggcacacctaaacatatactatcaatgaaggtgttttctcaacaattatacttgaattttcattcttaacaattcccttctaaataacctcttcaactgaggacgaactcaaaatgatatcataatttccctcccaaataacctctttgcccgatgacgaactcaacaataaatcataagttccctctcgaataccttcttcggccgaagacaaactcatcatattaattaaaattaattgcacatcttataagcaagttccaagcacaaaacac

SEQ ID NO: 24713 - DNA, 478 bp, Glycine max
  unsure at all n locations
cgatgcaatttgatgcttgaagccctagaggcacatacggcacgtcaccgcggatcctggagagcctacctgcacgcacgcatgtantgtatttagcgtgaacgtgctatgaagtcctcttatcgaaacatgcaaggtgactgccgacaggtcccaatcttaccaaggtaaactgagtacactatccgaagacaccatgagtccgaactgtggtgtctaatgaacgaactaaatagcacatattgaggggcgcacattgagcgctatgcaagcaataaaaatgacttgccgaacacacgcgtgatacagccaaagctaaacatcgcttgcttgggactggacctgtcaacatctctataacaatgtatcttataaacaagagactgtatccaataatgcagtagcgtccctactatgaccctgcccaatatgcccactgagagcctcgaaatgtaacacgcacttatggaattcgccg

SEQ ID NO: 24714 - DNA, 284 bp, Glycine max
caacacaaggccaatcctaccactgctatcaagtggcacaataaataaacaagccgatcccatctccatccaaactaacacacctacaaactagaactagctccattatgtgagaccataataaacaacacccatataacaccactaaaacaatacatatactaaaatggcacggctaacttatccagctttcaataagacctcctactacgtaccctaacctgcacatatcacagacaccctccctccctaccaattaagaatggacacaaaaaattacatac

SEQ ID NO: 24715 - DNA, 382 bp, Glycine max
tgcttctcctaatttgcgactcttccgttggaaaatcttgctcgcttctcagattcactgggagtcatcactttatttgcttctcctaatctctctttatgttcagatcctttgtttcttcatctcgtttcaagatgactcctaggtcgacagccacgtaagtactattggagttgatgtcgtaattatcactcttcttctcttttggtatttctatttatggcccaacactcattcttattttattttcagaaaatcagaatcgtggagctggaatgaaaaaccgtcaagctgcagattgtgagtattcatacttcactgacacgaatcaatgtcttgtaccgactacttcatttataatgcctagcaagcatgatcatca

SEQ ID NO: 24716 - DNA, 380 bp, Glycine max
  unsure at all n locations
tgatcttgaattaagttgactcttagtattcgattattatattcttganctcttggaaacactttgttgtgggcaaaagcttgatctttaattaactggttctctggtaattgattacactgcctggtaatcgattaccaaagccttaatcatttggaaacactttggtgtgaggcaaaaacttgatcttgaattaatcttgaagcaatgcttgtttgttgaagcaaccttgtattaatatagaagcaatgcttaacctttgaatgtttggtgaagtaatcttgaaagccaccttatttgattattctttggcttatcatatacatgtattcatacattcatactctatgtgttcacattcctcgcctgtatgatgatga

SEQ ID NO: 24717 - DNA, 393 bp, Glycine max
agtttgatagcatgcagtgactaacgatgtcatttgcaccttccctggagatataggcgtcttccggtcgagacttcgaaaaattttcatttgtgatcggttagactaaaggcccgatagcatgcagtgacgaacgtcgtcacctgcacctttcccggaaatgtcatcgtctaccggccgagactatgaaaatgtctcatttgcgatctgtcagactccaagtccggcagcatacagtgactaacgtcgtcatctgtacctcttctggagatatcagcgtcttccggtcgagacttctaaaaagtctcatttgctatccgtaaggcttaaatcgcaatagcgtgtagtgattcacgtcgtcatctgcaccttcccccgagatatatgcgtctt

SEQ ID NO: 24718 - DNA, 385 bp, Glycine max
acactatacaatactcccgcttgcctcaaagatgtccaggaaagacaattttgtcgttggaactagttccgccccggagtacgacagtcaccgctttaagagcgttgtacaccagcagtgtttcgaagccatcaagggatggtcgtttctccgagagcgacgcgtccagctcagggaggacgagtatactgatttccaggaggaaataaggcgccggcggtgggcaccactggttactcccatggcctagtttgatccacaaatagtccttgagatttacgccaatgcttggccaacagaggagggcgtgcgtgacatgagatcctgggttatgggtcagtggatcccgttcgatgccgacgctatcagccagctcctgcgatat

SEQ ID NO: 24719 - DNA, 397 bp, Glycine max
ttatgcattcttaaaccacttcacacagactctaggtgttcaatagccctcaatttaatggattttctaggcttgagaagtgaaattcataatgaggtaaatttgtagcaaactctcaccttacacaagtgcataacatcaatctaaacttgctcatactggatttacacctataatttcaccgaatcaaaatttgacttctcaacacctaattttgccctaaaaatggctcttgctcactttggtcattctgtttactcctaacacattccaagctatctcataagtcctagatgacatttctagctagaattatctcactgtaacctccatttaccacagaatccatatttaaccctacaactcttatagcctcactctgtttctactcataaca

SEQ ID NO: 24720 - DNA, 301 bp, Glycine max
accttggtgattcaacggccgacctacgagaacatgtcagaggcggcgccatccacttcggaataagccatggaacaaggagtttcaccaccaacatgagccttggataagaagctcggagaggatgcttccttggaggaaaagatagagggagagaatgatagaggggggatcaccaaattgaaggaagataaagggagagaagttgaactttgagttgtgtctcacaagactctcattcctcaaagatactccaagggttacacatgcttctattcatagactaggtagctgtcttgag

SEQ ID NO: 24721 - DNA, 156 bp, Glycine max
tcttggcagtaagggatgcattccccattgagttttgtggacagcgcaaccgtttctccttgagtttacctacatgacccgccgtggtgatgcatacaccatttaacttgagccagctcttgcttagcttaaaaagcaaatacattgtcaccgact

SEQ ID NO: 24722 - DNA, 351 bp, Glycine max
agtttcttcttcagacctcagggatcggtcatctatcctgtccgacgacgactgcattctcttctatcaatatcggagaataatatcttcttgcctgagtgggctaatgttatgttgatcgaacaccagggaacatctcaggtacacctgagacaaaacgtcagatgagctcccacgaattaacgtatccggcctacaatgaagatcttctatcccacaccaaaaactagataacttcctctgccgtaaaaaaaaaacatcacaggccagcgagcgttttaaaaaaaaaatctgtagcggctatttcacgaccgatgtcggctaatgaagtttacattcaatccctgaatg

SEQ ID NO: 24723 - DNA, 373 bp, Glycine max
  unsure at all n locations
ctcattttatttcttaaaaagaaaccatatctagcgcgaggtctgagagaccatacaagtaccctatcgagttctaattatgtgggccataaagtctatcatatgctgacaatagtcgagaagcccatgaatctcttcaggggcagagtaagtgtctgccatcgccttggccttggctaacaataggggaagtacttgacttccgtttaaggaaagagcaaaccgatccatccacatggntgcctcttggtgtaaagagtcgatcacccttcctcttacctctttatcgcatatacttgggcatactcatccgcgactttatgctcgtgggcccgaggctagaaccaactcttcttggtacttggcgatgata

SEQ ID NO: 24724 - DNA, 384 bp, Glycine max
  unsure at all n locations
atcttntaactgaatttgcaacgttccaattgatttcaaaatggtgtaattgattacaatatattggtaatcgattaccagtgtatctgaacgttgaaattcaaaatcaattgtgaagagtcacatcctttcataaaatgctttgtgtaatcgattacatggttttggtaattgattaccagtgacaagttttgaataaaaatcaagagatgtaactctttcaatggttttcaggttcttctaaaggttataactcttctgatggttttacaaggttgaaaagacatctcaaggactgcangtcgcttggtgactggatgtatgcacggtttgttgccgaaccagtataaactctttgtgtttgtcttcttctaccctacactc

SEQ ID NO: 24725 - DNA, 413 bp, Glycine max
  unsure at all n locations
tggaaggatgcttcaatggaggaaaagaaatagggttataaagagagaggggggagcacgaaattgaaggaataaaagagggagagaagtggaactttgaagtatgtctcacaagactctcattcatgaaagttacaataagtgttacacatgcttctatttatagactaggtagcttccttgagaagctttcttgagaaaacttccttgagaagcttctttgagaaaacttccttgggaagctagagcttagctacacacacccctctcataactaagctcacctccttgagaagcttccttaagaagattcctaaagaagctaaagcttagctacacacacctttctaatagctaagttcaccttcttgagatgagaagctagagcttagctacacancccctataatagc

SEQ ID NO: 24726 - DNA, 400 bp, Glycine max
  unsure at all n locations
agcttgaaattgaacaacggatgctctcgagaaattcaaatggtcataacttatcacatggaatgatggaagctttcttgtggggcttctatggaggctggatctttgagcttcaatggggtcctttaatggtgattttccaccatggagatgcagcggaagacaaaggaaaggaggtgagaggaggcgccatccattaaggaataagccatggaagaaggagcttcaccaccaagatgagccttggataagaagcttggagaggatgcttcaatggaggaaaagaaagagggagagaaagagggaggggggagcacganattgaaggaagaanaagggagagaagttgaactttgagttgtgtctcacaagactctcattcatcanagttacaacaagt

SEQ ID NO: 24727 - DNA, 416 bp, Glycine max
tctcgttatattatgcacctgaatcagacttccttttgaaaagttatgaccatttgaattcctcgagagcttccgttgttcaatttcgagcgtcttaatatattatgcacctgaatcggacttctgtgtgataagttatgaccatttgaatttctcgagagcattcgttgttcaattccaagcttctcgatatattgtgcacctgaatcggacttccgtttgaagagttatgaccttttgaatttctcgagagcttccgttgttcaatttcaagcttctcgatatattatgcaccttaatcggactttcgtgtgacaagttatgaccattttaatttctcaagagctttcgttgttcattttcgagcttctcgatatattatgcacctgaatcggacttccgtttgaaagatttga

SEQ ID NO: 24728 - DNA, 405 bp, Glycine max
agtttaaaggttcactcaaactgggtgtatttagccccaaggcctagactccaaagagtccgtcagggcctctccctcctgattcaggtccaacccagaaaatattttaacacgtagactctatctatgaactatacaaaacacacgactcctcaattgttctcaaaataattttaactcgtcatgcctcaaagtgattatacttgttgagttcccatagtggatcccatcacaatactcgtcgcacattaactcgtttcccgtaaagggtcttacaatggtgtgattgtacgattcataacttataactcaatgcacataacatgtcaatacatgtgtgatctcacaatataacacatacacaacttatcacatacacccaatctccttcactatattataatg

SEQ ID NO: 24729 - DNA, 429 bp, Glycine max
tctaccatatatttttcaaggagattagttgtaaattattatttatgcataagggtgattaattgaaccatgtattggcattgctcttagctccaacattcatccaaatgaggggtattgtgagaaaagtgtaaaaaacgcggttttgtagattaaaacaaatgccattggagctaacgtggaaagacaaagaaattaacaattgcatataaaaagggggtttctgttggtagacaatattgtaagagaatagtgttggaggaaaataccttaatttgaagtaaacatggtatccaaacctgtggccaactcgatgctttttctgaggattgttgctctcgctgcctcagctgcaactgtggccttactatttactaacaaggtcaaatttgatgatggaacatagttgagatttcaagatttctattc

SEQ ID NO: 24730 - DNA, 398 bp, Glycine max
  unsure at all n locations
agtttgttntctatttgtcaccatgtttaactttttgttagatttaactgaaaataaatttcttcaagttttacataaattgatgattaagatgatcaaataataaaaatatagaaataggggaaaaagtgcataaatgtgcacttgaatgacatgaataatatatgttttaccattgngcgaattaagtgaatttatgccttatatttttattaactactagtcattaattcttctttctgcaatgcattccactttcacgggaagtactttttattttttttccttataattacaaatatcatcttatttttattttatttcttgttctaaaaataaaaaataataatatatttaatattcttattatatctatacaatttttttaataataatat

SEQ ID NO: 24731 - DNA, 380 bp, Glycine max
  unsure at all n locations
cttacttactattcgctcagaactaaactatttgcgtctactttttggagctgccgcaattgctgttcaaactccacccttactttctatcttatccttcacatggatcaacaatttgactatctgcatttgcttttgaaacttcctcccttagttcagcaaactgtctgtcaagcccgggctttaactgcctaaagattctagaccgacctcccttgccagtgctttagcatctatccagatctagttggaggtcaggaaaagatccttagcttccaaaacctgtgcttcatttctcacctaacttctattcacataggaatcttacatagatagatcccttcttcatgtggtttctcttngatcatagaaaccttctg

SEQ ID NO: 24732 - DNA, 406 bp, Glycine max
  unsure at all n locations
agcttgtaaatttagatatcaaaatttttcaaatgggtccagacgatagacccagatcttgtaaaacaaacaaagtttttcaaatacaaaaatcaaattcgaaccttgagtcaatttaaagcacaaaagagaaaataaataaagttaagacacaaaaggttacattggttcatctcaaccactaagactacattcagttcttggtaaaccaccaagttccactaacttcaacaagttacaagtattaatcactgccacttctaactctacaactcanactctacaccaagcttgttacaaccagtattgtttgccctaccaagccattgttggctctaatagaaatcaaaagaatttttgtttggctntcagactgactaacactccatcatcataaagatgaata

SEQ ID NO: 24733 - DNA, 432 bp, Glycine max
  unsure at all n locations
tcttcacatagtctgcctttgcttgacctttntatgcttaaaaacagaaacattaggcataggcaaaagatcaagaggagttagtgggttaaaaccataaacaggagaacaattagtggtgctatgaacagctctattgtaagcaaattcaacatggggtaaataagcttcccaagtttttaagttcttcctcaaaactgtcctaagcaaagttcccaaagtcctattagcaacttttgtttgcccatcggtttgtgggtgacaagtggttgaaaataacaatttactgcccaacttgctccacaaagtcctccaaaaatggcttaggaacttagagtccctatcactaacaatgctccttggcaaaccatggagtctcacaatctccttgaaaaacaaatcagccacatgggaagcatcatcaactttttt

SEQ ID NO: 24734 - DNA, 409 bp, Glycine max
  unsure at all n locations
agcttgtagaattatggggtacccatcacatgtggtactaggtggcggtcgggcgatggtgcacaacaagttttccacatccacaatgcgcgcataaacccaccatcccctgttgcccacctccaactgagctcacgtactcccacgtagcccatatcctcgtttctctcaacaccgggtccccatcaatcctcccaagcttccacaacatccaagcaaaacaacattcacacagcacaagctatcacagccaagcaaaacaaagcaaaggcagaaaactctgccaaaacaccaaccaaaaatcacagcttttcccactcaaagaccccagtaacaattccttcgatccaatttgttaaccgttggatcgactccaaaattnttctggaagtctatagtgcataagcct

SEQ ID NO: 24735 - DNA, 434 bp, Glycine max
  unsure at all n locations
tataatatattgatacgctcgaaattaaacctcggatgctctctatgaaattcaaatggtcataactattcacacggatgttcgattatggcgaatcacatatcgagacgctaaaaattgaacagcggaagctctcgagaaattcaaatggtcataacttttaacactgagttccgattcaggattataatatatacagacgctcgaaattaaacattggaaggtctcgagaaattcaattggttatcacttttcacacggatgtccgattcgggcgtataatatgtcgacacgctcgaaattgaacaacggaagctctcgagatattcaaatggtcataactnttcacacggatctccaattcaggcgcatcgcatatcgagactctcaaaattgaatagcggaagctgttgagaaatttaaatggtcataac

SEQ ID NO: 24736 - DNA, 381 bp, Glycine max
atcttcctctgccgtaaaaaagatattatcggccagtgtttgtaaaaaaattgcgcaatgtcggctgaaaaatatccgtcggggctatttaactaccgatgtcggctattgttttttctattccacccctgaattatatttggatgatgcctattacgaaatgttcggacggggtcatccggtcatgcttctttttgaggcctcgatctgtcggctttcctagccggccgacgtcggctagcatttttttcgatcaatatctgtgtgaatcatgtttttttttgccaaagagggctaatgttttcagggccgacaaaatgagaacatgccagtgtcggccgaaacacaatcccgcacgaataaccctagccgacctacatt

SEQ ID NO: 24737 - DNA, 408 bp, Glycine max
cagctgtttaccccatgttagaattgcttacattatagctgttcatagcaccactaattgcgctccttttgaagatgattatggctttaacccactaactcctcttgatcttttgcctatgcctaatgtttctgtttttaagcataaagaaagtcaagcaaacgcggactatgtgaagaagcttcatgagagagtcaaagatcaaattgagaggaaaaataaaagctatgctaaacaagccaacaaagggagaaagaaggttgtcttcgaacccggagattgagtttgggtgcacatgagaaaagaaaggtttccggaacaaaggaaatcaaagcttcaaccaacgggagatggaccatttcaagtgcttatagaataatgacaatgttacaaagtgagctgccggtg

SEQ ID NO: 24738 - DNA, 397 bp, Glycine max
agtttgcctgtcttatgcagtagtaatgatgacccgagttatgttggggaacggttacgaacccggaatgggtttaggcaaagacaacgacggcataactagcctgataaatgccaaaggaaatcgtgggaagtatgggttaggctataagcccactcaggcagatataaagagaagcatcgcgggaaggaagagcggtagtcaaagctcgcggttgagacaagaaggtgaaggaagcccaccctgccacataagtaggagctttataagcgcgggtctgggggacgaaggtcaagtggtcgcgatatacgaagatgatgttccgagtacattggatttggtacgaccatgccctcctgatttccagctgggaaattggcgagtggaagaacgcccc

SEQ ID NO: 24739 - DNA, 343 bp, Glycine max
  unsure at all n locations
gaaaaaagcttttaatggaagttaggaaaatgaaggcccccccgaaccatcaactgggaacccaagtcatgataggggtaaagacatttgtaccgtgtttaggaagtcccacacaaagacatcatctcccaacaacatctggaagaaacggtcaatattctttgatcttccatattggtctgatctacatgtgcgtcactgtctagatgttatgcatgtggagaaaaatgtttgtgataagtcaattggtactcttcttaacattanagggaggacacatgatggtttgaaatattgtcaagacttatttgacatgggaatacgagagaagtcgcatcccata

SEQ ID NO: 24740 - DNA, 404 bp, Glycine max
ttttgcaagtttgggttcctagggctagaatcgcattcgggcactcattttaaatccttcatgctgtccctatacatataaaacagtcccacaatcccaagcttacaaaaccatgcccatatgtcattgaggcatttcaccgagcacttggtgggcgcatgttttggcatgaatagcaagagaatgggggcaatgtggcatgccccattactccagaatgcaacataggcctagggccatcccatacaaccccctaactcacaccaatcaagcatgaaacaaagccaaaattgccccatagacttgggcacattcccacaatttatagcaccaaaagaagaccacaatacatcaatggaaagctagaaagctaaaggatgagatacttacttgatggagtgagt

SEQ ID NO: 24741 - DNA, 434 bp, Glycine max
agacattatacaatactccagcgtgccacccagctcgcccaggcgagcatttttgctttctccagaagcaatagccttctggaggaatcttctaaagggcccaagtgggcctggttgctatttgcacccccattttgactaagtacaccccctaccttttttggtgattcttttttcgtaaaggtaccgatacttacgaatttcgtaatgatacttgttttctttccataatgttacggaaccttgcggattacataatcatcccctttttgacttacagaatgttacggaacctcactaattgtgcaacgatgcttccatttgatttccggtgtgtcacggaaccttacagattgtgcatcaatattttcttttgttttccggcacatcccggaatatcacaaattgcctaatgatgggtgcccagcacctca

SEQ ID NO: 24742 - DNA, 388 bp, Glycine max
agttttgatgaggaggctattagccaattgttgtgcatgtcggggtaggactttgcccggaccgcaacagggagaaaggtgcggatcatgcgcaccagcatgaccactctcacataaatctggatgacgttgctgcttagcaaaattctccctagcgaccataactcggacctcaccctactaaagtgtcagctggtctacaccatactgacacatgtgagtgtacatgtggctcagctgatctctgatgctatttaccagtttgcagggattgtgcgtaccagacacccggtggacccggagaagtccaacagggccttgagatttcatgctctgattataggcctctgtcagttctatggagtgtcggtcacccccagcaagctta

SEQ ID NO: 24743 - DNA, 412 bp, Glycine max
gctttatggacgctggatcttcgagcttcattggtgattttccttcatggagatgcagcggaatgctcaggagaaaatgagaggggatgctccctccacaagggaataaaccatggaagaaggagcttcaccaccaagaatgtgccttggatagaagcttgaagaggatgcttttatggaggaaaatgacagagagaaagggggagcacgacattgatagaataaaagagggagagaagtggaactttgaagtgtgtctcataagactttcattcatcacagttacaacaagtgttacacatgcttctatttatagactaggtagcttccttgagacgctttctagaaaaaacatccttgagaagcttctttgagaaaacttccttgagaagctaaagcttagctacacaca

SEQ ID NO: 24744 - DNA, 331 bp, Glycine max
  unsure at all n locations
agtttgacatagttgtcataggtaagggcatgctgagctgcttcaggggagcagtgcacgtgacgatgtccaacgttgttgtggagagaaaccccaacgcagagatcttccactgcctgaattgcatcttgttgactcataactgttacaatgtcttccctggctggggcattgacggngtcatgggtccagtgcatgtgtcacgcaagaggccatggcagcaatgagaatgatgagggagacgaagaatagagaacgcgatggtgatgaccacaccattggtgaacacaagactgagagagagagagagagataagtaagaagggacaca

SEQ ID NO: 24745 - DNA, 383 bp, Glycine max
agcttgcggaacccaacattacttgctctactgttccactttacattctatacaaaccaaaatattcgctgtttggttgggtcggagactacacatatttattgttattaacaattcatagacattttattgaatctcattccaagtcatataataatatttacatttatttatgttatgcattcgaacactttcaagcacatatgtaacatatacatatatattgctaccaataatctcaaagtattcacattaatttaatcctaagacataaactctcaatcctttaatgacattctataataatattaacaaaaatgagcaagtgacattgtaaatagcataaatgagtggccaataacaattttcagaacttccttctc

SEQ ID NO: 24746 - DNA, 375 bp, Glycine max
  unsure at all n locations
agcttctcccccaaatttctataaatagggggagaagtgaagtgaaaaagggttcaaccccttaggcacttctctttctttcgaatttgcttggaaaaattgtttccgtgaagaaaatccaaaccgaggcgcttccgaaacgttttcgtgaggaatttcgcgaactttcgaccattcttcgacgttcttcattcgttcttcatcgttcttcgatcttcaacgggtaagtacctcgaaccaagcttttcgattcattctatgtacccgtggtggttcacattgtgtttcgtgtatttttattctcgtttcatttactttntataccccctttataccccccctntcaacgggccatttatttaagtcatttctcgc

SEQ ID NO: 24747 - DNA, 422 bp, Glycine max
tggtctcaccggcaagcgcaccgggtcgccaagtaaatataattaaaatagaatgaactgagtattgaacacagggaacttgttcatttagcaaagttttgttaagtaagcaggcatttgcaaacaaaaattaatgattgtgaattaaagcaaaagtatgttctatcctaagtaaaagcaataaacgagaacaagtaagtgtgaaaacaaatatctaaaggcgttgggtcctcctactgagtaagttgatgcaattaaagatgtttttctaattaaagatgttcctgtgttctatgctgaggacaaaagaataccaaacaccaattcctctagagtttggattaatttaaatcaaacttcgttcgcagatccctcttgttgaacttagcctaatttaaacagcattatactcacaacatatc

SEQ ID NO: 24748 - DNA, 318 bp, Glycine max
tttcatgcaagtctttggacaaaattcaatactgaagaacgcgatggggtgtctgttctgagagagaactgccccaacgctagtgcaagacacgtcggtctccaccacaaagggaatgtcgaagttgggaagcgccaagacgggagccgtgaagactgcttcctttaaggtggtgaatgctctcgtagccaactccgaccaccagaattgacccttgcacagcaactgtgagagaggcgcaacaatcttagcgtaacctttaataaatcttctgtaaaaacccaccaaacgcagaaaacttcttaatgtcttcactga

SEQ ID NO: 24749 - DNA, 411 bp, Glycine max
tcggaagaaagtgatgaggtactagccctaaaggcttatcttgaaagagcctgtgtagtcaaagagaagttcaagtccataaccatcaaagtctgaagagagtatgatgaactaagggacgtcaatatggccaccgatgaagccttggaatgagaaaccaagaaggcccgaaaggaagaacacgaccaaaacaagttttgaggggctttatagggtagcaatagtgagctcaaactctgaagaggtgaaaggaatcatcacgggtcaaaggcatgatcttgaaggacgagctaaaagcttgccttatgtcaaaaagaaatttgtcccaacagttaagcgagactgaagggaatatgtgggccatcatcgatgagtgcaaagagaagctaaatctagcagcgactcatgagc

SEQ ID NO: 24750 - DNA, 400 bp, Glycine max
agcttaataaaaggtatgcgatgtgggtggaattcctagagcaattcccttatgttatcaaacataaaaagggaaaaggtaatattgtagccgatgctctttctcggcgtcatgccttactttctatgcttgaaacaaaattgattggtcttgaatgtttgaaaagcatgtatgaaaatgatgaaacttttgaagaaatttttaaaaattgtgaaaatttttcagaaaatggtttctttagacatgaaggctttcttttcaaagaaaacaaattgtgtgtgcctaaatgttctactagaaatttgcttgtttgtgaagcacatgaaggaggtttaatgggacattttggggtccaaaagactctagaaacattacaagaaacattttattggtctcatat

SEQ ID NO: 24751 - DNA, 430 bp, Glycine max
tcttatccaaggctcatcttggtggtgaaactccttcttcaatggcttattccctagtggatggcgccgcctcttacctcttctcctttgtcttccactgcatctccatggtggaaaatcaccattaaaggacctcattgaagctcatagatccagcctccataaaagctccacaggcaagcttccatcacattggccccgcacccaggagtgcttgtccctaaatccctcctctatggactatgcattggcgtagaactccatgattatttatggatcatacttagccatgggtgttgcaagttgagtccactgcctcctggcaatgtcctcctagaattcagcatattctccttgccttaattggacccgcctctccttgagaaaagaccaacccttgactgtctcacaatggcgctagtgttcatcg

SEQ ID NO: 24752 - DNA, 405 bp, Glycine max
agttttcaaaatatgcaactattgaatcctaataacaaaatatgaattagtgatatacatctacacatactaataacaaaataaaacaaacaatgggtctttagatttcttcattttttatactgcatcatctttatcagcaaccttcctttgtttgggccttgttatgtttagcttattccttgctactggcggaacaatagatgtagggacctacatgcaaatgccaaacatgaataacacttgtaatatataagaatggagagctgcaacaaattatgatgagataaaaatattctgccgcgacatatattgaccatgaactccatgtcactatcgagacaaattaggctgagatacattaatctccacaggaccttcttgaacatgagcagcacgaatgca

SEQ ID NO: 24753 - DNA, 328 bp, Glycine max
atgattccaagaaaaactaaaaggagcgaacaatatttatgcattcagcatacgtgtaacactacacttttcatgaatcatacaaaaagatatttatttataaaccaatgtggttttataaatcacgagaaataacttgattaaattaaatcatggcttgaacgacataatacagaaagattctatgtattcatttgataggaaatgaaataaagatcttttgattatatactaataatactaaagaatatttgagttcatcctcagctgagagtacctacgtagagacagtgaagtttttagactgaccatcgtctttgtgcttact

SEQ ID NO: 24754 - DNA, 393 bp, Glycine max
  unsure at all n locations
agttttaaaatgttaacccaaaacaaaatcaaccaagtcctcaaccaatccaagtcttcaaaccaagacctcatttattcaacttcattctttttcttttctttttttttgaatattttttttctttttttgtatacttttttgaacgtgaacagtagcaattgaaagcatttgaaaaataaagcagccattaggcagtgtatgtatacatcatcaagcatggccaataaaaacatatcatccaatgaaacataccccccttcacacttattcccaaaacaattccaaagctccaaaattccttaagggtagggtgaaatcatggtttttcacttaaggcttgtaatgagcttcanaacatagaaaggggaacataggctcanaggggctatc

SEQ ID NO: 24755 - DNA, 431 bp, Glycine max
  unsure at all n locations
ntttggagtagaaacatgggaccaactcattntatttgaaaaatagaagtcgtatccagtcaaggtctgagagaccatacaattttcctaacgatttctaattatgtgggccattaagtctatcatatgctgacaatagccgagaagcccatgaatctcttcgggggcggagtaagtgtctgccatcgccttggccttggctaacaatcggggaagttcttgactcccgttcaaggtaagagcaaaccgatccatccacatggatgcctcttggtgtaaagagacgatcacccttcctctagcctctttttccgcatacacttgagcatactcatccgtgattctatgctcgtgggccgnggctagacctaactcttcttggtacttggcgatgatagctaacatgttggtctctgtctcgcataaacgct

SEQ ID NO: 24756 - DNA, 370 bp, Glycine max
  unsure at all n locations
agttttctcattttttgcggattgacgctcttaagacggctgcgtatatattaaaccgagtgccaatcaaggttgtctcacagacaccttttgagttattcaaaggttggaaatcaatgttgcgacatatacgcgtctggggatgcctgtctgaagtaagaatttataatccacaagagaagaaactagaccctatgactattactacgtatttcattgaatatgctgaaaggtctaaagggtataagttctattgtccatcccactacactacgattgtggaatcaaggaatgcatagtttcttgaaaataacttgatcagtgggagtgatcaatttcngaacatttcttctgaaagggatcactatga

SEQ ID NO: 24757 - DNA, 172 bp, Glycine max
gctcatctttataatattctctcctattatgtatagatcccctcttataatttatctatattactaaaaaactatacaacatatcatgcattatggagtgaaactaactaatgaccaaaaagtaatccttgcatcgcttttttattgattgataaaaaacaataaatttaac

SEQ ID NO: 24758 - DNA, 408 bp, Glycine max
agctttttctacttccttttctccccctttggcaacatcaaaaagccaaagaactcgggaatcaacactgatataacaatggagtagaacgatataaatatcagagtataaaacacaataattcaaactcacaaacaagaaataatcaaaccagaatccaaataactgaaaatgtcaacaaccacaaaatatccaagactgaaatttaaaaaccacaagataaataagcaaagtacttagcataataatgtaaagtctaagaaactaaaagccaaaatacacggcttataaaaaatatataatcagaaactaaaatctaagaagacggaggtggtggtggaagatcgaaactctgacgaatgtatccaacatcctcttcaagctgtgtaaggcgaatgtccataccgg

SEQ ID NO: 24759 - DNA, 435 bp, Glycine max
tctatagaaggttagttcctaatttctctacacttgtctcacctctcaatgagctggtgaagaagaatgtgacattcacttggggtgaaagaaaagagaaagcattttctttgctcaaagaaaagctcaccaaggcacctattctagctcttcctgatttttctaaaactttcgagctagaatgtgatgcctctggagtgggtgtgagagctgtattgttgcaaggtgggcaccctattgcttattttagtgaaaaacttcatggtgccaccctcaaataccccacctattataaagagctttatgccttaataagagccctccaaacttgggaacattactgtgaataatgcaggttttgatgatgctaaaaagaaatcacttgataatgattgtcatcatcaaaaacgcggagaatgtgaatgtatgaataca

SEQ ID NO: 24760 - DNA, 403 bp, Glycine max
ttttgcaagtttgaactgagagataaaaagtaatcgatgctttttgagacttagaaatttggggaacaaaaaatgcaggatagcagttgagagagaaaaagtgagacaactgtttaagactttggagcactaaaaggtgttggtgaaatcaaaatttaatgcgataatctttatttggaagcggtccaaccctggcactcacaccggctttttcgggttaataccggattgatgatgtaagcaccggtcttcgattcccggttagaccggccggaccggtccgtttaaataacgctgcacagaagccttatgtgtagcataaccatattgtgttatgcagcgtaatcatacccaaatcatcggatattattacatttcttattttcgtgaacggtacaaacct

SEQ ID NO: 24761 - DNA, 423 bp, Glycine max
  unsure at all n locations
tgagaaggctctcggcgaccaattccctgttagagtttgttacttnggcctcgagagtttcggcaacacttgttactgcaacagcgtcttgcaggtcttcgatccgatttacgttttttccttttttattatatttttcttgttctataagtgttgatggcttattgattcatctatgcaaagtttgttgcagtatcttcaggagagtttagtactttaatgtatattattgttttggacattctgttgacctgttttagcagattctttgaagcgcttattcttagttntattaaaatttaaagttggatatgctcttcattatgtttcgttcgtagtattataagcgtctctttaggtgcatacctcaattttaaagaggatgatgtcttgtagcactcaatatgtgtaccatctcttaaa

SEQ ID NO: 24762 - DNA, 400 bp, Glycine max
  unsure at all n locations
agcttgtaatctataataaatataagatagaagtgagaaactataataaatataacatagaacctttttgttgttgaaagtccaacaatggctagcaaggttgaaatgcagcggcgttgttggtatagtggaagctatgtgtgaagtacaatggatgtactggcaggttgttgaaattcaggtccactagtggctagttgtgttagtgaaatatcatttttaagggtgaggacaagacgtagcccaaggttagggtgagctagtataaaaatcatcgtgcactactctcttccctctctctacattgattctgnttattgatctcttgactagttntgntaaatccttaagacaagaaaaccattcacacatatatccaaaattgaaccattttatcaaa

SEQ ID NO: 24763 - DNA, 401 bp, Glycine max
  unsure at all n locations
gcttgatagttccccaatttatggttattttggagtatattntgtttataaatcttattttatgggtaatgctgtctctagaacatttccattggatttaatgatgaaatctgagcattttcacgtgaaaaagaggatgagttctgaattgcaaaaagttgcacctgggctaaacgcttattcaccgctaagcacagcttcagtgcgcttagcgcaaaagagaatctggcagagcatcagcatcaaagccgcaccctaagcgcgagatcaatgcgctaagcgcaacaggtgcctttagccaggctcaacgcaagactggcgctgagcccaattccacttactcgagctaagcgcgagggtggcactaagcgcaaggttgcgtattctgagcctatttaaag

SEQ ID NO: 24764 - DNA, 382 bp, Glycine max
agttttctctaccggtgaaaaaacattgtcggccagcgcttgtaaaaaaattgcgcaatgtcggctgaaaaacatcagttggggctgtttaactaccgatgctggctactgttttttctattccacccctgaataatacttggacgatgtcgatttggaaatgttcgatcggagtcatccggtcatgcttctttttaagacctcgatctgtcatcttttcctggccgacgtcggctagcatttttttcgatcaatatcggtgaatcatgctttttgccaaggtgggctaacgttttcgtggctcatgaaatgagagcatgccagtgtcggccgaaacacaatctcgcacgaaaaaccctagccgacctacattgtaattttt

SEQ ID NO: 24765 - DNA, 415 bp, Glycine max
  unsure at all n locations
ttttntgttcggtattgcctaaaaaattttcaatgtatttcggctaggtttcttcgtgcgagctcaaccgaagttgtatttcggccggtcggctaggttttttcgagcgagctcaaccaaagttgtgtttcggccgacaccggcatgttcttgtttactctgccaggaacacattaacccacctcggcaaaacaaccattatcctccgatactgattgagaaaaacaatagccgatgtcgtccaggaaagatgaccgatcgaggtctaaaaatcaaaagcatcacccgatgacgccgatcgaacatttcctaatagacaacacctaacaattatcaaggcattaattagaaaaaacaacacccgacatcggtcgttttaaagccccggcggatatttctcagccaacattgcaga

SEQ ID NO: 24766 - DNA, 387 bp, Glycine max
  unsure at all n locations
agtttgatcaattttcccctcactntgcactgcttggggaactaccttcgaggtcgcagatgttggtgtcataccctaatttcgtccggggattattacttgatgacatgcaacctttggtcagccgctttgagatacttggcatcctttggtgcacaataaatgaagtcccgagacgtctcagaaatctaaaggaagcatgcttgcgcgatccgtgaaattccgtaatgtggcggaagtcgaatagaggtgtttttgcgcaatccgtaagtatccgtaacttcttcgaaagttaaaaaagagtaaatacataatccgtaaggattcgtaaccttgcggaaggataataggtatcgctacaaaattcgtacagtttcgtaacattac

SEQ ID NO: 24767 - DNA, 425 bp, Glycine max
  unsure at all n locations
ntgtatggtagaaggtgtacgacacctctatgttgtctagagcctcgagaaaacctcaccttaggacctgaagtggtacaacaaaccaccaagaaggtgaagttgatccaagaaaggatgaggactgctcagagtagacaaaaaagttatcaggataagaggaggaaagatctggaattcgaggttggtgatcatgtattcttgagagtcactctgtggactgaggttggtcgagcattcaaatcccgaaaactcacacctttctttatcggtcctttccaaattcttaaaagagtcggtcctgtggcataccaaattgcattacccccatcactttctaatcttcacaatgtctntcatgtatctcaactccgtaagtatatacatgatccatctcctgacatatgaaacatttcctttgagga

SEQ ID NO: 24768 - DNA, 358 bp, Glycine max
agtttcaaagggaagagagagaccaatcacgagtacatagcatggtcttaaaggaggagttagctgcctgctcaagatccaagaagagtttggcccaacacttagaagccacggagcaaagcatgctagctataatagggcaatacaaagaggagttaaaccaatctttggctcatgagcaaaagctagtagaagacttcacacaagtatacgccgagaaggaggcaagaggaagggtgattgatgcattgcatcaagaagcgaccatgtggatggataggttcgccttgaccttaaatgaaagtcaagacctcccacgactactagccacagcaagggccatggccgaagtgtgttc

SEQ ID NO: 24769 - DNA, 422 bp, Glycine max
  unsure at all n locations
tgccaacccatggaagctcctaatatctctcacactttttggggtgggccattcttggatggccttgattttctcaaggtccacttggaccccatttctaccaactacaaaccctaagaaaactatattatctacacaaaaagtacacttctctatatttgcatagagggtgtttttcctaaggactgaaagaacttgtccgagatgtcctaagttatcatctaggctcctactgtacactaaaatatcatcaaaataaacaactacaaatctacctatgaaatcccttaagacatgatgcataagcctcataaaggtgcttggtgcattagtgagcccaaaaggcatcactagccattcatacaaaccaaacttggtcttgaaagcggttttccactcatcacccntttcatcctgattgg

SEQ ID NO: 24770 - DNA, 387 bp, Glycine max
  unsure at all n locations
agtttggaaagcgatagacgaatcgcttagtgagctgataatgtgctaagcgcgtgcttatgtagcagatgtctttccagattcccctttactcgctaagcgcgctggttctgggcttagccgttgatgtgcacaaagcgcattgagctcacttagcgcgatgactcctttggcatttcttcaaaatacctcctttttgcctaatattaaagaagatttaacattaattccatataaagaggctcttactgagcatagatcataacaaagcaatattatttacaatccaccaaaaagaaccataaatgggagatttatatacattgtggaatacctttctatanaaaagttagtggtaaatgacgactaacaaatgtcttcattctt

SEQ ID NO: 24771 - DNA, 410 bp, Glycine max
  unsure at all n locations
tgcttgtggagcttctatggaagctggatctttgattcttaatgaggtccttcaatggtgatttttcaccatagagatgcagcggaaggcaaaggagaagaggagaggggaggcaccatccactagggaataagccaaggaagaaggagcttcaccaccaagaattgccttggataagaagcttgaagaggatgctttaatggaggaaaagaaagagagaaggggggagcacgaaattgaaggaataaaagagggagagaagtggaactttgaagtatgtctaacaagactctcattcatcanagttacaaccagtgttacacatgcttctattcatagactaggtagcttccttgagaagctntcttgagaaaacttccttgagaaagcttcttgagaaaacttccttg

SEQ ID NO: 24772 - DNA, 384 bp, Glycine max
  unsure at all n locations
agttcttcnagagtttactgtagaagcaaagcttcatggtggatcaaaggtgattcaaatgtgtttcgatgataacaatgatgataacaaaagatgatggcaaaggtgatgacaaaaagctcacagatcaatcaaagaacaactcatgcgatcaagttagaatcaagaacaattcaagagttcaagatagaatcaagaagaattcaagactcatgacgaaaggtaagagtcaagaatcatgattcaaggttcaagatctcaaaaatcaagatcatgattcaagactcaagattcaagaatcaagagaaggcttaatcaagataagcacgacaagtttttctcaaaaattgagtagcacatgattnttctcagaacatgtttacc

SEQ ID NO: 24773 - DNA, 352 bp, Glycine max
  unsure at all n locations
tctggaggaagccgctcaatgatgcgcctttagaattctacangaagctgcctcgttagcaacgctttctaacctttgttaaccgatggatcttctcgaaatttggactgcaactttacaagacacttttccatgatctgaccgttgggatctttgagaaaatatctggagtgtactcgaagcttccgttcccgagagtatttcttatttaagcactgtagcctttgctttcatgtatctcaagaaaaacaacatttcttcttctatctttctttcaaagccatatataaagttccaagcgctttctccatcatccacagccactattatccaccacaaaccatcattgttc

SEQ ID NO: 24774 - DNA, 408 bp, Glycine max
  unsure at all n locations
agcttgcaagctgttaaaccattaccatcatactgaccgtctaacttttggtccagtcattgccaagaataaaaaatccttctagattgcatcatttgcacatttacaatatcaatgaccatcatgacaaaagagcatttgcaagagaaattcatgtatacaatatgatgattttggaaacctatataagaaacaatatcgtttataaaatatacagctcatacctcttcagaacccaaaggaggttgccttggttttccccatactaacgataaattatcaaactgccagaagagaaacaaaagatgatgtcattaatattatacagtgtaaaatggaacaggggaaataaaggccctataaatttttgcaaatatgagcagtatcatanatcaattcataacaata

SEQ ID NO: 24775 - DNA, 470 bp, Glycine max
  unsure at all n locations
ccggcccttggcttgactttcgcctttgaaaccccgctgggaaatccagcggctgggagcaacaaagtatccggctcttagatctgcaangaggcgcatcattggtgctgcttcactctatacaagctgggcgaatgcaacatgccaaaagagacgggaggttgcctgcactttggcataagcctatgatcaaagagcttcaccaccaagagttgcctttgattagaaacttgtagaggatgctctaatggatgaaaagaaagagagaatgggggagcacgaaattgtaggaattaaagaaggagagacagggaactttgaagaatgtctatcaagactctcattctcttaactcacaagcagcgttacccatgcttctattcctagacaacgaagctttcttagaaaacgttcttgagaagacttccttgagaagctctttgagaaaacttcttcgcgagctaaacctn

SEQ ID NO: 24776 - DNA, 383 bp, Glycine max
  unsure at all n locations
agcttcctacatattagtagaggatgatagctcaatgccaagcatgatagggtgtgcacccttttgcttcagcaagtaatatggttgttgagatcgaataatacttagcctttttcactttgtagagcttaaggctggaaggttgtgtactctcttgtctagttgttgattgtaaaatactctaacatggaatcctttatactagaaaaatattatttttagtaaaaggatattttagattaaaaaaaaaaggaaaggaaggtgtatttatcaaataaaagctataaatagcaatagcctatgcgaaaagtcctgtggttntgcaggagggtgggttaagaacccaacatgaacatactctcggtgcatgtaagtatggattt

SEQ ID NO: 24777 - DNA, 404 bp, Glycine max
  unsure at all n locations
agcttgcccagtgaaggagtccacggaggaaatgcttaccacctcaaaagactggaaagcggtttctaatgactcctctgcggcttccacataaggcatagaggatgggcagctcaccaagatgtcttcctcgcctgatacgatgaccagatgcccttccactacgaatttcaacttttggtggagtgttgagggaacaactcctactgagtggatccacgggcgccccaacagacagctgtagggagggttaatatccattatttggaaagtaacttgacaggtgtgagggcctatctgtactgngagatcgaactctcccctaacctctcggcgggtgccgtcgaaggtacgaaccaccattgaacttggttntaagtgggaggcattgaatggtaatttct

SEQ ID NO: 24778 - DNA, 424 bp, Glycine max
tactaagcttccaatgacccttttgccctcccttttggttattttctgtattctttttcgaatcgtcaaaaaaccttttggactgcaatgcaactggtgttaagcagctcaatttggctagcagggatcaaaagatcaacaaacgatagtccctgaatgaaattagggtatgacacaagtaattttcaactgtagtgtgatattgttagcattttgttttgtttgtggtagtttcacgtggactcgagtacaagtacttgcgatgactagaactctgttctagtaatgttggcacgatgttgagatacgtgtaacgtgagtgcgtgatgagacacaaaaagtgtgagatgaagagagtctcatgaggcattccgactatggtaatgatggagatcatgaaagagaagttccaatgacaatatta

SEQ ID NO: 24779 - DNA, 384 bp, Glycine max
  unsure at all n locations
agtttcctcattgtatctatggtagaatcgataatggtaggcatcatgatagaaagcagaatcagaagtgtggaggtgaagctggagaagatgggaagtaaggttgtggcagaggactccataccagtggcaacagttggtattattatgattccaagaccaaagcctatttgaaggatcattcagattattcttaaacttcataagtgtctcacgctcacttgggatgcacacactctctctgcaaggtaacctacataaccaaaggtggagaaagacaagaatataaatggaggaggaattcatgatcacacaagaatatatagaanacaagtgtagttgttggttctgcatataaatcatcaaacttctattatntatact

SEQ ID NO: 24780 - DNA, 409 bp, Glycine max
  unsure at all n locations
atgcatcagggaacaatttcactttataaagtttgtcctaannggattcctaattttcaacttacccttttggatgtgacatcatggcagataggtcccaactttccatcgtggattcagtcacaaaacaaacttctatatgttggactgtctaacacagggattttagattctattcccacttggttctgggaagcacattctcagcttttgtatttaaacctctctcataatcatatccatggtgagcttgtgactacaataaaaaatccaatatctatccaaactggtgatctaagcacaaatcacttatgtggtaaattaccctatctttcaaatgatgtgtatgacttagacctttcaaccaattcattctctgaatccatgccagattttttatgtaacaatc

SEQ ID NO: 24781 - DNA, 385 bp, Glycine max
  unsure at all n locations
agtttgtattgactttccactacactaattgcactaatcatcctctggctgcttatatcttgaatcaaacatgaattagaaaagaaggttaacttgcaatttaatgtagaaaccaattttgatatagagattaaattgaaattgaaagatggcaagtatagcacatcttctaaatgtaaaaactccgtaaatttgactgttctagagtgtgtggctatgacttgttgaccagtangtaggcgaactactatcggatttatttctctatatgtagtataacaagtcaatgaggaggcaatatgatctataaaactagaatccaaaatctatgttgcagcttcaggcttttgaacattacaaacaagggatagtatattacctatgc

SEQ ID NO: 24782 - DNA, 418 bp, Glycine max
  unsure at all n locations
tatccccaaagcgactctggcttagaaaaatgactttccatatttctcaccatatccttaaaagttcggtttcgtcgttctgccataccattcatgctaggttttcctacatagtgtattgcggaacaattccacactctttgagaaaaaatgcaaaaggtcctggacgttctcttgatccatcatatttgccattgtactcgccaccacgatcagatttgagagccttaattttctttccaagttgaagttcaactttatgcttgaaactcttaaaaagtctagggattgggacttcgcatgcatcacatacaagtaaccgtatctagagtagtcatctatgaacaagataaaatattgttgcctattccaagaaggtgtnggaaaaagatatcacatgcccgtatgtactaattct

SEQ ID NO: 24783 - DNA, 400 bp, Glycine max
  unsure at all n locations
agtttgtatctgtagctcagagaattntgctggatcctggaacgagccaattgaatgacatattaagttcagtgcgcaatcacaactagaagtgaggaaaagtaatgctgataccaaaatgaactaaaaaaaacaacagcatcaatggcatcaaacaaaagcatagtgccaaaccaaataacttatagaacattaagaagcatgagtttctagattcatgataataccgtaacaaaagaagaaacttccctatttactaatttctagaanagccatgagttttctattcagaatcccacactctcacgttctgtttataaggacaataaaaataactaacaataatatggctttgccacttctaaaattgcanatcagtacaccatacgaacccaatgat

SEQ ID NO: 24784 - DNA, 438 bp, Glycine max
  unsure at all n locations
ggacactaaatactcaagcttgactgagtcatcaagagatataaattgtgactctggcatgagtttaaaaagcaatcgaatcatcaatcatctttgaatcatctatcttcaatctttncaacatcatctctcaaacatctttcaatcaatctttcaatatctttctacagaatttttctgattcatttctcttcatctttctaaaattttgttatcaacactttttcttccgagaaaagttcttcgttcaaaaacttgtggtattcatcttttgcattctcttttccctttgccaaaagaacgaaagactaaccgcctgaattcttttgagtctctcttcttccctttcccttaagcaaaatatgtcaaaggactaactgcctgagatatctnttgtttcccctttacaaagattcaaaggactaaccgcctgagaat

SEQ ID NO: 24785 - DNA, 394 bp, Glycine max
agttggtagtatgaagaagaagggacaacataggatggtcattcaagaaacaatctctgaacaaagcctagacataatggctagtgtgactcttatcgaccgagaatgaatgattgagatttggaacatcttggagaaaggctcactcctataaaatccaacaataacaaaaaagctcataaggaatgccaactattatgtaatagagggaaaagacctatacaaaagaggctttacaacacctctgttaaaatgcctaaccgaagaccaatctgaatatgtgatagaagagatgcttagaggaatatgtggaatacactcaggttctcgattgatggaaacatgtgttctcaaagccagatactactgactgatgatgagaatagattgcata

SEQ ID NO: 24786 - DNA, 429 bp, Glycine max
tcatcttcaatccaagaagaaagtgataaagaagacttaatttatttgaatgaagatgatgatcttagcctttttgtaaaaaggttcaacaagttcctaaaattcagaggaaatcaaaggaaaccaaattttaaacctaaaagaaggacagaagattcatcctctactacaaaatgctttgaatgcaatcaacctggacatttgagggtcgattgcccaatcttcaagaaaagaatggagaaatctgaaaagaaaaatttcagtgaaaagaagatgaagaaggcctacatcacatgggatgaaaatgatatggaatcatctgaggattcaaaaatgaagagataaacctatgtctaatgactaaaagttatgaaagcgatgaagagttaacatctacaaataacaatttatccatttcttttgatgaat

SEQ ID NO: 24787 - DNA, 404 bp, Glycine max
  unsure at all n locations
ttcttgcaagttttagcctttgggttgttcaccatgttgctcatctcatgttgttactccccctatctctaacaatatattttagtttattacgacaatataatttttttttgtgttaactttatttattatgagatattatatattttgtcatgataatatattttaaatttgaagtatgaattaatcaatcaatttatgttagttatatatataatttaatttttttaatatatatcgagtcaaatcggttcaattagcaatccttggttcgactactaatttattgatccaatgtctcaactgatttgattatcgggttagtttttataatactaccttntgcactctactttaatttcaatttttatttaaatcccctttattttgattctctaaatcaa

SEQ ID NO: 24788 - DNA, 459 bp, Glycine max
  unsure at all n locations
cggtgtcctcgtcacgctgnancacatgaaancacnccggccccgggatacttcgagtcgaccngcagttttgcagttattcaacattttatacaagaaggganagcagcaggacgaaacctaaacgggacagcttggagcataatgctacaaaaaggcatgtgatgacggggcacatcacttacgattaagaggacgggaggatcacagaataacattggaatccatatgcgataaaaccgctgaaatgggtcaatctaacaggctcaagactcttctgacgaaacaggggaagctgccttcagtttgcattaggcaagggacatactgaagcttatatacactcgcatctgtggtacaggagctaaatttgctattcatcaacatactggcacaatgcatggactacctcttgactaccagtaaggcaatcttttggcgtgtttgccagcaaaagct

SEQ ID NO: 24789 - DNA, 417 bp, Glycine max
  unsure at all n locations
gaacgcatgctgccccaanttatgaaacttgtcatacctctntcccggatcaggctcgtgcatctcaatcatttgccatgcagcgtacatagtgcaaatccatgaaaggagcaatattgtaacgccccaacccctgccacaacaaagaaacatgcatgcatgaaggccataacaatagaataatgatacagtataaacactccataataataattttattttctattcattgactatttaataagagtgtttttaggtatatacaagaaacaaactctggatacatatttattatgaagtgatgatgcatgaaaagagaagatgagaataccatcctagctctgacatggcgtatgggatacccagcacaccagctgcaacaacagcagtgacattgtgaaaagcatagtaccacca

SEQ ID NO: 24790 - DNA, 377 bp, Glycine max
agtttgactttggtttaaacatgattgatacatgatttgggacttgtaggatttgatttgggcaagattggatgagggaaagtgtgactttcgaaatctgcacttatgcagaatttggctgtgaaattatgtagcagaattttgcataagtgcaggaaaatacttgtgtgtggttagctgtgggaagagtagtgcagaatgagttatggatgtttgctagtagatcacaacggtcaaaatgtaggattatgtattagagactcccagtacaattttcgagtcgatccaacggttaacaaactggaacaaaggaattgttactggggtctttaagtgagaaaagtgtgatcatggttggtgttttgggcagagttttc

SEQ ID NO: 24791 - DNA, 419 bp, Glycine max
tttcgattcattttatgcacccgtagtggtccacattgtgtttcgagcattttgattctcattttgtttactttttataccccctgttgacatgcttaagccattttacttaagccatttctcgcttaacttaaaaataaaataaatttccaccgaacgtttgaattgtattatccgttaacttcggttaaaataaattccgaccgttcggtcgtgccgtaaccacgttggaaatcaaaaaagaggtaaaaataatataataatcaaaaaaaaaaaaaaaacatcttttagtaaaataaaccggaaaatcaatcggacgttttctctttgggatttctcattcttaatcgaattgagtaataactaaagtgaaactaaggctaaaatcaactcgcctagtcaagctcgtccacaaaaat

SEQ ID NO: 24792 - DNA, 393 bp, Glycine max
tttcatgcaagcttaaacatagttctatagaattcattaaggtgttgctatctttcacctacaaatggaaaaacatgatttctactctcccattagaaaataacaagttgttatatgtcacctaccatatggttatactatatactaattgctgagcaaaaaaaaatactatatactaattgccattcttaataaattatatattaatgagattttattggggctttttctttattgtaactcagtggatgatttttatgccaactacatcaaaccaaccattgtaaatcatatgttgactacgttggcttggatttttctttgctattatttttctgtagtacctcaataaatagattgtaaaccaaccgcttacaatttatagcgttaagc

SEQ ID NO: 24793 - DNA, 414 bp, Glycine max
tccctccaatactgctttgaaacaatggatcagattattcaaagtatattgcatttggatcttatgggtagaacccatacagtatgccatacaagtagagaatagtaggaactatatatggtgtcaattgtttcaaagcagtatgtgtgagaagcttagatgtaatttggtcttttgggaaaagaggaaagctagagattttctttttatgtgaaggagggaagcttgacattttgttttttctggtcgaggagggaattatatacatgaggtaaataattgaaaatttcgatacttaaaagactttccaaattgaataatttattattttttaatatattttacacattgatgttagaatatatttaaatatctctctgaacgaataacttacccaataataatactattaac

SEQ ID NO: 24794 - DNA, 388 bp, Glycine max
  unsure at all n locations
agttttcttcaaagcttcaaaatcaatgcctggaaacactttcattggtgctttcatgatatattttaaaaataaaaaataaaaaaagggaagcccataacatacactgaaaacctgcccagttattatcatcagcagtagcatcagctgcccctgagcccttttcatttggatcatccatagacaacatgtcaaaaaggtccgtagcatagtcaacttttgaaggggaattttgtgttgtgtcagtagtctgttttgaagtttcagcttgtggtgatggtgcaacaggttccactttctcaacatgttgaggttntgccacagtagttacctgttcagaaatttaattgttttacacgtctaananagtataaaccatgaaactttc

SEQ ID NO: 24795 - DNA, 413 bp, Glycine max
tgcagcctgataaaatataagctatattttttctatttcactgcaaaaaactgaatattttctgttactcatacttttatgcaggcagattgaaatagacaacaaatttttggaagcacaacaaattatggactagcaatgcttgcagaggaaggtgcatctcttgtctcctttattgacttatgttattgctttttctagtacaacttataaacatgaactgatccgtttaaaaactttgttatgctaataatgatttggtagaccctctggaggatgaactgatcctatatttcttccctctctttattcctatatttctctttatttcatgaactaggaatacgcaaatctttagataatggaattgtagaatgtggaggagacacggtatatgtcaaatcattcacaat

SEQ ID NO: 24796 - DNA, 388 bp, Glycine max
agtcttagggaaagccaaagatagaatcattgattagacaattgctggttgttttcccaagagatagatagagttgttgcaccactaccacgtacacatacatacacatctacacaaaagaaaggagacatagagagaacattctgttattttctaactttttgctttttctgttgcctcaataaacaaatagatcttgttttatatacttacctagctacgtccagcatttgcttggtttattgtgtttagtgtttcttacatttgcacgcatactcatatccactgttcattcataccattctcagtttctggcattttgtctgatcagtcaacaaaatataaatcactaattccattttgtttattccaagtcttaccatggttc

SEQ ID NO: 24797 - DNA, 388 bp, Glycine max
agcttttatccacacagttcaaaccacttgttcacaaaccaatatagcatctggtttttcccccctaagtctcactttttaatctatataagcaccaaactcacactcacttgaagtcatagttgcaagttcaactactaatatcatatcacaaaatagtggaggattattagggaagtttgattagtttgaaactgcaccaatttattggaaaaaaaaaacaagcttgcaaagacccagtgacataaaaacatttattgaaaaaaaaacaagcttgcaaaagctcacaaaaatgagaaatgaagcaaatacgtaccttgcattgatgttagactccaacgaatacggcggtcacgaaccccagcgacgatgatggtgaggagcagat

SEQ ID NO: 24798 - DNA, 379 bp, Glycine max
agctttgaccatttgaatttctcgagagcttccgttgttcaatttcgagcgtctcgatatattatgtgcctgaatcggacatcctagtgaaaagttatgatcatttgaattgctcaagagcttccattgttcaatttcgaacgtctcgatatattatgcgcctgaatcggacatccgagtgaaaagctattaccatttgaattgctcaaaagattccattgttcaatttcgaacatctcgatatcttatgcgcctgaatcggacatccgagtgaaaagctttgaccatttgaattgctcaagagcttccattgtccaattgtgaacgtctcgatatattatgcgcctgaatcggacttccaagtgaaaagttatgacca

SEQ ID NO: 24799 - DNA, 382 bp, Glycine max
  unsure at all n locations
agcttgtggcaggtattactagggtgattcccgacatgtcagatggcggccaagcgaacaaatccatgtttttgtgtaggacatcaatgatgcccctgtgctcatggctagtgaggtctttactgagctgcgtacactgctcaagtttaggtttgagttgcaacataacgagctctttgatgggctttaggcctctaccagaagtgtcatcatgtggatctatactgaattcttcgtctaggcttgtttagtagatagctagggctcaggttggaggtccttcatccacgcttatgacttgagtaccttcagccgctgcggggtaaggcttggcaggctccctggtgggaggataaggtgctatcttcangctttctatgta

SEQ ID NO: 24800 - DNA, 381 bp, Glycine max
agcttctaaacggatctcatctagctcatttagttgcaactttctttcctctccagcctgatcaatagagaagttgcaggtctttacagcccagtaggctttgtgctctatctctacaggaagatgacatgccttgccaaagacaacccgataaggagacattcctatgggtgctttgtaggcagtcctatgcgcccaaagagcatcatctagcctggtgctccaatcctttctgttcggctgcacaatcttctcctagatcctttttatctccctgcttgaaatctcagtctgcccattggtttgggggtggtatggtgtgtgtcgcaacctaccctttggcgggcgagcgaggtgagggctcacgggtgcgtcttccat

SEQ ID NO: 24801 - DNA, 378 bp, Glycine max
agcttgtaaaataatgggggacccatcacatgtggtactatgtggcgtgcagccgatggtgcacaacaagttgtacacatgcccaaagcgcgcataaacctaccatcccctgtggcccacctacaattgagctcacgtactcccacgtaggccagatcctctgggctctcaacaccgggtccacatcaatcctaccaagcttccccaacatccaggtaaaacaacattcatacataacaaactatcacagcgaagaaaacagggcataggcagaagctctgcccaagacacgactcataatcacagctttctctcacttaaagaccccagtaacatttccttcgttccaattcgttaaccattggatcgactcgaaaa

SEQ ID NO: 24802 - DNA, 382 bp, Glycine max
ttgcatgcaagtcttatgatgaatctggattgattcaaagagttgtgatgataacaaagatgatgactaaaagctcataagtcatgaacacttatgattaccactatgatgatctcatgaatcaaagaatgagttcaagattgaatcacgtacacttcagggatcaagaacaaagttgaattcaagaatcaagaatcaagattctagattcaagaatcaagagaagactcaattcagataagtattaaaaagttttttcgaaaactgagtagcacatgaattctttctcaaaaccttttaccaaacagttctactctctggtaatcgattactagattattgtaatcgattacttagtagcaaaatggttttcagaaagaat

SEQ ID NO: 24803 - DNA, 373 bp, Glycine max
agcttcaacaatcacattcatggctacacacaaaagaaaggagttaaatagtcatatgtttacacatcaagagagacacactcatccaaggcatatatagttcaaaaggtttgcacaacacaaatccacacatcaagagagagataaccttattgccaatatacacacaagaagataagggctcattaaggcattatcaatcaatattaagactacctgtgcggcgtccctaaataatgactggtttaatagtaataaatcaaatcgcagaaaccatggaatttttcttttttgcactgttattcatttcacggtaattaaattcagaaggaaaattatcactataaagtcctgaatggctagttcacaactc

SEQ ID NO: 24804 - DNA, 370 bp, Glycine max
atcttatgacatttggatgatcaagcctccgcagcacaatgatttcccttgacataaaacggacactttctggatccatattatcaaatcgaaccttcttgagtgcaacaattgtatttgtttcgagatcacgagctctataaacactgctgtaagatccttggccaatctgcatcatgataggaaagttaagtcattaagaaaaagctattgggaaggtttgaaaaatgtaatgttggtgatggagataataataataaataagaaagcaatggtggaggctgtaatgaggatttgccttatccaacttctcaaaggaatcagccctgcgaggtatccaaccaataatggcttcaccagcaactgctgt

SEQ ID NO: 24805 - DNA, 358 bp, Glycine max
agctttgtcacctctttcaaaaaaccaagagatcattaatggtccaatgccttaatgttttctctcctttcaaaagaattgaaagattgtttaatggtccaatgcctcaaatgacctttcattcaatcaaaatatatcttgcaaaaaaggataaaaacaatttaaccagcttttagttctcaaagaactacgtaggtctgatttccttatcacaaattgatggatacgtaggagcaagggaaacacccttgtcgaccacaaaaagataaaaaatacaaaaggcatgaaaagacatataaagcgtaatagagggaagagaaaataaattgaagtcatatttgcacacttgattaaaggc

SEQ ID NO: 24806 - DNA, 368 bp, Glycine max
agcttgtagaattcaccccaattctggtgtcgtatgctaacttactcccatatctactcaataatgcaatggtagccataaccctagccaaggttcctcaacctccatttttccggggatacaactcaaatgcaacatgtgcttatcatggaggagttttggggcattccattgagcattgtatgaccctgaaacataaggtgcaaattctaattgatgcgggcaggctaaaatttgaggaggataatcacttgtgaattctggcgttggcaagcgacactatgcatggggcaatttgaaggtttttgttagatgtctccaatgacttattaggatttttaagtttatgccattattgtaaacaacag

SEQ ID NO: 24807 - DNA, 364 bp, Glycine max
agtttgagagaacaaattcagagagcaaggagcagcaggaggaggcaaatttggacactgatacaataaaaaatatttatgttaataagtagtaacaaataaaaacagaaaaatataataagtgaaaagagtgttaccaaattatagaacaagtgtatgaactgaatgataatggactgaaaatgaactggtgaggatggaaatggaaaccgaaattttttctaagtttcaaaaacacaacattgagcatgaggataaacacgcggtttggctatatagtgtaaaaaaacccagagaataactcacggaatgcccctcacaaaacaacagagtcaaaggctaacctcctagcttcagctatatg

SEQ ID NO: 24808 - DNA, 388 bp, Glycine max
  unsure at all n locations
agctttgttttgtaacagtattttatgtagccatgagcccatgacatacattgataaacagtattcagtatgagaaggtggtggttggctntagaaaaaatttactgcactatatatataatttccatcaacttgttatgattaacgtttcattttagtttttaatttgaagcaatattttgtgtcacatacaacgctgcatttgacagaagtaataaatagttgtcaatttaaagggagcactaattcatgatacaaggaaattatataaaggcatttactatcattttaaatgagatattttttctttaattatattttttttattcctaagatttanaatcttactttagaaatcgaattcaatattactcagatcaaatcaata

SEQ ID NO: 24809 - DNA, 388 bp, Glycine max
agtcttatatcaacatacataagtgtagttgtcgagcgtcatatttgttgatgtgaattgggctatcatcaggactatgaatatcctcaacttgacaatgacctgcaaaatgggcagcttggttacacaaaaaacactaatcttgtcgatgcaactagccattgagaatacaatgcattgtccaagggctttggtgcagagaaaatgaaataaaaaatatgtatatttattctcaaataattgtcaataattgtacaaacttatttataatgtttacagtaaacatcaaatacaacatagtggttcgtcctatgacatccaaacctttctagatcggatgtttttaacttttaaaaaatttgccacccatttcttgcaaatttttgtt

SEQ ID NO: 24810 - DNA, 389 bp, Glycine max
agctttgagccaaaatcttgactcaccataaaccttgacccagggtgagaatgccaatccttaccctcggaagcaaaaaaaagaagagaaggaaaatttccaatcaaaggaaaaaggagaaggaaaatttccaatcaaagaggaagcaaaaaaggagagaaggaaaatttccaatcaaaggaaaaaagagaggaaaggaaattcccaatcaaagagtgggagaaagcaaaaagaaaagaaagaaaattcccaatcaaagaatgggagaaagaaaaaagagaagtaaaaaagaagatagttcctgatcaaagaaactagaagaaatgtgcagaaaggtcttttgaccagacgatatctgaacaatacagaattgtcaccaaatgaacaaa

SEQ ID NO: 24811 - DNA, 381 bp, Glycine max
atctgcttctcttttttttgtatttttttttttacttttgcatgtcttatttcaagggacattgtctctctttgctgaatttcttatttttgtgaagttgatggacatgtgaaatgtgaaaagtggattcgtgatgacaataatcgttctgaagagtggaaggcgacatggtggttaaacagattgatagggcgaaaaaagaaggtgacggtagactggccatatccttttgctgagggcaagttatttgttctcaccataagtgctggcttggaaggttaccatgttagtgtggatgggaggcatgtgacatcctttccctatcgcacggtgcatacccaaatcatatctccttctgtatgcatgcaggaatattgtatt

SEQ ID NO: 24812 - DNA, 371 bp, Glycine max
  unsure at all n locations
atcttgagttgcggttttgctgccattgttgctggggttagcatacttgggaattagaaggcacttgcattatcgttacaatttgttgcatgctggaggagtcaatggccacaagtatgatacacaagagtatgcctatacgacaccggatggtatgtgcaaccaccctgctgaccatttgatcagcagtcaggggacgtcttttggccggaacatgcctccgacgaccttagattatgggttggacttgaaattttgtatgatttgtagatgttcttgttccttttagtaccaacatccaactactttntctcatgttaataaaggtaattcgacttgtatgtatgtcattgtgtgcagttactggaccc

SEQ ID NO: 24813 - DNA, 375 bp, Glycine max
atcttgatgcatataaaatattcaaataatgtctaggttaattgtaataattacattaattaagataatcgtaatctatgtacttgatatcagtctatataattaaactcaaatgtgttgcttaaacatacaaatatcaccatatgtttctctttttctttttccttaacaaaactcgtactaaaccatgaagattacacttaattgaataacctatggaagcaattcataggcacaatgaaaacctatacattttggctagatccatggcaatgtcaaaccatgagtactctactatttccattagaaatgtagaacagtcaaatgcttatatctacccaaaaatttgagttcataacaaaattgttctttcat

SEQ ID NO: 24814 - DNA, 382 bp, Glycine max
  unsure at all n locations
agcttgtgcagagttgtgagcaacaaagggatctaaaaaatataaactaaaaattaataatcaaatagtattgataaaaaaaatgtgcataaatcaagtacaaatccttcaaaacaaagtaagatcaaatagtaattttagcagaaaagagaaaaagaagcaaaaaaaaaaagataagcaactaaagttagaagctaaacgtaagaacaaaaccaaaaccattgtaatttaaggtgtgtgtgagagaactgagccgaaggaattgtgacctatgaagaacaaatcaaagtgaaaatgcatagaagagtgtcattttttttaaactaagaaatatatactttacggcatggntcttgcacaaccatatcataatcatcccttg

SEQ ID NO: 24815 - DNA, 374 bp, Glycine max
agcttgtgttgggaattttaaaggcaaccatcaaacttttcaaaatccattagtagatatcacaaatactcagccaaagagcaatgacctcctaaacagacgaagcaaaactattaataatatctgtagaatttgaaataatttactgaatgaatttgttgctacatcttcatcgtgtgctacacacacagataatgaaagccatgatcatagcattgtacctgaacacacaaatgatcctcttgatcagacatatgaaggctatccaaatgaaactactcgaaatgcaggtaacaataataatcagactatataaaaaataatattgcattattaatgttgggttttatgcagaaaccaatcataatttacta

SEQ ID NO: 24816 - DNA, 370 bp, Glycine max
agcttgggaggatttatggggacccggtgttgagagaaacgaggataatggctacgtgggagtacgtgagctcatttgaaggtgggcaacaggggatggtgggtttatatatgatttgtggatgtggagaattgttttgcaccatcgcccgaccaccacctagtaccacatgtgatgggtaccccataatcctacgagcttgaattgatgaagtgtataatggtgaaacttcctgcttttattcgttgaccacagagtggtacctagagatatgttgcgggggtcaagagaccttgtggacatcacgtggcgtgctattgcccaataccaagcttgaccaatcccgacccaacccgggcatagtcagtca

SEQ ID NO: 24817 - DNA, 190 bp, Glycine max
agcttatcacgaagtgccaccaagaacaacgttttgttgggcctgaagcccaattccataacctcccgaaccgcatcctgaaacgtgggggcattggcaacgagcgagcaagcccagtagcgaagcaacataacaaccttggattccgggacatcgttgtggaggagaaattgaatgttgaggagggggg

SEQ ID NO: 24818 - DNA, 365 bp, Glycine max
agcttgaagaggatgctttaatggaggaaaagaaagagagacagtgggagcacgaacttgaaggaataaaagagggaaagaagtggagctctgaagtgtatctcataagactttcattcatcaaagttacaacaagtgttacacatgcttctatttatagactaggtagcttccttgagaagctttcttaagaaaacttccttgagaagcttctttgagaaaacttccttgagaagctagagtttagctacacacacccatctaagaactaagctcacctacttgagaagcttccttgagaagctagagcttatctacacacacccatctaaaaactaagctcacccacatgacatataaacatg

SEQ ID NO: 24819 - DNA, 362 bp, Glycine max
  unsure at all n locations
agtttgtccaataatatttagtttgagtttgagtacttcttataaaaaaaattagttttgatcctttgatcaaatatattatatatttaacaaattaatttatcatatgtataatgtatgtacttataccttatcaaaatcaaaataaaccattaactcaaattagtaattntcaaccctgtacatgtttagttcaatttaacttattttctttaaataataattcattttttagtttaattcttatatatttttaaggttctcactgttatatgttatttctaaaataatcattaaaaaatcaataattttcaattatatgaaaattcataattaaaataataacgttataccttaattaa

SEQ ID NO: 24820 - DNA, 380 bp, Glycine max
agctttgaatgcactattcaatggagttgacaagaacatcttcagactgatcaacacttgcacagtggccaaagatgcatgggagatcctgaaaatcactcatgaaggaacctccaaagtgaagatgtccagattgcaactcttggctacaaaattcgaaaatctgaagatgaatgaggaagagtgtattcatgacttccacatgaacattcttgaaattgccaatgcttgcactgccttgggagagaggataacagatgaaaagctggtgagaaagatcctcagatccttgcctaagagatttgacatgaaagtcactgcaatagaggaggcccaagacatttgcaacatgagagtagatgaactcattggttctcttc

SEQ ID NO: 24821 - DNA, 380 bp, Glycine max
agctttgcttcctatttcttctctggtttttcttttcttgttgcctttggtttttcttttcttgctgcctgatgcctctggttttccttcgtttagtgtggactgtggtgttccactttattctttaaacatttacacactctctctctttggcagttatctactgggtattacatgtttctccatttttttattttattgtaaaaagcaacttctcattgtaaaaagcacgtaggcctttaaagtatcccactttattttattgtaaaggttgttttctctctctcacacacacacataccacttttcccttctaaatgcatttacctttattttattgtaaaaagcaacttctcattgtaaaaagcacgtaggccttt

SEQ ID NO: 24822 - DNA, 384 bp, Glycine max
agctttaagaaataatgattctaaaatttttattttcttatttatgattaaggaagcatgatatttttaattactattaaaatattaaatgtgtttatttttattgataatattaggaagatttacaacgaatttttaggatttctcttttaagaaaagagtagatttaaatagcaatcccatggaagggaagttattgccagcagatgttctgccctttcacctccataaacacagaagacactgttgttgttggatttgtacgtatacaatacaatcttccacttgaaccgaatctaacagccttttttacgtgttttgtttatattgatcattgccccatctttaaccaacacaataaccaaagttgtttgtcattgaata

SEQ ID NO: 24823 - DNA, 382 bp, Glycine max
  unsure at all n locations
agcttgaangcaagactatacgaggtatcttccttgggtatagcaatatctctaagggctaccgggtctacaacttccaaactaagaaactcgtcatcagtcgagatgttgaagttgatgaatatgcttcatggaattgggatgaagaaaaagtggagaagaacgttcttatacccgctcaactacctcaagaagaagatgaggaagaagacccaggtgaaccactttcacctccatcacaacaacaagatcaagaactatcatcaccagagtttactccaagacgaataagatctttggtggacatatatgaaacctgtaacttggccatacttgaacctggaagctntgaagaagcatcanagcaggaagtatgggtcaa

SEQ ID NO: 24824 - DNA, 385 bp, Glycine max
agcttcaactacaccttaaaagtcttgtgaatagcatcgagtatcatgttaggatctagggtttgaggaatggtagtccttgccttagtccaagtgggtgcaagaccccctaccatggtggatgctagcctttcggggcaccccaagtgcctgagaatgctcatagaatgatatttgagtagttttccccttggttacaaattaatgatatcccatatgatgattagggtcactcctctaccctgcccctaaatacacccgtactagagatatgttgctatgagagatgttaagggtaatggaaaatccaataacgcctgagacgttaggtgaatgccaagacctttagacaacaccaagaggaggtctgaatgcatcaacgttt

SEQ ID NO: 24825 - DNA, 369 bp, Glycine max
agcttgtagaccttctcttcttcaccctttcgaacataacccggtggttgttccacatacacgtcctctgtcaattctccgtgaagaaatgcgcttttgacatctagttgatacacattccatcccttttgtgctgctagagctaaaaccatccggattgtgtcccaccttgctaccggggcaaacacttcgttgtagtcaatcccttgttgctgagcatagcctttagctactagtcgggctttgagcttatcaacttcaccattctcatttaacttggttctaaaaacccatttcactccaatcttcttagcacctttgggcaaagttgtaagctgccaggtttaattccttttgattgcttcaatc

SEQ ID NO: 24826 - DNA, 375 bp, Glycine max
tgtttatcaaaatattctttaagcttatgagttaagcttgtaaataattctcgcacgataaattaaatatactctaattaattaagttatttgtttggataattaattaagttattgacttaaatgtgtactaattgagatctaaataaataatgcagtgcacaagaagtcagctcacacagaataaataatcaagttattttttggataggcaaagtaataaggtacgaatattacaaagctcttgaagtctaaggcctgaatggtacgcagaaagaaactctcgaagcttgacaaatcaagacaatgtgcagcttttacattcattaatttaggaatagggggagaaaaaactatcagtcgttaagatacatg

SEQ ID NO: 24827 - DNA, 377 bp, Glycine max
tttgctgcaagctttccaaagatttctggatttctaaaccttgaaaacttgagctattcattcttttcttctcttctccctttgccaaaaagaattcgccaaggactaaccgcctgaaatctttttgtgactctcttcgcccttttccaaaagaaaaaaggactaaccgcctaaattcttttgtgactcccttctcccttgtcaaagaattcaaaacgacactgtctgagaatccttttgattcttccctttccctattacaaaagtgctcaaaggactaaccgtctgagaattcttttgtatccccattcacaaagtatcaaaggtttaatagtctgagatctttgtcttaacacattgcagggtacatcctttgt

SEQ ID NO: 24828 - DNA, 371 bp, Glycine max
agcttaaattgcctcttggatcaatggttcataatgtcatccatgtttctcacttaaagaagtttaatggtactgctactgctgggaactttagtccttcacctttattggatacttctcagaaagaacctgctgctatcattgacagaacgacagtctagagagaaaatcgcgctgtaaccaaagttttggttcaatggaaacatcaactacctgaagatgcaacttgggaattcttttatgactcgaatcacaagcttgctcactataatccttgatgacaaggattcttttggctgggaggaattgatacacgcttaggaacgtatgtagttagttagactcgattctgttaacttctgttagttgga

SEQ ID NO: 24829 - DNA, 365 bp, Glycine max
agttttttgttaaccaagttgacaaatatgatccctctagtccaatggctctatggaaaactaccattatgattgcggaattgattattttatttttttacagtaggcatgatgactatatagcttaagctctatcccctcactctatctcaattttagaagttattacttgctcaatcgaactttttatttcgtgaaatacaaatggaataaggggtgattaatgaaaatttgaaaatgctaaaactagcaaattttcaagtttgtggattcttgttctttagccttaccaacatccaagttcagagccgaacaacatttgatagtatatttcaccaaaatgtgatttttatagtgctagatta

SEQ ID NO: 24830 - DNA, 359 bp, Glycine max
agttttgcctttagggcttgtacctcatcactttcttccgaagctttaacctcattgtctctcacagtctttagatttgggagccaatccaatccttgtgtccggactctcagccatttatgatagccgccgatggtcccattactgcttcccctaagctctctgtcctttcttcacaccgcatcccatgccttgcgaactccttggagtaccctcacgtttgtggtcactgaaacctcgtgcgatgaaaggcgtgatgctttcgtctgatgacactcctctcatgggacatccttcgcatgaagatagaatcctgattcttccttccttctagcgagggaaccatttaacagacgccc

SEQ ID NO: 24831 - DNA, 382 bp, Glycine max
  unsure at all n locations
agcttgtgcctcttttcgtctggaatatgaatgtagcatatagatccaaagacccttaggtgctttgctgatggcttcttcccgttccaagcttcaattggagtcttgtcttttacagacttagttggacatctgctgagtatgtaaacagcagtgtagactgcttcagcccagaatgtgttaggtagtcccttttccttgagcatcgatctagccatctccataactgtgtgattctttctctcggacactccattttgttgaggagaatatgcgactgtaagttgtctctcaatgccttcatcctcacaaaatctttcaaactcgcgagaggtgtactctntgccacgatcgcttcttagtacttttatccgttttccac

SEQ ID NO: 24832 - DNA, 384 bp, Glycine max
agcttatcaacatctttcttggagaaagagttcttggggtcaagacatgagaagcaatcaagtataatgttacttccttcactaaagcggtgatccatctccacacatattttatcaatagcaacataaaaaatctctacacggtaatgatgaagattagtgatagtcctcccttctgctcttgaacgaccccgaactggtatttcgtcatccatatttggtaccagaatacttttagcaacacaaaatccttggacatcggcaaaaaaattattccagccactctctctcattgtgcccaaccgagctttgacaacatcaactaattccatggcattcacaatattaagatcttttctttgcaatatatttgaaagctcgttt

SEQ ID NO: 24833 - DNA, 383 bp, Glycine max
  unsure at all n locations
agcttgaacttaatgattgagtctctcttttttaattgatcacacccaaggctgggctacataacaaaccttgatttaacagtgttcctagtctccaatatgagactccatggtgatgttctcattgttgttcaataagactttctgatcctcttctgagcttatgtctagtaccatgaacaatttatttataacagaaagaagacaatattacaactttcactatgcttgacaattgctttgtgaattgctcgagagtatctctcagtcttttgatttatatttacatcactgcataattgaatcccaaccattcaaggattagatgaaccatttacagcaagtgtccagaatttcctaacctanatatatagaagcaatta

SEQ ID NO: 24834 - DNA, 381 bp, Glycine max
agcttgcacaagctatatatcttctatcccggatagcaaaatttaaaacactgatatcagatagatatgagtgcatacctgaagtcattttggctggtgacttcaattctacgccaagagatatggtactagcattcctaaaatcttaactcccctatttcttatttttgtctagtttataatgttcctgtttgttatattcctatcttgcccaactcttgtcttgttatttgaagctaggtgctagattaagattgttgttgcacagaaatcctgcgtgatgcattaatctgctagcaactcatggttattgattaaccttcaatctcaaaggaaaagagaagaatggcatagaaatagttgctgggaaagggaaattgc

SEQ ID NO: 24835 - DNA, 390 bp, Glycine max
  unsure at all n locations
agcttggaattgtatttgggaacctattttgaatctcctatgatgtacctacatataagaaatagtcccactctcccaattttacacaatcatattcatacatcattggggcatttcaccgagcatttggtgagcacatgtttggacataaattgcaagaggatggggacaatgtggcatgccccattgcttcagaatacagcctaggcctaaggccttctcattcaaatcctcaactcaagaaaacaagcataaaaacaaaccaaaactgccccacaaatataagcacatcctcacaatttggagcaccaaaagatgaagaanatataccaatgggaagctaanaacatcaaggattgaatacttacttgtgagagtgaataataacac

SEQ ID NO: 24836 - DNA, 377 bp, Glycine max
agtcttttcttgtttctctccccatttgaaaccagcatttttcttgagcacttcattgagaggtgctgccaatgtgctaaaatccttcacaaatcgtctataaaaacttgctaagccatgaaaactcctcacctcggtcacggacttaggtgtaggccattcttgaatagccctaaccttctcctcatcaacttgcactccttttgaactcacaacaaaaccaagaaacacaacatggttagtacaaaagatgcatttttcaagattggcatacaattgttcttctctaagcacagtcaaggcagattttaaatgatcaatatgcaaatcaagtgaagtgctatagataagaatatcatcaaagtacaccacaacga

SEQ ID NO: 24837 - DNA, 374 bp, Glycine max
atcttacaatggcatctttgagatgatcaacggaagtcttcgagcacgtggattccgccattgatggtcaatgaaagcaccactgttatcttggcgttcgagggccaaggaacctccagaactgagaaggagaaagaagtatcgaaaggaattttattcatgattcacgtgctgaattacaaggtatttataggcgcgtataggattctcgaagcttcctaacaactaaacaactaacccttctaacagaataacaaccagattcgttctctctctcctaaggctaatctctgaaccttcacatttgtcacgtgcttcattctgcatggccataatcataatctttcaagtatgctggtatgaaccttgctcgt

SEQ ID NO: 24838 - DNA, 379 bp, Glycine max
  unsure at all n locations
ttgcatgcaagtcttacccaccttgctagtataaccagccttctcaatggcatccatgagtaaaacaagaccctcctgttatcttgaacattgngagcaaatcctccgtcatctccaacattacatgcatcttgtccatattttgccttgtaccccttaatacatgataaactgttctaccagaaataaccaagttaactgattgtcaccatatatagatcgctggtgagattgaaaaaatcatggaatttatgctatagataatatgcagtcaggaaaaatggaattaagattagctatcaaatcatatgtaatacctacctaagaacctaatattagcacagaaagtaatatctgaactcaccaattcacactcacc

SEQ ID NO: 24839 - DNA, 351 bp, Glycine max
atctttccctgctctctttggctgtttctataaatagtgatgtaagctccattggagcttggcggcctaggatcttcttcatcaatggattcctttgcttcttggaagaagaatggtcgtggaatggataaggaagagagagacgagatgccacttcaaggagaagatgagtgtacatgaagctcaccaccgtatgatgccctggattagagcttggatgaggaacgagatgaatgattggagaggatgataagagcacaaacctgcgtgctctaatagtactctgacaactgatggttaattgtcaaatgatcaacgttgatgaaatgcacacacatggcctctatatat

SEQ ID NO: 24840 - DNA, 377 bp, Glycine max
  unsure at all n locations
agcttgcttctacacaatgctagcaagagaagcgatgtagggaatgatcctcggtagcgccttggcttcgcttttcttctttttccttcctttccctttgtttttcttcctctctaaactctctgaacccaaaaacccttcccctccatgtctatttatggaaaaagccatttggggtaggggcagctcgcccaggcaagctagtttcttaaggctgaaggtatttcatggcctaggcaagctagacactagcctgngtgagctagtgtctagaaaattccagaaaatgaccatgtgtgaccccttggccttgcactgtaattggtgccaaacaccgtaatttgactagcagtgatcaaaacatcatatccgaatga

SEQ ID NO: 24841 - DNA, 366 bp, Glycine max
  unsure at all n locations
agcttaagtgtttaggctcattccatcataaacaactaacacaagtcccaacctttgcatttcatctcatatcatacaacaatgaacacccaaaattgaatccgcaggactttctaggcttgtaatggggttaggcttccaaaaaatcatggtttttcctagattcaaaagcttaggttctaggagagcattcatccatagataaaccttcactttttcattcattcacatcccatacttgccttttatttaggcactcggcttcatttcattattttgcagcatacacacttattaatttcattnttttatttttatttttttaacacaagatatacaaataaattatgtgtatatacagaaata

SEQ ID NO: 24842 - DNA, 440 bp, Glycine max
  unsure at all n locations
nctgacgcactggctatgacnctnnnttgattcccttcgacacccanggcgaattnnagctcggacccgggatccttatagtcacctgcagcctgcagtttttaaccccaaccttttaaccttcatgccagaagacctactcctggctaggaatccaaattttggttttaaaaataaaaaagcctgaaaaataagaactgcctgggagaagttttgctcgaatttgggctggcccatgtttgatactttgcacctaagtaatatgaaaaacaccttgcaatagtatgtatatataggtcaataaaaggggcatggaaattctttgacagggtgaaagaataatgaagcccttcctaatgaatgatgatacacaaattccttttgatgcaatgtggcatatgtaaatgcttgcatatgataatggagggaacaataaaatt

SEQ ID NO: 24843 - DNA, 387 bp, Glycine max
  unsure at all n locations
agcttgaacacctattagtatttatattttttaaaaaaaatatgtatgacatcaactcgtcattggctcccaggttagtggattaggcaaaatagaccaatacaaactcacgggttaagtcacctaacccattgatccaaagtttacattgtcacctctacattagtgactttttgttgcctttgtttcctttaagctttttgtgtataaaaatatattttttcttgtgtgaaatatttgtttgtaattcagttttaactatataataaaattgatggttaagtttaatatatatttaaacagtcttgatcatttgattatgaggacttggataaaatttatattcttcanagttttgttaatataacttgttaaatataattctat

SEQ ID NO: 24844 - DNA, 303 bp, Glycine max
atcttggaagcccataactaattaatatacgatagttctacaatctccatgtacgcgaattaaatgaaacaaattgcataccaaaacgaatgccttgaaagataaaggaacaacacacacattacaagcaacacaaagaaaaataataactgaaacttagatttatgtactgcacacaacgcaattattatggactatcattacctctgcattaggtaatctacaatccaataagaccgatactagctattgcggccacgtattcgagttaactcggacggaaagttaatatcatattcacta

SEQ ID NO: 24845 - DNA, 368 bp, Glycine max
  unsure at all n locations
agcttgccacccagctcgcccaggcgatctcagctcgcccaggcgagcagggttgcttcctccagaagcaacagccttctggaggaatcttctggagggccaagtgggcctggttgctatttgcactcccatttttactaagtacaccccctgcctttttttttgtgattctttnttcgtaaagttatggaaacttacgaattttgtaacgatacttgttttctttccgtaatgttacggaaccttgtggattacataatcatcccctttttgaattacggaatgttacggaacctcactaattgtgcaacgatgcttccattagatttccggtgtgtcacagaaccttacggattgtgcatcaatat

SEQ ID NO: 24846 - DNA, 359 bp, Glycine max
agtttgtaagtggtttttgatgaaccaactatatcaactgttggattcatctaatttatatggttccaatttacaccactcacactaaatttattgcttccctcctagcaaccttctgatcaccatttgccgttgacggaggcaattcctggcaacggcgttttttttaatcctttcctcaccacctttgatcctttctctccccatcaatcccttgtcttcgactgcaattgtctttcacaacatactgatacccctaatatgtcgaaattaaggccattccaagattgaacagtgaaacgcaccataaacatcaaatgtgatgcatatgaccgagaggcattcacttactactcttt

SEQ ID NO: 24847 - DNA, 511 bp, Glycine max
  unsure at all n locations
ccccccaccgcaacaaaccagacgagaaacacaacgatggaacgcacaatcnaacaagacaacagaacctgagcctgatgacgcatgaaaccaaggcgaaacgactcgcacccgggaaccacagaccgaccagttgacagccaacttcacaacacggccgacgaaaaagaaagcgggacgacaccatgcacaccgccaacgacaatagcagcacaccgggcacaaaaaagaagggagcccgaagcaaacctcccaaccacgaccgaggcaacagcaacgagaaagccaccaaaggccccaccacaggcagcaacgaacacaccacacaccacgggaccgagacccgcacaacaacacggtacaagaaacgaccccaaaaacaggtggagagggcaacaggaacagaaggcaagaaacgcccactagaaacagaaacgcacacacccagagacgctaacgccagaaaaacaacgacgaagcggggnacaaggaagcaacaacagcacccacc

SEQ ID NO: 24848 - DNA, 372 bp, Glycine max
tgtttggcataaattcatgatccgagaatataatatagagaattgatagaatttggttgtattatatttgctcttatgcttcttatttaaaaaaatatgcgtcctttgactcttacacaccaagagtaatttattgttgatttccatattttatggttacatagatattcatattcttatcaaccaaattttagctaaataaaagtattgttttatatcttaattataaaatatataaaaacaaaatatgaccaaactttaatctaaaatagtaaattaattaaaaatataatgtatatttagtacttgtaacaaatataatatattatataaatgtataaaaataactcacttataaacgtataagtttgg

SEQ ID NO: 24849 - DNA, 261 bp, Glycine max
ttgcatgcaagtttgccacacatttttcccaggcgagcagggttgcttcctcctcatataacagcctctcggaggaatcttctagagggcccaagcgggcctggttgctatatgcacccacatttctactaaattcaaccctgtctattattgttgaatctcttttcaaaatcttactgagactgacgaatctcgcacgatacttgatttctttccgtagagagacagaaccttgtgaaatacatgaccatgccctattga

SEQ ID NO: 24850 - DNA, 218 bp, Glycine max
gctcgtcccgggatcttagagcgaccttttgcacgcaatcttaatcatttttttggatcattaagggcatataatacgtataatgggaacacctcctttgacaagttatgatgaatagaactatgtgaaaactactagaaacttaaacgtagccgatagataaaaatttatggtcgaaagaaaaaaaattctcgcaataatctgaaagcgtaagatga

SEQ ID NO: 24851 - DNA, 388 bp, Glycine max
gcgaatacagctcgcacccgggatcctctttttcgacctgcttgcatgcaatcttccatcaagtggaaatcagagcacaagagcttcaagtatgcgctccttaaacctccattaattttttgctataccttctcttccattggtgattcttcattattctccatgtatctcctcacatgtcttgcgataaatgatgttaacatgaatctttatagtttccaccgactaaacttgctataaaagctagattttattatctatggatcagaattcttgttcctgttcttgaaccatgaattgcgttgagtataggttcctttgacttcagtcttgctattttagtgggtgaaacctaatccataaaattcttaccaaaatattataagag

SEQ ID NO: 24852 - DNA, 362 bp, Glycine max
agtttttagtgaaaggatgtgactcttcacatttgaatttgaatttcaacgttcaaaggcactggtaatcgattaccaaaacattgtaatcgattacaacttttttgaaatcaattggaacgttgtaaattcttttgaaaactttttcaaatccattttgctactggtaatcgattacaacaatctggtaatcgattaccagagagtaaaaactctttggtaaacatgttttgagaaaaatctatgtgctactcagtttttgaaaaaaccttttcatacttatcttgattaagtcttctcttgattcttgaatcttgattcttgaatcttgagtcttgaatcttgttcttgattattcttga

SEQ ID NO: 24853 - DNA, 386 bp, Glycine max
  unsure at all n locations
agcttggtangtgaataaaaactcaccgccatagcaagaaaaacacattggagtgtttgtggttcaacgtcccagaaaattttaacaagtggatcatctttcaagtcagcagtcactattttctcacatttatcattccctgcaagctcataatcagttatagaagtagatggtgattgcccatcctggttggaactaacacttgtgaaccagagacacgagttcatgaagcacctgngatgcagcaggttctaattctagcaatgtgttcctttctttaagctttttctctcttaaatccatccctttcaacatctgaccataattttcatcagcgtgatctgaatatcagattatcaagaaagataagctggaaatttattctt

SEQ ID NO: 24854 - DNA, 384 bp, Glycine max
  unsure at all n locations
agcttcaaccaaggtgagatggaccatttcaagtgcttgaaagaatcaatgacaatgcttacaaagttgaactgcccggggagtataatgttagttccaccttcaatgtctctgatttatctctttttgatgcagatggagaatccgatttgaggacaaatccttctcaagagggagagaatgatgaagacatgaccaagagcaagggcaaggatccacttgaaggacttggaggacctatgacaagggctagagcaaggaaagccaaggaagctcttcaacaagtgctgtccatactatttgaatacaagcccaagtttcaaggagaaaagtccaaggttgtgagttgtatcatggcccanatggaggactaaatgacaccac

SEQ ID NO: 24855 - DNA, 387 bp, Glycine max
agcttgtggtgaatactcactcttgcatgtgtcccaaaatgtctgatcccaccacatagatggattattaataaaacaaagcttcgctatcaaattattgaactggtaaaattcgccattctatgttcagggctttatagaaaaatgtttcagctggtattatacagaatgtaaaaaaagtgaacactgtttacccaaaccaccaaaagcagcaagcagcttcccagagaataaatgtaattatttgtatttatttaataaaaacaatcaaactcctattaattatcaatggaatcaaacagagtattagataaagtttacaccaaataagttgtttcctctacatatgtgattcttgctgtttagattgtctatgctagtatataa

SEQ ID NO: 24856 - DNA, 370 bp, Glycine max
agcttcaacatcagtatcacttccagggtgctggaactacttcacatggacttgatggggcctatgcaagttgaaagccttggaggaaagaggtatgcctatgttgttgtggatgatttctccagattcacctgggtcaactttatcagagaaaaatcagacacctttgaagtattcaaggagttgagtctaagacttcaaagagaaaaagactgtgtgatcaagagaatcaggagtgaccatggcagagagtttgaaaacagcaagtttactgaatactgcacatctgaaggcatcactcatgagttctctgcagccattacaccacagcaaaatggcatagttgaaaggaaaaacaggactttgcaag

SEQ ID NO: 24857 - DNA, 375 bp, Glycine max
  unsure at all n locations
cgttttaaaaaacattaggaatcttattcttataactctttcccataagtacaagaataaggaagaaatatatgcataataaaataagtcatgtgatacatagaatgatgaaaagaaaacaaatcgcataacagaacgtattacacaccgtgcgattacgattcatataaccccaaaatatggagaaagagcatgcttgataacaattcacttccatcacaagaaaaaagatctgataccgtggactgatcaaacgcatatttgaaaaagaaaaagaatagttatattttgatttcagtttatggccanaaattgacggtacaaaatgtatgaagagagtttagtttaattaattaaacagaatataccaatatt

SEQ ID NO: 24858 - DNA, 375 bp, Glycine max
agcttcaaaggcttagacaagggactatgagtgttgaagaatatagacaaaaaatggaattactccttttaagagctggacttatggaggaggaaagaacaagcatagctaggttccttagtgggcttaatatggaagtgagggacaaggttgaactccttccatatagggacctagatgagctagtccaactttgtataagagtggagcaacaacttaaaagaaagccttcttcaaaatcttatggctctcactcttatccaaggaaggaccaagcctatggaattttaggggctgcaccttcaaaacccaaggaagataagggtaagaccatagagaaatacacccctaagactagttcccaagaaaggacta

SEQ ID NO: 24859 - DNA, 355 bp, Glycine max
agtttgtattgacttatacccagattccacggtttaccctgtagatagatagaattcataacttagatggcatatttctcccaaatgcatcttgagtaaagtcccattgttatcgataaaattgctgtaatcaggctctacacatgcacggtgtcagagggttctcccacaggtcatagttagggaaagtctcttctggcaatcctgtccgtgtctggtgagtaacaacaacatcttctacaaaaggagcccaacccatatatggatccccaaaagacttggacatcagccctttgtcaggcttaattgattctaaacggagacccatgtatcttcgtgctccaatgatcagctt

SEQ ID NO: 24860 - DNA, 350 bp, Glycine max
agtttgcatttttctatcgaagaaaaaaaaattatatatgcaatgatataataatgaaaacaaactaagcaaaatcatgttcggctgcaaaaagtaaaaacaaaaagaagttcaatccacatgtgttgaagtaaaggaactacatcagattcatagaatatgttcagaaattcaagggttgtttgcgatatttctgcacacaggtataacgcaacaaagagttgttaaattccatgcttcaatatttgattagatacaaaatagtatacaaccagtagagtttatgtttgaaatattctcacaatacgaattcaaagaaatggaatgagagaaatacaaaacatagaaca

SEQ ID NO: 24861 - DNA, 270 bp, Glycine max
agtttacgtagatctcatgataaactaattgtcacatagcatgacaactctacagagatcaagctacagttatagaaattctaccctcaagctaagacaagaatgatagaataaggtcccacgaactcacttggacagagtatgagtgatgctttaaagtacgcatcgcacatcgagagtactaatgaagactgtgcaaatccatggagagagagaatgccaatgccaagttattgtatttttggcaacgcgagtgaaactgctggtaca

SEQ ID NO: 24862 - DNA, 380 bp, Glycine max
cagctttgaaaacatggttggtccaaaaacatattttaagcatgccacaacaaatattaaacaagcagtctagtagaaaaacaacataccaaaaaattatattagaccatctctcaacctggactacgttcagtgtacgctttgcaccaagaacaagtacttagcattggttctttatcaaacccttcatatgctgctataacaattggtattctctaagcctctatgagtgattcttaactattctttcataaagtctctttgagtttcaccccaatattttttaggcctctataggcactatccaagtattctttcaaacaatcttcagaggttggaacacccatgagattataccaattaggtacgtacttaagcga

SEQ ID NO: 24863 - DNA, 360 bp, Glycine max
  unsure at all n locations
agcttcttatccaaggcactctcttggtggtgaaactctttcttccatggcttattccctagtagatggggccttctctcaactcttctcctttatcttatgctgcatctccatggtggaaaatcaccattgaaggacctcattgaagctcaaagatccagccttcatagaagcttcacaagcaagcttccatcaagtggtaatcagagcacaagagcttcaagtaggtgctcctgaaacctccattaattttcagctttaccttctcctccattgttgtttcttcatttttgtccatgtatctcctctcatgtcttgtgctaaatgttgntaattctttagaatttccaccaattaaac

SEQ ID NO: 24864 - DNA, 365 bp, Glycine max
atcttgttcttgatttttcctcatttctttaacaagctttgaacaatatacttgtccttcatttaactgtctttgggcttggcggccgcgctcaacaaagtactttcgacacctactatacgttgatttcaccaatgctgttatgggaatgttgcgacaatcctttaaaaccttactgatacattctgagaggttggttgtcatgtggccatatcgacgtccttctttatcataagccatcgtccattttttctttgaaatgcgatcaatccatgttgctatggctggactcagttgacgaaatttttctaaattttgataaaaaaaaatgtgcttttaaggagtgtaggctgcataaaattagt

SEQ ID NO: 24865 - DNA, 372 bp, Glycine max
tcattaataattatacaaactttttttttgttttatttaaagaaatatatggtaagatggtaatttcgctattcacaattatgctcctataggttttgttcttaccaaaattagtcaagtaggctatttgatctctctgtttagtattggtatgatttccaatctccttattttaatgtgtgatagatacctatgaaaggaactttgatgttcaatctacttagattgaagtgtttatgtgtataatcaagttacataacttctattacgttggactaagtatatatatatatatatatatatacatatatatatatatatatatgtatatatatatatatatatatataagaagccgcacagaaagctcct

SEQ ID NO: 24866 - DNA, 380 bp, Glycine max
  unsure at all n locations
agcttgtangattatggtgtacccgtcacatgtggtactaggggggggtcgggcgatggtgcaattcgactatccacatccacaaatcacacatatatccaccatccccagttgcccaccttcaactgagctcacgtactcccacgtagcccttatcctcgttcctctcaacaccgggtccccatcaatccctccaagcttccataacatccaagcaatttcaacatccaaacatcatgaactatcaaaaccaagccaaaaacagggcagaggcagaaaactctgcccaaagcacaaaccaataccacagtttttcttattcaaataccccagtaacattctcttcgttccaatttgttcaccgttggatcaactcgaaa

SEQ ID NO: 24867 - DNA, 385 bp, Glycine max
agtcttgcttctacttttacaacttttttcacttagattcttattagtatttggagcttcggttaaaataatgtttcattcttgtatttttcatgtcggtaattccattaaggcaactttgggcacttaaattcttatttgtatcaggtgttctatttgattaaaataatgtttcattcctaagttttcatgtctaaaaagccattaagataactttcggatctcaaacacatgaaccaactgtcaaaagataagagaatattactaagacttgaatatatgaatccatgacggcagctctgggtacttagattcttatttttatccagtgatttggttgaaataatgattcattcccatagatatcatgtcaataaaaccatta

SEQ ID NO: 24868 - DNA, 386 bp, Glycine max
  unsure at all n locations
agcttatgatacttgttaatattttcttactaattgtggttattttatttttgtaataatttcttttataataaactcacccctcgcaatttttgtaccgtgtggttggtacctgtgatgatcgctaacctttgttcgttagagcagaatgacaacagtagtggacaagaagtgagattcttttgtggagccggcgagctgacatgatgacgttgagattattttgggagagagttgtattttgttaatcaactcctccatagctggttccgtaattctttntgttgatttgaagatgtaaatcacatatttaattatatgtatgaacaaatttattttccattatgtgaatgatgtgtactangttactatatatatatatatat

SEQ ID NO: 24869 - DNA, 388 bp, Glycine max
agcttacaaatacaataggtaatatgaaatggaagagaaatggaacgaaatggatcagctagtgctccagagagtgattttctccaaaaatggctcttttcttcctttgcttcttactttttttaaaatcaaggaaaatcttctttcaaaaatatcttcccacttgttattagctcaaaaccaccattatgttcttatcgtgatgctcgcgttaagcgcgtatgtctagctagattaagtgaccacgcggtaagttgcagggtgcgtgcttgcatgtgatagttggctttcaaggttgtttcttgcgctaaacgggcttcttgggctgagcggtccttatgtgctaagtgaggttgccgcattgggcgcgacacttcaattcttcaat

SEQ ID NO: 24870 - DNA, 372 bp, Glycine max
agtcttttctaaaccaccgaacaacatgaagttattctaatttactcatgatattgaatttgagtcttagtatgcaacaacattaaaactttcaaggaaaaaaaattttatagttcataataatcttatttaatttgatgagaattatttgtaattaatagatgatacatgtagtttttgaatttttttttcaaaaaaagtcttactagaaattgctctatttatttgaattttcttttaattggaaaacaaccattgcgagggatataatattattggtaaataaagaaaaggaaaaaaaaagattgatgtccatggaaatatttcaagatatacataaattttgacacctacaattactggcggacgtgt

SEQ ID NO: 24871 - DNA, 375 bp, Glycine max
  unsure at all n locations
agttttnggatccatttgacctctatcatttaaagaatcaagatcatcaaaaccttctcttccatccgagaagttggcaaactcaatattcactttccttcttacatccacatcaagaaagaacctcttgaagcattttaatctttcacgagtgagttccatgtcttgatgtggaggaactcgattagaatcttcacttaaccattcatgactataatatctacaattaaaaagaaatatatacatgattaaaatttatgtaattctaaaaaaaatgtaagtaaaaaagtatagagtcaattagctaggatttaaagaatgagctaaacaatggagagaagtgctactcttagtccaacggtcaattaatatgga

SEQ ID NO: 24872 - DNA, 366 bp, Glycine max
agtcttatcagatgttgcatttcggtatcagctcctcttattgaagaacaatatgcacttcttgcattgtaaatttgctttatcggggtgcaactgttggcattgtgttccttcaacgtcagcaagatgttttttggtttcaccatctactttgtcatatcagcaataattttcttttcatccttagtcaatcgcccagtgtatggatgtccaactaaggacttggccaattcatgattgtgaatcccacatatcaacttcaccatccaaccttcccctccatgcactggtttcccacgaagcctgaagggacaaccacatttcctactcccagtgtcttttctaacgaattctttattcctacac

SEQ ID NO: 24873 - DNA, 270 bp, Glycine max
atcttgcgaagtcaaagaagacaataacgcgcggatcgtatcgaaaccgacattgctgcttttgatgcaagtaaagcgaataacaaagaaatagcggttacagtttgcgtaccttgtagaagactacggtgcggagtggtgtttacgttcgatcgtcggcttcaatcgaagatttgactgaaacgggggagatagtgatgagagagaaagtagatagagtgtatctgatgaaggctaattgtgcgcgagagagaactagagaatagagta

SEQ ID NO: 24874 - DNA, 357 bp, Glycine max
agcttgctctaaatttacattgatgtttgtatttatgggaggaggttatatgccatttttgctttaagagtaacgtcccactggtaaaactaactttccaaatgtttgccttcgcaggaatggccccgaggaagcttgcctcaaagaggtccaggaaggacaaggcggccgaaggaactagttccgccccggagtacgacagtcaccgctttatgagcgttgtacaccagcagcgcttcgaagccatcaagggatggtcgtttctccgggagcgacgcgtccagctcaaggacgacgagtatactgatttccaggaggaaatatggcgccggcggtgggcaccactggttactccca

SEQ ID NO: 24875 - DNA, 352 bp, Glycine max
  unsure at all n locations
agtttccaaggcacaataacatcagtgtatctttcccaagcctcttgggatatgaatctggatctgtcaaatctggcttgggtaggtgtagagggtgcctttcttttccttgaagccatttgcaaaatataagacaaaacacacaagattaccacaggttttttctcaagaaaatagaaaaattaaactgaaaacagagctgggcacttagcgtagcatgctgacacttaacaaaccttatgaaattaacacaagcgctaagcgcagcaagctgtcacttagctcanagacatganaaacattnttttctgcagaataggcttagtgtacaagggcgcttagcctaagtcta

SEQ ID NO: 24876 - DNA, 354 bp, Glycine max
agtttatatgaggaagtgtaaagggtggaaccttcttgttttatttggtgaacaccaaatggtaccttgaaatatttcccgggggtcaagaaaaccttgggaccttaagaagggtgcttttggcccaaaaccaacttgaaccattcccaaccaaccccggcctaatcaagtaatgagaacctgggatggacctaaacattccaactcctggcagtcaacaaaataaaagaacatggaccacaaagcaaagaggctggtggtggctggccagctatgaacttgattgatatatgagatatggcctctggtaatcgattaccaagggtgggtaatcgattacaaggcttaaaaatg

SEQ ID NO: 24877 - DNA, 383 bp, Glycine max
agcttgctctaaatttacattgatgtttgtatttatgggaggaggttgtatgtcatttttgttttaagaatagtatcccactggtaaaactaactttccaaatgtttgccttcgcaggaaatggccccgaggaagcttgcctcaaagaggtccaggaaggacaaggcagcagaaggaactagttccgctccggagtatgatagtccccgctttaggagcgcggtacaccagcagcgcttcgaagccatcaaggggtggtcgtttctccgggagcgatgcgtccagctcagggacgacgagtatactgatttccaggaggaaatagggcgccggcggtgggcaccactggttactcccatggccaagtttgatccagaaatagt

SEQ ID NO: 24878 - DNA, 380 bp, Glycine max
agcttcaccaccaatgttacgacaattgttactttgaagatgttatataggttttttcaatgccacctggttaataggaacaaataaagattcaaaacaacaaagaaggttgaaaaggaaaaaagaaaacaagatggaaattacgaaaacataggaagaggatatgatgtaagttaacaagattcaatgatggtgggaatagatgtgattcgggaacctaccagccaaggagagattttgtttagaatttgtaaaacggacggtacagaagaagggcttagattcctcaacattttgaggccatgtagggtgtaaaacatatgttcccttcacaatgcaaacatatcaggatatactcgtgaagatactgatgagttcat

SEQ ID NO: 24879 - DNA, 384 bp, Glycine max
  unsure at all n locations
agctttcttnccagcttcaaactttaatcttcatggaactcatgttggttcccctatctcttaccaaaattgcacttactcctaaaaaggaacattgttttataacaaattaaggaattttcactaaatgattttattaacaaataaatgtttaaagatgagacatagaatccattctcgattgtaagttctttttaatctaacaaataagttcataattttcaacttatcagagaattgtctaatacttaatatatataataatagtaatttcgataaagatattcatagataattatagtagtatcgtataacagtttgtaatatactttgtaagtagattntatgatagtgttttcgattaanaagtaaatttcaacaatt

SEQ ID NO: 24880 - DNA, 370 bp, Glycine max
agcttctagccaaatggacttaccttgaattaattcctttgatagtccttttgagccttgtttccctttccttgttttgaagctcactacaagccttaagtgaaaaaccatgatatcaccatatccttaaggaattttggagctttggaattgttttgggaataagtgtggggggtttttgtttcattggacaacttgttttgttggctatgcttcatgatgtattttgggccatacttgatgtacattgtatattgggtaaatgttggacatgctgaatgaaatgttgtttctcaaaggctatagagtaaaaaaaattcaaaaaaagaaaaagaaaagcaatacagttgagtgaataagatcttaaatg

SEQ ID NO: 24881 - DNA, 369 bp, Glycine max
tttcatgcaagcttgggaggattgatggggacccggcgttgagaggaacgaggataagggctacgtgggagtacgtgagctcagttgaggtgggcaacaggggatggtgggtttatacgtgatttgtggatgtggagaatttttttgcaccatcgcccgaccgccacctagtaccacatgtgatgggtaccccataatcctacaagcttgaaatgaggaagtgtggaagggtgagacttcctacttttattcgttgaccacagagtggtacctggagatatgtcgcgggggtcaggagaccttgtggatgtcaagtggggtgctattgcccaaaaccaagcttgaccaatcccgacccaacccgggcat

SEQ ID NO: 24882 - DNA, 371 bp, Glycine max
agctttaaaatttgaattaaaacgttcaataactgctggtaatcgattaccatatatgtgtaatcgattacacagtgcaaattttgaattcaaattttaatagctgttgtaaatcagttttggccactggtaatcgattaccagagagtaaatctgttgaaaaaacctttttaacttagatttcttggccaaaccttttgcgacttcaattggaattcccttcttatttaatatacccttcctaagactctagagattgtcttgatcattcatcttgaatatctttgtcttgaataaatctttgagaagcatatgattcatgtaatcctttggcatcatcaaaacattcagtttgatcctttgtctacatg

SEQ ID NO: 24883 - DNA, 373 bp, Glycine max
  unsure at all n locations
agtttatgctacaaacatttataataggcctcctcagcatcaaaaccaacaagagcagaataattatgatttttcaagtaacagatacaattccgacatggctcccgaccgcacccaactgcagaatatgttcaagaaagagggcgaaacctttaaagaatacgcgcagcggtggagagatttggtggcacaagtagctcctcccatggttgagagagagatgatcaccatgatggtagacactctgccagtgttctactatgagaagttagtaggttacatgccgtccagttttgcagacctagtattcgccggngaaagaatcgaggtaggattgaaaagaggaaagttcgattacgtttcctccacgagt

SEQ ID NO: 24884 - DNA, 375 bp, Glycine max
  unsure at all n locations
agtttaggctaaattagtctaaactttcgtaagctatttaagctgagtctagtccaacaagagggatctgaggatgaagcttagtttaagttagtctaaacctatgaggactgcctaaattgagcctagcccaacaagagggatctgaggacgaagcttggattgattcagtccaactagggatcgaggtttagtaatttaggctacaacataaaacacaaaagcatgtttgattagagaaacatccttatatgcatcagctggtctgttagaaaaacctaacacttctacctactactgtcaatnttacttgtatttttactgtttttaacctagacttagtttaaacttggtctaaatcatcaattatcaatg

SEQ ID NO: 24885 - DNA, 369 bp, Glycine max
  unsure at all n locations
atcttcattcatcttggtcaaaccattcaaagacttactattcacccctaaaacaagttttttacctgtgtaattataatcatatatatacaaacatcacaaaccatcaccttataattaattaattacatatatttaaattaaatttaattattcttacaatctaattaaaatcacttaactagacattaaaaaaaaatataatgttactataataatttattttaactaataattatggatacatagtaaagattaatataggacataggagtcttttttttattcattaattcggttnttaaaatatgctntgtatccaataataattaaaaaaattaaaagtaatttatttaatatagttaacta

SEQ ID NO: 24886 - DNA, 365 bp, Glycine max
agctttgatgcaacatttggagaggttaatgaaacaacgagatgatgcgctccatgagaggttggaatagagatcataatgaagaagaaaggaggagaatagggaatgatggtgttcctagacaaaaccgaattgatggtattaaactcaacattcctccatttaaaggaaagaatgatccggaggcctacttggagtgggagatgaaaatagaccatgttttctcatgcaacaactatgaggaggaccagaaggtgaagcttgccgccacggagttttccgactatgctcttgtgtggtggaacaagctacaaaaggagagagcaagaaatgaagagccaatggttgatacatggacggagatg

SEQ ID NO: 24887 - DNA, 370 bp, Glycine max
  unsure at all n locations
agtttcatctaacanagcaataataccaatgggtttctgcaaaagaatgcaacaagtcaataagaaaatgaaattcaaaggggaaaaaaattatttgtacataacaatgatganagcaacagaatttaatttccaaatgaagcaacataatattcattangcatgattatggttaaatgaatcctagatatgcagatcttaacaacttatccttcanaagaacccaatccaacacttattcccaacattatgtcaaaatcatatatatgagatccaaacattagaccaaaagcacagaataagacaaaggaattgatttaatgcggtctagttaagtagttgctttctattagagagaactaatctatat

SEQ ID NO: 24888 - DNA, 426 bp, Glycine max
  unsure at all n locations
agtctttattcaactcaaacatggcaagaagacagtatatactaggcactgaagatttcttaaaccttatcacccgtaccgactattgaagaaagcttttaatgaaagctaggagaataaaagtgctccttgaccattagctagaaatgaagtttatgatcaggtgaaggacatcataactatctttgggaagacccaaagccatcatctaagactaacctatggaagaaaaggtcaatattttttatcttccatactggttcgatctacatgtatgtcattgtctagacgtaatgcatgtggagaaaantttttgtgatagtttaattggaacccttcttaacattaaaggcaagacaaaggatggtttgaaatgtcatcaagacctggttgacatggaaatacgagagcaattgcatttgatat

SEQ ID NO: 24889 - DNA, 454 bp, Glycine max
  unsure at all n locations
tgagttcctaggcctagaattgcattcgggcactcattttanatcattcatgttgtccctatatatacaaaatagtctcacaatcccaagcttacaaaaccatgctcatatgtcattgaggcatttcaccaaggacttggtggacgcatgtttatgcatgaatagcaagagagtgggggcaatgtccattgcttcaggatgcaccctangcctaaggccatcccctacaacccctcaattcaaaacaatcatgcatgaaaacaaaccaaaattgccccacaaatttgagcacattcccacaatttagagcaccaaaagaggaccaaaatacaccaatggaaagctatanaactcaaggatgagatacttacttgttggagtgagtaggagtaccacaaatgacagcaaaatgtaaccaagggtggcttgtgggagcanaaaccgtgagtcccgt

SEQ ID NO: 24890 - DNA, 419 bp, Glycine max
agcttcattgcctaataggccaacttccaacagcgaaccccaagagactcagcataaggatgcacagaccaaagttgcgtatgtaaaacaattgtatgaccaagtgaaggtgcaaattgcatacaatattgagtagctatgccaagtcttctccaacacaatcggatagtaatgaaacttcttcaacactgagtttgagctcttaacataacgaaggatcttgcgaatgatgtaaggatctgagctcgagtatcctgtattgagattctaggaatacaacttctcgatgcatgaatgctatgagatttatgatttatgcacttaatgtttgaatttaagtatcatgatagagccatattagagtaaatcttctctttcagcggcgagccgagaaagcgcaatagacacacaatcaccca

SEQ ID NO: 24891 - DNA, 443 bp, Glycine max
aggaaggatgcttcaatggaggaaaagaaagagggatataaagagttaggggggagcacgaaattgaaggaataaaagagggggagaagtagaactttgaagtgtgtctcataagactttcattcatcaaagttacaacaagtgttacacatgcttctatttatagactaagtagcttccttgagaagctttcttgagaaaacttccttgagaagcttctttgagaaaacttccttgagaagctagagcttagctacacacacccctctcataactaagctcacctccttgagaagcttccttaagaagattcctaaagaagctagagcttatctacacacacatctctaatagctaagctcacctccttgagatgagaagctagagcttagctacacactccctataatagctaagctcacccccatgacaaaataagatga

SEQ ID NO: 24892 - DNA, 525 bp, Glycine max
  unsure at all n locations
cgccccccacaaccaaaaggaaggcgaaagggnaacgaaatacgaannncannagcaaggnnttgggactcgagacancagcgaaaaagccgggcgggaacaaaagcgaacgcggccgctatcttaccaaaaccgggggaagaaagagaacgagcccagccgccactcggacccgcaaagaaagcacacacacagaagagagtgagaaccagacgagacaaaaaacgacaccacaggccaggacaaacaagacagacagcgcacacccaaaacagaaccagacaaatcacaacaaggcccacgagagggagcgcgaaaccaacaaagaagaatcgacgacgagcaggaactacaaaggaagccaaccaacacccaccgacagacccacacgagcacaagcagacacaatgccaaagaggaaaccacagtcgccgctaccaggaaagaaacaacaaangcagcaggcgcaaccacagacaagcaggctcaaaccacacgcacggaaaggaggccacctgggcaccg

SEQ ID NO: 24893 - DNA, 416 bp, Glycine max
tgtttggttgtgtttcgcacttgttccaacaagacacaagacatccatgtccgctcctgagccatcgctcgtgtactgaaaagaggagaatagattgggaccagctcttggctgggataggtggtagaacaatcaattggttcccccgatggaaggaaggaaaagaaggagtccttttctcatgtggaggatacccaaacattccgctggtaggaacgaggggttgtattaactacaatcccgcgctcgctataagacaactagggtaccccatgaggggagcaccgacggaagaaagcatgtctcctttccttgtaagggatttcgacgcacaaaatttcaaggctatacaaagaatccacaaggcatgggaaaccccgttaaggaaagatcaagaacttagaggcattcgtaat

SEQ ID NO: 24894 - DNA, 437 bp, Glycine max
cttgggggctgaaaactatataacagcaccaaggttctagtttagctctctctcctctctctcttctatttttcatttttagtttcagtctctcttctctttctcttttattttcattttttttacaattccagttcatacttttagttttatcaataaaatttcgttctctatttgaataatggaaggctaagtccgcagtgttgttttctcttgaggatcaagcaaagttctctttgaggttctattattactgttaaattttgtttagtttttcctcttcactaattactctgaatttgttgctattaattcatgcatgcttagtgcttgattaattgtctctgcgcttaatttacgttcatgcttaatgatcgtttatgagtaattggtgtgtgtgatggctaatcacataatgaatgctttatggttaaatt

SEQ ID NO: 24895 - DNA, 321 bp, Glycine max
ttgcttattctaataaccctacaaaatataattacaataaggaacctcagaaccaagtaggacaaatattcatagcggattatgcgcgactgcatgacatgttatatgtgtatctatgaagtgagccacctcatgattggttagttgcaaaagtgagccacgtctagaattatggccggctaaaatattgaccacagcgtaatccaaccatcaataactagtgaaaaatggcagattgggagtagctttggagacaaaatggaacgtcaaaatgctaacccacaggacaaaaagatggatcacacagtatcacaggtggtc

SEQ ID NO: 24896 - DNA, 232 bp, Glycine max
attcatgatgttggctacacattcacactgtctacaacaacggcgccttaataaaaattactctcgactcggctcgaacgggaacgcaataaacttacatgctcttttctaattgcgtatccatgttctcattcaattaatattatctagatacgatagctctataaaatctattttaaaagctagacatcatcctgttcatcagcaactttcaacctagctaaagacgctc

SEQ ID NO: 24897 - DNA, 419 bp, Glycine max
  unsure at all n locations
ttcttttgtgttaattagttgcattgtagcgtttagagtaattgtttgaacaacaactaacaaaaaataattgtttgatcaatttcaataaacgtcaagagagaaaaaaaaagagagttcgatattaggtttgataaaaagtcttctaatacactatttattattaattaaatttcttaaaaactgattttgagctataaacataatgagggatcttgtgtatgtatgttggaactgagcttgattatcctgtattgagattctaggaataaaacttctcgatgcatgaattctataagattttttattnttgcacttaatgtttgaatttaattatcttgatagagccatattagagtaaatctcctctttcagcggcgagccgagaaagcgcaatagacacacaatcacccatggac

SEQ ID NO: 24898 - DNA, 453 bp, Glycine max
  unsure at all n locations
tctttcagatcgtaacatcaaattacacttatgaatgtatcttaaaaatatgtctaatacaaacaaatcggaagcaccttgcaagtggagtcatttcgtctaagaaaaataaaacttatacaacaatgacaatcaaatcttgagtcattagtcgggcagctacgaggaaaaatcaatggcatgtcgacattgggaaagcatgatgacagattctgaatgaaatgtaggctacaattggacaggagatgtccaatgggtggggggagcaaacaaaagagaagttacaaggcatcctcttgatctctcaaccagcaaacacacataaagaacattctcatgataacacanaaaattagcatcatatcaaacttagtacataccaacttcttataatccacataagaaccacacaaaanactaagccataaacaagaacaagatataatgataaac

SEQ ID NO: 24899 - DNA, 403 bp, Glycine max
  unsure at all n locations
tttctttcaccaaataccgtgtggaataaaagagttcatgccttttttttcttggacacaaaatgaaagtcaacatagagaagaatgtgagtagctgtaaatgtaaatatatgattctataggccagtaaaatcaatttatattttcaacccccaaaatattttcaaattaatcataaataggcctatgtgaggtatctgtaaacctaaatatatgattctatgatgatttctatctacaatgtttgctaaccatcacccactgactgacccacagatttataggcagaattagtgccaaagaggaaactaaatttgcagtaatcaggaaggaaactaanattgtagtaatcacaaccatagacatttagtttctaaccttactcctgtgaaagtgtccttct

SEQ ID NO: 24900 - DNA, 579 bp, Glycine max
  unsure at all n locations
cgctcacgccagtcgtcgctactacacaaacacacatgcgtcaggtgtgtgcgtcnccctccaaccanccncccnnccagcgcgcnnctttgaccccttgganccctagcctnccgcgacccaaggatactgnactcgagagcatctaaccaaccagctcagattaatgatttgactgccacagtgagatacaccccatatgatagaaacactgcagaacgatctgacggagtcataacaagatcagtatacagggatgtagcatactgcatgatcatgcccatcatataaccacatcctatgatacagtctgccaataatgacatggccattgcacaggaagatgaactccaccggtacaccatgaatgatgtggggacactccgccccaaccccgatgacaaaaacatcattggaaccagctatagaattagaaagagcgtggattaacgaagtaagggagcaaggaacaaggctatgacatgagctcagggctgacaccaacaagaaagaatagactggtaggaacccctgctctatggcaacaggcaacgtaagaacaagcgttctatgtaggag

SEQ ID NO: 24901 - DNA, 314 bp, Glycine max
  unsure at all n locations
ttgcttcttgatgatgaatcaagtttgagtcaggtagttttgatgatgaccaaaagcccaatagaatgattttatgattgagtcacctagttcaagatcaagattgatttcatgattctcgaagagacatcgagaagaatcctgattcangagaagatgaattcaagattcatgagatgagatgaagaggcaacacagtcttgacttctccacggaagtattgaaaatgatgtttcaaaaaccatacatatcacagtcttgccttataaaagagtttcttcataatctcctagtgaccagagtatttacacttt

SEQ ID NO: 24902 - DNA, 415 bp, Glycine max
  unsure at all n locations
ttgcttctcccccaattttctataaatagggggagaagtgaagtgaaaaagggttcagccccttaggcacttatctctctttcgaatttgcttggaaaaattgtttctgtgaagaaaatccaagccgaggcgcttctgaaacgttttcgtaacgtttccgtgaggaatttcgcgaaggtttcgaccgttcttcgacgttcttcattcgttcttcatcgttcttcgatcttcaacgggtaaatacctcgaaccaagcttttcgattcattctatgtacccgtggtggtccacattgtgtttcgtgtatttttattctcgtttcatttactttntatacccccctttgacgtgcttaagccattgtatttaagtcatttctcgcttaacctanaaataaaataaatttccaccgatc

SEQ ID NO: 24903 - DNA, 441 bp, Glycine max
  unsure at all n locations
tgccacccagctcgcccaggcgagctcttctagccctggcgagcagggttgcttcctccagaagtaacagccttctggagggcccaagtgggcctggttgctatttgcacccccatttttactaagtacaccccattgcctttttttttgtgattcttttttcgtaaagttacggaaacttatgaatttcgtaacgatacttgttttctttccgtaatgttacggaaccttgcggattacataatcatcccctttttgacttacggaatgttacggaacctcactaatcatccccttttttgatttccggtgtgtcacggaaccttacggattgtgcatcaatattttcttttgttttccggcatgtcccggaatttcacaaattgcctaatgatgggtgccaagcacctcacaaggaccanacaaaagttgcatgtcatc

SEQ ID NO: 24904 - DNA, 367 bp, Glycine max
  unsure at all n locations
tctannttttctaattactcgccacgatcttaatttgatgttacagtttgagagagagtatgatagtgtagagttatgatcatttaagtattgtaaaaaccagataaacattggtctacgaatttataattataaataaagagtttatatttcgaatgtcaaatgatacatatcttacatataagcaggtgatctatgtgtctgagatgagaggagcatggcctgaggataaaacaacgaagcgctaggctcttgtagctcatacatatatagatgcatggatgctatgagacaatgacctacgacctgtggagtaagtgatttatataagagagagaccctggcattacatcttcagagatatcga

SEQ ID NO: 24905 - DNA, 412 bp, Glycine max
  unsure at all n locations
gatatatccactcaacttatgtgcatnttatttcttatactctccttttacattagattatgacttagccttctattttcttattcataaccatcattatccaactagtaccttacaaaacaattataaggtataatccctctcatacccctaaggtggcataaagcattttcaattgatgacacacatcttttgcataattactagacatgcatctcactctctatcaaacgggaataacacattaacacacatacataacatgatcaattactcatagtctagacatctcatcagttcacatctcacagtcattatcatcgcatacattcaatatatagtaccaatcatgaaatagacacacgtgctttacataattgtattacaatacccatcaccaaggacaaatgta

SEQ ID NO: 24906 - DNA, 407 bp, Glycine max
  unsure at all n locations
tgtctttgcggaacaaagataattaatggcccatctttagacaaataagaaacacagagaactatattggaagcacctggcttgcagatcatgttagttgtgttatgctgacctctccaaaaaagtgttaacgttatcgtgttgtactcaactctacaaaaagttgatgtcatgatgttgttacaaaatacattgcagttaacaaccttgcactgaaaaggtatatgatgattatgaatacgttttaatgtcttgattaattatatagcaagttttaggacatactacagattttgaagtacttccttgtaaaccacgttggttgttatattatgtggttttcctttnttatcacgaataaggattttcaatccattcttgctttgaactcttaagaatgcgacata

SEQ ID NO: 24907 - DNA, 323 bp, Glycine max
tacattacatatattacagcatttcagtgcactgtgaagtgtaaaacacaatttagattggatagaacagataaagggagaatgttcaattaccatagcatggcaatagctgaccccagatatgagtcgctgaaagaagaatccagcctgaatcataacaacgggttacaaactatcgcagaataagtacaaacttatagcattcaggtgtagaataagtaaacaaaataaataagaacctcatcctcggtaaaacgcccagcattgcagattattttaaagagctcttccccagatgcatattccattacaatagcaagatg

SEQ ID NO: 24908 - DNA, 414 bp, Glycine max
agtttgtttatatttgcaaccttttcgatgccagaaaacgttatcaatggaccggaaacaacatcgcgtgttactaaatacctcatgtaaggttctgcatgagcctccaaataaggaagtccttcgatcttaagtatttgatcatagacacccttgttgaagctgtcagccacggattttgagaccaataagactaacatcacaagtggaagtaacaagagatcattagagagctcaagcaatatgacacaaagagacactgtcattctcatggtgccaccaaggaaggaagcagctccaagtaaggcaaagagtcctctgtcgagatcggtaatcgtttcgaagagccggtcgaatagactgccataggcagcaccagcacgtatgaccggaatgaacagcccggatggaata

SEQ ID NO: 24909 - DNA, 339 bp, Glycine max
  unsure at all n locations
gagcgctctgactatgttgaccaagcgctttgacttttatctcctgncactgagctgatgatagtatggaatatacatcctggtggataaccatgcctgcggaagccaacatctatagtgcggccaattctaccagcaatgagagcgcatctcaccactacagacctgatggatcttgtaattgctaccatcattatgagagtagcgcgttcgattacatacacttttatagtgaccgagagaccacaaattccgcactttgtgtactacttgctgctcacatcatttacagataataatctctggcatcaacatggagacttccacggacactagcac

SEQ ID NO: 24910 - DNA, 424 bp, Glycine max
agtttgtattaattcggccagacgagggatcaagggtttagtaatttaagctatagcatagaacacaagagcacgattgattagagaaatatatttctatgcatcagcttgtttgttagaaagacccaacatttctacctactgctgtcattttatttaccttgcattttatagtttttttagcataaaagtttggttaaattctgtttgaaattatcactcatacatgttctctcaacaatgcttcgattctgaacttaattcaagctaacattagttccctgtgttcgatactcagattcatccattttaaattttaaatacttgacgatctggtgcgcttttcggtaaacccccattgaaatttccttgagacataaatgaacaaaaagtaactgcattggagagtcaacacagtctaagg

SEQ ID NO: 24911 - DNA, 445 bp, Glycine max
actattcacacaatttaacaagaaacaatgaattatcaactttgaaaattaattgcattcccatacctagatctccttctaaattccaccgaatttatatatgtttaaatgcatggaagcaaggattcaagactagctgtggatcttttattggtcttgatggttgttttttgaaaggctactatggtgatcatttgcttgcagcagcgggacaagatgcaaacaatgcattttttgtgattgcttatgcggtagtaaatgttgaagataaagataactggaagtggttcctcacattgttacatgaagaccttggagactgcaagcaatatggctgaaattttatgttagacatccaaaaagtgcaattcaattgttttgctttgatcaattcatatatagaatgttgtaattctgattgcctgcatgcatatgtgatagtttg

SEQ ID NO: 24912 - DNA, 411 bp, Glycine max
agtttgtgttggcgaagcaaaaagccattgcacttgaatatggcgattgagaaactttgttgttgcttttgtcaacaaataggacacctcctatctaaggatccatgcacgggtaaacctttgtagttgttctacgttaccatcatggttatttatttgtgaaaaatggtgagtcaaccagcttaatttaaccacattgccttgaagttcaccttcctgtggtctgactcccaacaatttttcacacaattcagcccaatcaaaattagtttgaccaattaatggtgccccatcaacacgcagacctaataatacaaagacatcttgaagagtaatcgtacactctccgcatctcatgtgaaacgtatgtgtttcgggcctacatctctcaatcaaggcagtaattaatga

SEQ ID NO: 24913 - DNA, 503 bp, Glycine max
  unsure at all n locations
cacgccncaatgtacgttgcattgcgtgantctatagaatactcacgcttgtccttgcgttacacacgatngngtacacacacatgtgtctacgattagacatttcagacacaagactgatgcagcacacataatgtctacaactcctgcactacatacattacaccgttgctgagcacagtgaagtgtaattaaccacttgtatagtgaagtacacaaaaggcgggtatagttaattatcataccatggggtttttggacccctgatattagatgctgacagaagaatcgtacctgtatcatatctacaggtgtcatacaaccgttgaataagtacaacctcctctcattcacgtgtagagaaactaaacaaattacatatatacctcatcctcggtaataccccacattgcagatattctcaagatctctgcaccaatgctatgccatacaataccacgacactacgtgctaaatacctcctctcattatttgacaccccc

SEQ ID NO: 24914 - DNA, 407 bp, Glycine max
agtttcttgagagagtcaaagatcaaattgagaggaaaaataaaagctatgctaaacaagccaacaaagggagaaagaaggttgtcttcgaacccggagattgggtttgggtgcacatgagaaaagaaaggtttccggaacaaaggaaatcaaagcttcaaccaaggggagatggaccatttcaagtgcttgaaagaatcaatgacaatgcttacaaagttgagctgcccggtgagtataatgttagttccaccttcaatgtctctgatttatctctttttgatgcagatggagaatccgatttgaggacaaatccttctcaagagggagagaatgatgagggcatgaccaagagcaagggcaaggatccacttgaaggacttggaggacctattgatgaggacatg

SEQ ID NO: 24915 - DNA, 454 bp, Glycine max
  unsure at all n locations
tgaatcggacatccgtgtgaaaagttatgacgatttttatttctcttgagcttccggtgancaattgcgagcttctcgatatgtgatttgcctgaatcggacatccgtgtgaaaagttataccagttgaatttctcaagagcttccgttgttcagttttgagcgtctcgatatgtgatttgcctgaatcggacatccgtgtgaaaagttatgaccatttgaatttctcaagaccttccgatgatcaatttcgagcctctcgacatattatgcgaccgaatcggacatccgtgtgaaaagttatggccatttgaatttctcgagagtttacgatggttaagttcgagcgtatcgatatagtatacagctgaatcggacatccgtgtataagatttgaccattaggattcctcgagaacttccattgttcaatatcgagcttctcgacatattaag

SEQ ID NO: 24916 - DNA, 416 bp, Glycine max
  unsure at all n locations
agcttctatttatcaaaataccaggggccgcctaatgtcaccaactgcagatccagtctatgaaataattggaactggaaaactcccctttctatttattagattgtgactcccttctttggcctccaaatctcgaccattcgagctttcatgatctgaacccgaacctctctctctgttaaaaccttccaattaaacatagacctaggttaagtatctggttatgtgcctccccaccattgaaaacaaagccatcgtcctccttaaccatcgagagtctctttgtctccttctccaatgaactagccatatctcacacttaacatctattatttgtatcactcacaagcaaggcactcactatcacacaacanactctcaacggaggagagatctcacctagataatcataatat

SEQ ID NO: 24917 - DNA, 461 bp, Glycine max
  unsure at all n locations
cgcttctattgggcctaatctagtcggatccatgtacttgtttcctgtactctttttattgcttcttgcactttccattttgcattccgaaataggctaattacatttcgtaatggacttttcattatatactgaaaagtgtagaaaacaataatgagagtgcataaagtttatctacactctttttatttattatgaaattgggcttctgactcattttgtccattgaaaactgaagttgtgttttaatttaagtagttgctatttacactctttttattactaatacacttcacttgtgttatcaactttaatattattattttgaattttgaagtatgaaattatggatgaacttttcttaatcaaataatattagttatatacttatatataatatatacatatataantttaaattntttaatatagattgcgttaaacatgatcaattattgacc

SEQ ID NO: 24918 - DNA, 489 bp, Glycine max
  unsure at all n locations
agacggtttatagacttgatgacacgnggnnaaacagctcgcgcgcgaggatcctagaagacagcggcggcaagctagtttttagggcgcccaacggagggggagtgagaagcttaagcacctgcgaacaacacttaagcgccgatgaagacagagctatcttctgaagatcccactcgtatggtgtaatgtctcaccctaaataactcacgctagaatgacatggacgcagaggcaatgcaggtgtgtgacgaataggtgagtgtgacttcagagagataataggcactagtcatacacacaccacgcagctacgtatctgaactcatgtaacaccccaatcgaatccagcgaagggagcgagaattcatcggtgtcaagtctacgacgtcaacagatggtgacctaaagggattacctgctactaccaatactggcaacatgcatagactgaaagggagcgcatccgcaagaactccatagctaccc

SEQ ID NO: 24919 - DNA, 483 bp, Glycine max
  unsure at all n locations
cgatgcnccnttgatacctttggaattgctagcacattcagnacactntcgactacgtgacctttgcaccatattacggagaagcaggggttgtccctttgatttataggctggcgatggcttgtgtagatccacttcctacacacactgcctaagaggtgctccattgcgtataaacaagcacaaagaaggtacaggcgatgggatcctatcctccctgctcgttttgtcattggtatcgaatacctatcatagtactgcgtcactgccgtagcatcatacatacaactcctttaccacacgcggttgtgcacgctgaatgtataaattgcgattgcggatgaattcctacattatacacgacatcttgacattgaatccctaaggagtaaatgacgaatactcgctgtgtcgtattcaattctaatccacagtaattcacttgcagtgcgtcataagctaactctctctatattttccttc

SEQ ID NO: 24920 - DNA, 315 bp, Glycine max
cgagggatcaagggtttagaaatttatgctatagcatagcacactggatcacgattgattagagaactatatatatatgcatcagctagctagttataacgacctcccagttctacctactgctgtcagttacatttaccttgcattatatagaatgactagcataagagccatggttacattctgaccgaaatatcactcatacatgtgtctgtcaacaatgcgtggatactgaacttaattgatgctgacattagtatcctgcgtgcgatactcagattgattcattttatatgctagatacctgacgatctg

SEQ ID NO: 24921 - DNA, 442 bp, Glycine max
tctctgtcttcatggaccaaaggtgtcattccctgcttgtttatatgaatccgttgcgacgaatgcatctctgtgaccgctataactgttacaaatcttgggctacaacgtactctccacgctctaaaactctcatcctatcccaaactgctcactatggatattagccacaacagtactagtggaactattcctcagcaaattgctaacttgtacagagacactcaattgataatgagtgctaataattctagaggtccaatccaccattacatgaggaagttggctagctcgtcaattctaaacttcgaatacactacactctctggctctattcctgaagagattgcatactaccagaacttgaagagtctattacttcaatggaatcaactttcaggtaccatacctccaacaactggaaggttgtccaaccctgtta

SEQ ID NO: 24922 - DNA, 402 bp, Glycine max
  unsure at all n locations
tgttttgangctgaggacctatataacagcaccaaggttttagtttaggagttttttttagaggagaataatttcagggttttgcaattccagtttttactgttcatgcacactattcacgtagaataaaattcgttttctgtaatttcgtttctgcttcaatctacaatttcattttctactgattaatggaaggctaagtctccagcgttgttttctcttgaggatcaaacacaactctctttgaggttttgttattactattgaattctgattagttgttcctcttcaccaattactctgtatttgttgctattaatccatgcatgcttagtgcttgattaattgtctctgcgcttaatttacattcatgcttaatgatcagtttcattcatgattaat

SEQ ID NO: 24923 - DNA, 371 bp, Glycine max
actactatagaaagacacttcaatctgtattaggcttctactggtgaaaaccgagttgaagcccgatgtagaatgtatgttgttacatcgatttaaaaaaccgatgttaacataaaaatgttaacatcggctttataaataactgatgttataaagaaagaagtacaacaaaatatgtgtatgcgtgagggacgttgacatcggttttctgctaaaaccaatgctaatatgttaatatgttatattaacatcactttttataggaaaccgatgtgaacgttcatcattcatgcacctattttgctgtaataatgtatgtataacatcgattatctataaataaccgatgttaacctatgtacattaacatc

SEQ ID NO: 24924 - DNA, 253 bp, Glycine max
ttgcttatttaaacagatggcctcatcgaattgcttatttccagatgggaattctatccctacacctgcagacttaaggggagagggttaccactactgtgagacccggagcgcattatatatcaaggcattacagctcaatagctgggaagccattgaccatagggccatatatacctcccacatgctaaagagatcaatacatggcttccatcttgtgctgcctgccatataatgcctatacaccatggtg

SEQ ID NO: 24925 - DNA, 396 bp, Glycine max
  unsure at all n locations
gaattaacataagttatgcttgttattctgtgcggataacaaatgctgactaatggagatctaaattccatagaattagaatacgggtaattgagtcataagagtttaaagtggatgacatttttgtaaatgactatataaatagtctaaaaatagaattttagtttaattaatggtgaccaattaaagtgactaattatatgatgtagaataattaacataagttagaattgcaacaccttgaataattacagctcatactgacaaaggatactctgttgttgtattcgtgcatgtatgaatataatctcaatagatatatgtgcttagtcatataatttcgngctatatatatatgtctgtgtgtagtgtgttgacgtgtgcgtgtgtgtgtga

SEQ ID NO: 24926 - DNA, 347 bp, Glycine max
tgcttgtaagtatttattggtataatttgcctgttccattaggcttttaatgtccttagaggttacttcctcgttgacatcttttgtcttgaatggaattgccatgacaggtttattgttactgtctttgatatttggtagctgatgttgtgttgagggaggtaattccgattggattaactcaccatccttcacttgccagtttgttatgacatttgttgttggatcacctatgatgtcttgtttcccagggtaatctatatcctttctgatggcataagcatgaaaccaatcagagataaggacattaattttgactctttcaacaaatgtatagaacttgtctt

SEQ ID NO: 24927 - DNA, 422 bp, Glycine max
  unsure at all n locations
cgtattacatggttttctttaagttgtctcactgacagacatgcaatgtgattaaaaagcttaattgtattcgtgagtatgtttgtctttgttgtcatgttttgttctatccttttaacgtagtctcactggtatgaaggatttatttaccttgccctttgtttgtactccattcctctattgagctgacttcattcagtcaaatgagtatgtgtctacttactcttttatctatttttcattacaactccttcattctcatgtgtatataagtatattcctcatctcaatctttctctgttattgcatgtcatgcttttctttcatatataatgaagcatctgaanagacaacattccttgcagcttcctgatcatgaccttacgttggaagcagcatggcctcaattatttgttgaccac

SEQ ID NO: 24928 - DNA, 407 bp, Glycine max
ttgtttatccaatcagatgggacaattggctacccaattgaatcaacaacaatcccagaattctgacaagctaccttctcaagctgtccaaaatcccaaaaatgtcagtgccatttcattgaggtcgggaaagcaatgtaaaggacctcaacccgtagcaccttcctcatctgcaaatgaacctgccaaacttcactctattccagaaaaaggtgatgacaaaaatttacctaacaatttctgtgcaggtgaatcttcttccacaggtaattctgatttgcagaagcagcacattcccccgcttccattccctccaagagcagtttccaacagaaaaatggaagaggcagagaaagagatcttggaaacgtttagaaaagtagaggtaaacatacctctgttggatg

SEQ ID NO: 24929 - DNA, 434 bp, Glycine max
actcagcttgggccgacatggataatatggtgggtatggtgttctcgtactccttactacaagagcaataactaagcactccaccctggaaatcttcattgagttgttgatattgatgtgcttataaagttgctgatgatgctccatggacattgttgtgtgttgagcttctatggaccattgttgatgttgatggagtgcacatacatgtatgagtatgaagcgtgaggctgcgttttgcaagttagcacgtaactagagtaatagttatcgggggaaagtgctttttattcttgattcttattggacaacgctgccaacaataattagaacacatgacaagtaataaaaattgatactacacctcagaggtggttgctagacgatatagagtggcaagactactttaccaatccgagagtgaagtatatcat

SEQ ID NO: 24930 - DNA, 407 bp, Glycine max
  unsure at all n locations
agcttgtggatgtttttaggaactttgaattagatttctttaggaataactggccaacaaaaagtaaaatatcataacagtattttcttttatctcttttatatctgaatgtgaaaattcaaaacttataaataatttgttcttaacaataaaggttaattcagtcgattagaaatatatgatatatcttaaaagaatatgagtttgatttttactgttgatataaaaattttgttggtaaataatctaattatttctataagtgtattttgagtcttgaagtctgttctgattcaggtgagtcccccaaacctaaataagtgaatccccaaaagcttgtatcatctgaaagaacttgtcattaaggagtanccacaaaaattactgtttctattctgtgaggaaat

SEQ ID NO: 24931 - DNA, 449 bp, Glycine max
  unsure at all n locations
tcagtagtaaaaaaaaaaaaatcataacatggtatnattagatatgctaactgattacccaactatggaccttcagccacagaaaacgacaatcaactatttttctttctaaactagcaagcaaggcagcttgcatgataaatacagacacattgataacctactagccaaataagattgctaaggtgagaaatgggcaatgtagcttcatgcactccttccttgacacctaatggggtcttcaaggtcctattcttagatgggaggctggaggcctacacaaaacctatgagagctgcagaactgatgctagaatactctggacagtttgtttgtgactctagctacctcaaagtcggacatcgcattcatgggcttctagctgatgaccaacttgaaaagcgcagattctacttccttctaccaatagagctgctcttctctgtgct

SEQ ID NO: 24932 - DNA, 422 bp, Glycine max
  unsure at all n locations
agcttgctttttatagtaaggaatgaaggttttaggggaatgtaccgtggcctttcaccaacaatagtggcattacttccgaattgggcagtgagtttcttttccttttgccactctaactacattgatcaatgtctattgcaactaaagatgcaaggctctgtgaagcagggtttggatttacttttgttttgccttgtttcagcattcatttcccttccatcttctcatgtcatatgcacaaactatacataaacatagacgaaacataattgataagcccaaaatttggagttacacgggtctcatgaatagctgatgattatcttcaaatcaattnttatttgtcttataatcctctctaggatacagtctttacaagctacctgattgttcattaccactagttnggaaaattcttg

SEQ ID NO: 24933 - DNA, 442 bp, Glycine max
atgatgaaccaagacatattgatgatgccaatagcccaggtgattgtttcaagattgatgcaagacttctagcgtcaagaatccaatccaagactgatgattcaagagaagagatcaggacgccacacttcaagacttcatataggataagtatgaaaagaattttgcggagaccaaataccacagttttgtgttacagaagaattttctcaaattttgtaagttaccagagtgattactctctactcatcgattaccagtgaccagattggttttgaaaaagttttcaaatgatttgtgacgtgccaaaacgattttcaaatagtgtaatcgattacactatattacggatcgattacaagtgaatctgagcgttggaatgtacatccaattgtgaagagtcacaactcttcatcaaatacatagtgtaatcgattacacc

SEQ ID NO: 24934 - DNA, 249 bp, Glycine max
tgcctgcatgcatgcttttttttcaatttctacctagattgatagtgcttgatattatgagcttgagcatttctagagaactcgccacttattactaaagccatttgaatatacaactaaccatagttgctaattgtaatcgaatactgattaagccacagtgatccgttacgtatgagcataatagtatacaccaactgtacatatataatgtagagtcgactcatatcagcaattatattgtggtca

SEQ ID NO: 24935 - DNA, 423 bp, Glycine max
gaaactaagcttctgcatattaaggcgtctctatagagtgattgtctacttttgtagaattcttgactcggtcttcgtctaatgaatgcggtcattgcaatatctattgactgcattaaatgcacattctttcttcatgcagagaatccactctttgctattagggtgttgaacactacaacagacaaacacttccttaatagctagaatatgtatgtgcaccagagctcttcttttgatgacaattgaacactttcaaatcttgatttcattgattcttcatctgatttgacaaatcttataagaatgtttatgcaatacatatattagacatagaatattcactgaacctttacatatcatctttaatatctgatcaaatcgtacttctattcgtctatcgcatgaaacattacaggcaca

SEQ ID NO: 24936 - DNA, 415 bp, Glycine max
  unsure at all n locations
agtttctttgtgaaaacttccttgagaagcttctttgagaaaacttccttgagaagctagagcttagctacacacacccctctaataactaagctcacctccttgagaaacttccttgaaaagattcctaaagaagctagagcttagctacacacacctctctaatagctaagctcacctccttgagatgagaagctagagcttagctacacacaccctataataactaagctcacccccattccaaaaatacatgaaaatacaaaaaaaagtccctactacaaagactactcaaaatgccctggaatacaaggctaanaccctatactactagaatggccaaaatacaaggcccaaaagtaggaaaaacctattctaatatttacaaagaagagaggatccaactctgacccat

SEQ ID NO: 24937 - DNA, 449 bp, Glycine max
gtcggctagagaggcaggggacttctttttttttccttctctctatctccagtgacgaggtgcttgaaggttattgaaggagtctatgtgagtttgctagctttttttacatgctcatctccattcttacatcttcagctcactagaatccttacatctctcttttgctccattttcatgaccaaggtctacgaggagctcaagattccaactcaacccacactcatctctttgcttccttgtgtcaaaaaagaggtaagggaggagcaattgatctcttacgacccatgctatgttgctatgaagctcaacttcatttatgttgtggttctggtatgaaactagtaatatgcaattgtgctactatgatttctgggagttgaattctagaattctgggttcaaaaaagagattctagatccttaagaaatcatacatgatatgtctta

SEQ ID NO: 24938 - DNA, 412 bp, Glycine max
agcttctttgagaaaacttccttgagaagctagagcttagctacacacacccctctaataactaagctcacctccttgagaagcttcattgagaagattcctaaagaagttagagcttagctacacacaccccctataatagctaagctcacccccatgccaaaatacatgaaaatataaaaaaagtccctatttcaaagactactcaaaatgccctgaaatacaaggctaaaaccctatactactagaatggccaaaatacgaggcccaaaagaaggaaaaaccaattctaacatttacaaagaagaatggatccaaccttgacccatgggctcaaaaatctacccaaaggttcatgagaaccctagggccttctttagtagctcaagcccaagcctcttggagtcttcta

SEQ ID NO: 24939 - DNA, 460 bp, Glycine max
  unsure at all n locations
tgannattgagtgaggaaaanatgtctctcactaagcttattcattacttggtaagattacaaaatatatagagaaaagatggaagagagagacagcctactctcaggcctatctctgctaacttctcagataagcaaaatattacatcagtcatacatcaagtaaagcaagatattcaacactccccctcaagctggagcatataaatcatatgcaccaagcttggaacatatagattgaatcctaggtcctctcaaggacttagtcaaaatatctgttggctgatcattggaactaatgaactcagtgacaatctccttggacaatagtttctcccgaatgaaatgacaatcaatctctatgtgcttagttctctcatgaaaaacaggattcgaagcaatgtggagagcagcctgattatcacaatataacctcatntgcccaacttcacanaatctc

SEQ ID NO: 24940 - DNA, 417 bp, Glycine max
agctttttattctggtctctgccagtgaaaggatcgatgtgggtctgaatagaggcaaatttagtcatactgcttagacgaatgagaaaactgcggcatatgaacagggtgaggatgaaggagaagcccgtgctgtgactgacattcctatacagccaagtttgccaccaactcaactgtgtcattactcatgcaataccataccttctccttacccaccgcccagttatctcacaaaggccatccgtaaaatcaaccacatagtccacctaccgcacttacaatgactaacaccacctttatcataaaccaaaacaccaatcaagagatgaatcttgcatcgagaaagcctgtagaattcaccccaatttcagtgttctatgctgacttgctcccatatctacatgatgattcaat

SEQ ID NO: 24941 - DNA, 474 bp, Glycine max
ctcagaacactcaagcttggaacctatgttggtgatatgctaagatggacgtgttgacttgtttactcctctaataaagagtacaacaaattttgtgtttgatgatttaggttttctctttttctttcttgttcatatgcaacgttcatttttttctcttatttgcttctattctatctcctatctctatatatttggcatgggtgtcttcgactatctcacgttccaattgagatgagagataagaatttatctaatatttgtgtcttttttatacctgtatataataatcacatttttatactataattaaataataagataaattgtataaactttagcacaatagaaatgcagacgcgagaactattactaaaaatacatatagaatttattaattttgggtaatagttaacaaaaatcaaaagagtgtagtggagatggtgacattttaaaaagttaatagcaaaagag

SEQ ID NO: 24942 - DNA, 411 bp, Glycine max
tttcttgctttgaaaacttcccttcaccctaggccttagaaactacaatggttgagtgagaatggggagctagttgtagatatacaagttttgctatgctttttcattggaaaatatgttgatgagatactgtttgatgtagtccctatggagcctagcaatctcttacgtggaaggccttggcagtatgataaggatgttgttcataatggtgtcacaaacaaatttgcatttgtacataaaaggaaaaaggttaccctcacacctatgtctccaagtgaggtttgaaaggatcaaataatatatgagagtgataagagaacaagagactaaagtgaaactttgtaacataagacaccaaactgaaacatagataaagtatcttattacacaatttgactattattacta

SEQ ID NO: 24943 - DNA, 442 bp, Glycine max
  unsure at all n locations
tatagttattggagggagaataaaacaatccaaaatttattgtacctttcaagtaacgaagaattctttttgcggcttttagattaggagaggtaggagcctccataaagcgacacacaactcccaccgcatatagaatatcgggccttgtattggttagataccttanactccccacaagactcttgaagatcgaggagtctaccttctctccttcatcaaactttgataacttcaagccaccttccataggtgtgttcacaggattgcaatcaagcatattaaatttcttcaacacttcttttgtgtacctttcttgtgagacaaagatacaccattctttgtttgcttcacttccattcccaagtaatatgacatgagtcccatatctgtcatatcaaattcacgagacatggactccttgaagtcttcaaacaaattt

SEQ ID NO: 24944 - DNA, 419 bp, Glycine max
ttgcttatacaaatagaaaagagaaagaaagtaattgcattattaggctaaaataaaatctagagaaatcaacactaatttctaaagccatttgaatattaatttagcaatagtttctaattatatttgaatactgattaagccacagtttccggttacatatgagcataattgtatacaccaattgaagaaaattaaaataggtctctcaattcggcaattagttgtcgtcgttagagtgaagagaggagaatgtgaaccatggaggcctcaacctcttaaatagaagacttgtggccacaacatggttggttggcaagatagacagaatgtgagagaagtgtgagctaatgctcttcacttttgtaaatgattcctatcagcaaccaatttggtaaggagattgactccttcacatc

SEQ ID NO: 24945 - DNA, 467 bp, Glycine max
  unsure at all n locations
tataaaactaagcttacaagcaagcttccatcacaatgattggccaacattaataatgtgaagaggatgcttgaatatatgggttaaatccttctgtgcataaaccgagtcgcacattccgcagatcaacaacaaaatctgcatgtacccgatcaaagtgctttcaggcttcaccatcagatggatggcgtaacatgcctgaagatcttctattctcatagtgccatgacatttgtcttgcagtttgtattgatgcaaatagtctttacaaccttggaattataggcaaataaaacatctcctttattagaactggttttttgttgcttgttccaacagtcttcgcacaatacctgngcttgttacanaaattgcattcaattaaagctccatcattgttataatacaacatgaagccttccacaaaacagtcaatcctcttagcctccaatcccaacttcgatact

SEQ ID NO: 24946 - DNA, 336 bp, Glycine max
tttgcttattgactaacagaaagatacgccttgcaccctaacttcctaacactctgatactaaccctatcttcgtcccacatgagtcacgcactccactctgcatggcttctatcgtaatccttcacatacgctagagtggacttctccctatatgggcttactctcgtgacttcctgcaccccctttgctctcggcaactactccacatgcttttccgtaacatagacacacaattttgtgcgtgaaagaaaaatacatatatgcattatgcatgtatatacatatatatctctatatatatatatatgtatctatctatgccattgtgctatat

SEQ ID NO: 24947 - DNA, 219 bp, Glycine max
gcatcaatggggctaaacacacctgcagatcatgatgatggctggctcaaattcctacaaaggctatcactcttcaattgatgaacatttaccacacttcgtgtacgtataccataatatatagattaatatgcacaagttggtcatgcaaacagaatggacctaaaatatgaaacgtagaaacccatcataactaaagacattaacaaaactaacata

SEQ ID NO: 24948 - DNA, 368 bp, Glycine max
acacaccgctcataactaagctcacctccttgagaagcttcattgcgaagatgtgtacagaagttagagcttagctgcacacacccactataatagctaagctcacgcccatgcctaaatacctgaaaatctgacaagaagccctatttcatagactgctctaaatgccctgaagtacaaggctaacaccctatactactagaatggccaaaatacgaggcccaagagacggagaaaccaattctacacattctaccagaagaatggagccaaccttgacccatgggctcgacaggctacccacaggttgatgagaaccctagggcctcctatagtagctcaagcccaagcctcttggagtcttctat

SEQ ID NO: 24949 - DNA, 378 bp, Glycine max
  unsure at all n locations
gctgaangcgaggaggaaaaaatggcactcactaagcttagcatttcttgtaagaggcaaaagatatagagaaaagatggaagacagagacagcctactctcacgcctatctctgcgtactgatcagataagcaaaatattacagcagtcatacatcatgtcaagcaagatattcaacactccgcctcaagctggagcatataaaacatatgcaccaagcttggaacatatagatggaatcctatgtcctctcaaggactgagacaaaagatctgatggctgatcattggaactaatgaactcagtgacaatctccttggacaatagtgtatcccgaatgacatgacaatcaatctctatgtgcttagttctctcatg

SEQ ID NO: 24950 - DNA, 225 bp, Glycine max
tggcgcctgatgcggtattttctccttacgcatctgtgcggtatttcacaccgcatatggtgcactctcagtacaatctgctctgatgccgcatagttaagccagccccgacacccgccaacacccgctgacgcgaaccccttgcggtcggatagaatatcatgctatattatgtatgctatacgaactaattagatgtgagcactgacttgaaatagccattcg

SEQ ID NO: 24951 - DNA, 285 bp, Glycine max
tatgtttgtctgtcaaacagtataatagtagactgctgattcatcgattacagtaacataagaaagagacactgaatcgtgaccgtagctgaatataactctcctacgagagtcactcctatatttgctagctgaaggcatacagcttctaccagtcacatgatccatattgaagtgaccttttgtacacatctactggcagcatcactttctacgtctctgatatcctcaatagtgggagactttgagcagatcaaccatggaaggcaagcctctaatatactc

SEQ ID NO: 24952 - DNA, 446 bp, Glycine max
  unsure at all n locations
ctcaagctgcctcccttttagggcattttctgccacaatctagttgcttacaatcgttacctttgcattagtaaaaccaatcgcatgctaatatgtaaaatgtaaaatataataaaagtaaagaattaaatatgtactaatggttagtcaatttctcatctcatttgtgttgacttgtggcatttaacgaatattctcttctcttattgacggacatacactcactacatgaattctaattctacttgcttatgaaggtaactctgactataataatggtttaagtaaataatatataacggaaaaattataaatgtcgtctttattaaagggtgacagtgaccaacgtacttaattatcaaaatgaaatataaataagataataatgttagatcactanggctaaacctttgtcaagatgtgaatcaatacttgccattgatcct

SEQ ID NO: 24953 - DNA, 411 bp, Glycine max
gcttgcttcatgggagtgaacagaggcccctgcatcatgttcaaaaagattagtaatctaattccatttctttcttgcatttgcaaatgcatgaaagaaacttgtgttggcatctccatcactcaaccaatagattttcgccctttgcttccaaaagtgctcttcttgatgaagcaaagagtttaagtggttatttaattccatatattgagcaactgagaggatcttcaagttgtctacaagcctccatatctaatttgcacttgttaatgtctgatacgaataactactctattctactgctacagctaaggaactaaggaaagctaattgaggtaattgttctcattcctttattcattccactgcttgatatacttatactaagtgttctaacagaattggaaatgg

SEQ ID NO: 24954 - DNA, 446 bp, Glycine max
  unsure at all n locations
taagaaaacatcagaagttgttctttgtttgcatatttaacaaaggttagatttgagtgcccttattcaaccccttctagggaccaactgatccacctcactttcccttaaggattccattttaaaatcaaaaaggattcctatttgttcgacctcatcaaacatcatacttaagctctcaacgatgatgaggaatagaaatggcgatatggatctccctgcattgatcacctattcttacttcttttgttggactcctgttaactaatagtgacaccatcgttatcactccctaatccttaaccttcttttatttgtgaattgtgagcctcattctctccattatataatccaagaaatcccaactcatagaatcataagaattttcanaaccaactntanataaaagagtttcctttntctccttcatcattgcatcaaccaac

SEQ ID NO: 24955 - DNA, 411 bp, Glycine max
  unsure at all n locations
agctttgagccaattcaaacgacatattctttttactcggatgtctgattgagtcctgtaatataacgagacgctcgaaattgaatattgaacctctgaggaaattcaaacgacaataacttttttctcggatgtttgattgagactcgtattatatcgagacgctcgaaattgaatgttgaagctctgagccaattcaaacgacaataactttttactcggatgtctgattgactctcgtcacatatcgagacactcgaaattgaatgttgaagctctgagccaattcaaacgacaataactttntactcggacgtctgattcagtcctgtcatatatcgagacgctcgaaattgaatgttgatgctctgagcaaattcaaacgacaataactttntactcggatgtctg

SEQ ID NO: 24956 - DNA, 477 bp, Glycine max
  unsure at all n locations
ggaccttaaaactaagcttaancattcaatttgagcgtctcgtaattttacgggactcaatcagacatccgagtaaaaatttattgtcgtttggattggctcagagattcaacattcaatttcgagcgtctcgatatattacgggcctcaatcagacatccgagtaaaaagttattgtcgcttgaattggctcagagcttcaacattcaatttcgagcgtctcgatatatgaccggactcaatcagacatccgagtaaaaagttattgtcgtttgaattggctcagagcttcaacattcaattttgagcgtctcgatatattacgggactcaatcagacatccgagtaaaaagttattgtcgtttggattggctcagagattcaacattcaatttcgagcgtctcgatatattacgggactcactcagacatccgagtaaaaagttattgtcgtttgaattagctcagagcttcaac

SEQ ID NO: 24957 - DNA, 420 bp, Glycine max
agcttgtttttgaaagttttttcccttttctttttggaataagaatagtaggaactatgaagtagataacaaccccagttctaccgcatgcaaggaaattagtaaaggcccaatagagaaagtttattgcacagcttaaaccacaagcaatttttctcgtgaaaagatgcctatcaaaagaattttgaaagcttttaggatattggaacttgtgcattcggggaaggtgagagtctgtcaaaatccttcatcatttgtgtcaatttgtactccttgaaaggttatagtgggaataatgtccaattaatggtgatacaataacaccttgtttaattagttctaaaagtttaaaattaagtcgtaaatttcttaccgaaaaattaattatgacatattggagtgttgacagtggttataagt

SEQ ID NO: 24958 - DNA, 462 bp, Glycine max
  unsure at all n locations
tgactattactttatacattcaaccaatgagagaaatatgtctatattcatttaaagactgtggatgggttgttttaggaataagagccaagaacgaggcattgctgcctatagggaagctaccatgaatatggaattcatccacaaatctcctgaattcaggtttcaaaaccccccaaaattccttaataaaattgaaattaaagccatttggccccggacatttgtctccaccacaactccaaacaacatctttaagctcttggtctgaaaaaggggcagtcatcccctctttgcctctgatcaatcatagggaaatataccccatccagagaaggtctgaacaatttatcttcagtaaatctatggagaaagtatntgagaacttcattcttgactaaattaggctgctgaacccatacaccatcaatgaagattccctgacaagcattgaagtttctt

SEQ ID NO: 24959 - DNA, 369 bp, Glycine max
agctttgtgttatcgattacaaggatttggtaatcgattaccagtgacaagttttgaagaaaaatcaaaagatgtaactcttccaatggttttcaggtttttctaaaggttataactcttccaatggttctcttgaccagacttgaagagtctataaaagcaataccttgatttgcatttgaagactacttacaatacttacaacctttacaaacaacttttccacatattcttttacaacctttgaatctctttgaacttcttcttcttcttcttcttcctcctttgcaaaaagctttctaaagttatctggtttccgaaccttgataacaacagtgtgctattcatccttttctttctctactccct

SEQ ID NO: 24960 - DNA, 459 bp, Glycine max
tgttggagattgctgaaaatcatgggagaattggtttgtattacatgcctacaagtgctgataaaaagaggattgatttggaaaggaaagagaaatgcttagctcgtttacaagggcgagaaccacgggtggagagggtccctatctaccacatcattgagagctttgtgagtacagggtgtatgtacgaagatcatgttgctatgctggatgaaaagaccgatcatgatcaaccaaattgggtgcagccatgtcccatagactttgattgaaaaattgacatatcatagagcaacccaagatttatgtttctaatttgatgtcaatcaaccaaactaaggaagatgaagagaaggattaaggattgtctcctgatttgttgaggatggtggtgcatgacaagagggaaataaagctgcatcatgaggaatcagagcttgttaacctgcgcactgatga

SEQ ID NO: 24961 - DNA, 403 bp, Glycine max
  unsure at all n locations
agcttttatgaaagaatatacgaaaattatctatgtgaatcattcttttgttcattcttgtaaagttttctgtaaattcttgtaaagatacaaaactttcaaaacaccttgtatactttgagagaaaagactgaaaatgctaagtggtatatccatctataagatgatcatactttagttggtgaacaaccttccaacaaatcatgtttatttatttagagccaatagtggcttggtaaaacaaagaatgatgaatttaagttaaacttgnggtacatatagtaaatgtaagagtcaaaagtgacagtaaaaaatacttataacattgataagttagtgaaaacttactatatggttgtcaagaactagatgtagtcttgaggttgatacgaactagtataat

SEQ ID NO: 24962 - DNA, 458 bp, Glycine max
  unsure at all n locations
tgtagcanatntaattacagaagcaggtgcaaatcgtgtacttgcttgtgacctccattctgggcagtccatgggctattttgatattccagttgatcatgtgtatggccaggtaacggattattatgtcactagcatatagtaatagcatggaagaataaaaagcatttaatctattaaactcaaacaaacatggcttggatgtgttgtatattagtaatttgtaattgatagtccatccaataatttgttaatttattgtatttatgcatctcaagtctgaattgaaatgaagggacaaccttctggaaacatgcttattttactgtttatagttatatgatcatttaaatttacgatttctgtagtaaagaaacttcaaatctagttttctttagacgtgctaaaatcttctattgttctatttatcccagatcagtcacacatggactctaatg

SEQ ID NO: 24963 - DNA, 390 bp, Glycine max
  unsure at all n locations
agtttgtaattcttgatccgcagataacataggtggtaaagtttgggactggaacgagtcaccaatggctttcttgaggaaagagaaataaaatgtcagatgaattttactgtgagatggaagatccaacttataagcaacaacaccaaccttgtttaacacctggaaaggaccataaaaccaaggggagagtttttcattaatccttttagccaaggatcttctcctataaggttgcatcttcaagaacacccaatcaccgactgcatattctatgtctcggtggcatttgttggcatttgctcacatgatatcttgagacttcaacaaattttctcttagagtagccaataattcattccaagaaattnttagtttattgacttcttc

SEQ ID NO: 24964 - DNA, 450 bp, Glycine max
  unsure at all n locations
tcttagccaacttgcttcctcactagcagttgctagtgctatcatctcagattccatagtggactgagctaagatcatttgtttctttgacttccaagaaacagccccaccagctatgctaaatatatagccgctggttgctttggaatcatctgagagagtgttccaatctgcatcgttgtatccttcaagtacagcgggaaaccttttataatgtaatccaagatttatggttcttttaaggtacctcattaccctttcaatagcgtgccagtgctccatactaggtctactggtaaacctgcataataatcccacaacataggctatgtcgggtctagtacaatcagtggcatacctaaggctgccaatgatacttgcgtactcagtttgtcgtataccttcaccagtgttcttaaacagttntacactnggatcatatggtgtact

SEQ ID NO: 24965 - DNA, 413 bp, Glycine max
  unsure at all n locations
atcaataggttagcccatcctcttatgactctaatggtgttggactaccataatacaaatagcgtaactattttgaattttctctttccagagaataaaaaaaaggagagaaagataagagtataaacacaccaagggttaggaccgttaggtggtataccttttccatttgatgttgttagttatagttcattgtgtataataatcaaatgaaatattgatgttcaattnttttcctgttatcttagataagttagatgtctgtaactatatgtatagtaatccctaagattaagagataattatctcttgctgtatcattattatcatgtgtatatatatacagtcctagttgaggattctcttcttcaggaaatcaatgaaacattcacatttaattcaaggtggtatta

SEQ ID NO: 24966 - DNA, 443 bp, Glycine max
  unsure at all n locations
ngtggcaaatgaagaagaagaagaaggttattaagattttcatagagattcagaggttgcagaagaatattgtgaaagatattttaaatgcgagtcaaggttttgcttttatagattcttcatgtctggtcaagaaaaccattggaaagaatatgaccttgagaaaaactgaaaaccgttggaagagttacatcttttgatctttattcacaagttgtcactgataatcgattaccaaaattatgttatcgattacacagagctttttatgaaagaatatgactcttcacaattgattttgaatttcaacgttcacatacactagtaatcgactaccaatatcttgtaatcaattacaccatctgaaatctattggaacgctgcatattcgttaaaaactctttgaaatcaaactttgccactggtaattgatacaagaaact

SEQ ID NO: 24967 - DNA, 394 bp, Glycine max
ttgcttgtcaaagagttgatcgtgttgagataatccaattatgaccagacagaaccttttaaggataggtgccctgaaattgcatctgctatgcagtataagagtggagcaactactatgccacgtgactaatgttgacaatacgggccggtccggctcgctgatggcccgctataaacgggccagagtagcccggactgctgagcataacagtctaccttacgtaatatggcccatttcaagttggtccacggtccacccatgaactcattgatatgttattgtgagaatatggatcgacttttatcgatgctggtaacatcagtttagaatctaactctagtctttatataattcgttataactataactaataatatactatgacgtaacg

SEQ ID NO: 24968 - DNA, 431 bp, Glycine max
tgttcttgattcttcctcagttctttatcatgctctgtacattatagtaggccttcattgaactgtctttgggcttggcggccacgctcaacaaagtactttcgacacctactgtacgttgatttcaccaatgctgttatgggaatgttgcgacaatcctttaaaaccttattgatacattctgagaggttcgttgtcatgtggccatatcgacgtccttcccttcgtaagccatcgaccatttttcctttgagatgcgatctatccatgttgctatggctggactcagttcacgaaattattctaaatgttgatcaaaaatgtgcttgcatggagtgtaagctgcataaaatgagttatgaataacaattgttagtataaatgaaagtaaaataaacgtgaccatcaaatatgaaatcttacccaatttc

SEQ ID NO: 24969 - DNA, 409 bp, Glycine max
  unsure at all n locations
ttgttccatgcatagtcgccaatacttgtagttcgatcgtacaagtttctcaacaccaaactgcatatttgatcagtttcctccagtttgcgagtccttgaaaaccagttcagtctgccttaaattcttagagcgaagaattgaaaaagagaagaaaaaaagcccagatcaaagtccaagctctagataccataaaacaaataaatgaatatttgaaatatgaaaaacaagataccaaatttttacttttttttgttatcttttcgcttctttttatttgctttgattcttttccaaaataaaacataccatcaaagtatttttctatgaacactcctataaaaattaagtgagtttcaaaaatatttttcctttgaaccagactgaccatataatctntatcttaatg

SEQ ID NO: 24970 - DNA, 455 bp, Glycine max
  unsure at all n locations
gaacttaaatctaagcttcatgtaaagatgggcgaagagggatttattactttcgaacttatacacacagatctaatggggtcgacaaaaacacctagatatagtggatgtatagatactatggcagtatatgatgattacactcgatatacttggttgtatttcctaaaagagaatagtgaagttacgcataagtcagntattttctctgacatggtggagaaagaccgtgatggaacaatcaaatgcttgacgagcgactatggatgagagttcaagtcaacagatttcacagttttttgtcctgagaaaatggatccatatgcaatttacttgtccagatacactgcaacaaaatgcagtggctgagaggaaattatctcatctaactgtagtgagcttgtcatggatacatgacaaaaatctgcctcgagagatatangcagaagcaattc

SEQ ID NO: 24971 - DNA, 148 bp, Glycine max
  unsure at all n locations
atatcaaagctcatgatagcttcacaatactaataactaagacactaaatactatttattagttcttatcacgcgnaatcacacagcgatagttcgcactaaatattgcacttatgaaactacagctctaacatacttatgcccattg

SEQ ID NO: 24972 - DNA, 372 bp, Glycine max
tactcaagctgcgcgtgcacattatggagaaagacattggcacctttggtctcatagagcagctctatataagaggagggcatttattaagaaatgaacaataaatcattacaatttataaaattacattactcttgactttttttatactctgcaatcatttctacactaaatattatgattacgcaagacccataatagtaatatatgcatgtcgttctattcgtttatctgctcttttcgctatcttgaatatgcttgtgacttgcaatgatctatatatagatatatatatataggtcaaaactgtgacatctatcctcataagttgtaataaataataaacattaatatgcgtctggtatacgtata

SEQ ID NO: 24973 - DNA, 422 bp, Glycine max
ttttacacctcccgctagtatgcttcaaaataaatatatatatatatatatatatatatatatatatatatatatatatatatatatatatatatatatatatatatatatatatatatatatatatatgtgaaagcgtagaggcacttctatcgtacaccctcttctgtggggacaacgtcgataccatctgtgtacacatagagagacatatagtactgaaacgcgtggtatatatggacttctaacgttatgaacgcgcacagctagacatactccaccttagagggtggagaaccacgcctgagacacatatcgtcatattgaccgcatcgcgtgcgcgcccgttagatcgccctacacagtcacatttggccgtagggcgcggccatcctagacacccttctgatgcaacaccaccg

SEQ ID NO: 24974 - DNA, 450 bp, Glycine max
  unsure at all n locations
tgtaggcaatatggtgagtcatgaattttctaacattgngttaatagcatatattaccatactaggattgtctggttagccatcatcaatctgtcatagtattgattaagcaagcttagagcaaatgctttggcaatatctacaggatgaaaagaaagtgtagatgactagcaacataaatatctctattcatacttttatctatttaattagtgattgaagatacatgatctgaaatcaatatgaatcaaggaatagattaatctatgttccaaaattgggaagagactaaaaatacaagtgtacattaacattattactgttgtcaagttctcaagataccttcctaagaaaaccttaagcataatatttaaagcctttaacaaaaatttgaaaacatagcaatgaaaagtatgccataactcttaaccaatgtgtaaagaatctact

SEQ ID NO: 24975 - DNA, 368 bp, Glycine max
ttgcttgagatgaggaagtgtagaagggtgaaacttcctgcttttattcgttgaccacagagtggtacctggagatatgtcgcgggggtcatctaggactgactgttaggtttactcttttgtttttgaatgggtagacctgatgtataggaatttgatgattgtatatatgtggctgaagccaccactgtggacacctttgctctggatgacactatgtattttgttaaactaccatatttaggacagctttagatgatgaatgcatttatgatcaatcttgttatttgacaagacagcatgagccaactttatctgtataaggtgttatcgacctgattttattcttctatattcacgtgacgacc

SEQ ID NO: 24976 - DNA, 445 bp, Glycine max
  unsure at all n locations
ntgagctaanatcctgactcaccataaaccttgactttgggtgagaatgtcaatccttaccctcggaagcaaaaaagaatagaagggaaatttccaatcaaaaaaaaaaaaaaagagaaggaaaattcccaatgaaagagaaaaaagaaaagaaaggaaattcccaatcaaagagtgggagaaagcaaaaagaaaagaaagaaaattcccaaccaaagaatgggaaaagtaaaaaagaaaagaagaaagctcccggtcaaagaaactagaagaaatgtgcagaaaggtcttttgaccagacaatatctgaacaatacagaattgtcaccaaatgaacaaaaaaggaaggaaaggaaaccacgacctanaatggtcttctccctttaattaccaaccaaaattccgtgcgctagcgacccttttttctcgccccgcactanacaaa

SEQ ID NO: 24977 - DNA, 413 bp, Glycine max
agtttattctaagttcaacctaccaccctcagactgatggccaaactgaacggaccatttagtcactaaaggaccttttaagagcatgtgtattagaacaaaaagggagttgggagtgttttctgttgttgatagagttcacctataacaatagttttcattctatcattggcatggctccatatgaagctttgtatggtagaaggtgtaggacacccctgtgttggctagaacctggagagaacttcaccttaggacctgaagtggtacaacaaaccactgagaaggtcaagttgatccaagagaggatgaagattgctctgagtaggcaaaagagttatcaagataagaggaggaaagacatggaattcgaggctggtgatcatgtattcttgagagtcacctcttggact

SEQ ID NO: 24978 - DNA, 601 bp, Glycine max
  unsure at all n locations
cccacaccataccctcnacncgcgagtctngntgtgtaataacagcacctcaatananagcatcaccaccacaccccacagagcgcacctttganccttagaattgactncactntcanaacacgnnacaccacannaaacncaagctcgagctaaaatcccgactcattatacaccttgtctcttggagagaatgtgagacgcttaccctcggaagcaaaaaagaatagaagggaaactctccatctaaaaaaaaacaaaagagaaggaacaatcccactgaaagagaaaaaagaaaagagatgaaacttccaatcaaagagtgggagaaagcataaacaaaagaaagagaattcccaaccacacaatgggaaaagtaaaaaagaaaagacaacagctcccggtcaaagaaactacaagaaatgcgcacaaaggtcctttgaccaaacaatatctgaacaatacagaattgtcaccaaatgaacaaaataggaaggaaaggaaaccacgacctaacatggtctttctctcttaattaccaaccaaaataccgagtgctagcgacctcttttctcgccccgcacaaaccaaaaaaacaaag

SEQ ID NO: 24979 - DNA, 412 bp, Glycine max
agtttttttattatggggtacccatcacatgtggtactaggtggcggtcggacgatggtgcacaacaagctttccacatccacaatgcgcgcataaacccaccatgccctgttgcccacctccaactgagctcacgtactcccacgtaggccatattcttgcttctctcaacaccggttccccatcaatcctatcaagcttccacaacatccaagcaaaacaacattcatacagcacaagctatgacagccaagcaatacagagtcaatgtagataactctgctcaacacatcaaccaaaatcacagctgttctcacgtaaagaccacagtaactattccttcgatccaattctgtaaccgtaggatcgactccgaaattgtactggacgtctatattgtataagcttgcat

SEQ ID NO: 24980 - DNA, 346 bp, Glycine max
gcaaacagacacccccaaaggagcggacggtaagagacacaaaaaaacattgcaaacgcaagaatccaagaaaaagacggacaacacacaagaaggaagatcgcacagcgcaagagcgcaactggagcacaaaacgccgacagcataagcagctaagattatactaagaccaatcaaaaaacaacaaaccgacgatcgaggcaaagaccagaaaaaaaaggacaaagaacacaacagaaaaaccgagcaacggaaagaccgaacaaaaaaaaaggaaatacgagagaaaaaaaaaaaaaaacacccgcctcaaaaccccagagaccggaaacgaggaagaaatacg

SEQ ID NO: 24981 - DNA, 122 bp, Glycine max
cctgagcgagagctgatatccgtcaacacccgttgacgcgaatacctagacaactcaccctactgacttacattcactccttatgccttgcgatggacaatgagtaagtccaatcggcaccc

SEQ ID NO: 24982 - DNA, 413 bp, Glycine max
  unsure at all n locations
agctttgttaccaaatgataagagaacacttaggatcgtacatgtataaaaagaaaggaacttgacccaaatcgggacctaccaatagaaccaaagttatcaaaaggagcgtgatcctaaccgcgacctgtcaatagaaccaacactatcaagttcttacttaacccaagaataaaggaaaaactttcacaatagagaaactctcaaatttcattgattttcaaattctgccattggagagtacaagagtttccaatttatagactaatcttgaaatgctataataaaatcccactaatatgcacttaccaaatgcattgataattgcatgtcactaaatgaaaataaacgacaataaagatgaanataaattcccactagccactaaatgacctagagcattctagaaacat

SEQ ID NO: 24983 - DNA, 437 bp, Glycine max
  unsure at all n locations
ntatgcaagtcagctttcaagaggcatctcggagatttcttttttttcatatcngcgcaaaatctcttgaattatgaagatgttgtccatcatctttttgttcttaatgaaagcagtttgagtttccccaataatagtctcaagcactggggctatgcggttggccagaattttagacacaatcttgtataacaaattacagcacgatatgggtctaatatgattaacctgtgaggcctgatcatgcttaggaataagcgcaataatagcatggttgagctgctttagaatttctccagttgtaaagaattcattatccgcttcaaagatatcatgaccagtgatattccaagccttcttgaagattaaaacattgaaaccatctggcccaggagctctattgttattcatcacagacataacgttccaaacctctt

SEQ ID NO: 24984 - DNA, 374 bp, Glycine max
  unsure at all n locations
agcttattttatatgcatntattgttagactagacctattaacctgtgatgatgcaaactacaaatgagacacaggtcattaacaaaatgcggaaaataaaaattaaatcatacctacaatcattgccatgaagcgttgtattgttttggttcttccaagctctatgtctgtctctatctagatggcggatcataatgaatcttcagagatgagctcaaggaccaaaatacatgtgctatatatggcattctaccatcaagaatgcattaagtagtcattaccactcattatagattgtgataattgattattggtcattaccacccattaacagtaattcaatctgggtccagaaactgacgagcgattcaat

SEQ ID NO: 24985 - DNA, 453 bp, Glycine max
catgcattaatcaacaattgaacacgtatatgttatcaaattttcttttcagaactatacttactaaaatctagagctgtccctcgtcaaggtggacgtggccaatgtaggctctaagatctcgcacgttacactgagagtagcctttgttaaaaggacaagtggggggacctgccaaataaaggacttcgacactgaaataagtacgagagttaagtgagaataaattttgtaaaagggtgagatagaacctggtacttatagagtggagtggaagctgcaggtccttatttgttgggattgttacggtgttgtaacaacccttgcagataatgactagctagtacataattgtagcttacacataatgttgtccttatagatcattgaatacttgccacaatatataaaggtctcaacatattcatataatgggtacttatagataacctg

SEQ ID NO: 24986 - DNA, 585 bp, Glycine max
  unsure at all n locations
acccgcgaccccgcgacccccncaantagngtgtattaacncctccgaaccanttcccatttncgatnnnncnnnnnnccggggcggggggnattaggacgtcgtcgaacatccgagagcgaaacgagctccgcacccgaggatcctagagagacgagccgcaggcacgcttgctattgcatgcgaccgaccgcccagagagagaaaggcccacggtccagacagctcagacagacactgctgcgtgaagatccggagagacaagagctccaagcgcgacacccccacataccccgagaagacagtgcgagcgacagagagatcctcgaggtgaaggagacctcgccccactaagagctttgccagcacaacgcatgagcaactcagcgcggcacaggacgccccggaccacggaacgctaagacacaccggcggagcctccacgcaggaccgagcgcaaatagaccaaaagacgatcaagagcgcgtagagagctcacagtgcaatccgcaaccgcggaacacacgccactacctngcacaccgacaacgccgctccaggaaggccacccacaccgccaacccc

SEQ ID NO: 24987 - DNA, 394 bp, Glycine max
  unsure at all n locations
ttttcttcttgtatgacngagtcaaaagaggcaacattgcttgaagcagagaagatttcctgtcgtaaatctgaagtggatttcaagttcctgtgttctttgttggtttctcaagtcaagaattgcgaagtaacacattcctatttttggtatttattgctctttattattattattattattattattattattattattattattattattattattattaagtcatgttttacgaaattggaggatctgatggagcaacttctccagcaattgatgctttaaccctctctcatacttactctctgctgttagctataattcaatttaactgtccaccatcttttcttgcattatgtagaattctactcatcttaattctctgctttatatt

SEQ ID NO: 24988 - DNA, 463 bp, Glycine max
ggaccttagaaactcagctgaccccaaataataatgaaaccatgtgacctttttgtataaagaccactttctagctcaggcctagagaagacatgtcactcagttaggaaatcagctacttgaggacaacaacagttgtatacaatgagtcatctatggacatgttgacttatttgcgtggttcacaacagacatcttggtatcgacccaagttttcattgccataagttggtcatatgtgaagatgccaaaccactcgcctagaggaagagagagatgggccgaagagcaagtagaggcactatgggcttataggtgcacccctcagtctacaactcaggaaattcattcttggctaacatacgggatagacacaatgttacatgttgaagtaggataggcctttctccgaagacattattttttcgaggcccaaaacaacgaagcactataggtggacctg

SEQ ID NO: 24989 - DNA, 334 bp, Glycine max
tgtttatacctcactacaccatacatttctgaacataccgggagtatcgaatgagcgaatgtcatatcttgaatataatctatcctgcactcttgaatccaggaattaaattgccatcatcaaacatggggagattgtctaagcaaagactttcatgttttgacgatgcaatgcgaccatgcgcttctcaagtataatttcacatcctactcctagaatggactcgggaatgttctcagttaaagttccaccaatataactgcccctataagactttcttggaacaactctagtactcggcaatgttccatgtcatatcttaaatgcattctat

SEQ ID NO: 24990 - DNA, 551 bp, Glycine max
  unsure at all n locations
ctccccctcccacgtatacntcaatacgcgacgggacgtacnccactccccccccgaggccnatgaacctgantcctngcatgcaagacacaanaaacccaagntgggaggantaggaggcaccacacacatgtggcactatttggttgacgggcgaaggcgcacaacaagcgtcgcacattcacaatgcgcgcataaacccaccatgcactgcagcccacctacaaccgagcacacgtactcccacggagcccatatccacgagcatgagaacaccgggaccccatcagtcctccaaagcttccacaacgaccaaacaaaacagcattcaaatagcacaagcgatcacagccaagcaaaatagagcaaacgcagaaactctgccaaaacaccaaccagatgacagctatactcacttagagaccccagtaacaagcacttggggccgggcgattaaccgaaggacaacacgaaaagcggacaggaagcattacacataagcctacactccaccgtgggaccactagaaaacaacagaacgattctgaccg

SEQ ID NO: 24991 - DNA, 541 bp, Glycine max
  unsure at all n locations
cccacccgacacaaacaaggatanggaagaagaaagtataataaaccactgannnnnnnaagagagnnnttgtgtgagtcgtggacagcanaggaacagcacgcgngaggaaanagaagacggcagcagcatttattttttgctgcgaaccaggcaaggagggcttgactcctcaacgagcatgagaaccaacagaacgggcatcccatgaccacaaatccaaacgttgaaaccccgaaaaacagcactcacggtaaccgccacgcttctaacaagaataatgctaccaatggcaacaccaacaacaacactgccacacatcaacctggaatgaaagcccaaccccaagcaactgctacagaagtgaacatgctcacaacgagcaaccccaccaagaanggcgatacaaaaaaaagagggaacaccacctacgcaacagccagaacgctaagtgacatgaataaaaatccaagaacacacatgcttgagcaggattacaccaccgcagccgagagacctagagcaaagcaggagcagaaag

SEQ ID NO: 24992 - DNA, 164 bp, Glycine max
tgcttgtttaagggagacatgatacatgtaagacttggtgggatcaagatcaagggatgcccgacattatttccatgacactatgcaggaagatgatcggaaactttatgcaagactggacatgcatgctcctatgggcgctgaagcgccagatgatatgggca

SEQ ID NO: 24993 - DNA, 425 bp, Glycine max
  unsure at all n locations
ggacctaagaaactcaagctctcttggaaaaatgcattaagagcttcttgtctctttattatgcccccatctatcgacagtttacattgacatggctcgagaggcacgtaagacactggtacctatcgaaaatatggcactcgatacatggggggatgacgacaccacgacctcaacacagctctgccatgtataggattggcgtaatcattactccctttgatggcccttaggctctcctcactgaggtgcaatgtctcccttccttccatggccaaaggnatgctgcccacagagaagttgagagggtgcagcgagcgcgtgtaaggtaccctcaccgcattgtgccgacgtatactactactacgttgtccgtcagtggcgaacatattggatggctcagagccacctacagcatgatcccg

SEQ ID NO: 24994 - DNA, 416 bp, Glycine max
tttctgctagtcagcgactcataagcaaaggctagaggacgagtacaccaaggtatcaatcctacaagcagaaagggaagcaagggaaagggtgatcgattcattgcacagagaagcaatgatgtggatggacaggttcacctttactttgaatgggagtcagagagcttacccgactgctatccaaggacaaggcaatgggagatgagaactcgactcccaaagaggttcacaggctcctcaattatttccaacaaatgattatctgatggcccacataattaagagctactatggcaattgtattgtcgctgtgaatttgattagataaaccctgtttgttccccaataaaatgatgttgatttaatcctgtgtgtttaaaactctatgtgaatgcaatacttcgacaacttat

SEQ ID NO: 24995 - DNA, 243 bp, Glycine max
  unsure at all n locations
tctaaaacgcgggaacgtgctcaaatatgtggagcaattncggtctgtttactggcttgattgggttagattgagggtttgattgggatggccctatgcctacaatgcattttgaagcaatggggcatgccacatagtccccgttctctcgctattgatgcctaaacgcgcgcccaccaagtgttcagagaaatgcctcaatgtccttaacgtgtgactattgttaagaatcaacccatgggg

SEQ ID NO: 24996 - DNA, 385 bp, Glycine max
  unsure at all n locations
tttctagctcattgctgcggaacctgtgcatgtcatggcttcactcctcaaggagcatgagtaccaagagattgggtatcccatgatcacaaatccaaatgtttaaccttctataaacagtactcatggtaaccgttatgcttctattatgaataatgctatcaatggcatcaccaacaacaacactgccaatcatcaccctggaatgaatgcccaaccccttgcttctcctacagatttgaacatgctctatttgagcaaccccaccaatcagggtgataattaataaggagggatcactagctacgcttcatttgcgactctatgtgtcttgaataataatccaataacagaattcttagttatgctnttacctatgtatccg

SEQ ID NO: 24997 - DNA, 417 bp, Glycine max
agtttgacttttacccagtattctttgtcctaccaagtcactactggctctaagcaaatcaacaagatttgttggaagattgctcactgactaaagtatgattgtctaatagacgaatatatcacttagcacttttagtcttttatctcaaggtatacaaggtgttttaagagctttgtacctttacaagaatttacagaaatctttacatgaaagaatgaaagaatgattcacgtaggtgattcatgtcttgtttcttgaatgcttcttctatatatagcgttcatgtccaagtatttgttatctctcaacagttggattcttcgctttggtcttcgtttgatgtcttgagtctgttgcaacacgtccttttttcatgcaaaaactatgctaataggataatatgtcttgtacttc

SEQ ID NO: 24998 - DNA, 466 bp, Glycine max
ttgagccaaaatcctgactcaccataaaccttgaccttggtgagtatgtctatccttaccctcggaagcaaaaaagaaaagaaggaaaatttccaatcaaagagaaagcaaaaagaaaagaaggaaaatttccaatcaaagagaaagcaaaaagaaaagaaagaaaattcccaatcaaagaatgggagaaagtaaaaaaggaagaagaagaaggaaagaaagctcctgatcaaggatcgaaagaaatcagaagaaatgtgcagaaaagtctttggaccagacaatatctgaacagtacaaaattgtcaccaaataaacaaaaaaggaaaggaaaccacgacctgaaagtggtcttctccctttgattaccaaccaaaatcctgtgcgtcggtgacttgttcgcctcgcgcaaaacagatacagataaggaaaaggccaaaaacacacaaaagccgataaacccacc

SEQ ID NO: 24999 - DNA, 415 bp, Glycine max
  unsure at all n locations
agtttctaacaatggttcgtttctcttccatttctctcgcggtctttcttcttccatgccgtgacttgcttcaacctctatgctgtgactgtcactgctatagcaacaaacctcatgcgtgttgctataagtaccataacctatttctccattctcatttcttgttgagaaagcttccgtccccgcaccacgtcaacgccacgagtttctctcgcaatctttgaaccccgtggctgcttcgttcttcgtgcgcgccacttgattgactggcttgtcgaggtaaacaatgtttgttgatggataacacatgttaacttcaaaagtattaacgttattatattgcaaatggngacatctaagtaatattttattgttgggaacatcatggttggttcgaatagttcagtatcacact

SEQ ID NO: 25000 - DNA, 453 bp, Glycine max
tagggggatgatagggattaattgtaagcaattatattgtatgattctcaactcccacattaaaagtataagattctaatgtaagatttaagacttaaaacaacaacagctagcttttactggtgttttatcccaagatttttatcaatcagtatccaagtccttgtcacacaccatggcattattagacttgaccaaaataccaaattctaaaaaatgttattaaacataatattactttaataacttttttccgatgtaatttttcttgatctcccactactagtcctcttgactcttgagagctttccatggaataatgcctctatttgttccacaatgctgcctaggagccaatgttatatcatctagttatgaagagcatgtgactaacaagctatgaagcacaaacatagacatcagacacgatacagacaatgatactctgacatg

SEQ ID NO: 25001 - DNA, 412 bp, Glycine max
agcttgctctacttgaaaagcctcttttgaatggtgactctaatgtaagcaacaattatgttcccattaaggctagaggaaatgaaaatttaacctggtattcaaatgttggatttttcagcattcttactttctcatggatgattcctttaataactctagggaatgagaagactttagagcatgaggatctcccacatcttgctactgatgacagtgtggatgggattttgccaacttttacaaacaaacttgagtcagagtgtggtaatgtgataacaaccctactctagtttcataacaaccctacgaaaatatgaggttactgcacacatgaacaacactacactagtgtgataacaaccctgcttacactatgcaaacaaccctgcttccagtgtatgtttgtgat

SEQ ID NO: 25002 - DNA, 454 bp, Glycine max
  unsure at all n locations
ntatcaatatccaaacaaagaaacagcctgttacttttatcttattctttattccattccaccatagcaatagcaacaagaactgcatagacaatctttgtaataattttataaagtcacattctttttcttttttatgtaataaatatttttgtattttttatgtaataatttctttcttttcaaacatttttattttatttatgagtcttgctaaccaaagcccttaggacattggttaaggaactaaaaggggaaagtatttagtgtgtaaatcatagggaagtgtaaaaaaaatcatggacaatgcaattttctgtctcccaataaaaacatttctactttaagatccttaacaaattatacacccgttcttgggatagaaaaagagtaattctacatccttgtacagtgtatggtcactaattctcctacttagtaaataaagaaagta

SEQ ID NO: 25003 - DNA, 401 bp, Glycine max
agtctcttttgtttccttcaaatttttatcttctgcttcaaagcttcttcacgacattcttctctttcctttgcaatttttctcctgagatctgttatttcttctacatttgcttatgtttccttaactaacgaagcaattctcaactttagtttttcattctcctcaatgtaccaaaccaaatcactcccctctgtagaaaatgttgttcacatcatcagaaaatatcttctcctcaatagaatttggaatccacttaaaaaatctacaatacctagtatcctacaacacaaaacaaaaataaactgagacgacatttgcttatgttccaataggggcaactacaaaaacccttcctcgagttcttgttagtgtgtgatgacgacccacacattgcactc

SEQ ID NO: 25004 - DNA, 456 bp, Glycine max
gctctactgtgtgctctctctaaggaagaattcccaatgtcacaacttcaaaagtgccaaacagatgtggtgatacaaatcaacttataggatcgtcttgaaattaagcaaacgaaacaagaggaacttgactctaaccgtgatctatcagtagaaccaaagttataaaaaagtgtgaccctaactgcaacctaccagtagaactaacactataaagttcataacccaagaacaaagaagagctctcacaatggagaaaacaatcaaattctaattaatattcaacttattctctttgtccattacatggtttcctatttataggaaaatagaaaaaacaagtaataaaaaactaaagataagataaaatcctaatgggggaaacacatcttagtaagatacgatcatcatcctaataaaggaaataaattcaaagataagataatatgctaatag

SEQ ID NO: 25005 - DNA, 414 bp, Glycine max
  unsure at all n locations
agctacttcgacctcatctagcccctctccccgtcgccatagcgagatccgtcgtgagatccagtccgtttctctctatcatttttctgattttttttccagatctgagattagctcctcccagatctgagattcgttcctcccttggtgtcctccttttccgcctcgtcctcgtcggtaactccattcacgtcgtcactgcgagatctagacccgctcctcgctgccgcctccacacgattgcttcaggaaccgctttccctttatttgttgtggaggtatttggcttcctttggaatttgactagagatgcaagtttagttgtgggttntggattttgtttgtaatgttttagttttcttctttgttggacctgtgttgtgcgtttaagtgtttgaagtantatcaattgta

SEQ ID NO: 25006 - DNA, 450 bp, Glycine max
  unsure at all n locations
gggagaggatgctccaatggaggaaaagacagagggttaaaagttgatgggggagcacgaaattgaaggaagaaaaagggagagaagttgaactttgagttgtgtctcacaagactctcattcatcaaagttacaacatgtgttacacatgcttctattcatagactacgtagcttccttgagaagctttcttaagaaaacttccttgagaagcttctttgagaaaacttccttgagaagctagaacttagctacacacacccatctaaaaactaagctcacctccttgagaagcttccttgagaagttagagcttagctacacacacccatctaanaactaagctcacctccttgacnaaatacatgacaataaaaaaaaataaaataagtccttattacaaagacaactcaacatgccctaaatacaaggctanaaccctatactaat

SEQ ID NO: 25007 - DNA, 502 bp, Glycine max
  unsure at all n locations
cgcgtnaactaagacatcgtagactcttctanggcgaaagctagctcggcgcccgatgatcctatagagtctagctgcatgcatgctttcattgaaaagcaccaacctattgctgaggatgtgccaacatccttcgaccgatgattcaacacatatgccaacaatgcgtgaacggcttatgccttagacacagctcatcttgcatgttgctgtaagtggaactattgatgctcaaaacaacatatgaagcgatacagctgacgacaatgcggcaaggaacgacactataatcgtgtatgatagaaagactcaatgaacgcaaggaaatcaagggagtgctccatgctctaacatctaatcctagttggagaagtaagccaatggatagctcgagacaacagtcaagttcttaacgataccattatgtcaaggagaacacaaacttattggggatcttgtctgcaacatgcgggaaactatgaattaactgatgtaggctccg

SEQ ID NO: 25008 - DNA, 365 bp, Glycine max
tataggtgtacatactagacatagctcatttagatgttattctgtctcacattcttagggtgattgtttccttccctgatgtatctctgatatcatcgatggcgtgcgcttaaaaatgatttttgacaagagtaactttgatatttgatcaaaaggctatcacactcgcttattgtttagaagctgcatctactccaagcatgaagagtaagaacttaaaactaatgatacagtctaatcgattttgcgatgctaagcgtctgattcacactcgtataacacactattacttgaagctctttactctaaaatatgattctatccagatacttgtgaaagaaaatttctcactcctgtaagtattc

SEQ ID NO: 25009 - DNA, 394 bp, Glycine max
  unsure at all n locations
ttgctattttgcagattntagtaatgacccactaacctagaattaaaataacttaatgccattaaccttgggaattaaaaaaaaaacgtaatggctgagtgtaactgaaattgtggcaaccaaaagtcacccccaacagccaacaagtcagccaccatttggtctcccaaaaggctgatgcctaggttgccaattgggcccttattacaacttgaactaaacctactaaagcccttttagttgattaacccaaaacatatatttggtcagccaactatacaaggattgggccattaattagacaaactatacactctaaaattgagacaaagtggtgccatttagtcctgctccatttgggccatgatataactcacaaccttggacttttctc

SEQ ID NO: 25010 - DNA, 454 bp, Glycine max
tctcgagaaattcaaatggtcataacttttcactcatatgtttgattcaggcgcataatatatcgagacgctcgaaattgagcaacgaaagctctcgagaaattcaaatggtcataacttttcactcggaggtccgattcacgcgcataatatatcgacacacccgaaattgaacaatagaagctctcgagaaattcaaattgtcataacgtttaacacggaggaccaattcacgcgcataatatatctagacgctcaaaattgaacaacggaagctctcgagaaattcaaatggacataacttttcactcggaggtccgattcaggcccataatatatcgagacactcgaaattgaactacggaagctctcgagaaattcacatggtcataacgtttcattcggagatccgattcaggcgcataatatatcgagacgctcgaaattgagcaac

SEQ ID NO: 25011 - DNA, 391 bp, Glycine max
agcatgctttacttgaaaagcctcttttgaatggtgactctaatgtaagcaacaattatgttcccattaaggctagaggaaatgaaaatataacctggtattcaaatgttggatttttcagcattcttactttctcatggatgattcctttaataactctagggaatgagaagactttagagcatgaggatctcccacatcttgctactgatgacagtgtggatgggattttgccaacttttacaaacaaacttgagtcagagtgtggtaatgtgataacaaccctactctagtttcataacaaccctacgaaaatatgaggttactgcacacatgaacaacactacactagtgtgataacaaccctgcttacactatgcaaacaaccctg

SEQ ID NO: 25012 - DNA, 407 bp, Glycine max
  unsure at all n locations
tttctttttatgcactattcaatggagttgacaagaacatcttcagactgatcaacacttgcacagtggccaaagatgcatgggagatcctgaaaatcactcatgaaggaacctccaaagtgaagatgtccagattgcaactcttggctacaaaattcgaaaatctgaagatgaacgacgaagagtgtattcatgacttacacatgaacattcttgaaattgccaatgcttgcactgccttgggagagaggataacagatgaacagctggtgagaaagatcctcagatccttgcctaagagatgtgacatgaaagtcactgcaatagaggatgcccaagacatttgcaacatgagagtagatgaactcattggttctcttcaaaccttngagctatgactctcggat

SEQ ID NO: 25013 - DNA, 370 bp, Glycine max
  unsure at all n locations
ntccctcgttgaacaaataccgataagtttgatagtttccatcttgggcctttgtgccacaactatcgtgaatgggagagaaatgttcatctaaagcatacaagcccctaatattatcaaatcctaaaattcgagctcctagggagcaaaataatgtgagtcttctagagagggcatcaactaccacatttgttattccctttttgtattcgataacatatggaaattgctctaggtactctacccattttgcatgcctcttgtttaactcgctttgccctctaatgtacttaagtgattgatgatcactatgaatgacatatcccttggaaacaaagtaatgttcccaagcttggaaggctattattaa

SEQ ID NO: 25014 - DNA, 399 bp, Glycine max
  unsure at all n locations
ttgtttttgaccgtttatttaagccgttatctcgccaaataattgataaaatgaatttcaaccgattatttgtgttgtaatatcgtttaatcattgtcaaaataaaatccaaccgatcattcgcgttgtaaccttggttaaatcaaaaaaggcaaaaataataataaaattatcaaagtatctttgaaaaaaatataataaaataatcaaaatatctttgaaaaaatatagtaaaataatcaaaatatcttaaaaaaataataataaaataataaaaaaatcaatcggacgtttttctttgaaagtttccttgaatgaattgactaataaccaaagtgaaactaaggctaaaatcaactcacaaaccacgcttttttccgcanaaagtcacttanaact

SEQ ID NO: 25015 - DNA, 451 bp, Glycine max
ttatgtttgagtgtccacatggatgtgtgctatgatttattttgcataaatttctaatcatcattgtcatatgtgtgtcatggaaatgatttagggcattcccttattcttgaaccgcttgctaaacaaatatcccgacatgcgtcatgtcccaccatccgtaggccttttgagccaaaccttaacattttggccataaccttgacctaggatggaaatttccaaccttaccattggaagaaagaacaaaaagatcttccaaaaacaaaaaaagcttcttttaacttgggttattactgtgcttcaaaggaaaagaaaattgaaaggaagaaagtcaaccaatcaaagagaaaagtagaaaaggaaaaaaatagaaaagaaaaaataaatacagagaggttctttgaacccaggcaatgtcttaacaacgtgcaacattgtcaaaagcaaa

SEQ ID NO: 25016 - DNA, 410 bp, Glycine max
  unsure at all n locations
tcaagttatatgagatcttgatcaaacgaaacacaaaaatgcaatctagtcaagccttataccacaaaaggaacaatatacaaaaactaaaattaaaaaattaaaccaagaaagacattgattctattagaaacattttgttaaatacctcataagtaagacaaatttcaacaattaaaataagcaaaagcaagactaattttatgtaaaaataaatttcatgtttgaaacaaaccggtgtgaagtctgaaagaaactattgtgaagaagtttttcgggtccttcaagcttaataagatcctgttcaaatgaaacacagaaatgcaacctagtcgagccttttaccacaaaaggaacaatatacaaaaactaaaactaanaaattaaaccaaagcagaccttgattctat

SEQ ID NO: 25017 - DNA, 432 bp, Glycine max
gggaaggaacagagacgactcttaaaggcttgtttgtcaaggagaatcattgtgtgtaagactatgtcaaacaaatgacgcatccttcttccttaggttgatgataacttgcaccatttaaaaattgaatatgcagcctgttggttcctcttatgttactggctctcatgacttattctttcttcagcttagtcatgagtttgctactacaaagaagcgagtcttttgcgtattgcatatcgtatcctttcttcaaataactggcctttcttaggaacacttctcatgtcttctaaatatcttgctttgactaggacttgtcgatgatgacaaactatattctctaacatcattcatgtcttgtggagagctcgataccttacatgtaattactcactacactactacatggcatagtcctttatgatctct

SEQ ID NO: 25018 - DNA, 392 bp, Glycine max
  unsure at all n locations
ttgtctgtcttgcaccattagaagagaatgagcatgtgattggaagtatgactgaaaatgttagtcagtttatcagattgattgtgaaggaatgcattgaccgtatcccggtgagagtgtgatccttaaattttgagagaaacgactatcatttagtactgatttttgcatgaatctctaaagtatggactaaatgcatgaaattgagatgatgaaggccatgtttgattgtgatagccacttagccaaaaagttgaccacgtgcttgaatgatttatcccttgcacccagtttgagctgaatgaagtattaattgattgaaccctgagcctatacaatgttatctcctgctaccatgtcttaagttgtangagagcatcatcctcaagaag

SEQ ID NO: 25019 - DNA, 443 bp, Glycine max
  unsure at all n locations
tccatcagtttcttggcttcactatggactttgtcatatcagcaataagtgtgttttcagctgtagtcaatcgccccgcatatggatgtccaactaatgacttgaccaattcatgattatgaactccacaaatcaacttcaccatccagccttctcctccaaccactggcttgcaacaaagcttgaagggacacccacatttcctagtcccagtgtctcttctgataaattcttttttcctacacctatactcgtcactcctctcacctcttccatggaatattgaactcctaaaattgtggtaaacaatactagtgagttcaacatacataggaaggttgaaagtaagcccaaggcaatcaatatgccatgcttganaaaaaatcgctggtgctggcaacttggacatgtatacttgtagaaatactgagaattggtacttc

SEQ ID NO: 25020 - DNA, 417 bp, Glycine max
agctttcactctgaggcccgattcaggcgcataatatatcgagacgctcgaaattgaacaacggaagctatcgagaaattcaaatggtcaatacttcgaactcggaggtcctattaaggtgcataatatatctagacgctcaaaattttacaatggaagctctttggctatacaaatggtcataacttttcactcgaaggtccgattaaggcgcataatatatcgagacgctcaaaattgaacaatggaagctcttgagcaattcaaatggtcataacttgtcactcggaggtccgattcagctgcataatatatcgtgacgctcgaaattgaacaatggaagctcttgagcaattcaaatggtcataacttgtcactcgaaggtcggattcaggcgcataatatatcgagacactt

SEQ ID NO: 25021 - DNA, 452 bp, Glycine max
  unsure at all n locations
ntgatgtaacatttggagaggttaatgaaacaacgagtatgatgcgctccatgagaggttggatcaaatggagaatagagaccatatgaattgctcaagagcttccattgttcaatttcgagcgtctagatatataatgcgcctcaatcggacctccgagttaaaagttatgaccatttgaaatgctcaagagcttccattgttcaatttcgagcgtcacgatatattatgcacctgaatcggacctgcgagtgacaacttatgaccatttgaattgctcaagagcttccattgttcaattttgagcgtcacgatatattatgcacctgaatcggacctgcgagtgacaacttatgaccatttgaattgctcaagagcttccattgttcaatttcgagcgtctcgatatataatgcgcctcaatcngacctccgagttaaaagttatgacca

SEQ ID NO: 25022 - DNA, 413 bp, Glycine max
  unsure at all n locations
agtcttgtttctgcagcagttaagtgaacaaatgaagtgtcgacagtcattggatggttgcttggtagaggtacatgtaattaactaataagatttcctacgtgttaggtataattattaagaagaggcactatgtatatagacttttatatataaatcttattagagttttaacacaatctccactggtggttgaaatttattgagaattataaaataagaagaatgactcatcaaatgactagtgggacctgccaaatttgtgatttttaagaaatttgagccaacaataaagagtgtgttcaacagaatgcgctagagacagtgtngctagcatttctctgtttangaatggtgtttgtagttattagtgaaaatagaaatagaaaatattttccttatgtccaacacgc

SEQ ID NO: 25023 - DNA, 460 bp, Glycine max
  unsure at all n locations
tagtggagataatcaacctcaagtaccagggtagtgttctaagcgtttgaaactcgtggcttagcgcatgaaatattatgcgcttatcaagaagcaggcgcttagcgaaaagactaattttcaaaaataagttttaaacttagtcctttcctaagaaattgaaacccttaagtctaccattcacagggaggctgataggctccaatattcagattatatagcaagttcccaatgatcaaatggacgaaaaaccaaaaataacacaaattgaaactgggttgcctcccagggagcgcttctttaatgtcattagcttgacgcttttaccttgctgggcgatcttacgttntggctctcaccttgagaacctcttgaccttctctcattacctgcaagcacacattgtgttctggagcatgcttgtcttcaacaaacaagtaanaaacaatattctgatctt

SEQ ID NO: 25024 - DNA, 411 bp, Glycine max
  unsure at all n locations
agttctctttttgtgttcccctggttggccccatatacaggagaaatgtccaatttcaatatgggaactttagttgtgagacaagcactgtaatatgggtcaatgctttatgaggaaaaagcacggtctatttttttggagctgtcaaaacttttaatttaatgacagaaaagaaaaacctttaattgggattcctatatctttgagatcttttatcaaagttttatctgtagttggaaaaggctagttgtttgtagaagcacatagtttaggttagagtactcttcccaaatttgaacattatgactctntagtttgtattgcagagtggaacttaatcttgtagctgttagtactggaagatttagtctcttgattctgcaattatttcaacaaacattttcggaagct

SEQ ID NO: 25025 - DNA, 431 bp, Glycine max
  unsure at all n locations
gcttgcgaaaatatgcatgctgtaaaaatgtaaagctaatctcctatctatcttttccttaacgaaatgtgtattaatatgatgagattcatcatgttgaactaattgcgggataatgatatataacttgtcataccatatctggatgagaacctgacgtccagatccccttatgatctacaataagtcccatcaaatgtaatgaagatattcattgtgtcataactggaaatccaaggtatataccnnnccaccgtatgccattacttactcatgcactgtaatagattatatacttactaacatgtagcttaactttaatatttaatctttgactgagctgcataattagaatccgtgtacactttcatggtaagggaacgacacttcgattccctatcttatacactagtcattaaccaagtgtaaat

SEQ ID NO: 25026 - DNA, 417 bp, Glycine max
agtttattgaatcgatctcaaaaactcaatatagctatgtaaattttttttaaaaaataagatcgttatccgcaagatcctatgacttaaccagctaatccacagatatgagtttgtatacccactcctaagtgtagcattagtttgctttaccttcgtaacaattgtgtgaatgaaggtatttacatcaatatctccaaaaaataatatcacattcgatgttgattgaaaataatcttgcacataaataaaaaataattatgaatgaggtttgcaaaatagccccaacctaattattgattgaaaatttccagtttgatcaattttgatctattaattattgattgaaaaattcattgaattttataaacaatatataaatagttaaccacccatataatagatgaatgaatcgga

SEQ ID NO: 25027 - DNA, 452 bp, Glycine max
tgctgctatgattaacatttcatcgatgaattaaattttgactgttatgcattatcttttgttgcatgcagacatcttatatctttcacgcacacaaaaaattgtaacaaatcatatttgtttggcagaagtggggccgaagaaaatactagatctgatgaatgtcccatggctgactagagagaacgttgctagccacttgcaggtgatgctataatttcacacctgaatgttatctttcattcaaatgagcatctagtttttaatattttttactgtatgcatgattacatctcatttatatccccgtttggtagacttagaatcacaacaaagcttcactttaatacaatatggtgtaagtggtaacctccaaaccattggtcctgtacaaatgtttctcaaaaacattacaacttacacgttactcagcatgtccatctctatctaat

SEQ ID NO: 25028 - DNA, 403 bp, Glycine max
  unsure at all n locations
agttaattcgtacaatcaatgtagaaaaacatgaccgcgttgcgatgtaaaggggaaaagacggaaacttaaaagaaaaagcacttgggaccaaatatgagagctaacgcacaagagaagagagaaaacccgtcacttggggaccttgtccttcattatctttcatgctctgtcatgactgtcggttccttcttgtatttgtaagcctcttgtgacaataagagactaaaccatcaattgttgggagctcagtaaccaaacactcttgatgtaatgattttaactatctatttaatgctatttcgagattattgtttcttttctgtacttattatcatgtttatggttggatgacccatgctcatgtagtgttatagggtctatgcattggaanatgtttata

SEQ ID NO: 25029 - DNA, 370 bp, Glycine max
aagcccagtgatttttacattttacgtggatacatttagatgatagccttgaatcaaaagagcctcagaaacctctcttgcattattaagttttctaccttgtcacaatccatgaataaccgtagtgcgaaatgtaaccgccattcgaatggctaataaagaaatgaagagaaaaaaggctgcaggcttgatccctgtattaacgaaactaacattcgcagataaaaaagtatatcgtgtatgtgtacgcatcaagctgaattccttggtctaccaaaatgactgtgagaaaccggaagctagttaactacatgatcaaagcccacctgtcacgcagaatatggcttaggtgaacaatagtcttgatcaa

SEQ ID NO: 25030 - DNA, 414 bp, Glycine max
  unsure at all n locations
atcaatattaggattagaacgatacagagtaaagcatcaagattaattataaaaacatagtcatatgtacactaaattgaaagtaaccgggttcctatttcatgaagaaacagaggagttactactttataaggagtaacatagtcaatgagatgtacatgaaacataataggaaataagaaagtgagctacaaatgtgtgtttgtatctcatatcagaagccgtcgaggatattcaaccatgcgcattcattgtgaactttacattacatttacattattactcaatgatgctatatttagcatacacctatgtaagctntctagcctcttacattacatatgttggctgtccagaatacaagccacactctattcgtaagtcactttgcacaattgcacaaattatgctcgg

SEQ ID NO: 25031 - DNA, 378 bp, Glycine max
acaggaggtggagatgatggatcttcactgtcattttggtctgaggtacctacatgacaacaagatggaattgacagaacattctggatggaagaagaccggtgtgtcttcaaagaatgtttctttgagacacatttgatctgcacacatatattatcgcctagtacatggagaatagcattcttaacctgtttgaagacgagaatatcctcaaactacacatttgattgctcgggcaaagagtctgtctaaaccgggagagagatcttgaacacaatagatacatccagacactttacgtggaacatggaataaatgatcatgacggacattgactgattgagggatttgattttcatgagaacatggtggcattct

SEQ ID NO: 25032 - DNA, 411 bp, Glycine max
  unsure at all n locations
cttgtttgaagtaccaaacatttgcactaagcagctgtcgtccatcaaagatgtactagtatgggtggtgactatgacttccctttcaaatagattgctgtgctgctttcctgaatctgaatccacttgcagatccttctcaatttttccaccatcaaatgtacaataattgcgaacaccccttgaacaagatgaataatctgtctttagaacagaagacaagtttgataagtgaccctcaccacaaagttccatgatgacttcttcctttntggcttctgaacagcatactgtttcctctactgaaacacctttattatgatggttatcagcaatatgcagcagatgaatgtcattntcaccagagataacatctagattcagatccagagaaccagcctgatccacttt

SEQ ID NO: 25033 - DNA, 453 bp, Glycine max
tgacaaagttagtactcagcagaaccatttaatcttttcaatgggtatcttagtggataacagatgggagtggaagcttcaatggaggagaaacctatttgaccacgaagttgatacggcagcagcctttatggcagatattgctgagtttcaaattcaacctgcaagcagggacgttctgctatgggggcttgattctggtggaccctattccacaaaggcagcttatagcttcttgaaggatggtgacagccaggttactgaagatagtgacttcaaggcaatctggaatctcaaaattccacctagagcaagtgctttttcttggagaatattcaagaaccgaatccctaccaaggttaacttaaggcggagacatgtggagctgccttcctataactgcccgctgtgcgatgaggaggaggaaacagttggtcatatcatgtactcatg

SEQ ID NO: 25034 - DNA, 405 bp, Glycine max
  unsure at all n locations
ttgtttatcccccaattttctataaatagggggagaagtgaagtagaaaagggttcagccccttaggcacttctatctctttcgaatttgcttaggaaaattgtttctgtgaagaaaatccaagccgaggcgcttccgtaacgtttccgtgagtgatttcgcgaaggttttcgaccgttcttcgacgttcttcattcgttcttcatcgttcttcagtcttcaacgggtaagtacctcaaaccaagcctttcaattcattctatgtacccgtggtggtccacatttggtttcatgtatttttattctcgttttcatttactttntctacccccttttgacgtgcttaagccatttatttaagtcattcctcgcttaacctanaaataaaataaatttccaccgatc

SEQ ID NO: 25035 - DNA, 458 bp, Glycine max
  unsure at all n locations
ccattcctagactngatgattngcttgatgagtttcatggtgccnatatcttttcaaaaattgatcttacaagtaggtatcaccaaatcaggatgaaaaagggtgatgagtggaaaaccgctttcaataccaagtttggtttgtatgaatggctagtgatgccttttgggctcactaatgcaccaagcacctttatgaggcttatgcatcatgtcttaagggatttcataggtagatttgtagttgtttattttgatgatattttagtgtacagtagaagcctagatgatcacttatgaaatctcagacaagttctttcagtccttaggaaaaacaccctctatgcaaatatagagaagtgtactttctgtgtagaatatatagttttcttatggtttgtagttggtagaaatggagtccaagtggaccctgagaaaatcaaggccatccaagaatgg

SEQ ID NO: 25036 - DNA, 330 bp, Glycine max
ttgctacatagccctcatcttaaactaattataacaaaacataaaaaccctaaaaatctaaagctacagttatagtcttctaccctaaagttaagacaagaaaaagagaaaaaggaccaaggaacttacttggacagtgtatgattgatgcttcaaagtcgaaaatgcacaaagagagtacaaatgaaaaatgtgcaaatttttggagagagagaatgcagaggcgaggtttctgtaatctggcaaatgtgagtgtaactgctgttacactcacttaagcagttttcatactttcgcttagcggaccgttgcgctaagcgagcaagagag

SEQ ID NO: 25037 - DNA, 396 bp, Glycine max
  unsure at all n locations
ntcagaagatgtaagttcaacatgcttttcttccatttctgttggaggatttgtgggatgctgtcttatcattttttggtatgtctaacttactggactggttctcctactgtaggtcgatctagagagaattgcaaaagatactcatggatatgttggtgctgaccttgctgccctttgcactgaagttgctcttcaatgcatcatggagaaaatggatgtcatcgatttggaagatgagagcattgatgctgaagtactaaattctatggcaatgacaaatgagcatttacatactgctctgggaacaagcaatccatctgctttacgagatactgttagtagtgtttttaattcttttaaatttaaattattatctagctggtgaggctttct

SEQ ID NO: 25038 - DNA, 412 bp, Glycine max
agcttataattctaagaaaagcgatgaaaaatgttttgaactcaatcaagaaaaacataggattgaatttcatcattcgactctttagtcctagtgaaatttacgcatatgaatcattctttactgttgttgatgcactcgctaaatcacaatgtattgattcctcacatatgaaatttctaagaataattatcaaatactgattccttgcatattcaaaaatcatttctgcattaaacaagtataagattgcaatcaatatgttatgatctattcctagaaacataacatggagagtaacttcatttagtttagactctcaagattgctttccaatcaaactcaagaactagattcatgagactattaatgagatagaatcaagcataaagagcagaatgatgttaccaac

SEQ ID NO: 25039 - DNA, 431 bp, Glycine max
  unsure at all n locations
ctcagcttaggaacacttggacaatttgttgcgcacggttagtgtatgtcttgaaccaactatcctaaataaaagctttagttattggatgaaagcagatgaatgattttacaagtttagcatgccctcttcacatacgagccgtttgtgcttgaagcttaaacaagacaaacttactttatgatgaatttcaacatattagaagaacagggttgataagattcaaaatctaaaccacagttataattgtgacaaggatactactttgagagaaaagaaaagcatgtgctgaaaattgtgtttcaattgcagcacagactgtatatttttataaagagtgtaaaatcaaatacaaagatacattttcctattactatgnttacatggttcaataaatctagacttttccttactgatatacatntgacatt

SEQ ID NO: 25040 - DNA, 409 bp, Glycine max
  unsure at all n locations
gttttttccatgtttagaaattttaaagctcatgttgaaaaggagattggtgcatatattgcttctttgaggacagatagaggtggtggatttacctcacatgagtttgtagaattttgcaaaaatcaaggcattagtagacaattgactacagcctatactcctcaacaaaacggagttgtagagaggaaaaatagaacgataatgaacatggtgcattctatgttagctgagaagcaggttcctaaaatgttgtggcccgaagctgtaaaatggagtgtgcatatactcaatagatgtcctactatggctgtgtagaacanaactcaagaagaggcatggagcaatgtgaagccaattgttgattattttttagtttttgagtgtgtagctcatgcacatgtcccat

SEQ ID NO: 25041 - DNA, 281 bp, Glycine max
tggagtagagctcgagttatacatccaaaagtctaatgaacaatacttgtaactcgcgagaaggtaacttggtgtttattccaataactggatgtcatctcagtggctaagatcaaaaagcataaattattgtgtctgatctttatattgctttttgccctctttaattgatcaagggatcgaattggttttaaatgattgatataactcttactatgctaaaacatatttcattgtgcgactgtactttcggtatcatttatatctatctaaacaaagac

SEQ ID NO: 25042 - DNA, 190 bp, Glycine max
  unsure at all n locations
aacagaaaaaccccaaaaancaaaagccacagagagaggcgactacccnacaggcaagacaagaaaaagagaaaaaggaccaacgaactcacttggacagggcaagaacgaagccacaaagacgaaaacgcacaaagagaggacaaaggaaaaacgcgcaaacgttaggagagagagaacgcaaaggcga

SEQ ID NO: 25043 - DNA, 411 bp, Glycine max
  unsure at all n locations
agcttgactatttgtgatggtttcggtaccatagactgcaggttttgccaagaaactacagcaatggctcatattagctntgctgcgaaaaattccttaggagaaacttcaatgttgaagtccatggaaatatccttgtatatataatcgtgattctcagatgatttgatgccttaaaattgtgccaattgaagttaaacttgttcaaatttatataaaaaaaattccataatctaagtttgatattttgggattaatattgcagtgctttaactttgtttcgtgtttccaaagattntgcaagagatggtgaagtgaaaataataaaatatattattatgtatcatcctanaatttataataataattgttgttagttttagtttaaaaattattagtataaaaatttat

SEQ ID NO: 25044 - DNA, 455 bp, Glycine max
ggcataatgaattaatgtacataccgcataaagggcttaggaaagtctcatagcattgtggagtgaccaagctgaggccctgtggtcgacacacacggcaatgatcacgcattgaaagcttgccatgaaacacattaagccagtgctcgtgtaaggagctggaaatgtcttgcttatgtctttctgaaaaacgtaatgatataataattctcttaaagaggaaaattaaactagttaagatagattgatgcttaattacttgaattatgaaccatgctgcccaaacaagggtgctaagaattacgaccaaagggcctaggaacatgtttcctttgccagaagagctagttccttccattttctcagcatatctccagtgaatacttgattggcctaaaccaatggtttttccatggtaaaatgacaaaagcaaggctccactcacacacaatatt

SEQ ID NO: 25045 - DNA, 364 bp, Glycine max
agctttgtagccaattcaaacgacaataactttttactcgaatgtctgattgagccccgtaatatatcgagacgctagaaatggaatgttgaacctatgagcctattcaaacgacaataactttttactcggatgtctgattgagtcccataatatatcgagacgctcgaaattgaatgttgaacctctgagccaattcaaacgacaataactttttactcggatgtccgattgagtgacttaatatgtcgggacgctcgaaattgaatgttgaacctctgagcaaattcacacgacaataactttttactcggatgtctgattgagttccgacatatatcgagacgctcgaaattgaatgttg

SEQ ID NO: 25046 - DNA, 411 bp, Glycine max
cattcaatttcgagcgtttcgttatattacgggtctcaatgttatcatccgagtaaaaagttatagtcgtatgaattggctgaaagcttaaacattcaactttgagcgtctcgatatattacgggactcaatcagacatccgagtaaaaagttattggcgtgtgaagcggcttagagccttagcatacaattatgagcgtctcgatctagtacgggactgaatcagacatccgagtaaaaagttattgccgtttgaattagctcacaggtgcaacattcaatttcgagcgtctcgatatattacgggactcaatcagacatccgagtaaaaagttattgactgttgaattggctcagaggtgcaacattcaatttggagcgtctcaatgtattacgggactcaatcagaca

SEQ ID NO: 25047 - DNA, 411 bp, Glycine max
  unsure at all n locations
agcttgtctaataatatatagtttgaagtcgagtacttcttataaaaaaaattagttttgatcctttgatcaaatatattatatatttaacaaattaatttatcatatgtataatgtatgtacttataccttatcaaaatcaaaataaaccattaactcacattagtaattttcaaccctgtacatgtttagttcaatttaacttattgtctttaaataataattcattttttagtttaacttttatatatttttaaggatctcactgatatatgttatttttaaaataatcattaataaatcaatcattgtcaattatatgattattcataattaatataataacgttataccttaattaaattgtntaattttattaatcagtctgaatatcttttttataataattaa

SEQ ID NO: 25048 - DNA, 385 bp, Glycine max
gcttattcaggcctcagcaccaaagccggcttgacattatttgactatcctctcagcaaataatgagagacagggaagacctgaaatatctacgacactacttccatgttccaacttgcttcttactttatctatttccccttatagagcttgatgctgctctcacgtatttgtccacatgtgcgtctggcttcattcatccacatgctatacatgcacgtatgactactcatattcaacagcatctgccttacttccacacattcatcatggaagacatcaagtaggcttgtgtaagctcaacccgacatctaacaagccaccgcatggctaggtcgcaacttttgctggatgcatatgtgctcatacccgccgtctctctact

SEQ ID NO: 25049 - DNA, 420 bp, Glycine max
  unsure at all n locations
agcttataataagacataccagcattttattgaaccagtccaaggaccacaatattgggcccagacacaatatacacaccctgttccaccacataaaagggtccaaagaggaaggccaaagaaaaatagaaggagatccgtagatgaggacaatgtcacaggacataagctaaagaggaaattggctgagtttacatgtggaaggtgtggccaaaccaatcataacattagaagctgtaaaaatattggagttcctgttaggccaaagaaatatgttgcaccatcaacttcaaatgaggatgaccacctattatctcaagatgaacaagctntgaatgaggctgaagaagctgctgctcatgttcaacaagatccggtggacattaatttatctcagcctcatttgtcacaagatagtga

SEQ ID NO: 25050 - DNA, 459 bp, Glycine max
  unsure at all n locations
tccttgaaaagattcctagagaagctagagcttagctacacatacttctctaatagctaagctcacctccttgagatgagaagctagagcttagctacacaccccttataatagctaagctcacccccatgccaaaatacatgaaaatataaaaaagcccctacaacaaagactactcaaaatgccttgaaatacaaggttaaaaccctatactactagaatgaccaaaatacaaggcccaaaagaaggaaaaacctattctaatatttacaaagaagagtggacccaaccttagcccatgggctcagaaatctaccctgaggttcatgagaaccccagggctttctttagcagctctagcccaatcctcttggagtcttctatccaatactcttgnggggtaggattgcatcatgatccctattttttccgtgagttttaatgtgaaaagtatcatta

SEQ ID NO: 25051 - DNA, 391 bp, Glycine max
tatcttattccttcatagctaagcattagctcgcttgggcgagcttcaacagccccaaaatggctttttccctataaatagccatgttgggggggggggttaagtggttccaaggttcaggagttgagagaatcgagagaaaagaaggagaaagaagaagaagaaagaagaagaaatggaagccaaggcgttaccgaatcgtgactgtgatcattccctacattgtctttttgttctgtgttcttcatgcaacagtcaattagttatgctattaagagttgaatgtagactatgtacccttaagggtcccctctgatattatgtgcatattcatcttctctatcaatcatcggtaattcatgagtcatcatattagctatttgattaacac

SEQ ID NO: 25052 - DNA, 450 bp, Glycine max
tgtctcagcgtctatgcgagacagataccattatgttagctatcatcgccaagtaccaagaagagttgggtctagccacggcccacgagcatagaatcgcggatgagtatgcccaagtatatgcggaaaaagaggctagaggaagggtgatcgactctttacaccaagaggcaaccatgtggatggatcggtttgctcttaccttgaacgggagtcaagaacttccccgattgttagccaaggccaaggcgatggcagacacctactccgcccccgaagagattcatgggcttctcggctattgtcagcatatgatagacttaatggcccgcataattagaaatcgttaggaaacttgtatggtctctcagaccttgactagatatgatttctttcttttgttttgaaataaaatgagttggtcccatgtttctactccaaaaagcttgg

SEQ ID NO: 25053 - DNA, 411 bp, Glycine max
ttcttatgctgcaaatatttacaatagacctactcaacctcagcagcaaaatcaaccacagcagagcaattatgacctttccagcaacagatacaaccctggatggaggaatcaccctaacctcagatggtccagccctcagcaacaacaacagcagcctgctccttccttccaaaatgctgctggcccaagcagaccatacattcctccaccaatccaacaacagcaacaaccccagaaacagccaacagttgaggcccctccacaaccttccctcgaagaacttgtgaggcaaatgactatgcagaacatgcagtttcagtaagagaccagagcctctattcagagcttaaccaatcagatgggacaattagctactcaattgaatcaacaacagtcccagaattctga

SEQ ID NO: 25054 - DNA, 453 bp, Glycine max
  unsure at all n locations
tgttacagaacttagganatatcaagaacaagcttgttctcacatcgttcgcgtgtacgatatccactcgacaaggtttgaagtagaggagaccttcaatcctataacgcaacgtggcggacaaaaatgggcagttaacttgaatggccattattgtcaatgcggaaggtattctgcgcttcactatccatgttcacacattattgcaacttgtggttacgtgagcatgaactactaccaatatatagatgttgtttacaccaatgaacacatcttaaaagcatactccgcacaatggtggcctcttgggaatgaagcggcaattcctccttctgatgaggcatggacactaatccctgacccaactacaattcgtgcgataggtcggccaaaatcaacaaggataaggaatgagatggattgtgtcgaaccatctgaccaccgacaaaaatg

SEQ ID NO: 25055 - DNA, 393 bp, Glycine max
  unsure at all n locations
ttctaatccaatcagatgggacaattggctacccaattgaatcaacaacaatcccagaattctgacaagctaccttctcaagctgtccaaaatcccaaaaatgtcagtgccatttcattgaggtcgggaaagcaatgtaaaggacctcaacccgtagcaccttcctcatctgcaaatgaacctgccaaacttcactctattccagaaaaaggtgatgacaaaaatttacctaacaatttctgtgcaggtgaatcttcttccacaggtgattctgatttgcagaagcagcacattcccccgcttccattccctccaagagcagtttccaacaaaaaaatggaagaggcagagaaagagatcttggaaacgtttagaanagtagaggtaaacata

SEQ ID NO: 25056 - DNA, 445 bp, Glycine max
tgaggccgaccatggataattatggggggtatggagtttccgtactccttactacaagagtaataactaatcactccaccctggaaatcttcattgagttgttgatattgatgtgtttataaagttgttgatgatgctccatggacattgttgtgtgttgtgcttttatggaccattgttgatgttgatggtgtgcacatacatgtatgagtatgaagtgtgtggttgcgttttgcaagtaagcacgtaactagagtaatagttaacgggggaaagtgctttttattcttgattcttattggacaacgctgccaacaataaatagaacacaagacaaaaaaaaaaaattgatactacacctcaaaggtggttgctagacgaaataaagtggcaagactactttaccaatccgagaatcaattatatcatggcgaaaattctgaac

SEQ ID NO: 25057 - DNA, 391 bp, Glycine max
  unsure at all n locations
tatcttgcttctacaagatcataagtacttacgcgtcgatgtttttaaacaaaaaaagggggggacaaaccttgggatttcaatggtttgattaaacgtcaaacgactccattgtcgtcactccaaaatggtcaagtgactaaatcaaacagaacatacactctgagggagttccacgagagatttgcaaaagataggataaggttgcatgaactatcacctctttcaaaaggacagtcaatctgtgttttccgaaacaatcaaataaaaatcaaaatcacaaaatatggaaagaatgccatgaacattgtacaactnttcattacattgcattgttgcatacgaagtctgcatttaccgcatttcaagacaaaggttgcatgcatctgca

SEQ ID NO: 25058 - DNA, 451 bp, Glycine max
  unsure at all n locations
tgaggcgagagttaatgaaatctctncttatggaactccttcctaagaatcctagagtcatgagatctcttcactttctcattgtaaatcttggagttctcataggcttctaagcagatcttctcaagttatagcaattgaagcttcttttccatacctgcttcatcaaatgccatgttacaacccttcactgcccaataagcaaggtgtgcagtctctaccagaaggtggcatgccttaccaaaaaccactctattgggagacatccacaaaagtgtttggtaagcagtcttgtgggcccgtagagcctactcaagtaacttgctccaattctttctattgagttgcactaccttcaacaacacttgcttgatctctctattaaaaacctccgcttgcccattagtttggggatgataagctataacaactctattcacaaccccatact

SEQ ID NO: 25059 - DNA, 404 bp, Glycine max
  unsure at all n locations
tgtttgttatcaattacacacatattgtaatcgattaccagaggagtttttcagaaaacattctcaatagtcacatctttttatctgatttttaagtggccatcaaaggcttatatatatgtgactagagacacgaatttgataagagttttgaagaacaaaaaggtcttatcctcttaacaagcaaaattgttttatcctcttacaaattccttggccaaaacacttgtgattcaataaggaattatttaagtgctcaaattgttcaatctatctctttcaagagagatttcttcttctcttcttctttattctgaanagggattaagagactgagggtctcttgttgtgaaaggattctaaacacaaagganagaatgtccttgtgtgtttagaacttgtaa

SEQ ID NO: 25060 - DNA, 441 bp, Glycine max
ttgggacttgagaagcgtgaagagaatgtgcacttgttctttgttgctcttatggcaaaggattggtttcttggattttttggcattgtggggttcaagatagtcatattccgaagcaatctcccacctaacaccaaacttttcatgaatattcatatgaaacacaagttatattgactcattatgcgacgaactacttgtatccacataagatgagccattaacatcgtcagagatagggtcaattcaccatgacatataactaagagacagctctacctcacaaactaacttctagaattgagacacgtgagaaattgaaagcctcaaaggatatcttatcttattctaccagttgcaataggagtgtcagattatccattcttgggacgcactcacatgtgcaaactcgtaaatttcacgtgagagatatctgatcat

SEQ ID NO: 25061 - DNA, 396 bp, Glycine max
agcttctcaaggaggtgagcttagttatgagaggggtgtgtgtagctaagctctagcttctcaaggaagttttctcaaagaagcttctcaaggaagttttctcaagaaagcttctcaaggaagcaacgtagtctataaatagaagcatgtgtaacacttgttgtaactttgatgaatgaaagtcttatgagatacacttcaaagttccacttctttccttcttttattccttcaatttcgtgctccccccttctctctttcttttcctccattaaagcatcctcttcaagcttcttatccaaggcaattcttggtggtgaagctccttcttccatggcttattccctagtggatggcacgtcctctcacttcttctcctttgtattccgctgcatc

SEQ ID NO: 25062 - DNA, 436 bp, Glycine max
tgatttagtataataagaagcacggatataaatatcttgatgcctactattgatatatagcattgaccatacatgaaactagctaaagagaatggaaactattgataatagtacactccatagatagtcatgctgtgtaaaccactactacaagaaagcactttaaattatagtattagctagtaatttctatgattgtgttgatcatggtcgccctcacataactgtcaggtgccctcacttttaattgtgaatttcctgctgccacattaaaggttgccaatgttctgccatcacatgtatgattttctcagccaattttgccaccaattccttgacatgggttggcagccagtttcggaccctttgatggacactgaattgacaacagcagctccacccacattggtgatcaaaactaggttgaattatcagt

SEQ ID NO: 25063 - DNA, 407 bp, Glycine max
tcttcttttgtgtgggatacccaatgtgagcatagtttccagacccttaaggaaagattgacgaccgctccagtgctagttttgcctaacccgagagaaccttttgaggtgtattgtgatgcatcaaagatgggtttaggtggagtgttgatgcaaaatggccaagtggtggcctatgcttctagacaacttatgactcatgagaggaattatcccacccatgatctatagttggctgttgtagtttttgcccttaagatttggagacattatctgtttggctctaagttcgacgtgtctagtgatcataagagccttaaatacttgtttagtcagaaagagctaaacatgagacaaatgagatggttagagtatcttaaggattatgattctgagcttagctacca

SEQ ID NO: 25064 - DNA, 438 bp, Glycine max
gtacccctatggcttgcctccggacttcgctcttctgccgtcccggaagatttaagccaagcccctaccttggaggggcaactcccaccttatgatgactatcccatgcaagacaatgaggaaggagatacccatctcggccccctgctccacttcaaagatccatccccccatgaactaccctaaccaaacatcatccaccatgtcccatcttcacccgcacccataaaagaatctgttcccttctcggaagataaaggaaagattaaggcgctcgaagagaggctaagagcagtcgagggcctcggcaattacccgttctcggatttagaggatttatgtctcgtgcccaacatcgtcatccctcctaagttcacagtactggactgtgataagtacatacggacaacatgtccaaaatggcatcttcagatgtat

SEQ ID NO: 25065 - DNA, 412 bp, Glycine max
tagtcttgaatacaaataattttgcttagcaaataataaacaatgtgatctcaagtgtattgttgatcgaggtcgtacccaaatcaaataaacattaaaaatgcaatatctaggaagtgatcctaggttgtcccccaacgagcaatggtcaaccaaacattcataatcgatagtaataaaatagtaacgaattgggggttgtttgtttttgtaaattaaatagcgagcaaattttaattagaaaatacaagaattaaagcacgttgtttccccttgattcacaagctagtatcttatcctaggttacgagaatttattctttatcagttcaactacttaatccaaccctagattagattactaagcgaaatttaacataaggcattcattatgtgattaagcaacacataca

SEQ ID NO: 25066 - DNA, 316 bp, Glycine max
tactctttactctcaaacgtttgtctgtgagttatatgcaaatgctacattctactccaatcttttaatttacatttgccatcgtgttaacagataaccaacaactaattttaacaaaagttccttcatattagaaaaacatctaattgtaggataaacttatggtgtattggtgagatacgtaagctgatccattatttagtgaaagataaagtaatttcttttagacagtatgtttttaaataaaatgcatatattaatattggaccctttctctaacatatgtatgtgatctattggcctacagtctgagatc

SEQ ID NO: 25067 - DNA, 381 bp, Glycine max
  unsure at all n locations
agcttcatgtataaagcaactcaaaatctaggtatccaaaacccctcaatttaatggattttcaaggtttgagaagtgaaattgagaatggggtaaatttgaagcaaactctcacctcacacaagtctataacatcaatttaaacttgttcaaactgaacttacacctaaaatttcaccgaatcaaaatttgactcctcaacacccaaatttaccctagaaatggctctttgttcactttggtcatttgtttttctctcttgcacagcccaaactttctcataagtcctaaatgacatttcaatctangattaactccctttaacctccaaataccactaaatccagatttggccttccaactctcaaagtctcactcttt

SEQ ID NO: 25068 - DNA, 85 bp, Glycine max
  unsure at all n locations
ntagctcgcctgtgcgagcttcaaccgccccaaaattgctttttctctataaatagccattatgggggggggggggtaaggggtg

SEQ ID NO: 25069 - DNA, 378 bp, Glycine max
agtttctatactttatacaagcatgaagctttcataccacttgtagacaagtggcctcacatatcttaagaaggggggttgaattaagatattgcaaactatttcccaaattaaaattctatttcactttctatgcaagatacaaattcccttataaatgaactcttaaataatgattcaaatagaacaatctaactataaatataaaacaataatatataaaagagtttaacggaagagaaaatgcaaactcggatttatactggttcggccacacccttgtgcctacgttcagtccccaagcaacttgcttgagagttccactatcttgtaaaatccttttacaagttctgaacacacaaggacaatccttccttt

SEQ ID NO: 25070 - DNA, 420 bp, Glycine max
  unsure at all n locations
tagtaaanaatcaaatttcattagaacataattttatcttatgcagattagaccatgtaaattcacgcggcttaaatttactctcagcacgattaatttgaattatacaatgatctatctaggtaattcacaccattacctatgttaataattagctaaaaatttacttcatttggtatacataaaatatctatttatgcttataagattactttagacaattactagtcttttacccgtgcgacgcccggcttcatactcctatttgaatattactaacacatgtgcaaagttcaataacgatgtttatttgtatgataataatgttgagttatgtttagaaaaaagcaatattaagtaagaatacaaacaaacctaatgctattgtagattgtgtatatggtgtagatgtaacaatga

SEQ ID NO: 25071 - DNA, 363 bp, Glycine max
agttttgtttacattatgatagactttacttgaatcttgaaaatgcaaatcaaaaccattttctttcaggccctgatcaattcttgcaaatgcaccatttgtaagctttgcttcttttgatgcttgaacttcattccatttttccttgcagcattcttgaacggcatgcacaatctcgtgacgagaagtatatgctacgcaaatcaaatgaactctctggttgttgagagcagtaactctcattgctttttccacagaagccctgacaggctcagtcaatagttgcaagtctccaatgaaatgtaatcgaacaccgtattcattgataagacttacttgttgaagatactctacaatcttttc

SEQ ID NO: 25072 - DNA, 411 bp, Glycine max
tataggcgttgttttgcaatgattcggtgatgtggtttgtttcttcccaatttggcgtgagcttttcttttgagttatctttcctggcatttcctcggagcctccaaaccaagttgttgggcttgaagctacgtttcttgagcttcaagttgtatttttgagttattctttatttgcatgcttcttcttgaactcatgctttgcttttgagttcctcgaccaaatccaactctactgccaaggattctgagttgttggccgcattgaacatgcttatgcagagtgaaggttcgccgatctccacaggtatcatagtgtcgatgtcgtacgttaacttgaataaagtgtcttgcatggtagattgggagtacagtggtaccccatagcacgcttgggagctcgttcacccat

SEQ ID NO: 25073 - DNA, 562 bp, Glycine max
  unsure at all n locations
caccacgcatacntcancanacacganagtanagatagtgcacacatcgaacaccgccgcatngaaaacatacancgncanaanaaagaaagcngagaatnnaattgaagtcctcgacatagcaanggccnaanncgagcacggaacccggagaagcncaaaagncgaccagcaggcatgcacgctcggttaggatgcatgcacggaggaaaagaaagagggacagaaagagagaggacgcaccaccaaaccgaaggaagaaaaagggagagaagtacaactctgagtcgagcctcataagaccctcactcaacaaagacacaacaagtgcaacacatgacactataaaaagactacgtaaccaccctgagacgccatcccgagaaaacaaccgcgagaagctacgaggagaagacacccgtgagaagctagatctaagctacacacacccctctaagaacaaagcacaccttcttgagaagcgaccgtgaaaagagtcctaaagaagctagagcatagcgacacacacctccctaacagcaaacacacctccacggaagac

SEQ ID NO: 25074 - DNA, 383 bp, Glycine max
ttaagaagattcctaaagaagctagagcttagtctactcgcacatctctaatagctaagctcacctccttgagatgagaagctagagcttacctacaaaccccctattatagctaagctcagccccataacaaaatacaaaaaattccctactacaaagactacttaaaatacctcgaaatacaaggcacaaaccctataatactagaatggccaaaatacaaggcccaaacgaaggaaaaacctattctaatatttacaaagataagcgggctcatactttgtccatgggctcgaaatctaccctatggatcatgagaaccctagggccttcccttggatctctggcccaatctgcttggagtcttctatccaatgcccttg

SEQ ID NO: 25075 - DNA, 382 bp, Glycine max
agctttgcattgtttttctcatccagcaagatgttggatgtcttaaaatcccgaaatattagctgcaccagtaagaatggcaatcattaataatgtgtttccccaaaagttctcagtggattttagcatatgtgaaatgctgtaaaagatatccatagtacaaaccatccacatccttctatttatgacaaaaactctcttccataaagatatccatccacccaattcacatttaaccaaaatcaattctgtaaaaccaatccaaaatcaagcatgcaaatgttttaaccacaactaaagacccacatgctttcttttcaaaatcacataaatgatcacagagacaaaacctagataacctaattaatacgacaaggtaaag

SEQ ID NO: 25076 - DNA, 427 bp, Glycine max
  unsure at all n locations
cgaccttaaaactcagcttanactaggttcttctcttaaaactcttgttttgtgcctttagggaaccctagaaaatttggtaaattatgtcaacgaaccatgggatgaaggaaattgtctgttgctccacaaagattactacaaataagactcacctttggggatgtttgactcctggatgcatcttcatttgcattcgaccgaaacacaatctttccagaaactctacgagaagcagtacttgatattttagaattgcaattcttggtttcattttcaatctctagctgctttatcattgaagaagtttcttcaactgatggtgtacaaggttcgccatccaaacgtcttccataaccagtgaatggaatgatccgggcagtcttagttgctgaatcatcatgaactgaaacactatagtcagaat

SEQ ID NO: 25077 - DNA, 379 bp, Glycine max
tctagcttgttagaagctgtacaagtcagagtctctttcagagaacagaattatataaatttaatgatatcatagataatgaaatatctgtggtccctagttttcattttcttgaggcatacattaattactgatcaatcagtgaatcggttcaactgggattaatatatattggcaaaccggtatttggctaagtaattggtctgaataaattacgtgattattcatacatcgtgatttcttcatcaccacataaaacatcgtttttaacatataataattcataatgattatatgaaacatctcttttataacaatttgagtatctgaagaggacatatactttaatggagaaataaatttgtggatcacatctgat

SEQ ID NO: 25078 - DNA, 388 bp, Glycine max
tatccaaagcataaatgctacataacatcttgaggctagcataagctacgctggagtacgacatgagagcctgtactatcaacaaaagtcgctcttctaataccattctcagttatatgctacttttcatcgtctcttattggaggtataaatctttaatatccccttgattttgtgtattacattaaccatatcttgatgctagtatatacgatacaaaaactttaatttgattactttccttatgctctaatagacagcggatcaaggcttctctcacctagtcttgcttattgtcttctagcatatgcaagaggtgtaaggacagacactttcggaatccatgctactcatcttggtcaacaaaatccttgtaatgcatagaaaa

SEQ ID NO: 25079 - DNA, 356 bp, Glycine max
ttgtttcttttttaacttgggaagtatgaaagcttatttacaacggtcttgtgaatgcctgccagtactaattagtttgcattactacctctaaactcatatataagtacaaataactaattacgctaattatgtccaaatattgaactacacgtgcatccaatcataaatatccttgctctagtgtaacctgtcttgttaatcagcttctagtttgagtatatgtttctgaaaccatgggtatcgggtttgtctgagtggatctactcttaatttcttgaatacttatttagttttggatccaattctaagatactcccccccgcacccctaatttacattatagacaagagagc

SEQ ID NO: 25080 - DNA, 416 bp, Glycine max
tgaacaacctaatattatttgtcctatcaagctattgtttgctctaaaacaaataagaagattagttgtttggtcggctcactgactgattcttaattgtcttagagacggatatacaatctacgcacttagtcttttctttcaagatgtaaaaggtattatgagagcttttgaactttacaaagaatttatagaaaagctttacaataagaattcaaagatagtagcacgtacgttcgtgccttcatctcttctagacttttggtatatataggccttcttcttcaagggttagttgtcttgaaatggatagatttattcacttaagcttgcatatgaagatgcaactattggggcatttaatgcttacaataaatgcacgccccctacatgttggaaagtcactctctttagct

SEQ ID NO: 25081 - DNA, 358 bp, Glycine max
tctattttgctgagtgctgagcataaatttatagcctttattttgatttcttttttacctcttgtactcaactgttgacagatcaaagaggacaagtattttattcacaaccacttagcatttgtggttaagtatcatactgatccagagttagatttgtcaaggattgtaggatttgaggttacaccattcaggttgtattataattcttttccacctagtttctaatatagtcttgtacttatctattaatcttatggctaataataactgtacattgaaatgattcttatgaattcagcgtaaagcatgaatatgaaagttaatggaatgagaattcccgcttaactacctgtga

SEQ ID NO: 25082 - DNA, 361 bp, Glycine max
ttgctaaggtcggatatgcgcagaagatcttcctgcgaatatcttgattacagatcgcgccagaattcttcggctttgtacatccaaagtatactttgacgtatggaggtggccaccgagtgaactatccacgagacaaccatattgttacatcgacgccacgctccatgcattctatctgttttgacaggttcaggcgcgctgtcatttatgaactctactttgttcttggctctcaatgcaatgatcatggacctgctccatgagtggtagttactcgaatgtaagactgtggaaacacggactgtggccggtttctcgctcgtatggatgcagagataactctccatgttgttgatgg

SEQ ID NO: 25083 - DNA, 340 bp, Glycine max
ttatcctttatataagctaaggcgaggggtgttcatacccagttacacaccacttgagcgatcgtatccaccgatatgcaatgtttctatagtatgacgcgtaatacaaaggagtgccttctttgattaatagtgttcgccgctctactaacatttctgttggatctttgcctcttagatgagaacaaatagggtatgaattggctcgatttcatacgtcaaaagctcataacctcactacactcacatggtaaccgagttcacctaacggcggtggcgagctacacacgcagtggttacgggcgatcgcgacgtttttaccctgggactctgtaaaccg

SEQ ID NO: 25084 - DNA, 417 bp, Glycine max
tgtcaaattgaaacaaatgcttgtacaaatgaatggttcatataaagggtaaaacagatttaaaaattgaaactacatcctaaaatataacgctaaagcactgaccaattatgtttatttataaggtggccttatagtcttacaccaaaccaaaaaacttgtgcatcaaaaatacaaaaaaaaattcctcaaattgttgcttatttccaaggttttcttttgttttgaactccctatgaacccgaaaacacaaaagctactattgcggaaccacattgtttataacattctagcacatcaaatacatagggtatgacttatgtgtttcaatcagcaatttctctacataaaataattttttttattgattaattatctttctccaaagtaacttactgaacaaaccataccctatgt

SEQ ID NO: 25085 - DNA, 358 bp, Glycine max
atttatttgcaacggcaactatgttggtgataaagttgaaaggaaaaacacatgcggcagatgtcactttattggtggtaacttagttacgtggatatgcaataaactagactcaactacattgtccactgttgaagttggatatatgacaacaacaagttgatgtactcaacttctatggataaagaatcagctcgaagactacaacatctatgatagtcaaattcccatctattgtgataataaagctgctataagtctttctaaaaatccaacattgccttctagatctaaacatatacaaattaagcatcatttcatacaacccttaaccaaagacatcacgttctcaatggga

SEQ ID NO: 25086 - DNA, 563 bp, Glycine max
  unsure at all n locations
cccttcgaaacgcacacaaacgatcacactgcggangcataataggggtcagnacaagaatagaccgcgtgagacacanaaaccaaaagcacgganatnnnttganacatcgtagcancgcngngacactaganaacacgcaagcggacggaagcnanccagcccgacaaaaccagaattcttgtgctatccagcaaacccaccgacgggcccagggccaaaaagaatccacaagggacgaacgcgactgaattgccgcagcagacaaacaactaccaaggccacaaaccaaagggggagccagaagcaaggaagcgagagcacctgcacacacggaaacacaaccaaccagacactctacgagaagcagcgatcgcaacacgagaaacgacaagcccgggatgaaccacaaccgcaacacgggcgaccagagaagaagattcatcacccgaaggggagacagaaaagcgacgaacccaaaccctcaactcaaggaaagaacagacaccgcaagcgaacccgagaacatgcctcacaagcgacacaacaaagcagccaaaccc

SEQ ID NO: 25087 - DNA, 374 bp, Glycine max
tgtatgttttcttatagagatgttatttatttatgctttaccatttactaatagtgactgatatattgtaaatagactgtacacacgatgaatgaagataaaaacaattggaatgataaagctctgactttgatggagattatcggatcaacggctgaaacgatcgacacaattcatattaaagatcacgttatgaatgtcaagactattctcaaatagacatgacatattttaacacattagtattgcttatattatttctctttacatgtattcttatggcgaagtgagtaagacttttgctgtaatatagaatgatcaactagagcatacttggcatatgctatacagtcttgacaacatgcactctatta

SEQ ID NO: 25088 - DNA, 419 bp, Glycine max
ttgaacaatatacttggccttcatttaattgtttcttggcttggcggccacgctcaacaaagtactttcgacacctactgtacgttgatttgaccaaggctgttatgggaatgttgcgacaatccttcaaaaccttattgatacattctaagaggttggttgtcatgtggccatatcgacgtcattctctatcataagccatcgtccatttttcctttgaaatgcgatcaatccatgttgctatggctggacttagttcacgaaatttttctaaattttgataaaaaaaaatgtgcttgcaaggagtgtaggctgcataaaattagttatcaataacaattttaagtatatatggaagttaaataaacgtgaccattaaatatgaaatcttacccaacttcttcaacatttctttttgt

SEQ ID NO: 25089 - DNA, 378 bp, Glycine max
ggtatgttaatttgaacttgcctgctaagcgagagtgcgcactgagctaggattacacgctgagcgagctgttcaattcttccaactcttcttcaattcttgcatcaattttactctaaagcacttgaattcttcttcttttgacttctgctaataaaaaattgcaaagatgctaatttcttcgttatttcattcaaaacaatagtacagtgaagaaattacaatcattattagtcaaaattgactatcaagttaactcagatttcgcagttatcaactcctccaaattaaaacatttgtttgtcctcatgcaaaagacaagttctgagtgtgccaacacatgagataactatgaatccattaatacatttgtcttga

SEQ ID NO: 25090 - DNA, 407 bp, Glycine max
ttatgaattactttggctgaaaagttttgagctaattgcaagctatggcataaggcatttacgaattgctttggttgaaaagcatcttagaagacttgaaaattaaatgggatggatctatgaagctctattttaataataagtcagcaatcaatatagctcatatttttagtttatataccaaaacttttagtttaccaatctcaactctttcccatcaacacacccaaatggagaataaagatgagatttattcatccatcaggaaaaaaatgctgcttgtcaaaaattaatcaggtaaatttttcttcaaatagaaataccacaaaaaattcaagccaaggattccatggatcatttctatataattacatattagtgttatactaaaacttcagaggcatatc

SEQ ID NO: 25091 - DNA, 379 bp, Glycine max
agcttcttagtctcagatgatgcagctgagtttgtagctacctcatgcactcctctaatgactatagcatcatttatggcgctaaactgctgggagttagaagccatcttctcaattaaattcctggcttcagcaagagtcatgtctccaagggctccaccactggcagcatctatcatacttctctccatattactgagtccttcgtaaaaatattggagaagaagctgctctgaaatctgatggtgagggcaactggcacatagttttttaaatcgctcccagtactcctacaggctctctccactgagttgtctaatacccgagatatctttcctgatggctatggtcctagaagcagggaaaattttttctaaga

SEQ ID NO: 25092 - DNA, 426 bp, Glycine max
tgacaagaaagcagaacctggaatttttgtaggttatagctcaacttcaaaggcctacagaatctacctaccatagagcaacaaagtaatcatcagcagggatgtcaaatttctggagtcagatagttgggactggaaaaatgataagaggtccgagtttcaggaggagaatgaagatgttgatgaagaacccataagaggaaccagatcactttcagacatctgccaaaggtgtaatgttgctgtgatggagcctgagggatatgaagaagctacagctgatcagaaatggataaatgcaatgaaagaggagcttacaatgattgaaaaaaataaaacatgggagctggtggacagacctaaccacaagaaagcgattggtgtcaagtgggtttatagaaccaagctcaatccggatggttctgt

SEQ ID NO: 25093 - DNA, 373 bp, Glycine max
agtctccgttgttcaattttgagcgtctcgatatattatgcgcctgaatctgactttcgagttaaaagttatgaccatttcaatttcacgagggcttctgttgttcaattttgagagtctctatatattatgcgcctgaatctgacatccgagttaaaagttatgaccattcgaatttctcgagagcttccgttgttgaatttcgagcgtctcgatatattatgcgcctgaatcggacatccgagttaaaagttatgaccatttgaatttcttataagcttccgttgttcaatttcgagcatctcgatatattatgcgcctgaatctgactttcgagttaaaagttatgaccatttgaatttctcgagagctt

SEQ ID NO: 25094 - DNA, 407 bp, Glycine max
tataagaaattcaaatggtcataacttttaactcggatgttcgattctggcgcataatatatcgagacgctcgaaattgaacaacggaagcattagagaaattcaaatggtcataacttttaactcggaggtctgattcaggcgcataatctatcgagacgctcaaaatttaacaacggaagctcttgagcaattcaaatggtcataacttttaactcggatgtccatttcaggcacacaatatatcgagacggttgaaattgaacaacggaagctctcgagaaattcaaatggtcataacttttaactaggatgtccgattcaggcgcataatatatcgagacgctcgaaattgaacaacggaaggttatgagaaattcaaatggtcataacttttaactcggatg

SEQ ID NO: 25095 - DNA, 374 bp, Glycine max
agcttgcatcttattttagaattcctctataataaagtttattacatcaatccttttcattttttggtggtaaggacggctttagcccatcaatcctttttctatatctatcatattaatgatccgggctcctttgaatattttacaggaaagattctatttcacctgtaatccgatttcgtaatcccgtgatgtgaccgttttatttcatataaattaattccttcttttatatgtgcacatacaagagttgggttagcgttttttttcttgtacaaaagtaaattaaaccattttcaccagtttagcggctttcgccaccttcttctacctctacaatatcccaccactgccacaatgccccctccacgtgt

SEQ ID NO: 25096 - DNA, 418 bp, Glycine max
tcagaccaaaataactcaaaatctaggtatctaaaactctttttttagtggattttcaaggtttgagaagtgaaaatgagaatggggtaactttggagcaaactcccatctcaaacaagtctataacattaatctaaactcgctcaaactggttttacgacgaaaactctaccgaatcaaaatttgactcctcaacacccaatttaccctagaaatggttcttgccttcactttggtcactcattttcctcctttgcacagcccaagctttcccacagtcctaaatgaaaggattaactcactctaacctccaattaccactaaatccagatttggcttttcaaatcctcaaagcatcacacctttccactcatatcactacattctcactttttaaccctaggttaactctaccctt

SEQ ID NO: 25097 - DNA, 381 bp, Glycine max
agcttgatttgaattaccatttcaaatgagcaccaattacgcttgcacccagaagagctacaagtcaagctcaaaacacagatagcaaacctcctcaactctagagttccatcaccaaacatctcccaccattctccaggttgcataacttttctagtgtcctttgcctcttccatagacaaaaaccctctagcaaaatcaaactcaacaagttgcaaattaattttttttcctttctacaacatccttgaccaatcttctcatacacatgtgcaacccttctttcacctgagggtcatcatgtctaaaactaggtttataatgcaaatgaggattactataatacgcagttgtatgcaaaggcttgtgaagctaatgatc

SEQ ID NO: 25098 - DNA, 405 bp, Glycine max
gttctttgtggattgatgaactctgtcatgcagaattgttgattgctggctgacatattctcaattagctcagttgcctcttcatgggttttcaactttatttttccccctagtgaagcatcgaacagttgcttggtttgtggtctcagcccatctataaacatattcaattgatttggctcagagaacccatgggtgggagtctttctcaataaacctctaaacctcttgtcgcaacctacccttcggcgggagggcgacgcgtgactcgcgggatgcgtgttccacgaaaggaatacgcgcggagtcgccaccaacgtttatttgaggaaaacgtcggaaaaaccggaaaagacgcgatctacgaactttttagtgaaaggttcgggagttgtatttacacac

SEQ ID NO: 25099 - DNA, 381 bp, Glycine max
agcttggctcgttttgtccggaagaagacgaaagcttggctcgcggtgtcacggaggatcaacaggaatggaagaagaaaagaagcagcagtggtcttccgagaagaggagcgcgtttatagatttttaacttaaagggcagaatggccattcactaaaattgctgggtgcaccagcaatattgctgggtgcacctagcatatcccctaacagggtcaacctatggccttgatttgaggggcggtggtccatgactaggagtaacccacagattttatcatatacacaaatatatagtagaaaaatctatagaatctttattaatggattataagtattgtttacatttatatttattttattcagatgaatatatgatgt

SEQ ID NO: 25100 - DNA, 416 bp, Glycine max
tgaatttggagaaatcctttttgagccgagtagccttattgtagtatctcgtcatgtgtggatcttcggtttgatattcttcattcaactgacctttgacgagattggagtcactccaacactttaggaacttagctcatatttgcaatgccacctaaaagggctttggacttggcttagttgtttgtcgtctcgaacttaaacctctatgattgctctagaattacttcatttgggctttctaggatgactccagccccactcccttttgtattggatgagccatctacacagagcttccaccacttgaattacaattttgtattgcttgatagcttgattacaaattttactatgcactgagacttcattgacccccttgattcatattttagcccaaacttggacaatttgat

SEQ ID NO: 25101 - DNA, 356 bp, Glycine max
gaagtgacacaaatctatcatcgtgattcctaaagcactctcacaagattatcaactaaagctttctatctattaatgctttaaccgggtctctaagggatcttgtacgcagttccattaattattatacaccaacaagcatttttgataggaagactaaaagaaatgtgtcactaatgcactgattatgtgttggagaaataaagggagtaaacgccgggatatttacaccaatgagtcatgagcaaccatataagaaaacttgacaccacatttaacccagaaccttaaggctcatgattatgagtcaattggctcttataccaactattggtgaattgaatggagtaaacacc

SEQ ID NO: 25102 - DNA, 424 bp, Glycine max
  unsure at all n locations
gggagaggatgcttcaatggaggaaaagaaagagtgtgttagaaagagagaggggggagcacgaaattgaaggaagaaaaagggagagaagttgaactttgagttgtgtctcacaagactctcattcatcaaagttacaacaagtgttacatatgcttctatttatagactaggtagcttccttgagaagctttcttgagaaaacttccttgaaaagcttatttgagaaaacttccttgagaagctagagcttagctacacatacccctctaataactaagctcacctccttgagaagcttccttgagaagattcctaaagaagctagagcttagctacacacacctctctaatagctaagctcacctccttgatatgagaagctagaacttagctacacacccnctataatagctaagctcac

SEQ ID NO: 25103 - DNA, 375 bp, Glycine max
taagcttgggatgaaacaaatgcgattcatcaaaaattacatctctactgagaagaactttcttttcagatggtgaccagatcctatagcctttcactccatcaccataacccatgaacagaccctttcttgatctaggtaccagttttccttcattgacatgataataagcattgcagccaaatactcttaggtttgagtagtttgctgttttgcaattccagatttcaataggagttttaagtcctatagcagtaaagggcgttctattgatcagaaaacaagttgtattgatagcttctccccaaaaacttctgttgagaccaacattatacaatagacatcttgttcttaccaggagtgttctgttcattc

SEQ ID NO: 25104 - DNA, 418 bp, Glycine max
  unsure at all n locations
ntataagtgcgggttcgggagacaaaggtcaagcgttcgcgatatgcgaagatgatattccgagtactttggatttggtacgaccatgccctcctgatttccagctgggaaattggcgagtggaggaacgccccggcatttacgcaacaagcataatgtaaacctttacggttttaaaagctctatagttgggcctaggctttagagttttcattttgttaaggctttgtgtcttttgtttttgaatttataatacaaggatctttcttcatctgttcctggtctctacccattctcattcatttgcatgtttacttctttttctgaaacggcagatccgatgacgagtcccccgaaggtactaatacctgggacccgtctatcgacttcgagcaagaaatgaatcaaacggaagatg

SEQ ID NO: 25105 - DNA, 378 bp, Glycine max
agtttgcatgtccgatgcagcagtaatgatggcccgagtgatgttggggagtggttacgagcccggaataggtttaggcaaggacaacggcggcataactagcctgagaaacgccaaaggaaatcgtgggaagtatgggttaggctataaacccactcaggcagatataaagagaagcattgcgaaaaggaaaagcgaaagtcaaggttcgcggttgagacaagaaggcgaaggaatcccaccctgtcacataagtaggagctttataagcgcgggtctaggggacgaaggtcaagttgttgcaatatacaaagatgatgttccgagtgcattgaatttggtacgaccgtgccctcctgatttccgactaggaaattg

SEQ ID NO: 25106 - DNA, 414 bp, Glycine max
  unsure at all n locations
tcacactgctgtgtagattntaaatctaagattgacagttgcattgagtttgacataaagaaaagaaaagaaaagaagaaaacattcctttagcttaattgtactgaaaaactacttgtgcataatcatattcattcttttcaacataagctcatgtcttcaaaatttgggtaaatttgtattgaaaatattttttatgataggaatattactttctatcatacataattacaaattgtgtactgaggagaacatattatgaatgttttagattattctattgatcgaaagtaaattttgaatttgacaattttataggaatcaaaaaatcttactaagctgacctctgcatataaatttatcaacatagttggcttgcatgcttttcaatgatttgaatacgccttaatagct

SEQ ID NO: 25107 - DNA, 376 bp, Glycine max
  unsure at all n locations
agttggggcatagaggtagaccctgcaaaaatagctgttatttcacaattgccttacctctcttgcgtgtgagaggttcgttcttttcttggtcatgcacggttttataggagctttaccaaggattttagcaaagtggcccttccactatccaatctgttgcaaaaggaggtggagtttgattttgatgaccggtgcaaagaggcttttgattgcctcaagcgtgcggtgactaccacccctatcattcaggcacctgattggacagccccatttgagctaatgtgcgatgcatccaattacgcattgggggctatccttgctctanagattgataagctacctcaggagatctactacgcttccagaactttgg

SEQ ID NO: 25108 - DNA, 417 bp, Glycine max
  unsure at all n locations
tattggattatggggcacccgtcatatgtggtactaggtggcgatcgggcgatggcgcaaatgaactctcccatttccacaagtcaaacataaacacaccatccccagttgcccacctttaaattaagctcacgcactcctacgtagcccttatcctcgttcctctcagcaccgggtccccatcaacccctccaagcttccacaatatccaaacaattcgatttcatttgtcatgaaactaccctaaaccaagaaaatagagtggaggcagaaaactctgcacaaaattcattccaattccacagttttccctactcacataccccagtaacattctctttgtttcgattcgttaaccattggatcgccttgaaaattttactggaggttcctagtacataaatatacattntgacc

SEQ ID NO: 25109 - DNA, 376 bp, Glycine max
ttgcatgcatttttcctaacctcacacaagtgtaagaactatgaacaccttaaaaatctgttgtttaacgttaaaactaagaattttttttttctcaactaattttgttcccattttggtggaacttgtcaccttgccaattgaaatgaaatttgctttgattgtagtgattttgctttgaactacctaagtggtacgattccaaaggagtggggttcaacaaaactaactaatatgtaagttcttatcaattaattgaaagttttcatctagttacttgccttttgtattaaatacggttgctatactgtgcagctctctatttgttaatcgtatatttggggaaattcctaaggagttgggaagtattaccact

SEQ ID NO: 25110 - DNA, 414 bp, Glycine max
tgtagaagttactgtcatctgtcagaaaaccattatttggctttggaaataatacaatctctttgggaatctgttgttgtaatgattgaaaaagagacctggccaacttggatgctccaggacttttgcttatgtcttcaactgcaccaaagacattgttcaataggttataggaatatcatggccattgttgtaaacctaacactatgcagccagatacatgttctcatattctttgactctcctccctccccattttctccttttatcagatttgcaaaaagattaaattattcttttccttcattgatgattcctcatcctcctgctacgccttttatcagcaaattattattatttaaccttacataaaaagataaattggcagattgccaaacaaccagaaacactgag

SEQ ID NO: 25111 - DNA, 373 bp, Glycine max
tttttttactttattttttcccaatacttacaaaaatatcatcttatttttttacctcatgtcatgatttgaacaatgtgtattgctacaaagtactgatactttagtttgcttcttacatctatatctgataccaatatattgatatattaatttcactggtacatatatgtgaagtgaccaattctttaaaaaaaaattatgataatcaaatatagtgacatgtaacatagaagtaagtataatatagaaatataaaaagtattgtttcttgatgaaccaaatatgaaaattgttttgtttatacgtaatttcaagacagatatgagattgatcattgatagtaccattcttatatgtgatcaatacgaaa

SEQ ID NO: 25112 - DNA, 418 bp, Glycine max
  unsure at all n locations
tgttgggtagaagtaactactgttctgttttgtgttattatatgtattagatacaaagcatttcaactgctctaagaatgaacatcagactttcacttcttctcttttgagtgtatttttattatttctaattttgtgaatctcttgtgccaacattatccttctacaaacttaagttgaatctttagccaatgaattttcaaaagctaagtcttatttgtaagtttcatgtattctgcaaatggaatgaaattgtatatgaagtttcaaattgtatgttttaattatattaataaccccttaaaaaaaagatgatattggttatgctgaaacatttttaactatttgttatgctgacttcgatggaagactccacattctaaattgatctcattntatagaggtgtggtatctataa

SEQ ID NO: 25113 - DNA, 347 bp, Glycine max
tctgctagtttacggggccacatactatctaccttgataggaagcccaacattgtgcgtgaaagactcatcaatattttcatcattctcagtcttgccagaagggattttgacatcagtttccaccctcctctgcttggtcttgctcttctgggatctcaacgtgcgcttgctggtcagtccagtgcgactatcctttctatcacaattggctgtgcccaacaaggtcacagttggttcagaacctttaaatgggttggagcattccttttccgctgctattgttgcagccttatatgccagatcatggacaatggagctgcaaaacaggatcgtatcggttgtctc

SEQ ID NO: 25114 - DNA, 409 bp, Glycine max
ttgttatgattaacatttcatcgatgaattattttgtgactgtcaggcattatcttttgttgcatgcagacatcttatatctttcacgcacacaaaaaattgtaacaaatcatatttgtttggcagaagtggggccgaagaaaatactagatctgatgaatgtcccatggctgactagagagaacgttgctagccacttgcaggtgatgctataatttcacacctgaatgttatctttcattcaaatgagcatctagtttttaatattttatactgtatgcatgattacatctcatttatatccccgtgtggtagacttacaatcacaacaaagcttcactgtaatacaatagggtgtaagtggtaacctccataccattggtcctgtacaaatgtttctcagaaacat

SEQ ID NO: 25115 - DNA, 379 bp, Glycine max
agcttcactctgctcttcttttacttccacattagttatagtctatattgttttatgtatacgtgcatgatgagctacctcaaacttctaaattatgatcaattcacacgtgcgttatatcattctgattataagcacaacctacaattccctccaaaattttgtcacaagaaagcacttgtaagtttataaatcttgcctgcccacgaggtttagattgcttctttgcccaagtatgattaggctgatatgcccgcattgctctgtctctatctctggtgccttccatggattgctggtttatgtttgcggaccccagtaacacatattcatcatccactatcattccttttgaatgaacataaatcatgaatctccg

SEQ ID NO: 25116 - DNA, 423 bp, Glycine max
tgatatgtaattatgtcttttcaggaatgacctttatctgttagacaattggcggcaatttgaattctaaggttaaatctgctgtgatgaagggttcaacactaatgaaacctactgctagtcttttggctaagcaaaatcggccccatccaattgttagctcaaggtgatcatcggagaaacttgttctttgtcatggttcaaggcatgaattattagtgaaaatcaaacagtcttgcaacacttgattagttggcaaacattttttgaattgaatcatgtcactgcattctaccataagatatctgtttgctcggcatggtgcattgatttaaatgctttctttcttggatggttactctgttctttatgaaatcgtgaattcttattaagtaggattgccggagtattactgcatttatt

SEQ ID NO: 25117 - DNA, 379 bp, Glycine max
agtttgtgtatataggctttaatttactgctaatttggctttgttttttttgaaacaagaacaagtggaggaggagaaacatatatacatatcctttaaaaatggttaccatgcttgtcaaaaatacatatccttcatacacactacattttgtcaaattataacctgaccatacaccattttttgagaaagcaacttgaggctattgtggttcaagtgccctagtattttgcatgtgccacattcaaacagtcgttaaattcctttttttgtcatcaacatgaattttttctcataattaaaggatagaggaaatctcatggtctttgatattgttgccatagtaattcatttcaacaaggattgctgttagggatag

SEQ ID NO: 25118 - DNA, 423 bp, Glycine max
tggccataactgtcaaacaaattcaataggttgtacatatttctcttagtacctctgcagaaaatcagaatgtcatcagcataaagcgagtgcaaaggagtattgaaagatttcagactggacatcagatgagaaccttagattgaatcagttgagcagtgcccctgctgagaacctcctctgccaagcaaaaaagaaaaggggataaagggtcgccttgtcgcacacccgagatagacccattgatagagaaagaaagtctcagaatccaggattgtttttattcagcaacaaaaggtagtgctgaagccgaaggaatgaagaacttggagaaggaattgtcagtccaacgagccaaaagcttttttgatatcaatttttagggcaatgtttcctccaaaagatttgcattgcagcaaatta

SEQ ID NO: 25119 - DNA, 371 bp, Glycine max
agctttggacaaggtactttaccaagaatgtgaaagtgggaataatagcaacaatgtgttgagttggaatcatagggtaaacattgctgttggtttggcttctgtgttgagttatttgcaccaagagtgtgagcaaagggtgattcacagggacattaagactggtaacatattgctagatgggagcatgaacccaaggttgggtgattttggtttggcaaagcttatggatcatgacaagagtcctgtttcaacactaactgcagggacaatggggtacttagctcctgagtatcttcagtgtggaatggcaaatgagaagactgatgtgttcagctatggtgtggtggttcttgaggtggcttgtggaa

SEQ ID NO: 25120 - DNA, 417 bp, Glycine max
tcgcaaatgtacttggttgttgcccagtttcatcatatcttccgtaatacttatcacctctatcatatctaataattttcacatttatgtctaattgtcattttacttcattgtagtaaatttctaaggaatccatttcctaagaaatctcgggcaataaatagacataaccgtaacgtgaataatcatcaataatggtgataaagtatcattcctttttgaaagaactaacaccaaaaggtccacaaatatcagtatgcacaatttcaagaagttgagtgcttcttgtagctcttttctttgtatgttttgcttgtttttcccttaatacaacccacacaaatatttagatccgtaaaatctagataaggaagaatttcattctttattaatctttccatcctttctctaaaaatg

SEQ ID NO: 25121 - DNA, 378 bp, Glycine max
cgtttattgtttcccttctcttcttcagattgactggatctgttatgcgcaattaacaagcctggattcaaaagccaccaatttgcatagtgatctccatcatactcacatcacaatggaaaccaagacattcggccaacgcagcaccggtacacttatctgtgcagacagactcatgacatgtcagacccagagttagcgactgactatacttaacgcctaaaaactgtcaggtagagattacaacttaatctaagctcactagctcgccaacacaaacgaagtgtgcgctcaaccgatagcctttctactcacaaatatagaagcaattcgtgcacttaacatcctataagaaagtgacatggagaaactaaccac

SEQ ID NO: 25122 - DNA, 415 bp, Glycine max
tgcgagctattaggttagtcatattctaactagttcctcctatcaccgtttgttacgcttagtatgataataatggtttgaactagacgcttcaattctttgattcgtggcatatagtattggttaatagcttagcatgctggagtgtgattttcttatctcgaaattatgataatgccaaggacttcagaatggtgattatgtattctataagatttgggtttctaattgaagtaattctgaatgatttatagcttaactctctttgaatttattggttatgttattatgtattaattgatgtattgactcgtaagaagagtaaatctgtttctcgtggcaagatgttattagaaagtttttctttgtttttgttttttttccataatcgtcttgcagccaaaaacaattgtca

SEQ ID NO: 25123 - DNA, 379 bp, Glycine max
agttttgaacaatattcttgtccttcatttaactgtctttgggcttggcggccacactcaacaaagtactttcgacacctactgtacgttgatttgaccaatgctgttatgggaatgttgcaacaatccttcaaaaccttattgatacattttgagaggttggttgtcatgtggccatatcgacgtccttctctatcataagccatcgtccatttttcctttgaaatgcgatcaatccatgttgctgtggctggacttagttgacgaaatttttctaaattttggtaaaaaaatgtgcttgcaaggagtgtaggctgcataaaatgagttatgaataacaattttaagtatatattaaataaacgtgaccatcaaatat

SEQ ID NO: 25124 - DNA, 416 bp, Glycine max
tgatacaagtgttcttgaggtctcttccatcaaagctttgtaaggagctgttaatcttgttactcttattgttttccttaccaaatttgtgcaagtttctcattcatggttcaaaaatttcatttccgttcttagaagtttgagacatcaagtacccgagttcttagttcatttgagtcattttgtgcaacttcatcaaggtaaagggtgtctttccacttcttgaaccctaaccttggtagttatgttgttcgattgtttgtgtgacaagtgttttctactgcttaaggggccataattggttccttgagagtaatacgtagacctgagcctcgtatctctttcttatttttgactgtatgtgtttgttgatgtaagtggcacgagggctacacatgtgatgcagtggcagaaat

SEQ ID NO: 25125 - DNA, 376 bp, Glycine max
agcttgtcaattgaacacatcaatagccttgcatcctttctcaccattttctctccaaaaatcaaaacttggaacctcattcttccccattttgcatgagatcttcaaggaggaagaggccacaattttcatcttcttccaagctccatcatattgttttgactttttctctcaaagccttggtaagaagcccttaaacctttcttttccttctaatttctttctcatttttatgaaaaattcttacttgaggttccaaatttatttttcatcctttggaagcttgagacttcaacatctaagctttttttccttaaccattttgtggaagcttcactcaaggtaaggggagtctttccacttcttaaaccctaac

SEQ ID NO: 25126 - DNA, 424 bp, Glycine max
  unsure at all n locations
tcaacctaggggagacggaccattccaagtgttggattatagatcaacgacaatgcctacaagattgacttgcctaatgagtataatgtaagtgccacttccaatgtgtctgatttatctcttattgatgcagatggaggagccttggatttgaggacaaatccttttcaagaaggagggagtgatgaggacacaactaagggcaaggaccatgaagcacttgaaggcccatgaccagaggcatacttaaaaaggcccaacacagtgatgaggacacaactaagggcaaggaccatgaagcagttgaagggcccatgaccagaggcagacttaaacaggcccaacacatcatagagataaggctggtcattngtatagctgccattgatgatgaatgaaggcccatgtttccataatttttatt

SEQ ID NO: 25127 - DNA, 373 bp, Glycine max
agttttagctcgcctgggcgagctacaagtccaccaaaatgacactttgcctataaataggcgtgctaggggggctaagaaggggttccagtattgagagcgaaggaagttgagagaaataagagagaagaagaagaaagaagaggaaacgaggtcaaagcactgttgaatcgtgactatgatcaatctctacatcattccttgttcagtgttctttatacgactgtcggttagttttgtttttaagatttaaatgtgatctatgcacccttatgggtcccccttgttgtctgtgcatattcatctcctcattctatcatcggtaatctcattttttttgtaaagtttaaacttaactgatcattagcgccgt

SEQ ID NO: 25128 - DNA, 417 bp, Glycine max
  unsure at all n locations
ntgttgtagttgtgaagtagttgtgaagaatgctttattaaagttagtggaacttgatagattgtcaagaattgaatatagtctcagtgaaaaagacgaaccaatataaaactttttgtgtctgatccttttatatctcttgttttaattgactaagggtttgaatttgattttattttttaaaagagtttttgcaaaatcggttaatatcgtctaattgagtctgatgtgaaaatcaggttttttttatctttaagctttatcagatgatagctttgtgatatttgtctttacaatttgatgttccacatcccaatataacaaaatcttttaataggaagtatgcctcccaaaaaagttgtagatacatgtcttcctaatttaatcatgtcctggattatattttaaagaataaat

SEQ ID NO: 25129 - DNA, 375 bp, Glycine max
ttaagcttgtcggcagaactaacaatttccattaatcaatttatcactaataacttgtccttagattggaatttttaaaataagatcaatgctttgaggaattattttatatttcataatgtggaagcatttaaacaaaattaaaattttattttgatgtgaattatagcaatgggatcaacacaaatgaattactgtaggacaagagaattagtcatttacattgcatgataaagaaaactagataaaataacaaacaaaatgctgttgataatacgaaagttcacgagaccagtgctactaatagttagtgggggtgtgtatgtttttccctaaaccctaaagacacataagatgtgtaacaaaccaactaag

SEQ ID NO: 25130 - DNA, 413 bp, Glycine max
tgtatttgaatgttagtgtaatgaggtggatatagcgtcactggtacttactgtttcatcaattgtaactttcatttgacgggcattcaatttggaagaagttgggcttacttccagatttcaattactatttttcactttccagtgcatggctctttctattatggtttccctacagcaacattttggcatcttatatcttgtttgaatcttggtttgatacattgtcgtctttgaatacattgaatgttgagaactttagcctatattaatatctattatatctagtttcttgttctttcattttccccaaattttttcttagtgctactttcattatatagtgccagagttgtacttactgttaaaatgaaactttttcgttcttatttattataattacattgaattct

SEQ ID NO: 25131 - DNA, 383 bp, Glycine max
  unsure at all n locations
cccaaccaccaagaatggacaggggaaaagaaagggagaaaaaaaacaaaaaagaaanttgagctgtgaccctganaccannanaggaacaggagcacgagggagaagttgacgaatanaggggacggcgacaaggggagagaggcggacccgccacgaacaaccgaggacagagacaaagcgaagcgacggaagacaccaagggccgaaagaaccacgggaggaccacacgcgacacgaagacccaaagagcggcagaaacaaggaacaaccaaggaggaaaagggacagagccggacgagacaagaaggggaaacaaaaaccgagcgccgaaagagacgacaaaaagggaaacaaccggagcacaaagcgcagccgcacac

SEQ ID NO: 25132 - DNA, 221 bp, Glycine max
tatgcttgttttcagttatatgatgtcacctttcttacacagggcataacacatataacgataactgtttagcgaaaagaacggaatcactgtttaacgcggaatatgcggtttcttcgaaacccgctaagacgtgacccttaaagtttttgttattgtaaacggacgtgaaggatgtacatgtggcactaggtccaaccgtgtgatgcaagggcttaaag

SEQ ID NO: 25133 - DNA, 378 bp, Glycine max
tttgcttttcttgatgtcattcaaaacacactatgtagacctaaatgaagactaaacattgtttatttaattgtattcattatacgatataatttgttgtaacccgttactaaccaattaatattatcaactactcgtttggttaagcaaggaaattgttggtccaacaaaaatcatttacgcgtgcagcatacatcattgtcataattgacaacacataatgacatgcatgtgtattacagtttgagcgtgacaacacattggctgacttcagtacacattttgaaactagcagtcgctcgacaacacattggttgacttgactacacattagcgacaacacattggctgacttgactacacatctacgcgtgtctg

SEQ ID NO: 25134 - DNA, 418 bp, Glycine max
tcctctaccgtaaaaaaaaaacattatcggccagtgatcgtttttaaaaagtaattgcgcaatgtcaactgaaaaatatcagtcgggctacttcacgaccgatgtcggctattgagttttctattcaatcctttaatgaaatatttatgatgtcggtaaggaaatgttcgatcggcgtcatgcggtgatgcttcttttttagacctcgatcggtcatctttcctagcggacgtcgactgacatttttttcaatcaatatcggtgaaaaatatttttttgccgagatgggctaatgttttcgtggccgaataaatggaaacatgccagtttcggccgaaagaaaacgtcggttgagctcgctcaaaaaaacctagccgacctacattgtacattttttatgcaacaccaaaacaagaaa

SEQ ID NO: 25135 - DNA, 370 bp, Glycine max
tagtcttaaacctaataatacaaatactctctacttaagtacatattctttccatctctacctcttatgttccacattaatgtcatccaaatgacattcactagtacaagaaaacaacacttgcaatgaaagatttcaaccaatttttagtttccttcaacgaactttcaactttcacaatctttctcttttgtcgaaaaatcatcaagtctttctcatcatttagttcatatgaacaccattcaaaaaaattgtatccaactccaactctgttttcaatggaaaaacccacaaattaaacatgaaacaaagccatactattaaaaagaaatgactaaaccgttcaagacaaactcacccaatgaggaca

SEQ ID NO: 25136 - DNA, 409 bp, Glycine max
ttaactaagtttttagtccttgaacttttttgattttctatttttagttcctaaataaaaatttgaccgatcaaggtctttcaactttttttcattaagatttttagttcctaaacaagtttcaaactcctccacaatggtgagtggatgctcaggcataagcacccaatgggcaactccctttctcatcttttcatgatcataattggcacttgacttcaataagaaatgaatttgtgcatcataattagattcaccataatttaaggtcttttgtttcaaattaaatttatcacaattccctaaatgtctctttgaatgtgtggttgttccaccctccttgtagcatattttcttcctataatgtacacaaacaacttttaatgtctcatttgataacttaatctca

SEQ ID NO: 25137 - DNA, 378 bp, Glycine max
agcttttagtggtatttgactaattatggtttattgtacttgacttattagggtttagtgttacatgaccaattagggtttagggttatttgaaaagatagggttgcttgactaattgggtttaggggtatttgacaaataagggtttagggttacttgacgaatttggatttaggggtatttgactaatgaggatttatatgtagttgagttaattagggtttagtgttacttggccaattagggtttaggggtatttgacaaattagggttacttgactaataagggtttatgggtatttgaaaattaaggtttagggttacttgacaatttggggtttaggtgtatgtgactaattaagatttataggtacttga

SEQ ID NO: 25138 - DNA, 426 bp, Glycine max
gttgcccaatgaggtgacattgaaaatacctagagggactacttgatatacagaatttgctgctcgtttcatagtggattccaactgcgtatatgcatatttaacgggcataccactaaccagagcagcaaccaatttgaccttatttggactctaaagtaccatagaaaacagggtatgtgaaatgtgcaactagtcgggatttaatcggatccttattagaccataaattaagacattgtccacagcaggccagggaaggcatatcaatggctaagaaattagatgccaacttttctgcaaaataacatgttggttgaaacacagaagtttcttagcgagtagctaggcagtggcaccacatagatgtaacaaaacattggaattagtcaatatacatgttattgctaagctgaacatacttgt

SEQ ID NO: 25139 - DNA, 379 bp, Glycine max
agctttatctttaaacatatccttacactcactttctacactagttcaccttcactcttattcgagcttatactcgactttacttttactacactagctctttttcttgggtaactcactccactttccttactcgaacttatctcttaaatactacccttgctttagtctatgattgaaaacaatacaaacattctaacctatggtcacatagtgtcattctagatagaccttcatgcctttaaaaagtcacttctcatccattccaagtcatcacaatagtttcccatcccaatatatatcataactaaggagggaaccatccacccattacacaagtacaacctaaggcattcatggcatccacatcatccatcac

SEQ ID NO: 25140 - DNA, 421 bp, Glycine max
tggagaggatgcttcaatggaggaaaagaaagagggtgttataagagggaggggggagcacgaaattgaaggaagaaaaagggagagaagttgaactttgagttgtgtctcacaagactctcattcatcaaagttacaacaagtgttacacatgcttctatttatagactaggtagcttccttgagaagctttcttgagaaaacttccttgagaagcttctttgagaaaacttccttgagaagctagagcttagctacacacacccctctcataactaagctcacctccttgagaagcttccttaagaagattcctaaagaagctaaagcttagctacacatacctctctaatagctaagctcacctccttgagatgagaagctagagcttagctacacaccccctataatagctaagctc

SEQ ID NO: 25141 - DNA, 367 bp, Glycine max
  unsure at all n locations
agcttcccttttcaattacgagcgtctcgatatactacgggacacaagcggacattttagtcaaaagttattgtcttttgaatttgctcagagcttttgttttcaattacgagcgtctcgatatattacgggactcaatcggacatccgagttaaaagttattgtcgtttgaatttgctcagagcttctgttttcaatttcgagcgtctcgacatattatgggactcaatcagacatccgtgtaaaaagttatcgtcgtttgatttttctaatagcttctgttctgaatttcgagcgtctcgatatattacgggactcaattggacatccgagtaaaaagttattgtcgnttgatttttctcagagc

SEQ ID NO: 25142 - DNA, 414 bp, Glycine max
tgagctcattgttgctgccccacaaagctcctcggtttttatctcagccatgttcctccttgtgggcccttttagtttcttgttcaaggcctcttgtagtggtcgcattttcctctcgtaactcagtgcactctttccagatgtttgtagcggctgacttgaacttttctttggcgagtcttgccttccctagctctaattttagagcttggacttcttcatcttcttccggagcttcgaagttctcctcattgataacttttaacttggcgagccaatctaaccctcgcgtatgaactcttagccattcgtgataaccaccgatgacgccattacggatgcccctaagttctttatccttcctcaacggacttcttcatgccttgtggactctttgtacaaccttgagacttt

SEQ ID NO: 25143 - DNA, 349 bp, Glycine max
agttttgttctttgcattaaatgagaagacctgaacttatcacgttatctaaaaaaaaccttggggtggatccaagcgcttcgatcattcatttgcatattcatgttttggcggcatactcaccgatgttcatttctttaggaatctcatcataactaagaaagcacaaaggcacccctataacactcgatccagaaaaatggataatgaagagggcatgcacgaacagatgaaggccgatctatcggccctaaaagatcaaatggcttccatctcggaggacatgtcaaaactccagaagactatataggataaagccacgacaaccgtctccagtaaagttagggaa

SEQ ID NO: 25144 - DNA, 419 bp, Glycine max
  unsure at all n locations
ntcataagtgaaatcaggtgcagccatctccctaagtgttctctcacaaggcagaggttgagtcatgttctcagtatgaaaattaacaatcgaatgctcaaaatcagaatattcagaatcattagcaacagaatgctcaaaatgctcaaagtgcataaaatgatcaggatgcacactatgcctaactaatctatgaaaggttctatctattttaggattaaagggttgtaaatcacctggattgcccctagtcatgcactatatgaagcaaataatgtgttctcaaacaagcacctaacaagggggtaaaactacagctatactcaaacaatatcaaaatgagctaaaattttgtgaggaacaccctaaaatcatgaaaagatagcatgaaaattttcacacaaaaattcaaagtctaa

SEQ ID NO: 25145 - DNA, 378 bp, Glycine max
agcttggttttggtcaatagcaccccacctgacgtccccaaggtctcctgacccccgcgacatatctctaggtaccactctatggtcaacaaacaaaagtaggaagactgactcttccacgctttctcacatcaagcttagtggattatggggcactcgtcatatgtggtactaggtggtgatcgggcaatggtgtaaatcaactctcccactttcacaagtcaaacataaacataccatccccagatgcccaccttcaactgagctcacgcactcctacgtagcccttatcctcgttcctctcagcaccaggtccccatcaatccctccaagcttccacgctatccaagcaattcaatttcatttatcatgaaacta

SEQ ID NO: 25146 - DNA, 417 bp, Glycine max
ctgacaagtgttgtttttcaccttctcgataagcctatttgctagcttagcgagcgtccgctaagcgcaacactcatgggttaagtgcgaggaagactctggaagaagataagctgtacaggttcactaagcgcaccgcttcatctcactaagcgcaccgcttcagttcatccgctaagcgagaaggcacgcgataagccgaaattcactaatgtgcgctaagcggtccataagtgcgtgatgtgtcattattttctcctatttcttaaccctttttgtcaccattttaattactaattagccttaattgtgaaattaattatgcagttttatcatttgggcctacttgactaagtttatgtttttaatttaatttcaggagaattataagcaattgtgcttgaatccgaaattggg

SEQ ID NO: 25147 - DNA, 375 bp, Glycine max
tcaagcttgagcacctttttcctcacttcttccttcattgatgggttgagccttctctagggttgtatgattggtctatagtctccttccatcattttcttgtgcatgtagttggcagggctgattcctttaagatctaatatgtgccacccaattgcttccatgtgtcccttgaggacctttaccaacctattctcttcctctgctgttagctcactgtgatcaccacaggcttggtctcgctctcctccaagaacacatacttcaggtggttgggtaggatcttcaactccaccttggtcttctcggatggactcccactttttaattcttcaaagctggtcccccttgcaggaatgttatcttcatgatcta

SEQ ID NO: 25148 - DNA, 416 bp, Glycine max
  unsure at all n locations
tgtagaatggctagacatgatacatgtcagggtttgttttggttcaaggataaaagggatgccccacactatttccatgacacaaatgcaaaaatgatgatttggaaacttttatgcaaaactggtcatgcatgcacctatgtggacactcaagtgtcaaacttttatggtcatgtgatgctagggctcangattaatttcctccattttaaatcaacccaatgtttccaaaatatgttcttttatcaatttgtgcattcctccaagtccatttcgggcatccggggaaatttcacagcattcacccttcaggtgtagacacgttttttttcaaaaactagctatgatcagcgaatttttcttttaaagaaaagttggaaatcatctcttttcaaaagcatggccgatttttagct

SEQ ID NO: 25149 - DNA, 381 bp, Glycine max
agttttgagccaaaatcctgactcaccataaaccttgacccagggtgagaatgtcaatccttaccctcggaagcgaaaagaatagaagggaaatttccaatcaaagaaaaggaaagaaggaagatttccaatcaaaaagaaagcaaaaaagaaaagaaggaaaattccccaatcaaagagtgggagaaagcaaaaagaaaagaaagaaaattcccaatcaaagaatgggagaaagtaaaaaaggaagaagaagaaggaaagaaagctcctgatcaaggatcgaaggaaaacagaagaaatgtgcagaaaggtctttggaccggacaatatctgaacaatacagaattgtcaccaaatgaaaaaaaagaaggaaaggaaacc

SEQ ID NO: 25150 - DNA, 421 bp, Glycine max
  unsure at all n locations
ntgcggatttggtcttcgccagtgaaaggatcgatgtgtgtccgaaaagaggcaaatttgatcatcctactaggacgactgagaaaactggggcaaatgaagagggtgagaaagagggagaaacccatgctgtgactgccattcctatacggccaagtttcccaccaaacccaacagtgtcattactcagtcaataacaaacctcctccttacccaccacccagttatccacaaaggccatccctaaatcaaccacaaagcctgtctaccgcacttccaatgacgaagaccacctttagcacaaaccaaaaaaacaccaacaaaaaggaattttgcagcaaaaagcctgtagggttcaccccaaattccgttgtcatatgctaaacttgatcccatatccactcaataattcaatgctagc

SEQ ID NO: 25151 - DNA, 375 bp, Glycine max
agtcttaaatatttgaagttctagctagtacacttgaattattatctttttcttaagctcctttacctttgcctggtagtggctggggttgagtaggcttatgtgacagggcagcagagattgggaagttaatttatggttttgggttgcagatgagtgatttcagtgataagctaatgataaagtttttgtggggatgtaattgtgtttagatgttttgaaggtatttctagattaaaggttaacattcataagacctaaaccttgccgacaagatgaaaatggttatggggaggcaaacttgttgaaagaattttaagtgtcatgatttgttggctctagctatctgcttggagccaactatgtaattggatt

SEQ ID NO: 25152 - DNA, 416 bp, Glycine max
tgccctaacctttggaatgagctatagaaatatccttaacaactccctctagttcagttgtaaagaaagaaagatacccacatataaaacatatcctcctaagaaagcaccagagtaatcatgaaataacctaccatagcgaagggaaccatgaaatgattttaccagccttgggtgcatgaatattgatgttaaaagctttgatgacctgaaactcactcaaagaggatctcatacagcttgaagtaagataaccggcccacaagcaaaatatgagcaaacataaggatcattgcttgctgctatgagacaaaaagattatgaaagcaggcttgattttggcaacttaagatcgcccaaaccatagagataaaactagcaagaacaacatctttagcttgcgggcgaacaactaa

SEQ ID NO: 25153 - DNA, 377 bp, Glycine max
taagcttttcttatactaaatttggtgttgttctgttggttggtggcaagaacagagggagctggaacaagcggcgaagcatattgcaaatctggtatgcttgtgcaactatacatactcggtgctgtagattggttgagaacaagattctgccttatttgttctcattttgcagctgctgggaattttgattttgtgaatcagtgaaaatgttgatattcataacttacttgcattctttcaggacaaggagcgtgtcaagttatacaacgaaagagacatgaaagaagatcagctcaaatccatatcttcgacgaatgaagacaatgcttgtactatgttttcaaagtcaaagagttcagacacgtacgtcaaat

SEQ ID NO: 25154 - DNA, 414 bp, Glycine max
tattagtaaaacaatattggattagccgcagagtatattagctgtggaagcaaaacccctagagcaaaaacatgaaggaaagtgattggatatttccattgcaccctttcattcttctaatggatcaaagatttgtaaggaaaaggaatgtacaaatgagggaaaataccaaatactactttaattcatcatatgcagaaatgtcgggctacatcagaatgcatattacacgaataccagtttgctagataatacataattttgtgaaagaccaatttcttcatttggtgcagcaagtaaatatagattctgaaaacaccccattatttaaccttttcttcccttctttcaacatcagttccaacaaaaacttatcctccaagttagctcttgtgtatcaacaacaccaacaaa

SEQ ID NO: 25155 - DNA, 376 bp, Glycine max
cgcatgcttttttcaacctataggtgatggaccattccaagtgttggagaagatcaacgacaatgcctacaacattgacttgcctattgagactaatgtaaacgccactttcaatgagtgtaatctatctgtttccgatgcagacggaggagccttggatttgaggacaaatccttttcaagaatgagggagtgatgaggacacaactaacgacaaggaccatgaagcacatgaagggcccatgaccatacgcaaacttaaacaggccgaacacgtcataaagacaaggctgggcatttgtatcgctgccattgatgatgattgaaggcccaagtggagacctatgaatgcccacatgcagaagcgctactaagac

SEQ ID NO: 25156 - DNA, 415 bp, Glycine max
tgaagatgtatagcccaccatcttttcatactgtgttatgtgtctactatgattggcatcatgtgatcttcgtcattgaggtgccacttgaactgccaagtctctccacctttgggcgtattcttttaaaagattcgtgcccccattttttgcacatgttcaataattgcatcctatccgaagccattatactaacactgcctaacgaaggcaaccattaggtccttccaagcatgggctcgggaaggttccaagttagtgtacctggtaacagctacccccagtaagactttcttggaaggaatgtatcagcaatttctcatcttttgcgtatgcccccatcttccgacaatacatctttagatggttctcggggcaagtagtccccttgtacttgtcaaagtctagcaccttg

SEQ ID NO: 25157 - DNA, 351 bp, Glycine max
tatttttgaatggaagctctggtctcttgctgaaactgcatgttctgcatagtcatttgcctcacaagttcttcgagggaaggttgtggaggggcctcaactgttagctgtttctggggttgttgctgttgttggattggtggaggaatgtatggtctgcttgggccagcaacattttggaaagaacgagcaggctgctgtagctgttgttgctgagggctggaccatctgaggttatggtgattactccatccaaggttgtatctgttgctggagaggtcataattgctctgctgcggatgattttgctgctgaggttgacgaggtctattgtaaatgtttgcagcataa

SEQ ID NO: 25158 - DNA, 437 bp, Glycine max
gtgacactataaaactaagctttacaatatccaaacaattcaattccatatgtcatgaaactaacctaaaccaataaaaatagagtggaggcagaaaactttgtacaaagctcattcaaattccacagtttttcctactcacatgccccaataacattctcttcgtttcgattcgttaaccattggatcgccttgaaaattttattggaggttcctaatacagaaatataatttttgaccgttgggatctactagaaaatgcctagaacacgagatgtactacccttcctgtgactagcactgcacaactatttttctgcacatttggtaaaatctattgcacaatttaacatcatttttctgcataatgtggcagatttcgaattctagcttgcttgtatccaatttcactcaaattggatcctacaagtcctaaa

SEQ ID NO: 25159 - DNA, 369 bp, Glycine max
agttttgagaaagtaagcttcaaatgatctttgaatagaaatagattcctcagcctttgctaatgcttcttcacgatggccagtgtcatacagtatccatccttcatagacaagcctttcatgatcagaagtagaataatttctagccagccgcaaactacgcattgcagactttggacaattcaacctacaagattcaggaaaatcaacacccataatagtcaagctctggcattaaaatgaaaccaggactaagacacacccaaccagtttttcgaagtacttatcagtttccattcattctgaaagcagagaagatacaataactgaaaatcacctccaggactaacacttatgaaactatgcata

SEQ ID NO: 25160 - DNA, 408 bp, Glycine max
tgttgaccattgaataggtgaatcgtgtgctatactttgtggataaattagattctctaaaggcaagaaacgccaacccttttagcaacagtagcaatgatgtcaaagtaacaacccaatgggaaacctttgattctggaatggaaagctcggatgccccatccgataactcgtcttcaacgaaagtaactcaagattgggagcagtttgattaaatcttgtacatcatactactgtcccttcatcctttgttcgagattcatatatatattgagaggtcttggtacaacgatgttgccttgtgatttggtaggcagaaattttaattgcagaaatgttctctccgcttaggtaaagttgcatatgttaatctatctcgtgcacttagttttaggcaaaacatgtaaa

SEQ ID NO: 25161 - DNA, 380 bp, Glycine max
agcttcccctccagttcccattcgagtacctaacgggtgtgattttcaaacgttaaaaaccagaatacacaatacccttaagctaaccgacaaacaatttttggatgaaatttactaccgacagcctttcacgtatgcaggtaatcaatttcggtttcaatgtatgcaactgaaagatgatgctgatgttaacacaatgttattgtgtaatcatgaattttcgtttgttggtccgattgagttattatgtagcattgttagaaccccagatggtattttaaacttacttgaaactactatgacccctactcatgatgccctgttatattacaatgggaggtggaacatgtcacgccaaaatgagtttgttggttactcgt

SEQ ID NO: 25162 - DNA, 413 bp, Glycine max
  unsure at all n locations
ntaaccttaggttgtacacttcatatccttgcaagctaatgcttgaaagataaatattgctaatttctgctagagtttgtctaaatttcctccaattagatgatcatcccagatccaactcagtatgagtatagttaaatgcccaaattgcagtcccattctgtgtcacttttataatgaacgcattctgtgtcacttttataatgaacgcattctgcctaatgtcaatacagtacaagagaatttatttgtttcatgaacaaagaactggacgacaggtagaaaattatgattcaattcagaaatccattgcaagaaaatagccttgagattgaagagtttcagcatctgctacatgtctatatgactaacgaccaataacagttactgggtttctagcaaatatgcagcat

SEQ ID NO: 25163 - DNA, 347 bp, Glycine max
  unsure at all n locations
agcttcattccatgagagaacacaccatcaacctgtaaacacacaaaacaaagagctacaaccatagaggaaacctcctaacttgacaacgcaccgtctaaccgctacaagatgacgcacgatgcacatacgaaacgatagagacaaagacgccacacacaatataacaaacaatacaaacgccacacaagagagctgggcatgaaaaaaataaaacatcttaaagctctccaacaagctgcaaggctaagtaatcatgacgctcctgctatcactaacaaaaaccacatggcacanaacacatatatatacatatagagatatatataaagacacacacacacata

SEQ ID NO: 25164 - DNA, 360 bp, Glycine max
ccccatccactatcgcgagggcgatcatcctgtatatcaaggctacaaccaaacttatgatcaataccatactgaagcctcataacatccactatacgagtaacttggatatcatgacaggactatgacttgtatataccaatactcagcacccatctagagttggcattgttgttgctaaaaacccttccacaatagatgtttagtactgtacgtcttattactataagtggtactcctcctaaccttgttacaaaacaccttatacccatatttgactttgcactcggccctatacctcactatttgtatatggtgaatacacagctggccacccattcattatagaatgcacaacaa

SEQ ID NO: 25165 - DNA, 381 bp, Glycine max
agtttgtgtctgtattcttctacagctctttcaaatgtctaataacctcaccgagtaatgacgctttgtccatctatatgttcaaaagtaaagaaaagagatgttcaaaacttcaaacagtgaatgcattctttaaaatgtttatttccactgacatctgagcataaatcaaactataagcacaatttcaagttcctctcgcccccttttaggaaagaaaactcaaattgagtccttgacaatcaaaagcaacaattcaactaccaactagcatagttacataccaaaatattaagtttccaacaattcattcgtacacaagttgagatggtaatggaagcacaagagagtgctaatgagtctaatggctcatacaatact

SEQ ID NO: 25166 - DNA, 414 bp, Glycine max
tgtatctaaaaatgtcttaaaaatgaatttaattattttttgttttcttatccctttattaatatatatgtgaggggtatagggtgtcacaataggtgccagcttgttgatgtggaaaaatgcaaagagccacttttgaaggtgagaaggcatctctcacagtcggatttggagagagaataaaggaaagctattctagatttattattttctttaaaaatggatgactaagggatcttatgtcttatatattttgagttaataatgggttgctaattatctttgggctagggcttgagggagccaattggaattgtgatctagttattcttctttaattctctaagcattttgtttatagattgtcctttaaatcttaatttactgctgtgtatgaagttgatgaatcttcat

SEQ ID NO: 25167 - DNA, 520 bp, Glycine max
  unsure at all n locations
accacacgccataactagcggagcagacgacgaagatggcgaccacacttacacaaaaagaagnacaatgaatcgatgcatgcaagncnaanacgacacagnacccggggagccacgagagncaaaccgcaggcccgcaagtttctatacacgcgcggaaccagncagcgccggcgcacgagcagccgaacacgacagtggcgcccacagtggctgcagcaaagcaaagagccgagccacccatggcaggagcaacaacccaccacatgaacacagccaaccgagacgcagaacgaaaacaaaggcgaccgccacaagganagagcaaaccccaaagcgagcacccaccgacaccgacgcaaaagaaagcaccaaagacacgactaggactacgaggaccaaaggccccggccagcacacagaacaacggaaggagagaaacaaaaacgcggaaaggagctcgcaaacacacgaacgaacagcgaaaaggggcgaaacacaccagcngaggagatcgacg

SEQ ID NO: 25168 - DNA, 579 bp, Glycine max
  unsure at all n locations
ctccgccanccccctancagcgacacactcanacagagtagaacgcagcaaancaacgnagtagcgcacangngcgactcgcaatcaacacaaaacacacaancagacggaagannttttcgggacctcgtaagnacngcgacactanannaaacacacagcggcagcgcaaagncncacgacagacacgagcncattctttaatcgncagccgcggccatacgagacacccagccaaacaaagacacgcaagccgagacccgactgagaacgaccgtccatgccatacgcagaaaaggcaacgatccaaacaagccccgacacacggacaacgaggcacgcaatcaaacccgagccagaacggagatgtatacaccgcatgagccagaagacatcacgagccaaaagattgcgcacctggccacagaaaacaaacgacgaggtaccataagcaacggaggacggacccgaaaaagcgacgcatgacgagcacaaaagggcacacaaagaaaaaaatcgcccaaaagcaactattgtcgagacgcaatcacaaaagaaaccgccgaacacagacacacc

SEQ ID NO: 25169 - DNA, 513 bp, Glycine max
  unsure at all n locations
acacccacccaacaaccgacaacacaaagcaggaaaaaaaagactacttttaacaaaagcacagannannttgagcctgatgacaccatggaaacaangnngaaacgagcacctaacaggaaccggaggcagcagtctaacgaattttaagcgcgcgcggagggacccgaccaaggaggagacaagatcaaccacaaggccgacaacattgactagacaaaagagcaatcagctacggaaatttatacgcggccaagcagacacggtaacaaccgaacagaagagcccgggaatgaaagacaaatccggactcatacaagaaggcagatggagacccacaatacggccgagccacagacacacatgaatgagcacgagacgaaaacgtgccaatgcacgatccatgacacataaaagacaacggccgaactggtgaaagaccaactcgatcaacatagagcccccgagaagacacagatgaaggccaagagcgaaagacattacaacgaaacn

SEQ ID NO: 25170 - DNA, 361 bp, Glycine max
gcatcccttcaatatacgttgttgtcaagaatttgtttcagacgctctccatcttcaacccccttataccttacaaagacgtacctatggccttgtttattccttttcagaggtataaacacttcccaaactttaccccactcctgaaaaatcttccaaagatctttctcacggacataatccggaaaatgggaaaagtcgaaagaggggatgtctggtctgtccctccacgatgatgatgagccccttccgcgtttggaggtctggtgatggtcttcgtgaccagctatctccttttcatgtgccgaaagaggtctcgtacgagccttacttctaaccttgacttgagtccacgagccct

SEQ ID NO: 25171 - DNA, 379 bp, Glycine max
ttaagcttgaaggtgtgtaacccaccattttccatagtagaacactagcaatatgtctactatcattgttattatttctttcttcgtcattgtaggtggcacttgagttgccaagtctctccatctttgggtgcattctttgaaagattcgtgccccctttttgcacatgttctgtaattgcatcctatccggagccatatcagaattgcactgatgctgcccaatgaatgcaaccattaagtccttccaagaatggactcacgaaggttcgttatttagtataccaggtgacagttgtcccactaagactttcttgcgaaaaatgtatcagcagtttctcatcttttgcgtatgcccccatctttagatggttcttac

SEQ ID NO: 25172 - DNA, 415 bp, Glycine max
  unsure at all n locations
tccaaattagtgtaccaaactaccgcggctcctgttcttctatcttgaaaaaagtgtattaatagcttctcatccttagagtgtgtgcccatcttgcgacagtacatcttgagatggttcttgggacaagtcgtccctttatacttgtcgaagtctggtactttgaacttcggggggataacaacatcgggtactaagcagagatccgtcatgtctgcaaacggatagtcaccaaatccttccacggccctcaatctctcctcgaggagatcgagtttcctcctttcttcagttgtcgggggcggtccttccatggacaaaactattggttgtgtcgtgatgttgggctgaggcaacgtgctgggtgccggcccttcggngatcggnggatagaactcgacatcccttctagcat

SEQ ID NO: 25173 - DNA, 539 bp, Glycine max
  unsure at all n locations
accccacacacacacaaacataacganggagggacaccacgancanacgtaaaacgcacacaacagacaacganncacgatgaatgatgccatcgcagaccccacanggaagnaancaagcnncccgccgcagggcacagagagaaccagacggcatgtaagctaactaacacgagagagcaacagacacgtgaaaaacgaggacgcaagaaggaactgccacgcaaaatgaaacgatggaagcagaggcaaataaatcgagcatgcaaacgcgaacgttatcatacacaaggggacacaaacaaacctacgagcagagcgacaccagctgtggaacaaccccagacccgaacgggcaggctcagaagcctgagaacatcgaggcacccaatgacgggaccaagaacgaaggaactgcacaacgaaacagctcacagctcacacgctaaatgtcacaccgtcaaagacagaaacagactacgtctgaagaaaaaaacaaagaaacagggtccagaaatcggacagaacaaacacgggcn

SEQ ID NO: 25174 - DNA, 413 bp, Glycine max
gcttgagccattaatcgacaataacttttactttgtgtctgattgagtcccgtcatatatcgagacgctcgaaattgaatattgaagctctgagcaaattcaggcgacatattctttttactcggatgtctgattgagtcctgtaatataacgagacgctcgaaattgaatgttgaacttctgagcaatttcaaacgacaataacttttttctcggatgtttgattgagactcgtaatatatcgagacgctcgaagttgaatgtttatgctttgagccaattcaaaccacaataactctatgctcggatgtctgattgactcccgcgatttaacgcgacgctcaaaattgaatgttcaagctctgagttaattcaaacgacaataacgttctactcggatgtctgattgagtc

SEQ ID NO: 25175 - DNA, 373 bp, Glycine max
tattaacagaggcgatgcaacccgagcgtatcatggagctaatccagccctcacctacccagggaatatcaagagccacgatcagaccaattacaagacggccttcaacaaacaagaaaccccaacaacataccgcatatgaggtacaccaccggaaaacaccaaatcatgtgcgacccaccccctatgaaccgagcctcacctacaagaatagctaccgaacaaatctatacgatacaataacaacctacctaagagcggagcaacccataacctcggagagctttcatataacagcggagatacataccgttgatcaaagccaaacgcgacaaaaaacccaagtaaacaacaacggaccagcccctcgacg

SEQ ID NO: 25176 - DNA, 403 bp, Glycine max
tttgctataacgactctggcaattaatatacttttttatatacgaacggttcacaatgcatgttgtgaaagtaagtcaatgtaagaataaatgcttcgtggtcacctaattgaacctggcgttgaaatgggggtctctcacagcgggaggttggaaaaactttgcatgcgcattgaactaatatcttcattgctttaatcacttagacttgtgcttatgattgatttgaaattagagaacgattagtgtcagaaatgcactattgtgttcttatactattatcaaaagattcaaccttgcaaactatactttacaaagtttatagttgaaattttcacaatagaatgattagaagagttggtcaatcatacttgatcaaaaactatagttggtgtgcatgcaa

SEQ ID NO: 25177 - DNA, 372 bp, Glycine max
taagtctttttctagaggagaccgaccattccaagtgttggagaagatcaacgacaatgcctacaacattgacttgcctatggaagataatgtaagtgccacttgcaatgtgtcacgaacacctctctgtgatgcatacggaggagcctcgcatctgaggacaaatccttctcaagaaggagggaatgaagaggacataaccaagggcaaggaccatgaagcacttgaaggtcccatgactagaggcagactgaaacaagcccaacacgtcatacagacaaggctagtaatttgcatacctgccattgatgatgattgaaggcccatatggagaaagatcaaggcccacacgcagaggcactaccaacacta

SEQ ID NO: 25178 - DNA, 412 bp, Glycine max
actagctggacttcctgtgttgtgaaccttcttttcatctgtcccaaacccaatcacctggttcaagcacgactctctttctgcttttgttggcttgccttgcatagctcgcatttttcttttcaatttgaaccttcacttgctcatgcaacttcttcacatactcagctttagcctgagcatccttatgcttaaacatagcaatgttacgcatatgcaacatatcaagaggagtcaaaggattaaatccatacactatctcaaatggtgaacaattagctgtgctatggacagcccgattataagcaaactcaacatgatgcaaacaggcttcccaagatttatagatttttctttataacagtcctaagcagtgtgccttaagtcctattgactacctctacttgaccat

SEQ ID NO: 25179 - DNA, 648 bp, Glycine max
  unsure at all n locations
acgcacacacacccnaccgcgaaacacaagacgacaaaggaatgaagacctctacaaaacacacncaagacaaaacacaaattgacccccatggatgacatcgtaagaacaacggngannaanagcgcgcgcccgccgggatccagaagcgaccaccggttaggangaatttttttaccccgaccacacacgacgataaccagaagagaacagaaagccacaccgccctcgacagacaactatacacgaacgcagatggacgaagaaggtagcacagtagaaacgatagagcaaaagacacccaaatggagccagaaggagcagagacatcgggcaagaacaccaaatacaagcgcctgcgcgacgaacgtgacatacgaagacggcgacgacctagaagcgaaagcagcgcgggcagagtgcactctgacacatacggtgtgcatgtcgacacaacgacgagagccaacagacaacacaacacagtgagcacacgcactgaccaggcagggaagcagacccaaccagcaanggtgagaagaagaaacgagcagagcgcactgaacagcacggaacgacatctggcatcagaactcacagaccatcgaacaacaacagaacgtagcactaccattagaggctacatcg

SEQ ID NO: 25180 - DNA, 80 bp, Glycine max
cattggcggattccaccgatatgggcacttacactatctgctctgtgccgtagtagccagccgaaccgcacacccgtgac

SEQ ID NO: 25181 - DNA, 367 bp, Glycine max
ttgttttcatttgtgtccaaaattagcttagatctgataagcaagatgttaatgacttgcaagttaaaataaatgaagcggaaaaaattgaatcatgtttgtaatctcttattttattttttacatgtgtataaaatattaattaatttttgtgctaatagagttgcgttttaatttttagacttgtttggtttggctttgaatcctattaacattgaaactccaagtgttgggactactaatgtttgaacttcttaagatattattttcaagtacattgttatttgtttcacctttttattcgtatttattttttgtcatgtttataatattaatgaatcatgttttattcttttgtataacaaat

SEQ ID NO: 25182 - DNA, 407 bp, Glycine max
tatttacaaagtgcaataaaaagcgaagctacttttttacagtgtgttgggacatttttcagaggagaattgattggccgcaaagatcgttgggatatgattggcatggaatgggaagttcgcctgaattaataatgtgaactgagaataatagtgctttcctttccctccatttgtttcttttggtaatcaatgattcaacccttgaaatttattatcaagagtaaaataaacgattgtatagttaaatagaaataacaattaaattttaccataataaaaaaacaaataaattttaaataactatatattttaccatacatttcttctaaaaaaacccaagttcagagatatcattctgcacttttttttaaaataccttcacatgaaatatcgagtagtgattt

SEQ ID NO: 25183 - DNA, 373 bp, Glycine max
ttgcttggttcgaggtacttacccgctgaagatcgaagaacgatgaagaacgaatgaagaacgtcgaagaacggttgaaacctttgcgaaattcttcacggaaaacgttacggaaacgtttcggaagcgcctcggcttagattttcttcacggaaacgatttttccaagcaaattcgaaagagagagaagtgccaaaggggctgaacccttttcttcttcacttcctcccctatttatagcaaaatatgggaggtggatgccgcccagctcgcccaggcgagccaggttgcttcctccagaagcaacagccttctggaggaatattctggatggcccaagtgggcctgggtgctatttgcacccccattttta

SEQ ID NO: 25184 - DNA, 410 bp, Glycine max
taggtattatggtttagggagtgtctttgactcgtttttattcttggcttgttgaaagacagtgttgagttccattcttacgatgcaagtagtttcagaacagatgatcttgtaaaattttcaaaggttttaaatttcttcacaatatcagcctcaatttttttttgtctttgttaaaagaagattcatactcttgtttactaactttccagacttcatctgcttggtagctctcaagttgattgatttctacatcttttagttgttttgtcttttgcacaacatatgtattgtgaaaaagatacttctgagcctcatttgaattgttggtattcaaaagacttttatatgtccttcaaattcttaatttaaactttgtttttagttaagagttgatgacattctgatta

SEQ ID NO: 25185 - DNA, 380 bp, Glycine max
agtttttatttttatttcaagaaggccctagtacacaatagtttctcaagtacagagactaatctaaggctgtgtttacaagggaattttacaggatcacggcttacaaaattttctgttcatttagttaaacatgtaccagactgtgatgaactagatacaaatttattaaaatccatttgtgcacaattaacacaaacaaatatattaggttatcaaattcaaaacatcaacagtcagtcaaaataaatctatttgaatgaagagagatagtctatgcttctcagtcatatcaagtatgcaacacatccttttggcatcaagaaagaccattccacatgaaattaagcctgtctaagatagaccatcccacatgaaat

SEQ ID NO: 25186 - DNA, 401 bp, Glycine max
tcctatatcatgcccttttccttagatctatctttattttctattcaatcttacccgataaacgacatttatatgtaaggaatcataggaaacgaatttgatacaatctattttatttgaaatgaataagagaatcacattttataatacacttacaaaaaaataatacgaagatagtggtaataattaattttgtgtttaaataactaaatattcaaaataaaaaagttagctaaaaataagttgttaactattaatcgaaaagtttcagttaaaaaaatattttaatcaaaaagttcaatgttttattttttataaaaagctgatttctctgtaaaaataataaaaagtgataatcttaaattcttatgtatgatcaaattaatatatcatgatttctt

SEQ ID NO: 25187 - DNA, 379 bp, Glycine max
agcttgtacttgcctcttatcccttctatttgttggcaatttttcacactcctatgtctcaacaatagaatttcatatctaccatcatcatccaccctcttttcttagaaaaaacaacaaccttattgattgaaaacacatttattgagactcttattaggcatgtaatcatcaaccaacaaaagctcgttcctttttctacaatactattggatttggaccaagtttttttgttgtaacctctccatgatcgatatctccaccatgaattgttgtaacacttgcttctaatcgtggttcgcacatttcacagtaatttgagtgttattcagtaatgtgcttctacactctcacaaaccctccagaacctgacaacatc

SEQ ID NO: 25188 - DNA, 419 bp, Glycine max
tgcctaattaacctgaaattgagagaaaattattatttatcacacaaaatggaagtactaagtatttattacctatacttaacagaaaatacttataacactacaaaataaccataaattggaagagtttgaaacaatttacacaaaagttagtcatattcatcgactaacagagaccacagttgaaaatgaaatgaatgagaagctagggttagcaaaggaacaaatacgaaggcggttttttaagaaacccgttgttgtttaacttttcaataattgcagaaatgtcacaatgtcacattctaagacggtttttgataatcgccttagaatgtgcgtcgtaaaaataaaaaatagtgattttaattacaaaaatgtcactgcctcacattataagacggtttttgtataactgcctt

SEQ ID NO: 25189 - DNA, 377 bp, Glycine max
agcttctttatattcctttcggttatctcattagaggctttggtgaaatctactatctcattagaaacatcgatattgaagtaatcaatgaatctagaggccaagacaacatgtggaaattcataatccactagtcgacagctttttaacataacatcttcaatcagaagtacctaattcatttgaatacctgatttcagcccatatacgatttgtaagttgttgttagtaatttgagcatgatttcttgaccttggtgcgagagtgtatgtaatgagatacactaacattctatcttctgcggctaaaacaccaactccaaggcggtttctcagattccttgttgggtcaagaggcatacctctgcatgtctgcat

SEQ ID NO: 25190 - DNA, 415 bp, Glycine max
tgaaagacatgcacaaagtgtgactatatgatgtggttattggtgtagtaagcaaatgctcacctccccctctaaaatttaattggattaggcttctaccaattcaattaaatttatttcccaacacacacatcaaatattcacttagtgcatgtgaaattacaaaactacccctaatacaaaaactagtctaggtgccctaaaatacaagggctgaaaaatcctatatttctagggtaccctacctacgttatggagccctaaatacaaggaccagatataatgacatcctaatctaatatgtacaaagataattggacccaaccttggcccatgggctcataaatctaccctgaggttcatgagaaccctacgaccttcttcaacagctctagcccaatcctcttagtgcctc

SEQ ID NO: 25191 - DNA, 374 bp, Glycine max
agtttaatatacccagcttacatgcttaatagggtgccaagtaaagcaattaacaaaattccttatgaactttggactagcaaaaggccaagcattaaacacatgcatatttgagattttcaactaaggcacaatcttataggtcgtatgaaagaaagctggattcaagaacaattaactactattttgttggctatgtcgaacgctctcatgatataagttttacgatcccactttaagaaccttttttgaaacaagaaatgcgagatttattgagaaagttgaatttgggaaagaatgttgtctttctggaataacctcttattgacagtgtgatgtagctctatatggagcttgtacgccttggatcttct

SEQ ID NO: 25192 - DNA, 414 bp, Glycine max
tttctccaaatctcgtcctagtgtgtgttcctacctcattatggcacatgttgaaggtgtgactatctgttatatatattttatttatatatgtgcgtgtacacagtaatagttaatgttatagatagtaaaagagtgcatgcttaggtgagatgagctaataatctaggcacaattaaagttcaaaagatacttatcattattcattactttaatacattcttgttaagcttgtaagttagttgtgtacctattatcactctgcatatgtgaaaattattctttgaaattctgaatgtggtttcaaaaaggtttcaaggccttggtgggtatccaaaatgttgtatctctgatcgattaggaatcagaatcaagaagcaccaaactacaaaggaagcatgggaattgcttcaa

SEQ ID NO: 25193 - DNA, 375 bp, Glycine max
agcttaagagaatctatcctttgtagtatacatattattagtgaaacataagaaccttattgtaaatctactctctgagtgttgtaaagaatctctgattctatatcaaacttctattagtgaaaaccaagagtggcttagtgacaaaacaatacttgggtgttcttaaattcagggggattctaagggttgtggcaagagtggccttgagaatacttgtaagccataagtgataggaaaaaatacttattgtaatcaaggttgatcagtggaacccattactagttggtaaagaagaactggatgtagctcaggttgagagaaccagtataaaacaaagtatttctactactcttcattagcttattaaagtat

SEQ ID NO: 25194 - DNA, 416 bp, Glycine max
tctggtgggacatcttgacttgctttccaatctgactttttccacagattctgccttcttctattttcagattgggaatgcctctaacagcacttttgtcaaggattttcttcatgcctcttaagtgcagatgtccaaacctttgatgccatattctgacttcatcttctttggaggatagacatttggaggagtagctggtttcttggggtgtccataggtaacaattgtcctttgatctgctgcccttcattagaacttcactcttctcatttgtcaccaagcattctgactttgtgaagtttacattgaatccttcatcacacagctgactgatgctgatcaagtttgcagtcagtcccttcaccagcagtactttgttcagactatgaagtccatcatgaactagctttccc

SEQ ID NO: 25195 - DNA, 506 bp, Glycine max
  unsure at all n locations
cccacacgccaacaacagtagaaaaagatagaagagcacgaacaaccacatacaccaaaaacccaggggangatgatcatgcaagcagcaaanaanagaaccgggagcacaagccaccgcagcaagaagtttgccttgccaaccatcacaacaaggcggcggcaacatgacacacacccacgtctcaaacaaaaaacaccatatccaccatcatcaaacaccctcaactgcgaaaacaaacaacgaccgcaacgaacgacaacacacataacgacacccctaacaagcacgaaatcatcaaccaacaaaagctcgaaccacgcactacaacactaagggaaacggaccaagataaacagcagaaacctcaccatgaacgacaactccaccaagaagagcagaacactagctattaataggggatcgcacagcacacaaaaagtagagggacaaccacgaatgagcatagaaactctcacagacactccaaaaccgacaacaactcg

SEQ ID NO: 25196 - DNA, 499 bp, Glycine max
  unsure at all n locations
accacaacaaacactactataaaaagagaggaaaacgaaacgaaaacaaacaacaaaagaggataattgaacccgtagacnncaanaannaaaaancangggcgaacaaacacgaaacacaagagaaaacagttttacacaaaaggcaanaccacagaggggacccacaacgaaaaaaccaaccacacaccgacgagcacaaagaaacacagaagcagaacgcaaaccaaccaaaacgaaagacaaacacaaccacagaggaacaaacaccaaccgagcgaacaaaaagaaaaagaagacaacgaaacacacaaacaaaccagaagacaagagagaacaaaaccgaacgaagacagaacacgcagaagcagaaagaaaacaccaaagcacagacagacaccgacaaggaaacaaccggaaacaccggacgaaaaaaaacaaacaagcgccacaacaaaacgcaccgcgaaaacaaaaacgcgaccgcaaactaaacacg

SEQ ID NO: 25197 - DNA, 369 bp, Glycine max
agtttcttgcgtagccgctcttggtgctcagaaaatcccaaaaacaaatccctcttattactagctattttgaattctttagttcctgaatgtacaaccttcaaattgttgctcgttcccctctttcttttctgcaaaaaagaaaatcaaatgctgtcaaaacatggatgaagtcttaagaaaatcaatatcaaagaaaacatggatgaaatcacaattaaaaagcacaactacctatctttcaaagtcctttggttaatttgtcttgtctccttatatggtggggttttgtttaataatcttatacttttgccttccaaaaaaaacttatcactaatcctcttttcattaatccaattatggatgcta

SEQ ID NO: 25198 - DNA, 415 bp, Glycine max
tctaagcacaaatgttgaatataaaattactttatcttttatttaatattgttcacattgattattaatatgctttaatttatgcaaatgttcaagttggttgcaagaagaagaattagaagacttggattatttggataagaatttgatgggagtcgaattcatttttgacaagtattaatttgactatggatcttgattctaattcttttcattgttcaattctaaatatgtatatggggatttataataaattcctctaattctatatacaagaaaagttctaaggggggagatatataagttgaaatggctcatgtacgttgtgtcttaagattttgggttggatatagtatctagtttacttgtattatttgcttgaggtcgttttatagtgatctagtgaatagctccc

SEQ ID NO: 25199 - DNA, 379 bp, Glycine max
tcaagtttgaacaacccagtattctttgtcctaccaattcactgctaactctaaacaattcaaaatatttaaagtgtatttgctcactgactaaatcttaatcgtctcacagatgaatataaaccctaagcaagctcttagtcttttctctcaagatgtttaaagtattttaagagcttttgatctttacaagaatatataaaaagctttttatagaaaaaattcaaatgttagtgcataggttcataactcatctctttaaagcttctagtatttataggcattcttaagtgttcatcgtctcaaaatggatagatttcttcacgtgagcttgcgtccgatgattgtggccgttggaaaatctaatgttcgcattaaa

SEQ ID NO: 25200 - DNA, 412 bp, Glycine max
ttcgacgaagagtaattgtgcagtatgccaagttttatttaaccgagacatgttaacgatgattactaagagtcgatgagctcatataccgacgatttcaagtcatgcatccatgtaggcaattacatgtgatattttttatctactaactcgtaagaattactcgtatttgaataataactcactcataaaaaattagcttctgtattctttacaccaatggtcttgaagattacttatattatactcgtaatgcatgtatattttttttacattaaactgaactaactaagggattgatgtattgctttgtacacttacgaggggtgcattgtaacgaattttacaatactagtaggatactttgtcacgttaaatgatggagaggtatatacgatgataaagattataa

SEQ ID NO: 25201 - DNA, 375 bp, Glycine max
agcttttagtttttcttaatgcaatttgatcggtcaatgttaatttgttaaaaatgtaagttggatattcaaacccaagacacagaaaaaacaaataaaaaacctactaatatatgtagatttggacctaagtcaatttcaaaatttatctcatgggataagaattgttctttacttatatattttagagctaaattacaattttaactaaaaaaaagtgagatcaaaatcagaaaattaattatgatatttgaaccggaggaaaaaaaaacggatttttttaggtgtcaaaaaaacgttgtagagttacaatcttattatgaatactattaatacggctacatttttattaagctccagtatatttgtttgtgg

SEQ ID NO: 25202 - DNA, 408 bp, Glycine max
gtgatagaggtaaaacttcaaaaccttgtcattttttctttcatcttcttatttcttcaacaattatcattatgattctcgaattaggcatgttcatgttggatttttgttacttggcgatatatgatttctattaatacttttttgcatgtcattataactattatatttagttttttcataagagaggcaatgtagttttgggacatcaacatgcaaaccctgatgttgaggattctatttggatgtgtgccttccaatatgcaaatcttgattttcataaggttactcgtagggttacaatgactcatgcgttcatgggtgaggttctcttttgttttgaattattttactaaatgaacatactttttgcaatttttctacctaaccaatcaaaataatataatc

SEQ ID NO: 25203 - DNA, 368 bp, Glycine max
ttgtttgttgcaattcttctagacttagagtgataacatgcagtcctcttgatcccttatctctcactgtctcgatatgccgagactccgaaaccacaacaagttttatcttttccatgtactcgaaacaaaactcagtagcttgtttcgcaatgtacttttcaacaataaatgcttgaggacggtgtagattctttgtatacccttttaagatcttcatgtatcgctcaaccgggtacatccaccgcaaataaatgggaccacaacatttaatttccctcaccaaatgaacaattaagtgaaccgtgatgtcgaaaaatgaaggaggaaaatacatctccaactgacacaagataatagtagtctca

SEQ ID NO: 25204 - DNA, 404 bp, Glycine max
tgtatgactaccatggtatcaaaattgaactctattttaccagaaacactctcatcaggaatgtgatgaagctggaatgcaaagttcaccactaatgcttcatctggactgcagttcagcattgatgtggtgacaatggaagtccttgatgccactgctcgaagtttgagtcaagttcagcatttataatttcattgatgtcttaaaaggtaacctgtggatgtgcagctggagttgctgcagcatttagagagctccagtttgtggtgtattgtttgctttggaagaggttacatcttaattggtatggatttttatttcttgatcaaagattctgtttgcttagaagcatgtgcagtaaagatagtggtgtctgtacttaaattttgttgcttgtgctcttg

SEQ ID NO: 25205 - DNA, 366 bp, Glycine max
tgcttcaagttagaaactatcaactactaaggtttcttcttacaaccttaaatcatgcaagacaaaaagttttcccttgtctcaaaatatgggtgagtagtagtgactcactttgtacaccttttgggtttctcttcgtttatggaatctatggagagggagtgaaccttagacagctcatggaatccatgtggagattcacatgtgactttactgtaaaggccttctttctttattttctttaacaaaataatattaaaatctagctacaaatcaaatacacctaaaattgttgtgttttttaaatatatattatgtattgtaaacagaaatattacaaggaaaaatattccttagtaatcccag

SEQ ID NO: 25206 - DNA, 415 bp, Glycine max
tagcgcgtgaatagagaaaaggcttagcaagacatttctcgctaagcgtgtctctaggctcacttagctgaaatcatgtatcttgagtacacaggagtgggcgctgagtgtaaattaaaatcgctcagcgcacatattgccgcaaacatttgagcttagcggcatggaataacacttagctcaatcaaaatgaagtttggctgcaagaagttcagcttagccacaatgattggcgctcagctctatgaacttcagttatagccgtaaagagttatgcttggcaacactgagtcgtgcttaaccaaggataaggtatcgcttagtggtttggttgtcgcttagtcaaattcagatcgaattgaagttggcttagctcagccttggccagcttagtggaccaaatcagcctcagatg

SEQ ID NO: 25207 - DNA, 372 bp, Glycine max
gcttttctgcctttgatgagtgttaaattgactcaatataattgttgtagttataaacaattgtacttcattataaagagtttttatctgcaatttaagtaacacgtttaatcataaagtaatagtatatacgtactccgaacaatggtggaaacaaaactaacaatgatcgacatggtagttatcggactaatttaatagtatgaataacacaacaattgattcagggggaaataaaataaagtgaaaaaacttgtgtaaaagacagatacactttgataaaggggatctaaattgttttacaaaacatgaaaccatattcgacttagctggaattatggttagagtaacatgcaagtaactttgttactt

SEQ ID NO: 25208 - DNA, 160 bp, Glycine max
  unsure at all n locations
tgataattntataacaatggaaagagataagtgatatattgagagatgaaattttggggaagaagagatagggtttgagagagggggtgggttattgaaaaaaaaaagggagtttgggaaagggtctcgggtgtatagaatgttagaggggagagggggc

SEQ ID NO: 25209 - DNA, 380 bp, Glycine max
agcttcttagtctcggctgatgaagataaatttgtggctacttcatgcactcctctaatgacaatagcatcatttctggcactaaattgctgggagttggaagccatcttctcaattaaatttctggcttcagcagatgtctccaagggctccaccactggcatcatctatcatacttctctccatgttactgagttcttcataaaaatattggagaagaaactgctcagaaatattgtggtgagggcaactagcacatagttttttaaatctctcctagtattcatatacgctctctccactgagttgcctaatgcctgaaatatcctttctgatggtcgtggtcctggaagcagggaaattttttttctaagaatact

SEQ ID NO: 25210 - DNA, 420 bp, Glycine max
taattattttcatctaggcatgacaaacatctcatcatattcttttgatgtagcaacttcaaggcttgagttatgaagtgaccaaatctttgatgccacaaccatcaatcatcaattgttgttctcattgcaatgttagtattagtagtatattttaagcttattggaaaacttctattttctttctccatttcaactttgataacactactataaaaatagttttttgcaacattgattttacgttggtcgatcaataatcgacttagaaagaaacacagtggcattttcataaataaatataaaagttttacgaccgttttatgaaaatcaccttagaagactgtcattctaggatggtcttataaaaccgccttagaatactatcattctaagatggttttgtaaaaaccattttag

SEQ ID NO: 25211 - DNA, 378 bp, Glycine max
agttttgttacgtatgtgaaactttggcatcatcaaaacattcagtttgatcctttgtctacatcatattctttagtgccttccattgaagaactttagaagctatcagaatttccaccttcaacttgaacctgtcatattcttgagtgccttcccatgaagaactaattccatcttcaattttgtggtgtttgaacaagttaatattgtgatgaatctgtgttgcttactgatggaatttgcggtagacatttgtagatcatggttaggactagaggcttaggtcttgccttaggtagagttgttaatagaggtctgggcaaaggggatcgtgatgattctgatggtgctccccagcggcgaaggcctactgtatcg

SEQ ID NO: 25212 - DNA, 404 bp, Glycine max
tgctaacccatggaacctcctaatatctcccacactttgtggggtgggccattcttggatggccttgaatttctcagggtccacttggaccccatttctaccaactactaaacctaagaaaactatattatctacacaaaaggtacacttctctatatttgcatatagggtgttcgtcctaaagactgaaagaacttgtctgaaatgtcctaagtgatcatctaggctcctactatacactaaaatatcatcaaaataaacaactacaaatgtacctatgaaatcctttaagacatgatgcataagcctcatatacgtgcttggtgcattagtgaacccaaaacgcatcactagccattcataccaactaaacttgggattgaaagcactttttcactcatcac

SEQ ID NO: 25213 - DNA, 379 bp, Glycine max
agtttgtcaaggaggtgaacttagttataagaggggtgtgtgtaactaagctctagcttctcaaggaagcttctcaaagaagcttcttaaggaagtttcttaagcaagcttctcaaggaagcttcttaagcaagtttctcaaggaagctacttaggctataaatagaagcatgtgtaacactggttgtaactttgatgaatgaaagtcttgtgagacacacttcaaaattcaacttctctccctcttttcctccttcaatttcgtgctccctcccccctctctctctcttttttttcctccattgaagtttcctctctaagcttcttatccaaggcactctcttggtggtgaagctccttcttccatggcttattccct

SEQ ID NO: 25214 - DNA, 413 bp, Glycine max
tgaaggcaaaccggatgcattggttaacttggtaacctagctggccttgaatcagaaatttgtacctgtcgcaagggtttgtggtttgtgctcctctgctgaccaccatacagacctttgcccttccatgcagcaacctggagcaattgagcagcctgaagcttatgctgcaaatatttacaatagacctcctcaacctcaacagcaaaatcaaccacagcagagcaattatgacctctccagcaacagatacaaccctggatggaggaatcaccctaacctcagatggtccagccctcagcaacaacaacagcagcctgctccttccatccaaaatgctgctggcccaagcagaccatacattcctccaccaatccaacaacagcaacaaccccagaaacagccaacagttg

SEQ ID NO: 25215 - DNA, 379 bp, Glycine max
agcttatttagcgaccgtatttaactaatttgtgaccgattgttgtggtcactaaatgatgttcttttccttgcagtgaatgccaacaatatccttgagttttttttggcatggagaaatgcaatcttgaaacctccatggaaattctgagtttcactatttaattctttcttttagcattaggagcgaggctttgagtatgagccttgaaataggcaacaaattggtccttaagtaggcataacttctttgacacctgcatggttgcgaaagtcttggctccatctgaagagcttaggaaatttctcacatgtgaacaattgcagcccatttatatcttgaattataggtatgaatacaacaacaatatccacataac

SEQ ID NO: 25216 - DNA, 418 bp, Glycine max
  unsure at all n locations
cgcttncatctggaaaggtctgccaattaggtgtcttttcaactatatgatcactaacagaaagaaaccactctatctctcgtcgccacattgctttcttctctgaacgcaggggctctaatctccaaagttggccaaagagggtagctgcaaattcagcaaagaaatgaacaacaacaatcaaagtcaagaatagcaaatgaataaaattcaccacaccaattaataaaaaataaaaacacagtaactgcttcaagtgtgcattttgcataccacatagattggttatggcatttgagatagccaaggctgtagcgaccccatttccacaacctgacatatcttctccaagtaacaattttgcaaacctctccttcatcatctcaatctctacaagtgagaatgaaaatcaaatctc

SEQ ID NO: 25217 - DNA, 378 bp, Glycine max
agtttgtaccgattttacatggttggagcattctcacaaaacagtgtgacgctggctggtctccctatgattttaccaagcgagagtgacttgacttattagtgtgtggtttgtcttgtcatgtactcctaggcgcccgaagagatttttcactgtcatggtaccacattgcatataggattgagtcttagtatatctgtttcataacgcttgtgtatcaatcgatattgattgatttagtgatattgtgttttgatcattgagtacgtgaatgttgtgaaaacgaatgagacgtgtggtgttgtgatgtgatgttgcgcgataaagtggtgaaataacgtgagctatgcttaagtaagttgtattttgtttatatga

SEQ ID NO: 25218 - DNA, 427 bp, Glycine max
tactcacgcttagaaatcaagtgattaagtgatcataaattccaattctttggggagtatgaaatgagtgaatgtaactttatatcttgcatatactttgcttgtatcttgatttcaggaataaaattgtcatcatcaaaaagggggagattgtagaagcaaagactttgactttgatgttttgatgatgccatatgaacatgcgcttctcaagttaagatcaagacaaaaatccaagagattcaagatacatcatcaagaagatctctaatggtttagggagggaattccaaattgaaacagcaagaggtttggccaataaatttaagctaaaatgtctttttcaagagatttactctctggtaatcgattaccagaggatgtaatcgattaccaatggccaaaatgatttataacagctattaga

SEQ ID NO: 25219 - DNA, 371 bp, Glycine max
agctttatgccttaataagagccctccaaacttgggaacattaccttgtttccaaggaatttgtcattcatagtgatcatcaatcacttaagtacattagagggcaaagcaagttaaacaagaggcatgcaaaatgggtagagtacctagagcaatttccatatgttatcaaatacaaaaagggaaaaacaaatgtggtagctgatgccctctctaggagacagacattgttttgctccctaggagctcaaattttaggatttgataatattagggacttgtatgctttagatgaacatttctctcccatttatgagagttgtgggaaaaaggcccaagatggattctatttggctgaggggtatttgttc

SEQ ID NO: 25220 - DNA, 424 bp, Glycine max
ctcagcttctataaaaggttcgttcctaatttctctacaattgcatcacctctcaatgagctggtgaagaagaatgtggcatttacctggggtgaaaaacaagagcaagcctttgctttgctccaagaaaagcttactaaggcacctgttctagctcttcctgatttttctaaaacttttgataatattagggacttgtatgctttagatgaacatttctctcccatttacgaaagttgtgggaaaaaggcccaaaatggattctatttggctaaggggtatttgttcaaagagggaaagctttgcataccccaaggatccattaggaaattacttgttaaagatagccatgagggtgggctcatgggccactttgggatagacaagacgctcgtcttactcaaagaaaagttttattggcccc

SEQ ID NO: 25221 - DNA, 379 bp, Glycine max
tttgtcttattaaatctatatatggcttaaaacaagcctcccgtcagtggtaccttaagcatcatggacaatttcttcatttggttttgacgaaaaccccatggatcaatgcatataccacaaagtcagtgggagtaaaatatgttgtcttgttttatatgtatatgatattttacttgcagccaatgattgaagtttgctagatgaggtgaaacaatttctctctaagaattttgacatgaaggatatgggtgatgtatcttatgtcatcgacattaagattcatagagatagaccttgaggtattttaggtctatcacaagaaacctatattaacataatttcaaagagaatccagatgagagattgttcaccaagc

SEQ ID NO: 25222 - DNA, 415 bp, Glycine max
  unsure at all n locations
taatagtttatccactctgttgagtgatttgaatctttgtattcaataaaatattatttgtttgtaaaagtcaagagtgccttagtgataaatagtacttgggtgtcttatgtgaaattgcttgacaatgtttgaagtgtgttgagtgttttggtcattagctataccataaatcctagatgcattgtcatgaaatattgagattggccatcactataatttgtgcgatgcgagtgggacatcatggcaagcaaaaatcgaggtcaagagtagttgccttcgatctccttttggttatatgcatgtcttangagaacttagtttattttcttatgtgtaaagatgtatagttcttttcaacttcttggttattgtttggatacggacataagtataggatgtttcagtgaatgcc

SEQ ID NO: 25223 - DNA, 369 bp, Glycine max
tcatgtattatattataggaatatatggaagcaaaaacaataaccaaaccagagggggggaggagtaatgttggaaaatacagtgcgagtaatgaagctccatattggtctaaactccaaaatgggttgagaggaccacaggttacagattcacagactccttgtgttaaagttttggctgcggtgtcaaaccctcaattagatctgttgttaaacccactaatagatgtctgctatacttttgagctccttttgacctccaaacatgaccgagtaagacttagtctgaataggcgtataggattataaaacactacagattatgcatcattgttatactccaccaaaaaaaatacatcatgtattagt

SEQ ID NO: 25224 - DNA, 405 bp, Glycine max
tctaatgcctatatatgcatggcaacaagtatattattcttgtcaattgcaccaaaaagcaatggtatagcaggaccacacggccgagtggcttctgagtgctacagaacttgaatagtaccacagtttagaatagcagccgcgataatgctagaaatagcagtattttgtaactggaaccagcacaacactttactgggagatatttacaaacaataaaagcagagacctaattgaacatcacaatatagggtcctacaaactacagattaatttaacccaaaatacaataccttttccttgcgactgtcattttgtgtgtgtgaacctattacgaccacattatccggaagattttcaagcttacttttatatgaatgtgaatcttcatttcctacaatagac

SEQ ID NO: 25225 - DNA, 379 bp, Glycine max
  unsure at all n locations
agttttgagccaaaatcctgactcaccataaaccttgacccagggtgagaatgtcaatccttaccctcggaagcaaaaaagaatagaagggaaatttccaatcaaagaaaagagaaggaaaatttccaatgaaagaggaaaaaagaaaagaaaggaaattcccaatcaaagagtgggagaaagaaaaagaaaagaaagaaaattcccaaccaaagaatgggagaaagtaaaaagggaaggaagctcctggtcaaagaaaccagagaggtctttggaccagataatatctgaacagtacagaattgtcaccaaatgaacaaaaaggaaggaaaggaaaccacgacctanaatggtcttctccctttaattaccaaccaaa

SEQ ID NO: 25226 - DNA, 411 bp, Glycine max
  unsure at all n locations
taacgtaatngtctctcacagtctttagatttgttttccaatccaatccttgtgtccggactcgtcagccacttatgatagccaccgacgatcccattactgcttcccctaagctctctgtcctttcttcacgccgcatcccatgccttgcaaactccttggagtaccctcgcgttgtggtcactaaaaccccgtgcgatgaaaggcgtgatgctttcgtctaatggcgctcctctcatggggtagccaagctgtcttatggcgagaacgggattataattaatacaaccccttgttcccatcaagggaacatttggacatccttcgcatgaagatagaatcttgattcttccttccttctagcgagggaaccaattaacagacgcccccccatgctagccaagagttggt

SEQ ID NO: 25227 - DNA, 365 bp, Glycine max
agcttttgattcagacgcatcaagtaacatgaatgattgaatcccataccgtatagcactagctagctagctgccttcacttcacgttcacaatgacattgattcagtgggccaagcagtcaactcgggcagaacccaatcggcgccgttgagttggtccacgtggcccaccgcctgaatgatcaacggccacatgcatttcctttcggctactgtgtccccaccaacacaacacaacacacactgtgctactatgcctgtctctgcaacccagtgaaagtgagagtgagagacagacacatgaaagaaggactctttttcttttttcctcaaacaaagtaaacaaagtcgtaaacaacattatg

SEQ ID NO: 25228 - DNA, 408 bp, Glycine max
tgctcacccatcaccgaaagtgagtgttcataatctcatcttttcatggggtgtgctgtgtgagtattcactgttcattgcagttccatgacaatgttaaagcctttgacttttttgtttttggcttggttctttcagtttcctgttgttaatggtgcacacgcagtgtcttccttgttgaggtgttactttttcttgtttttttctctccaagttttccctcaaccaaacagaatgagctaaaaaaatgtggaattttctctttcttcttccacttcacgtcttccggatgcttttattttgggtagttattttggtttttggatgagtgatatgattacttatctgacatatagcttattctaccagattttttgagtgcttctaggctgctttttacttgcatct

SEQ ID NO: 25229 - DNA, 373 bp, Glycine max
tgcttacgatcctaatatttttttctgtaattattttagtcctttagtttttcaatgcattcattttaaacactcaattcatcaattacatcaaatttccatagatcatatatccaaatcattttattaaactccaatgtgtccaacagttattcaaatgtctaagaaaaatcaaactcgacacctcacatcttactagaaaaaagccaaattgtatttttaacatacagaaaaagaggaaattatgagaaggctaaacctaataaaagcaacaaaacaaggattaaaacttatttcatattaatttaggaatagcattgattatttccctatcagtatattgttaatcccatatagctttttcccttttttc

SEQ ID NO: 25230 - DNA, 413 bp, Glycine max
  unsure at all n locations
ntgtggatttggtcttcgccagtgaaaggatcgatgtgggtctgtaaagaggcaaatttagtcatcctgcttggacgaatgagaaaactggggcaaatgaagagggtgaggatgaaggagaaacccatgttgtgactgccattcctatatggccgagtttcccaccaacccaacaatgccattactcagccaataacaacccatctccttacccaccacccagttatccacaaaggccatccctaaatcaaaccacaaaacccacctaccacacgaccaatgctaaacaccacttttagcacgaaccgaagcaccaaccaaaagggaattttgcagcaaaaagcctgtagaattcaccccaaatttcggtgtcatatgctaaacttgctctcatatctactcgataattcaat

SEQ ID NO: 25231 - DNA, 381 bp, Glycine max
gtgtttgtctgcttgaaggtaaactagatgccttggttaacctggtaacccaactggccatgaataaaaaatctgcacctgtcgctagactctgtggtttatgctcctctaccgaccaccacacagacctttgctcttctgtgcaataatctgaagcaattgaacaacctgaagcttatgctgcaaacatctacaatagacatcctcaacctcagcagcaaaatcagccacaacagaacaattatgacctctccagcaacaggtacaatcccgggtggaggaatcatcccaaccttagatggtcgaatccttcacaacagcagcaacaacaacaacaaccttattttcagaatgctgctggctcaagaagaccatacgttc

SEQ ID NO: 25232 - DNA, 406 bp, Glycine max
ctcagcttcatgatgatgaatcaagttgattcaagctgtttttatgataacaaaaagcccaagagaatgattgcaagattgagtcaacaagttcaagatcaagattaaatcaagattaatttcaagattcaagaaatgacatcaagaagattcaagattcaagattcaagagaagtttgatttcaagattcaagagaagatgaattcaagattcaagagaagaaatcaagaagacttcacaagggaagtattgaaaatatttttcaaaaaacaaacatagcacagttttgtttttcaaaagagttttttctcaaaattttctaagttaccagagtttttactctctggtaatcgattaccaattacctataatcgattaccagtggcaaagtttgatttcaaaagc

SEQ ID NO: 25233 - DNA, 381 bp, Glycine max
  unsure at all n locations
agctttgggattattcacatgagttaacaagaagcaatgaatgatcaattgtgaaaatgaattgcatcccatacctagatcttctccataattccaccgaatttatatgtgtatagatgcatgcaagcaaggagtggtcttgatggttgttttctgaaaaggtactacggcggtcatttacttgcagcagtgggacaatatgaaaacaatgcattttttgtgattgcatatgcaatagtaaatgttgaagataaagacaattggaagtggttcctcacattgttacatgaagacattggagactacgaacaatatggctggaatttcatgtcagacatccaaaaggtgcaattcaattgtcttgctttgagtaattntgac

SEQ ID NO: 25234 - DNA, 419 bp, Glycine max
tctataaattagaattttagtgtaatgaataagattatatattgatacataaaaaaattctatttctattactctaataagttgactttaaagatgtttacctttaattgttaattctcttcaggaatttagacgtatcaaggggaacataaactcaatgagggaacatgcagagcttttgagttctgtcagggatgatattactgactttaaggtgaatcatgagtttgatttgaattaaattacaaagctattttctcatagctgtactagacttaccttcttctggcagacatcaggcagtatgtcaccaaggatgcagttactacgtgagagagctgccatccatggaagtatatctcatgtaagtatttataatatgaaatatgatgaatttgtattcttctacttgaaattct

SEQ ID NO: 25235 - DNA, 72 bp, Glycine max
agcttcttttaagacatttgtgcttttttttatttatttaaatgctttaatcttgaacacttatgcatggtt

SEQ ID NO: 25236 - DNA, 409 bp, Glycine max
tggaccgtgcgcttagtgagactcaaccgctaagcttgtttcagctgcttagcaagtgagacaaatattgaagagaatctgccatgtcatcacgcgctctgcgtgtcatcagctcattcaacgagaagattgtctcttcggctcttagcatgagaatggcactaagccaaatttcacttactcacgctaagcgtgaagatggcgctaagcgcgccttcatggacaaaaagacctttttaagcctaaattgcagagaatgaagagaggaggtctgaatagactacatgagcatagtgctgaacgaagaacagaggaaaagcttgttggatcaagtggcctctgaataattaagaagaggggttgaattaattattcctaaacctttactaattaaaaattgactcttcta

SEQ ID NO: 25237 - DNA, 376 bp, Glycine max
agtttgtagaattcaccccaattctagtgtcatatgttgactgactcccagatctactcaataatgcaatggtagccataaccccagtcaaggttccttaacctccatttttctaaggatacgactcgaacacaataggtgcttatcttggaggagtactggggcattccgttgagcattgtatgaccctgaagcgtaaggtgcaaggtctaattgatacatgctggctgaaatttgaggataatcacttgtgaattctgacattggcaagcgacactatgtatggggcaattttgaaggttgttgatagatgtctctagtggctcattagagttttcaagtttatgccattactgtaaacaacagttgcaatgct

SEQ ID NO: 25238 - DNA, 415 bp, Glycine max
tgatcgttgaatcttgattcttgaattcaactttcctcttgaatcttgaagtgttcttcaactttcctcttgaatcttgaattgagctttttgtcatcagctttgtcatcatctttgttatcatcaaaacatctttgaatcaatcttgattcatcatgaagctttgcttctacaatgtcccccttttttatgatgacaacttatgaaatcaagaaacacacacacacactttttcctagtcgatcactcacataaatttccattctccccctttgtttttgaatttatgcttctcttaaaattaagttgattactcatgtgagttcttgatttaattcctatttctctccccctttgacatcaacaaaaagccaaagtgcgtaacaaattggaagcattcaaatataactaatca

SEQ ID NO: 25239 - DNA, 379 bp, Glycine max
agcttatatttacaaatgaacaaatgtactctattgtgcacaatataccaaatatggccctatcgagcacgataagtttttaattacaaacgaacaaatgaaatgagtatgccatgacaggttaatataccagtctacaaatgaacaaagactcaaacacaagatgaaaatgtaattttgcactaattaatccaacaccataattgcactttattcatttacaagttatagccataggctagcacaaggtagcagttaacttgaaacttgtgagtcatccacaatagatagagtaataataggccatagcatacagacaactgccactaaatgaaaaactaacctggtaaagtccatgaaataatccagcttccaacct

SEQ ID NO: 25240 - DNA, 417 bp, Glycine max
  unsure at all n locations
tccncaaagaagggtaggagtcaataaagttttaacttattttgatagcattgagaggaaagagaagtttgttccaacattgacaacatttgatgaagtgtcagcattaacaacttttgatgaagtggtgacaagagaaatagacgtggagtctggtgattttgttgaagaagatgttaagcttaatatgttggaccggtcgtggctagagtgaaaggattttactgtacaagtcatttatcaaagttatatatatatatatatatatatatatatataacataatatagtccaaaatttaaagtacctaatattttaagataatttcatttcagattatgcaatgttatggaaaactcatcttatctaatttatcattcttatacgcacacggtagtcagctcgtcaattgtcatt

SEQ ID NO: 25241 - DNA, 372 bp, Glycine max
agttttgcggaaggcttgccgttgaagttgacccattaattgccccaactttcgtaaactggtgacctctaagctcttgattttgacttgataaaacctctttttaagcgaaggcttttgacttgatcccatgttttactaaagtgaaataaaatctagtgcaatcaaaactccgacatctatcatgggtggaatggatgaatgcatgaagaaatgcatatgacacagatgcaatttacgaatacgggagcccgagaaactgtctccttcttagatacaacgtctaggggtagcaaagtgccccaacgtatgtatttaaaacggtgatacggacccttcgttggtttgctaaagtgaggggatcaaagacga

SEQ ID NO: 25242 - DNA, 413 bp, Glycine max
  unsure at all n locations
tgtcgaaattgccatgtttgggtgagttagtactttctccattctgttttagggtttttgtgatgatgtttgtaatgtttatatgctgaaattgctgatggaaatctgttagagatgaagggtagaactaacctagggttagaaagtgagaatgtgatgttatgagtggaaaaagagtgagactttgagagttggaaggctaagtctgaattctgtggtaaatggaggttaaagtgagttaatactagcttgaaatgtcatttangacatgtgagaaaggttaggctgagctagagagaaaaacaaatgaccaaagtgaaccaagagccatttctagggcaaaattgggtgttgaagagtcaaattttgatttggtggaatttttggtgtaaattcaggctgagcaaggttag

SEQ ID NO: 25243 - DNA, 376 bp, Glycine max
agctttaaaatttgaattaaaacgttcagaaactgctggtaatcgattaccatatatgtgtaatcgattacacagtgcaaattttgaattcaaattttaatagctgttgtaaatcagttttggccactggtaatcgattacatcctctggtaatcgattaccagagagtaaatttgtttgaaaaagactttttaacttaaattttttggccaaaccttttgctacttcaattggaattcccttcctatttaatataccctttctaagactctagagactgtcttgatcatccatcttgaatatctttaatttctttgtcttgaataaagctttgagacgcatgtgaacctttggcatcatcaaaacattcagcttg

SEQ ID NO: 25244 - DNA, 413 bp, Glycine max
ttctcggggccatttcctgcgaaggcaaacatttgttaagttagttttaccagtgggatactattcttaaaacaaaaatgacatacaacctcctcccataaatacaaacatcaatgtaaatttagagcaagcttatgcgcatatttccttacaaacgttctcttgcacaagacattctattaaccgaaaaaaatgcacccatatacaatcaaggcagcttcgttacctagattatttacacgtacttccaaggtgtatttgttacttacatcacacacctccttggctaaattcacatacatgcatactcaaagcattttggggtaccaaaaattgcacatgtgcacatcttggtatttctaacacctatacatacacaaacttcatgatgaatcttgactatctacacaata

SEQ ID NO: 25245 - DNA, 377 bp, Glycine max
agtttctttattgccaccctataaaagatgtgaacaaagcatcagacatcttcatagagcaaacattgttattttaaacttaaactttgtcaattcatagtaaatttttaacaatagtgaagttatgttttaaataataatatagttctagtaagatatgggtgtttgcgtgtgtcggtaagtgtaccgattcgcacaagtagtataaaacggtaagaccgactatcgtatcttcagagaatttgtttcacctagaccatgtacattcgatatgcaagcacttatacggattaaaataaggcaaatagtgagttctgtactagaaaatctatttgaacataaacaaaatatataaagttataaaagatgaaaactat

SEQ ID NO: 25246 - DNA, 417 bp, Glycine max
tcacacaatggttcatcacttttctgatggaagctcaatatatttgtcttagcctggtttcttttttcctcttggaagaaacagtctaaaaacttgtttccaatgtcactccaagtgataaggctctgagatggatgagtattgagtcacttcaaggcattatctcctatgacggaaaaatggaaaaccatcatatagagattctcctcttcagtttgggtcacccctgttgtaccacattgatcataaaatgtggccagatggttgtatgggtcttcattagctaagctaggaaatgcatgttgggcaaggaaagtgattaggcctaactttagcctttgttgtgtggttgttgctccttggtctagcaatgttgaagtatactcgtgaaccattatcagtgtcatggtccgcaag

SEQ ID NO: 25247 - DNA, 378 bp, Glycine max
ttaagcttacataatgagcatctgtccctcaaacaaactctgcaacttagaatctaaagtagaagatgaagggatgtcagctgctggtgcaaaagaaaaaggaacaccagctgctgtggacctggttttccttgcccctagaaaattaactatttggtcattcacattccaacatttccttttaatataggccaagttgatgaccggcctcaggctcctataagaagtaagagcatcagatccaactctccttgtcctgcacaaggctatgattaaagctgggaagcctaggcgagaagagttggaatgagccataatggttatctatccaaagatcaagccgccaatgttcatgtccatccttgtgactaagccata

SEQ ID NO: 25248 - DNA, 412 bp, Glycine max
tgtatgagtacttggaaagattcaagaaattgtgtgcaagctgtcctcaccaccagacttctgagcaactcgttcttcaatatttctatggggacttagcaacatggagaggagtatgattgatgctgccaatggtggaactcttggtgatatgaccactgctgaggctaggaatttgattgagaagatggcttccaactcccaacaattcagtgcaagaaatgatgctattgttcttagaggagtcaatgaggtggccacgaattcatcttcatctactgaaaataaaaagcttgaaggaaaacttgatgccttggtcaacctagtaactcagcttgccatgaatcagaaatctacacctgttgcaagagtctgtggtctatgttcttctacagatcaccatacagatctc

SEQ ID NO: 25249 - DNA, 376 bp, Glycine max
tatcttgtagtgagaaagtgtggaagagtcagtcttcctacttttattcgttgaccatagagtggtacctgaagatatgtcacgggggtcaggagaccttggggacgtcaggtggggtgctattgcccaaaaccaagcttgaccaatcccgacccaacccgggcatcgattacacagtgtaaattgcaggtttccatgttctgaagctgtgtaactcgagtttggcctctggtaatcgattaccaatgttgtgtaatcgattaccagagaagaaaacccttgaggcataccttttaactacatgtagcggttatgggactcattgtgttgtacacgtagttagatttctcatgaaagagtctacccctttttctct

SEQ ID NO: 25250 - DNA, 412 bp, Glycine max
tattcgttgtagtccccctatggtagattgttatatgttgaactctaatatgttagttaggcataatctggtttagcttttgtgggaggtgttctgtgtgatcattatggatctgtttgtggtttcatatgtagctaatattggtatttgtccagtttttaatatagaattatgagctctatatattggtattctcattgctcagcgaagacgattcaagcagttcactatggagtcaaattcttagctttttatcaatcttctatagcataggtgcattgattctcatccttgtgcagcttttggttaatagtattgaaagatttagaagatttgttgagtcataagacaaatcagaacccttaataattttgattagatgtaaataattacaaagtttctaaattgagtc

SEQ ID NO: 25251 - DNA, 168 bp, Glycine max
  unsure at all n locations
tattttctccttacgcatctgtgcggtatttcacaccgcatatggtgcactctcagtacaatctgctctgatgccgcatagttaagccagccccgacacccgccaacacccgctgacgcgaaccccttgcggncgcatcnaatataacttctcataatgcatgctatn

SEQ ID NO: 25252 - DNA, 375 bp, Glycine max
  unsure at all n locations
tctttgctntgcttatacacataggaggaagaattctatcattcataataatcttatccgatttaaataaaattatgtataagaaaatatacttgtgatgtacaattaaaaaaatcaaatttgagcaatatttatttttcttgatcaaaagtcaaaactattcatttcttgacgattccattgaggttgtaatgagtagaaaggcaataggcagaagatgccattcaatcaatatagtaaggatatctattggtttacatggtgcaagtagacatatataatatggattgaaatttttagagcattgaaatcaaatcaatttacttataatatataaaaacatatttcaattttaatgcatcaaaccttatagat

SEQ ID NO: 25253 - DNA, 415 bp, Glycine max
  unsure at all n locations
tcctttntttggcacagaagattgcaggctataagatatcttaattgaaaatttgaaaagacaatatgcaatgtttgacaacatttttaagcataatggccgtttgaacatataatataatgttaatgtatctgaatttctcacatctagttcaatcttagtggcaactttttagacaaatttttaaaagaaatgcccatggtatactttgacacttttaatttttattatcaagtaaagttttatgataggcttggcaataaaaaaggcgaagtcattgttaagtcaaattcttcttcatcctctgggttgctagataaatcaaaagaatttacatgagtaatttcgagttagtttatgctgtcagagttcttaacagaaattttgatctcttagttgatgcttacactttggg

SEQ ID NO: 25254 - DNA, 372 bp, Glycine max
agctttaacattgataggtggggtgtttggaattaagggtatgtggtgatcatgggatctaggtggtggtagtccatgtgggggttggaatatagaagagtagttgtgaatgatattttgaatttctaagggtagagtgtgtataggtgaatctagctcaagtaagggttgggaagtttatgttgtgagagagggtgtaggttagaaggtgagtagatggaaggaagcaatggagttagtttgtaccaattggaaaattagaggataagtagatggggtggggttagagtgtgggttgccaagcaaggtaaatggggcattctgacaggtaaataaaatgcaaggaatagcaaaatcagttgtaatgggtct

SEQ ID NO: 25255 - DNA, 414 bp, Glycine max
tgcttgtggggcttctatggaggctggatctttgagcttcaatggggtcctttaatggtgattttccaccatggagatgcagcggaagacaaaggaaaagaggtgagaggaggcaccatccattaaggaataagccatggaagaaggagcttcaccaccaagatgagccttggataagaagcttggagaggatgcttcaatggaggaaaagaaagagggagagaaagagggaggggggagcacgaaattgaaggaagaaaaagggagagaagttgaactttgagttgtgtctcacaagactctcattcatcaaagttacaacaagtgttacacatgcttctatttatagactaggtagcttccttgagaagctttcttaagaaaacttccttgagaagcttctttgagaaaact

SEQ ID NO: 25256 - DNA, 299 bp, Glycine max
ttcttcaattctttgggttgggtttgttgcaattttttgcaaactcatcccgatcataaatgaattgggtcagaataggttaattgggtttgaatatttaaaaaatatttttttaattctttctttagaataataatttgtttttttcactactagaaaaatactatacaacggtggttttaagacacattcaaatccaacgtcgtggaaagtctggttccataaaagctgtcttagaaaaaaactactattctaagatggtgatgcaatcatacccctttccccacaggcattggata

SEQ ID NO: 25257 - DNA, 424 bp, Glycine max
tctaattatcaagatcaccagcccaaacaaaattactatgcctttaatccacatctttaagaagctttcatggccaagaataaatgtggaaagaatttatcaccataccattaatgatcgagttgatcaattgaactttccccatgaaggaaagaaaggaagttttctaggaataaattttagatttgattttgtcctaggaataaatggtagagtcaaggcttacctactaaaattgggactccaaggtaggaaaaagagaggttccccaccttgaaacccaagagggattcaatttccaacattatgtaaggagtcatggaactggaaaatagcaagcatttgttcggattaataatttggtcagagacattcccataagactgaaagaggtccatcaaagaggagaggttcctttttagtt

SEQ ID NO: 25258 - DNA, 325 bp, Glycine max
agtcttcatattttatcaaatcaaattcttataatggattcaaataaacacgaagcggctattaatattgcaaacaggattactattaattgtttaatatttaaataaacaagaaacattttaagtattgaaatattcaaaatctcatgcattattacaaaaatatattatttcccaaccacttatcatggattggaatgttaaatgacgtaactgaatgggacagaacaacatgaaaaaatacataaataagatatactcagatcttccagtcttaaataaatcacctaaattcaaataacacgtggatacttattaaatttac

SEQ ID NO: 25259 - DNA, 422 bp, Glycine max
tattgaataatgttgacaaatgagattatccacagattctgttttataccagggaaaatatgagtagaaaaagaaagaatttagtcaaaatgtgccgaaagtatagcatgattcaattataaatcacttttataataattacttaaaagtcattctaataatgatttgttattagttgagtattatacttacaatgcatgaaaactaaatacaaataattgtttttttatagatatataggtcatgggtatgttttacgacaaacaattctactcaagttggataggactactgtaggcaacaaagaaaattgaatgatgtcaattacgttgttacataccatggaatgacttgaatgtgaggtcaaaggctcttgtttccttgaggaggttcttttagaactccatcccttgaagcttcta

SEQ ID NO: 25260 - DNA, 392 bp, Glycine max
  unsure at all n locations
tttcgattagacgaacaggancagccgcgggtcgaaggcacgagcaagacgacgagccaaggcccgacccaagcagaaaagaaagcaggcccgacaggcaagcgaggactgaaaggcacacgcgggacaccaccgacgagcacaaagagaagcaaaacctagcggcgacccacgagcaaaggccagaagaggaccacaccaagacatcagcggacagggaagcaagggaaagggcaaccgactcactgcccgagacgcaacgaggaggaagacagacccgcccatccaccaaagaaagcaagaccccccccgacgacatcaaaggccaaggaaaggcagacgggactacgcccccaaaaaaaaacccggcgccttaacaatagcagcacacg

SEQ ID NO: 25261 - DNA, 274 bp, Glycine max
cgtctttatattactttgccggaacttataaaaagggtatgattctttcaccgcctccaaaacagtcagaggtcggtctcaagatttgagagattgaactaactagttagttctctaaggacataatgcatgccatcaatcccacgaaatccaaattagtgatagctattagaaatctgatagtaaaggaggttgaaagtgacctccatcaaattgatcttaatactgcaatgaacaagtcaaatcgataccaacatatgttctatctgatagt

SEQ ID NO: 25262 - DNA, 477 bp, Glycine max
  unsure at all n locations
gcgtnncctgaaccctagacttgcngtcactcgatanaccactgacgctagcctaattcacccgatctagttagacaaggattatttatcgcggaaggtcttcatactaaatccatattaactatccacaagggactagtcatctgaacttcttatgcaccattcttctatagaggatgccacagcctcatcttttatctttctgtatacagaagcatgttgaccgactagcaaaactcaaacactaactcatatgaatacatgaatagaaagttacgaccacgagagtagcatagtgagtgacactcatgatatgaatagatgtcttgagggagcgttattgaaattggatgatccattaatttgtactataaagaatagacctcattctccttcttgtccctctgaaacttgtgtttccctttatgcctctacatccaataatcattgcctaccttcaaactggtatacatggcn

SEQ ID NO: 25263 - DNA, 533 bp, Glycine max
  unsure at all n locations
gcacaagacgacgagggcaagcacacggaggagaggagagggacagaaaaaanaaaaaagagggaaattgagtcgatgcctcgcanaccnaaggagaanacgacncgggaccgggggaaccncaagagncgaccagcaggcatgcaagtttatacctaaggagaaaacgagaaaagggagaaaaggcagctccncgcgcaccgccaaagtaaaaccaagaaggcacaaaaagcctgcaaccaccgaccaaagggggcaaggacaccccacgcacagacccagaagaactagcggaacacgcaagccacaggagagcccaaaacccacgcgggtggaaggagcttcaaaaaaagaagccaacgaacaccggcccaacaggcgacacacaaaggaaaaggcgtacatgccggacaaggacacacaccacatggcaggacgacaacccagcccccccgacctaacgaacgcacccggaaggccaagcacccgacggagaccaaccgcagacgagcaggcacagaagacgccgaccg

SEQ ID NO: 25264 - DNA, 520 bp, Glycine max
  unsure at all n locations
ggcgacgataacgagagaagataacgcgtgacggaagagaaaaaaagtaaaaaaaaaaacggangatgacccgagacatcgcanncccgnganataaanaaaagcacgcggcaagcaaaganccgcancaacncnacagcgagcctcatcccgaggccgaaaaaaaaaaangggngggacagccgacagaccagccggacacaacaacaaaaaggcgaggaaccgggcacaggacaagcaaccaaccccgcccgtgaacaggccaccagacaccacaagcaagccgacgaccagccaacccgcgaggaacaaaatgcacgcagaaaaaaggacaaaggaggaccaggaccgaaccaacagaaaagccagctacgacacagacagacagaacggacgcccgaccggacgccagacgccagagaccgaagaagaaccacgcccgacgctcgacaccacgcacaaccgaaccacaagaaacgaacacaagagaaggaccagaacacggcaaccgacaaggacc

SEQ ID NO: 25265 - DNA, 344 bp, Glycine max
agcttctataggataggcattctattttactaataacagtatataacagttcagccaggctactattctatccactctttgcagagtcttcatggaccaaagtggctgaaagctgaagttcttttttggttagtataggcttaatttttcagtgcaatctgtcttagtcttactgcttactctgagtatcattattctatctaatttatcagctacataaatactggcaaacatgaagaatgaatttctctgtatacctgtatggtgggcagttactgtatccaagagtgtgtcgggagtataactagttgattgcagtcttattcgtcttggttcaacaacat

SEQ ID NO: 25266 - DNA, 410 bp, Glycine max
cacggaaatggaatccttagatcttcctctgtgcgtgtttaatcttcacaggatatgttttccctaggaagactcactttcatatctaatgatgatactatttcgtatcatgtgcttggggtattatcttatatatatgttcgagttagaatctaataaacatactatcttgattcacggcaagtcttaatgctcttggtggataaaatatgagacaactgttattaccagctatgacactctaactaaatagggcttatttacattaactttcatataagctccttattttataggataataatatctcaacgtgaagtgctaaaagtagtcaacatgttactcagtgaaaattaccttctgtattgtctatttatagaagctctcttttaactgctctaacagctgag

SEQ ID NO: 25267 - DNA, 309 bp, Glycine max
  unsure at all n locations
tagtttggagcgctatccgcagactcagcagaagtcagttgggaaagaaatcagattatgtgcatgaatcttacacccagtgggttattgataggaccaagagctttggcctaccctaccgcttacctagatacctatcgtccaccatcccaccatcatccttgcctatcccttttgacactaaggaagagtttcatgaacaattaaccaaagaaaggcaagataaagaaacttggaagaggagatgccaggagctcgagcgagagaatgagactntgaaggggaagatagcccaacagagccgtgagc

SEQ ID NO: 25268 - DNA, 415 bp, Glycine max
tgttcttgattttttctaagttctttaacttgctttttacaatatacttgtccttcattttactgtctttgggcttggcggccacgctcaacaaagtattttcgacacctactgtacgttgatttgaccaacgctgttatgggaatgttgcgacaatccttcaaaaccttattgatacattctgagaggttggttgtcatgtggccatatcgacatccttctctatcataagtcatcgtccatttttcttttgaaatgcgatcaatccatgttgctatggctggactcagttcacgaaattattctagattttgataataaatgtgcttgcaaggagtgtaggctgcataaaattagttatgaataacaagtttaagtatatatcaaagtctaataaacgtgaccatgaaatatg

SEQ ID NO: 25269 - DNA, 386 bp, Glycine max
  unsure at all n locations
agtttgtaactcttggcaatttctttaaaactagtcacttaaaaagttatgacttttgaaagaatcttcagaaacaagtcacttgaagaattgtgacttttggaaatgtatttttcanaatcagtcactggtaatcgattaccattaaggtgtaatcgattacacatcaacagatgtgacttcattttgaatcttgaaaatcttaaccatttaaaacactggtaatcgattacatgattatggtaactgattacagctttgtaaatcagtttgaaaaaaatgctggctactggtaatcgattactaccttctggtaatcgattaccagagagtaaaacactttgggtaaaaaatttggtgaaaacttcatgtcctactcaatgttt

SEQ ID NO: 25270 - DNA, 415 bp, Glycine max
ttgcggatttggtctaccgctagtctaaattatcgaattgggtctaaaaagaggcaaatctgatcatcatgctttgatacatgcaaaaaaaactggggcacgtgaagagggagagaatgagggagaaacccatgttgtgactgccattcctatacaaccaagttttccactaacccaacaatgtcattactcagccaataacaaaccttctccttacccaccgcccagttatccacaaaggccatccctaaatcaaccacaaagtctgtctaccacacttccaatgacgaacaccacctttagcacaaaccaaaaacaccaaccaagatatgaagtttgcagcgagaaagcctgtagaattcaccctaattccagtgtcctatgctgacttgctcccatatttacttgataattc

SEQ ID NO: 25271 - DNA, 369 bp, Glycine max
agcttctcccctatttttctataaatagggagtgaagtgaagaagaaaagggttcagcctcttatgcacttctctctctctcgaaattgctgaggaaaattatttccgtgaagaaaatccaagccgaggcgcttccgtaacgtttccgtgagtaattacacgaagattctcgaccgttcttcaaagattcatcgttcgttcttctttttcttcagtcttcaacgggtaagtacctcaaaccgagctttccaattcaatctatgtactcgtggtggtccactttttgttccatgtattcttattctcgttttcatttgctttttatacccacttttgacgtccttaagccatttatttaagtcatttctc

SEQ ID NO: 25272 - DNA, 411 bp, Glycine max
tgttatccaaggctcatcttggtggtgaagctccttcttccatggcttattccttaatggatgacgcctcctctcacctcctttcctttgtcttccgctgcatctccatggtggaaaatcaccattaaaggaccccattgaagctcaaagatccaacctccatagaagccccacaagcaagcttccatcaagtggtaatcagagcacaagagcttcaagtaggtgctccttaaacctccattaattttttttctttaccttctgttccatttttgtttcttcatttttctccatatatctcctcacatgtcttgttctaaatgttgttaacatgattctttagagtttccaccgattaaacttgctatagaagttagatttgactttctatggttcaaaattcttgttctt

SEQ ID NO: 25273 - DNA, 365 bp, Glycine max
  unsure at all n locations
agtcttgattgagttgatgcatcacgtatcaatttcactttaaaagcgggtcctaattggattcctaattttcaacttacctatatggatgtgacatcatggcatataagtcccaactttccatcgtggattcagtcacaaaacaaacttcaatatgttggactgtctaacacggggattttagattctattcccacttggttctgggaaccacactctcaggttttgtatttaaacctctctcataatcatatccatggtgagcatgtgactacattacaaaatccaatatctatccaaactgttgatctaagcacaaatcacttatgtggtagattaccctatcttcanatgatgtgatgact

SEQ ID NO: 25274 - DNA, 425 bp, Glycine max
tgtaagatttgcaagatcatcttccttgacaactctttgaattagattgccgtcaatatgaagagataacaatttagagagtgatcgaagactttcaaatggatttccaatgaatttattcatagagagatcgagatatcttaatgatgaaagttttccaaatgatctaggaagagcaccaccaattgagttgttggaaaaaagtaacgtgtcaatatttttaaatgccccaatatgatctgtcagattgcctgaaagtcgtgaactctgaactgcaagtgttgtgagtccatgggaaatacaacgagcaagaatttctaaaagttcattaacctgttggttgagtttgagatatgataaatctatcacccttaagttgcagagagtacccaaagaagttggaatcgttccttcaagatgattac

SEQ ID NO: 25275 - DNA, 424 bp, Glycine max
tcatgatgaatcaagattgattcaaagatgttttgttgataactaaggtgatgacaaaaagctcaaaggtcaattcatgataatcaaagaatgagttcaagatgttcaatattgaatcaagaacacttcaaggttaaagaggaaatttgatttcaagaatcaagaatcaagattcaaggttcaagcttccaagaatcaagatcaagattcaagactctagattcaagaatcaagagaagacttaatcaagataagtatgaaaaggtttttcaaaaactgagtagcacatggatttttttcaaaacatgtttaccaagattttttactctctggtaatcgattaccagattattgtaatcgattaccagtagcataatggatttgaaaaagttttcaaatgaatttacaacgttccaattgattt

SEQ ID NO: 25276 - DNA, 389 bp, Glycine max
agtttcattatgatgaatcaagtatgattcaagtagttttgatgataacaaagagcccataagaatgatgtcgagattgagtcataaagttcaagatatcaagagaattcaagattcaagagaagttgatttcaagattcaagaaaagacatcaagaagaatcatgattcaagagaagatgaattcacaagggaagtattgaaacggatttttcaataaccaaacatagcatagttttgttttacaaaaagagttttctcaaaattttctaagttaccagagtatgtactctctggtaattgattatcagtttcctgtaatcgattaccagtgatatagtttgatttcaaaagcttttacttaattgtgcaacgtcccaaagtttttta

SEQ ID NO: 25277 - DNA, 405 bp, Glycine max
tgaaggtgtgtagctcaccatcctttcatagtagaatactggttatgtgtctactatcattgacatcatattgttttccgtcattgaggtgccacttgagctgccatgactctccatgtatgggcgtattcttttgaaagattcgtgccctctttttgcacaatgtcatgagttgcatcctatccgaagccattatatcgacactgcctaacgaacgcaaccattaggtccttccaagagtggactcaacaaggttccaggttggtgtaccatgtaacagctaccccagtaagattttcttggaaggaatgcatcaacaattcctcatatattgcgtatgcccccatcttccgataatacatctttagatgagtcttggggcaagtagaccccatgtacttgtca

SEQ ID NO: 25278 - DNA, 376 bp, Glycine max
  unsure at all n locations
atcttccttttttggtatcagagcacaagagcttcaagtaggtgctccttaaacctccattaattttttttctttaccttctcttccattgttgtttcttcatttttctccatgtatctcctcacatgtcttgttctaaatgttgttaacatgattctttagagtttccaccgattaaacttgctatagaagttagatttgattttctatggttcaaatttcttgttcttgttcttgaaccatgaattgtgttgagtctacgttcctttgagttctgtcttgttatattttgtggctgaaacctaaaccatanaattcttacaaaaatattanagtagaagataacctcanaaatctagagtgacttgttcaccta

SEQ ID NO: 25279 - DNA, 420 bp, Glycine max
  unsure at all n locations
tgcggatcaagttttaattttaaaaagtggcaattttgttataatttatgaaaaatggtttttattagggtttaggcttatttttgaggcatttaggctgaagtaaagtatgactgagtaatgaaataagtttgatgaagttgatattggtttgaaatttggttttgaagctttttggtttgtattgtataatgcttgtttaagatattttggctggtgtgaatttatattttgaaggtttcaatgattgacttatactatgtattgctttattactttaattgtatcatgtatgctagtgaataacaaattgacaataggaacacaaactattaagttgtagcgctagtttgatgtccctgccttctttcattaaccaatgtctagttntgctaaaagtntctcctacttcagtgtttg

SEQ ID NO: 25280 - DNA, 399 bp, Glycine max
  unsure at all n locations
agtttaatgcatgatttattataaaatattacattatcctacaaatttgaacaagaagattttttttattaaggatttaaattgttttggcatttaaaaaagcattttttattacaattataattttatatttttggtgaccaaataaaaattgaatttttaaatctttataaaaactattaatgttctatattttgacaattttttatttttattcattttgtatacatatatataaaatatttttttgttttattttattgaattatattcacaacaatgaccaaaacaataccccatgcatggcacanatacaaaaactagtaataataaatttgtgaatctatacacagcttgagaatcaacatgtngactctaggaagattttcatgcttcata

SEQ ID NO: 25281 - DNA, 418 bp, Glycine max
  unsure at all n locations
tgcagagaanactaaaagaagaagaatgaaaagaatgccaaattatcaatgaatgaaagttagcttacaatgattaaatattacagtttatatagttagttacaagattaactaacttgtagttagttacaagagtaactaacttgtaactaactaactttaactcactctaactaactaagctaattctaactctagttacatgataacttatgctaatagcccccttcaagctaggaatgaatgttagacgtgcctagcttggaatacaaaaattgaaaaacaccaggcagcagagctttagtgtaaatatctgcaagctgatttgcagaggaaataggaagcaatttcacaagcctagtcatcaccttctcttgaactatatggcagtcaatttcaatgtgttntgttctctcat

SEQ ID NO: 25282 - DNA, 297 bp, Glycine max
tcatgctttatgagaaaccatattttctaaggtagttcctaaacaaaaatcaattgaggaagcttcgccaagtatccccattgaaaaacctatattcatacctctcaaagattatattcttctttcatctattatactgcattcttacttcctatctgtccagttgatcctactccgctgacctctgatatatatatacgtcaaagattaatactgtctctggtctcatatataagcaaaaataattacttcccatagattaagacagttagttgaaagcatgaaatttactaatct

SEQ ID NO: 25283 - DNA, 411 bp, Glycine max
tgttgccctcaacgtgttaaagaatacatgagtattcttttccctgttctggtcaagttaagatgttagccaaaacttaatttgtttccatttgacaaaatatttaaattatccttatttcacttaaaataaacctctttactggttgtactattttataaacctcaaacatgatgcattgttatttgagtatgattgatccagctgtcgatgtcattggcactgagcatctttcgaggtttgtctctatttataaaaagttgtatgattgtaacatgtcgttgttcaaatatcggtattgtttcatgttactagttagttgcattatgagtgaaccttatttgcccgttcgagattcgatacatcgattaatacggatagtttgaattaatcgatgtattgaatcttgaa

SEQ ID NO: 25284 - DNA, 382 bp, Glycine max
  unsure at all n locations
agcttatgctattccaagttcattaatcatacctttaagccagattgcttccttcactccttcagctaaggccatgtattctgcttcaggtgttgaaagagcaacaattgattattgatttgctttccaactaattgttgtaccacacaaagtaaacacatatcctcttaaggacttcattgtgtctacatttcctgcanaatctgcatctacatagcttgtgattgctgcctcgtgtgctgtcttcttgtaccttaaaccagctttcaaagatccatgtagataccttagtgtccacttcacagcttcctagtgtgcgctgccaggatctcccatgaatctgcttataatacttatagcatgagctaagtcaggtctactg

SEQ ID NO: 25285 - DNA, 416 bp, Glycine max
tcaattgagcctcagaagttccctgtttcttcacattcagcatcacagaaatctcctcattcaataacatcatctcaatggctaaagaatgagacctttctaactccatctggaggtcttccactgcttcaattttagtttccaaatcagactgacatctattcaggttttctgtcaactgttttatcttaaagttccattcagcttctttagtctttaaagtagaggcacactctttatgagtttgttccaaatttctgagcttggaccgcaactttgactgcgaatatgaagttcctgcttcttgaatttgagcttcctggagttctttgagggacatccgcagctcttgattatcttgctctagcttctcaatcctgtactttgattctttattatatgcctcctttgtcttt

SEQ ID NO: 25286 - DNA, 364 bp, Glycine max
  unsure at all n locations
agcttatngatctcaaacaattgctgaaaggctggagcagagatactgtaggtgacttgtgctttaaggttaagcagctgtagcaaaagttgaatgaattggaagattccatgtctcaccaaccttctgaccagcaagtccttcagttgaagaatattcaggctgagctatgggaaaaggctaagttgcaggaatcctttgttaggcagaaatctaaatggattaaggagggagatagcaatagctcctatttccataaaattatcaatttcagtaggagaagaaacaccttgagggggctgatgatggatggtacttgngtagaataccctgatttgattaacgatgaagttctacagcattt

SEQ ID NO: 25287 - DNA, 416 bp, Glycine max
tccatcatctagtgtcaagggaaattgtcttgtgttttggagattgttcggtgtcgagggtggtaacctcgactagtgtaagagttgcaggtttgtgaggcatgtcaagctcccccagcttggaccagtgttgtttaggcttcttctatcaagttgtctggggtggacaagcttttgatcttgcaagcaaaattagacgtgtcaggtggatgatgtccttatatatgacgattctgcccttttctgatcgttggaggatgcattgaagacaaatgtttcattttgtcttttgctacaggcgagtgcaacacacacgtattactcttgcatatgtgtcactcatggagtgggcgtgtactgaagattcaatacgtgggtgagtggagttgcatcatggtttaaaaaattaaggcacc

SEQ ID NO: 25288 - DNA, 398 bp, Glycine max
tcaagtttaaacattcaacttcgagcgtctcgatatattacgagtctcaatcaaacatccgagaaaaaagttattgtcttttgaatttgctcagacgttcaacattcaatttcgatcgtctcgttatattacaggactcaatcagacattcgagtaaaaagttattgtcgtttgaattggcttagagcttcaacattcaatttcgagcgtctcgatatatgatgggactcaatcagacatccgtgtaaaaagttattggtcgttgaattggctcagagcttcaacattcaatttcgagcgtctcgatatatgacaggactcaatcagacatccgagtaaaacgttattgtcgtttgaatttcctcagagcttcaacattcaattttgagcgtctcgta

SEQ ID NO: 25289 - DNA, 402 bp, Glycine max
  unsure at all n locations
ntgagccaattgaaacaacaataacattttattgtttgtctgattgaggcccgnagtatatcgaaacgctcgaaattgaatgctgaagctctgagccgattcaaacgacaatatctttttacacggatgtctgattgaggcctgtaatatatcgagacgctcgaaattgaatgttgaacctttgagcgaattcaaacgacaataactttttactcggatgtctgattgagtcatgtcatatatcgagacgctcgaaattgaatgttgaagctctgagccaattcaaacgacaataacgttttactcagatgtctcattgagtcctgaaatttaatgagacgctcgaaattgaatgttgaacctctgatctaattcatacgacaatatacttttacacggatg

SEQ ID NO: 25290 - DNA, 354 bp, Glycine max
  unsure at all n locations
agcttaccagagccatccaatgatcatggactacatcaatctggtggcgccaacaatttgttaatttgtggggcaagagtactatagaagatcagttgcatcttaagaccaccgaactctaataaaccccaagacaatgatcatggggttgaggtgcaagtctctcttgatatataccttatattatgatacaacaattgatttgaatgaagaagattcttaatgtggacattggcacatcagtgcgggttactttttgcccaatgtttattttcaataagccccatcangaagatactgaaaatttttatactgctttggtgcattatatatggatgtaaaatcatgctgttg

SEQ ID NO: 25291 - DNA, 466 bp, Glycine max
cggaacatgacccgtaacctgcgacctcgatgaactgtaacactcttcaatactgctgccctactcatgggtcagagcacatttttatctctaatctttgcatctgcgaaggtttaagcgtgccctcacaataaatgtgtgaccgattcaccaaacgatggagttgttccaacttgacgtcaagaatcaccattctactgcttgaagtagtactatctcctcaaacaggatgcgatgaaatgctagtagagaagatacaactgtcggtgacattggcgctgtacatgtctcacggaatgtcacagtgatcacgagttgatagttggatcgtgagatccaaaacttaccctgtcgctgaaccatcctacaaagctccgatatgagtgaatctgcgttgcgcgcaccacatgcgcacactcaacataacacgagctcgataaatcctcgaactattgttgaatgtccc

SEQ ID NO: 25292 - DNA, 468 bp, Glycine max
  unsure at all n locations
gcggganttgttcgtgcatgcanaacttgatgccttganagcccgggaataaactcgcacgcgcgaacccctgagtttatctgaagcacgcaagttttttgagcggttgcgcgccagagagcgagacttccattcggcatgtactcacaaaccaagagctagatgtgtttactgttgaacaacaccataatctcacaatattttagtagcgaatctttcccaatgatggaacctcagcttcaaaactcgcctttcataatcaacagatgtatgtcccatcttagcagctctcacgatttcgtaactggaaccagctcgccattactcagcgtcaactttgaaaccgttccagatgctccaccccctagtacatcagtcccactcagcactttaataattcaacactacttaaaacccagtctatgaagcgaccttcactatgaaagtgacacccctctttatcatccg

SEQ ID NO: 25293 - DNA, 402 bp, Glycine max
  unsure at all n locations
taccaaaatatcctcccagcatttagatttacacttttttgtgggaagaagcaacaaggtacctgctgtatgatgatagttttatatgtaaaaaaatgttgaggcatagacaatttagttatattatgttcaataactaatattatatgacgtgattttaacttttctcaggtaatcaagttgattatgtattgattgttaaattagaatgattaaatctttgacatgaaccaaagcaacatcattggtcactctcgtacatgacaaaagaaatatgcatatgtttgatttctaaagctttgtacgcatgcaactttaaatttgagtttcatgaataatgttgaatttgctatctgatacacaggctatatacgtangtgatagagggagcctttgttacct

SEQ ID NO: 25294 - DNA, 358 bp, Glycine max
  unsure at all n locations
agcttgtatgattatggggtacccatcacatgtggtactaggtggcgatcgggcgatggtgcacaacaattctccacatccacaaatcacgtataaaaccaccatcccctgttgcccacctccaactgagctcacgtactcccacgtagcccttatcctcgntcctcttaacgccgggtccccatcaatcctcccaagcttccacaacatccaggcaattcaacatccaaatcatcacanactaacaaaccaagcaaaatagggcaaaggcagaaaactctgcccanaactcanaccanaatcacangcttttctcacttaaagattcagtaacatttccttctttcaatacgtaacc

SEQ ID NO: 25295 - DNA, 424 bp, Glycine max
  unsure at all n locations
ntgcggatttggtcttcgccagtgaaaggatcgatgtggatctgaaaagaggcaaatttaatcatcctgcttagacgaatgagaaaactggggcaaataaagagggtgaggatgagggagaaacccatgctgtgactgccattcctatacggccaagtttcccaccaaacccaacaatgtcattactcagtcaataacaaaccacctccttacccaccacccagttatccacaaaggccatccctaaatcaaccacaaagcctgtctaccgcacttacaatgacgaagaccacctttagcacaaaccaaagaaacaccaacaaaaaggaattttgcagcaaaaagcctgtagggttcaccccagattccgttgtcatatgctaaacttgatcccatatccactcaataattcaatggtagccat

SEQ ID NO: 25296 - DNA, 310 bp, Glycine max
  unsure at all n locations
agtttttatatacattacgcanaaggtaatggtttctttcttttcattttaagacttcaagctgtgatattttcaattctatggtaatatgtgtgataaacaaacagatagtagacatatgcaatgtcgaacaaataaacaattcagaattgatcactaaatctacagttaaaaaataatggcaaatataatgttcatttaccatttattaaatagaatttgccatccaacgaacaagagtgtataaagaagaaaactgataaattatgtaacctttttgaaatgtgaacactcagcttcaatacaagag

SEQ ID NO: 25297 - DNA, 425 bp, Glycine max
tatatgttttaggagaattatgccaaaaggaatgagttctcatttcaaaaaggtcgatttgttaataaaaacgagagaataaataggcaagattactattctcaccacggaggatttttagataaaaaaaattgtgacccatctaaagagaaacaaaatagaaaatcttcaagaagtggatgtaataaggctatcttgacaatcaaattgaagaaattctttgagatttttccaaaagaatggcaagttgtttaatttatatttgactacaatcatgaattgttgcctctagagtaagtgcgcttccttgcatcttattggaacatttttgaggaagatgagaagcaaatcttgttattaaaagatgttgacctttcagttaagcaaataatgtgtgttatggagcttgagaaaaatgtgatgca

SEQ ID NO: 25298 - DNA, 381 bp, Glycine max
  unsure at all n locations
agttttagatatttataggcctcctttatttaagtatctgttgtctctaaatagacacatttgttctctttaagctcacgcctgaagaaaatggttgttggaggcattaaatgcacgtacttcttcatgctgagaaaccactctntattgttggtgtgttgaacactttaacaggaaaccacttccttttgtgttaaagtaggtctatgcagtagagctcttcttttgatggtgattgaggaatttcagagcttgacttcatttattcttcataggattctatagatcctaagagaatgtctttgcanaacaaatctcagacacaatattaaatgaaatattatatgcaactttaatgtcgtatcagatcatgattccatc

SEQ ID NO: 25299 - DNA, 423 bp, Glycine max
tcacaggcaagcttccatcagttcttcacttaaactcttgcatgagtcatgacttgtataggagacatgtttttttcttttcatttctttcattatttttcttctttcgtcttctcttatattctctctttcatcttgacttatttcttccacttttttctctttttcttttctctcttgtttttttttcacaatttaagggatcttaaatcatttaatctcctatacaaggggtacttaggagtagaaccctcaccattaacactagatgaagaatgaagactcatgttggttcctaagtcgtggttccatcttgttgggggtttgaaaacaaaaggtaaaagaaactatcattgaaaatagccaaaataaacactacaagaggtgtgaaagataaggtaaaaactaattggtaaaaaacac

SEQ ID NO: 25300 - DNA, 321 bp, Glycine max
agctttaatttgctctgaatccgcgatgttgtgcctagtgccaccctcgcgcttagcgcgagtaagtggatttaggttaggcgccagttgtgcgctgagcctggcaagagacaaacgtctcgcttagcaagctaatctcgtgcttagcgtgcaaccttgatccttgtgctcttccagattcccttgtcacgctaagcgcgctgaacccacaaggtccgcttagcgcgactgcttcttttagcacttcaagattttagcctcttttgacctgaaattgaacaaatttctcattaaatcaaatggaaatatcctagagacagt

SEQ ID NO: 25301 - DNA, 424 bp, Glycine max
  unsure at all n locations
tgtgtgttgagttggttttatacttttgaaagacttattttatttgcgaacaaagagtcacttaaggcgtcggaccttgaaatgatttaaattttgaaaagctgagagaattgttaaggcgttggaccttggaacgatctcaagtgatatttgataaactgaagaagtttggttgtgaattgattttatcttgattttttttattaactctcaatctctttggagacaactttacaacactagtgatcggttaagattaaattttacaaagaaaacgagatcaccgatgatagatggagaagatgaatgtgcacataataataagagggacccctaagggtacatagatcacattcaatccctanaaataaaagtaattgactagtgtgaagaacaccgaacaagaaacgacatggagacgatc

SEQ ID NO: 25302 - DNA, 405 bp, Glycine max
  unsure at all n locations
agcttagattcaatctaaaagggcatctctctaaattggcttcaacacgaagtgagcttgataatctaaagcaagaaaatgaaaaactcgtttcaagttataaagccactaattgtgtttgagtttctacatcttctaatatggatgattacaaatccttgcaagatgagtttgaaaagtttaaaaaatatcactatgaagaacatatgaagttgcaaactgagctttcctatcttgaagatctgtttagaaaatgaataaaggaaagagtaatcttaatcacttacttagtgtgcaaaagcatacaattgataagactgctttgtggtataacaagcaaactgacatttctaagagaaccaagtttgtaccccttataaaggtgaacccanacaaagtctccaa

SEQ ID NO: 25303 - DNA, 422 bp, Glycine max
  unsure at all n locations
ntcaaccaaaataaaaactataaactgaaatttatattctgattcataagcataaatctaaattataaaatgtactaaatataatataataataaaactattcaaaaagtagggaaataaaaatcctgatcctatcaatgatcctgtgcagagtccatggcatgttcattcaggtccagtgtagtagtgcctgatggtgaatcctgagaaagaggtatgtctggcactggtgcaaatggctcaatctgaggagatgataggtccaacgctaaagtggtaggctctggtggaggctatggagtcacctatggtgtaactgttgcaacatcctcttgtggaatggctggactagtctcaacaatgaaaggctccgatggaatgggctctgaggcctctagaatgacatcctcctggtccggctg

SEQ ID NO: 25304 - DNA, 348 bp, Glycine max
  unsure at all n locations
ttcttttttattcaagacaaagatattggagatggacgatcaagacagntactagagtcttagaaagagtatattaatataggaagggaattcctattgaagcagctaaaggtttggcccagagatttaagttaaaaagtctttttacaagagatctactctctggtgatcgattaccagaggatgtaatcgattaccagtggccaaaactgatttacaacagctattaaaatttgaattcaaaatttgcattgtgtgatcgattacacatatatggtaatcgattaccaccagttattgaacgttttaattcaaatgttaaagcttgtaatcgattacacatatact

SEQ ID NO: 25305 - DNA, 407 bp, Glycine max
  unsure at all n locations
ttataagcgcgggttcgggagacaaaggttatgcgttcgcgatatgcgaagatgatattccgagtactttggatttggtacgaccatgccctcctgatttccagctgggaaattggcgagtggaggaacgccccggcatttacgcaacaagcataatgtaaacctttacggttntaaaagctctatagttgggcctatgctttagagttttttcttttgttaaggctttgtgtcttttgtttttgaacttataatacaaggatctctcttcatctgttcctggtctctacccattctcattcatttgcatgtatacttctttttctgaaacggcagatccgatgacgagtcccccgaaggtactaatacctgtgacccgtctatcgacttcgagcaagaaatgaatc

SEQ ID NO: 25306 - DNA, 395 bp, Glycine max
tctagcttgaatgtaggagaagattatatgaggagaatgagagatagaacacgaagttttgtgcctcaaaagaggtctaaacattgaagtgtaattctcaaataataaaagttgaaaaaatgcacacacatggcctctatttatagcctaagtgtcacaaacaattggagggaaatatgaatttctattcaaatttcacttgaatttgaaattgaatttgtggagccaaattctggagccaaaatttcagtaattattattagtgaattctagttatggttcagcccactaatccaagatcaagtccaagattctgcactaagtgtgcttaggtgtcatgaggcatgtaaagcatgaaggacatgcacaaagtgtgactatatgatgtggcaatg

SEQ ID NO: 25307 - DNA, 420 bp, Glycine max
  unsure at all n locations
tgaaccataaccggtgaaagtgtgatctttaactgttagtgaacgactagctntgagtaatggtctttgcatcaatctctgaaatttagaatgaaatgtatgaatgaggacatgatgaaggctatgattgtgtatatacaagccagttgaccaaaaagcttacgttgaatgctaattgtatcctttgcaccctatgtgagctaaattacattttcaaaattgaaccctgaacttaaatgattatctccagataccttgtttagattctaggagagcagatagttcaaggaaaattaccccaaatttgggggatttgattgggatgtaaagtaaaaggtaaagcattagcacacataacaaataggttgtgttaaaaaaaaggagaaaaagaaaagaaatcgaagaaaatgtgtattgttg

SEQ ID NO: 25308 - DNA, 376 bp, Glycine max
ttagttttcatgcacatggaatttatctacaaatcttctgaagtcaatttttagcactccccaaaattctttaatgaaattgaagttgaatccatcaggtccaggacatttgtccccaccacaactccacactgcttctttgatcttatgatccgagaaaggagcaatcaattcctccctctgcctttggttaattgaagagaattgtactccatcaagggtgggtctgaaaagctgttgttcagtgaatctgttgagaaaaaaaattcacagcttcattcttaacttcattgaggttctaaatccttacaccatgaatgagaatcctttgaagaccatataatgtctcttggaattataagttatggaataagct

SEQ ID NO: 25309 - DNA, 418 bp, Glycine max
tgtagtagtcatatatatatatatatatatatatatatatatatatatatataaacaacatatacaattctgaatccattattgaatataaggcaactaccacaaacctgccaactaggggtttgacggtttttgcaaattcgacccatgttgttggatcaagaccatacttcaccgtaggatcagatatttttctgaccttcattgtcagcatagacaaatttagaagtcaatgacgacttaaattgcctctatctaactgcgactgttgacatcaccttcttttttgcatcctcacgttcagggatgtcaaatttgcactgcacaacaaaaggtgttatgtaacagtaagtaaatgattcctttaaaactaacttaaaaacaaaatcataagcatgcgtgtatttataaccattta

SEQ ID NO: 25310 - DNA, 320 bp, Glycine max
atcttgagatgaggaagtgttttatggtgaaacttcctgcttttattgttgaccacagagtggtacctggagatatgtcgcgggggtcaggagaccttggggacgtcacgtgaggtgctattgcccaaaaccaagcttgaccaatcccaacccaacccgggcatagtctgtcagtgagaacctgtgatgtacctaagcaggcgagctcctggcagtcaacagataaaaggaattcaagacctacaagcatggaggcttgtggtggctggccagctgtgaattttgtgaatatgtggattgaggcctctggtaatcgatta

SEQ ID NO: 25311 - DNA, 393 bp, Glycine max
tatcataatcgattgcactgttgttttttatacgatgatcgatttattcatgagtctgtgcctaaattgattaccatgtgatatattcgactacttctatttctataagtgatttgagaagcgatcaagaacactttaatggactacattgaggacctaatccattacattgtgcttgagaggcttacaggttttgggatgaacactttaatcgattgataacataatataatggactacttgattgaaagcatcgattacattgaatatttagtcgagtataggcagccgtaaatggtgtatctataaatagtcaccttgtgatgtcacttataagtacaagtccattaagcgtgaaactatatgtgctgagataattgagagaatagaaga

SEQ ID NO: 25312 - DNA, 392 bp, Glycine max
  unsure at all n locations
agcttgttatccgagtagactactccgagaatggtggcattgactaccccagttgaaatgttgacactgttacctaatgcattcacattcagcggaagccttgcagggtctttaccagccactgtctgcacagggttgcttaaggaatcgaagtttgagctcgacacaaactctggcaatatgtggaactgcactaattcgattttctggccttcgtttaaggagttgaggaagcctgctttgaggttggaaaaggcagaatcatctggtgcaaggatggttatgccgccactcttggctgttatgagctgtgagttgatgttgttcatgatttctgtggttntgaggaggcggattangactgagaacattnnttgccttttcaggattct

SEQ ID NO: 25313 - DNA, 425 bp, Glycine max
tgacactatgaaactcagcttttaattgcttttgagttatgttgatgctgtgcactgtatgttttgttaattaaaattctctaggtgttgaatttgcttttctgtggtggaatttactcaggaaaataacctattgtacattttctccttttctttcatctctatctcaatgtttccttaaatctttattaggtggagtttggctattaaacttcattttgtttccaagacacaaccccgtgcaaataattatctgcattgatgtttaaaaccaaattttcaatgtggctttcttcctgaatgacttaagttaaccatattcctttctgaatttttcagaaacaacccagtgcagagtgtggagagaacatttcaactgactagagctgacaaggacttggtatcaaaaccagaatttgatgttg

SEQ ID NO: 25314 - DNA, 270 bp, Glycine max
agttctatcataaccatacattatataaattacattgtgactattgaaaaggagaaaaacagagggcctaaggtgatgggctaacccaccacaccgttatgcttaaatgaatgtttatcaaacgaagagaacatagactatatcttggtggtgggttaagcataactatgggtataagttgtggtcgtgatagactataaagtatgacacttcttatcatttattcaaaaacaccatattacttacgacagtggctgcgtgtatacatac

SEQ ID NO: 25315 - DNA, 281 bp, Glycine max
tctatgactcaacgcggacaattccgcctctcaattctcccgattcgcctgcgagtgcaactcgttcactctccataaccccaccagaatcttcaccgtgttggcgtgcatcatcgccgtgcgcccctcggtgcacacggcgaggccgcatagaatcagcagcacccggatcgccaaattccccgccaccaccatctagaggagcgtggggacagccccgagtttaaccaattgcaatctgttgctctgcacaagtgacatatgatacaacgcgagcgctg

SEQ ID NO: 25316 - DNA, 173 bp, Glycine max
  unsure at all n locations
gatgcggtattttctccttacgcatctgtgcggtatttcacaccgcatatggtgcactctcagtacaatctgctctgatgccgcatagttaagccagccccgacacccgccaacacccgctgacgcgaaccccttgcggtcgnattgaatataactttatataatgaatgcct

SEQ ID NO: 25317 - DNA, 346 bp, Glycine max
  unsure at all n locations
agcttggtggagttcgctgagaatcgttgaaggtttgggtagggttacgagcctacacaggtggacaagaagagggtcgcctttgaaaggaaggagagaagcctggcccatctacaagggcaaggactacaagtggaaagggtccccatttgtcacatcagcaaaagctttgttggtgcaagatggatgcgctaggatcaggtggcggtgatagatgaagaaacccctcaagaccgaccaaattgggtgcaaccatgtcctacggactttgaattngggaattggcaatcgttgaacgacccgagattccatgacaaattcaatgtaatccaatagttccacccta

SEQ ID NO: 25318 - DNA, 431 bp, Glycine max
acagcttgtgcaaatcaagtcactcccgcattttatctctatcatgcattgtatgttggtctcgtcctttgtcacgggaagccggaaggtccatatcaccttcttaattgtacacatggggcactgcacccccaaatgcgcaagtaagaagagataatttttcgggctctcgtgtccgtaaaatgcattcatatcatgcatcgcataagcatctcttcataacatcataatggacatatcctgcatttgtccgttatcatattccggcctcacattttgcatgagtcatggcatcatcatgcatatgcgttcaacaaactttttgatctgcaaaattgcataccatttgttttcatgtttgctcatccttgcgttttcctctacaaaacaaaaacaaaaaagggggaagcgtgaaacttcacactacattc

SEQ ID NO: 25319 - DNA, 353 bp, Glycine max
  unsure at all n locations
agtttgaagtcacttgctaatacaggtcccactcccatatgtccccatacaaaacaatatttatttttacttgttcgcttttgataatcctatgatgttatacaaactgtctgattgtgtagcttgtcaatatggcaaacaaattagattatcattntcccaaacaaggaggagagcaacacanaaattgcagttagtacatacagatgtatgtcggaggacctcatagaacaacatctttgaatggtaatagatattatattacatttattgatgattattctagaatttgttagaattaattatttaaatccaagactgangtagttaacatattctggaaatataaagca

SEQ ID NO: 25320 - DNA, 423 bp, Glycine max
gctcaaagtggaagtctggaagcatgagcatttttccatttgccttggatcacgtgaccaccttggatttctttacgtaaaatattgcatgtgcgtctctgcaacccgtacactatgtaataaagttataagacttcaatccaaagccttaccttgcttgtttgcataccctgcaaagatagagcgtaacttggatctcaagctatgctatgctcccagggtaacaagtgtcagcccaatgtaaccatctacttatttatgggattccaacgtgtattgcgaacaaatacaattgtcattaatcattagcctaaagttcatgctatttctaagatctcgaaaggatatctcctcggtattcggattctttggatgtatttttcttagattactcatttatataataacacattcataatacct

SEQ ID NO: 25321 - DNA, 311 bp, Glycine max
agcttgataacaagtgaaaatgtctgtataatttgtgccatactgctgatgaaaacccttagccaccaacttggctttgtacttgttaacaatgccatcagagttttctttcacctaaaacacccacttgcaaccaatggaagttttgttaggaggtataggaactagactccatgttttgttttaaatcaaggcatcatattcagtttgcatagcagccaaccaagtagggtcagccaaggcttgcttggtggatttaggttctaaatgggtcagaataagggtaacgtgaatcttgtgttgaacaatac

SEQ ID NO: 25322 - DNA, 426 bp, Glycine max
ttgaaatcataacttcttgtattccacaccatcatgaccatcatagtgggagacaaattaattaatttcctcttaccactgcaatcatcccgcacccaatttaacataaagtgattcacagctatctattaggatgaaaaacagtgaataatttctcttttccaaatgttctttctatgtattatgtttcaccgtaaaattcaataatgaatataattaacagattaaatttatataaaagaacttaactttaattatcgcagaatatatttctaaaaaatgataaattttaagtgtgcaagttattaaagttgttgttaatgaaaaaaatttaaaattaaagaagcccaaatcccttttttttatttttctgataaaaatctaataaattgtggtactttggtggatggatcttggaccacaatt

SEQ ID NO: 25323 - DNA, 187 bp, Glycine max
ttcctgtttcgggatttattgctctactcatcgtgtgcagactttgacaccgcgtatggtgctcactcattacaatgtcatatgactccgcatcgttagcgaggcctcggtccactggataaccatgatcgcgaaacgttttaaataggattcttttatcggaatttctccacaatctttacggttc

SEQ ID NO: 25324 - DNA, 393 bp, Glycine max
  unsure at all n locations
attcttgatgtagagaagttatggattataccattctttttatagaatgatctaaactcagcatttttaaacttagttccatggttgctccgaatagaagagatgtaaaaacctttttcattttggactattttatagaatatttcaaagaccttaaaagactcattcttatgagcaaggaagtatacccaggtatatcttgaatagtcatcaattatgacaaagccatacttttttcctcctagactcaatgttctagttagtccaaatagatccatgtgcaatagatgtataggtctggaagtggaaacaacatctttagatttaaaagaggttntgatttggttgccttgctgacatgcttcacagagaatatgagttttccaacagatc

SEQ ID NO: 25325 - DNA, 246 bp, Glycine max
  unsure at all n locations
ntatgactatgcaagcacacggtaggatcagtttatatatttttcaaaatcatttttacctttcattttcttttatatcatgcaattggagtagttatcattatgtatgtttatccaccaagttttgtcatggtatcgttcttcaaattctcatttagttgtggagaaagccttagaaacaaaaggaaaattaggagactgaaaaaaaaataggaggtgataaagttaggacaaaaaatagtgttt

SEQ ID NO: 25326 - DNA, 181 bp, Glycine max
gaagttttctcaaagaagcttctcaaggaagcctcctaatctataaatagaagcatgtgtaacacttgttttaactttgatgaatgagagtcttgtgagacacaactcaaagtttaacttctctcccccttttcctccttcaattttgtgctcccccctctctatttcttttcctccattg

SEQ ID NO: 25327 - DNA, 416 bp, Glycine max
  unsure at all n locations
tgagatgagnttgtgagtgattgtgagatctctagatgtgaaggatacatcctcaccacttgtatttttgcaatctttcatcttgttcttctctttattgtaaagaaggcttcctagtatggaaagctaaatcctctgttggatcttccctgtaggtacctgatgtaaatatatttctatctatttaatgatgttttgtgtgttctctgtgctatctgcttttcactccagtatgcctttaccttgatcaaatagatgcatgctttgttaggatcattcaacagtggaaactggtctgactctaaagtccttgagagtacagggctaagttgtcgtactatcacgaagaatcggggtgcgataatttagttgtgtatgtgtgtcttaatgccggcctggttgagtttagtcttaca

SEQ ID NO: 25328 - DNA, 320 bp, Glycine max
  unsure at all n locations
tcaagtcttcttgagaagattcctaaagaagctagagcttagctacacacaccgccctaagaactaagctgacctccgtgagatgagaagctcaagcttacaaaagaagtgcctacaacgaagactactcagaatgccctgaaatacaaggctaaaatcctatactactagaatggccaaaacacaaggcccaaaagaaggaaaaacctattctgatatttacaaaaaagagtggatccaaccttgacccatgggctcaaaaatctaccttaaagttcatgagaaccctanggcattctttagtagctctagcccaatcc

SEQ ID NO: 25329 - DNA, 418 bp, Glycine max
tgcccagagaaggagtccacggaggaaatgcttacttcctcataagactggaaaaaggtctctaatgactcctctacggcttcgacataaggcatagaggatgggcagctcaccaagatgtcctcctcgcctgatacgataaccagatgcccttccactacgaatttcaacttttggtggagtgttgagggaacaactcctactgagtggatccacgggcgccccaacagacagctgtaggggggttaatatccattatttggaaagtaacttgacaggtgtgagggcctatctgtattgggagatcgatctctcccctaacctctcggcgggtgccgtcgaaggtgcgaaccaccattgaactcggctttaagtgggaagcgttgaatggtaatttctccagagtgctgttaggcat

SEQ ID NO: 25330 - DNA, 418 bp, Glycine max
  unsure at all n locations
ctcgacccgggatcctcttagtcacctgcagcattttatcttctagaataatggcctctttctaacttcttattcccagaaggaaattcaatacataggcctcctatttttaatggagaaggttaccactactggaaaacccgaatgcaaattgttattgaggcaatagacttaaacatttgggaagccatataagttagaccttatgtacccaccatggtggctggaaatacaacaatagagaaacctatacaagagtggtatgaacatgacagaagattagtgcagtacaatttataggctaaaaacatcattacttctgccctangaatggatggatatcttacggtttcaaattgtagagtgctaaaatatgtgggacactctacaagttacacatgacggaacaactgatgtc

SEQ ID NO: 25331 - DNA, 419 bp, Glycine max
tcaagaaaaagatggcctcagcaaattccttatttctctgaaggttaattctatcaatagacctccaatctttaatggagagggttaccactactggaaaacccgaatgcaaatttttatcgaggcaatagatctaaatatctgggaagccatagaaatagggccttatatacccaacacagtagaaagagtttcaatagatggtagttcatcatgtgaaagcataaccatagaaaaacctagagatagatggtctgaagagggtagaaaacgagtacaatacaacttaaaagccaaaaacataataacatctgccctaggaatggatgaatatttcaaggtttcaaattgtaagagtgctaatgaaatgtgggacactcttcgataacacatgaaggaactacagatgttaaaagatc

SEQ ID NO: 25332 - DNA, 393 bp, Glycine max
  unsure at all n locations
tctattttgggagtggtcatggttttaagccctcangttagctagtgcacaatgcaaattaccaattaccgaatggagtctcaccctgtgttcggatctactgaaagtgcatatatgaaaatgaaagagctatgaaaagagatgaaagtatcttttctttgatgtttggttgccccgaaatagagatgaaagtctttataaatatatatatttctcgtaaaattgatatatatcaaattttgattcacagttagatttggataaactacattttacaacctgttggatcttttaggattaaaattactatatactatatataaattatcacaacatagagaaaactgatactaactataaaagaatgtcacattataaaaaaatgccaaaatt

SEQ ID NO: 25333 - DNA, 405 bp, Glycine max
taaatgcaattttgatctctgtttacctttccttatgttataggagagcattatggtttaagaaaaatttgtcccaaatttgggggagtatgtttgggtgatcttggttgcgggaaaagaaagtagcagccacacagagagccatataataactagtagcagtaatcataaactgctaaaataaaaaaataataaagataaaagaaaaaagagaagaagagaatttcaagaataagtgaagctctgtgtgctgttaattgtgttgtaacttcattgcgcttttggcatatcaatagaaactgggaattaaagaggaaggtgatctaaggatgaatgctctcctagaacctaagttttgcatcctagaaaaaccatcaattgtttgtagcccagcctcattacaag

SEQ ID NO: 25334 - DNA, 339 bp, Glycine max
agcttgtgcctcttcacgtctggaatatgaatagcatatagatccaaagacccttaggtgctttgctgatggcttcttcccgttccaagcttcaataggagtcttgtcttttacagacttagttggacatctgttgagtatgttaacagcaatgtagactacttcagcccaaaatgtgttaggtagtcccttctccttgagcatcgatctagccatttccataactgtgcgaatttttctctcagacactccattttgttgatgagaatatgcgactgtaagttttcgctcaatgccttcatcctcacaaaaactttcaaacttgcgagaggtgtactc

SEQ ID NO: 25335 - DNA, 199 bp, Glycine max
gggacttgcttatatatgacaaaatgactactatcgtggcgagctacatgctctgttggatcctccctgggagtacccgatgatggtatacatctatctatatgatgatgtgatggctggtctctgggctatctgcttttcgctccacatgcgctctccttgatcaatataggcgagctttgttggctctttcagcaga

SEQ ID NO: 25336 - DNA, 509 bp, Glycine max
  unsure at all n locations
cgccaagacgaagcaacacacggaacggacccaaggacctaaccgtnacaacaagcagannataggtcattgccngcanacnttctaaccctggaaacccagggaanaaaaccgccccgggaccacaagcgaccgcagcagcaagcttggacaccacaccagagagccgagagacaaggagacgaccccacagacacctacccacacgaaggcccaaggcaagaacccaaacgaagggacggtaaaccgagcacacaaccccgggcgaagcaagaatggcggatgaaccacgcgcgaagacgaacaacgcgccaaccgcgacccagggcacgcccacaagccatcgacgcacaaagcaagagccggcgcccagcgaacacacgcaccaagcgaataggacaaggcccgcagaacgcaccaaggcataaacgaacaaaacaggaaccaagatccaccaaaggaaaagacacaccgcaacagcgggcgcggaaaaaaaaggcaaaaaaccc

SEQ ID NO: 25337 - DNA, 342 bp, Glycine max
tcaacaagcgagaacacggaggttattattttctgtgtgagacgagacagaacgtggtgaatcgatctataagataactacaacccgcataatccttttgccacagaatgatgacccactaattcggtgtaaactggttaccagtaggtgatagataagacttaaccttttgatattttcgatccaagaaagaacctttggaatccgacgaatagtaacatcaaaagaaaccttatttgctgcgtgcctattagatacgtctaccgtactcgcctcagtttctcctatacgcgaattatcataaggagtaagactgaacctaaatctctagtcgtacacacg

SEQ ID NO: 25338 - DNA, 381 bp, Glycine max
  unsure at all n locations
atcttatgatantttgtaatgtttccttactaattacggggatttgattttttttggattaattacttttataataaactcacccctcgcaatttttgtaccgtgtggctggtacctgtgatgatcgtgaacccttgttcgcgggagtataatgacaatagtattggatgagaagtgaaaattctttgtggagccgccgagtcgacgtgatgacgttgaaattattttgtgagagagtcgtgtcttgttaatcaactcctccataactggctccataattcttattgttgattcgaagatgtaaatcacacattgtattatatgtatgaacaaatttattttccattatgttaatgatgtgtactacggtactatatatat

SEQ ID NO: 25339 - DNA, 296 bp, Glycine max
  unsure at all n locations
tgagagcaattnctaatactcttctaatttgtatactcttctatggatttaggcaactaaatcactgctttatttgtattcttaatctttatcattcgaagagaattatattctatcatttgaagaggtcagtttgaagttcattagtgctggtaaacagatactctcttcatgttgatgatctttaaataagaattatactcttcatgttgcatctttttgctcgtactctactctatttcattcttctgttgaatctaaaacttatgttcacgacatttatccaataaacgcat

SEQ ID NO: 25340 - DNA, 398 bp, Glycine max
  unsure at all n locations
ttcttgcattggaagcatattttgacaaagacagagcaagctattcttacaggcggccaataggacccaaccctcaatacacgagtggcaacagttctatccctagaatgcatgttacaggaaccttcgtgtagctcttagagcacaaggtagctcgggctatgacaagacatccgagtagaggcggggaaagccccctcatatatatctgacagctgccgtgctctggcgtcaggctctctctctgcctacagggagtgtgatatgctctagataaccaactatcgccttcttgcaccacgaaaaggtcactgcttaaatatgcaaacactctgtacccgatacactgatgacaaaaccgatggaagaatgaaagtcctagccgcccggcctagccn

SEQ ID NO: 25341 - DNA, 302 bp, Glycine max
ttatcttctcaaggaagttctctcaaagaagctacttttggattttggctcaagaaagcttatgagggaagctacctagtctataaatagatacatgtgtaacacttgtggcaactttgatgaatgagagtcttgtgaaacacaactcttagttcaacttctctccctttttcttccttcaatttcgtgctcccccctctctctttcactccctctttcttttcctccattgaagcatcctgtccaagcttcttattcaacgcacatcttggtggtgaagctccttcttccatggcttattt

SEQ ID NO: 25342 - DNA, 252 bp, Glycine max
taccatcacgaacatcgactccctttccatcattggggagaccacctgtgccgccatatccctccaccttttgggcgtgatctttgatagataccgcccccttttagcatagttctgtagtagcatactatccggaaccatatcaaaattgtactgatactgcctaacaaatgccaccaatagagaccttccaagaatggattacggaagattccacgttagagcacaagtaacagctaccccaatagacta

SEQ ID NO: 25343 - DNA, 394 bp, Glycine max
ctataacactcagcttaacatctaccacttccaggtgctggaactacttttcatttacctgtcttggcccatgcaagttgaaagccttggtggattaaagcatgcctatgttgttgaggatgatttctccatatttacctgggtcaactttttcagagagacatcagacaccttagaagtattcacagagttgagtctatcacttcaaagagataaagactgagtgatcaatagaattacgagtgaccatggctgagagtttgaaaacagcaagtttactagattctgcacatctgagggcatcactcatgagttttctgcagtcattacaccactacaaaacggcataattgtaaggatatacacgactttgcaagatgctgctatggtcatg

SEQ ID NO: 25344 - DNA, 334 bp, Glycine max
agtttgttttttttacacaataaccctatagataattcatggctactagataaacgggtacttacaatttgataagatgataatgacattatcattaaagttcatatatattaatagcttatcagtccaatgacccatatgctaagcaagtcgtgtttgcattcctatatcaaggctaatgaggaaggttgatgtgtatattttaacgccacgtcagtttatggaccccagacagtacaaattcgaaaaataatcattgtaagtaaaccaaatgtcttataagatactgcttttaaaagtcacattttgttctctaatcaactttaattttata

SEQ ID NO: 25345 - DNA, 422 bp, Glycine max
  unsure at all n locations
tcttagttntagctgatgaaaatgaattcctggcttcttcattcactcctctaatgacaatagcatcatttttggcgctacattgctgggagttggaagccatcatctcaattaaattcctggcttcaacaggggtcatgtctccaaaggctccaccactggcaacatcaatcatacttctccccatgttactgagtccttcataaaaatattggagaagaagctgctcagaaatctggtggtgagggcaactgacgcgtagttntttaaatctctcccaatattcatataggctctctccactgagttgcctaatgcctggaatatcctctttgatggtcgtggtcctggaagcagggaaaatgttttctaaagaatactctcttgaggtcatcctggctcgtgatggaccttggagcaag

SEQ ID NO: 25346 - DNA, 359 bp, Glycine max
atctttttttgttgcccaactgctattactaatataagaggcccatgatttacgaagagggcaacaattcagatggcaagaaagatcgtttttatagaaaataaatgagtttggcggcgtctaagctcaaggacttgcattagtttttctcttcatcaaatcctttgattcccatagctatgagtaactaattccatgtctgttgggtttggtgtaattagactaccttcatctaattgctgctttttatattcaataaagcatttgtattgttcttctttgtgcctattgcctctgattgatcacctaattactcgattcattgtgttcaattgtatttggaaaaatctatttgatct

SEQ ID NO: 25347 - DNA, 421 bp, Glycine max
tataggaagtgaaagaattagcatgggcagaaatgtttccgctttgattggtaaatctgttccccaaatccctgaataatgtaaagatccaagtacattaagcataccttgtattataggaaacagtaagtttgacaatgccatgctagatttatgagcttctgttagtgttatgcctcagtctatttttaattctctatctcttggtcctttgcagtcaactgatgtggtaattcatttagctaatagaagtgttgcctatcctgctggtttcatagaggatgtcttagttagagttggtgaactgattttccttgttgatttttatatattgaatatggaggagggattctctcaaggatcagttcccatcattctaggcagaccttttatgaaaactgctagaactaagatagatgta

SEQ ID NO: 25348 - DNA, 434 bp, Glycine max
  unsure at all n locations
cgtgaatgatcctgtacntcgaattcttganatatccacgctatgcttgcggattgtcttcccgacaaattttgattttgtncttaaagaggcaaaggctattctttcttgcttggacaaactgaaaaaactgtggttnaatataagggtgataatgatggacacacccatgctgtgacttgtcttcctatacacgacaatttctctacatcttattcaccatcattactcaacccataatattcatctttatattccacagtcatttctcctaaatgtcatccttatatctcagcatacctacttccacaattaatgctaaacccactttatccaacctaactcctacaaaaatgattttgcctgaaatcctgttgataccccaattcggtgcatatctacttgaccatatctatggtgcctatcctctgtag

SEQ ID NO: 25349 - DNA, 477 bp, Glycine max
tggacattgattgatgcatgacaatcattgagaccctgtgacgccacccggtgttcctctaaagctcagcccgcaggctttctatttttcagcgcacgaacgattgttcttaaccagaagaatgcaagaaggaggcgcacaactggggagctccccgcgaaaggtcctgtctttcttacagccgaacgatcatccataataagccttactataagttcacctacctacaaacagggatccattttattatctctttcacaaatgaacacctgtacttcccacgtggaaaacaatgctccatacctgcattgcgtgacctcagacatcttgaaatgaatattcaccgatgcatgcgaatcaagagcatgcacatttcatgacctaactttaacaacggggtgttaccatcacaataccacaatctggaaccaaatatttaataacctaccttctctgctaccaattatctaaataacg

SEQ ID NO: 25350 - DNA, 475 bp, Glycine max
  unsure at all n locations
tatactctcttcatgaatggagcacattataccacttttgtgctacaagnggcgccccaagactatctatatacgaggggtggcgcgatcgacatataaagcatactcaacaacacactatatttctcctccagtatataaacattttctatacctcttctatgaatcgacacactatcaatggcagcccttaattatgaactcatctataacacaatctcaatactaaacatggcgtaatgcactgagatagatgtttattcaaataatgcatgatcattggaagataacgagcagactcatatatacactggttaaaacatgccctgagcctacgtacaatacccgcgcaacccacgtgagatatgcacctatctgtaaaatcgctttacgtcttgtaaaccgcacaaggacatcccttactttgtgttcatatcactttaaaacaagcatatcactacttctcttactatcn

SEQ ID NO: 25351 - DNA, 173 bp, Glycine max
ggcaaaacaacaccacaatggattatgatcgatggatgcgctcaaaattctcacaaaagggtaaactcatcactgtcaagatggagctctcaaaactatcatgacatgtagagaagaatcaaggagctcaagtcacaaaatgtcaagaacctgtattttcaaaacaataaccc

SEQ ID NO: 25352 - DNA, 250 bp, Glycine max
agattcatggatcagatttatgcattatttcttcctgtaccttctaagccattgtccacaaagctatcccaatgtatattattttaccatttaaaagcccttttagccaaacactctgacattctgtctgaacactaactctaggataagagatttcaaccataccttatgttacgagaatgaatgtgctttgatggggatcgctatcatttggtggataatgagattcccatactctgctcctaaacgt

SEQ ID NO: 25353 - DNA, 216 bp, Glycine max
ctgatgcagactcagagcactgacatataaagctgcacgaaaacgaaaaccgtgacactctatggactttcgaacggtcacaaaatatcacacagaggttccaaaacagcgctttatatattcatactcttgaaaacggacactgggcgatcttcacatatctaaatcgccatgactttatatggagaggatatacccacgggaagacgaattact

SEQ ID NO: 25354 - DNA, 359 bp, Glycine max
tctattttctaaacctatgtatctctgcataagctggtcctcttgcacactccagagctctgttctcaaaataagcactgtggtgtgtgtggaattgtaagacctgtgccttgataccgaaattcttcacaaaataggctttaaataggctctgaagttgcaacattggtcttatagcgcccctctcgctgagcatgggtaagcgcaattgggcttagcgccagtaatgcgctgagactatatgaatacacctgctgtgcataacgcactgatatcgcgctgagagtgctatcctgatgaagatgcgctgcacttattttctatctagctaagcacactgaagctgcgcttgtcggtgg

SEQ ID NO: 25355 - DNA, 277 bp, Glycine max
aagttttggatttttcatgccaaactcgctcgagtgtggtttggattggatgatgcgtatattctatccccttaccatagcgcttttggcataatcctggtgatcactagtatgagcttgaagaaggaaaaatacactcatcgctacttctgtttatcttgtgctgaatggagaagagacagcttcgatttgttctttaaagagaaatgatgatgaggtataacgcttatgttgacaagcttaattgacaccatggatgactaatacccaacccatg

SEQ ID NO: 25356 - DNA, 479 bp, Glycine max
  unsure at all n locations
tggcntattcggtcgtggaatgcannaannttgatagctttgactacccacggcgaataagagctcggtgcccgcggatcctctttttttgttctgaaggcacgcaagcttagtttcaagcggaagaaaagaaaagcgaagctgaacgatatgatgacgacagcttctaaataacgaaacgaatcgaaagtcgtaagactacaaacttaccagttgtagaacgacgaacggtgaacaacgactgacacccttatcggatatgctcccagaaacgtattagaaactcacagactaggactctcttcatggaaacaattatctccacccatgacgatgatatgcaatacaaaggagtccggtatataagaacaatcctcctgcccctatatctaggataaaaggcgatgactcttgatgcaccaagcaaggcgctctggaaggaaatctatacgcaggctgttttttatatcgggacggac

SEQ ID NO: 25357 - DNA, 355 bp, Glycine max
  unsure at all n locations
agttttcaacaagtttcttcacaaataactatcatgaagcagaaaactagcaagactacccatcatatcttccaaaaccccatacccacgaaatttaagagagaaagaagtccacccaaacctgaattttcgaagtcccactcgtagccacgcacttcacgaccccgaaaatgccctcctttcgcgatttggggcagaaatgatggccaaaggttgaagctttgcttggagcttcaatggagaatgaagaagaagaaaatggcaacgtgagggagagagagagctgtctganaaagtgtggggctgagtgaagagagagnaaagctnnttgggttttaaataaagggggttctct

SEQ ID NO: 25358 - DNA, 409 bp, Glycine max
taatatatcgagacgatcaaaattgaacatcggattctctcgtgaaattaaaatggtcataagttttaactcggatgtccgattcaggagcttcacatatcgagatgcacgaaattgaacaatggaagctctagagaaattctaatggtcataaattttcacacggaggtcctattcaggcgcttaatatatccagacgctcgaaattgaacaatggaagctctcgagatattcaaatggtcataacttttcactcggatgtccgattcaggtgtatcacatatccagacgcttggaattgattagcggaagctctagagaaattcaaatggtcataactgttcacacggaggtcctattcaagcgcttaatatatcgagacgctcgaaattgaacaacggaagctctc

SEQ ID NO: 25359 - DNA, 396 bp, Glycine max
  unsure at all n locations
agttttcttgagaaaacttccttgagtagcttctttgagaaaacttccttgagaagctagagcttagctacacacacccctctcataactaagctcacctccttgagaagcatccttaagaagattcgtaaagaagctagagcttagctacacatacctctctaatagctaagctcacctccttgagatgagaagctagagcttagctacacaccccctataatagctaagctcacccccatgacaaaaaacatgaaaataaaaaaaagtccttattacaaagacaactcanaatgccccgaaatacaaggctaaaaccctatactactagaatggccaaaataaaaggccttgacgaagganaaacctattcgaatggtcataatttttcacacg

SEQ ID NO: 25360 - DNA, 427 bp, Glycine max
tgcatttggaattgcgaaagccccactccatcattttgattagtacctgacatctcaaacaaacaaatcaaacgtaacaagacaattatagttgctgtttgaatacctcacccactcaagtgtatcacacaattatggcttttctctaatgaaacactcttgccttttaccactctaattccccttgagttcttaggcaattcaagagattatggccacaacaaagaacaattcaccaatatgtgtaaggtaaggctagacaaggaaaaggttaaccaagaaaaaggctaacaatgtttttaggcacaaatgaaggaaataaaattcagaatttaggaattcaagtaacaatccttcatgcaaccaatatattaccttaaagagttttttttttaagttcttcaagcatgaaccattcagcccaatt

SEQ ID NO: 25361 - DNA, 401 bp, Glycine max
  unsure at all n locations
agtcttagtataaaagcagtgctcaccaccctcagatttaagtccttgaacatacctgtttagttcaagtaaaattgcccacagtcatatttaattatacaggaaacttatcattacaatataacaacatgccttattggcaagctaaatagtacaaactacaaacaaataatcatgataatgattgcatgacattagcaaaaggaacaaatcatagagggcaaagagaagaagactagacaaggtcaccaccaatgctatcctagttgcaaatgttctacgattattcaatgaaattnaaagctttgaggtctcattanttttaataaattcacattcacaacattgatattatatggtggaagtaacagtgaattaaagaaaaaatactatcatatgat

SEQ ID NO: 25362 - DNA, 428 bp, Glycine max
  unsure at all n locations
tgtgtcatgcgatttatatacatgaaattgattagtctaaattattattcgaccggtaaaatatcataaacattgaaaacatggcccagaaagtcacctccatgaaaagtttaaagaatttaactaattcctataactaatatattttaagagtaaattaaatcataaatctgcaaattaaaataaaaaactcaaaaaaagaaaacaactattaaaaaaatacaataaataaatatagaattaaaaaaataaattcataaaacaaaaaaatggcacattgagaaattggtttgtgacatattgtgtagcaaaaaaaattaaagctggacagtgagaaatcggattangggcaccggattttcattggcaataatgatttgtatcacttttgatagataatttggaacttgtattatttgtgtaacttt

SEQ ID NO: 25363 - DNA, 269 bp, Glycine max
  unsure at all n locations
atttctatcttgagctngccgtattttttataattattgtagagaaaataactatcattatcataatataaactcaagtatcctgccaaatttcaaaaccctgtccacactgggaccttaattctgctctttattgcgtatgcatgattattattcgctctaaacttggatgcttgcattcataatgttatgcatatattggtcgacttgatgcaatttttattaacgtttggacaacactatcgtacttgacccattacatccctatt

SEQ ID NO: 25364 - DNA, 420 bp, Glycine max
gcttaatggcttaatgaggatggagaggagcacgtaatgtagcctttggtgttggatattaccattggagggtacaatgattaagtcctatgtgatgttgatgctatggaggccagccacttactcttggggagaccatggccttttgataagagggctagtcatgatggtttcaccagaaagatctctttcgcgtctcatggcttaaagatcgtgctcaaactattgagtccccaagaagtgtgcgaggatcatagaaaattgagagagaaaattcttctcgagaagaccgataatggaaaagagagtcaaacacttgagagttcatatagtgaggacacaaagagggaaacacatgagagaatattgatgagtgaaacacttgaagtgagggagaatttctagttacaaaaggagagc

SEQ ID NO: 25365 - DNA, 292 bp, Glycine max
ttctccattttattttcgtgatttgtaagatgggattttcctaccatacgaaaatgtactcaactatgacactttgctgtagaatacctgaagatgaaattccaaacttggataagattcttccggtacttggtttctacataacggttttttggtatatgttagtgcaatagttatttgaaatttaagaggttttaactttttttgccttatctgcaattttatgaagcctaagatttaaaacaccataattgcatttttagcaatttaaccaactactttttagttagga

SEQ ID NO: 25366 - DNA, 378 bp, Glycine max
gacaaaacatcttaccagcttttttactttttatggcatagtacaacatagcgtgcacgtgaagaaatcttatattacaaatattcacccaagattgttgcaatagtatgatctgaacctttacgttcaacatgatgaaagctcttataaaccaaccccacacgcatttaaaaggccaaaagcagtagcctcctcacattaacctgttctgctgaataagatatcagtcacattcaaaagcgacaaggggtcactcatttcacaaacttatagggtaagggaattaaaactctagaggctgcattagaaatcatcacaagaatttagcccaatgcacttgcgtagtattgcaattcaccatccatcgtatcatgaaca

SEQ ID NO: 25367 - DNA, 400 bp, Glycine max
agttttgttgttggggcagtttcaggtgaatcagaaaatggagatgatacggacatagggttggatctttagcggtagacctagtggaatcagcgagggtcagtggagaaggttgacgattcctttgatgaaagctccctgaatgatttattatggaaatttgtgcattctgattcagtgattctatagaaattgcaaaaatagaaatttgttttgatcggtacatattgttagaagacgagcaaaatattttaagggagggaatggtgtatgatagattacgataccttttgttagtttacggattattatgtcatgcaccattctacccctagttcttagatattctaaaacatattattgtcattataatgataactttcaatgtataataacatga

SEQ ID NO: 25368 - DNA, 431 bp, Glycine max
taagcttgctaaaatcagttcctcttttcacaaaaaaatactttacattatagaaaaagtagagtaggttaatcagcacaagcagtcacaccaaatagcaaccgaagcaaagaatgagtgagtggcaatctctttcggataaaaataaataaataaataaactacagtttatatcctttcaggttaagctggtatgtcagaaaacaaagactagctttccttataggaaacaacaaataatcactcttataatggagcaaataagtcctctccattttgatttgttcaaaatatacactctatcgtagcattggtgtgcagacagaaaagaattcaaaacagaacgaaatgaaatgattctattttatttagttcttggtaccaccatttttagtagaaccaaaactaccacttcttaacctcatgtctaa

SEQ ID NO: 25369 - DNA, 355 bp, Glycine max
tctagtttttcgtcttacagaatgcaacaagtttatacggataaccactcatgtatttccgcccgtcagcgtgactcaaaagtcagtatgacagatcttgtgagcgcggaagataacgtaaatctccacgtgtcaacgggcttgtcagccgtgattgacgaatggcgcagaagacgacgttagtctctgcgtgctatcaggcttttcggtatacagacaacaaaaagtttatacggataaccactcgggtatttccgcccgtcagcgtgactcataagtcagtatgacagatcttgtgagcgcggaagatgacgtaaatctccgcatgtcaacgggcttgtcggccacgattgac

SEQ ID NO: 25370 - DNA, 414 bp, Glycine max
tgttgacatgttgagatttacgtcatctttcgcgctttcaagatctgtcatactgactgttgagtctcgccgacggccgaaaatacccgagtggttatccgtataaactttttgttgtctataagacgaaaagcctgatagcacgcagagactaacgtcgtcttctgcgcccttcgtcaatcgcggccgacaagcccgttgacacgtggagatttacgttatcttccgcgctcacaagatctgtcatactgacttttgagtcacgctgacgggcgaaaatacccgagtgggtatccgtataaactttttgctgtctgtaaaacgaaaagcctgatagaacgtagagactaacgtcgtcttttgcggcctccgtcaatcgcggccgacaagcccgttgacacgcagagatttacg

SEQ ID NO: 25371 - DNA, 286 bp, Glycine max
tttatttttttaactgcaaaagtttttgctcagacgctaatcttaaaagattgccagaacctaataataattatgagcagcgtatgaaaaaatgagagatactgcgacgtgaatattatctgacacgacattgggggtaacttaaatattgaatagttgctggtgataagatcagttgacacaagaaaattggagaactaattatggatctgtgctcaacctcgaggccatttataactatgcagatgccaagacacataatttgacaaattatcacaacattgat

SEQ ID NO: 25372 - DNA, 302 bp, Glycine max
gaaatgggagcgcctaattatcatgcctagacacatgctaaaatgaagatttggcaattttatgctgaactggacatgcatgcacctaagcggacactccagtgacaagaatataaggtcatgtgatgctagggctcacgatctattaccttcattttcaatccacccaatgtataccgaagatgttcttttcatacaatgtgcggtgaaccgagatcatctagggcgcacgggcatatatcacaggaatcgaccccatggtgatgacaccacttgttcatattccactatcggtcatgatc

SEQ ID NO: 25373 - DNA, 362 bp, Glycine max
agcttgaagcactctggcttttctattcaaagcttgatgcttctacttgtgatgaaaagattactaacatagaagagaagatgtacaagctctttgatgaatatgccattgaaaagtcaagtccatctattgcatcacgttctcaacaacctactggctaagaagatttcagtctagaagaaaatctagagatggatgatccatacaatggtagccttttgtttaactattgaattgttctatgattcaatccatttgatgtaatgtgtctcatatattgtcatatgaacatatcagttatgtgagcgcaaatgctaatgtcgatggcatctctgaattacagctctattcggctgagacac

SEQ ID NO: 25374 - DNA, 421 bp, Glycine max
ttgatgatatggtcttcaccgatgaaaggttcaaagtgggtcttaaaagaggacaatctgatcatcatgctttgataaatgccacaaaaaaacaactatggcaaatgaagagggtgagaatgagggagaaacccatgctttgactgccattactatacacggcaagtattaccaccagcccaacaatgtgattactcagccaataacacaccttctccttacccaccgcccaattattcacaaaggtcatccctaaatcaaccacagagtctgtctaccgtacttccaatgacgaacatcacctttagcacaattcaattacaccaaccacgaaatgaatttttcagcgagagagcctattgaatttaccccaattacagtgtcctatgctgacttgctcccttatctacttgataatgca

SEQ ID NO: 25375 - DNA, 384 bp, Glycine max
  unsure at all n locations
agcttatagcacaagcaacataaaacttcaaagataccacattcacatgcaccaccttcacctttttactccaaacaacgaataaaacggtgtcaaaattaaaacctagcatttatcatctatcatcccatgataaactcattgcactgcacgtgctattgatataatgtctctccttcctcattntttccacacatccccaccaaaatataaataacaatttcctttnttttcggcagttacattttcattacgtttcctttccttgaacctactctgtaatgtaatcactagtgtagtataattaattaataatgatanataaatatatcaaacaagctgcactcaactgaatttatgaatattcctaatctaaaaatctgg

SEQ ID NO: 25376 - DNA, 409 bp, Glycine max
tctttcgtctaaatgcgacttaacaattgtgattttttgggaagctgatgattgtcctatactggtaccttctaaacttttataagatgttccatgagcatcaacctgctgctcgctattcatgtgctccacttgagaagctgcttcttctacaatttcaccccttgtcttttcaacagaatcagttactgatggatgagctagagtgccaacaccattaaagtctctaatctgggacgaactatcattggtagcgggcaatgtaagaggttgttgaacagccgaggctgcatctttatttaactcacatctaatttctattgttatagaagatccaaggactgattcaaatgcttgcaagatatgacctctgaacttctcggcagtagatatggtcaattgagaacta

SEQ ID NO: 25377 - DNA, 359 bp, Glycine max
  unsure at all n locations
agtcttgagatgaggaagtgttgaagggtgaaacttcctgcttttattgttgaccacagagtggtacctggagatatgtcgcgggggtcaggagaccttgtggacgtcaggtggggtgctattgcccaaaaccaagcttgaccaatcccgacccaacccgggcatagtcggtcagtgagaacatgtgacgtacctaagcaggcgagctcctggcagtcaacagataaaaggaaaacaagaccacagagcaaggaggcttgtggtggctggccagctgtgaantttgtgtaatatgtggattgtggcctctggtaatcgattaccaagggtgggtaatcgattacaaggcttaaaattga

SEQ ID NO: 25378 - DNA, 417 bp, Glycine max
cagcttgtagaatggctagacatgatacatgtcagggcttgttttggttcaagggtaaaagggatgccccacattatttccatgacacaaatgcaaaaatgatgatttggaaattttatgcaaaactggtcatgcatgcacctatgcggacactcaagtgtcaaatttttatggtcatgtgatgctagggcttaggatttatttcctctattttaaatcaacccaatgtttccaaaatatgttcttttatcaatttgtgcattcattcgagtccatttcgggcgtccggggaaatttcacagcattcacccttcaggtgtagacacgttttttttctcttcaaaaatcggtcatgatcaatgaatttttttttcgaagaagagttggaaatcatctcttttcaaaagcatgtcggtt

SEQ ID NO: 25379 - DNA, 399 bp, Glycine max
  unsure at all n locations
agctttctttcaagtcctaaatgacatttcaagctagtattaactcactttaacctccatttaccacagaattcagacttagccttccaaccctcacagcctacctctttgtccactcataacatcacattctcactgtctaaccctagtgagntctacccttcatctctaacagttttccatgagcaatttccgcatataaacatcacaaacatcatcacaaaaaccctaaaacagaatgggtatgtttaactcatccaacatggcaatttcaacaagctntcaacaagagtcttcacaaataatcatcatgaagcagaaaactaacaaaactacgcatcatatctcccagaaccccatacgcacgatatttaagagagaaagaagtcacccaaacct

SEQ ID NO: 25380 - DNA, 404 bp, Glycine max
ctcacaaaatatatatagtgtatgctgtatgttagtttaaataccttacatgtgcgtgtatgtggacaaaataaacacttcacaaaatatatatatgtatgtttaggtagaaagataccttaaatatgcatgtatgtaaacaaaaaaatacttcacaaaacatatatatgtatgtttaggtggcaagataccttggatatgcatgtatatagcaaaaatacctcacaaaaatatgcacatgtatatgtagcataatacctcatgaaaaaataagaataaaacaacaggcgcgataaagatataaacagatgataatgattataaaaaagaaggagaaaaaagaaaaaataagttgtcaagctgaaaaaccaacatgcgtttgaaaagagatgaacttcaacttt

SEQ ID NO: 25381 - DNA, 344 bp, Glycine max
agtttgatgttattgaagtgtataagggtgaaacttcctgcttttatttgatgaccacagagtggtacctggagatatgtctcgggggtcacgataccttggggacgtcaggtggggtgctattagccaaaacctagcttgaccaatgccgaccctacccgggcatagtcagtcagtgagaacctgtgatgtacctatacaggcgagcttctggcagtcagcagattataggaacacagaccacacagcattgaggcttgtgtggtggctggccagctgtgaatcttgtgtgatatatgggttatggcctctggtaatcgattaccaagggggtaatcgattac

SEQ ID NO: 25382 - DNA, 425 bp, Glycine max
  unsure at all n locations
ctcagctnttgagaatttaaaggtatggtttaattttttatgtacaatttgtgcatagataggttttaaatttatgtggttcgagattttttttgtacaattattttatataggtgtggttgtagattacataccgagaattggagaagtcattttttcccgttaaagttttttattcttttttccatcctgagtgtgtgtgtgattggtatctggtttgctattttggagtgaggttgattatttggcttgaggagtagattatttctcctatttttgtagtttcccttagtatttggaaaaacttatcctttttgcaactgggcatctctgaattttgtagaatgtgaaggtagtgtcttgaaacgtattgagcttcaaagggtaattaggatttacgagtatagaaagttactccactgttc

SEQ ID NO: 25383 - DNA, 346 bp, Glycine max
agtttgcttttcattcttgattgttttctatcattcttcatcttgtttgctatcggtattattttctaccacttttacgagctttcaattgtttatttaaaccgttatctggtttaataattgataaaacgaatttcaaccgatcattagtgttgtaatctcgtttaatcactgttaaaacataatccaaccagttgttcgtgctgtaacctcgggtaaataaaaaaaggcaaaataataataaaataatcaaaatatctctgaaaaaataatagttaaattatcaagaaaatcgatcggacattttactttcaaagtttacttcacatgagttgataataaccca

SEQ ID NO: 25384 - DNA, 280 bp, Glycine max
tgctctcacctcattttcttcgtgacccgatgctactacaaggaggaggatcaccaatgcaagaccgtgaatgcgcgcacctatgcagccactcataaagtccctacatacgggcatgtgacacaacggctaatgattcataacgactgtatgcaattaacgcaccgttatgaatacctgttgatataacatatgtgggaatcattcctactcattattggcgaccgcagaatacttgcaacgcttgcttctttaggatcacaaccgtcatggaatcgga

SEQ ID NO: 25385 - DNA, 357 bp, Glycine max
  unsure at all n locations
agctttgttattctcctgttttagctntacccgattttactcaaccatttgaagttgaatgtgatgctagtggagttggcattggggctgttttgatacaaaacaaaaggcctatagcttatttctcggagaaattgggaggagccagattgaactattgcacctatgacaaagagttctatgccattgtgagagctcttgatcattggaatcattatttgcgttctaatcactttatattgcattcagatcatgagtcattgaagtatatcaatgggcagcagaagttgagtccaaggcatgctaaatgggttgaatttcttcaatcttttaatttctctttcaaatacaaggatg

SEQ ID NO: 25386 - DNA, 423 bp, Glycine max
ctgagcaaattcaaacgacaataacctttttactctttatgtcggattgagtcccgatatatatccagacgctcgaaattgaatgttgaagctctgagcaaattcaaacgacaataacctttttactcagatgtcggatagagtcccgtaatatattgagacgctcgaaatggaataccgaagctctgagcaaattcaaacgacaataactttttactcggatgttcgattgagtcccgtaatatatcgaaacgctcgaaattgaatgttgaagctctgagcaaattcaaacgacaataaatttttactcggatgtccgattgagtctcgtaatatatcgagaagctcgaaatggaaaaccaaagctctgagcaaattcaaacgacaataactgtttactcggatgtctgattgagccccata

SEQ ID NO: 25387 - DNA, 210 bp, Glycine max
agctctgacccgggatgcgtagagttaactgcaggctgcggttttattgtgtaatctcgagcagttctacataaaaggcgcctgaacagaccccctagagaagagacacgaccatctgaagtgctcacgagcttccattgctcaatttggagcgtaccgatatatgatgcgccatagttcgacctgggaacgaaaattgatgaccatacg

SEQ ID NO: 25388 - DNA, 415 bp, Glycine max
tactcaagcttcatgagagagtcaaagatcaaattgagaggaaaattataatctatgcttaacaagccaacaaagggagaatgatggttgtcttcgaacccggagattgggtttgggtgcacatgagaaaagaaaggtttccggaacaaaggaaatcaaagcttcaaccaaggggagatggaccatttcaagtgcttgaaagaatcaatgacaatgcttacaaagttgagctgcccggtgagtataatgttagttccaccttcaatgtctctgatttatctctttttgatgcagatggagaatccgatttgaggacaaatccttctcaagagggagagaatgatgaggacatgaccaagagcaagggcaaggatccacttgaaggacttggaggacctattgatgacgacatgac

SEQ ID NO: 25389 - DNA, 385 bp, Glycine max
  unsure at all n locations
agcttgtacgcacatcgntctcttgtatgatatccactccacaaagtttgaagtagaggagagctccaaccctataacgcaacgtggcaaacaaaagtgggcagttaacttgaatggtcatcattgtcaatgcggaaggtattcagcgcttcactatccatgttcacacattattgcagctggtggttacgtgagcatgaactactaccaatatatagatgttgttatacaaacgagcacatcttaaaagcttactccgcacaatggtggcctcttgggaatgaagcggctattcctccttctgatgacgcatggacacttatctctgacccaactacaattcgttcgaaaggtcgaccacaatcaacatggataagatatgaga

SEQ ID NO: 25390 - DNA, 410 bp, Glycine max
tattgaggaagcctcttaatgaagcttcttaaggattctacatgaagctgcctcggtaaaaacgcttcacagcctttgttaaccgttggatcttctcgaaatttggtttgcagctttacaagatacatgtccacaatctgaccgttgggatctcagagaagatgtctggagtatgctcgaagcttccattcccgagagcatttcttattcaagcatttcagcctttgctttcgtgtagcttagaaaaaacgcaatttcttctcctttctttcttccaaagccatttctaatgtcccaatcactttctccatcacccataaccaccattagccaccacaaaccatcgttgttctccattgaaaccccacactgagaggaacccttcaaccgaagcggaatcatccaacttg

SEQ ID NO: 25391 - DNA, 390 bp, Glycine max
  unsure at all n locations
agtttcagtaaaaatcttcgtgctttgccatcatgacatgtcttagattgactcctacttttagccatagacttaggtttggaaaatctatttagttgcttccctgttgaggctaagcagttcatctgagtgagtctgttctagaaagcgccttacattttggtaagctgggttgttgccaattctctaggaagtttttctactgaaatttattgtttaaattaatctgcangtccctgcattatttgacaacaattaagtccctaaattttttttttcaattgggtccttgaactcgtatttgttttttaattaggtccctcatttaaaatagttcagtggcctatttaaacattgccatagttcaggccctaattaaaaataatcaaa

SEQ ID NO: 25392 - DNA, 414 bp, Glycine max
tggaacatgagctgaagcatctaagcttttcacttactttttggactgcctcctgatggaggtgatgctcccaaatacaaaattggattgaactggggcaggttgctgacttgagtggaggtagaggttgctgctgtctgagtaaatgagaattgatgagttgatgcgctggataactggcgaaagtaacagatgcagtggatgactatgatgtattaaatgtggagccaaatgtagacttggtggactgccaactaaagtataacttggaccacattggagctaacagattacaccggcgaagagggagcagaggtgccaagtttaaaagatgtggcccgacttgtataacgaaacaactaatgcccagaaacaaaagctgctgcagggctagacttcaaaatgattagtact

SEQ ID NO: 25393 - DNA, 291 bp, Glycine max
agtctgtagccaactggatgcattggttaacttggtaacccagctggccttgaatcaaaaatctgtacctgtcacaagggtttgtggtttgtgctcctctgctgaccaccatacagacctttgcccttccatgtagcaacctggagcaattgagcagcctgaagcttatgctgcagatatttacaatatacctcctcaacctcagcagcaaaatcaaccacagcagatcaattatgacctttccagcaatagataccaccctgcatggaggaatcaccctaacctcacatg

SEQ ID NO: 25394 - DNA, 337 bp, Glycine max
tttattgcagacgcacgagcttgttccattttttgttttagagggttggcgtatattataataatttattgaatccttaaactttgattcatttttaacttggccgtcatatatgtcttttttaaaaatacgtgtctgcattcggacctaattaactataccatacattttcagagatctaactgataacaagatcgccagagagtttagcacaaattatcctatgatacagggacttgtcgacctatcaagtgagacaaacgattgattacttataacattaaaagttttattcgagaatgtaatcaccatctatcctatagtaataagttattat

SEQ ID NO: 25395 - DNA, 379 bp, Glycine max
  unsure at all n locations
agttttctattattcattgtgacaatacaagtactgtatcccttactcataatccagttcttcatgctcgcactaaacacatggagttagacctattttttgttcgtgaaaacattttaaacaagttgctcttagtgatttatgtgcttgccaccggtcaatatgttgaaattattaccaaatctttatctcttaccaactttgaagctttcaggtttaagctcacactgtgtgatccctcaaattcttgtcagtctcacccactgatggctccccactgcagttactttttgtgcatttatgtcttaagggaaatttcaatggggggttntatcaccgganagcgcaccaagttgtcaagtatttaaaattaaaacgg

SEQ ID NO: 25396 - DNA, 414 bp, Glycine max
tacccttttaattttctacattttctaccggttattttacagtttaaagtattgtaaggctgttggtcgtttcaaaatattgtcttggtgaattttgttcttatttgttttaagggagagggatgcatgtgttatatacaagtgtacacattcattttaaacaatgtgttatataacttgatgaaaagttctcatcttaatttattttctcgttcttcaccgtgtgaaaatgataaccattgtttaaggccaatcaattttttatttaaaaattaaaaagtgaaattcaaaacaaaatttagtaaccaaaaacatattaaaatataaaagtaatgacccaatttctcttacataatcttttaggcttgatttcaaaattatatatatatatatatatatatatatatatatata

SEQ ID NO: 25397 - DNA, 336 bp, Glycine max
  unsure at all n locations
agctntgctattccatgctcaattgtgaatctttttgtaggtaaaacactactggatttgggagcaagcattaatcttatgccaatttcaatgcttactaaagttggagatgtggagattaagccaacaaggatgacactttaactgacagatcaatcaaagttccatatggagtaatggaagatgtgctagtgaaggtggataaattcatattcttggttgactntgtaatcatggatatggaagaacatgttgaagttccttttattcttggaagactattcatgatgacaactctagcattgattgatgtaaacaatggcaagctcaaaatac

SEQ ID NO: 25398 - DNA, 422 bp, Glycine max
  unsure at all n locations
tggatttcctttagtagggaatctatccttcctaagatggagccaaatccagtcaccgtcattaagaactagctcttttcatcctctattgcctttagttgaatacacctttgtttggttctctatttggttcttaaccctctcatgcaacttctttacaaactctgacctagattctcattctttatgtataaaagaagtgtccagtgggaggggaatgaggtctaacggtgttaggggattgaatccatagacaacctcaaaaggggattgcttggtggttctatgaacccccctgttgtaggcaaattctacatgaggaagatattcatcccaagacttatggttgcctttcagaagagcccttanaagggtggataaagatctattcactacctctgtttgcccatcagtttgtggat

SEQ ID NO: 25399 - DNA, 393 bp, Glycine max
  unsure at all n locations
agctttacttaaggtttgttcctaatttctctacacttgcctcacctctcaatgagctggtgaagaagaatgtgtcattcacttggggtgaaagacaagagcaactcanagaaaagctcactgaggcccctgttctagctcttcttgacttttctaaaacttgagctagaatctgatgcttctcgagtgggtgtaggagctgtattgttgcaaggtgagcaccctattgcttattttagtgaaaaaattcatggtgccatcctcaactatcccacctatgataaagagctntatgccttaataagaagccctcaaacnttgggaacataccttgtttccaaggaatttgcattcatagtggatatgaatcacttaagtacattagaagggtaa

SEQ ID NO: 25400 - DNA, 423 bp, Glycine max
  unsure at all n locations
ctagacctttgatagcatgtnggcatcccctgcattcttgttttagtcagcttcaaacttattacaagaaaaatgacctatacctacggacagaaactgtcactataaataaaaaatccgtaggtaaatgtatgatagactttgttctacggacgttttttccgtcaactttgagcgacatataatgacggctaattgtctgtcactataggttttacctactatgtatagtgtgtaggtaaaagtcattaacttctacttacatctcctaactgtaggtaaaagtctttaatatgtacatatcatcttcaactgtaggtaaatgtttagatcttagagaaagcttagaacatacataattgaatgtgggcagtgcagcaaaccaatacctctctgcttcttcggactaaaaaagaattatat

SEQ ID NO: 25401 - DNA, 239 bp, Glycine max
atatcgtttaaagggagaaggatgcgtgagtgatctccaccagtacccattcatctttaacaatgtgatatatgactagctgactagagctcatattaagatgatgacccggacttcaccgggtggatacgaaacccattgtatgaaggcgaatcatcccttatttataaagaattacagaagcagcctatccctcttctattccctacaaaagaaatttaccacaaaaaaaatggacc

SEQ ID NO: 25402 - DNA, 386 bp, Glycine max
agcttccattgttcaatttcgagcgtctcgatatcttatgcgcctgaatctgacctccgtgtgaaaagttatgaccatttgaatttctcgagagcttccgttgttcaattttgagtgtcttgatatattatacgcctgaatcggacctccgagtgaaacattatgaccatttaaatttctcgagagcttgcgctgttcaatttcgagcgtctctatatgtgatgtgcctaaatctgacctccgtgagagaagttatgaccattttaatttctcgagagcttccgttgttcactatcgagcgtttcaatatattatgcgcctgaatctgacctccgtgtgaaaagttatgaccatatgatttctcgagagcttccgtggtcaatttg

SEQ ID NO: 25403 - DNA, 423 bp, Glycine max
  unsure at all n locations
nttcactcggatgtccgattcaggcgcataagatatctagatgttcgaaattgaacaatggaatcgtttgagcaattcaaatggtcaaagcttttcactcggatgtccgattcaggcgcataatatatcgagacgttcgaaattgaacaatggaagctcttgagcaattcaaatgatcataacttttcactaggatgtccgattcaggcgcataagatatcgagatgttcgaaattgaacaacggaatcttttgagcaattcaaatggtcaaagcttttcactcggatgtccgattcaggcgcataatatatcgagacgctcgaaattgaacaatggaagctcttgagcaattcaaatgatcataacttttaactcggatgtccgattcaggcgcataatatatcgagacattcgaaattgaa

SEQ ID NO: 25404 - DNA, 228 bp, Glycine max
  unsure at all n locations
tcgtaacccggaaatatcactctgatctttgtcaaccagcccattggatccttactgtcgaatatgggcaattccaaattcctccaccgattgctgtcatgtgccaccataccttcatcttctccgctcgtgtcaactacgtgcacattcgtctcaagagtttttttctcccatgccgccgccgacctttggatcttnccttcaatcgagctcagctgcaattccact

SEQ ID NO: 25405 - DNA, 414 bp, Glycine max
tcataaattgcacaagagatacttgtagtgggtagttctgtcaacacaagctggtccagttcgttgggtctgacccacatcaatccaccccttaaatgagttagcccaacccggttcacttaaaagtttatttaagaaaaaagtgacttagtctggcccatcacgagttgtgagttaaatgggttggtccaccaatccacctaaaataaaaaaaaaaaatacatttttttaaaaaaattaacaaaaaaataatttttagaaaaataaatttgaatacattaaaaaaatattagttgaattaaatcttccattatccacacaccaaaagacattatcacaagctagaagtctataactataataacaaaaactttaaaaataatcttgaacaaaacaataaataaaataatgttg

SEQ ID NO: 25406 - DNA, 390 bp, Glycine max
  unsure at all n locations
agcttcacccacatggtcagtcaactgtaggagcccgcattaatcctccaccatattatggccttttaaggtactgcagagggttggggctgtatcttataaattataacagtgttgtcaatagtggattgtggaaaattgcgagaagctgaaaatcccctgtagaatatagcatatacaactaaagagcggaagtcgcatagcggctganatagaatatataattaaatatgtataaaaaaaaaccatgctatatgcaaataataataagctggactaacattaacataatattatctcaaaagtaaattgttaccacaaaatatngtcattctctctgccccttcttcatataataaaaaaataaaatctataacagctaaaaagcaa

SEQ ID NO: 25407 - DNA, 208 bp, Glycine max
tattcgcaactataggattttttaaaatacatgccttagaatccaaatttttgcaaaggggttttgcaaaaacaaaaaaaggggaggggtgaatcccttcttcaccccattcttccccaaaatcctaaaatcactaaggtcctatgggagtgcaccaatcatacattcacaaaccaccatttttgctttcttgctttcatttttgcat

SEQ ID NO: 25408 - DNA, 340 bp, Glycine max
catgtcatctggctatttctgcattttgagggtcaaattgaacttggaagtgctgtgaatttgggctttgctttgtgtaattagtttaattacgtagattagataggcctaatcaaggcacattccttccttttgagtagtaactgtatatattactataagttagttagttagttacttcattctgtacaaaaacatatttagttaattgttgtgcaagctttaggatcaaaattctttctctctttttctctctttttctctcaactgttcttcattcttctccctcttctcattttggtattgcttcttctgcacaaattttgtggctcttccactg

SEQ ID NO: 25409 - DNA, 413 bp, Glycine max
taactaatcagatgggacaattggctactcttttatatcaacaacagtcccagaattctaacagattaccttctcaatctgtctagaatctcaaaaatgtgagtgccattacattgaggtcgggaaagcagtgtcaaggacctcaaccagtagcatcttcctcatccgcaaatgaacctgcccaacctcactctactccagaaaaagatgatgacaaaaatttaaagagtaagttacctaacaatttctatgcaggtgaatcttccactagtaattctgatttacagaagcagcatatccctcttccattccctccaagagaaatttccaacaaaaaaaatggaagaggcagagaaggagatattggaaacatttagaaaagtagaggtaaacatacctctgctggatgcaat

SEQ ID NO: 25410 - DNA, 377 bp, Glycine max
  unsure at all n locations
agttttcttgattaaaggtcatagagtgatgccatgggtctgttgatcccactgaaacttgatggcatgggctaatcttgaaagaatttatatagtgaaggctacccttggattcgaaaggaatcctaaggagttctgcatgagtggctaatgtcaggtgtatcccactatcacaatcgcctttgggcattttccatgagttcctggtcaaatgagttttcttcttaactatgtaagtgcaaaacctcggggattcttttttttatttatatttttttcaacaatcacaagcgtgtgtaagttttattccagaatcccaacttanaagcaaattagtaattccttgatccacgtgggcttgtaacgtggtcaggggt

SEQ ID NO: 25411 - DNA, 350 bp, Glycine max
cggtggggttgaccggcactccatagaatttgcacttgcctgttatcaaagcaggaaaccccagggccctattggacttctccgggtccactgggtgtctaggaggcgctatccctacaaactgatacatagcatctgagatcagctgggcaacatgtacactcacctgagtcaggatggcgtataccatctgatactttgacagggggaggtataagttatggtcgctggggagaatgttgctaagcagcaacgtcatcctaatctgtgtgaggttgggcatgcttgtgcgcatgatccgtacccgtgtccccgctatgctccaagataagtcctaccccggaacgcac

SEQ ID NO: 25412 - DNA, 379 bp, Glycine max
agcttctactgatgtggcagggcgggaccccttcggcttgttgtcctaaccgcgagccttggcctctgttcttcctttgcgagatacttttccttatgtcagtttgcgtaggtttatagcctaacccaaacttcccgcggtttcctctggtgcttactaggctggttctgccgctgttgttcttgcccaaactcattccgggctcgtagccgtaccgcaacatcattttaggtcgtcacgtgaaaaataataagatacggtcggtagactctgttcaaactaaaattgttaacacttccttttcaaataacaagattaaacataattacattcatcatctaaaactgtccaaaatatgggagtttgcaaaatacatagt

SEQ ID NO: 25413 - DNA, 414 bp, Glycine max
tctaaatatgaaaatgaaattttggaactataaatgagaagcttgcacgaatttggtaaggaaaagaagataaggaagattaagagccccttaccaaagcttttatggaagaaacctcaagagcacttgtatgaagcttgtaagaagaaagaaatagactcatctctcctttggttgagcttgtgcaaaatggagaagaaagagctccaatttgttttttaaagagacatgatgatgaggtttaaggcttaagttgacaagcttaattgacaacatgaatgactaataaccagcccatggttaacgtgccaagccatgcaattttagtgcattatgccttttgaaattttaagcaaaaatggctaaagtaggtttaaaccaaaaaatggaaatttctggctttgctaaaactag

SEQ ID NO: 25414 - DNA, 365 bp, Glycine max
  unsure at all n locations
agcttctcaaggaagttttctcaagaaagcttctcaaggaagctacctagtctataaatagaagcatgtgtaacacttgttgtaactttgatgaatgagagtcttgtgagacacaactcanagttcaacttctctccctttttcttccttcaatttcgtgctcccccctctctttctctccctctttcttttcctccattgaagcatcctctctaagcttcttatccaaggctcatcttggtggtgaagctccttcttccatggcttattccctagtggatggcgcctcctctcacctcttctcctttgtcttccgctgcatctncatggtggaaaatcaccattaaaggacctcattgaagctc

SEQ ID NO: 25415 - DNA, 412 bp, Glycine max
tggagaggaggcttcaatggatgataagtatgagggagagaaagagagaggggggagcacgaaatcgaaggaagaaaagaggagagaagttgaactatgagttatgtctcacaagactctcattcatcaaagttacaacaagtgttacacatgcttctatttatagactaggtagcttccttgagaagctttcttgagaaaacttccttgagaagcttctttgagaaaacttccttgggaagctagagcttagctacacacacccctctcataactaagctcacctccttgagaagcttccttgagaagattcctaaagaagctagagcttagctacacacacctttctaatagctaagctcacctccttaagatgagaagctagagcttagctacacaccccctataatag

SEQ ID NO: 25416 - DNA, 357 bp, Glycine max
  unsure at all n locations
agctttacctatctatgcattttcgttctagtaagactactatgcatgagattgatcaacgaaccgagaagaagaacaatttcaaacaaaggaagaattcattaggaatgtttgtttccttaatgagaagtcatgtggcaactactttgtgcctgctccttcgagtgccactacgttagctggggcacctgttgttgctagtgtgcctaaggaaacgcccattgtgatgattacattgttcattaaacaaaatatagacttangaatacttgatatcatgtatcaactatctggacaattagttgaaaaaaatattcaaacctatggtgcaaaaaaaggtgcagtagtttgagaaat

SEQ ID NO: 25417 - DNA, 409 bp, Glycine max
ttctattttgtcttgaattcaactttgttggatggtcttcataaataatccattatttattactacaatgggtctgttgatctgatctccattatgcaatattcttctatagatgattccaaggcctcatcttttatctttttgtatccagaagcatgttgagctaatcggttagcttcatcattctctcctatgtatacatgttctattgttacaatcaacaaaatagttaagtaattgtctagctgaattgtagagctctactaaggtaatggtattgcatttgttttcacctttcatatgtcgaatcatcaattgggaatctccataagtttgtacacgttttacttctttttgcaataatgtttctatacccaatatcaatgctttgtattatgattgattatta

SEQ ID NO: 25418 - DNA, 477 bp, Glycine max
  unsure at all n locations
nggcgggattgttgcctgaanttccgcaatcatatcggacncgngatcctctagagcgcctgcggcgagccagcgcaacttacttgttgtgataggccagaagggccacagcgtgcttaacaaaaattcactaaaaatgatcccccattaagctcttattcaaaggctatgttctatcatatcgtaaatgtcctagtttgctcctaaaatcattatgacaactcgagtttttcattagaggattagattgcctttaatcatggaatgcggtttcgtttctttgctttatacccctactctcctgagaaaattaacatttgtcaaacatcanatatcatgagtcaagaatttgcaatattcatcttatgcaatgtctatcatcatacttcaacaaggacaaaagcaaagatggtatttttataatacataaattaactatatttagggctgacagcataaatgtcatatgcaaaacct

SEQ ID NO: 25419 - DNA, 271 bp, Glycine max
acattgtgggtacacgctcacacacatatttatatatggatagatgacataatccttttcctctggcagcatttatctaagtgggtagataggcacgtgcataggagcagatgggtgattgagataacattgtcgtagacgaacaaaacgtccagtgatgtactggggtggagattatttctgggtgggaaggatatggggaagcttttttggaatagggggttttgaagtgactttgaagatgagtaattgtagagagaattttgtatat

SEQ ID NO: 25420 - DNA, 144 bp, Glycine max
  unsure at all n locations
agcaagtttatgttctgctttatncggancgccaggaggctattgaggatgtttgcatcaatgttcatcaaagatattaggctaaaattgccttttttggttgcgtctctgtcccgctatggtatcacgatgatgttagcctca

SEQ ID NO: 25421 - DNA, 554 bp, Glycine max
  unsure at all n locations
agcgacncnccncccgagcggactggttatactagnnngctagnancntcnacnacnannactaagcggaccngggacncgcngganaagggagctacgngggactttttacaagtagatctgcacaccacgcncggaggaatgcggagattctggggcaaatgaacacggtgagaaagagggagaaacccatgctgagactgccattcctatataaccaagtgtcccaccaacccaacaatgccattactcagccgatgacaaaccttctccttacccaccacccaggtattcactaaagccatacctaatatcaaccacgaagcctatctaccagacttccaatgacgaccaccacctttagccctaaccttaacaccaaccaagagatgaattttgcccccaaatagcctgtagaatcaacccaattccggtgaccaatgctgacttgcctccatatctactagataatttataggtagccataacccgcagccataagttcatacatctcgcatgatctcgcgaaatacgactctccacacgactgtgcg

SEQ ID NO: 25422 - DNA, 544 bp, Glycine max
  unsure at all n locations
agagaaggggcccccgcccgttttgcaattcagtcccgtaagnacnnatcnncnnaantgaanagcccgngcggngagcaatgtccagcatccaaaacacattattacatttatttctacncccngancacgggcgcttgggtagcgctatcactttacacaataccactctcattactgtatgactaangacatcatatctgtcatattaatacctaaacaaataatatgacctataaaagaactactagatgagaacataaacctgcaatgcacatgtgtatcacctaatccatatcctatgcctcgagaaaatccatttaatatcacctagattataagactgtacataccacatatgtaatgttctataaataatacaaatcaaactaagctatcaatgtcacaaatgcctactgctagacatatcatacaagatcccgcatattgaacagtgtcttctgccaccttaattacatttatcactctaatacctacaccaggttgaaacttatcttatngaaatcacacatgaataccagcg

SEQ ID NO: 25423 - DNA, 339 bp, Glycine max
  unsure at all n locations
cattcaaccttccaagaaaaagtaatggccgttggaatttcctctgaccttcaacattcaattccgagcgtctggatatattacgggactcaatcagacatccgagtaaaaagttattgtcctttgaattggatcagaggttcaacattcaatttcgagcgtctcgatatatttcnggactcaatcagacatccgagtaaaaagttattgtcgtttcaattggctcagaggttcaacattcaatnttgagcgtcccgatatattacgtcactgaatcggacatccgagtaanaagtattggcgtttgaattgctcaaagcttaacatttcaattcgagc

SEQ ID NO: 25424 - DNA, 452 bp, Glycine max
  unsure at all n locations
gtctagctnttcattggtagtatttgatctccttttggtactctttaatgtgggaatgtgctcaagtatgtgggggcaatttggtttgttttcttgcttgattgggttggattgcgggtttgtatgggatggccctangcctataatgcattttgaaacaatgggacatgccacattgtccccgttctcttgctatagatacctaaacgcgccccaccaagtgttcggtgaaatccttaatggcattagcgcgtgacttttgtaggaaacaacccatggggcattttggttttcacatattttctattttttgggacatgcattcattccngaaaaggctagaggtattgcccacatatattctatgcctangaaccaaagttntatgcaaaaacacaagaggagtgcatgtggtaaagtactctttttgccacgtccctataaccacctcn

SEQ ID NO: 25425 - DNA, 266 bp, Glycine max
  unsure at all n locations
aattggatttttggccttcttcttctcctagtggctcacataattttggttgtattaagaggaggaaaaatggtttttctttgtgctttctcattgtgctaaagtgaggtgagaagagagctttctagcttgcttaccaagtttaagtgagaataagtgaagtgctagtgggtgtgtatggagagtggtcgttgtaacgacttgccttgttgctacgatatcattactctanaccgcataaattttaaattttaaatgaaaactct

SEQ ID NO: 25426 - DNA, 543 bp, Glycine max
  unsure at all n locations
tgtccnncnccagacgggggacgatgagccattgngcttgtatnnctngacactatagatactcaagctntggatctcaatagttgcggagctgtctggtgttgtttaaatgttgtgaatgaacaaggacatgattgtttgatgacaaatattgacaaaaatgcatgttgtaaacatgctttttctcattatcctaaatgtgatttgttgttgaataatttgagtgacgatttcaataacactattttagaggcaagggagaaaccaataataatattgtttgagtggattaagtcatatttaatggctaggtttgttacatagcaacaaaagctagcaaaatattatggttaaattatgcctaaacctatgaagaggctagatagggaaattgagcttagtcttaattggaatttagattactantttcataagatattggaagtcacccatgctntaaatggtcataagtttgttgtcaacttgcatgataattcttgtacttgtaattatggggtatagttggtattcattgtcgccatg

SEQ ID NO: 25427 - DNA, 505 bp, Glycine max
  unsure at all n locations
tgcccccccaggaagtgactaagctagatnntgaccatnaaaaaagccggaccagctgctgcgagcagagctttcttagataattctgccttctggaagaatagtctggaagcggatgtggacccagttgctatttgcaccccgtttgtactaaatacacccccttgctcttttgtggtgatattttttttccgtaacgttatgaaaatttacgaattgtgtaacgatgcttgttctctttccgtaatgttacgaaatcttacagattatggaatcatccctttttttggcttcccgaacgttacggaactttacggattgcacactaacacttccttttaattctcggcatgtcacggaacttcacggattatgctacaatgctttcttttgactttcggcatgtcacggaacttcacgaattgcctaaagatgggtgccaagcacctcgaagaggcaaacgaaggttgctcccaacaacggatggtcccggacaaataaggag

SEQ ID NO: 25428 - DNA, 435 bp, Glycine max
agcttgtgttgcaattctatgagctaaacgaaggggagggaggtactgagcaaagtgggtacggaaaggatgtgggggtgagagtattcacgataactcggctagactgtgagccacttcaagtgttggtcagatttccgtagagaatcctcaggttaaataatacagcaatacttctttgagattcactagacataaaaaccaaacagagtcttcactgtctctctctcctttgctgacataaatgaaacctctcctgatgcctccctcttcctctcctcattctatacctgtgctttttctaactcttaaggcatctagaaaattagagactcatcactagcatatcagcaatacgttctcattattctgtatgctctcctattatccacaatgcattattgtcatctatcaatgtatcattattgaacacct

SEQ ID NO: 25429 - DNA, 308 bp, Glycine max
aaaagatagttggaggtctgctgcatacttattcaagtacctaaattatgcaagggaatcgttctttgtttaaaacttaaattattaaaaataattataaatgcctctttacatgaaccctctttataatctgtttagatgggctaacttatagcatagcgggtctgttttttacctggtgtattttgaaatattataaattcacaggaagttacaaagatggttcagagtgttcctgtgtaccccttacccagttttcccaatggtccatctacatattatactatatgtcaaaccagaaattgaat

SEQ ID NO: 25430 - DNA, 412 bp, Glycine max
  unsure at all n locations
agcttctgctgcaatactatgagctaaatgaaggggaaggaggtactgagcaaagtgggtanggaaaggatgtgggggtgagagtattcangataacttggctagactgtgagccacttcaagtgttggtcagatttccgtagagaatcctcaggttaaataatacagcaatacttttttgagattcactagacataaaaaccaaacaaagtcttcactgtctctctctcctttgctgacataaatgaaacctctccttgatgcctcctcttcctctcctcattctatacctgngctttttctaactcttaaagcatctagaanattagagactcatcactagcatatcagcaattaggttntcattattctggatgtctctcctatttatcacaattcattattttcatct

SEQ ID NO: 25431 - DNA, 316 bp, Glycine max
  unsure at all n locations
agctntatgtgaagatttgtgaaagtgtaacctgttcaatgacatttgaaatattcatagtgtctctagtagagaaaacagtcaaaagtcacttctttattatttgcttactttcccaaccaaatgttcaggcccagttctccatcccccacactcttatatgagaacctgactttacgttttcacatataatggtatgtagttcttgcatgaatcanataatccatctaattcaccagtctcataatctagtttatgacatatcaccagagactaaggactggtgtctgtaaactgtganagggccaagttgatg

SEQ ID NO: 25432 - DNA, 486 bp, Glycine max
  unsure at all n locations
nnnccgccttgcatgagacgccaattcaaccgacacgcgagctcttaagcgacttgaggagcagcctattatggaaaggaccgcaacctacaacgagatatggttaggccacgctaatcaacttgttgaaaccgaagtggcggtaattaagttggtaatcattctgtcaatngtaatggttggataagatagagctaagtcaacaggagacatctgagaatgaggtttaattggaattaggccaaactcgcgagacatcngtgtttggtatttgcgccttcagcatagaacacaaaaataatttcaagtcgagaaaaatcctaattgcattaagtatcttagtagaaggaccctacgcttttgcatattttgtttcacactcactcgctgacacttactatngtgacctataatagaaatacttctgtnnttacttcatgactatcaattgtttacgcagatgcctatntactgcatgatgcttta

SEQ ID NO: 25433 - DNA, 538 bp, Glycine max
  unsure at all n locations
tccattcaagaggggcncnncncncccgaatttctgntgnctagnctnttgntngnctcacacannnacagagaggcnncacgagctcgacattgagacggngaagaaagnnatagattagatantttggacaagacngccngcagcccctatgggagggtgggaaagacaanaccaaaccannaaagngagccaaaacattctaagaacggtttggaanaaccatcttagaataatcaccttctaagatgattttcttaaaccgttgtatagtcggtgtatttatttacaaatatgtcaccgtcttatatactaagacagatcctcggnaattggctttgctntggatctggagaataagttttttataagcggtgacctggccattatttaattaatatgctgtacaacataaacaattagacaatttatgtgtaggtataacgcatacaagctctcagcgttaaatattaagataatatactgcaattatccttcaaaatcttattaatatcttggtcacattcttcaatttttg

SEQ ID NO: 25434 - DNA, 195 bp, Glycine max
catggatcttacttgctggctctgagggggtggatccactgagctagaacattggctccctggcttcacccccttttctgggagtgaatgagtctgtctcgctggcattccaggagccactatggtatgaaaaacaaaaactcctgtagctagttcggtgtctgaccaaatggctgcccaagttttgcttgaaac

SEQ ID NO: 25435 - DNA, 194 bp, Glycine max
  unsure at all n locations
tcgccaaaatcttcaggattaacatcctccccctttttgatgatgacaaccacctgtaggttnggagcaacaacaaagaagaatatctatttgcatatagtttactcccccttggttttggaatgattgcttatatgaaacagttgaagatttcatatttttcatatgtaaaccttattgtctcataaacaata

SEQ ID NO: 25436 - DNA, 151 bp, Glycine max
  unsure at all n locations
cccccaacagccatcaatcaatcaccatttggtctcccaaaaggctgatacctangttgccaattgtgcccttattacaacttgaactaaacccaactaaagcccttttagttgattaacccanaacatatttttggtcagccaactttac

SEQ ID NO: 25437 - DNA, 397 bp, Glycine max
  unsure at all n locations
ttcttttttattttangggntatcagaatcactatttcgaaagcccttatanatcataangaanattcttatctatttatagatgtttgatttgcaaggatattagttctcaatcatatttaaatcatgcaacagaattgcattttgcacgtttgtaaatcttacatatatggaaatataatatgtaatgattgtacagaatatattcatcctgttttataagacttatagcttaattgtattattccagatcaattataaggctcttaatgtccatgtctgttatagtagtagtgggctttagctataatttatttggttcaactatccttaatggaaaatagattccacttattacctgttcagaacatgtagtggcttgataaaaactactcta

SEQ ID NO: 25438 - DNA, 597 bp, Glycine max
  unsure at all n locations
cgatnacccagtannnaccttcatcccnacncccccaactgatngcttagcnnggcatagcatnnnncnncacactattngaacacatcaagcctncaagaaaaaaagatggcnctcagcannnactccttattttttcagaagttttaattctatcaatagcaacctccaagtctttaagtggagagtgtgttaccattacnntggaaaacctgaatgcccaaatttttattgagggcaatagatctataatatttgggaagccatagaaatagggccttatatacccaccacagtggaaagagtttcaatagatggtagttcatcaagtgaaagcataactatagaaaaacctaaagatagatggtctgaagaggatagaaaacgagtacaatacaacttaaaagccaaaaacataataacatctgccctgngaatggatgaatatttcanggtttcaaattgtaagagtgctaaggaaatgtgggacactcttcgattaacacatgatggaactacagatgttaaaagatctangataaatgcactaactcatgagtatgaattatttagaatgaatgcanatgaaaatattct

SEQ ID NO: 25439 - DNA, 259 bp, Glycine max
atctttcttttgctgggctcactaaaggtcactaggccccaaagcttacaaatatgattcttgggcccaataaggtctggtggcccaataacaaaaatacagcccaaaaacaaaaataaaattgtcagctctcttcaagtccaagtcagttctgccgaatttcggatccaagcccaaatgcttataattctcctgaaattcaatttaaacaaaaaaataatcaagtaggcccaaatgattaaactgcataattaatttg

SEQ ID NO: 25440 - DNA, 236 bp, Glycine max
cccttacctgagcttggtttcagaactgctagagaatacgttgtctagttctgtccatggaattatgcctggcgggaatttgcgcgatgttcttttccttctttgcttctaagatgattccctcaggcaatctcaggccactcaagtattttcattttcacgttctttctgtgagaaacatgaacaaacctatggagtggtttgaaaatgaagattttaaactcttcagtgacaaa

SEQ ID NO: 25441 - DNA, 376 bp, Glycine max
  unsure at all n locations
agcttgcatgcaaattatcttaatataaaaacatgcanacattgaaccatagaggtaaaagtttcctatgaaggaaactaanaaacactgattaaagaaattgtagataacacaaacaaatggaaaaacacctcatgcacatggattggaaggaacattcattaaaatgaacatacttgcccaagaaatctacagattcaatgcaattcctatcanaatatcaatgtcatttttcatangaatagaanaagcaatcctaanattcatatagaaccaaaaaagagaccanatagcccaagcagtcctaagcaaaaagaacanagctggagtcatcacattacctgactntaaattatgctacaagactatagtaatc

SEQ ID NO: 25442 - DNA, 509 bp, Glycine max
  unsure at all n locations
nnnaattcgggatcgnnagttagatanctagaaactaagctngaattgacaacggaagctctcgagaaactcaaatggncattacttgttttacggaagtccgattagagcacgataatatatcgagacgctcttaattgaacaacgaatgctctcgagaaattcatatggtcataacttgtcacataggagtccgattaaagcgcgtagtatatcgataagcttgaaaatgaacaacagaagctctcgagaaactcaaatggtcataacttattacacggaggtccgattgaggcacataatatatcgagacgctcgaatttgtacaacgaatactctcaagaaattcacatggtcataacttttcgaacggaagtccgattcacgcgcatattttatcgagaagcttgaaattgaacaaccgaaggctctcggaaattaaatggtctaacttacacaccgaagccgattatgcgctaatatatcgagacctcaaaatgacaacaaaa

SEQ ID NO: 25443 - DNA, 304 bp, Glycine max
  unsure at all n locations
agcttgttantcgttaattgaganaactntaagcaggttcaaagttatcccatgatagtggcattcttatttgtatatatgtgctttccttttttatttgtatcaaagcatttaaaatgaatatatgtaacatgtacctaagttctaaaagcataataaaatgaacacatctgaaaccaccattctgctcaagaaatataacattactcaagaaatacagtgttacaaggtgatactgtgaaccagcttgacttgtaacaggattagagggggaaaggcttgggtgaaaatgactgttctcaag

SEQ ID NO: 25444 - DNA, 444 bp, Glycine max
  unsure at all n locations
agcttgtatttcttattcatgctgctataccatcatctgaaattccttaaacaatgcgtttaaccttaaaacactgcagcgcccattggccataaggtctgatttgtattcaccctgtctttgtttcattgaaaacacnttaaaatgagcttctgttgtangaaagtgctagcatgttcagctagccataaatcaatgggtatttgagacagattatctataacaattattttagattatntaagtatcatttttattntaaaagaatactntccatgaatttgaacctcagtaatggcaaataactcagtctaaacagaaagatgttgcaggtataattatctgaatattgttacaattaagggaacagtcatgcacattactggcctttagaanaatantatacttcatgtagatattattaatcaataaaaccctaatgga

SEQ ID NO: 25445 - DNA, 510 bp, Glycine max
  unsure at all n locations
ncccgattcggttacngnnngttagtatnncttgacncantnaacactcaagctcggagaggatgcttcaatggaggaaaaganacagattatgaattgagaggggggaacacaaaatgggaggatgagaaggtggagagaagttgaactttgagttatgtctcacaatactctcatttatcaaagttacaaaaagtgttacacatgcttctatttatagcctaggtagcttccttgagaaacttccttgagaagctttcttgagaaacttccttgagaagctttcttgagaaacttccttgagaagcttctttgagaagcttccttgagaaactagagcttaactacacacacttctctaataactaaactcacctccttaagaagcttccttgagaagattctagagaactagagcttgctacccacacctctcaatagctaactcacctcttgactgagaagtagacttatctcacacccctatatagctagctaccccctgccaaa

SEQ ID NO: 25446 - DNA, 513 bp, Glycine max
  unsure at all n locations
nnnttattggggcagttttcnngangntngacctataatactcaagctgaattgtaacggaagttctaagaaaagtcaaatataatattgnttgactcggatgtccgatagagnatcggaatatatcgagacgctcgtaattgaaaacagaagctctgagcaaatttaaacgacaataacttttgactcggatgtccgattgtgtcccataagatatcgagacgctcgtaattgaaaacggaagctctgagaaaaatcaaatgacaataacttttaactcggatgtccgattgagccttgtaatatatcgagacgcttgaaattgtaaacggaagttctataaaaagtcaaacgacaataacttttgacttcggatgccgattgagcctcgtaataatatgagacgctcgtaattgaaaatagaagctctgagcaaattcaaacgaccataacttttgactcggatgtgcgattgtgcccgtaagatatcaaacactcgtaattgaaaccgag

SEQ ID NO: 25447 - DNA, 525 bp, Glycine max
  unsure at all n locations
nccagttagatttgctaaaagttgtatcactngacacttagaaactcaagctcagactatattgtagaatcttgagcctntgntctctatgattatgtcggncttatcatagagggggtctttatgctttcttccaatatcgagaatccattttgtaagtacaatgtttttcctaatgatatgatcgaggcttcacaccagtaatgtggacttatcatttactaaaagaattaggattccagacaaggagaaattaccaccatatacatcttgtataacacccaatttttgcgtaatataaattaaaaaagattctatttaaaaataaatagaggtttacgaaaataatgagattttcataattaaataaatagaaaaaatattttattaattaaaatgatgattttagggtaataaaataattatatgttcttattaaataaaatgaatatttaaattattcatttgattgcgagtaaatatagtctatcttattaaataatatcatcaagaacaatagagtag

SEQ ID NO: 25448 - DNA, 251 bp, Glycine max
tttctttctgtattcgccctagaagcagatgccactacacttgctgtatagtctgcagaaccatgagccaattaaacctcttttcttttagattgcccagcctgaggcacttatttatagcaatgcaagaactggcctaaacaaaacattagttcaagagtgaatctcaggatggacattggtataaagataactgaaaatgtagaagcaacttggaactgggtcatgagaagaggttacaagagtttgga

SEQ ID NO: 25449 - DNA, 213 bp, Glycine max
caagtgggcacaggccagaagcctccacatctttccccgagcctgccattctaccttctcagtgtccctgtggccaactgctacttctgtcccctatgatattggacgtcatgcaagggcacttgctgatagcgtgaaaaagacaacaaacctcagaaaggaactcaatgtctttaagagcagaacaagccaatgaagacctatgactgtgac

SEQ ID NO: 25450 - DNA, 234 bp, Glycine max
  unsure at all n locations
agtttatgtttatagagaagaaagatatctgaatgttatgtgactagaaggtacacatgagtactatttttttttttgatcagcaaaagtagatatatatatatatatatacacacacacacaagtnccagtgggtactgaaaatacagatgatattaggtagacttgctgttccaatggtcaggctaatttcagtctgataggatccaagctagtcaccatatatattgatac

SEQ ID NO: 25451 - DNA, 290 bp, Glycine max
  unsure at all n locations
agctttttagctcanaaccacacaaacacacaaacagcgtcttgtgaactgtggaaagaaaggcgtacccttgactctaacaattctggcatatgtatgtgtcatattccttacttcctcctctagacaaaatntattttcctaagaccatcgaattaggtggtaaactcattgatntatttttatgttcacctttcttcaaataccttccttgaaatctcagaggactacaccactgacatatattcccagagcaccatcaacattaatcctccttctaaatatctcac

SEQ ID NO: 25452 - DNA, 229 bp, Glycine max
tatggaattctatcgtttgtctcactttacacctattggattttggagtactattgataactgctaataaatgagtatattttggagttaaattatataggaatttgtaatttttctctcataattgttccttttttagcaaataattgttaaattaatatcatttaagttttcgtgcagaaaatattaatagtgatgaatttgtgatgcttagtgaataaaataaagc

SEQ ID NO: 25453 - DNA, 95 bp, Glycine max
  unsure at all n locations
agcttacttatatacaaaaataaaagataacanagccctttcagccggaaccgccgtttccagtaatcgccaaatgacgaacacaaagggaaaag

SEQ ID NO: 25454 - DNA, 348 bp, Glycine max
  unsure at all n locations
agcttctgttaagtttatagcagatcaactaggtaaaaaggtgttaggacccgtgtcatataaagaantttaaaggaacgtaggatatttagtactaanaacaaacataaaaaagaattggttggcagaacatgagagatgccacttatgtgaanaatactttagatttattccatacaagttttggagggtaagttcaaagggtagaaattagaaggagatagatttccgctttaatgtaaggaaaagatngccaacaatttgagctcttcaaaaatggaatagacttattgtgaattcgtgagttcacccctatttggacatagtcaagcagatgatgaatgactt

SEQ ID NO: 25455 - DNA, 404 bp, Glycine max
  unsure at all n locations
agcttattttcttgttttatttnngngctgngcaactttgttntcaattctgtaatctgagggtcatgcgcttagtttggctgctactcttangatactattatcatatgtatnttcctttatccttcattctttagatataatgattttgtttccctaatagtaagacatatattatcaatcatggctcaatggaatntaccaacaccaataaaatatttatttaatataaaccaagttgaataaaataatagagaaaaatacattggatgcttgcaaatgtactactattgtaaagtgtgtgattcctccacttggttcattcacctcatgtgtttttaatagttgaaaaatcataattaccagcaatattatactatttcttgcctatatcataaacatac

SEQ ID NO: 25456 - DNA, 514 bp, Glycine max
  unsure at all n locations
ncccccggatgctttcatgtgtttggacantctgacaaatanacacgtgagcttgtagggttagagtctcacgaaagacacgggcccatttaacaattgttagccgcggctatatgagagcgcctgtcaaacaaagtcangttcacgataactcgcctgtgctttctcttccatgctatatgtagcaaagtgattgatctagtaatgcttgatgagttggaaaatgaggccgcaattatactgtgccagttggagatgtatattccccctgctatctttgacatcatgattcactagattgacatcaagtcagagaaatcacatgttgcggtcctgtttatctacagcggatgtacccggttgagcgatcatgaagatcttagaatgtatacaaagaatctatatcttccggaagcatctattggtgagaggtacattgcaaaggagccattgaatcctgtcagaaacttagagacgctaaagctgtgggcttctgaatgtcacatgaaacaag

SEQ ID NO: 25457 - DNA, 299 bp, Glycine max
  unsure at all n locations
ttcttatttattatttggatgaaaaacactagtccaaaaaacgccanaatactcttgatgaanatgaatatgatggggagaattgccctaccagatataaatctataacaattaattcagggcagtattgtcgtagagatagaaaanaatacactaatgcgttagaatagacagctcagagnagcaataggaatatatggacaatgtaatatatggtgaaggtgctataacagatcagtgaaggaaagtttgaattttttcagtaaatggctctgagatcacatgaatanagaaaaatc

SEQ ID NO: 25458 - DNA, 225 bp, Glycine max
  unsure at all n locations
tgcttcatgcattcactntccctcttcctcgaggtaattgctccgtatctaaagcttcatacacctgcagttcctgtggagagtgagctcatatctgagagccagatccctcgacccacgttgtctgatagatgcgcttccataggttaacatttcattgaatggctgacaaagcacttcataggatagctatagtccaatcttacggggtgctgagaagaccct

SEQ ID NO: 25459 - DNA, 385 bp, Glycine max
  unsure at all n locations
cactcactaaggaaatcggttttaaccaggtctcctccaattaacactatcctattactagtaattaattggatatcgcaaccatgcttctctaattcgtagtgtcttgtgtaaatgtggctaatgtcttttggtgtgcaaatggngtgaagtgatttgagctcagaaaggacaaaccaactgggtttccttttctgcatttgaatagaacagtagaactntccattcttacttgttgtggcaattgccagcttttccgtaacttgtccccttgacatgagtgacgaatgaaccgtgtccgtggcttctattaagttttctttctctttgngaccacactaattattacccaatccatgctagatcactaatactgcgattagan

SEQ ID NO: 25460 - DNA, 380 bp, Glycine max
  unsure at all n locations
agctngttattgcaggcactgngccggtttgttttttaacctgttttacctctacatttacactatcagcataatatactataaataaatatatgctgattaatatattttcaatggtacaatttaaactaaatattatttttaaaaccacactctctctagctntgttactaagagcaaagcaagtcacatacagtaaggtttagtcttattgtaaaagaaaaatttcagacaacataaatttaacagaatttacgtggaaaaaaaagaaagattcatgaatcacacattacacagaatctgaaaagattcagagagctctgctttgccacatgggcagtgagtatttatagacagaacatgggagtaagtatagaaat

SEQ ID NO: 25461 - DNA, 477 bp, Glycine max
  unsure at all n locations
ggggnggatgactatgatcttcgggatagngcacncgtcncngggatccttagagtcgacctgaggcatgcaagtcttatatcagaccacttccagggtgctggagctacttcacatggacttgatggggcctatgcaagttgaaagccttggaggaaagaggtatgcctatgttngtgtggatgaattcttcagaattacctgngtcaactttatcagagagaaatcagacacctttgaagtattcaagggagtgagtctaagacttcaaagagaaaaagactgtgtcatcaagagaatcangagtgaccatggcagagagtttgaanacaacanggttactgaattctgcacatctgaaggatcactcatgagttctctgagccattacaccacaacaaaatgacatagttgaaaggaaaacaggactttgcangaacttgtanggtcatgctcatgccaagaactttctatatt

SEQ ID NO: 25462 - DNA, 255 bp, Glycine max
agtttctttgcccattgcctcaaggacattgttttcacttgtccctagcacgtgcctatccatatttatggatgagtggattatcactagacaaagacaaattatctttaaatctgaagctataaaatgtttatgtttgttgatttatattgcccagctgttctcccagcagggtggttagcagggtgacataaaaataaaacagcatccaccctttctatgccaaatgtaagaaaagaattaaaatgatgttcc

SEQ ID NO: 25463 - DNA, 73 bp, Glycine max
agcttagtcctataggggatggaccttttcaggttttggagaggatcaataacaatgcctataggttggacct

SEQ ID NO: 25464 - DNA, 144 bp, Glycine max
ttatcttttcccctccctacaagggcagccaaacattctagagcccaggaaagccccagttccaggctctccacagtgcccacccaccccagcccttcagaaagcccccaaattccagcccccacaaagtccaactttgatatt

SEQ ID NO: 25465 - DNA, 328 bp, Glycine max
  unsure at all n locations
agctntgtatgaatgtgacttcagggaatcctgagttctgtttagtgagcatcatagactctcagagcttcaagggtctagacacagaaatcaggggcctgcccccaggtaccattagaatcacctggagagcctttacaggttctgttttctgagcccacacctgagtagttctgcttcagttaccttgcggtgatcctcaaacctcaaaactttgtaaagttttggtgactccagcggtggctaatttcaagcacagcaaccaagcgcccaagccaaaactattgttcttacccacatgtntatttcatggaggagtaagtgtgag

SEQ ID NO: 25466 - DNA, 350 bp, Glycine max
  unsure at all n locations
ctaaattaccgtccttcctaatgaaccgttattaattaatggtgggggtagagctaatccccttaatgatggtttaatgttaaatttcccttaataattaaattaagggttggattaagtggtgttgaactgataaaggataaattctcgcaacctangataagagacttgcttgtgaaatcagggaaagcaacgtatttaattctgatattctaatcaatttactcctgttaatttcaaaagcaacacccccccccccaattgtactattcctacatctgtataacatttgtgttcattgtcattggaacacctagacactcctagtctacatcatattattgatcggc

SEQ ID NO: 25467 - DNA, 271 bp, Glycine max
  unsure at all n locations
agcttatattaattttctaattaatggattccaagacaatcaagcaccttttggttaagaaaaaaaattaaaactcaattcaaccttttaagacaaattttatatatatatatacacacacacacagtattgaagtaaaattatccaaaaagtaaaatttataccctcaacagtaagcagtaaattggatatcattaaaatctgcatatattaagacccanaaatgctaaatattgnggatgttatgggagaagaagtgttataaaatatt

SEQ ID NO: 25468 - DNA, 350 bp, Glycine max
  unsure at all n locations
gggggtcacaactaattcccagggaggggcaggccactaaccattacaaaccttctaaacaaaccaaaaatcagcctcaggggcccagctggatcagaaccgaaagtcacaccaagtcccaacgtctacaagactgaaatctttgtggaggtcgtgaaacagagtaaccatgaaacaaatggcagccttcactcaatccctgggaaagggttaagagtagactacgatgaacccatagcattcagactcgctggaaaactcaaatggcttgacatgtgtggtcggggtataaaaatatggtttgttgatagggagcatgangttacggggcgttggattgattagaaacc

SEQ ID NO: 25469 - DNA, 541 bp, Glycine max
  unsure at all n locations
agcncnncgcggcgtcgggggacgaggctggatctatcgnancccccaaacnntagccaaaaatccgaancacgngcanccatcnccctaagagncctattacgaggatgatgtcgagccacgnncncagggggacagggagtatttgaatgctcaaaatcacaatactgagaatgctcaaaatgcacagaatgatcaggatgcacactatgcctaactaatctatgaaaggttctatctatttcaggatcaaaggggtggaaatcacctggattgcccctaggcatgcactatatgcagcaaatcatggatctctcaacaagcacctaacaaggggggaaaactatagctatactcaaatgatatccaaacgagctgaaattttgagagcaaccaccctaaatcatgaaaatatagcacacaagagctcaaacaaaagatcgaagtccaactatgaaaaccacctaagcaaagggtagaaaaacaggacgacaacacttgaaaacaaaacaaacctagaaatgactgacttttcagggcg

SEQ ID NO: 25470 - DNA, 305 bp, Glycine max
cacatccctcctatctgctccctctgtttccacattcttatcattgcacatgtcacacccactatactgatttggattgaatcctataaaatacagctcatgtagatttatccattcgagattgcttaaatttgaccgtttttgactgtttgattatttcacatatccaagctggtatttatctacgcaccccattaaactgttagttacgtgagaaaacaaagaagaactttactctattttggcctcacctcgcacagtgcttgatgtgtattgatacttatacacgtgcattgataactgaa

SEQ ID NO: 25471 - DNA, 283 bp, Glycine max
  unsure at all n locations
gaaaaaaaaatagaaatgaaagacagtccgggaaaatctcaaggttttaggtagaattatctgatatgtgtggtatttatattttttcccttataaaatctatanaaaattatactaaaaaataatccattaaaatctgtatgaattttaatgaaagatagttataaaaaatcttaattgaatatcatcaaattttattgatattaaaaaataattctaaatatcttgattgaatactataagatttttttatcttatttaaaagttntgattgaatatcaca

SEQ ID NO: 25472 - DNA, 469 bp, Glycine max
  unsure at all n locations
gcattatagtagtgtcatccaatacatctttgatgtctctgattttagaatgaacctctatattaagggattggtactctatattgttattctttgatgaagagtcatcttccaagagcagtcgaattatctaacagatcaagataagaaacctatattatatttgcatgcaaaaaatatctataaactcacatggatctacattgatagtctttattaacttttaagtaatcaaatgtgattaagagaatttcatatagacaaactagtagaactttattaataaaattgaagaacacaggtatgcaccaagaattaatgtccaaccaaaaaacatgcacatatcaagagtcaactattacctttctaaaagattcattggaagtcgttcatccaatacatccttggtgcactgagaaaagcttganaaactaaagattagaatacaactggagcagggttaatgccg

SEQ ID NO: 25473 - DNA, 177 bp, Glycine max
  unsure at all n locations
taattttccgggctctcgtgtccgtanaatgcattcatatcatgcatcgcataagcatctcttcataacatcataatgaacatatcattcctgcatttgtccgttatcatattccagcctcacattttgcatgagtcatggcatcatcatgcatatgncgttcaacaaacttttgat

SEQ ID NO: 25474 - DNA, 358 bp, Glycine max
  unsure at all n locations
cctcaagaagaaaggaattcacccagtgcatacaagtatctgcaggcacanataaatccttggctgagctcaagagacttttaaaaggtctaatctgagattccttatgaaaaaaattccagcatagccagttagagaaagagagcctatatggccaataattattcttgctgcactttatgtaaataattaggcatagtataataaagcaagcttattttgcaaataaattggtcttgtctttagtaaaaataaactggagagagacaaattatggttcataacagctacagcacacctgttattagattccaacctcatccattgttcttgagcttctgctgatgaccccatattt

SEQ ID NO: 25475 - DNA, 80 bp, Glycine max
agcttttttccctctctctctctcacgttgccattcccttcttcttcctcaccatggaacctccatcaaagctccaacct

SEQ ID NO: 25476 - DNA, 534 bp, Glycine max
  unsure at all n locations
agcggtggccccagcccgtgttcctcagcatcatgtacnacgcgcacataaanactcacgcgngaaggcacgtaacccaccatctatgcatagtataacatttgttaatgtccactatcatggctatcatggcggtgtttatcattaggggtgctacttgagctgccagatccctccacctttgggcgtattctttgaaagattcatgctccttcttacatatgtnatgtagttgcattctatccagagccatatcaaaattatactgatactgcccaatgaaggcaaccattatgtccttccaagaatggactcaagaaggttccagattagtataccaggagatagcttccccagtaatactttcctagaagaaatgcatcaataattcttcatctttcccgtatgtccctattttcctacagtacatactcaagtgattcttgggacaagtagtccccttgtacttcaaagggataacgacatcaagtactaggcacaactcttgcatgtcaccgaaacataaacctcccn

SEQ ID NO: 25477 - DNA, 401 bp, Glycine max
  unsure at all n locations
tngcaattgatgtcaaattacttgaccttagcacggctcaccaagaataatttgcactanaatcagaaggtacggccaaagaagattctttatgaaatatatctcgatacgagtccctcgactatagaatatcaacatttgctaggaacaagaaatcacgaacaaccatactatctatgcaattaaggcaaaacaccatactacaagcatatccagaattataaggttcttatgataagtatacaacatacatataagaagtgaaaattaaatagttaataaggatgtattaaggaatcacaaacttcaaccactacattcacgactacacacaaataaagggagtaagtatcatcatttcacatcaagaagaccactcttccaacatatttggtcacagt

SEQ ID NO: 25478 - DNA, 452 bp, Glycine max
  unsure at all n locations
agcttactatcatggtggaaggtgaagggggagaggacaagtcacatagtgaaagcaagagcaagagaganagtgtggtcggcagaggtgccacacactnttaagtaaccatatctcatgagaactcactatcaganagacaacaccaagccatggatcattcaccccatgatcaaaacacctcccactaggccccaccttcaatgctggggattacaattcaacacgagatttgggtggtgacaaatatccaaactgtatcagcagactaatacaatagtacattatgatcaaatagggtttatctcaagatgtaaatntgggttaaccatttgaaactaatcgtgtaattcaccaaaattacagcatanaaaagaaaaatcatatgagtatctcacaagatgcagaaacaggatttgacaaaattcaatacccattcatgataaataact

SEQ ID NO: 25479 - DNA, 479 bp, Glycine max
  unsure at all n locations
nggggagttttcttgatactacgcgatnctcnaagatcnngggatctctaaagacgacctgcaggcgtgcaaccttttaatanggttaaanggctaccatcaccttcctggaccttattatccaaccttgtccaattaattattaaaggcatttcgattcaaaaagggtcttctaagtttaatacatttaatatataacctattttctaatgtcacatcctataagagcgtggtgttcccgtgtcctctagcatgaggttcttcatagtcattcacctattcatctgctcccncgaacacaaagtcaagatcatcatatgatccanacacaaacaacaaaccgggagtgagtatcacatttctactactagagagaaaaacacaacatatcgtaggcacatcaatttacttagcatatctcacatttttcatcactttgtcattcatacatcacacttttattcattaatacaaccttn

SEQ ID NO: 25480 - DNA, 352 bp, Glycine max
  unsure at all n locations
agctngatatatttttcnttctggaacngataaagcagcatgtagtaatgtgaaaggtttcctcatatcacaatatgtagcaattaaagaaatgggtaaagttgatttttataaaagcctctcgtagaggaggctttaaaatctgcagttgattttataaaggatatacgatgatctcctcttcattacttagttgtcaagtgttattcattaacgaacggcactcaaaattaccaggatatttatcgctaatctagaaattttagtttgatctacgatccagtttgatctaaaataaacaaaaactgccatgtaccataccttattactatgacatcttcttttcattctt

SEQ ID NO: 25481 - DNA, 372 bp, Glycine max
  unsure at all n locations
tgcgagcgattttttgtttgttgtcatatnnnnaaaatatgttcttgctctgtttagcttgccataattatctcgttcttttataatacaaaatcttttccccaaaatctcattttttcccttgtcatttcaattttaataagagcagtatttcttatacctgacatttgttcaacaacaatgtaggtaaatctgcctatgcaaccttcacaatntatctagttgagtgtggaattcttagatacagaatccttggtggcggcgggaaatctaattttttccatatccatttttatccttaataagactagtcattcttatatctgacctttggtttacaatagtatggttatatcttcttgagatctctta

SEQ ID NO: 25482 - DNA, 357 bp, Glycine max
agcttgtttatagaattataagagagacatacatcttctttaatgatattggtggaacacatagatatataaagtaaaatgatatatctttttctaaacaatttaaattaaagatatcctatagtccaataattccttgtgctaatcaaatccaaggaaagacattatataagtagaacataatttatgtgtaaagatgtttctcgtgaaattgttttcacagcaaaaaaattgaaacacgaatattccatggtgggagtgttaaaataattgaagatatacacattgacacattaaattgtgcctaccaaatttgttttaaaaatatattatgggggaaaaattacaataaattca

SEQ ID NO: 25483 - DNA, 397 bp, Glycine max
  unsure at all n locations
ttattaaccgtgaccattgcctaatggaaggccttcctggcttaaaaggggtttccaaccaacctcttcaacctaattggtggtaattcctgcaggggccttgcctcgatccacctagtgaagtaattggttgtcactagtagggtatttgactactccttgggccttcgatagtggtcacatgttgtccattccccacatggcaaaaaggccaggggagctcaaaatatggaagttgtcaggagggatgcgtggaatgtctaccaactcttggcatcgtctgcatctcttgatgaagtcaaggggcatcngccctgagtggtgggcgatagtaacccagattgcaccaactttggtgcaaaggatcttcccctgatatagacacgctttctcctgg

SEQ ID NO: 25484 - DNA, 530 bp, Glycine max
  unsure at all n locations
aggggcccccnccccgggtggtatggctagtactacgaacacngaccatagactctaagcttgtataatgagaattgtccttcnacaagattttttattgttatctgaagtctgagagctcggggcagataagtctgctaaagctggaggtggngatgaagtagaagatgtagggatgccaactattggtgtaaaggaagaggaaatatcagctactctgatcttggtcttccttgtctctggaaaattaactgtttggtcattcacattccaacagttccttatgatataagctaagtcaatggctggtcttaggttttcataggaggtaagggcatcagatcccactcccttcgatctacacaaggctgtgattaaaagtgggaagcctaatctagaagagttaaactaagcgatcatggtcatttgtccagagatcaaaccgccaatggtcattgtccatccttgtaataagccatagacgaacctagctctgntctgtgtcanatttgaagtgcgtgaggtaggag

SEQ ID NO: 25485 - DNA, 227 bp, Glycine max
  unsure at all n locations
ccaatcaatggggcaaaacacaccaaatgataatgaagatggatggctcacattctcataaaggtaaactcatcactgtcaaattgagctttcaaaactatcatgacatatataggagaatcaaggatttcaagtcacanaatgtcaagaacttttattttcaaaacaattacccatttcttgaacatatgctataattcaaagaaaaacatgcaaagttgtacatg

SEQ ID NO: 25486 - DNA, 373 bp, Glycine max
  unsure at all n locations
ttgcttgttatgtctcagaaagaggctntgagatggagggaccagtcagtgcccagcctcataggtgggaagaggctggtgagtccaaggagcaagctgagcagtggaaatgcaccccaataagtcagggctgggagaagccagccagggccccagcacatggccacagggccttatagaccacgggataaggactctggggtttgttccacaactaatgagaagctctttgaaagactgggggttttgaagaagacaatgtcatgatctcacttatngtttagaagaatctcttaactgtaaatanggcagaggagaaatagcanaagaagtttggtgtaacatcagctccaaaactgataggggcttacac

SEQ ID NO: 25487 - DNA, 64 bp, Glycine max
  unsure at all n locations
agctcggacccgggatctctaagtcacctgcagcatgcttctngttattcttacagcaccaaca

SEQ ID NO: 25488 - DNA, 226 bp, Glycine max
gaatataaataagagcacatccagtggtatcctattataatcactctgatcatctgtattcctatatatatgtatgaattcgggaggaatgggtacatctgcaatcgccagcacaatatttaacccataatctatctcgtctgtcttgcatatatgaacatattatgacaaacgagttaacagacattgggctatctaatcaaccatggttgtctaccttacaaga

SEQ ID NO: 25489 - DNA, 78 bp, Glycine max
agcttcatgctgaagtatgtatggcaaaaattcattactgtggttcaacacatacaagtgagctggtaacaaatcttc

SEQ ID NO: 25490 - DNA, 307 bp, Glycine max
  unsure at all n locations
agttnnatttanactccacaccccgcaccctcttctgctctgcttcctgtgggaggaaccttacaaatnccaaatcatgtcagccaacgtatttaaagtactgaaaacatattttangaataaaatctgaagaaaaatgcgtttcctatgcctgngtcacatcagtttgggaaaaaatctgatgcaagaagataaaatgccagctccagtagcagaaaccaactaccacatcaaagtttgtcatctgccttttggttgaaagcatggcangcaagcggatctatagtgcagcccgctgatcatttta

SEQ ID NO: 25491 - DNA, 395 bp, Glycine max
agcttgttctgggtaactatcagagaccccactctgagggagagctaattcccccaaagaaacctgagatgcgctcaggcaggggaatggatggaaagtgcacaaaacacacccttagctctttcttctctccaggtcccttaatccctccaagggaggttctcacaatacctgacagatttgaaagacttgacttctagacctgtttctgagatgggtaatgtttctgtctgaataacagagagcctgggattttgctgcttatggtctgagagctgggtgaggatgaagaaagaaaacttctagtgcatgcagaagttgtactgtgcacttcacattcatttatctcttttaaatacaaccaaagcccttggacatatatattattattccta

SEQ ID NO: 25492 - DNA, 135 bp, Glycine max
  unsure at all n locations
agcttggtcttaagcangtacaacccagaagtgtggggtaattaataccactggaacaacccataactaattaatggaggacaggagtcactaaatacatgttccagtccctgcatctgcagtggagaacaactt

SEQ ID NO: 25493 - DNA, 332 bp, Glycine max
  unsure at all n locations
agctgtattatgcgttctttatttagangnacaagccacatgcaactgatgtgtgtgtgtggtctaaggaaatgtcaaattntacattntttccatgcagctctccacttgttgaaaagacttggccttttccctactgctctgtagtgccttccttgccatanataatacattcatatntctagatctgtttctggactgtctattcagttccattaatgtgtatgtgtgtaattaatcttgatttctgatagtgttncatcttgttctttaattttctatttatctcaactggtttttgggggaactggtggtgtttggttacatgaata

SEQ ID NO: 25494 - DNA, 357 bp, Glycine max
  unsure at all n locations
agcttccattgacttgtatcagatttccaggtttgtcttcagtatcaatgaacatttagaggataataatagatctctgaactgtatgacactatatggactagcctctgtttgttgttctccacaaagtagtcattntccaaacaacagcagcaatgtggaagatgaaattataatcacaatagactggagaccaagagagatctgaagcataatagagtctctccagtggaatgaacataacctgtagcatcccttangaaagttgtagataagccaatttgtgttaaaagcanatnggtcatcaacaccccagaaagtgtccctataagtgagccgatctctggtatagtcact

SEQ ID NO: 25495 - DNA, 463 bp, Glycine max
  unsure at all n locations
agcccncactggcttaccggctagngcatgcanncttangacnaaccntnaccgagangcgtagacatgatcatgtcaggctnggnnggtttttgatttatggatgcccccattatnggctgacgagatgctaaatgatgattggaattttatcaaaactggcatgcatgccctatgcaacgctcagtataaattttatggcatgtgatgctgggctcacgatcatttctctatttagtcaacccaatgttccaaaatatgtctttatccatttggcattcatccaagccatctcggcgttgggaaattcacgcattcaccttaggtgtcacacattttttttcaaaactagcttgacagcaattttcttcaagaaagttgaatcatcttttcaaagctgtggttttcacaacactatggctttttctccttttttctcttattaattgaattcttttctgcg

SEQ ID NO: 25496 - DNA, 57 bp, Glycine max
tataatttctttctgagccgatcttgtggagacttcttgcaaaccgcacttatctcc

SEQ ID NO: 25497 - DNA, 156 bp, Glycine max
caagttctaagggcaacagtacattttcccaatgctaaagtcacctaaccaggcacacaaatggttgatcagaccaagagcatacaaactttaagcactaaaagaagcattgaacacaagaaacacaatcaattagatattaaagtaattacatca

SEQ ID NO: 25498 - DNA, 477 bp, Glycine max
  unsure at all n locations
cctcggagccattcctgcgaaggcaaacatttgttatgttagttttaccagngggacgttactctgtaaagcagaaatggcatataacctcctcccataaatacaaacatcaatgtaaatntagagtaagcttatgcgcatacttccttacaaatgttctcttgcacaagacattctattaaccgaaaaaatgcacccatatacaatcaaggcagctccgttacctagattatntacacgtacttctaaggtgtatntgttacttacatcacacacatctccttggctaaattcacatacatgcatacccaaagcattntggggtaccaaaaattgcacatgtacacctcttggtatttctaatacctatacatacacaaactntatgatgaatcttgactatctacacaataaggtgctacatttcatgctcttttcaagttttngtacctaaagccgcatgcaaattccagtatg

SEQ ID NO: 25499 - DNA, 53 bp, Glycine max
agtttattactaaagtctcaggaccagaaggatgactttcccctttgctggac

SEQ ID NO: 25500 - DNA, 274 bp, Glycine max
  unsure at all n locations
agcttgttantttttccncctcnanaacacagatatggtctgatgtgaaacagagaacanaaccaggacattatttgtaagcccaaacatgacggtttgcaaattggcccaagctgtagaagatataagcagctattgttaggaggttttttgtagtgggagaacaagtctgccatagatatgaccttcaatgtgtctgctttcccacattatgtgacggtctggagaaatttaatatgtgtgtgtgtgtgtgtgtgtgtgtgtgagtgagtgt

SEQ ID NO: 25501 - DNA, 83 bp, Glycine max
  unsure at all n locations
agcnaatggnctgatcacccattgntgtgtgctgttaggaactttaccatngggaaatcccttgtttccttagaacctggata

SEQ ID NO: 25502 - DNA, 293 bp, Glycine max
  unsure at all n locations
atctttgttgcccatagggtaaatacctagaacctagtctaatctgatgactgcgtatagcagttaacctctacagtgatcagctgactgtattcccgtaattggctcgctgtactgtgtgactcaagctgtgtctactgaactaccatgagcttccactgaggaagacaagaccatgagcggatccttacattatacacttagctctcacactgcatctcaagagccccatttgcttctatgcataattcatcccatgggacanaagacaagcgagttcatatgatcaaatg

SEQ ID NO: 25503 - DNA, 412 bp, Glycine max
  unsure at all n locations
agctttttgtctttttttatccagangctaatatgaatgattcccaaacttgtgcacattgaaatcaccaacaggtctttcaaaaaatactgatgtgggttgaagacattgtgatttaattgttattgggtatgacttgagcattagtattttaaaaatcttgtagatgatttaattttagccataaatgtatcccatagtttgtttatcccataatttctgattcttcccacatcaagaatcaggtgacatcactgaagattgtacaagtattaagttgataattagacaatataaaaaagcattatttcaatatatttaacattgtaatgaaatggagatttttgaaatataaanattactaaagcttactcatgaagaaataaataacctgaatagccctatatctaat

SEQ ID NO: 25504 - DNA, 386 bp, Glycine max
  unsure at all n locations
agcttcctggtcattatgtggccttgngtggagagaagcctctgaagcttatcagctagtctcagcgtgttttacgttgagcaattcagatagctaagccagctctctgctaaatgagggaggaaataagccccgagctgatctattcagtctgcctagccctgctttgaatggagttgttattcaagtgtttcttataagactatgtgcttgtgctacaagcacaccgaagataatttgcgtctcattaatatatgagtgttcctgtccccacggctgttctgctgccaaagcagctgagatttctgccctcatattcagcctctgagagccctgangaggtcccgggtcttcctggcctcacagcttgactggataggcacaat

SEQ ID NO: 25505 - DNA, 552 bp, Glycine max
  unsure at all n locations
cctccacaggcnncggcgggagtggaggatgaaccttagatgancccatagaccaccncacatatagaaactcaagcttgcctcanagaggtccaggaaggacaagctgtcgaaggatctatttccactcctgagtatgacagtcaccgctggaagagcgccgtacaccagcagcgcttcgaggccatcaagggatggtcatttctccgggagtgacgcgaccagctcagggatgacaagtatacggatttccaggaggagataggtcgccggcggtgggcatcactagttacccccatggccaagttcgatccagatatagtcctcgaatnttatgccaatgcttggccaacagaagagggcgtgcgtgacatgaggtcctcggtaaggggtcaatggatcccgtttgatgccgatgctatcggccagctcctgagatatccgttagtgctggaagaagccangagtgcgagtatggccagaggaagaaccggtctgatgggttcgatgaagaggccatcactcaattgctatgtataccggngcaagaag

SEQ ID NO: 25506 - DNA, 174 bp, Glycine max
  unsure at all n locations
gaaaccaaaccttattccaaataataaaaaacaaaccacatagtatcaaagcataaaaagttgaaatccaaattctacaagataaataaagtacttaacattataatctaaattctaagaaactaaatagccaaaatacacggcttataagtgacatantaatagaaactgaat

SEQ ID NO: 25507 - DNA, 468 bp, Glycine max
  unsure at all n locations
cacccagctcgcccaggcgagcaaagttgctttctccagttttacagccttctggaggaatcgtctggagggcccaagtgggcctggttgctatttgcacccncattnttactaaacacaccccctaccctttttttggtggttctttnttcgtaaagttacggaaacttacgactttcgtaacgatacttgttttctttccgtaatgttatggaaccttgcggattacataatcatcccctttttgacttacggaatgttacggaaccttactatntgtgcaacgatgcttccttttaattccggtgtgtcacggaaccttacggattgtgcatcaatattttcttttgattttcggcacgtcacggaattttcacaaatcgcctaatgatgggtgccaagcacctcaaaatgaccaaacacaagttgcatgccaccaagcanatgtccccgaacgaaattatggtg

SEQ ID NO: 25508 - DNA, 373 bp, Glycine max
  unsure at all n locations
cctctaaccaccaatggggtgggtgcacaaggaacaaccgcataataatctgccaccacctaaacctaatggtaaaacctaacaatggctcttcctttggcagaccaccaccaaataattgtcacacaattcttccaatcatagtaggtgcactaatgattggcctaccgtccacccttatgccatgctgcagtgctacatnctctagtgtaattgtctattctcaacaagaagatgaaaagtttgtgctctggctccatcactcaaaagtgagtcactagtgatgataattttgagtgcataaatttgcacattgcaaacccgcatgagcaagcacgactcattaaggataagagccggcatgatgacaaag

SEQ ID NO: 25509 - DNA, 110 bp, Glycine max
ttgcttatttttttcataagtatgaaaaccaggggacatctgatctgctcattgaccgcctttacaatcgctagctaattcgaaagtaatctgctgtgagctctggctat

SEQ ID NO: 25510 - DNA, 235 bp, Glycine max
ctgcaattgacctaattggtgtttttcattcattagctcttcctgaaacaaggatttctgcttctcccatgattgaaacttcatttgggtcttcttttccctccttgagacctcttgacagcttgtggctgactcagccgcttgtaacttagcaacctccatctctttcctcagtgcagcattttccacctcaagtttccggacatcagcattggttctttctacctgtgcactc

SEQ ID NO: 25511 - DNA, 546 bp, Glycine max
  unsure at all n locations
agccaccccgccctcgccccatgacacaagcngtgccagnagtacgngcacnatacaatactcaagctggggacaaccaatattcttgttcttgccaagccatttctgagttttatataaataagaagatnnggggggttgaggacacaatgactgacactctatcgtcttacaaacgaataagagaattcaacacgtagtgttttctcttgatatgaacaaagtttttagacagactctctaaactctacaagaatttacaaagagagttttttatgcaaataatgaaatagtgaacacttcaaatcaaacttcatgtcttcaaatcttctagtatttatttgcctctttcaatcaattatatgtagtctctaaactgacatatttcctctctttaagcttgcatttgaagaaatggccattggggtattcaacaagtgtattaaatgcatgtacttcttcatgttgagaaaccactctacgtcgctgacatgttgaacactttagctagaaaacacttctttttgtgcacaacaagtctatgcg

SEQ ID NO: 25512 - DNA, 401 bp, Glycine max
  unsure at all n locations
ccaaaaagaagtaatataactcagtgtagataattggtgtttttccaagccatggaactcaaacatgtgtagattaaaaaatgagaggacctgatatcatgagacttcacatgtngtattcaggatcagacccatctgacttgataaatcattantgttcattacagagacacatacgacccttttttccctaattcttctgtcatggcttagttgaaaatcaaaactgtcaaagtctaagagaagtttcaattgtagggttccttgtgacaaacaaatctctctggcaaagtctcagagtacatctatttggttcatttgttagaactctccctcattttatcataaacaccttttgacggcatgctctcctngaagttatcatgtgaaaatagagagtn

SEQ ID NO: 25513 - DNA, 319 bp, Glycine max
  unsure at all n locations
agcttctatcttattccaaatgtaaattctgtctcaaactgttagcatgactactgcattntacctcagttctcctctactganacatcctctcaacccagtgaggataacagagataagtctgatgaagatataagacataattccaagatttcagatctaagtcatcacttgcaaattcagcgattatttaaatttgccattcttcataaactagaacaatatctggaaattgtctctctgtctctgtctcacacacacacacacgtgcacacacacatacaaatctaatgctacctcactgtcccaattcacaaat

SEQ ID NO: 25514 - DNA, 407 bp, Glycine max
  unsure at all n locations
agctttgttatgggataacccaagaatactccagaagaggggganagagacattgaacannatttagaggcaatattgaacaagtganaataacttanaaaatcacagatagctgagttatacctaagatttactcaggaatgtggaattcagaaaataaagtagagaagagagatttcttanaattaaatgatttattaaaatgaaatcaatttcttgtgaagttggaactagggagtctcagatgcaatggataactcctgcaaaaatgatgaggatggtgatgataatgcttgctaaaatttattgtgcacttactgtgtgtcanggcactaacttactaacttgctcttgacttgcgtgagcttgtnntgattgacacctcagtgaagctcattctacatgat

SEQ ID NO: 25515 - DNA, 470 bp, Glycine max
  unsure at all n locations
cgggcgacatggcttgtantctacggnaaanatgcacgnacccgggatccttagagncgacctgcggcatgcaagcttactaactntccatccancgagaaaagggagaggctcatgcacaanngcctaggccatngcaccccaaattctgacgatataatcaattcaattgctagaagcgtaaattgtatagttcatagtgttacatgcagttgaaacaattgtctgattaagagaatactttttgatctactacaggagtgtacatatcgatcaattcagatagaatagcttctaattgattatatattgactgaattgctggattaaataaactgacttgtctgtttaaataaggtcagtccgaataaactaatttcaaactgatataaacaagtccattcaatcaataccaaacacgcttctacaaactggagtattttacaacatactcgacaacagaatcacct

SEQ ID NO: 25516 - DNA, 376 bp, Glycine max
  unsure at all n locations
agctnttctaanaaaaaataattaataattaaatctctgaagtggatatattcttcctanatcaatggcacattgtctntgttaactntgttgttgttatttccttttaatagtacgtttgctgtttgaacactcggtctaacttcagttcattcaaaaacagttcattttgaaaggaacaataaggaacaaacgaaatacacacatgatatggattggctgtatccccaccaaatctcaacttgaattctatctaccagaattcccacatattgtgggagggaacccaggggaggtaattgaatcatggnggctgatctttcccatgctattcttctgatagcgaataagtctcacaagatctgatgggtttatc

SEQ ID NO: 25517 - DNA, 403 bp, Glycine max
  unsure at all n locations
tgagaagctaacgctntaactattaacacccttctaataactaaactcacctccttgaaaatacttatggataaaataacacaacaaataatcaaacatcaaacataattattaataatatgtagatatatatatatatatatatatatatatatatatatatatatatatatatatatatatatatatatatatatcaaggggtgacaactctcccacccatttataaatgtcgcccatgtatattaccttactcaaacaaagatggatgagctactcggatatatctttcctatatccacatggcatcatattctgatgcacactcctatatacttttaccaataaaaatctttcctcttaagtgtatggcgcatatatcaaataaaagcatgattctact

SEQ ID NO: 25518 - DNA, 427 bp, Glycine max
  unsure at all n locations
agcttatgcttatatttccctacgaacgttcacttgcacaagacatcctattaactaagaaaaatgcacccacatacaatcaaggtagcttccttacctagattatttacatgtacttccaaagtgtatttgttatttacatcatacacgccatcttgtcaaaatttacacacatgcatactcaaagcatttctgggtaccaaaaattgcacatgcgctcatcttggtatttctaatatctatacatatacaaacttcatgatgaatcttgactatctacacaataaagtgctacatttcatgcctttgttttcaagtttttgctacctaaagccgcatgcaaattcaagcatattntcctttgctaactaaaattgtattcaaattatatatatatatatttatggaatatgtgttctttcattca

SEQ ID NO: 25519 - DNA, 411 bp, Glycine max
  unsure at all n locations
agctncnatgttattactttcttgagaagctagagcttagcgacacacacccgtctaaaaactaagctcacctccttgagaagcttccttgagaagctagagcttagctacacacacccatctaaaaactaagatcacctccttgacaaaatacaggaaaatacaaacaaaaagtccttactacgaagactactcaaaatgccctgaaatacaaggattaaaccctttactactagaatggccaaaatacaaggcccaaaagaaggataaagctattctaatatttacaaagaagagtggatccaaccttgactcatgggctcaaaaaatctaccctaaggttcatgagaaccctagggccttctttagtagctctagcccaagcctcttggagtcttccatccaataccc

SEQ ID NO: 25520 - DNA, 422 bp, Glycine max
agcttcttagtttatatgatgcagatggagccatcttctcaattaatattttggcttcagcaggagtcatgtctccaagggctccaccactagcagcatctatcatacttctctccatattactgagtccttcataaaaatattggagaagaagttgttctgaaatctgatggtgggggcaactggcacatagtttcttaaatctctcccgagactcatacaggctctctccactgagttgtctaatacctgagatatccttcctgatggctgtggtcctggaaacaaggaataatatctctaagaatactctcttaaagtcatcccacctcgtgatggaccttggagcaagtaatacaccagtcctttgccactcctctaatgaatgacgaaaaccttcagaaaattggacctcttgacat

SEQ ID NO: 25521 - DNA, 436 bp, Glycine max
  unsure at all n locations
agctnannattttattataattttttaactnactnntataagattactttcagacgtaattacaatcttttaatgctaattnntttagaaacttgaaaaatctaagacagtgtatattgtgccaagaaattaaaaaaactttgatttgcaaatattgtctgacttgttatataataccctcttgtcccgtgaaccagttaagaccggcatgataaagcatattcacaggagaaaactttgctagttgttgaccaagcaaacagtgatagttctctattcataacattaagtctgtccacactaagcatgcaaattgaacatactcttgatgtacaaaggacagtaagtatcaatttaacaaaaaaatcaaaaggattctgtggcctgtttgaatcccttcagctttctaaaacaagtttagactacttataaatca

SEQ ID NO: 25522 - DNA, 473 bp, Glycine max
  unsure at all n locations
cgaccgcgaaagacaaagcaacacaaagaacaaaacgacaacaccaaaaaacacaaagaggggnnttgatcctcgacacgtcattnaaaanaccgggcgngtaanagaagacagagcaggcaactttatatcaacaagaacacccaagggggcaacagagcaaaacaccccagctaaaaacatacaggacccacgaacctaacatgaggccaaaagacatcaaaccgacaaaaccgaaaccccggatatctccggggccgagaagagcaagcacgcaatggccaggcaacaatcggcgaaaaccgactcccgacaaggaagaacaaccgaccatccacaggcagccccagaggaaaagcaaaccccgacccaaccactgaccacagaacaaggcataaacgccccacacaagctccggccccggaaaaccacccacaggaacgcgcgaaacaacacacgagggcaccccccac

SEQ ID NO: 25523 - DNA, 340 bp, Glycine max
  unsure at all n locations
agctttttattccatactttntagcttcaatgcgagaagacgtactcatggctaggaatccaaaatntggttttagaaaagcatgaaaattgggacttgcttgcgagagtttttactcgaatttgttctgcaccatgattgatactctgcacctatgtaacgtgggaaatgcttttcaatggtatgtagatatatgtgtaaatataaggggcatgaaattccttgccaagtgtgaatgattattttcctacatggatgtatgatagcatggaattctcttttgaatgcaagtgtgtgcaggatgtaattagctttccaatatgcatataaataaatgtga

SEQ ID NO: 25524 - DNA, 298 bp, Glycine max
  unsure at all n locations
agctncttatctcaagctcatcttgagggagaagctgctccttccatggcttattccttactaccaagactactcagaatgccccgaaatacaaggctaaaaccctatactactggaatgaccaaaatacaaggcccagacgaaggaaatacctattctaatatttacaaagataagcgggctcatacttatcccatgggctcgaaatctaccctaacgctcatgagaaccctagggccttaccttggatctctaacccaatctacgtggtgtctttctcccaatgcccttgcggggt

SEQ ID NO: 25525 - DNA, 256 bp, Glycine max
agctttctctttaatttattgtcatcagcatattggagaatattcacaggcaccttattcttccccaccaagaaactttgaaagcagtttttgattgttgattccctcatcaaacctgtcaaaccttcagcaaccaaatcgaataataacggggcctatggatcccctggtgtggagcctctttcatgcttaaattaatggttgggctaccattcactaggattgatacagaagctgaagtgatgcttacatttac

SEQ ID NO: 25526 - DNA, 409 bp, Glycine max
agcaaggtttttttgtattggcaagaaactatggaatggcagagttgaattaataaagatcaacaaagtatgaactttagttgaagcttcaaaggatataaaaccaattggttgtatatgggtttacaagacaataattggagcttattggaaggttgaaacctacaaaactcgccttattgccaagggatattgtcaaaaggaaggtatagattatgacataacttttgtcccatggcgatactcaaatcaatttggatgcttcttgctatattagcatactatgatcatgaaatatgatatggatgtggaaaatggctttccttaatggtgagctataataacatgtgtgtatgacaaaacttgatggatcacatcctagtcttatcataataaagtctacaagttt

SEQ ID NO: 25527 - DNA, 273 bp, Glycine max
  unsure at all n locations
agattgtggtgactcgatcgagncgcgctcggacgaggccgcgcgtattttctaaccccgagggttagacagtgccctgcctcaaataccattattctccggattatagaggggcaaaaaagcccccgcttttttgctaagtctctgacagaacgctcgaagtatatgccgccggcctattctccagcacattgagacatattcgctgacctctgaccattttttaaatggaaaaggttccgacaactgttcctggagaactaaaaactcctc

SEQ ID NO: 25528 - DNA, 419 bp, Glycine max
  unsure at all n locations
tatcttgtgcttatttgtcacagacaaagggatccaaataatataaactaaaaaattaataatcaaattgtattgataaaaaaatgtgcataaatcaagtacaaacgcttcaaaacatagtaagatcaaatagtcattttagttgaaaatataaaaagaagggaaaaaaaggcataagacactaaagttagaagctagatttaagaacaaaatcaaaacccttgaaatttaaggtgtgtgagacagaactgaaccgaacgaattgtgacttttgaagagcaaatcaaagtgaaaataaatagaaaagggtgattgttttgaactaagaaatatatacttcatggcatggtgtttgaacagtcatatcataatcgtcctctcactactagaaaaatgactntntatgacgattattaagt

SEQ ID NO: 25529 - DNA, 384 bp, Glycine max
  unsure at all n locations
agcttcttttgtactttgaacaagcaatcaactcctctttcagaaccatgctatgtgctcgcgactggtccctttcttcccttcgcaacttgagttcattattgctaccccatagagctccgcgaaatttgttccggccatactcttccttgcgagccctcttggtctcttgttcaagggctcttgcggtaattgcattctcttcccgtaacccggcacactccttccgaacgtgtgtagcagccaacttgaacttctccttggcgagtttttcctttcctaactcgctnttgagagcttggacttcttcgtcctcttccggtgcttcaaaattctcttcgctgacgacttttaacttggcgagccaatctaaacctcgtatgc

SEQ ID NO: 25530 - DNA, 400 bp, Glycine max
  unsure at all n locations
agcttggacttatgtttggtatgtngacgtctaagcggagcggtccttttgttgttactaatgtctttccttatggtacagttgagatcataagcgactccacaaacaagagcttcaaggtcaatggacaccgacttaagacattcctcacaaacccttctttagtggacgtagtggtggaagagacttctttactcctccctactcttgctctaccatgacttatggagttnttctttcctacctccttctttacttctattacatttgtctgattctatttgatggtttaattgcttgtaatcttttaattgtgccacattaacgacaatgtgttgtttaagtatggaggggtgttctttggttatggatctggtaatcatgttaaattaccttaatt

SEQ ID NO: 25531 - DNA, 408 bp, Glycine max
  unsure at all n locations
agctngagaataaatttcgaccttgctgggcgggctgggtgcacgctgagtgagcacatctctgactgattatcttcaagggttntccaacccactaagcgagctatatgcctcgcttagcaaatgccactcgctgagcagatcagcctcactgagcgagtcatcagttacttgaaccttctcttctttggcctaaaacagagttggattcaacattaattcatagaatgagagtatctactctataaaatcacactaaacataaaaatatgtataattcgtacaaaaagaaccataaattggaggtaaggcgttatctccttgcaaatattcaacataaaactaactcatgaataacgactaacaatgactagattgagtcacgacgacatcgatggcacttccaga

SEQ ID NO: 25532 - DNA, 203 bp, Glycine max
taagcactgcagctgcagcttacttttttatttttaaaaattactgcagcttaagaataaatgaacatttattatacaatgagatataagtggttacaatggagaaagtaatacacagagggtatcaaaacatagtgaagggggatgaaaaataactgaaacaaggatatacagatacttaaaagacccagctgtatcttatc

SEQ ID NO: 25533 - DNA, 527 bp, Glycine max
  unsure at all n locations
aatggaactgatgacgctgnagtaacgtgcaanttagctaagaaccgggagcctctanagacgagccgcaagcatgcaagcgacnannngtaccttgaacaanccaacaacnccccncnggaggagcgtgtgtctatgcgctcgccacgtggtcctctttcttcgccttcgcaactgtgagtacatatatgtgctacccctatagagctcgcgcgaaatgtggatcgcggacatactttttcgtggagagcccttgtgtggtcttttgctacgagggcttcgaggggaaagatgctattctttctcctgataaccggacaattctgttttacgggtggtgtgcatgcccacatgaacttctccttagcgagattttcctctcccgaacgcctctgagagccgggacctcgttcgtccctttccgggcgtcttagagttctccgcgtgccactttgtactctggctaggcatctaaaactctggtgcgaaacttcagccttcgtggtacccccataggggccatgccc

SEQ ID NO: 25534 - DNA, 381 bp, Glycine max
  unsure at all n locations
agcttttntttttcgatgttgcctaaaaaatttacaatgcagttcggctaggtttcttcgtgcgaactgaaccgaagttgtgtttcggccgactggcatgttctcattttgtcggccaggaaaacattagcccacctcggcataaaaaacatgattcaccgatattgacaggagaagaaaaatgctagccgacgtcggccaggaaagatgaccgaccgaggtctgaaaaagaagcatgaccggatgactccggtcgaacatttcctaacagatatcatccaagtattattcacggattgaatagaaaaaacaatagccgacatcggtagttatatagccgtgactgatatttntcggccgacattgcgcaatttcttttac

SEQ ID NO: 25535 - DNA, 413 bp, Glycine max
  unsure at all n locations
agcttttgcttttaatatcttatnnngnaatttaacaaaaattgcttccctatcaattagcatctcatccactgctgccactgatgaagatcccattagatattggggaatactgggcggatttctgccaaaggttacttcgaagggtgaaactccaattgttaagtggactgatgtgttgtagaaccatttgacccacataaaanattttccccaagttgcaggtttatggtgaacgaacgcccgcaagtattattcgacaactctgttgatgaccttgatttgtccatctgattgagggtgataggcagaactcatttgcaatttcgttccacgcaatcgaaagagctcttgccaaaacttactcacaaataatgggtctctatcagacacgagacttcgaggcataccat

SEQ ID NO: 25536 - DNA, 397 bp, Glycine max
  unsure at all n locations
naagcttatgatttgtagatgtcttgtgaaaattaaaatggcgtgggtaacagacaaaattatcggctcatttcaccaatttgagtcaggaaagacatgtacacgcatgtttaaaaactatttagcaataacaatagcagcaatagtgagtagtctactattactacttgaccaaaaatcatgttgatctcgaatccccctatctttctgctctgccacatagccagagaaaagattattacaagttaagtaacaaaatgagagaaacaatgtaccanggatgacaataatagattgagctatatatcgctattaataataagtaaaaatatttcttgcatatggatagncgaacctatcaaggatactgtttaatattctaaggggaacaatacag

SEQ ID NO: 25537 - DNA, 227 bp, Glycine max
actttataacttaaaatacgacaaagtgtgatcatctttacaaaactaacaaagatattctcaatacatctgcaagaatccgaactcgatggcatactccgaaatcatgaagacatatgacatggtctcatgcggtcctgagagattatataatggcaacagtgcctctcacttatgaacacctacaacatgcttaataatagtttaccactttacgtcactacaac

SEQ ID NO: 25538 - DNA, 413 bp, Glycine max
  unsure at all n locations
ttgcttanactttgtttagcctaccatcctcagactgatggccaaactgaacggaccattcagtcgttggaggaccttttaaaagcatgtgtcttatagtagaagggaagttgggagagttttcttccattgatagagttcacttataataacagttttcactctaccattggcatggctccctatgaagctttgtatggtagaaggtgtaagacacccctatgttggtcaaagcccggagaaggcctcaccttatgaccagaagtggtacaacaaaccactgagaaagttaagttaattcatgataggatgagaacggctcagagtatgcaagaaagttatcatgataagaggaggaaagatttggaattcgaggttggtgatcatgtattcttaagagtcactccgtggac

SEQ ID NO: 25539 - DNA, 389 bp, Glycine max
  unsure at all n locations
agcttgaaatctactcanagcttaatcagctgccacaacaaaatgaagccccacattacaattcttattgatacttttatatggttagccaagtggacaaaatgacccaataatttgataagaaccttcggacaatcccaccgcactgattaagaacttactaagaagagcaagaaactaaggtagagctcataccttgttaactggcagcgtagaaagctttgagctttgagcacccacgactgttccaagagcagtgtagggttttcttcgacccacagttccaacagtagtgtagggttttctttgacatttctttgatagggggttctatggattccagcgagcgatttccgacagtattgaaatcaatgtggggcaatgtgggt

SEQ ID NO: 25540 - DNA, 409 bp, Glycine max
agctagcatgccttttgaaccctattcaaatggcacaaaccttcaataaggcaaatataaatccccaaatcagccctatacccggagctcaccaaatccttcaacaaatcaaaagccaatccaaccttaccctcagccacaaacgcctcaaccagcgctccatatatcaccctatccaccaaacaacccttccccttcatctccctgaacaactcatacccctcctgaaccctccccccttttgccagccccacaatcatggtagcatatgccttcacatccggcaccacccgggccctcttcatctactcccaaaccctcagacacgcatgcagattacctgcaggcaccagaatcttcaccagcgccgtgtatgcagacacatccagcttacacaacctctccctta

SEQ ID NO: 25541 - DNA, 375 bp, Glycine max
  unsure at all n locations
gaacattgcaaggatgcaattctttatggaaaagatcaagacattaccctagaagaagtccagacctcaataatgaccaacgagatgcaaaaacaacaagactccaaatctgacgataatggtgaaagcctgaatatttcaaggggaaggagtgaaatgaagggaacaagacgataaaagtccagatcaaggtcaatggattcaaagaatggccagaaaacaaagtccaaatgctgtaattgtcacaaaattggtcatttcgagaaagactgcccagacaagatcaagaaaggatctttggactatgttgacatgttgaagcctctgaaggttatgacagtgcatgtgtntatataacctctaataccaaaacac

SEQ ID NO: 25542 - DNA, 430 bp, Glycine max
  unsure at all n locations
agcttttgttcttgtgctccaatcgagacatttgagcttgcacattgtgaattgtctccgcgttgcgcttaacatcggcactgagctccttcattcgcttgttatctgccatggctagatgaaagcaccaatgaaagggaattactacaaattgaaggatgtactcgttntattcccgtattgaaaagagaatcaacctctaagagtacagtgtgtacaattagaaggactgaatacaatagtcatagagagaaagagaagaagaaagagaaatgttcacaccttcctacctctcactacccattctccccctctaaataccactattagttggttacataatccaccaacctaaagttggtttttctctctctcacactctatctgttacccatagtggacacgtgtgatttagcanatattccccttc

SEQ ID NO: 25543 - DNA, 286 bp, Glycine max
  unsure at all n locations
tcgttaagcaccgtaaataaacttccaagcatcggttgacaanctttcgtctgtacgtcagtttggggatgatatgctgaactgaacttaggttgtgtacctattgctttaaaaatggctttccagaagttgcttacaaacaaacggtcacgatctgaaacaatggaagatggaaatccatgcaatcttacaatatcctgtagaaaaactgcagctacttcggtagcggtgaagggatgtcctaatggtatgaagtgggcatattcagtgagtcgatcaaccacca

SEQ ID NO: 25544 - DNA, 501 bp, Glycine max
  unsure at all n locations
nacggtgactgcnacccatgcagnacnntcaannnttacaagnacccgccaggcgatacagtagagccgaccggcaggcaggcagactcttactgaaatctttataagaggaaaccgggcgcgggcggagataagcaagctcacagaaacccgatctcatagaggcgcgttagaagagctatgatctcttgctctaatatccctcggcaaatcggaactcgccaatttacaactatcgtgtatacaccactgactcgagttgcgctgccctgtctgtatcagaactagtcagaacaggacacaattgtacacccaatagaaagccccaggacagggtagatataaatggacacccccatcccgcacggccaatgttacacgctatccaaccattaaacaggcgtccataattgctgcagaagccacatacttcacctactacctgctaggatgctgaccgtgactacataaatctccaccatcctgctcatgagagagacg

SEQ ID NO: 25545 - DNA, 416 bp, Glycine max
agctttctctttgccatttcctgcaaaggcaaacatttggaaaattagttttaccaagaaatgctactcttaaaacaaaaatggcatacaacctcctccaataaacacaaacatcaatgtaaatttagagcaaacttatgcacatacttctttacgaacgttcacttgcacaagacattcttataactaagaaaaatgcacccatgtacaatcaaggcaccttcgttacctagattatttatatgtacttccaaggtgtattttctacctacatcacatgcacttccttggctaaatttacatacatgcatactcaaagcatttggggtaccaaaaattgcacatgtgcacattccggtatttctaatacttatgcatatacaaactttgtgatgaatcttggctatctacacaat

SEQ ID NO: 25546 - DNA, 395 bp, Glycine max
agcttgtcgttatctctcccaggcgagcaaggttgcttcctacagaagcaacagccttctggaggaatcttctggagggcccaagtgggcctagttgctatttgcacccccctttctatttttttgtaattctttttccgtaacgttacgaaactttacgaatttcgtaacgatacttattttccttccgtaaggttacgaatccttacggattatgtatttactcttttttacctttcgaagaagttacgaaaactcacgcattgcacaaaaacacctcttttcaacttccgccacaatacggaatttcatggatcgcgcaagcctgcttccttttgatttctgagacgtctcgggacttcatttattgtgcaacaaaggacgccaagtatctc

SEQ ID NO: 25547 - DNA, 425 bp, Glycine max
  unsure at all n locations
agcttgtttgtttaatatggtttggttaatttgcatagtacagagaatgaatcatatggaaattctttcttgtatgaaagctaggtaattaaagaggaactgtgtanggtgaaggtcaagttggggggagaagagtgcaatttgataggtgcttggagaacacgaatgaatgccatgaatatgatcatagatctgaaaaagagttcatgccctcacctcactgacctcataattggagttctcttttatttattagaaattntcagtaagagatatataaacacaatcaatatctaaattatgttcaaattttttaagtatatgtttaacttattcttcttatgcttaaaaaatgtgaacattattattctcattttaaaatcaacataattgatattgtactttnttagagattagtttgatta

SEQ ID NO: 25548 - DNA, 314 bp, Glycine max
  unsure at all n locations
agcttttgctaatggtatttacctngaatnaatngcgtgatagccgttttgagccttgtttccctttccttgttttgaagctcactacaagccttaagtgaaaaaccatgatattaccatatccttaaggaatnttggagctttggaattgttttgcgaataagtgtggggggtttttgtttcattggacaacttgttttgttggctatgcttcatgatgtattttgggccatacttgatgtacattgtatattggataaatgttggacatgctgaatgaaatgttgtttctcaaaggctgaagagtaaaaaaa

SEQ ID NO: 25549 - DNA, 351 bp, Glycine max
  unsure at all n locations
tctgctntgagtttattcaaacgacaataactgtntactcggatgtctgattgagtcccgtaatatatcgagacgctcgaactggaataccgaagctctgagataattcaaacgacaatgacttcttactctgatgtctgattcggtcccgtaatatattgaaacgctcgatattgaaagttgaagctctgagcaacttctaactacaataactctttactcggatgtgtgattcagtccagtaatatatcgagacgctcgatattgaatgttgaagctatgagcagattcaaacgacaataactttttactcggatggctgaatgagacccgtaaatatcaagacgctcg

SEQ ID NO: 25550 - DNA, 422 bp, Glycine max
  unsure at all n locations
tctgcttccatcttgttgtgtaataaaaaaagaaataggacgaagtgcttgtgtttgcaaagttggaagaaagtaatagagaaagataatgttgtgcggatgtattaaatgaaggtgaatatgacttctatatataggggtcagggttaagggtttatgacctaaggttagggttggaatcatttggatctccttgcgtaaagctaaagtgtctctaatgcacagacaaaaagaaaaagtgtttagcacaaagcattggattccttgacctaagtntagggttaaggtttagggtttagttattatattacggttaggttcttctatgtaggtatatagttcatgggtagggttaatggttcacgacctanggttanggtttgaagcattggattccctgacttgatttgataaggatgaag

SEQ ID NO: 25551 - DNA, 413 bp, Glycine max
agcttgtagttttatgtctcatattaatcgattacagccttatcataatcgattacacaattgtttttgagaaaatgattgatttattcaggagtttcttctttaatcaattaccatgtgatataattgattacttctctttctataagtgtttcagaattggacaagaacactttaatctattactttggatatctaatcgattacattgttcttgagttatttctaggttttaggaagagcactttaatcgattaaaaagataatctaattgattacttcattgaattaattgattaccttgttgatttaatctattacaggcggttataattgttttctctataaataaccagcttgtgttctcttcataatacaatgaaataagcttcagaatgagctaagatcatgtg

SEQ ID NO: 25552 - DNA, 385 bp, Glycine max
aaatatgcgataggataagcagtcatatatagtaacacattttccttccggcacattacatctgaatggatgagttgacatctatggccctaattcgtaattctggcatcagaccacacattgcagtgtctcagaaaatactgaaatatcgtatagatgtacagacacactgagacacttatcactcaaaagctttacaatcatacgtttgcggactgtgctatacttgacatgatcatctgtgtgatcgttccatctagcggaaaccactcacatttgctggtatgactagcaggaaacaatgtacttgagcgacgaaactccatcaattgacatctggtcgaacatgagataccagcgtcacactgtgacagtgagaaaacat

SEQ ID NO: 25553 - DNA, 340 bp, Glycine max
  unsure at all n locations
agttttgctgtagctcaatctcagaacgcggactagaangaagaagcagccgagtcttttttaaaaaaaacaggggggggagaatcgaccccccccagagacaaggctaaatgaacttgacattactacacagacggctcatgaacgggcagcctagcgggccttaacatggtaacgcaaagcaactgcacatcgtggaactcgtggacacactacagttccgcaccgaagcccacccacaccagactcctaggcctccaccaaccacagacctgggtagccacgccggacaaacgagccccgctcgaagaggactcccacaccgccataaatgccggcc

SEQ ID NO: 25554 - DNA, 428 bp, Glycine max
  unsure at all n locations
agcttgcattatttatatctccctctntctcaagcaaattcttcttgatatcatcaaaatcttcatgatttacattctccccctttttgatgatgacaaccacctgtaggttaggagcaacaacaaagaaaatatctatttgcatatagtttactcccccttggttntacaatgattgcttatatgagacaattgaagatttcatatttttcatatataaaaagttgtctcataaaacaatagataatttttcttactattttatcttttatctttctcttcccctttgtcaacatcaaaaacaaatcatgaatagagaggagaaagatgttaccacttgttgcaatgtatgagaatcaagtgataccaaaaggcattaaaacaatcattcaatattaatcaagcanaaacaagtacaataacacatc

SEQ ID NO: 25555 - DNA, 398 bp, Glycine max
  unsure at all n locations
agcttccttgttattattcctatataagctagagcttagctacacacacgcctctaatagctaagctcacctccttgagatgagaagctagaacttaactacacacacnccctataatagctaaactcaccccccatgcncaaaaataccatgaaagataacaaaaagaagtccctactacaaaagactactcaaaatggccttgaaatacatggctaanaccctatactactagaatggcctttatacaaggcccanaagaaggaaaaacctattctaatatttacaaagatgagtggactcaaccttgacccatgggctcagaaatctaccttgaggtttatgagaaccctatggccttgtttggtagctctagcccaatcctcttggagtcttct

SEQ ID NO: 25556 - DNA, 476 bp, Glycine max
  unsure at all n locations
nngagttactgagcctagtagtacngncaattaatctagcacccnncntccctccagtcnacccgcacggctggcatcctagcgattgtttttctttattatgtacaccccancaggaggggttagggtacgcattcaactacagtgaaacatattccttctggcaaataacagatctatcaatgaataccaattggattcattgataccgatactgtacatcagctgaccatatcagtacacaaacactaccacactcatctatagaggtctgatcataccatggaatttgtatcttaaaacgaatatgactgtcactttatgccttagatacaatgaacaaaaccatcttgtcgtgatcctgctacctagacgactcatatatccaggcggatgtcttgccaaagctaatgagcacttgtgccaaatctacacgggcaaaacgaaaaaagcgctcatcaccatgcataaattat

SEQ ID NO: 25557 - DNA, 350 bp, Glycine max
  unsure at all n locations
agcttgtgcttatttctctgactgtcatcctggaactctgcaattcgaagcccttgctcatccaatatagatttctccttctccaactcaaaatctgaagagacgaatgaacacagagtcacgaaatcatcgcaattgcagcaattgaaacaatgcggcaacacatcacagattagagatcgtcaagtcgattcacacacgcggaaacacganatcagatgaaagctatgaaaatcgacggatatttggaatgagcgaaacgtggaagtgaagtttctgtgtgacctttccagatggcggagacgacggagatcggagaataggatggagcggtggatatatctcgctcg

SEQ ID NO: 25558 - DNA, 425 bp, Glycine max
agcttgtattatgcttcaatggaggaaaagaaagagggagagaaagagagaggggggagcacgatattgaaggaataaaagaggtaaagaagtggaactttgaagtgtatctcataagactttctttcatcaaagttacaacaagtgttacacatgtttctatttatagactaggtagcttccttgagaagctatcttgagaaaacttccttgagaagcttctttgagaaaacttccttgagaagctagagcttagctacacacacccctctcataactaagctcacctccttgagaagcttccttaagaagattgctaaagaagctagagcttagctacacatacctctctaatagctaagctcacctccttgagatgagaagctagaacttagctacacaccccctataatagctaagctcac

SEQ ID NO: 25559 - DNA, 340 bp, Glycine max
  unsure at all n locations
agcttcttctctantttctataaatagggggagaagtgaagtgaacaagggttcatccccttacgcacttctctctctttcgaatgagcacggaaaaattgtttgcgtgaagaacatctaaaccgaggcgcttccgaaacgtttccgctacgaatttcgcgaacgttgcaagcgtacttcaacgatcttcatacgttcctcatcgtacttcagtcttcaacgggtaaatacctcaaagcaagcttttcgactcattctatgtacccgtggcggtccacattgngcatcgtgtattactattctcgaataatatacggaatatacccccttctgatgtgct

SEQ ID NO: 25560 - DNA, 428 bp, Glycine max
agctttatctttgtcctcaggcttcatgtagacttgtccaaaatcgcgaagtgaacctcggatccctgtcagatacaatactagaaggaattccatgcaaccttactactttcttgatgtacaactccactagcttctccattctatacttcatattcaccggaataaaatgagcagatttggtgagtcgatctactatgacccacacagcatcatgtccacgactagtcttaggtaaactagatacaaaatccatagatatgctctcccatttccattccgggatttccaatggcttcaattctcccgatggtcgctggtgctcaaccttagccttttgacatgtcaaacatcttgctacatattcagctacatctttcttcatgccatgccaccaaaaacttctcttcaaatcttggtacatctta

SEQ ID NO: 25561 - DNA, 411 bp, Glycine max
  unsure at all n locations
agctttatattctaatatatnnctttacttgagattcacagtgcagatcaattaacattataccaattataattatttagttataagcttttatgtaacatttcacaatttgttctttataaaggattgtgatttttaatacaagttactttaattattcaacgttctacgtaaattatatatagcctctccaagcctaacacaacaatatttgagctcattttgaatttgaaataataacttaagacttattaattgaatgaaattggaattatattttcaattatacaatgatttgattttactattttctggctatgactattagtaaaaataaacttgatattctgatctcttaactggacctaacgttttaagacttctaatactagtaaagcttttcttaaacaa

SEQ ID NO: 25562 - DNA, 405 bp, Glycine max
tagcttggaattgcatttgggcacctagtttgaatctcctatgctgtacctatatataagaaacagtaccactctcccaattttacaaaatcatattcatacatcattggggcatttcaccgagcacttggtgagcacatgtttggacataaattgcaagaggatggggacaatgtggcatgccccattgcttcagaataaagcataggcctaaggccttctcattcaaatcctcaactcaagaaaacaagaataaaaacaaaccaaaactgccccgcaaatataagcacattctcacaatttggagctccaaaagatgaagaaaatataccaatgggaagctaaaaacatcaaggattgaatacttacttgttggagtgaataatgacaccaaaaatgaaagca

SEQ ID NO: 25563 - DNA, 264 bp, Glycine max
ggaggattgtgcgtaacgtgggaagggaagccaagattagatacttggaaatttagaacaaaactttggtttaatcagccgcagatttcgatggtttatggttaatgcctgtcatatgtatcaagcgtatttcaccatgtgttaatggaatggcttctacaagacagccaattgctagaagatctgcttcagatcgaagcataccatgagtcctccttttatgagagatccacgttaatattatctctttgcattattgagaca

SEQ ID NO: 25564 - DNA, 385 bp, Glycine max
tgcttaagttatctttgagtcatgccattcagacgcctgagcagcaccattttctcgtgaggatgctatggtttgattacgcgatacaatatcattccggccaatctaacacagtggcggatgcatcattgcgggtcaatgaagataaccaggcgtctatatgtatgctgaccatgccacaactatggttcatggaagatttactactagaactcacacatacgcctgttttcaaagaattatatcagcacattcaagcagatcctacgaagcatccacatcattcatggacatcgggcttaattctacataacgggcgcatttggcttcacccaacatcatcattcattataccactcctcaaagagtttcataaaacaccagt

SEQ ID NO: 25565 - DNA, 319 bp, Glycine max
gaggagcaccaactaatgatgctgatgaggcagcccctgacccagaagacgagtgattcttacaatactgcacactattctcatacatcctttccaacacatagtgccccaaattcccatttgcctccaataaattctcattgcacagaaactcactcgcacaaaccttctccactttcccatagaagtcatgcaagaagacatgagtcttatggttcccaccctttttgctcctggcgagaacaccaacggtgaatatcgctgacattctgccaggagcatctggccagtccccgcgtgtgccgtcaaccaatatgac

SEQ ID NO: 25566 - DNA, 431 bp, Glycine max
agcatggaacttgttttttgaattatgggtcctcttaaggactgagtcaatatatttgttgactgatcattagaaccaatgaacttagtgacaatctccttggacaaaagcttctctcgaataaaatggcaatcaatctctatgtgcttaatcctttcatgaaagactgggtttgaggcaatatgaagagcagcctgattatcacaatacaacttcatttgcaactcttcacaatacctcaattcttgtagaaattgtttaatccacgagttcacaagtaaccatagccatagatcgatatttagcttctgcactggaccaagcgacaagtgtctgtttcttgcttttccaagagataagaattcctccaatgatgacacataagcctgatgtagacctcctatccatgggacagccaggccaatcatcat

SEQ ID NO: 25567 - DNA, 334 bp, Glycine max
gatttgtctttatgcattcgaagtttcacacaatgcactcataagacgatctgatatagcattttagtagtacatttaagacattcatttaataactatgtctaaaattattttatgcagaaaacattctcctaggatctatcaaaatcctatgaagaataaacgaagcccatagtctagaagacattgattctcattaaaaggcatgctttattatcgcagaccaactattatgaaagaagtggcttctctattgaagtataaagcacactaacctatctacatggactttgcatgaagaaaagatgtgcatttaatgcaattattaaatacc

SEQ ID NO: 25568 - DNA, 409 bp, Glycine max
  unsure at all n locations
agcttatcattatgaagntatctattatcctcttcgggtgtgcacccaatctatacacaaaaagcatcaaattgaaaaatcactcattataataatatcacaacaattaataacatagttggtgcatactccttatcaataacatcttagaaaaagagaggctgttaaacccaaagaaagacttgttaattcaacgattacttaactcacatgaatagacaggtttcttgggtttatgagcaacaacacttgaagactgagcattatatgacccttaactcttcttgctctttggtgtcattgcatcaccaccttgtatattgattctcatatcgtatcattgtgtgccatattttcaagatgaaaatatgttacctttgtttgcattcctatgaaatggttagtatac

SEQ ID NO: 25569 - DNA, 625 bp, Glycine max
  unsure at all n locations
cgacccacagcacacacaagcacacaagatcacgcaccgatgnacgacaaanaatcaatatnaaanaaaaaaaaaggaaccccnctgatgccctcgtagnacctacanannnacncnagnnnccngnnagagngaccnngnagnannagacaggcagggacaagcggagacgagttcttctngaagctctcgccaccacaccacacacggagagagaggcgcgagngagcgacgatatggtcgacccacacacaaccnaacacaccacagcacaacgcacgcgcagcacacaggaccaagcacagcacacatgacgacggacatcacacgcgggccacaagagagaaccacacgacacgaaatgagcgacccacaccgccaccaatgcacgagggaaaccgaccaggccaacgcaaccgaacgacacacgcccaaccgaaccaaagacaccacacaccaacccacccgacnaaaaccaccacaacacaacgagacaaccgcctccagccctccacgacgggcgcaacaacgaacacccacgagcacaccagggcgacccccgcccaacaggaccaaagcaaacgccccaccaccacggggaccccataccagcacccccccaccc

SEQ ID NO: 25570 - DNA, 354 bp, Glycine max
agctctttgttattttgaagagtctcactgaaagagtagcacctactgtttatttttctctcgttatgggtcacagacaatgtaagctgtcacatgactccacgtaccacacctcctattaggctctattcagttaattaagcggttcattaatttactgtgttgcttgtatataatttcattttaagaacaatatgaaatgtttacttaatctaacggtaacaaattccttaattcgtggtcgttttgctctcattttgagactatctcactcctaatcactttaaaggcttacacgttcagcacatttactatgaagtagagtatatactatctcatagattacctcattta

SEQ ID NO: 25571 - DNA, 386 bp, Glycine max
agcttgtagttatttggtaagtaggttgtatgactctgcccaattactatataccttctcgagcgcccattgttttgctagccatgcatttcaatatgtgatggtgtatccaaactcttgtctaatggatgcgatgaatgtacgaacaattagttgctcgttttcttcaaccattgcaaggatattttttcctatgagtgtggaatctatcttattatgatcttgtgaaatggtaggcatgacgcatgtgccaagactgtcaatcattctaatttcccaaacttttaaatcctttcgttcaaacgttctaagtttccattggcacccctcaactcggcaacataagacccatgtatccttcgtacacctcttgtatttgaagtgac

SEQ ID NO: 25572 - DNA, 427 bp, Glycine max
  unsure at all n locations
agctttttatataatgttcgcataataacataatgatcccaggaggaaaattgaaaagactaaaaaagttctagatatcaacaatcaactaaaatacagatagttgcatttctgcgtcgtctttcaagagattgggcaacctcaatttcaccaagagccttcacctttgagtatcaggaataaactaatgtcaatggctaaacaagcaaatctaattataagtttatttctagaataattacaaatgacagtatataggttatgtatattgtttaactcatcaacaaaaaagagcattttgtgtaaattaaaaagggcatgaaggttgaaaagacaacatgtgttctgtgcatttatagacacactactagaanataagtctttaatatcgattanttaggacttttaacatcggttattaaccgat

SEQ ID NO: 25573 - DNA, 406 bp, Glycine max
taatcttaacattataacatatgaagaagagaggtacaggccatcaaagtgtgtcattggagaataagacaggagattcaactgtgctgaagataggagattcggctaaagttgtgataaaacaagacatgaagggaagaaggcatatatatgggtttaacaacaataaacgtgagaaaccacagaaggtaagggtggtggatgatgaaactggcgacaaacatcagctggatgaagtcctaaggatgccatctacatgtgtatttctcaagatatagtatttatattccattatgcatctattgactgctgcatacatgtaatagactttttttaacatgtttgccccacatcaaatcataattcaatgttggctacacaacacgtcactataatttgctatgta

SEQ ID NO: 25574 - DNA, 418 bp, Glycine max
tatcttgagttatatgaagaagacaaccattgagagcccatgctcttccatggattcatcttcattccttaccccttcatcttttacacccttttgtacaattgagatcttcatgatcatgaatggctaaacaactcattgtatatggagttttcaaccaatctctcttgatgcaatgactctcactatctatttaatattattactagtttcattgttcctttgtgtgtatatccatgtgtttggactgatcatgcatttatatgctgatagggtttaagcattggaaaatgtggataatccttaaaacttggaagagcatctaaaatgcttccttgctagggatagtgtgagacagtttaattgaattgacatctatattaatcatgcagttcaactaattgagttctcgagggat

SEQ ID NO: 25575 - DNA, 386 bp, Glycine max
  unsure at all n locations
agctttgagtttattaaacgtcactaactntntactcggatgtcgaattgagtcacgtaatatgtccagacgctcgcaatagaataccgaagctctgagcaaattcaatcgacaataaatttttactcggatgtcggattgagtcacgtaatatatcgagaagctcgaaattgaataccgaagctctgagcaaattcaaacgacaataactttttactcggatgtgcgattgagtcctgtaatatgtagagacactcggaattgaataccgaagctatgagcaaattcaatcgacaataactttctactcggatgtcggattgagtcacgtaatatgtcgagacgctctatatagaataccgaagctctgagcacattcaaacgac

SEQ ID NO: 25576 - DNA, 348 bp, Glycine max
tatggagaagcacgaagcaattgtctctaaataagggtgaaatccaaatacaccttaaaaattcaaggtggattgacatgcctcttttttgccccagttgcacgtcaaaaacaaaaggcaagttcaatgagggtgttactatgtgcacccaacaccattgcttgtacatccaacaattcaagtgaagtggcaaaaatatccttcacttaaatcttaaaacccctccctcctaccttgcatttgtatgccgcaccagctccgttcttgcccttcttacttacgtttgcgttatgagccatgctgccacagataaggccaactccaccactgttatgtcattattgacgt

SEQ ID NO: 25577 - DNA, 372 bp, Glycine max
aatcataataaagtttcagagatgactaaatgcacatacaaagctccttctctattgaatcagatgacaagatttagtttagtgcatggcatgaactaaggttgggatttttaccagtagttaagacctatgttgatatggaagttgttaattttctgaataacattaaacaagagaaaattaaacaaaattcattggaagtgcaaataacgaatgatgatatggaggttgagatagggaagggatataagatgggagagaatgtgaatgaagcagaatagggaagttgtcttattatggtgcactagacgagatagagagactcatgataaagggttctcctaacttattaataatcttatgcaagagtat

SEQ ID NO: 25578 - DNA, 339 bp, Glycine max
ttaagctagtctatcctcaagaggatttacgatgaacttatttaagtagtctaacctagaggggctgctaaattgacctgtccacaagagggatttaggaccaagcttggaagattcagtcaactatggatcgaggttagtaatttggctacaatatagaacccaaagcatgataattagagaaacattttattacatcagctggtccgttagaaagacccactctttacctactgctgtaatttacttacttgcttttactgttttagcctacacttattaattttgtctaaatcatcattataatgttttttcacaatgcttattctgaattaccct

SEQ ID NO: 25579 - DNA, 406 bp, Glycine max
  unsure at all n locations
tttaattagatggggtttgttaatgtttatcttaacactatgttgtctaagcttacataatatgtctgaagtttagtacatatgcttgtactacaatttcaagatcctaagatgttgagnttttaattaaaccatgtgtggcaggaaatgaatgttctgagagattggcatactatggtatgagtacaaacctggtgaactatcttctggagcgtttcaaccagggaaatgcaaccgctgcaaataatgtcacaacctggtcaggcacatgctacatcacaccattgatnggagcctttctagctgattcatacttgtgaagatactggacaatctccagtttctcaattgtctattagtattgtagtttagagatnntttttttcttgtttgttgagtccccatg

SEQ ID NO: 25580 - DNA, 395 bp, Glycine max
atcttgagaagacaacgggggaggtgctcttaagagggtatgcttccgaagctatgagattaaccttaagcttgcaggaccaagcttcttatgccatacccagtgatgctctttgatcgagagtaggcacaacacttttttatcttgacaaatcaccaagtgtaatgtcatacagatttccttgtctcttagttgaaaaaagtgaagagttatccttgttatggatgatacacatatccttgttaaaggcgacattgtatccacaatcacataattgacttatgcttagcatattatgcttcaaccctttaagaagcaaaacattatctataggaggataggaaggaatacatactttacctacgccagttatcatacctttctgatccatctga

SEQ ID NO: 25581 - DNA, 332 bp, Glycine max
  unsure at all n locations
agcntatcattattggtatgtngaagnccacatatcaggcgggtctgattcacagactcacgatctccctgtttagatattgaagaaagctgctttactgctattattgtaccatctgataataggccctgcatcatgaacaaggcgtattgtttttttcttgcatcacaattacacaggtacacatatcaaactactgaagcggtgattgggctaacaaatctccattacactttaaccatcatgcacgtggataatttttctctttcattacccacgaaagttatatatgcttgctaactgagacacaatgcattacagagattatcaat

SEQ ID NO: 25582 - DNA, 416 bp, Glycine max
  unsure at all n locations
agcttttcatcttaccacttccagggtgctggaactacttcacatggatttgatggggcctatgcaagttgaaagccttggaggaaagaggtatgcctatgttgttgtggatgatttctccagatttacctgngtaaactttatcagagagaaatcagaaacctttgaagtattcaaagagttgagtctaagacttcaaagagagaaagactgtgtcatcaagagaatcaggagtgaccatggcagagaatttgaaaacagcaggttcactgaattctgcacatctgaaggcatcactcatgagttctctgcagccattacaccacaacagaatgggatagttgagaggaanaacaggaccttgcaagaggctgctcgggtcatgcttcatgccaaagaacttccctataatctct

SEQ ID NO: 25583 - DNA, 398 bp, Glycine max
  unsure at all n locations
agcttttgttattnttttagtgaaacatgactntgtacgttattatctatttgtcaacagttatacaaaatctggccagttgtctataattaagcaataagcatttctggtccacattttattttttactttctctctgctttttatttcttttcanaggtgcaaagtatgggtgttaatctaatttatagatatattaaatctgtccagtcgtcgccgtgtgttaacggtcggatagtttgcactttattttttttaatgcatttcattttggttttttaaaaatataacattttttcttatttcttctctcactcctatnttaactaaaaaccgtgcattggtcgagttgtaacgctagtttgttattatataagtgaaaggaagcataatataaa

SEQ ID NO: 25584 - DNA, 310 bp, Glycine max
  unsure at all n locations
gctttcttttanatctctagccaangaaaagcgaccttgcgtttgcaaaaactttcgagttggctatccgtgtcactctattangatgttccaccatgggtgagtgattttcttgagcgatatataatgcgtagttctcttttaaggatggagctgggtatagttgtttgaactagtagattgtacaagaatcgagattttatggatattatttgcaaattagatataattataatgccagcttaaactggttgccttctggactgatatgatacagtcacactgtactggttacgaaattagaaatgat

SEQ ID NO: 25585 - DNA, 408 bp, Glycine max
  unsure at all n locations
taagtttgcattacccgacncnnnggtgcaaaattgatctgtgcaaacttaacagctcattctttttgaacatactgaataatcagccaggagcttacaagcgtacaagtggaaaaattactcaactcttaaagtatgttctaagtctgagtaatggaaatacatattgcttagtatttaactacaatgtttacttgacggatgagcagttcatcatagctattgaaaggtaacattttctcttattcttaattaccccttaatttgtacatgcattattaaacaaccttttaaaacataaatacttcatcaatattagttctcaagtctaaattaaatgccatgtataatatttatataaaagttggttccatatgggattgataagcgtgtgtgtgtcttggtttg

SEQ ID NO: 25586 - DNA, 375 bp, Glycine max
  unsure at all n locations
ttagcttgcgngtttcgtgaaattccataatggggcggaaatcgaaaagagatgtttttgcgcaatccatgagtttccgtaacttcttcgaaagctaaaaaagagtaaatacataatccgtaaggattcgtaaccttgcggaaggaaaataggtatcgttacgaaattcataaagtttcgtaacgttacggaaaaagaattacaaaaaaaaaataggaagggggtgcatttagtaaacaggggggtgtaaatagcaatctggcccacttgggccctccagaaggctgttgcttctggaggaagcaaccctgctcgcctgtgcgagctgggcggcaagcttctcccctattntgctataaatagggggagaagtga

SEQ ID NO: 25587 - DNA, 421 bp, Glycine max
agcttggactttttttataatttgaggtaaacttctgatgacagctagatgctggtaaacacacaggaaagcatattcataactgcctaaacacaggaaaacatattcataactgcctaaacacacaggcccgatgctggtaaagaagcataaaaaacttgtggaaacttatggtactcatgcacaaaggacaatacactaagtcactaacaaataactgccttaatcttaagtggtgtgtttcaaagtttaacatcacaagattggaaagttacaaacaatactctttttgttaaacttgtttttagttccctaattataaaacattacaatttgtcatcagcattcaaaatcaatgtgtacttaccagctccccaaccagttcttgcaccaattgtttcctgaaaatttccaatgaact

SEQ ID NO: 25588 - DNA, 346 bp, Glycine max
attgtgtaccgtagtatatcgagatgctcgtaattgaaaacagaagctctaagcagattcaaacgacaataactattgactcggatgtccgaatgtgtcctgtattatatcgagatgctcgaaattgaaaactgaagctctgagagaaatcatatgacgataactttttactcggatgtccgattgaatcccgtaatatatcgagacactcgtaattgaaaatggaagctctgagcaaattcaaacgacaatagcttttgactcggatgtccgattgagtcccgttatatatcgagacgctcgtaattgaaaacagaagctctgagcaatatcaaacgacaataac

SEQ ID NO: 25589 - DNA, 311 bp, Glycine max
ccttgacccaggtgagaatgtaatcctaccctcggaagcgaaagaatagaaggagaatttcaataaagaaaagaaagatggaagatttcaatcaaaaagatgcaaaaaagacaagaaggaacattcccaatcaaagagtgggagaaagcaaaaagaatagaaagaaaattcccaatcaaagaatgggagatagtaaaaaatgaagaagaagaaggaaagaaagctcctgatcaatgatcgaatgaaaacagaagaaatgtgcaaaaaggtctttggaccggacaatatcttaacaatacagaattgtcacc

SEQ ID NO: 25590 - DNA, 296 bp, Glycine max
gtgtggcctgtaaattatcgaagcaatctggttgcaattcggatttgtgaaatatgaaacatttgagtccccatattttgtcacgctgaagagcctgttgggccgggataagatatctgaatcagacatggccctcttgcaagaagacttttcgcattgtcatcgacacctgacattctcactttggtgtcttgcgccaagacgaactccgtcctagacaattcttcaacagttcgaaattttagctctatatgaacctcttctcggactgaccagatcacaacacttgtttctta

SEQ ID NO: 25591 - DNA, 514 bp, Glycine max
  unsure at all n locations
gtgaattgagccnctgatgactttcnannncgctcagcccgcgcgcgggatcctgtgagccgcngtgcggcatgctagcntgtancttatatccatcangcacaacgagaaagagacgatgaggatctcacgaaaactcacaagttcagttagatgactttgtcctaccaaacacttaactcggtgatgtgcaagacacatatgtttgcgatggaatcaatgcattacttcgactataaggtatctagtggacccatgactcttcttaacgatgttcaagacttggaagaaaggatgatatccttagctgaagctcttgaagatttagaagatgaacgcaaggaaatccttacacagaaaatcttacttcaaaaagaatgcgccctctgctatagtgagcttgatgagtagaaaaagaagaactcatatctctggatggaatgtcaactttacaataagacttcttctaatctaacatatatgcttatgggacgtgatgtcttataggaactan

SEQ ID NO: 25592 - DNA, 422 bp, Glycine max
  unsure at all n locations
agctctanatggatcttatttgnnatncaaatggggggttggcttttaacaaaattcttattgcatatttctaagtttattttatttagtaaatatgtgtttattctaaaaataaagatgaattgagagtaaaagatagaattttgatgaatgaaatgattaaaaaattgagacagtgatcacttattgaaaatataattattaaagatttgaattgattaagtgctagatataaactagtcttaaataaaattataattctccatgtaaatgagttgaacaaaattataatctctgtaaatatattttaatgtcaaacctaccaaaatttaaactaaccgctcaataaatgtaaattttaaacttaaattaatttatttaattaaaaaataagtttaactacatatttaataaattaaatt

SEQ ID NO: 25593 - DNA, 414 bp, Glycine max
  unsure at all n locations
agcatttacctttantttatatcaancgcggngnnngggccgggagaagaaaannnggcggnnaaacaaaccaaccaagaannngcagngnnaacngncgcaaaaacnnaacatgcgcacngacagcaaccancatggggncancaannaagggcgacacttaacgaatgactaaaaatattaatagtaaaagaaaatagttcctagtcaattaattttctcattagaaactaaaagtaaaaacgtggtcctgttttgggatgatttttgtttctgagttatgaaatttttaaaaataacaattaatctttagtcttagtgtcaaaaacattttatatcagctctaaaatataattaatttcacataaacttaatttaaaagtcttatatcgtattaaaattaatctaagagta

SEQ ID NO: 25594 - DNA, 427 bp, Glycine max
agctttatatatctatcatcacatgacgcattattggcacagaacaagttgctttctaagcaactggagattttaatagaaacacttggtaagctgccaactaagttgtctatgggtcaacctacacactcttctgttttgcaagttacaggttgtaccatctgtggtagggctcatgaaacaggccaatgtactcccactgaagaaaacactcaagaaattcattatatgggaaatcaacagcgacaagggtatactcaaggaggactttcaggcttctagcagggtccatataatcaacaaggacagtggaggacacaccctggcaatcagttcaacaaagaccagagtgggccttcatataggccaattcaacaaggacctaacatattccagagaactactaagttggaggagaccttgactc

SEQ ID NO: 25595 - DNA, 431 bp, Glycine max
  unsure at all n locations
agcttgtgnattctccttcttcactacatgaagaatcaccgggttgagtcttctatgtgggtgtcttactagcttagccccatcttctaaatttattcgatgcatacatatggatgggctaataccaggaatgtccgccagggtccaacctatatccttcttatgcttcttgagaatagataatagcttctcttcttgctcatcagcaatggaggcagatataattactggaaaacttttgctatcatccaagtaagcatattttaaatttgatgacagaggcttcaattctggtgtgggcggctggatagtggtagaaagggatggtttctcagcctgtacctcataaagaaagtcagaggtatgtgtacttcctgaaacatggttagttctatctgactctataaaatcaatctcaagaggtaaaacat

SEQ ID NO: 25596 - DNA, 501 bp, Glycine max
  unsure at all n locations
agagaactanactttgtggtctttgcannacnccagantcagcaagacccgggagactnagagacgaccagcagcacgttacttctcgctcgtgaacaaacnacacgggcggagatggagagatgtaaaaggacgcagacctgtcacggaggcacccagatgcaagcaagctatgccatgcatgtgatcaggtgtactctcatcgacagaacctacaaaacatacacgtacagactcatactacttgactgtgagagagtgacaccatcggcgacgacattctctgctgagttgcatatctagaaagctgagcatgccaataatatagaatgggctctggaacgaataccacgactatgcataagacacaatcgcctgactgttgctggaccacagacagagacctagcactgaggaatgcagtgagaactgtgtacaccattctactacttcggttgcagattgatatcgatacaaatgtgaagctaacagcaatcttcn

SEQ ID NO: 25597 - DNA, 378 bp, Glycine max
  unsure at all n locations
ttgttttcattcatcaancnnnnanggaangcgagcgagctcgtgttgcatagccttcacctaatcctcatcttgcattgcctcgtctatgtgtctgggctcaaattctaagatcaatgcagtattaccactatgatgagtccatatctttttccacttactgaggttgaaccaatgggactatgttaaaagacactcatttcattgcaatgatcttttaattaacatgggcctttggaagcatagaaatgcatgtgttttatctggaaaataaacaacgttgactcacatgttggtcattgatagatggttgcgaaactatacgaatgatgtccgtcccaattctgaaccacaacgagtaatatacaaatatgtcag

SEQ ID NO: 25598 - DNA, 487 bp, Glycine max
  unsure at all n locations
agcgggtgatgactgatngtcatagcannacacgcgaattcagcatggacccgggatcctgagaggcgaccgcagcatgttagtttaggtcatannganacnancaggaagtgaaggagaatggaccataatctttgtctcataccatgtgctggacctgtgactgagccccagctgaaccgagactgagatgcccatgcccgatggccgcaccgatccgcatgatctgtaccttaagaccacctgtgctaactggcggatctttattgacccagtcatatatagccttgattattgagacgtctacaatgacgttgtagtatctgacccgacgcggtcacacacatcagaactcacaacgctgatggatggggaaaactatagccttgcctggaaggatgggatggtcgagaagagattctttgatggcggcgcacgccaggcggcttcgtgacctctcgccacatgtgcctcagggcgatgtggn

SEQ ID NO: 25599 - DNA, 115 bp, Glycine max
agcttcaaattgactctacttatactggcttggtagttatgggtgtaagtaaactcaatcaatggaaaacaatccatccagctaccttgttgctctataatacacgcccgaagta

SEQ ID NO: 25600 - DNA, 400 bp, Glycine max
  unsure at all n locations
ccattccgcgcgtgtattcgccccataacataacccgagccaccatcgaagcggcaccagataagcgtggctgcctcagaggagattaaacaacacatgcataaagttgggcaacaaggaaaagaaaacacaatccgccaaaggcgagtgaagaaaagaaagagacaaagatctccagattttacaagagacgcacataagtgcaacgaacgattaatgtataagacagaaggagtagagcccaacccatgagttgagaggaacaaaagtactagcaagcctctgaaggttcttactcaatataaccctcaaacactctttgagcctctctaatcctttctttcatagcccttttacccctgaccacattacanacccaataaagcccatgtggatcaag

SEQ ID NO: 25601 - DNA, 505 bp, Glycine max
  unsure at all n locations
agagaactagacttcgtagacatgcaantacgcnagnncccgggaggcttanagcgagccgccgcatgcaagcaagcngtttgttatanctcatcanngcaagcangcgagagcgagcgagggangagccaacaaccaccgcccagcaccaccacacgaaggaggcccagccngaagccccaccgtcaccacggggggataaagaaagncnnacagcccacgcaccgcagcaacaagagccacaaccagagaacgaccactcactcgaagccatcatcccctgagctgctgattcttccaacagataattctagacgagatccagtgaggctgctcatcctgcaccagtgctagtaccaactgatgtaccatcttcagtgatggatgcatcttcacctcagcatgcattagactctgaccctcctatcatagagatacctgacggacatccacaccagtgctggctctggacacttcttctcagctacttcaggtatgcatctcg

SEQ ID NO: 25602 - DNA, 354 bp, Glycine max
ctaaccaatatcactaggcgtggctggatcttagagtgatattcattagacttcgcgatctcttgatagacactactcttacacatcattttagtgctataacaaagagactcaagcttgataaatttaaaattgagaaacaaataaaatacatgtatagtaaatgttgaaatatcatgcagacgtacaataatgataggaagattcacaaataagacacatagtagatcaagatcagacctcttggacttcaacaacactaacaattgtattaacttccttgtgttcttcttgcttatcattaactttcttaattggatattcaatctcacatgtgaagaatgagaatgtcat

SEQ ID NO: 25603 - DNA, 463 bp, Glycine max
  unsure at all n locations
aagattgaacttgaccatcganaccgagancagaagggccggaacaaaaaaagagaagaagtcctttatatgtaggcccaggcaaggggagggggggaggggacaagcccaccaccccgcnacagcgcgcgcaaacnaaacaagcaacggnacgcanaagagaaaagacagcccacgccacgaacgacaaaaaaaggcagcacacagacaacggacaggaacccaggaacagagaccccaagccaaaacaacggacaaagaacccaaagaaagggcagaaaggacgggcaaaagccaaaacaagaggagacaacacaaaacggagggccaccggggagccggaggcaaacaacacacaacacggcacgggaacccaacaaagacagagacgggagaccgaacaaaagaaccaccccccgggaacaggcgccgaccggcaagnacggcaggcggcacaccgccc

SEQ ID NO: 25604 - DNA, 359 bp, Glycine max
  unsure at all n locations
agcttgtangttcttgtttcttcttcatcaatggaggggttggcttctcgaagatcaatgttagcggaatggagaaggaagaaacgtgattggagacaccactccaaggacaagatgagtcaagaacaaactcaccaccataggaagccatggataagagcttacagttaggagaagatgagtgaagggagaaagagagaacgagcacgaaattttatgcctcacatgaggtctgaactttgaagtctaatttcaaatgatcagagttgaataatttcacacacaaggcctctatttatagcttcaatgtcacacaagattggagagaaatatgaatctctattcaaatttcactcgaa

SEQ ID NO: 25605 - DNA, 424 bp, Glycine max
  unsure at all n locations
agctttaacattcaacttctagcgnctcgntatattatacgactcagttagacatccgagtaaaaagttattgtcgtttgaatttgctcagagcatcaaccttcaatttcgagcgtctcgatatatgacgggactcaatcagacatgcgagtaaaaagatattgtcgtcttaattggctcagagcttctacattatatttcgagcgtctcgatatatgacgggactcaatcaggcatccgtgttaaaagttattgtcgtttgaattggctgagagcttcaacattcaatttcgagcgtctcgatatgttacgggactcaatcagacatacgagtaaaaagttattgtcgtctgaattggctcagagcttcatcattcaatctcgagcgtctcgatatatgacgggactcaatcagacatccgag

SEQ ID NO: 25606 - DNA, 416 bp, Glycine max
agcttatagatgctttccaacacctttcccagagccaagcgtccctgaccgaaggccaagctaccctctcccagggccatcactccctcaacgccaaaattgactctatccatgtaaccctttcctctcagatcgagtctcttttcgatcgtcttgcggcaatcactgtccctgtatcttcgccccttccccctccccaccctactcctccaccagtctcacgccaccaccacttgaagctagatgtggcacggttcgacggccatgatcccattggttggatatttaaaatatcccagttctttgattaccaagggatcccagagaacgagcgccttaccattgcatccttctatatggatggtccgaccctctcatggtaccagtggatgcaccgcaatgattactttccttct

SEQ ID NO: 25607 - DNA, 423 bp, Glycine max
  unsure at all n locations
agcttgtcatttgttcttatagtgacaatttctttacatggagctacatgaacctgctgctcgatctagcacgaggagaactcatttgcagcatacacaatcacttagtattatggtagttntagaaaggagtggccgccactgtggttgcggttgcgcactaattcgaatatgtttagcggaagttaacggtggtggaataagttagtcgaacgttccaattggaaggagcaacattccatgcaataatagtctccctggtggtgtatgaagtgattctgacagaaagagcttggccacccagagttgcaaatgcttgataagaagccccccagttgtggctcatgctaatccatccacttctgcttnctttcacagacatgcttgatatgtctcctccaccttccacgttcttcacgtata

SEQ ID NO: 25608 - DNA, 423 bp, Glycine max
  unsure at all n locations
ttcttctntttaccttgacaagcaatcaactcctctntgagaaccatgctatgtgctcgcgactggtccctttcttcctttcgcaacttgagttcactattgctaccccatagagctctgtgaaatttgttccggccatactcttccttgcgagccctcttggtctcttgttcaagggctcttgcggtaattgcattctcttcccgtaacccggcacactccttccgaacgtgtgtagcggccaacttgaacttctccttggcaagttatgcctttcctaactcgcttttgagagcttggacttctttgtcttcttccggtgcttcaaaattctcttcgctgacgacttttaacttggcgagccaatctanacctcgtatatgaactttcagccattcgtggtacccaccaatgatgccatta

SEQ ID NO: 25609 - DNA, 414 bp, Glycine max
  unsure at all n locations
agtttctccttcaatnncnataaatagggggagaagtgaagtgaaaaaaggttcanccccttatgcacttctctctctttcgaatttgtttggaaaaattgtttccgtgaagaaaatccaagccgaggcgcttccgaaacgtttccgtaacgtttccgtgaggaatttcgcgaaggtttcgaccgttcttcgacgttcttcatcgttcttcgatcttcaacgggtaagtacctcgaaccaagcctttttgattcattctatgtacccgtggtgatccacattgtgtttcgtgtattnntattctcgtttcgtttacattntatacccccttttgacgtgcttaagccattgtatttaagtcatttctcgcttaacctacaaataaaacanatttccaccgatcgtttgaatcgt

SEQ ID NO: 25610 - DNA, 419 bp, Glycine max
  unsure at all n locations
agcttctcattgaagtncncttaagaaagcttctcaaggaagctacctagtctataaatagaagcatgtgtaacacttgttgtaactttgatgaatganagtcttatgagatacacttcaaagttccacttctttccttcttttattccttcaatttcgtgctccccccttctctctttcttttcctccattaaagcatcctcttcaagcttcttatccaaggcaattcttggtggtgaagctccttcttccttggcttattccctagtggatggtgcctcccctatcctcttctcctttgccttccgctgcatctccatggtgaaaaatcaccattgaaggacctcattgaagctcanagatccagcctccatagaagctccacaagcaagctttcatcaagtggtaatcagagcaca

SEQ ID NO: 25611 - DNA, 91 bp, Glycine max
tggcaccataactgcctaaaaaaattacgcccccccttcactcttccaatactgttgtattcatatagcatctcacgaattggagcctcct

SEQ ID NO: 25612 - DNA, 434 bp, Glycine max
  unsure at all n locations
agctntaggatganatcaattntctatctttnctctcaatggggcttcattcttcttactcttttcacttctactatctctttccttgcacaattttgtggatcttccattgatgatcatggaaggctaaacacttaatcaatccaagtatccactccaagcaaggctaaanttgagttctggtttagtatttctaatatatgtgaatgttcatctttttcttcaatcctatntttaaatttcatgatcatgaacatgcttaggatntgaaaaaattacgttacggattcctttcctaattntgaacctaatcacaaactgtttggatgatattctaacctattttgcgatctcaatgaattanggattaattcgattgaactaactctaatggcattcattgaacactcattaactcatcttctctacaaact

SEQ ID NO: 25613 - DNA, 370 bp, Glycine max
tatacggcaatcaaagcatttattatgctattactgagcgatactgtttttgagtcatcggattgtgaaataggtgagaaaatattaactttttgttaataaatatctcatacttctaatactgcggcacttgattgaggactgcctactagagatgctgctttcagcgattcactgaataagtcgtattttatagtctgcgacgccatgagtccatgacaaccactttgcttgtctttatacaatccaagtgcttatctgatttgattctattgattgaatgatcacaaccttatcctgccttgaccgtaatgttaggtgagatcgccttgatatgataaaggatccctcaaataatcatacttttaaa

SEQ ID NO: 25614 - DNA, 482 bp, Glycine max
  unsure at all n locations
gtaacgtctcaagacaactaacgggaacgattttttaataaaaannnaaannacaanaaggatgtgtttgtgctcgtanacnacaannacaagaccgggaccnnagaanaccgcagcagcaacccagattttttcagcaatncgagatgccgaggccgagtgatagttcaagattcaaatcaacattagaatccaatcgagaacaagatccaaagaaatatcagaataaaaaggaagactcataaggataagataaaaatttttcaaaaccaatgctagtttggtacaaaaaattctaaatttctagtaccgaggatactcctgataatcataccaatatcatattgaaccaagaccaatggtttcaatggttgcacattcaaatgattcaatgtgaatcatacctatatagaacgatacagtaaatgacttggattcaaccaaaggaaagtacaaatttctaacacatggtatcaaaccct

SEQ ID NO: 25615 - DNA, 472 bp, Glycine max
  unsure at all n locations
agagcncccgttgagttggtagncnatcgaacncattaaacncatcaagaaccatgcaagactaacgtcgccatgtagcctcattgttatatcgtttgttcaacaagcccgttgtcatagcgggatgtatgtcatagttaccgctcactatacgcttcatactgacatttgaataacgcagacaggctgaaatacctacaatgggtctacagatatacattctatcgctatctataagacaaagagccagatacgatgccgagactaacgttattttatgcaccgtcgtgcaatctcaacccgacaagcccgttgaccactgagattacgtaatatccgggctccaaatctttatacagacgcttgatcacactgcgataaataacatactgattcgcttaaatactttgcgttttcaaatcaaccttgcggtatgatagtgaattgaagacctatttaccttaaaatagag

SEQ ID NO: 25616 - DNA, 489 bp, Glycine max
  unsure at all n locations
gccagttgttngttttattactgctagacnacanncnannnaganccgggagtctcagagcnaactgccgctgcaagcaccacttttatgttttttataagccccacacgggtggtggggaactataaaagaagctttctcaaaatctaacgctttaactagtacaccctttcaataacaatcctcacttctttaaaatattactggttaaaatctcacacctactcttctttaccgtcaaaactaatagctcagaatatgtaaatatatatatctcggtgaacacgcctatgaagtgtaaagtaaggtaatctgccgcgttggcgtcttctagtcatctacgtatatcctaatgatcctgatggataattctgggctgcacttacataatggtacatgcaggatgcctgtagaccaacgcaccgtatataatgactctatactctgggatcacaaatggtctggtaagctttatactcttatatttcg

SEQ ID NO: 25617 - DNA, 423 bp, Glycine max
  unsure at all n locations
agagtgcctagaacctgcacgtcaacctactancctagaantcccancaccanaaaagccttctagagcatttcactttttcctggccattttatatggcagggaatactctcccggggtcttttactgtcgttgcaactattgagatgaaatcctctgtgaggacctcaagatgcttcacatcttcgatcctaatactgttcgcgcacatgcctaaaaatctcaggtgtagcaggagacacgactcgcataattgaggataacggcatgctgtacctacttttctttacagcgctactattggggaacctatatcatttttgtccggtaagaagaagccaccaataccgccctattatttcggtgtaccgtacgagacctctccattcaatgcagaaaattgtcatcttaatgaaacacatt

SEQ ID NO: 25618 - DNA, 201 bp, Glycine max
atttttctatgtatagttttttttatttttttttgtattatttttaaataattgtttttttattttgcttgttgtgtattgtacattgtttgtttttttctgtattttctttattgtttgtttgttgtacattgtttttttgtattttctgtttgagtttgtttttgtttgttggttattattttctttttcttatttgtt

SEQ ID NO: 25619 - DNA, 498 bp, Glycine max
  unsure at all n locations
cgcacgggcaccaccacagcaacccaaagatcatnataataaaagcnnnnnnnnnnnnnnnnggccggaaggccatgnagcacancnnncnnnnnnnnnnnnnnnnnnnnnnnnnnnnnnnnnnnnnnnnnnnntnttnntnnttnnnnnnnnnnnnngnnngngggggggggggggnnggnggnccccnnnngnnnnggggggggngnnngnnggggggggnggnnggggggggnggnnnggggggnnngggggnnngggggggggggggngggggggggggggnnggnnggnggnggggggnnggggggggggggggggggggngggggggggggggggggggggggggnngggnnggngnnggnngggggggggggggggggggggggggggggggngggggggnggnnnngggggnnggggggggggggggggggggggggggggggnnnggggnggggggggggggggggggnggggggggggggnnggnggc

SEQ ID NO: 25620 - DNA, 412 bp, Glycine max
  unsure at all n locations
aacacaccaccaaagcgacagganaaaganataaaccnnncnaaaganaaggtgactagctcgagacacannaannanngancgggaacaagagaaagaagcacaacattgatagaagaaaaaaaaacaggggaaaaaaaaaagaagaaaaaaaagaaagaaaaagagaagaacgaagataagagagnaaaaaaaaaaaggaaagagaaaaaaaaagaaggagaaggggagaagaaaagaaaaaaagaaaaagaaaaggaaagagaaagggaaaaaaaaaaggaaaaaagaaaaagaaagagagaagaaggaaaaaagaaaagaaaaaagaagagggaaaaagaaaaaaaggagaaaaagaaaggaaaaaaaagtaaaggaagaagaagaaaagaaaagaaaaaagagaaac

SEQ ID NO: 25621 - DNA, 507 bp, Glycine max
  unsure at all n locations
caggcaccattctaacaggaaccgcgaggacgacataaanttaaanntnnaaanaaaanaaggcgatgtctgtgcctcgtagccnncaannaannanaaaanaagggaannaaaannaaagaagaagaaannattgtttattaatttaaagaaggagaggggaggggaagaaaggaaataaatatatatatgagagagataaaaaagatgtaataaaggagagatatgatatggaagagagaaagaaaacataagaaagtgagtgattgataaagatgatgggaaaagaagggaaaggagtagataaagaaggtgaaatagaaaagaagaatgaaagtgaagataggatgagaagatagatagtagagaggaaggatgagataatatgaatgtagggggaaagaagaagnaatgaagggggaaataaagagggaaaggaatgagagaaaaaaaatgatgaaagaaagaaaaggggaagaagggaagattagaaagtaaggaagaaac

SEQ ID NO: 25622 - DNA, 385 bp, Glycine max
agcttttcttgaacccttcgaggtacttggcacccgatgggggacaatacgtaaagttccataatgtgccacaagtcaatagagagcatcgttgcactatccgtgaagttccgtaacatgccggatatcaaaaggaagcattgttatgcaatccgtgaggttccgtaacgtttcaaaagccaaaaaagggatgattacgttatctgtaaggctcctgaacattacggaaggaaaacaagtatcgttacggaattcataaattgtcgtaacgttacggaaaaagaatcagcaaaaaaggcatggggtgtgttcagtaaacagaggcgtggaaataaaacgttcatccctctggtatctgagatcacttgaatcaatgaaaaatcgt

SEQ ID NO: 25623 - DNA, 382 bp, Glycine max
  unsure at all n locations
tcataccctgatattattcatagaaagcagaacatgaganattatggacgggtcaaaccaattatatcaacggaataacactcgacagaatctattagaaggtaaacctatattattatgaagaaaatcctctgtcatgaaattaggtaaactatgccagcatctgaatccaacatttgtaactccaaaagatgccaaaaaacgcatacggctgataacatgaaaacaactatatcaacattaatttttagataaatggttatttgtgtccctaaatatgtacatagagagtgctcacaaattagtcttcctaacattaaattttagttcctggaagaaaaaaatacaacaaattatcccttggtaattttcgttgtaccat

SEQ ID NO: 25624 - DNA, 336 bp, Glycine max
gcaatcatctctgatccctcctctgagcttagagattcagacatcttttcttctcctttaagagcttctgcacagccatgttgaatcaagatttcttccatcttgattctccataacccgaagtcattttccccctgagaacttctctatatcatactttggtgttcccatctttcttgatcttgatcctttgttttccccacagacggcaccacttggtggtgcctttgagaagctctgcaactcttaaacctgcgcaggatcgaaagaaaagataaaatagagtcacggcagacaaatcagcagagcatgacgcagagattacgtggtcgacat

SEQ ID NO: 25625 - DNA, 410 bp, Glycine max
  unsure at all n locations
atctttcttcatcattccaaacttgtcatcattaggcttaggcagcatctccgtaacaaatttatattttataatacatgttacccaacagagaaatagaaggaaaagagaaaaatattagacatacattatgtaatactgttgaaaaaatttcaatcccgattagctaaaaataatgttaaaattaagtatatacaaagtagggtattctttttcctattagtaacttcttgaaattaagttaaataatggtatcacagtctatataagagagggaacaaactcttccttaataaataaatcaaatgtaaactcatattttaataaatatagttttcagacacaatctctattagtaattagaatttattgaaaattataaacatgtgtaatgtttattactntaatct

SEQ ID NO: 25626 - DNA, 330 bp, Glycine max
gcacgttacattcattaatattcaccaaagttgacattctaatatactttggatatagatagattctgccttccttgccatcttgcagtaaagttgaacaccatccaattacaagtagaattcaggtcgaacacatcttcacagaatcgactggtacaattgtcaaagaaacactatattatatgcaatgcataacataagaacatcttattaaaacattaaagaaagaagaagaagaagacgaagaagacaacgtgagagactattgacactctcattgcacactccccactatctacttttaattacaatatccaacaatgtgctaaa

SEQ ID NO: 25627 - DNA, 515 bp, Glycine max
  unsure at all n locations
nccgtggctggagcatgactntcggcaattcnactcgaacccgggatcctctgagtcgactgcngcatgcaacctaaaagtggtgcaattatccaccaacactttggtcggtggtttaatgtggaaggccatctcctagatagccttaaccagggtgagaatggccagccccaagagaaagtggattccaaatttgagaaggaagaacctggccttgccaagaagagacctgagaatgatattggttgaaaaccaaagaagggggccttggtcctatctcaacctggtacctgaagaaggtggtagaatggtatatgatgcctccatcttagccgggtatcacacctttgggtcgcacatgaagctctctattacataaggtgatggaactctatgtggagcctgtaggccctggatcttcttcatcaatggaggcctttgctctcttaagaaaattgcgcccgatgaagaggaanaaatatgattgagatgccactcaggagaagatgagcaan

SEQ ID NO: 25628 - DNA, 382 bp, Glycine max
ggattatcagatgtttgtaatcgattaccagtaacggcacttcagaaaatactttaaaaagtcatgacccttcaaaatataactgtgtaatcgattaccagaaacctgttatcgattaccggtgataaaatttcaaaaatactttttgagagacacatgtcttcaaactattttgaaaaggcacgatgggcctatatatgtgtgtgtgtgtgtgtctgactttaaaaagcaagagagagatattctatgagaactcaattggcaaatgctctctcaacaactcttgggcaaacacttacaaatctattgagaattcttctaagatctttaatgtgtatcatctactctaaaagagagaaatctttctgttcatcttgaactc

SEQ ID NO: 25629 - DNA, 432 bp, Glycine max
attcctcaacctcacgcacactctgaactttgtgaattacaccacacaacacagacaatatctcaggctcaatctcaagtacgtattttttcttatctttcttctttcttttctctccaataccttaattacattcatttgcactttgtctacacttattcttcgaaattagcctctgcttcattgaaacccctttctctttgtttgcgaaaatcatattcactttttttttcgcacacgctcaaccaagtaaaccctaattacttactcgcataaagtattgggtatagccacgtatgaactcctacaagttgttgttgcttctttcagatttccttgtctatattttgcacgcgctgctgttaagttttgaagcatcaataggctgcacattgggaattcgattggaatgtatgcaatatttctcagcta

SEQ ID NO: 25630 - DNA, 344 bp, Glycine max
  unsure at all n locations
agcttgcactctatttactaaatntattttctacacaatgaagtgattaactaactaactaactaaattccactaatatatagagtgactactcaaaagtaagggatgtgccttgattaagcccatctaatctatctaattaaaccaattacacaaaataaagcccaaactcgtagcccaattattcaagtgcagatgttctgacttccaagctcaatttaaccctcaaaatggcagaatcggccaaatcttatttgtgaaaaaattgaacctctcgttattagttnttgatggactactcacacgctccatttggagttctgtagtgtcctataagccctgca

SEQ ID NO: 25631 - DNA, 434 bp, Glycine max
gacactctcttggtggtgaaacttctcctttttgacttattctctaggggataactcatcgtctcacctctacttctttatctttcgctgcaattccatggctgaaaatcaccattgaaggaccttattgaagctcaaagatccagcctccatagaagcttctcaagcaagcttccatcactatggttctagctaacactactaaatatatcgtattccacgacgcgcatttaaagtcgatcatcacaaaaccgtcattgtttgggggcggcgacatttttgtaaatactggcaacatattaaagacgactatctttaattgaagctctctctctaagcttcttatccaagacactctcttggtggtgaagcttatccttccatgacatattctctagtagataacacatcctctcacctcttattcgttatct

SEQ ID NO: 25632 - DNA, 443 bp, Glycine max
  unsure at all n locations
agcttcacaattacttattatatctgaaagactgagctcagattggattctgattattnttgtgtgaccattatttagtcaaactcataatataatagtgtagcttcaagtttaatccaaactatgtttctgaatcaagagtaaataactatgattgagttaaatgtatatgcattgaacaacaaacccatcggccatcaccacttaaacaagaattattctttgttatgataacagaccaacctctcccaatgtcttttgtactcattattccaaccatgtatttaagacaaaaaccaacaggcaaaaatatgttaaattgaataaaaattaaaaagagaagaccaaaagctntttaccctgtccaacattgcagcctcctcagcgagcataagttctctagcagctacatctttcaacttcttttcatatatntcttaaca

SEQ ID NO: 25633 - DNA, 399 bp, Glycine max
  unsure at all n locations
actcagctcaagcttgggtcatgtacactaggctangatcatttttctatttcaatcaacccaggtttcaaaatatgctctttttcaatttatgcacacatccgagcccatttaggcattcggaaaaattttcacggcattcacccttcagatgtacacatattttttctttcttttttttgtaaaccttttttcaaagaanaattggcagtcacttctttccaaaagcgtcttggctttttagtcaaaatttaactttttattttcaaaaaaaatcctttgcaaaatttgactaccttctcggtctgcgcttgtttatnttaattcctaggattatgaggaaactaggcgtactcaactaggacttaagaaacataggtgaataactaacaagaagaa

SEQ ID NO: 25634 - DNA, 439 bp, Glycine max
  unsure at all n locations
agccttggagttttttagttccaatncgncttcttctttagtccagtcttcttctggcttcaattcttcagtgggctttccttctgtgtccagcatcttgggatgttcccagcctttgatgacagctttccaaggtctgctatccaatgatttgaggaaggccaccattcttgctttccaatattcatagttgcttccatcgagaattggtggtctgttcactggtccgccttctttctccatgttcatcagaaatttatctcctagatctcactctgtgatttcgagtgttggctctgataccaattgatattctgataccagnggacagatgtcgtacatgatgtcacgacatcacgcttcagaacatgcagattatatgtgtccgtatgaacagattaaacaagttaataacacaggagaattgttacccagttcg

SEQ ID NO: 25635 - DNA, 423 bp, Glycine max
  unsure at all n locations
ggcgcgactccttttacatctcctgaacctanatttgnttgttgttgggtgagccctttactcctcagacgccatgaacaacaaaataacaataaaaaaaaaccatagtatacaatctacgtaaccattacgtgtggttgtttaagcaaacaatactctcgcatcctaagcgcataactattccacttgtttcacaatagggtccaaccactaccaccaaacctcccaggtcatgatggttntacacttttatatggatgaaaattgagagtgatcaccacatacagatacaatgtacatcaatcctcagcccccaactcaaaaagcatagtctcagaaccagtgaggaatagcanagtgaagcctgtgagctccccgcgccaaatgagtgcaccaaatgtcgagtagtcaccattcactaat

SEQ ID NO: 25636 - DNA, 403 bp, Glycine max
  unsure at all n locations
gctcgcacccgggatcctatgagtcacctgcngcatgcaagctngctgatttggccactagagccaacatgagtncaagcagttcattaagcaggtggcctgcccggactcgccttttttgtagtgataatggaactctacagccagcacctagcagaaaagccagaaacaatcaatcatctgaagccactgttctggacttttatgtgcagaagagatccaaatgaattgaggaggctgttatctgaccagtaccataccgctgatccaccatcttagggggaccatctttccgcccagaacagcttccattacacatatatatcatgaccctacaggcacaccgatggttctctctcaccaaccgactcattttatatagaagggaggaactactctcgac

SEQ ID NO: 25637 - DNA, 399 bp, Glycine max
  unsure at all n locations
tgccacccagctcgcccaggcgagcaaggttgcttttccattagcaacagccttctggaggaatcttttggagggcccaagtgggcctggttgctatttgcacctctatttttactaaatacaccccctttgccctttttttggagattcttttttcgtaaagttacgaaaacttacggatttcgcaacaatacttgttttctttccgtaatgttacggaaccttgtggattacataatcatccncttttttgacttacgaaatgttacggaaccttactaattgtgcaacgatgcttccttttgatttccggtgtgtcacggaaccttacggattgtgcatcaataccttcttttgatttctggcatgtcccggaacttcacaaattcccaatgatgg

SEQ ID NO: 25638 - DNA, 371 bp, Glycine max
  unsure at all n locations
agcttgtgttctattatatataggacatgcatgatgtcctttgacactatatccacttaaattgccatatgctaganagtcattaatagtacaaaacaccattgagtgtaacctgaatgtctcttgcagatgctcatcccacacatcaaccttgtctttccataattttctcaagtcttcaatcaacggagtaagatacacatcaatatcattccctgactgccttggactcgctatcatcatacataggataatgtatnttcacttcatgcacaacgaaggagggaggttgtaaatcatcagcaaaacaggccatgaactgtggtttgtgcttaagtttccaaaatgattcattttgtttgaagcaagag

SEQ ID NO: 25639 - DNA, 345 bp, Glycine max
gatcaagagcaaatattgaaccattaatgtacgtttggatatggtaattcaaccgagtaaatcaagtagttaatacgtttaaattatcatataatttgttaagttgtttcaatgaagtattctaagagaatttgaattcacgtcattttgaacaagaattctgatcacctaaaaatgtgggaattgaaattacacctaaataagagaatttgaaatttttctctcacctctgcacatgactattctcttaagaacctcgttctttctctttcacgactcaaccctgtctcttgtgtgactctcattctcctttcagtcttgttctctcttactcaatttgctctc

SEQ ID NO: 25640 - DNA, 415 bp, Glycine max
  unsure at all n locations
agcttgtatttaccttccactacatcaattgtacctatctagctacttatatcctgaatcaaacatgaattagaaaagaaagttaacttgatatagagattaaattgaaattgaaagatggcaagtataacacatctactaagtgtaaaaattcaataaatttgactgttccagagtgtatggctatgacttgttgactagcaggcaggcgaactactatggaatttatttctctatatgtagaataacaagtcaatgaggatgcaatatgatctgtagcaccagaatccaaaatccatgttgtagcctcaagcttgtgagcattacaaataagggatagtatatattacctatgctngatgtatgagcagaacttgtaccaatctagttaacttgtgatccacgagaagctata

SEQ ID NO: 25641 - DNA, 353 bp, Glycine max
  unsure at all n locations
tatcaacttctaccagtggatacaaagattnaagtaccattttcataaaaatatcactaagcagagtactagcctaatatatttttggcagatacaaacaacttaattgaaataccaagcatctataattggacagaaccattcaattacatacattttatagaagataacactgaatcaacatatccaagccaagataacattgaatcaccctagcttatacaaaatagataatttcataaaggaagcccgctaagcgaattntgtctcgctaagcggccaatgtctttttcagttttatttctcacgttttaaaatttgaataattgtgtcctgattaattgtttgatttc

SEQ ID NO: 25642 - DNA, 379 bp, Glycine max
  unsure at all n locations
agcttttcttcnttttgattgcaagtggtggagtgtaaagtgagatacaatgaaacttaaacttgagttaagggatgtttacattgaggagatcttgatatacataaaggtagattggaagtaccaaatgtctggataaattaatgaaatattatttttgtttaaccaaatgtctcaagtttaagttcttggtatacaattaggttaaatatttgaagaaaaataattttatcatttataataattttatgtaactcaaacaaaattatttttagtgaaggaaactttatgaccatgaggctagcacaagaacctatgccaaataactcttgcacaaaatcactatcagattcattttttctattattttctatgtgcg

SEQ ID NO: 25643 - DNA, 370 bp, Glycine max
  unsure at all n locations
tagataaatggttaatcaattaaaatatctatttattttctaaaatattattttactctatgtattttctaatattatgaaactcttattttaattaacaaaaactttttcctctcatttatttaattgttaaaactctattaatttttaaataaattctttatttatttttaaaaaaatgagatattacagttcaggacccattagctgcgcaacgtctctcacaaagcttttacaaaggttttggcgtcaaggtanagggaggtgatggagaaaattgtgagtccttgtgggtggcaatttgctccccacagacaaagcaaggatagtatcgttattacccaggaagtgaccactctatgagaagtag

SEQ ID NO: 25644 - DNA, 433 bp, Glycine max
  unsure at all n locations
agctttattttgctttacctaaacnatgagctctacgtggttgtagcttcctataataggtataagaataggatcaaagcttctactttgacaatcacagtgtcaaggacttaactgatgacattattgcaaattcaatgttttgacattccttaattttgtaggtactaccaatgggaaacgggcaaccccaaatccagaaatgggttctacatctcaaggggaacggaagaggaagcggttagcaaccgacggagaggaggaaactttgccaagccaattaattgatgtcttataaaagaatggcaaaatgctacatgatcaacttngagctcanaacctgaatgtccagtggatcgccaacagcagatagacactgccagaacatanttgctgactcgataagctgcaatgctctaggagaattgtgata

SEQ ID NO: 25645 - DNA, 271 bp, Glycine max
  unsure at all n locations
atgcatactattcttcgtattgatataagcccccatcacatggaaaaatcaacaacccagcttaatattagagctgaaatgacatanggaagatgatgtctactggtacaattgactggaataggtatcctacacacttttgacacagacaaacgagttgaaaacggtaacttggtctagatatattacttgtgcgattgagtctgacattactattcattttcatttatggacaaagaaattaatttacacaagattagccctttacata

SEQ ID NO: 25646 - DNA, 518 bp, Glycine max
  unsure at all n locations
acaccgccggactgaattcagttcgtttcgnanncnccggnaannnancncggacccgggatccgcagagccgacccgccgcacgcaatcttaactttcaaacaaagacgacaaagggagaaggggngagtggcgacaacgacaaacaccgcgcatgcggcnctcgaaaccacggncgccatcacaaaacagagggagaagggagaaccaagcttcacgatgatgaatcaaggcgactcaagaatgctcgaggataacaaagacgatgaccaaaagcccaacagaatgagctcaagactgcagccacaagtcgcaagaatcaagagaagctcgagcacaagatgcaagagaagatgaacgcaagattcacgacaaacaaccacgaggactcacaagggaagcaccgagatatctctcacaaaccaacacacccagatgcgtccgcaaagaaggcacccaaactactaagcaccagagctncactctcaggcatccgaaaccggtccctgtgaccactc

SEQ ID NO: 25647 - DNA, 245 bp, Glycine max
  unsure at all n locations
aaaaaacttaatggctgagagcaactgacangggggcaaccaaaagncacccccaacagccaacaagtcagccaccatgtggtcttccaaaaagctgatgcctaagttgccaattgggcccttattacaacttgaactaaacctaactaaagcccttttaagtgattaacccacaacatatttttagtcacgcaactttacaaggatttggccattatttaaacaaactaaacactctataattg

SEQ ID NO: 25648 - DNA, 179 bp, Glycine max
  unsure at all n locations
tcntattttantttcactaaccaccaaggatcagaggggagcgatttttcacttccccctatggacataactatgaacacatattgtatctttagcttattccgttgttcttatatacattttccaacaaccctacgacgcggaccaaattccagttatccccaatatatataccctct

SEQ ID NO: 25649 - DNA, 383 bp, Glycine max
caagaggaaatatatttgcaaaaagtggattttattgataaaaacaacatccattcattaaaaagcttaaccatgaagcaaggaggcagagggagaaacaaaagcttccaaagccatttgtgaagaaaatccaatttttggagctctagccaatcccgttcactgtatttctcttccattttcttccatttcattccaccttttatatttgtaagtttctcatgaaaatgagagactaaaaccacctgttattagaagcctctgcaaccaaactctctttaatgtaattactctaaactatctattaatatgatgttgatattattgctctttcgtgtactcattcacatgtttgtggtctgatcatccattttcatgaacta

SEQ ID NO: 25650 - DNA, 368 bp, Glycine max
  unsure at all n locations
agcnnaatgtttattttaatgtaatgatacgtaaacattaagaggacgttattgaatatatataagtaatatatatatattaatgtttataatgcatttaattacttacatatatatttaatgtgtttaatcctttttatgtacttatatatataatatttatccaatgatatgtttatgattattgttattattattattattattatatatatatatatatatatatatatctagtattacctataacttgacagcggtatgttatatatatttgtttataagtcttgaagatacatgtgtcatgctattattattatacatatttatctaattgctaagtatatattataatatagttaattgtg

SEQ ID NO: 25651 - DNA, 373 bp, Glycine max
  unsure at all n locations
acatgcacaaagtgtgactatatgatgtggcaatgtttgtgtattannagcaaatgctcacctctccctctaaanatgtgaattggatagagcttctaccaacttcacattaaatttatttccaaccatacacatcaaatattcacttagtgcgtgtgaaattacaaaactacccctaatacaaaaactagtcttggtgccctaaaatacaaggactgaaaaatcccatatttctagggtaccctacctacattatggagccctaaatacaaagaccaaaattaatgaaaccttaatctaatatgtacaaagataagtgggctcatacttagcccttgggcccgaaatctatcctaaagctcatgagaaccct

SEQ ID NO: 25652 - DNA, 451 bp, Glycine max
  unsure at all n locations
agcttaccttctgatgtatatgcctaaccaaccatttcctcagatgaggtactccaaatactctatgatgttaagcaaccaaaacctagcatacattntgctttaaaattaagactcgtcgctctctcacagcacaaaaccctagtttcttcataagagaaaattggttccactccccattggtggaaaaagttgaaatccgtagagaggtcgaaacgtactatactagaaaatcagaaaataatgacaactttgttaatatctttaaagtcaaattaatacgtaatctctaaagtttattagatattaattagggctctttaatttgaattattaatttgaattttataatntaaatntattattatattcttaaaagtcaataccattaagcttacattannatatattacatagtatttctatattgtatacacatantttaaataat

SEQ ID NO: 25653 - DNA, 426 bp, Glycine max
  unsure at all n locations
cccaagaaaagttaaggtctaaaactcattcaatattggtcctggtttcccatcttccacgtgaatgagctgcttacccgaatacattatatcttctgacattttttttgttatttttcaattatctttaaaagttttatttttgtgggtacgagggtatgacaagattttttttccttccccatttcctaaataaatagtaaatttttaatattacttatcttatttctttattttctattatttttttgtcctttgctttaaatcatcacgtggaagtggaagtgaatctaataagtttagtaatatattatttaattcatccaataagagaaatatattcccacttaaactttgtgctctaaaatataacatacatangatatgttttaatcttataaactaaccgccgtttattttactact

SEQ ID NO: 25654 - DNA, 416 bp, Glycine max
  unsure at all n locations
agcttgccatctagtctccccaggcgagcaaggttgcttcctccagaaggctgttgcttctggaggaatcttctagagggcccaagtgggcctggttgctatttgcacccccatttttactaaatacacccctgtccttttttggtgattcttttttcgtaatgttacggaaacttatggatttcgtaacgatacttgttttcttcccgtaatgttacggaactttgcggattacataatcatccccttttttgacttacggaatgttacggaacctcactaattgtgcaacgatgcttccttttgatttccggtgtgtcacggaaccttacggattgtgcatcaataccttctttngatttccggcatgtctcggaacttcacaaatngcctaatgatgggtgccaagcacctca

SEQ ID NO: 25655 - DNA, 461 bp, Glycine max
  unsure at all n locations
agatactcagctagcatcctgaagacaacttctatgatatatagacttgttgtttatgagtacatggctaatggttcattggataaatggatattcaacaagaacaaagaggaatttcagttggattgggatacaaggtataacatagcacttggaatagcaaaaggacttgcttatctacatgaagattgtgactcaaacattattcattgtgacattaaaccagaaaacgtgctcctagatgataatttcagggttaaggtttctaattttggtttggctaagctcatgaaacgtgaacaaagacatgttttcacaacacttagaggcactagagggtatcttgcacctgagtggatcacaaactgtgccatatcagagaanaatgatgtttatagctatggtatggtgttgctagagatcattggggggaggaaaaactatgatcctagtgaaacttc

SEQ ID NO: 25656 - DNA, 379 bp, Glycine max
  unsure at all n locations
agctntcactttctcttatcttctcattgtacttctatttggtgtatgtacaacactcttgctgcatattttctcgttcttttatgcaagtgtgactgatacatcttttattttcctataacttctttctatttttggttggttgaataaccggttaaacccggtgaaccacccgtcctcatcgatttacccagtttaattcttgttttactggttttagtctggttttctgggagggtggttcaatggtgcttttggattggatgcctggttcccgggtggaccaattgaaccggtcgatccgatcttgntttgaaaaccttgattaanatagaactaatgggtctgtgaaagcgtaatatccatattaatgtatgat

SEQ ID NO: 25657 - DNA, 448 bp, Glycine max
  unsure at all n locations
acttgctttcnttgatttcggagacgtctcgggacgtgatttattgtgcaaccaaagacgccaagtgtctcanagcggccaatccaaggttgtatatcatcaaataataatccccggacgaaattanggtatgacaggagccaccagaaccaccttagattgttttgtcttttttctcttccttccttcctactccttctccttaccttcttctctttcttaccttctttgtaacaccctgaaatctcatcttagattatttcctacattgtgaaagactagatagtgtaagttcactctatgtaaatctactttgtgaatttatgaatntaatttatttgtttggataatcctaatccttgaattatgtgttatacatagatatataaataggtgcatgtgtttgcttgacatagattagcagagatatataaactatctgagctaa

SEQ ID NO: 25658 - DNA, 396 bp, Glycine max
  unsure at all n locations
aacttaagaacttaatcatgctaagggattttatagttttatctcatgnncnaccattgcagtaggcgagaaacactacccaatcacacagcaaagcaataacacttttaccacacgcacatgaaaaantggaatgttatagtattgctattagcactataagttttgttgatggaactacccacataggtgcattttactcatattccaaaactgccccctaaaaaattgcacaatggaatcgtgatttcattgtgcaattgtgggggtgaaaaattaaagaacgtttcctgtctacaagtgcacaatacatttgtgtccccattgtgtataattttcgtcccccaattgtacaatgaaacaccatttcgagagaatttttcatatcctatctaa

SEQ ID NO: 25659 - DNA, 413 bp, Glycine max
  unsure at all n locations
agcttatatgtatttcttggatgagttcctccaataggtggaaaaggtggaattattgatgttcaacagagaagatccaactggttggatttctcaagcagaagtntacttctgaatgatggagacgagtccagatgtttaagtgaacctcgcacagctgtgtatagaatgacccacaatcaacttctttaactctggtagcaaacaagcctaatttgacttgagaacagctcanaggttaattgcttgacatatatggatggatgagtgatggcgacattttcgagcaatttatggctcttcagcaagtagggagtgtagatgagatgagtaaatacaggaatttgaatagtaacaacccaggtgatgcgcttgcctgatgaccaatattttgggtatttaattcatggact

SEQ ID NO: 25660 - DNA, 376 bp, Glycine max
  unsure at all n locations
tcatcttatcattcctttccatatgctattgtttggattatagattgactntgtctattacataactccaccggagaatctagctaacgacctttacccaccaaccatgttcttttctatccagcttgaacccgagactttggttaaggaatctaagctcaattccactccattttctttcattagaacttatggttatataccttagtgtataagtgtacattactaagcacaaatatatgcttgaatttctctatattggatatctatctgtgtgtgatttagtaaagacagtctattcttttaatcagattcaaggtagctgatattcctggaacagtatcaaaaggggcaccagatttctgcacagtatatg

SEQ ID NO: 25661 - DNA, 451 bp, Glycine max
  unsure at all n locations
agcttttactttagtcatcaaaagattataaatatgtgaccatggcatgaattntaaaagaagagatcaatcatctatctttcaatcttctctcaacatcattcaatatctttcaactgtttctatagaattttctgattctttttctcttcatctttctaaaagattttgttcaaaactttctcttccaagaaaagttctttgttaaaaaacttgtgttattcatttgtttcattcttttctccctttgccaaaagaacgaaggactaaccgcctgaattcttttgtctctctcttctcccttacaaaagattcaaaggactaaccgcctgagaattcttttggttcttccctttcccttaagcaaaagatntcanagaactaaccgcctgagatatcttttgtttcccctttacaaagattcaaaggactaaccgcctgagaattcttt

SEQ ID NO: 25662 - DNA, 421 bp, Glycine max
  unsure at all n locations
gacacataacactcagctttccccaatttctataaatgggggagaagttattgttttaggnncagccccttagcacttctctctctatcgaatatgatcggaaaaattgtttccgtgaagaagatctacaccgatgcgcttccgaaacgcttccgtaacgtttccgtaaggaatttcgcgaaagtttcgaccgttcttcgacgttcttcattcgttcttcatcgttcttcgatcttcaacgagtaagtacctcaaaccaagcttttcgattcattctatgtacccgtggtggtccacattgagtttcgtgtatttctatcctcgtttcatttactttttatacccccttttgacgtgcttaagccattttatttaagtcatntctcgcttaaactaaagataaaataaatttccaccgatc

SEQ ID NO: 25663 - DNA, 415 bp, Glycine max
  unsure at all n locations
agcttggttttatgtacttacccattgaagatcgaagaacgatgaagaacgaatgaagaacgtcgaagaacggtcgaaacctttgcgaaattcttcacggaaaacattacggaaacgtttcggaagcgcctcggcttagattttctttacggaaacaatttttccaagcaaattcgaaagagagagaagtgcctaaggggctgaacccttttcttcttcacttcctcccctatttatagcaaaataggggaggtggttgccgcccagctcgcccaggcgagccaggttgcttcctccagaagcaacagccttctggaggaatattctggagggcccaagtgggcctgggtgctatntgcacccnncattttactaagtacacccnctctgcttttttggtggattcttttttcgt

SEQ ID NO: 25664 - DNA, 362 bp, Glycine max
  unsure at all n locations
ttgagccnaatcctgactcaccatanaccttgttctcaggttgtaatgtcaatccttattctcggaagcgaanagaatagaagggaaatttccaatcaaagaanaggaaagaaggaagatttccaatcaaagagaaagcaaaaaaagaaaagaaggaaaattcccaatcaaagagtgggagaaagcaaaaagataagatagaaaattcccaatcaaagaatgggagatagtaaaaaaggaagaagaagaatganagaaagctcctgatcagggatcgaaagaaaacagaagaaatgtgcagaaaggtctttggaccggacaatatctgaataatacagagttgtcaccaaatgaacaaaaag

SEQ ID NO: 25665 - DNA, 440 bp, Glycine max
  unsure at all n locations
agcttgtagattggctagacatgatacatgtcagggtttggtttggttcanagcttgtagaatggctagacatgatacatgtcagggtttggtttggttcaaggataaaagggatgccccacattatttccatgacacaaatgcaaaaatgatgatttggaaacttcatgcaaaactggtcatgcatgcacctatgtggacactcaagtgtcaaatttttatggtcatgtgatgctaggactcangattcatttcctctattttaaatcaacccaatgtttccaaaatatgttcttttatcaatntgtgcattcatccaagtccatttcgggcgtccggggaaatntcacagcattcacccttcaggtgtagacacattnttcaaaaattgttatgatcaatgaattntttttcaaagaaaagttgaaatcatctctttc

SEQ ID NO: 25666 - DNA, 512 bp, Glycine max
  unsure at all n locations
ccacgtcgggatgaaagcctggggagtangatnncgtgacctatagaaactcaagctngctctanatntacattgatgtttgtatntatgatatgatgttatatngccattttgctttaagaatagtgtcccactggtaaaattaactttccaaatgtttgccttcgcaggaatggccccgaggaagcttgcctcanagaggtccaggaaggacaaggcggccgaaggaactagttccgctccggagtacgacagtcaccactttaggagcgctgtacaccagcagcgcttcgaagccatcaagggatggtcgtttctccgggagcgacgcgtccagctcanggacgatgagtatacttgatttcangaggaaatanggcgccgaccgtgggcaccactggttacttctatggccaagtttgatccagaaatagtcctttgagtttattgccatgcttggccaacagaggaaggcgtgcgtgacatgagatcctgnngtangggtcagtgag

SEQ ID NO: 25667 - DNA, 435 bp, Glycine max
  unsure at all n locations
ttcttatntttatgaggaattcataatacaatgtttactctaacatactagtgagaaaataaggataaaatctgtgaatttacctcttttaatgaagtaataagtaaaactggttacagcgatgtctttattttagcactttcttcatcactagcatggtgtaacctgagcatgcacttgtgtgcacatattcaaaatgtggtttgaaaaaaatatcactaagaatgtacgaacacatctttattttaacaaaagaaaaaataccagatatcttgctatgaatatacattgaagaatcaaagttgctagctagtttgttggaatctatggnggaattgctgaactatcttccattggggcattngaacatctatcatgaacttccatttgagactntggtatcgatggataattagactcatcacaaagcatcta

SEQ ID NO: 25668 - DNA, 341 bp, Glycine max
  unsure at all n locations
nttacatccattaattatcaattttacacgtatatgagatcttatttccttttcagagctatacttactaagatctagagttgtccctcgtcagggtggacgtggccaaggtaggctctaagatctcgcacgtcggactgagagtagcctttgctaagacgacaagaggggggaacctgcaaataaaggacttcgacactaaagtaagtacgagagttaggtgagaatanattttgtaaaagggtgagatagaacctggtacttatagagtggagtggaagctgcgggtctttatttgttgngattgtacggtgttgtaacaccccttgcagataatgact

SEQ ID NO: 25669 - DNA, 356 bp, Glycine max
tctttttgttctttgaaactactagagaggcactatggctgacagaatacacacatgagcccgcttagaggtaatggatgagttattcacaatagatgagtagtgataacatgtgtagggatccttacagtatcaattcgaatgactttttgggatgttgtcgcaaaattagattttatccttacaattataactagaaattatatatgtctgacaaaccaattgacgtcccaatgagaaattgctgtgacattgatgtgtctctgtgttgagtgtgaacccttacaaatatgagaactttttattaacatgaatgttactctaaataatattctataatgacatgaatacttgtc

SEQ ID NO: 25670 - DNA, 522 bp, Glycine max
  unsure at all n locations
nncctcggccagttcaganacatcgcaaacnnactnngacccgngatcctcttagtcacctgaggcatcaagcttgaattttgttattataanggtgagacttctgcttgtattcgttgaccacagaatggtgcctggagatatgtcgcangggtcacgagaccttggggacgtcatgtggggtgctattgcccaataccaagcttgaacaatccctacccaccccgggcataatcagtcagtgagaacctgtgttgtacctaatctagcgagcctctggcagtcaacagataaaaggaacaaagaccacaaagcatgaatgcttgtgtggtggctggccagctgtgaatcttgtgtgacatatgggttatggcctctggtaatcgattacccagggtgggtaatcgattacaatgcttaaaaatgaagacaggagactaagattgtccctggtaatcgattaccaangggtgtaatcgattaccatgcttgaaacgaggtcatgaagctangagagcttct

SEQ ID NO: 25671 - DNA, 356 bp, Glycine max
  unsure at all n locations
agcttcaagattatgtcttcatgttgctcatgttgctccccctatctctaacacctccaaggtcgcacttttgtttcaatagcttcacattctcatcgctgcttcctctaattcccttctcaaaggcctaagtcgttgcagctctcaccatggcagttatgtgccatggtagttgcacatcatcgatgtttgagagattancgaaggcaggtctgggggaaacgtgagcgaagaagaaaatagggagtcacgagtgaaccatactagaatcctcaattaattgatgaacaaatctaaggagggttttagatctaagggcaaagtaaaaggttgtgtgaggtggaatggtggtagtg

SEQ ID NO: 25672 - DNA, 450 bp, Glycine max
  unsure at all n locations
agcttgttctttttatcttgtntagtggcagagttacaagcaaaagggctcagaatgacaactattttaaataaatacaactaaatagtactacctctggtcctttataaacaaatgagaacattcttttggtcctaaatcctaattataaactttcaaatatattaattggtcaatttcttttatatctttcaatttattttgaagtctattaatgagacattcagtcatttctcatgataataattctgagtatttttggaataaatttaaatttatgacattattaattacaattaacaaatttaattatttgtattagttttgatgaattacatatttgtttcatacatataggaccaaaggaaatatatactacatatatgaaatactcaaaacaacacaaaatacccaaaattaaagaannattgtgataataataaatcacag

SEQ ID NO: 25673 - DNA, 269 bp, Glycine max
  unsure at all n locations
ggatggncaaacattggtgtgttgtttttgcctttatggtgtttaagcattcaaaaattgtgtgttgcttctatcttgagcggttaagcaccatgtttagcttctgctcttgatggttaagctntgttgattctacctatataatggttaagtacttgtttggtggcttgcttctatcttgagtggttaatcatcatgcgtagcttctgctcttgatgattaagtttgatctacttttaccttttaagtggntaagtgtatttgcttct

SEQ ID NO: 25674 - DNA, 353 bp, Glycine max
  unsure at all n locations
agcttatacattattttaccatggaaaacaagtgtatgataactgtgtctttggttagtctggtcttaaagtgtctgataaaatgttttctttttagcacactaattgtttgatgaaatattgcattgagttcaacataaattgtatctctactacaactatagcatgtgtgtcactactccttttaaatattctgtgattctttataaaattaaataaatatgcaaaaatngcaaatatattaatggttntaggaagtattgtatgttgtagatcanaattgaattcaagattccccatatctttgtgcaggaactgatagtgaagttggaggaagctctatacaaaattca

SEQ ID NO: 25675 - DNA, 379 bp, Glycine max
  unsure at all n locations
acatcaatgcttaaccaccatggatagaaacttgatgatcttgtnttttaatagtagaggttcttgaccagattgaaccccagggacaacaattgcttcaaggacagagacaaggaagaaattgctggacaacaggatcaacaaatgacctaaagtagggttcgtgaccagattgaaccccaaggatagcaattacttcaaggacaaagacaagcaagaagttgctggacaacaggatcaacaaatgacctaaagtaggattcttgaccagattgaaccctgnggactgctatattaaccaatagatcacacaacagataaatagaaggacatgtgacaatggagctgcacaacaaaaggttaagagagacaaactaaa

SEQ ID NO: 25676 - DNA, 339 bp, Glycine max
  unsure at all n locations
cgaaatcgaccctgacctgaaaccacnatgggaggccgggagaggaagaggagcccttgttctttcaaccacaaagggagggagaaacaaacacccaccacacgagacagaccccgcagcaagcaacgaaagacgaaggaggcggcagaggcaggagggagccagaagagggacgaggaagcagccgaacacgcaggcgaggagaaagaggagcagcaggaacccgagcgaggaagcacgaggccgcacgaccgaagccgaagaagagaaagaagccggaaggcggagcgaggaggaggaggaggaccccgagcacgggaaggagaaggagcaccaacc

SEQ ID NO: 25677 - DNA, 400 bp, Glycine max
  unsure at all n locations
agcttttatatttgaaatcangtgcagccatctccctaggagtcctctcatgaggtggaggttgagccatgttctcagtataaaaattagtagtggaatgctcaaaatcagaatattcagaatcactagcaattgaatactcagaatgctcaaaatgcacagaatgatcaggatgcacactatgccaaactaatctatgaaatgttatatctattttaggatcaaagggttgtaaattgcctggattgcccctagtcatgattgagcagtttctagagagggtagcctatgcctgggcccaaccttctcttcatanggaagatgaatgtcccacagcccangtactacagcatatagaggatgcgtcatctganggccactgtccagagccattcattgt

SEQ ID NO: 25678 - DNA, 381 bp, Glycine max
  unsure at all n locations
gacacatagatactcagcttgttgacagtgaatgattgaaatgattgctgggatttttntcatgaaagagtgtttgagaatgatttgaatgagcaattgtatgatttgaatcgattggaatgattatataattgttttgatcaagcttgtagccattagaagagaatgagcatgtgattacaagtatgactgaaaatgtttgtcagtttgtcagattgattgtgaagaaatgcattgaccgtatcccggtgagagtgtgatccttaaattntgagagaaatgactatcatttagtactaattnttgcgtgaatctttgaagtatggactgaaagtatgaaattgaggatgatgaaggccatgtttgattgtgataaccact

SEQ ID NO: 25679 - DNA, 387 bp, Glycine max
agcttgtagttttatatgagaatgagcatgtgattagaagtatactgaaaatgttagtcagcttgtcagattgattgcaaaggaatgcattaatcgtatcccgatgagagtgtgatccttaaatttttagagaaactactatcatttagtacttatttttgtgtgaatctttgaagtatggactgaatgcatgaaattgaggatgatgaaggccatgtctgattgtgatagccacttagccaaaaagctgaccatgtgcttgaatgaattatcccttgcacccaggatgagctgaatgaattattgattgattgaaccccgagcctatacagtgttattgcctactaccttgacttaggttgtaggagaccatcatccacaggaagc

SEQ ID NO: 25680 - DNA, 445 bp, Glycine max
  unsure at all n locations
atgggtaaaaggctcacattcactatcttttacatcttattcaaacttgtccaattaaataataaagtcatctcgactcanagaaagtcatataagtctcatacaattaatatagaacctatatcctaatgtcacatcctatcagagcatggtaggcccgcgtcctctagcatgaggctcttcatagtcatccacctattcatctgctcccccgaacacagagttcaagatcatcacaggatccaaacacaaacagcaaaccgggagtgagttatcacattgctaactactagagagaaacaacacaacatatagtagccagatacaatntacttagcatatctcacattatgtcatcactttgtcattcatcaatcacacttgtcatccatcaatcacatctttcaatcatcaatcattatacacgggaatcacacactccgat

SEQ ID NO: 25681 - DNA, 278 bp, Glycine max
  unsure at all n locations
gannaaagcagacgagacccanaaagacncgggacagaacgagagaaacatttttgccaagcacaggggggagaacaacacccccccgaggaggaagcgacgacgacgagacgaacgacacggaagaggcaagcaagaccccagaacgaaaagacgggaagagagcagacggagcgacgagaggagccgaacagacgaggagcgaacgggccgaggcagaggagacaaccaagggaacggaccggagaggacagggccccagaccaggccaaaggcac

SEQ ID NO: 25682 - DNA, 342 bp, Glycine max
agcttctcgatatattatgcacctgaattggacttccgtgtgacaagttatgaccattttaattcttcgagagcattcggtgttcaatttcgagcgtctcgatatattatccatctgaatcggacttccgtgtgataagatatgaccatatgaatttctcgagagcttccgctgttcaatttcaagcttctcgatatattatgcacctgaatcagactctccgttgaaaagttatgaccatttgaatatctcgacagattccgatgttcaatttcgagcgtctcggtatattatgcgtcagaatcggactttcgggtgacgagttcgaccatatgaatttct

SEQ ID NO: 25683 - DNA, 244 bp, Glycine max
taacaagccaacttacaacagcaagtctcaagattttcagcatacggacgcttatgtcaaaggtgagtatgtgaaaagattgtatgaccaagtgaaggcgcaaattgcaaagaagaatgaaagttatactaagcaagccaacaagaagatgaatgaaatggtacttgaacctggtgatgatcctggacatttgagggcaaatgttttccaagatggagggaatgatgagaatcatgaaactggc

SEQ ID NO: 25684 - DNA, 444 bp, Glycine max
  unsure at all n locations
agcttttcattctctggataaacaaaggtaacaaagccaaacattcgcttctgctggtatgggatcctcacgtcttgcactgggccataaatgcttcaacaacagaattaataactcaagttaatatttctgccgctgaccaactatgcacaatgatcccagtcgaagctaaagttacagctaaacctaagcaataataacctgaagtagtttgaaacatcttcctctctgaaagtgctatctgctgggaaagtcaagtagatctgcctggaagctgggtttaccataacaggactgttcaaagaaaaatcatttctttcaagccttgatcgtccaaattatgcanatcctcactcatcatcagagctgcagctgccgctctgcaattattataaaccatgattaagattctgcaccccaactattacaaagaccacagtattc

SEQ ID NO: 25685 - DNA, 314 bp, Glycine max
  unsure at all n locations
gtagnngatgcatgtagccattaacaaaccaacttttgtgacatgggtggtttttgnnncngnggattagtatcatcaacttcagctacagccatttcctttntcaaagcatagactgtttataagttagtgttcctttcgaaggacaggatgaatgacagaaacccttacaagtgggggcagggatctagtataaagacttaaatgaaccataagccagataggaacacgttctgacagaacggagagcttaatnattatcaaaagtaaatagatagccaactcaaggacagatggatgataatgtaaatgat

SEQ ID NO: 25686 - DNA, 405 bp, Glycine max
  unsure at all n locations
tgcttatagtatatataataaaagaactatgactattgaagaatctattcatgtttcctttgataagtctaatgctatttctctgagaaaggatattttagatgatgttgcataatctttagattaaatgcatattcatagacaagattctaaaggaaaagggaaaggaagcaatgaagatcctccagaagaagccaaatcaaatgatgaacttccaaaagaatggaaagcttcaaaagatcatccccttgacaacattattggtgatatctcanaagggataacaactagacattctcttaaagatntatgcaataatatggattntgtgtctatgattgaacctaaaaatataaatgaagccataatagatgatcattggataattgctatgcaagaagaact

SEQ ID NO: 25687 - DNA, 313 bp, Glycine max
tcaatggcgagttcgtgagcactgtacacgtggatggcaactcgctgctgctgctgacgatttcaagttgaggagcgtcccgccggtgaagctggcgatttcgagcctgtgctgaaatcacagctttgtctggcgatttccaaggctacgaacgtagggtgaagaggcacagaagccacagaagccatttccgaggctctgaacgaagctgcagctgcaaggagtcgccaacaggaccggcgacttggtgagttcccgaaacccgcaataggaactgcggtttgctttgcttaaatccccccctttcccccgt

SEQ ID NO: 25688 - DNA, 389 bp, Glycine max
  unsure at all n locations
tgctttgtattcaacaatgcaatgcaatgganaattgtgcaatgttcatgacattctttcctatttttgtgatttgattnttatttgattntttttttgcttcttttttttttgtggaaaacacagattgaccatctctttgtgaaagacatgataactcataagacctcatcctatcttttacaaatctcttcggggactcccttagaatgtatgttttgtttgattacttgaaaattntggagtgatgacaatggagccatttgacatttaatcaatcaactaaaatattgatcctagggttttcccctatcctttcattntaaacttcaattattcttcacaacaagaaatatataagggctntgngaccgatcgcatgtagcatg

SEQ ID NO: 25689 - DNA, 414 bp, Glycine max
  unsure at all n locations
gttgcatcctagnaaaaccaattatanttgtagcccaacctttttataagccaataaaagtccttctaattcaatttgtgtatttctaactttatggtaagagatgaagtacaaatattggacctcttgttagttgttattgctaaatagcttaaacacatgtgcttgagtgaaatagtggccgcgagacattggtcaagcatctttccttgatatctgtctccttcctagcttcatttagttgtgttgcttactaacatgttctcttctctgaaaaactgcatgccttgtngaaagcaattgagtaagacattatgtctcatttgttattgatcgaggccgtaccctaatcaaataaacattaaaatgcagtaactatgaagtgatcctatgtcgtttcccaacaagcaatga

SEQ ID NO: 25690 - DNA, 328 bp, Glycine max
ctgaacttggtatcaaagcgggtcgatctcgctctgcctgccgtatgctgtcgcccattatctcctgccaacatcactgccggcagccaccgccattttttccagtgatcactggatctggtgtgcctcaccaagcatggcccagcccagaaggtttcaaagtccgaaaccctataactcaccatcatgtgcgtcatttctccgcaactctgtcaagcacatgctgctcacgcgctggtctctggttaccagaactcaggtgcaacaacacagtcagggtcgtcagcctcttcaagtctagtttcaatcttcagatcatcatttcttt

SEQ ID NO: 25691 - DNA, 532 bp, Glycine max
  unsure at all n locations
aggacnnagggacgggtntttatgtcttcgctagnacanncnaanannattagagaaacnggcgatctgtaaagtcgaactgcaagcgtgctagcgatgctgtttgtttatttatctgaaggccgccatatgcgtgcgctgtgtagatacaacaccactatatatgcctcgtgccataaacatttgtttctacgcataatgggagttggtaatcgggaagcgctatagcaggagctgtcgatagtgcctggtataactcctcatatgctaccagaacccgaggtggataaccgaatgagtccagcgccgggtactataccaaatgtagactacgcatggcatatccttgaatgaaacgactgtgatatcacccaccccactaactcttgtcggcctttgcgattagcgagccgtacatgagcaccgaactactatgtagtacgagctgacccccttccagaaatacgtgccctagtatcgcactatgtaggcatacaaccttaaagactggtgaccaactgatacgagcttg

SEQ ID NO: 25692 - DNA, 317 bp, Glycine max
atcacatgggactagggggcgggggacatagtgacaacaagcttccatccacatgcgcgcataacccacatgcctgtgaccactccactgagctacgactcccactagacatttctcgttctctacaccggtccccatcatacttaagcttccaacatcagcaaacaacgtcaacagccagctatacaccagcaaacgacaaggcgaaacttgctaccatcaccaaacacagttttcactaaacacgtacattctcatcaatcgtacgtggacactcaaattctgaagcatatgatagctgattgacgaggaatcta

SEQ ID NO: 25693 - DNA, 338 bp, Glycine max
accgacgaaaggatcaaagtggtatggaatttgcaaatctgatcattttgctttgatgaatacgacaattgcggcgcatgataaggatgacaatgatggagaaacctttgctatgactgccattcctacacggtcaaatttcctgtcagcccaacaatgtcattactcatccaataacaatttctctcgccacatattccacacatgccatccccaatcatccacaaatcctagccgctgtacatccagttgcttaacaccaaccaataaagaattatgactccaaagcctgtaagattcaccccaaattctagtgcttatgcctacttgctcttata

SEQ ID NO: 25694 - DNA, 286 bp, Glycine max
gcttaaacttcttgttattacaaaaaaagctgatatgaatcgcaatcacaagtaagatatcctaactacatgtaagatataagaatgaaaaatagaaaggggaaagaaaagctgggttgcctcccagtaagcgttctattaacgtcactagctagacacattatcctgttatccaagatccaacagatgttctacttcaaggaccttcttctcaggtctcttttactccatcacatgcactttaagacagacatcttggctaggtggatctttgtcctcatggaac

SEQ ID NO: 25695 - DNA, 521 bp, Glycine max
  unsure at all n locations
agantgggagcagcagcagcgttttgagcccatgagactattcgaacnnccntgaanactcaatcaancaagcactcagatcaagattcaagaagcgagagaagacgttttcgtttanagtatcgaaaagcgtttagatactgagggcacatggatttttctcaaaaccttttaccaaagagttgttactctctggtaatggaacaccaggagcaaaattgtgtacgaaaagctgtcaactgcatttacaacgtgccaattgatttcaaaatgttcgaatcgattacaatgttttggttattgattaccaatgtgcgtgaacattgcaattcagatccaaatgtgaagactcacatcctttcacaaaaatgctatgtgtaatctattacactgattgggtattcgactcgcgatgataccttctgaacaaaccatatagatccactcttccaattgtgtttgaactttcaactggactaaagtgttctaaaggcataaatcctcaatggtctatagccagg

SEQ ID NO: 25696 - DNA, 132 bp, Glycine max
tcagaatgctcaaaaccaagatgttcaaacacaccaaccacagaatgcacagactcactagtaacagaatgctcaagatggcaaaatgcacaaaacgaacagggagagtaggatgcacactatgcctaacta

SEQ ID NO: 25697 - DNA, 408 bp, Glycine max
  unsure at all n locations
gcttgttattgtttcaagncgcacccgacagcggaggtgatgactaaaaatgcaacagacccacttccaccatgagtcanctccttcacgatcactgacttattacaagtttccatgaatgactctacattcatgacccgtttcattatctgattcaagacagcatgaattcaaaattcaagggagaaatcaagacgacttcataatggatttatgaaccgatttgtctctaactatcctatcacatttgtgtctcaacaaagtcctctcagtatattaagtgccagagttttacccctggtatcgatacatttcctttacttatccatcgcttgtttaccccatccttagtgttttgcacgctcatctttttcatatgtaaacctactctacttgcttcccccaacg

SEQ ID NO: 25698 - DNA, 319 bp, Glycine max
  unsure at all n locations
gcttgtttttatgttacagaaaaaggtaaagcatgtgatcagaacttaaagtaatatggtaatgatgcttcaactctacaaaaccaattttatgccaaatgcaacaattggggaatggaataaataatattccttgttagatattggtgaatagtggaagtaatgacaaaacctaaggctaaaaaacttccatctcatactccaattggaaaagaaaaccgcgtttgatgaatgaattaagcatctanatggacttataattgccttccttctttttatcctcccaatacatatatattttgaatatacattatatgca

SEQ ID NO: 25699 - DNA, 314 bp, Glycine max
agcttttcgttttacaaacagcaaaaaagaatgtttatgcggataaccactcgtgtatttccgctcatcagcgtgactcaaatgtgagtatgacagatcttgtgagcgcggaagatgacgtaaatctccgcgtgtcaacaggcttgtcagccgcgattgacgatatgcgcagaaaactacgttagtctttgcgtgctatcatgcttttcgtcttacagacagcaaaaaagaatgttatacggataaccactctggatttcagcccgtctcgtgactcgaatttatatagacagatcttgtgggcgcggaagatg

SEQ ID NO: 25700 - DNA, 379 bp, Glycine max
gatagcacgcaaagactaacgtcatcgtctgctttcttctttttcgcggccgacaagcctgttgacacgcggagatttacgtcatctttcgcgctcacaagatctgtcatactgacatttgagtcacgttgacgggcggaaatacccgagtggttatccgtataaacatacttttttgctgtttgtaagacgataagcctgatagcacgcacagactaccatcgtattctacgcccttcgtcaatcgcggcccgaaagcccggtgacacgcggagatttacgtcatcttccgcgctcataagatctgtcatactgacatttgagtcacgctgacgggcggaaatacccgtatggttatccgtacaaatattcttttttg

SEQ ID NO: 25701 - DNA, 417 bp, Glycine max
  unsure at all n locations
acaccggcaacccacacgaaacgcgaacggacctgcacccaaacacaaaaaaacaaggcgggnttgtgctccctcctcgccacannaaannanaaaangaaagaaanaaaaagaaagagaagaanantattntttaaaanagagagaaaaaggaggggagggaaagagaggaaagaaangaaggaagagagaaaaagaaagaaaggaaggaaaagaaaagaagaaaagagaaaagaagaaaaggaaggaaggaagaaagaaaagaaaagaaagaaaaaggaggaaaaaagaagaagaaagaagaaagaaaaaaaaaaaaaagaaaaagaagaaaggaaaaaaaagagaaagaaaaagagaaaaaagaaggaaagaagaaaaaggagaagaaaagaaaagaagaagagaaaaaaaaac

SEQ ID NO: 25702 - DNA, 278 bp, Glycine max
  unsure at all n locations
agctttttgttttaatttactgagacagtcaaagtgccattgactgagcanatcaccagatgtaccctgagaggacatagcacatatatgtgaaactacacttcatcagagatgtgattgaaactgagaaggtgaaggtggagaatgtttcaatagaacaacacgcggttgaattgtaaacaaagtccctctctagtgtcaagttcaagcactgctagaacttgatgaattttggagatgcctaaatcagaaaggtaggagtgcaaccctgaatcaca

SEQ ID NO: 25703 - DNA, 294 bp, Glycine max
caaactctaattcgatgtctgcagcaaacaacaattgacgaatggggacacaccctcaacccatcgtcgaaatgagactgaagctcaatgatggtggcactacaagaaattaaagctcaactagggatggtaatagttgacactagctaatatcaatgtcactagaatttcaatgatgaattctaaacaattacatgtaattgctctgacactattgttcagtaataatggttttcaggggatccatcacctaaacattgactcaattacatacatcatacacacacgaaaaaa

SEQ ID NO: 25704 - DNA, 371 bp, Glycine max
tttctttgcactattgcatatggcatctcaacacacacacacacactgcatatgtatttggtaatcataatattatatcatgtaaaattaaatcaagttgttacagataaaagaatgcacatgttttaacataaattgcatttgaacaaattaataaacaaagaaattaagtgtttcattggattcgtttcataatataaaacttcacagccactccaatgaaagtaatttatccagccaatgtttcctcaaaaccatgtcatgaataaataacatcctctttacacacaatacattgtaacatttcaccagagaccaacaccagttttcatgcactactaaaaaaacactttgttatgatgcactaacta

SEQ ID NO: 25705 - DNA, 400 bp, Glycine max
  unsure at all n locations
ttcttatccttatttatggttagaccgacaccggcatgtgttcaaccgacatcggtcggtgtaaagccccgactgatatttttcagccgacattgcacaatattttttacaaacgctggccgataatatttatttacggtagaggatgctttttagttcggtgttgccgtaaaaatttacaatgtacgtcagctaggttatttagttcgagctcaaccgaagttatggttcgaccgacagctgaatgttttcattgctcagctacanaaacattagcccacctcggataataacttgattctccgatactgatcgaaaaataatgctagctgacgtcgacgaggaaagatcaacgatcgaagtttaaaaaagaagcatcaccggatgacgccgatcgaac

SEQ ID NO: 25706 - DNA, 302 bp, Glycine max
  unsure at all n locations
agaatgtgcttagagcttctattctcaatacgagcgtctcgctatattacgggtctccatcggacatccgtggaaaagattattgacgcttgaatttgcaacgagcttacaatttcaatgtcgagcgtctcgatatattacgggactcaatcggacatccgagtaaaaaattattgtcgtctgatttgctacgagcttccgttttcatttggagcgcctcaatatattacgggactctattggacattcgagtaanaagttattggccgttgaatatgctcagaagctcattctcaatttcg

SEQ ID NO: 25707 - DNA, 430 bp, Glycine max
  unsure at all n locations
caagcttggagtttcctagtgccaattcgtcttcttctttagtccagtcttcttctggcttcaattcttcagtgggctttccttctgtgtccagcatcttgggatgttcccagcctttgatgacagctttccaggttctgctatccagtgatttgaggaaggccaccattcttgctttccaatattcatagntgcttccattcgagaatggtggtctgttcactggtccgccttctttctccatgttcatcagaatntatctccctagatctcactctgtgatttcgagtgttggctctgataccaattgaaattctgataccaagggacagatgtcgtaccggatgtcacgacatcacgcttcagaacatgcagattgtatgtgtccgtntgaaccagtataacaagtaaataacacaagagaattggt

SEQ ID NO: 25708 - DNA, 310 bp, Glycine max
  unsure at all n locations
agcttactttttttntctcttctctataaagaagcggantaaccaggccctttagtcctttttagctagttatccaagggatttggttacagtacaaggcaacttaccctgttggaatgtttattactactaatatagtgtagcggcatctcatttctcaaggtattgttggttctagatcatctagaattataatgagcattggactttgatatctggtgagtcatatttatgaacgtgtctaaatgtattatgtatgtacatgctcattatttgtccttatgctttgattacttgtgatgcantccta

SEQ ID NO: 25709 - DNA, 319 bp, Glycine max
taagtcaatatcttttatctgtcttattcatgcacatgcctatattctgatcaatgaatcatcttaggtactataacataactattctgtatacggctctttgtattgctaatgctatatatgctacatcatattttgataaataaatacttttaggtagtataagatcatagtttgaatcgtaatgttatatggacattagatttacgttatatgataaattacgaatacttttacatactctaaggtttaattttatatggtacattaagaatatctttaattttgatatgatacataagcctacttgaaatttcct

SEQ ID NO: 25710 - DNA, 408 bp, Glycine max
  unsure at all n locations
ggcgacgactgtgctatccttgccatgatgaaaggcgaggaaagcgtcaatcgctgctaggtccactaacccttccatatttggaaagaggacaactccaaagatcaaaagtgccaagatgtcaataaaagaagcccattcgccttgatttgtcaaggtctttgccctttcctccaaacacttcattggtactccgactaccccattcctgttttgctttacatggtccaactcttgtgctgagattntcactaccttggcaactcttgtcatggagggatagaacccagaggaaagatatggcttccttcctcccagtgggcatcccagaatttcttcaaactcttccaccatgggtgatagctggaagtcccanaggtgaagcacttcaacgggctgatcaaatac

SEQ ID NO: 25711 - DNA, 430 bp, Glycine max
  unsure at all n locations
tagaaagatctaatttctcaacactttgttactttaagaacaaaaactatagtccgagtgattccatttgtagatgataacaaattgcacagtgtgcaaaatttcaacaaatcttattaatctatttagagccaacattggcttggtaggacaaagaatagtggatttaagtcaagcttgtggtagagcttgcaagagtaagattaagaagtggcaatgaaaatacttgttactttgttaagttattggaaactcggtgggttaccaagaacgagatgtggtctcgggtttaggatgaaccaacataattctttgtgtgccttgctctattattttaactgacaaatgatttgaatntgtctttggatcttatatgtagtttagtttacaaagaacactatttttctcgtcatctgatatagtatgatct

SEQ ID NO: 25712 - DNA, 342 bp, Glycine max
agcttcaacattgtatttcgagcgtctcgatatattacgggcctcaatcagacatccgagtaaaaagttattgttgtttgaatttgctcagagcttcaacattcaattccgagcgtctcgatatatgacgggactcaatcagacatccgagtaaaaagtcgttgtcgtttgaattggctcagagcttcaacattcaatttcgagcgtctcgatatgtgacgagagtcaatcagacatccaagtaaaaagttattgtcgtttgaatgggctcagagcttcaacattcaatttcgagcatctcgatatgtgacggggctgaatcagacattcgagtaaaaagtt

SEQ ID NO: 25713 - DNA, 428 bp, Glycine max
  unsure at all n locations
gagccaattcanatgacaatgactntntactcggatgtctgattgatgcccgtaatatatcgagacgctcgaaattgaatgtggaagctctgagccatttcaaacgacaataactttttactcggatgtctaattgacgcccgtaatatatcgacacgctcgaaattgaatgttgaagctctgaggaaattcaaacgacaataactttttactcggatgtctgattgagtcctgtcatatatcgagacgcttgaaattgaatgtggaagctctgagccaattcaaacgacaataactttttactcgaatgtctgattgagtcctgtaatataacgagacgctcgaaattgaatgttgaacctctgagcaaattcaaacgaacaataacttttactcggatgtttgattgagactcataatatatcgag

SEQ ID NO: 25714 - DNA, 430 bp, Glycine max
  unsure at all n locations
naagctacatatttgtctgttggaagaaagccatggatgctgagagtacagctcttgaagtaaataaaacttggactgctgaggatcttccatgtggaaaggttccaattagttgcaaatgggtatataaaatcaagtatcatgccaatggcacaaatagaaatgtacaacgccaggcttgtggccaaaggttacactcagatggagggtgtatactactttgacactttttcccctatagccaagatgactacagttcgtgtgttactaactgtcgctgctgataagagtcggcatcttgacaacttgatgtcacaatgctgtcttgcatggaacttgaatatgaagttatatgctcttctcctggtatgatcttctactcttcagtatcgaattaacattccttattgggtgaccaactaccgtcatg

SEQ ID NO: 25715 - DNA, 161 bp, Glycine max
aatccatcaattcatcactctatatatgcgacttcggactttgctattagatatcactatttatctattatacttgcaagaagaaggtgttaacatacatatgtacatattgacgaagagactcaatgatgcaatcctacccccctccccaaggacattgg

SEQ ID NO: 25716 - DNA, 266 bp, Glycine max
cacaccaagcacggccacagacacaaagcacgtacaaacccaccatcacctattggccacctacaatagagctcacgtacgcccacgtagcccatatccgcgtggctcacgacagcgagagcccagcaatcctcccaagcaaccacaacagccagggaatccaacatgcgaatcagcacaagccacaaacccagcaaaacagggcaaacgcagacaacgctgccgcaaactcaaaccaaaataagagcttagctcaccaaagaccc

SEQ ID NO: 25717 - DNA, 384 bp, Glycine max
  unsure at all n locations
gacacataaaactcagctgcttgggagctttatggagctggacttttttctttttgatgccttcaaggtgattgtccccatggagatgcagtagaagacaaaggataagaggtgagaggaggcgccatccactaaggaacaagccatggaagaaggagcttcgccatcaagagagtgccttggataaaaagcttggaaagggtgcttcaatggaggaaaagaaagagagagagatagagagaggggggagcacgatattgaaggaagaacagaggaagaanagttgaactttgagttgtgtctcacaagactctcattcatcaaagttaccacaagtgttacacatacttctatttatagcctaagtagcttccttgagaaact

SEQ ID NO: 25718 - DNA, 317 bp, Glycine max
  unsure at all n locations
agcttttaatgatctttgtcatgcagccgatgagagaaataggcctgtagtcatttaacgattgaggatgatttgatttanggatcagggccatgaacgaagcattgctgcctctatgaaagcttccatggcagtggaactcatccacaaatctcctgaatttacgtctcagaatcttccaaaaagccttaataaagttgaaattaataccatcgggacctcggcatctatcaccaccacaactccaaacagcatctttaatctctcgatcagataaaggcgcaatgagtccctctctctgattctgatcaatggag

SEQ ID NO: 25719 - DNA, 449 bp, Glycine max
agcttgtgaattatggtggttctacaatcattaacaagttcttaaaccataaagattagtatagttagtggctggcagtcatatctaatctaatgatagaaccgacaatacgtgacccatgtgtatgaaagaatgagtacataattagaaggctaatgatgccacatttcaatatgaagattgaacatgaagaggcattgtgcttctaattggaaatcctctatatcatgactaaaaagtaaagtgcaacacactcctcacacatcacatgcagcttcaccaagaatccttaatcactgtcctgaccacactctttgctcctatgtcactacgacattgtcattacatttgagaagatctctataaaatacctagatgatcaattttggaatatatatacggcactatataggagtaatcacttttattcgaatcgcgttcttatgtgt

SEQ ID NO: 25720 - DNA, 423 bp, Glycine max
  unsure at all n locations
agcttgttctttatttatcgtgattgntgctgncgatgtcgatgtcgctcctcctttaccctcactccaactctggcaacaacaccagtttcaacgtcacctcattgttgatttgatcaacgactactggccaacctctcgctattcatgatgcacagagattcagtgactcatggaggcttatatgtggatacactgttgtgttcaatggattgactggactttctatgggcgtttctttactttctttgcctgagcagtcccacttatactcattcaattatatttattggacgctaaacctgaaaactgaggtagaaaaaccaagttgaacatagcttcaacttgggaacctaagatttagctttcgttttcattcttttatcatgtcgctgatcatattgagctatgctattagtaaaa

SEQ ID NO: 25721 - DNA, 349 bp, Glycine max
  unsure at all n locations
ggatatagtggagagtagacttactttttcaggttttgtggtaatcaattgtcttcctcatataatctttgagttaattctagaattctttatcttcattgatgctaaatgttggtatggtgctattctcaggtatttaattgtcccataagatcagattcagccactgttntatctgaattgacagaatcctcacatgacttagtaagtgcagcattcaaattagcttctcttacaagaaaacagaagtgctttccttattgtaattttttttttcttagatccaatgaaaacatcagcctttatgatttatgaggaaatgagctgaatatagcttctttcattctac

SEQ ID NO: 25722 - DNA, 282 bp, Glycine max
agcttttgattaatttatatggtcataaatagtcactcggaggtccgattcatgcacataatttatcgagacgctctaaattgaacaacggaagctctcagaaaatttaaatgctcataacttttaactcggaggtccgattcacgcggatgatatatcgagacgctccaatttgaacaatggaagcttttgaacaattcaaatggtcatatattgtcactcggaggcccgaaactagcgcataatatctcgagacgctcaaagagaacaaacggaagctct

SEQ ID NO: 25723 - DNA, 403 bp, Glycine max
  unsure at all n locations
ttacagcagatattagtaatgacccactaacctataataaattaacttaatgccatttacctanggaatggaganaaaacttaatggctgagtgtaactgaaattgtggcaaccaaaagtcacccccaacagccaacttcagccaccatttggtctcccaaaaggctgatgcctagagtgccaattggacccttattacaacttgaactaaacctaactaaagcccttttaattgattaacccanaacaatattttggtcaaccaactttacaaggattgagccattatttagacaaattaaacactctaaaaattgagacaaagtggtgtcatttagtcctccctcatttggccatgatacactcacaccttggactttcttggcttcttgcttacccttgc

SEQ ID NO: 25724 - DNA, 415 bp, Glycine max
  unsure at all n locations
ttcttatagttttttcaacctgacacaagagaaattctaataagtagggatgtaagcttcatggagaatgagaagtggagttggaacgatgaaaaaaaatcagcaaactgatgatttgaatcaagaagggttagttgatcattctcctgttcgcaacactagattaattgctgacatatatcagaggtgcaatgttgctatgcttgaaccagcaggatatcangaagcaganaaagatcctaaatggaaggatgctatgtagaaagagctcgctagatcgaaaaanatcagacccgggaattagttgaaagacctcaacatcagaaggtgaatgcagatgcctcaattaacaaatataaagcaaggttagtggtnaaaggggtatgttcaagttttggagtagatttatttgata

SEQ ID NO: 25725 - DNA, 427 bp, Glycine max
  unsure at all n locations
tcgtgaccagcgatgtttcggttatgtgcacgaaggagagatagaagacagtgaatggngatgacattnggtgggccttggcaacactaagctttgatgactatgctgaaccaatgagaaggtacttgcatagatataaagaggttgaggtagaccataataataaggtcaatcttcaagatagagagaataatagtcctgaagagaacgacgatgaagtatttcaattgagtaatagaggggttaaggtttgatgaccaattattatgcttagtgtgaagtagtaattaattaaggcttgtttanggttgacattacttttcttgtatacttttcttgtctaaattgaattgattgagcctgcctagaacaagaattcttggtttgctttctttctttctcttcttcttctntatacttatatact

SEQ ID NO: 25726 - DNA, 401 bp, Glycine max
  unsure at all n locations
tttcttgtncttattcttcctcagttctctaacaagctgtgaacaatatacttggccttcatttaactgtctttgggcttggcggccacgctcaacaaagtactttcgacacctactatacgttgatttcaccaatgctgttatgggaatgtagtgacaatcctttaaaaccttattgatacattctgagaggttcgatgtcatgtggccatatcgacgtccttctctatcgtaagccatcgtccatttttcctttgagatgcgatcaatccatgttgctatagctggactcaattcacaaaatgtttctatattttgataataaatgtgcttgcatggagtggaggctgcataaattacgcatgaataacaattttatgttaattaaagtaaataacgtg

SEQ ID NO: 25727 - DNA, 294 bp, Glycine max
  unsure at all n locations
gagctcacagtacatcccatgtgagcccatatcnctcgtattctctcaacaaccgggtccccatcaatcctcccaagcttccccaacatccaggtaattcaacattcaaacagcacaaactaccacagccaagaaaacagggcaaaggcagataactctgcccanaacaccaaccaaaatcacagctntttctcacttaaagacccaataacatttcctttgttccaattcgttcaccgttggatcgactcgaacattntactggaagtctctagtacataagcctacattttg

SEQ ID NO: 25728 - DNA, 299 bp, Glycine max
  unsure at all n locations
gaagatgatgaatgggaaacacgggggccgaacaataaatctgctgttaccaagactcaaagctttcttccatcagaattaagtggtatttttggaggacaacttagaagtttggtgagagcctaaggtacaaaacaactctataatatattagtgaagggattctttttgttttaaatgtcaacttcattaagatnttgggaaaattcaattggaccagctgttgcttcctgctgatattccttcaaagaaaaaatgaacatgtacataaatgatgtattatataaaacaaacattat

SEQ ID NO: 25729 - DNA, 360 bp, Glycine max
  unsure at all n locations
agcttgcctatttatcctattattgagagaanatggttatgaaacacacaaaatggaagtactaagtatttattacctatacttaacagaaaatacttataacactacaaaataaccataaattgaaagagtttgatacaatntatacaagttttatacacaaaagttagtcgtattcatcgactaacaaggttgtgttgtatgtctttggtacccgagatgatgttttgctatgggctcgaacggttgcccatgaaaacggattagttgtaatcattatgaggtctgacacacatactggtagtagaggaagaacttcatttgtgttaattggctgtgaaaggagtggtcagtataagt

SEQ ID NO: 25730 - DNA, 350 bp, Glycine max
  unsure at all n locations
tctagagagttctagagagagaaaggtccaagtttcatagatttttagagatnccgncgtttgaagagctggagagatcagagcttgaagatgaagccgttctgagagcttgagatgagtttgtgagtgattgtgacgtcttaaagatggaggaggcatccccactacttgtatttcttgaatctttcatctttctcttctctttgttgtaaaggaaattttctaattatggaaagctaaatcctctattggatcttccttgtaggtacatgatgtaaatatcttcttatctatataatgatggtttgggtgttctcagtgctttcagatttcactctantatgctttac

SEQ ID NO: 25731 - DNA, 358 bp, Glycine max
  unsure at all n locations
agcttgccgtttatttcgttcaggcgagctcagctcgcccaggcgagccaggtttcttcctccagaagcaacagctntctggaggaatcttttggagggcccaagtgggccttggtgctatttacacccccatttttactaaatgcacccccttttctatttttttgtaattctttttccgtaacgttacgaaactttacgaatttcgtaacgatacttattttttcttccgcaaggttacgaacccttacgaattatgtattttctcttttttagctttcgaagaagttacggaaacttacggattggcaaaaacacctcttttcgacttccgcacattacngaatttcacggatcg

SEQ ID NO: 25732 - DNA, 308 bp, Glycine max
  unsure at all n locations
taaatagagggagtgatttttctncccctttatcttatttcaaactntctttcttctctggtcaaagatttttctcctaaaaaaatacaaaatggagtgctcaatgataaccctgtcgagttattcctaggttcatggcaaagtcaaaacctattccactagtttctgtacttacatgtcgatcatctatttccttgaaggtgtcacattttgccatgatgatcggccaggagtgatgttttttgagtcgcgtctcgctagtgagcacgtctttatgtgtgcctatcctatagagacaacgttcatgt

SEQ ID NO: 25733 - DNA, 298 bp, Glycine max
  unsure at all n locations
agcttcttgattgntatgtgtggaccctcaagtgcaatcctccgttctccacttatttcggaaccccatgaatgtcattgcctagcgctattcatgtgtcctccaccttcgagtctggagccccacgaatgtcattgcctagcactgttcgctaattctccattcttcacttttattcggagccccatgaatgtcattgcctagcgctgttcatgtgtcctccaccttcaagtttggagctatgcttcattattgcctaagtgtggaccctctagtgcaatcctccattcttcacttt

SEQ ID NO: 25734 - DNA, 440 bp, Glycine max
  unsure at all n locations
tgatcttgtaggccactgcccctgatgtcagctccattggttcttgtttacctaggatcttctccatcaatggattcctttgctttttggaagatgaatgacaacgtaatggagaagcaagagagagaggagacgccacttcaaggaaaagtgagtctagaagaagctcaccaccataagaggccatggataagagcttagaggaagaaggagatgaatgaagggagaggaagagaagagcacgaaattttgtgctctaaaagagctctgaaatctgaagtttaatattcaaatgatcaaagttgaaaaaaatgcacacacatgacctctatttatagcctaagtgtcacacaaaattggagggaaatttgatntcaattcaaattcacttgaatttgaattgaantgtggagccaactttggaccaaatttactaatat

SEQ ID NO: 25735 - DNA, 268 bp, Glycine max
  unsure at all n locations
agctngagtttctttttgctgccccataaagccnctcgaagactggtgtcgaccctattcttcttttccggccctcttcgtttctcattctaatgcttccgctgaggccatgttgatgtccctcagctcatcacactctttcctaaccctgatggctatcgtcttgaacttttccttgaccactcacgttctttcaagtactgctttcaaggctagcacatcctcgctctgctcagggactttagcctcttccccacttgaaatcttt

SEQ ID NO: 25736 - DNA, 439 bp, Glycine max
agcttttattttttcggctgcagcgtgctttatattatcgatgcttagttcttagggaaatttcatagaactctgatgattaatttaagaaaaatctttataattttttaaataatagtctggtcttgaatcttggtagcggaatattctttcatgcgtatcttctttacacaaataatttcaaatgagtattctcttaaattctctttgcaaattcaataatgcaacccattagacgaacatggaatatgtaagatctactaacaaaaatgagtattaaaaaaaaaactacatcgattccaacaaaaccattatagagaatcaaatctctatgacggtttccaggaaaactgacatacaagtacacataaaaaggatgttattgtaaaatgcacatattcctaacaatttataatctcatggaagcataccacttcta

SEQ ID NO: 25737 - DNA, 445 bp, Glycine max
  unsure at all n locations
acacaagaaactcagcttatagactacgagatataagctntttataagcttcttttttttnnnnngaaaggacgagattataagctaaatatactcaaatccagttcctgttgtataaatcaatccgattaatcagttgaaaacaaaaatagactatgagatgagcgtgtctcattgatttaatctcccccctccctccccccagttacactaatctaaaaaattacacgcataatccttgttttttatattacttttacacatatatacagcagttgttttttctataataaaaaaaaactacacattcctcccttacaaattatacacacaataccctgaaaaaataatgttattatgctaagtataattntntaatcaaagagtgcaagtacaattaataccattatgctaactctgtaacagatcagtgaattatctccat

SEQ ID NO: 25738 - DNA, 250 bp, Glycine max
  unsure at all n locations
gacccgggatcttaagtcgacctgaggctgcaactttagtantttcttcattggaatctctaggtgggggctgcctaccttggctctccctgcaaactcatgctctgctttgccataagacaagatcctttcagagctaaaaagttgaagaatgtaaccaccccctttaacactgaaattgcaacatccaacttagtgaactttatctcattaaaaatatcttccgattatactgttataaattgacaaa

SEQ ID NO: 25739 - DNA, 333 bp, Glycine max
  unsure at all n locations
agcttttactttttatntcgagctttncgatatatgacgggactcaatcggacatccgagtaacaagttattgtagtttgaattagctcacggcttcggtattccatttcgagcgtctcgatatattactggactcaatcggacatcagagtaaaaagttattggcgtttgaatttgctcagagcttcgagattccatttcgagcatctcgatatatgacgggactcaatcagacatccgagtnaaaagttaatgtagttcaaatttgctcagggcttcggaattccattccagagcgtctcgatgtcttacgggactcaatcagacatccga

SEQ ID NO: 25740 - DNA, 281 bp, Glycine max
ttgagcaaatgcacacgacaataactctttactatgatgtttgattgagtcctgcaatatatcgggacgctcgaaatggaataccgaagctctgaacaaatttaagcgacgataaccgttttactcggatgtctgattgggacccgtaatatatcaagatgctagaaatcgaatagggaagcgttgatcaaattcaaacagacaaggactttttactcggatgtgcaattgagactcgcaaatattcgagacgctcgaaatggaatattgaacctctgagc

SEQ ID NO: 25741 - DNA, 448 bp, Glycine max
  unsure at all n locations
agcttgtagttgatgcttcaatggagganaagaaagagggagagaaagagagatgggggagcacgaaattgaaggaagaaaaagggagagaagttgaactttgagttgtgtctcacaagactctcattcatcaaagttacaacaagtgttacacatgcttctatttatagactaggtagcttccttgagaagctttcttgagaaaacttccttgagaagcttctttgagaaaacttccttgagaagctagagcttagctacacacacccctctcataactaagctcacctncttgagaagcttccttaagaagattcctaaagaagctagagcttagctacacatacctctcttatagctaagctcaccttcttgagatgagaagctagaacttagctgcacacccnctataatagctaagctcacccncatgacaaannaaaacatg

SEQ ID NO: 25742 - DNA, 200 bp, Glycine max
agatgaacccatttcgggttatccattggcaccatgttatcgcgggaccatccatatacaaagaagctacggtgatcctcttgaggaccggtcagccttaggagtcaaagaatcggctgaatttgaaaatccagcccactggatcttgcccatcgaaacggagagcgtcaagcttcatatgtggtatgggagtgggtggc

SEQ ID NO: 25743 - DNA, 391 bp, Glycine max
  unsure at all n locations
tatcttattctatgtttgcccatatctaagaagctntaggatatctaattntattttagaatatctaagttatttgtttgtttttcccttttattgccttagtaccatccttttgcattatctcatattttttttttgttccttcattctgtatcagatttgaccatgactggaaaaagattgaagcatttgttgtatcaaagacaatcatccaagtaatttcaaatgcaagttgtgactggatatttacattagctgttgtttctgggttgttagccataaatgttatggattgaattaggcatgtntatagttttgaagtgtgtttgattatgttacattaanggatttggcactttccaaataaagaatcggttattggacatgaaat

SEQ ID NO: 25744 - DNA, 442 bp, Glycine max
  unsure at all n locations
ttctttatgatttagatggcctcagcaaattccttatttccagaaaggaattctatcaatagacctccaatctttaatggagagggttaccactactggaaaacccaaatgcaaatttttatcgaggcaatagatctaaatatctgggaagccatagaaatagggccttatatacccaccacagtagaaagagtttcaatagatggtagttcatcaagtgaaagcataaccatagaanaacctagagatagatggtctgaagaggatagatnacgagtacaatacaacttaaaagccaaaaacataataacatctgccctangaatggatgaatatttcanggtttcaaaattgtaagagtgctaangaaatgtgggacactcttcgataacacatgaangaactcagatgttaaagatctangataatgcactaactcatg

SEQ ID NO: 25745 - DNA, 432 bp, Glycine max
  unsure at all n locations
ntgtggagtagaaacatgggactctctcattntattncanattaaaggaagtcgtatctagtcaaggtctgagagaccatacaagtttcctaacgatttctaattatgtgggccattaagtctatcatatgctgacaatagccgagaagcccatgaatctcttcgggggtggagtaagtgtctgccattgccttggccttggctaacaagcggagaagttcttgactcccgttcaaagtaagagcaaaccggtccatccacatggttgcctcttggtgtaaagagtcgatcacccttcctctagcctctttttccgcatatacttgagcatactcatccgcgaatctatgctcgtgggccatggctagacctaactcttcttggtacttggcgatgatagctagcatgttggtctccgtctcgcataaatgc

SEQ ID NO: 25746 - DNA, 442 bp, Glycine max
  unsure at all n locations
ttcttatgcttatttcagcctatcgcccttagactaatggctagattgaacggaccattcagtcgctggaggaccgtttgagggcatgtgtcttagaacaaaagaggagttgggagagttaaagactactcaaagtaggcagaaaaactatcaggctgctcaagaataactgagaaggtcaagttaatccaagaaaggctaaagactgctcaaagtaggcagaatagctatcaggacaagaggaggaaagacctgaaatttgagattggtgatcatgtattcttgagagtcattccattgattgggttggtcaaacattgaaatcccaaanactcatacctcagtttatcaacccttttcanattctcaaatgagtcagtcctacggcataccaaaatgcattacctctgtctctttacaatcttgacaatatctatcatgt

SEQ ID NO: 25747 - DNA, 302 bp, Glycine max
  unsure at all n locations
ttagatagcttgttgttatcgattacgacaaccctgtaatctattaaaacagagagttctgcctcttgaagaaactnttctaacttagaaacttttcttcacactaatcatgatgatgcatgatgcaatacaaatatcaaatgtactaagatgcaacaaccaagataacaaccaatacaaatgccactcaagggatttaggcatgtaaaagtgaaaacttcttcaagcttttctttgagcttcaagctgtagcctntaggttgttcaccatgttgctccttctatctctaacactgcactcc

SEQ ID NO: 25748 - DNA, 462 bp, Glycine max
  unsure at all n locations
ctcagagtcacctgcggcatgcaagcttccttctcgttttccttatacctagaacttcaaacgttcgattctcactcgattcttcaccaaatcacgtcccgtaaagcccaatcttcctctttttcactcctctttcacttccaccgatcaaaatccagaaaaacttcatcaaatggcagagccatcaaagaagagaaagggatcatcttccaccgccaccgctgctgcccatcgccgtcacggcccatccggagcacccacagcacctattcctccttctttgtcatctccaagatcatcaacattgttttcatccgatgatcaacgtctacggtacctttctcaagtttcttctagaataatcttagaccctaagtacctagacgtagagttctttaatgatgatacgtntgattgctatcaagtggttcaaaattctgggctggtagattcatgtcattt

SEQ ID NO: 25749 - DNA, 375 bp, Glycine max
  unsure at all n locations
agctnctgcttatcatcaccagatataagtaaatctcaacctatggtagaattgacttaatatcatttatgattaaatgcgtgtaatgtacttatcccactcttgtcaattaatataaattaaaatatgcaagagacttccaagatttatacttttcttgaactttcgcttcactatagaaatgtacgcgaattcttgaccaaacaaattaataattacaactttcatggtattaagcttacacaatctaatcgatattctattcatagtcataaaaagatgattattaaatgattaaattaatactgagtatgacttagagtgaactgtactcagtcaatactttgataataagtattacaagaaatttgaata

SEQ ID NO: 25750 - DNA, 446 bp, Glycine max
  unsure at all n locations
atactcagcttgactatgtggaaggcgggctccttcactacttgctttaacgtatctntgaccactgctcttccttcccgcgatgcttctgttcatatccgcctgagtgggcttatagcctataccatacttcccacgatttcctttggcgtttatcacgctagttatgccgccattgtctttgcctaaacccattccgggtgtggaaccgttccacaacataactcgggccatcattactgctgcatcggacagacaaggctgcccagagaaagagtccacggaggaaatgctgaccacctcanaagactggaaagcgagttctaacgattcttctgcggcttctacataaagcatagaggatgggcagctcaccaagatgtctatctcgcctgacacgatgaccaaatgcccctccactacgaatttcatacttttggtggagt

SEQ ID NO: 25751 - DNA, 413 bp, Glycine max
tttgatgatgacggtgatgattacaaatgatgacgaccaacgtgatgaccaaaagctcaaagatcaatctaagaacagctcatgtaaatcatagatcaatcatgaacaattcgagatgtcaagataagaatcaagaagaattcctgactcaagacaaaagtctgaagacaagaatcaagattcaaggttcacgatctcaagaatcaagatcacgattcgagactcaagattctagaatgaagagaagactcaatcaacataagtcttaataaagtcttcaaaactttgactagtacatgaggttctaaaaaaccttttaccaagacttttactctctggtatcgacaccagagtgttgattcgataccattagcatacttgtttgaataagttgcaatgcgattcacacgtcg

SEQ ID NO: 25752 - DNA, 315 bp, Glycine max
cagcacactcacacacacaaaatttcacaattctaggggctccctccttttaacccatgtactgctgctcccagtgagccatttccccttcacctgatttgcatgttatctactctaattgctatccatcataaaagccattacgacgcatccaaaaccgcttcttatcctaacaagttaaacaaacgaaacattcccatgttcctttctcttcttaccaaactaactacggcaacacatcagcacatacatttatttaaacacagcaaaaaccactctcacacaaaatatcattaacacccaacaagggaagca

SEQ ID NO: 25753 - DNA, 319 bp, Glycine max
ttattttatatccaatatatcctctaaattattatattaaaaatttatatattattaatcaaagagatttgaacattaatcaaataagttaatttaaaatatagaattgtctttaatggaataaataagaacaaaattgatttaaacgaaaaacttatctcaaatacgtgaatgttattattgaaactttaaatattatttaatatttgaaaataattttatcaattaatggttaaacatgattcgagaatgtaatatgtacttattatacttcattcttataagtggtgattacatgatttaaaatatgaggttatcc

SEQ ID NO: 25754 - DNA, 454 bp, Glycine max
  unsure at all n locations
agccttcacatttataaaaaagaattaaggtatcgtcgtttatcggaaaagnctctttatatgcggaaattatgttacgtgatattcttattaattatttcagttatttattacatcaataagaataatgcgatatttctattgtaataaaaagattaaattcaaaaaattaagactcacacttccttaataagaaaatttttgtgaaaaacttataaaaaatcattttcaaaaaatattatctatcacgagatttatttttttagaacgaatattacacatgataaaggataattttgaacccaagatttgcaagagattcanaatttctcgccccatcaatcacctcctaaaggttaaacatgtacttatacatatatttaagaaaataatcaatcatctcctaaaggttaaacatgtacttatacatatatgttaatattatcttttatta

SEQ ID NO: 25755 - DNA, 271 bp, Glycine max
tttcttgattttatgggagcccaaccctccattcaattgtcttgtctcttcgatcatctacatcactaaccccaaaagaaggtaatgaaacagtaactaacgcaacatttttctacgaagcgttgcattaagatccaatttacaacgacttcagtagtactgctcgctcaagttagagaatgaaagacattggaactccactctaaagcatttaagcttataccaacgaatttatagtaatattcggcattgctaaaggggaatatgataa

SEQ ID NO: 25756 - DNA, 289 bp, Glycine max
tgtagggttaaagtcttacgattttcacgtgctcatgcaactattgtgagccggggctatatgagacatggtgccaaacaaagtcaggttaacgataactcgcctgtgctttttcttccatgctatatgtagcaaagtcattgatctagtcatgtttgatgagttggaaaatgaggccgcaattatactgtgccagacggagatgtagtctccccctgcgttctatgacatcatgattcacttgattgcgcatctggacagagaatcacatgttgtggtcctgtttatc

SEQ ID NO: 25757 - DNA, 406 bp, Glycine max
  unsure at all n locations
agcttcttgttcatgaaaaacatggctactcttgngtttgtacacaccaagtaagaaacatcattctgcctcaacatcattctgaaatgtttggcttttgtatttaattaattaagcaaaggaggattcttgaaaagacaagcccagccaagacctggaggtaactagtgaataagaactgacaaatggttaacttgtttggcttgattagctgcttgctactagcaacataccatcttggctggactttntttcttctataaatnntccttcagatatcctttanaattaaggtctctgtcacctaccatgtgtcactgatngtttgaaaatatataagaaaatcaagaaccanagatgaagggctaaaggcaaaagtaaaatgaattgtaaaagatgctagtat

SEQ ID NO: 25758 - DNA, 444 bp, Glycine max
  unsure at all n locations
tanataaagtagtagggttgacaatcaagcttatatggttttagtcactactttgngaatacatttaaaatgcataaggtaaagagagggggtaaagaatgaggcaagcactagaaggaggaaaataaggtagtatcaaacaatagatcctacattgttaaataattcttttgacaaattaattactaccttattattttatttttatggacgaaccattaaaacttagttngcaccatcttctaactccatcctttataatattttgttgtcttcttcaagtggcgttgtgtntgagactgtttgaaaactatntcttatcatgtttccttaacatgattgaagtttcctaaagttcttaaagttaattcgcccaactgtatntttctacctagcctaaagaaccactctaatnnttcttcttttgtcttataaatgtcccac

SEQ ID NO: 25759 - DNA, 446 bp, Glycine max
  unsure at all n locations
agcttcaacttanagttcatactttgntggtcttcattgatggcattcttacaatccaagctttagatagccttttcatagcttcttggatcatcatcatcatgataaacctcatttgatgtgtcatctaggaccatcaagtttaatctatcaggtgcacgatgcgctcaagtagatcttctagaaggttcatgcattgggttcataagttgctaaattggctctaagattggttcattaacctaatcttgaactatagctggctcttgaaccacaattgttggaggtgatgacctttgtggtaactntagaacattaaagaaaggtatctcagtttccatctcatagtcctgagttgtttcattggttaattgagtctcatcaagctcaacttttttaccatgacttcctcctgcnaggaataccctttctaaaaatagatcctc

SEQ ID NO: 25760 - DNA, 442 bp, Glycine max
  unsure at all n locations
agcttttgatttttgtttgaagaacctaacatggaatgtatggtcacccacataagtaaacattatctccctttcactgtaaatatcatttagtcttctaaatttaggctaacctttgtagatgagaattgaatctttatcatattcaagcactttgaccattaataccctcccttgcttatcaatcaactcctagtctataaaaacttcattcttaaatgttatccaaaactttggacaaacaaagagagagacctatttcattgacattggaaagtatgttcaaacatcgatatatcaaanatgtcatttacatagtaatgtattttgtatagggttttgaacaatgtatacaattctttgaaaaacataaataacaagtacagaaacaactcaagagactattcacattcatgataagcatttgagtaactaaattata

SEQ ID NO: 25761 - DNA, 373 bp, Glycine max
tgcattcatgaacctaacaaacaatacttatgcatatcttcagtcctgctccaatgaataaatcgttataagtaaaacatgtatgtttattctaactcaccccatcttggagcttgtcctctacagcagtggcaccaaaaagaattaggttcttctcaatcttatctgatacttcctcaatcattatatcctgatcagcactgactacattcttggccctagagaatttactatcaaactccttgtattcttctgcatcaagttcacgataggccagtataaaggttctcagacccgcatcagcatactcatgcacatgctccatggttttctcttcaaactccctcctattcttggcaagcctttcaaacat

SEQ ID NO: 25762 - DNA, 425 bp, Glycine max
  unsure at all n locations
agctttttgtatttgttgttggaattctgctctttcttttgaccagctnttctgatccggggacaataaacactgagaatgtttctcactatattaatgcttatccctatgataatattatttattcagagaaagaatgttcaacttgcaaaattccaaagtgagtttgctactattgcagaattntgttgaaatattggttaaatctatttataaaactgtcttaatttttttatgcagacctgctaggtcaaaacactgcagcatttgtgatcgctgtgttgcacgatttgatcatcactgtggatggatggttagtaatctttgacattctccctctatatttgtgttgatctcatttaatatatatcatgtgtttcgttggagttctactanaagttgctttactcacagaacaactgcat

SEQ ID NO: 25763 - DNA, 407 bp, Glycine max
  unsure at all n locations
ctacacccattgttagtccatgctcagcaggctcttagctgttcatggtctagtcttctacaagatggtagagcaaaggttccagatgttcatgacattcttagtggatcagacttgaaagtggaagtgatggaggaaacaattctgagggatctcacacgtgagatgtgttcactcctctctgtcattgcttctcctccccttaatactggaatcccttctttggaacaatctgggcatgttagtcgattagatatgtcttctcttaaanacttggatacagttgcatcatgctccatggttgggtatgctttccacctgttacgaaatatgtatctattatagntctttcatattttgaaactgtagtttgtgatctttatttctcancaattttatatgacagt

SEQ ID NO: 25764 - DNA, 420 bp, Glycine max
  unsure at all n locations
ttctntactatgcaaggaataaccaaggaaaattccttcatctgacttagcatcaaactttcctaagttttcttttccattgtttaatacaaaacactcgcaaccaaaaacatgaagatgcgagatgtttggtttcctaacattgaacagttcatatggagttttctttaaaatgggtcttattaaagccctattcatgatatagcatgcagtattaacggcttcagcccaaaaatattntggaagaagagtatcatttaataaagttctagcaatntctttcaaagaactatntttcctttcaacaactccattntgttgaggggttctaggtgcagaaaagttatgttcagtgtcatgcttatcacanaataaatcaaattatttattttcaaaatcaccccatgatcanctctaata

SEQ ID NO: 25765 - DNA, 401 bp, Glycine max
  unsure at all n locations
tataagaacaaaattgtctcaattatttccaaatatgcatgttaattangaagcatcaacaagaatcaagccaaggctattgtgcaagcaatcaatggggcaaaacacaccaaatgattatgatgatggatggctcanattctcacaaaggtaaactcatcactttcaaattgagctttcaaaactatcatgacatgtagaggagaatcaaggatttcaagtcacaaaatgtcaagaacttttattttcaaaacaattacccatttcttgaacatatcctataattcaaagaanaacatgcaaagtcgtacatgcacacaaaattgacccanaatatttaaactaaaatccgacgaaactaacaacattaacaaattaacacaactaacaaattaacaaaa

SEQ ID NO: 25766 - DNA, 401 bp, Glycine max
aaaacttgaggttacggttatcaataatgtcaaaccagcacagataaactaataaacagttaaattatgtaagtagagatgttgattcctattccagtcaaagtagaccataactattttaatttacctttcttgatattcttgtatataggaggatacaattgatgacaatccaatattcaatatggcctgaaataaaacctttctgcaaacttagccacatatatagctttctgtttaatatcatgtggagctttttggatcaactacacttccctcttcatattttccttcctattaatattcatggtgtataaaacacaatattcaagtaatcacataccaagaatcccataataaatttgccccaggccgacgaagttacctcatatatatatata

SEQ ID NO: 25767 - DNA, 273 bp, Glycine max
agaatctgaatacccattagctatttctggaacagcatatagttgtatttaaagagggcagaagacaaataataaacgtgctgcaccagctcctgctgcaaagcctcctcagcatcagcagcaacaacaacagcaaaagagatatatgcagaaccaacagcagcagactgggatcaagcgtgctcgagcatcagcaccagttggccctgcagctgtcctcaagaatgtcaattcaactattcaccactaccagcaatctcttgcccatcaatc

SEQ ID NO: 25768 - DNA, 347 bp, Glycine max
  unsure at all n locations
tctttacttgtatgccgancaagcgctaatatatggagaccttgatattgaataacacaactctcgagaaattcaatggcataacttttcacacggatgtccgattctggcgcataatatgtcgagacgctcgaaattgaacaacggaagctctcgagacattctaatggtcataacttttcactcggaggatccgatcaggcgcataatatatcgagacgctcgaaattgacgaacggaagctcccgagaaattcaaatggtcataactgttaactcagaggtccgattcaagcgcataatatatcgagacgctcgatattgacatctgatgctctctagaaattc

SEQ ID NO: 25769 - DNA, 405 bp, Glycine max
  unsure at all n locations
agcttctattctgccaaaacgaaggagactgagtatggatttaagataacaaagctagtaacagtgctctgggtcaaacacccacatcactacatgaaagagctgagagtatttcgggttttacaaaggaacgtaatttggaaattccgaccacgccaatgtgaccggggttcagtgtaggttacgaaaataacatgcatttcatgaaaggataatgtttacaaagtctctttctctaaggtttttcaaaggaagcataagacaagcaatggcagttccaaagtcagaaaagatgcaaagacaagatgaaactaacaagaaacaatcatagaaccatgattacctcgaaagagaacgaaagatcagattanggttttcgttctctaccgaaaccgcaagccaagt

SEQ ID NO: 25770 - DNA, 396 bp, Glycine max
agctatatttctgtaactaccaaagttcaggttaaaggctgttcctactgattgcagtgaatgccccatctgcttagaatagttctatgtatggaatgaggtatgctttttcctaattaaggatctctaacatgtcatgccatgtgctacttgcccatctattactgaaacatgttctcctcatctgacctcatgaattatttgatccctgcattttttacaaagttgagatgcaatgtgtatcggtaaggacaactagaaaattagtttcacacttactctaatgcacgtccctggcctcgcctgtgctcacaaatttcatgtagaatgcattgatgattggcttatgctcaatggatatgtcctcgtgccggtgtcacttttccaaaccttatc

SEQ ID NO: 25771 - DNA, 370 bp, Glycine max
cccaccatattttcatagtataacactggtaatgtgtctattattattgtgatcatctctttctcctcatggaacgtaccacttgagctgccaagtctctccacctttgggcgtattctttgaaagataagtgcccctttatgcacatgttctataagtgcatactatccggagccatattaaaattatgctgatactgcctaacataggaaaccattagatccttccatgaatggactcaggaaggatccaagttagtgtaccatgtaacaactaccccagtaatactttcttggaagatatgtatcaatagatcctcatctttttcgtatgcccgcgtctttcgacaatacatctttagatggttctt

SEQ ID NO: 25772 - DNA, 216 bp, Glycine max
atacatgagaagaaatgaatcgacttatgacgaatgcacttcttaccaccttctaagagaaagatgcttatgacaagctattataccctacacaacgtatcaacgagtctagaagagtaccataaacagatgattatgactttgaggagagccatattctatagcctataacttgcatgccttacgtacctatgagggcctaatacttacattcaa

SEQ ID NO: 25773 - DNA, 566 bp, Glycine max
  unsure at all n locations
tactacacacccttcgaatatacacactcgaacctctccatccatacacaaccaaacaaagggagggantttgatgcattgatagcacggcanagcgagncgnacccggagaccacaaaaccgacccggcagcaagcaagccagttaattattgtgtacccatcacatgaggcactaggcggcgcgcaggcaaaggcgcacaacaagattcccacatccacgaagcgcgcataaacccaccatccaatgaagcccaccttcaactgagctcacgaacacccacgtaacccacatacacgggggtctcaacaccgaggaccaataaatccacaccaagccgtcgcaacatcaaagcacgacaacattcacacagcacaagctatcacagactaacaaaacaaggcaaaagcagaaaactctgcgcagaaccgcaaaccaaaaggcagctttactaaacagaagacaccactgccataccctaacccaattgggaaccaggggaccaaaccaaattctaccggagatccataagataagcctacattagaacgcgggaggagacgaag

SEQ ID NO: 25774 - DNA, 457 bp, Glycine max
  unsure at all n locations
taagctntgagcatattctaacgacaataactgtataatcggatgtccttattttgtccctgattatatcaaactgctccaaattgaagatggaagctcagtacaaatttaaacgagaataactttttactcaaatgtgcgattgagtcacgtaatatatcgagacgctctatattgaaaacggatgctcatatcatatgtgaaccgtgataacttttaactcggatgagcgattgagtcctgcgatatattgagacgctcaatattgaacacagaggctctgcgcagatgctaacaacaatatctttttactcagatgtccgattgagtacttgaatatgttgagacgctcgaaatagaaaacaaacgctcctagaaaattcaaacgaataacgttttactcacatgttcgactgattcccgtatatatcagacgctctaaattgaaacgaagctc

SEQ ID NO: 25775 - DNA, 309 bp, Glycine max
  unsure at all n locations
agtttgttagattcctgctttccactgagtggcttgacaaatggcctgccaacactcaaatcactttacccangaacttttcaaaccactgtccaatcttgcttaagtctatatacgtcaactggagtcctaaaccttttaggattctagactgctggttatcagacaattctttcaaagaaactgtgcacaattgctggtcctccaatcagtaatcaagatggcgaagttatgttcttcatgaaaaaattaagagactcaaataatggctgaaaatttggaataaggagaactatggagatacttaca

SEQ ID NO: 25776 - DNA, 314 bp, Glycine max
actaagcggacctcctttaaaagcttccttgataagcaagagcttagcttcacacacccaaattaaaactaagctcaactccttgacaaaatacgtgatataacaaaaaaagagtccctactacgaagactactcaaaatgccctgaaatacaaggcttaaatactatactactagaatggtcaaaatacatggcccaaaagaacgaacacacctttatagtatttacaaataagagtggatccaacctagacccatgggctcaaaacaaaaaaaagagtccctacttcaaagacatactcaaatgccctgaaa

SEQ ID NO: 25777 - DNA, 427 bp, Glycine max
  unsure at all n locations
agcttatcttcactttgtacatgcagcctatcaaggatattggtctataatcatttanggactgaggatggttaactttggggataagagccaagacagaggcattgctgcctctatggaaacaaccgttgacatggaactcatccacaaatcttctgaactctggttttagcacactccagaattccttaataaaattgaaattaaaaccgtccggcccatggcacttatcttcaccacaactccacactgcttgcttaagctcctggtctgagaaaggtaaaattaaaccctccctctgcctttgatcaagagaatggaattgaactccatcaatggtaggcctacagggattctgctcaaataatctgttgagaaagatagtcacagcgcctatcttcacctcctctggttgctggacccacag

SEQ ID NO: 25778 - DNA, 391 bp, Glycine max
agcttatatgatattcaaatggtcataacttttgactcggatgttcgattcaagcgcataatatatcaagacgctcgaaattgaacaacggaagcattaaagaaatccatatggtcataacttttcacacggaggtcagattcatgcgcataatatatagagacgctaataattgaacaacggaagccttcgtgatatgcaaattggcataacttttaactcggatgtcagattcaggcgcataatatatcgagacgctcgaaattgaacaacggaagctctctagaaatataaatggtcatatctattaactcggatgtgtgattcaggcgcataatctatagagacctctaaattaacaatggagctcttggcaatcaaatgtcataac

SEQ ID NO: 25779 - DNA, 302 bp, Glycine max
tttatcgctactagatccaggatggtgtatctttatcaaatctgatatttaactggtataaagagtaggcttcctttgtgtttgggggcaaagagttgagtgcaaacactagtgaggttgacaaatttattttcaggtatctaagtcatcatatgtccacttccagtaattcatctataattccagtgtgtaaaggtaaaactatcacatatggatgctgacgttgctggccaagaacatagtttacaaactaccaaggatttctcgaattatagctacaccattggcctaatatagcataa

SEQ ID NO: 25780 - DNA, 386 bp, Glycine max
  unsure at all n locations
ttaatcttgattaggacaaaagtttntaatataagtactagacttaaaagaacaataacatttgaatttttgtcacaattttcacttcatacaataaaaaaaatcttaaatttagttgttaatataagtacaaaaaaaatatacttgtattttgaaaatttgtctctaattaatgcggagtgaaaacattttaaaaggcacaaaagttgtgttgaatatttattaatattgtaattgtttaaccatgtcaaaataagagtataataatatgaaatatattatattacttataggatcaatcatcctcattgtgaatgtgggcttgatctctctaaagcccctagatttctatgcatccaacgacaagttgagtagttgcaatggat

SEQ ID NO: 25781 - DNA, 421 bp, Glycine max
  unsure at all n locations
tattatgtgttgatgattataacacacacacacacacatgtattaaaaatcaagaaggtgaaattgcattagtcataagttgaaatatgctattatacggtgatttacatgcaaggaccaagaggtgaaatatgctaagcatttgattacaaatgcctacatgatagaaagaatgtccaatattgtgtttgctcaattgttgatgaggcaaaaagtctattgacactaccaagagctttagtttatctctctatcagattagaataaaagatcaagaatcaattagctggtgttgatggagttcanaatgtcagaactcaacaataattatccattctactcacaatattgcaaaaatgtcatctttgatattttgtagtcactttatacttttaggatatttactactttagagatatgt

SEQ ID NO: 25782 - DNA, 366 bp, Glycine max
agctctttttctttttcatttataaatataataacaccgaatgttggaatagtactaaacatttccacgattaggagcatgcaatgtaatcgataaataatgtgctcctatacatttagtgatttttagaggacaaactaatcagtggccatgtgagaatagcacgcacaatcatatttagtgtgcacgaacacaaaatgcatgcagagccgttatcttggagagtgttctggtagcacagattacgtctacattaacgcctttacaatctacatgcacatggacgacagagtgagtattaattgtaaatattagataactacatttctaacctatatttctatattgattacaataatgaaatat

SEQ ID NO: 25783 - DNA, 350 bp, Glycine max
aaatgaggacaggaggcagacattgaagtaatgctgaaaaagttatccggagtactgacaatgtaagattccttttcttaaagtaaagacattcctatcatatgccagtggagtgtaatctaacctacacatctacctccaatcagctaaatgaactatacgccaacattagaatgagaattaggagataaaggaaagcacgtccttcctcataacagcgtagcatacagttaccagtttttgtgacagaagcccatacttacaaccaagtgatggcagatagctcacttgaacttgactggatctttgctggaaagaaaagaaggatgggatttaaagttaccccatac

SEQ ID NO: 25784 - DNA, 390 bp, Glycine max
  unsure at all n locations
agcttgctctcttctagcagagactgatttctgtatcatttgattcaaggacaaatacatagatcaagctacaagccaggaaataattctatacttactaccaaaaggattattggtggcaaatttagaggaatagggtaatttaaaaaataatcagaaattagtagattttgaaaatattacattgataagtcatgttttaaaatattactttatataaaaatatcatgttctaaaacacgactttagaactacaattgtaaaaagatattgaaattatattctagaatacgacttctaactgtttatatttattgtaataaatatattaaaattggattcactactacaaaaagtattntttatgacgtgtgatctaccacgattatt

SEQ ID NO: 25785 - DNA, 394 bp, Glycine max
gaaaatatgagatacttatttgaggtgaagaggcccaaaacaacattcccaaactgtcttcatactttcatctgtataaagggagaggttataacttctttcactcatataatagccctattcttctggagctcaaaattcccttatctcccatctttactgcgtgtactagaaaagctcattgagcccaagaaaaaagaaataaaaaactaatgagtaaaacaatctgtttgaagggggagacacataccaactttattttagctcttggttactgactattgtatatatggtgttcttttgcagggttgtgatgctaatgagacacctcactgtcaacttgtctaaccctgacattcaacccattgtaagtttcaatatcaatcacaatgat

SEQ ID NO: 25786 - DNA, 499 bp, Glycine max
agggtttttgtcctcgatgactgcattcgataggtacggagattcctccagagacctgaagcatgcaaactagtttcttctctctagcttccgcaccgttatgaccatcgaagactgtcacaatcccgaccgcaaccttcttgatcccgttcggactgttacacgtaatctgcattatccatcgaatgcttctgaccaatcttctagaacactatccacggggacatagatgttgttgccggcgaaggtaatgctatacatcgatgtcgcaaagagcgcgatcctcatgctagtttctgtgggcttggaacattgcggtttgccatctcgctgtggtttctggagggtgaatctgtttggagaacttacactgggggcatattgtggatctgaacaccaccttgactcacgcgctcttgtatacagtcacgcactttaactactcaccgagaacctatgtgatagtggctcaaacatacaccatatcgctagtaacaag

SEQ ID NO: 25787 - DNA, 456 bp, Glycine max
  unsure at all n locations
atgtacacttctccagcagacaataaagtgttatgttcccctttntagattactttgcgatcaaaatcttattgctggttttagacatcacaagtatgcaacagtataaaaatggagaacaaacaatgtctttttttttttcaatccaacaacattatgtttcactgttaagcactattactggcactatcatttgactatatgtccaattcagtagctactgtatgtctttgaacccatcttcatcacatgatgtcaccatgcctcaacttctagctactgcaacatccacacgcctcttttgcccgaggtattttctgcctttatcagccattcttcttctacacccactaataatagaaaanaataaaaaatatccttacttatagcttatatatattgacaattcgtaagatttatatgaattgttaatgcgtaagtcattacgaatttaca

SEQ ID NO: 25788 - DNA, 345 bp, Glycine max
aaatcaagaacaagctggtggacacgttgtttgcgtgtatgatatccactccacaaggtttgaagtagaggagaccttcaaccctataacgcaacgtggcggacaaaaatgggcagttaacttgaatggtcattattgtcaatgctgaaggaattctgcgcttcactatccatgttcacacattatcgctgcttgtggatatgtgagcatgaactactaccagtatatagatgttgttacacaaatgatcacatcttaaagcgtactccgcacaatgagtggctctagagaatgaatcaggtatacctcattctgatgacgcatggacacttatcactgatccac

SEQ ID NO: 25789 - DNA, 453 bp, Glycine max
tccatatatagatcgttgcacttgaaacttcttacttccaaccaatgatgtgaatccttcaggttgtgtcatgtacactgtaacgacccgcctcgtcgatatgatatcaccactttataccgcgagaaactccaatttttcaatgagaactctgctaattcgcttatgaaaaatgagaataattttttttctcaacatacattcaccaaacaacgcaccatttactcaagtgaatatatatatataggaatagtgactcaatacacatcatacacataatggaaagtaaatttgtgatttacatcttcaaatcaacaaaaagaattaccgaaccagctatggacgagttgattaacaaaacacaactctcttccaaaataatcccatcgtcatcacgttggctcggtgatttcacacaagaaattcacttctcgtactttactgctgtcatct

SEQ ID NO: 25790 - DNA, 339 bp, Glycine max
aataactttaactcagaagctttatcaaatgcaaacggcaataacattttactcgaatgttctatttagtcacgtaatgcatcaaaatgctcgaaattgataacagaagctcggtgcgaattcaaacgacaattagtttttactcggatgtccgaatgagtcccttcatatatcgagacgctcgaaattgaagacagaagctagtactaaattccaacgacaatcatattttactcagatgtccgatggagtactctaatatatctagactcttgagattgtcaccgaagctctgagcaaattcatacgaacaatactgtattttcgaatgtccaatgg

SEQ ID NO: 25791 - DNA, 376 bp, Glycine max
aggttcatcaagtcaagttgaaatatggaagttttcattctgcataattggggcaaaagatgaatcgagtcacatcactgcttcgtctactgccaaacatatttaggattattgatgtccttgttacttccagtttcaccttgacaaagatgtcatggaccatgttgaaaatctaaattgattcaaccccatatcctgcgtaaaaatacgcaatacttcgactgtacatcattcgcatgcatccatgcttttcattggttgcattgctcatcgcattctttccttgaaaaataagatacaataatacgaacttatcaaaaagaaaatgatacgctttacggcgtccttaccgaactcgtgctagagctagagtaat

SEQ ID NO: 25792 - DNA, 401 bp, Glycine max
agcttattttcctactcctgaggatccggcctcaggagtgcaaacctgtaataagcacagagattctcccctctttcacaatcacaggggtcttcagaaaagtgttcaaagtatcttcatcaaatttgatcagatgacctctgaccctcacctgcttaggtgacttgtctttcgggtcgtagaggtttgcaaaaaattccttcacaatagcaacatcgatgttgccgtcagcaaaactagtcagctcctcatcccattttcttctctcgagttcctccttgaactcatcgaacttagtgtaatatactactacatatcctcggcaccacaatatcgttatatatgtcccaagctccctgagaatggaatattgatctcgtcaatttgatctgagaggatga

SEQ ID NO: 25793 - DNA, 435 bp, Glycine max
  unsure at all n locations
atctcggcacgtgtcggacttcatcatttgtgcatcataggatgccaagtatctgcaagcggctaaccaaatgttgcatgtcatcaaggtataatccccggacgaaattatggtatgacagatggctatcaaactcaggggcggcactggacccttccgccgcggcgtacctcctatatctcttcgtggaaagttntatcggagccatttcctgcgaggacaaacgtttggaaagttaatctacaatgaaatgtcattntaaagcaaaaatggcatactaatcttttcgacttagaacaaacttacgcacatatatccctgaagaagaacatttatgaatgtgcatacacgccaaataatctactatctatatcaatatacaacgatattgcaaacattccaactacttatattccacacatattcctttgaaaa

SEQ ID NO: 25794 - DNA, 385 bp, Glycine max
  unsure at all n locations
agctttnttacaaggatcagnccattcgttggagtgacgattgtcaagaggcgttcggaaagatccagcaatgtctcatgaaccccccggtgctgatgcccccagtggctggaagacctctcttcctctatatgatagtgttggatgagtcgatggggtgcatgttgatgcaacacgatgattctagcaagagggaacgggtcgtctattacctaagtaagaaattcatagcctgcgaaatgaattactgccttttagaaataacatgctactccttggtatgggcgtcccatcgtctgtgacagcacatgctctggttattcaccaactgagaagggagtgggagactatggatcatacgttgttctctaccatgcatgcatca

SEQ ID NO: 25795 - DNA, 452 bp, Glycine max
gaagttcctaaactgtccagagattcaaataatatctttttaacctaatgcaaaatatgttataccacataggctgcacacttttgttgatttatcatttaagaatgaattcaacatcatatctttgaataaccttttaattgattttctatcatccatgagcataaaactgaatagtttatcttcccacccccaaggagaattcatgttttaattactttactattcaccatgatgatgttcattctataatcttatataagtaaaataaaattactttataatctcaccttcctggtctttactaaaaattaaatacaataaaatgtaccaaaaaaaatgtaactgcaattacttcatcaataaacaaaaaggaatttcaattagaaatacgaaattaaccaaaattctgagattaccataaattagaatatagaacaagtggtatacaa

SEQ ID NO: 25796 - DNA, 396 bp, Glycine max
  unsure at all n locations
agcttangttatattataactaccaacttttctgtgagaataaaattcactgatcataaccaatttttgaaaaaaatgtgtgttcacctgaagggtggacgctgtgaaaattttcctggacgcccaatatggactctgatgaatgcccacatggatnaaagaacatgttttggaaacattgggctgatttaaaatagaagaaatgaatcctgagccctagcatcacatgaccataaaaatatgacacttgagtgtcgttataagtgcatgcatgaccaattttgcataagaattccaaatcatcattcttgcattttgtgtcatggaaataatgtggagcatcccttttatacttgagccataccaaactccgcatgtatcatgtctagccattct

SEQ ID NO: 25797 - DNA, 134 bp, Glycine max
tcttcaggaaaggacttccagcttcctttactctaaacactgctcttaaagtcctccaatgactgaatggtccttcatatgccatcaactaagatggtcgctgactcatctaacttggtcccaacctctgtcaa

SEQ ID NO: 25798 - DNA, 424 bp, Glycine max
  unsure at all n locations
gcgtggatcgttgactcgatgacnacnnnaaaatanatacccngcttatacccaaatgacataacacgaggaaggctctcatttatttttgaaagaagactgggagggttacatgttataccaactcatatgtattcaatacaacataaatgaccatcctatatcaattgtaaaatancacatatcacttcataattgaaaccatcgaagaatacagatcaactttaggtcatgtctggagcttgttcaaccattaaagataacaataatttttcaggaaacattttcaagagaggactctatgattcatatagaccattgaattttgagcttctgataacacatgaatctataaagatatggtaaaattcacaacaacataacatctcttgcaactacatgtctataataggtgtaacttacg

SEQ ID NO: 25799 - DNA, 363 bp, Glycine max
atcttctatactttatacaagaatgaagctctgataccacttgttagacaagtggcctcagatatattaagaagggggggttgaattaagatatcccaaactattttcccaattaaaaaattatttcactttcttttcaagttatagattcccttaacaatgaacttcttaaatattaattcaaatcaaacaatttgaatatgaatgtaaagcgataataaacaaaggagattaagggaagagaaagtgcaaactcagatttatactggttcggccacacccttgtgcctacgtccagtccccaagcaacccgctggagagttccactatcttgtaaattccttttacaagttctaaacacac

SEQ ID NO: 25800 - DNA, 392 bp, Glycine max
  unsure at all n locations
tgggtcatggttcagtttatggattccttgtatctctattccatacacaatgcaaaggataaacatgttgaatgtcaacattacattgaaatatgggttaaggaatcccaaagagagatctacccaggagcttacttgaattagtgagtaataattatgaaatgcatgtcaagaatgtttgtgttatacgtagctaattgttgtcgaattcagggcccattggcagctagttgtgttgtgtactacgaatgacattgatgtgtggttttgttcgacgcgtaagaagcctgatattcatatcaaagctgcaattaacaacgtaagttttatattatgacttattngatatatcataaatgtgcaaagataatatgtnttgtaatcgtatatac

SEQ ID NO: 25801 - DNA, 387 bp, Glycine max
tctgtcttagtctgagttcagcctaccatcctcagactgatggccaaactgaacggaccattcagtcgttggaggaccttttaaaagcatgtgtcttagagtagaagggaagttgggagagttttcttccattgatagagttcacttataataacagttatcactctaccattggcatggctccctatgaagctttgtatggtagaaggtgtaggacacccctatgttggtcaaagcccggagaatgcctcaccttatgaccagaagtggtacaacaaaccactgagaaagttaagttaattcacgaaaggatgagaacggctcagagtacgcaggatagttatcatgataagaggaggaatgatttggaatcgaagttggtgatca

SEQ ID NO: 25802 - DNA, 447 bp, Glycine max
  unsure at all n locations
ntgattnttgtctatgattgaatgctgattttgttatttttattaagtatgtcgataagggttatcattcgcatgaaatgtacatagttatggtgtgttttggtttggatctgaggcctaataggggcctatgttgaggggctgaaaatccctaattgttctggaaatctcgatgatctcagtaagtgcacctgtgcgctaagcgatttcatcagtttttgttgaatatctaggtttccagatgaactcgctaagccagctccgtcccactaagcgagttcatcatttttgttgaattattgaatgcttgcatgaactcgcttagccattgcacttaagcttagcgagtatttaaatttctagtttttatttgagttgtatgaacttgctaaaccggcatgccgtgcttagcgagtaagtatgcttagttcacgctcttaaagtctc

SEQ ID NO: 25803 - DNA, 442 bp, Glycine max
gcttttaggagttgaaaaggccagagaataatatctagaagctcttgatttttgacttgaatatatatatcattattggagaccctaaaaatctgactttattccctttccaaattctgtctagctattatgccgtggcctcaagttctagtttacgttgttcttcaatgttagggttcgtcgtctcccaaatgctataacgatatcattatgtgaactgtgaatcacagcattcaactctattgacagcttgttatgtcttattaaactaccttaccaaccgaactaacttatattatatagcctctcgtccacgcagcgcatgccacgtgaccctatcactgcttttctaacatacttatattactgagtctctagatttggtcacgaattatataaacataatgaatactactatactacgtataatttgcacagatac

SEQ ID NO: 25804 - DNA, 423 bp, Glycine max
  unsure at all n locations
agcttctttggttgctacctagtctataaatagaagcatgtgtaacacttgttgtaactttgatgaatgagagtcttgtgagacacaaatcaaagttcaaattctctccctttttcttccttcaatttcgtgctcccccctctctctttctctccctctttcttttcctccattgaagcatcctctccaagcttcttatccaaggctcatcttggtggtgaagctccttcttccatggcttattccttaatggatggcacctcctctcacctcttctcctttgtcttccgctgcatctccatggtggaaaatcaccattaaaggacctcattgaagctcanagatccagcctccatagaagctccacaagcaagctttcatcagtaaggtttcaaatcaagcgtttcaattcattctatgtac

SEQ ID NO: 25805 - DNA, 456 bp, Glycine max
  unsure at all n locations
taagctttcattattctatgtacccgagtggtccacattggtttcgttcttttattctcgtttggtactttgtatccccctgtgacgtgcttaagccattttacttaagtcatttctcgcttaacttaaaaataaaataaatttccaccgaacgtttgaattgtattatccgttaacttctgttaaaataaattccgaccgttcggtcgtgccgtaaccacgttggaaatcaaaaagaggtaaaacataatataataataaaaaaaaacatcttttagtaaaataaagcggaaaatcaatcggacattttctctttgggatatctcattcttaatcgaattgattaataactaaagtgaaactaaggctaaaatcaactcgcctagtcaagctcgtccataaaanatacgtttgtgaagtttgtcattacaatttctcactaagtataatggatca

SEQ ID NO: 25806 - DNA, 431 bp, Glycine max
  unsure at all n locations
agctntatatatgctactcaaaaaatgctagaaggtaganaaataaaacttatttattgaataatgaaacaagtttttcaactagtaaaaaaattaaaaatgagtcgaaatatcttgtcaaacataatcattttatgtgtgatttaattctcttccgggaaaaaaataaaaaacacaccctacccctgatcgtcgtcctggttcacggcttccatctcgttgagtaccatgttccacaatggtacaactaaaatgcagattgcagaagaaattactgtttaatctactattttacttctcttcagaaatctcctcgataagtngctcatgatggagtcttattctaatgtgaggtacactnttcagtcttcactgtattcaacagccttgtatcagggacgctcgaatatgtaaagcattcttaggaactc

SEQ ID NO: 25807 - DNA, 436 bp, Glycine max
tctagttggttattcatatgtattattaggagaaaagcttgttcttctaaagtacttggatagaattaataatctaataaaagttcttccaagtaaaacacgaaatactgcttcaaaagatactttaaaaagtctaaattcttgttattatagatttcaatttatgtcttttctagagaaccatagacgttgcttctgatctttaaaatatttagtaaaatcattaagaaatatatcaaagatatgcttttgtaaaacactgttttccaatacttaaaacaagtatctaacatgtaaaagtaaatgagaagcagtaaagaatggcataacacccacaaaaattataccagttcacccacaacctttgactatgtctagtcctacgcctataggatttccaaacacaaaaacttataacaaagtagcctttctccta

SEQ ID NO: 25808 - DNA, 328 bp, Glycine max
  unsure at all n locations
agccagtctangttcatacactgatccgttcaatnggcataccgaggaagaattatctgacttgtaacctttgggaaattccatataaacttcttcaaacaaatctccattctaaaaggcattattaacatctaattggagaatgcaccaatttctagtagcatcaacacaaagtaaaactctcacagttgtaagcttggccactggagaaaaagtgatgtatctccatgtggaacttgtaagccttgaatcttctttatcaatggagtcctttacttcttgaatatcaatggccgcggaatggagaacgaagaaagatgattggaga

SEQ ID NO: 25809 - DNA, 466 bp, Glycine max
  unsure at all n locations
actaagcttattaaagttatatggcttgaaacaagcaccgaggcagcgtcactatatgtntaatgagtntatgagcaagtcaggattcaacagatgtgacatggaccattgttgctacgttaagatatatactaatagctatgttatccttgtcgtgtatgttgatgacatgttgatcgcaggatctagtatggcagaaattaacaggttgaagcaacagttggcagaaaacttttggtatgagaattcttagaaacatatcagaaggaattatgaagctgcctcatgagaaatatatacacaagttacttgacaggttataccttgaagattctaagactangaatacccctttgggatctcattttgaagtttcaaagaagcaatctttgtagacagatgaagaaaaatgctacatggtaagagtaccatatgcatcatcagtcgacagtttgatgtccgttat

SEQ ID NO: 25810 - DNA, 415 bp, Glycine max
  unsure at all n locations
agcttgttctaatatcctctagacgttataagaggggccaatctttcggaaaagactttcaagaagtttttgaagatttctcttgatgaaaactataacctgcatccttttgagttcaaccattcccacttttgcaccatggggtttgttacctggtgggagaaatattattcgacccgttcagttggagacactactatcatgatctccagacttgagagtggttttacacaaccaacggtcgagaatatccgctcaaaccttcaagctcgaggtattaaattacttttgactntctaaattgatatgtagttttgccttttctaatattcttattttcaggcaaaacaatcatgacgaagaaagtgctgaaacgtctcgagctgatgtgagacccaagaacccactggggtga

SEQ ID NO: 25811 - DNA, 425 bp, Glycine max
  unsure at all n locations
gttggaacaaacaggttgtatnacaaatttgtatcttatatgtatatcatnngnggaaattaaaacaacatcaatttcagccccatttacatgtttcgatccatcgaaatataatatccaaggtttaattcatatatagcattccaatattttgatgttcgaatgatcaaccaagagatctacctataacttaggctctaatagcttttaatggcacaaaagtaagggaaaatccagataatgcaagggtccatttccctattctattgtgcaaaatagattaagacaacatanatttaataacattgttatgagagagtacttgaacattgaaagattctatataatacttnaagttagtacaagaataatacaagtgtaagcacagttnntttattgcactatatctaatnttgacatcatta

SEQ ID NO: 25812 - DNA, 305 bp, Glycine max
agtctaagttgtattttatgccgaagtcccttatgaggaaacgtgttcagtggttctacatgataaaacaattggtgttaatggtgaagatgatgattcaataattgatacttgtgttggacatttgtgcacacacatgttgcctaacgtcatcaacgaatacgaagttgacggcgtgcatgcaaaatgtaatgatcattataaaggagaattaattaacatcatataatgtgatttatcttatatatacttgctttcatctccattccattacataacttaatatagtctttgacattatttaa

SEQ ID NO: 25813 - DNA, 414 bp, Glycine max
ctgtagtctttggacacctcagagaccttgaagtttctgttgtggtatccagtgaagacattttcacggtgtgaccatgctgtgccaggatggtatgctatgaatgcatcagtgacatcctggccagcacggtctgagattggaacatcaccaccagggtgctccttgacccaatctgagacattgtacaccttacctcgaattgagatccataaatctccctccttggtgtgacccttcagctcctctgaggttatgtacttcttctccttctcaacaacctccattgcttgtgttaaccaaaaacaacacaaatcactgaaatcatacacaatgagaactacaataagaagatatatagaatatagacagattgatcgatacgaacaataatggcgtatctgggtcttctgc

SEQ ID NO: 25814 - DNA, 146 bp, Glycine max
  unsure at all n locations
agtttaatatcgttgttatagaaccanccacggcaagaattgcttgagcataataaacataaccaggaaataataactattccgtgaaccgtaacgaaaagagtatttttaaattattcaaagaaaatcatgacactttttcttgc

SEQ ID NO: 25815 - DNA, 146 bp, Glycine max
ctatgcaataatcgaacttgcgcctctatatagatacactatgctacacataaacagtgtcgctatacatatcactaaaacttctaatcgatatataccgcacaccgccaaccacacaatgccctccgggacgcccacccccatct

SEQ ID NO: 25816 - DNA, 378 bp, Glycine max
  unsure at all n locations
naagaggcgagatcgacagctacactgctttcttgaaaagacttggcagccttcacaacggcatcgccaagaccctttaaatgtgaaggagtggaaggtgactgacctagaccattcaattcaacccgtgttgaaccaatactggaactctaacaacaagttgcttgaccacttggcagaaaaatcctttttcaaaaggcctcaatttgtaaccacccaactttgagctatcgttgttaagatccttttcaaacttcagtttcctgtctagccaatcttctttgtaccacactgcagaatgacccttccttttgtacatacatcttacaccatagatattttcataatttcacaacattactcttttcaccatcaacg

SEQ ID NO: 25817 - DNA, 356 bp, Glycine max
  unsure at all n locations
aagtatgtagtgaagattntgatgatgccaaacaagaatcaaacaaggctgcttcaaaggataagcatatgcttcaagattaattacaagattgtttcaacaaacaaagccttgattcaagatttcttcaagatcaagccttgtctcataactaagtgctttcatgacattcaacgctctggtaattgattaccatgcagtgtatccaataccagaagacagggttgacaaatagctgttgaaaagggttctgaatttgaatttctaacatataatcaattaccatatgtgtgtaatcgagtactcacatcgaatactctgaaattaaatttcaaagtcatgacccttcaaattat

SEQ ID NO: 25818 - DNA, 303 bp, Glycine max
ctctctctgtctgccgtatgctgtcgcccattatctcctgtcaacatcactgccgccagccaccgtcattttttccagtgatcactggatctggtgtgcctcaccaagcatggcccagcccagaaggtttcaaagtccgaaaccctataactcaccatcatgtgcgtcatttctccgcaactctgtcaagcacatgctgctcacgcgctggtctatggtaccagaactcaggtgcaacatcacagtcagggtcgtcagcctctccatgtctagttccaatcttcagatcatcatttctttgct

SEQ ID NO: 25819 - DNA, 459 bp, Glycine max
  unsure at all n locations
nttacctctntattatgaagcatgcttaataaacaatttaatttctaatttaatnanannnncannnggtggggaaagatagatacattctaagacggctcttcagagaaccgtcttagattgtctaacttctaagacggttttccaaacaccgtcttagaatcattattttattttattcttttctaaaaaactatattctaagacggttctcgataaatcgtcttaaaaaacctttacattttaagacggttcttagaaaaaataaccggcttaaaatgtataatttttctaagatggtttctaagaaaccgtcgtaaaaaattgtaactttttacgacattggcaacatagacggtttaaaaccgtcgtaagaagtactttagaaccgatgtaaaatgatcttcttgtaagagtgctatttccagactcattggcgtttggacttatgacttttat

SEQ ID NO: 25820 - DNA, 351 bp, Glycine max
agtttttttttgttgtgcttcaccgacgaagggatcaaagtatgtctaaaaagaggcaaatctgatcatcatgcttatggacgaacactataacctgcggcaaatgaagagggtgcaaatgccgtataagaccatgctgtgtgtgacattgttagagagatagtattcgacccgtcctagtggagactctactatcatgatccaccgacttgaaagtggattacacagtcatcagaaaggccatccctaaaatcaaccacaaagcctacctaccgcactttcaatgacgaacatcacctttagtacaatccaaaaacaccaaccaagaaatgaattttgcagcgagaaagc

SEQ ID NO: 25821 - DNA, 363 bp, Glycine max
aatgaaaattacgtgatcctgaggtaaactctcatcttcatcaagtctataacactgaattagacttgctcaaactaattttaaggtaaaatctccacctattcaaaatttgacctctcaacactcaattcacactataaatggctcttttctttcacatttgccactcattttgctcatttgctttgaccaagcttttctacaagccctaattgacaatctaaactagaatcaactcactttaaactcaaatttccactaaccccaaatgttggcttctaaccctcaaaatcttacacttttgcacctacaacactaccattctcacatttaactctaagctaactttcccatcctctctac

SEQ ID NO: 25822 - DNA, 421 bp, Glycine max
  unsure at all n locations
taagtcttcttaggaaganntctcaaggaagctacctaggctataaatagaaacatgcgtaacactcgctgtaactttgacgaatgagagtcttgtgagacacaactcaaagttcaaattctctccctttttcttccttcaatttcgcgctcccccctctctctttctctccctctttcttttcctccattgaagcatcctctccaagcttcttatccaaggctcatcttggtggtgaagctccttcttacatggcttattccctaacggatggcgccacctcttacctcttctcctttgtcttccgctgcatctccatggcggaaaatcaccattagaggacctcattgaagctcaaagatacagcctgcatagaagctctacaagcaagctttcatcaataaagcatacctctttctga

SEQ ID NO: 25823 - DNA, 413 bp, Glycine max
  unsure at all n locations
atagaatactaagcttggctataaaggacatagccatcaacaatttatctatatcgtagtanactnccgntatgcgtncttcaatgtgcggcaactctctcgacataaagtcaacatcacaatccttcctcttaaccttttttgtggagcgactaaaaaagtcccctacatggtcgatatcgtttggcaaaaccctgacaccgctctcaatctctctgcacctccatctctaaagaagacctgagatgtttatttaaatctaactaacattctcttgaattctttagtattgataattgtaatgacccttctttgatactaaaacacatttattctttaattattcctaaatttgaagattcttatttaatatatatatatatatatatatatatatatatatatatatatat

SEQ ID NO: 25824 - DNA, 419 bp, Glycine max
  unsure at all n locations
tggcatgtcatatgttgatcatgagnggtcttgtttgacttttctcccgcaacaacaaacgtngatttgagggaagaagaatctgaacaagaaactcggcaagagcctgatcttcaatggaacccttttgagtcccttatgattcanaagatgaatgctatcattcatctccatcaaaagcatcaagccgaagttcacaactccttagagaacattacaactaagttcgagaacatagaaactaggctatgcctttgtaacttcttgaacccgaatgaggataaggctcagatatgcttatgtgattgtttgcgatgctctatggtctttctatcatgtcatgttctatttcgcttagcttgataatgatgttcacattacgtttgtctctgattaaacgcctatgcaatatctttttc

SEQ ID NO: 25825 - DNA, 87 bp, Glycine max
ttgaggatttggtctttgccagtgaaaggatcgatgcgggtctgaatcaaggcatatttagccatcctacttgcacgaatgagaaaa

SEQ ID NO: 25826 - DNA, 168 bp, Glycine max
  unsure at all n locations
atcttctttcaacccactgactgatctganatgcccagatcagacctctttatatctgccttctgcttcatcatgcttgcagcacgatgcaagcgatgtttaagaactcctatcatagctctccttgctgcaaatgttctatcaaacggatctaccactgaattcctt

SEQ ID NO: 25827 - DNA, 233 bp, Glycine max
tgaaagcttagagacaatgatcttttcaaggaagacttaatctcataatagatactttcactgaagtctataaaaggagtctcaaggctcagtagaacacacgtcacaacactcaattttttgaagtgttgaaactttgtcaaaatgtgaacgatcctatacttgtacctagagagtttattctttgcatcgaaaagctatttgtttgtacttggcctacattgtatatactt

SEQ ID NO: 25828 - DNA, 95 bp, Glycine max
  unsure at all n locations
agcttctttctctttgctcancttgacggcgaagccgggtctgttatggattattccctaccggacgacgcctcctctcacctcttctcctttgt

SEQ ID NO: 25829 - DNA, 192 bp, Glycine max
  unsure at all n locations
tcatgatgatgaatcaagtagttatgataacgacaaattgcctaaaagattgattacaagantgagtcaacaggttcaagatcaagattacattcccgattcattaacagaaatcaagaggattcaagattcaagaaaagctgatttcaagattcaagaaaagacatcaagaagaatcacgactcacgagaa

SEQ ID NO: 25830 - DNA, 322 bp, Glycine max
  unsure at all n locations
taanatctcttatgattacaacttttgggctaaacagttagctttctgtttatgntggagataatagattgagcttatatggatagcagatcggatccaaactattatgatgaaattttaatttatcagttctcctctattttaagtcttcctcattttacagcttgtgagggtggagagctgaggtcttaaagagatgttctgagatagggtatttgaacctagcttatacaggaatcgaagcgtttgagatagaaaactgcaaggcattgaaacagctgaatgtaaagatttgtaggctcgctgactgcttactcatcga

SEQ ID NO: 25831 - DNA, 178 bp, Glycine max
tgttttatggacacggttggtattgcacacaaccaaagtatccacagccctgaactctgaatgcacggaatccactgctttcaccaccagcactgtgagaaaaggaaacaatcaatattctttcccaatccataagaattttccacatgtgaatcagacaccactaccacatcagatt

SEQ ID NO: 25832 - DNA, 188 bp, Glycine max
tgtatcaaagcatggcaccctgcattcgcgacaaattctgtttcggcaggatcatctttgtgagggccatctatctcctctggatgtctatgcgcaccaccattgttgaaaacaacgatgaccacaggcaactggtaccgaaccaacgtctggatagaagatgaagagccacaaacatgcctcacccc

SEQ ID NO: 25833 - DNA, 212 bp, Glycine max
agtcttcattctgttcaattgctccaggttgctgcatggaagggcaaaggtttgtatggcgcgcaccagaggagcacaaaccacatacccttgcgacaggtacatatttttgattcaaggccagctgggctaccaagttaaccaatgcattcagcttggcttcaagcttcttaagctcaaatgatgcagctgaggttggagctacctcatgc

SEQ ID NO: 25834 - DNA, 400 bp, Glycine max
  unsure at all n locations
agcttgtggcttgttctttcattngngtgtaaggttaggagctctagcattgaaaaatgtactgcatccttacaactggatagggtagggctaggttattgaactgccaaacacagagtgcggtaatttaatgttgttcagttaggctaagttcaacaagagacgtatgagaatgaagtttaatttgaattatgccaacctcgcaagacatcggntattggtatttatgccttcatcataaaacacagaaataatttcaagtagagaaaaaccctaattgcatcaagtatcttagtagaaggacccaacactttacatatctgtttcacactccttgctcacattactggtttactagaatagaatactttgtcttacctatgatataatctttatgcaa

SEQ ID NO: 25835 - DNA, 380 bp, Glycine max
  unsure at all n locations
atctgcataacagacactactagatagcaatgtgattcctcttttcaacactaganacttgtgagaggttgtcatgtgattgtgaatgtcattatgaggtgtttgtttgtttgacttactaagagtttgttaggtgggtagggagaaagagctacactaacactagtacaaggtttttggttatggccctcatgtcttgtctgcattgtttttgttgtaggtcattgccatcaacaataagttcccaggtcctactatcaatgtcacacaaacaacaatgttgtngtcaatgtttataacaagttggacgagatcatcctcatccattggtagagtgtgctttgttttcttcttcaatttcataaacctcaattttaaac

SEQ ID NO: 25836 - DNA, 432 bp, Glycine max
  unsure at all n locations
agcttcatgttgtttaatcaagatagatntaaggagtggtgatgatcactaagatgatgacaaatagcccaagagaatgagttcaagattgaatcaagaacacttcaagaatcaagaggaaatttgatttcaagattcaagaatcaagtttcaagatttaagtttcaagaatcaagaatcaagaatccagaataatcaagttgaagattcaagaatcaagtaaagactcaatcaagataagtacaaaaacgttgttcaaaacattgagtagcacatgaatttttcacaaaaccttttgccaaagaagttttactctctggtaattgattaccagtctattgtaatcgattaccagtagcaaagattgttgtcaaaaagctgtcaactgaatatacaancgtccaattgacttcaaatggtgtaaccgattaa

SEQ ID NO: 25837 - DNA, 457 bp, Glycine max
cactgcgactgcagcattcaatgctgacctttttcattcttcgtcacccttgttgtccaaatgcctttgatctctaagtacatcagtcaatacacgttccatttcaaaattccatgtaaaataacttcttgtttcctcattattttttcctaaaacttttcttttgtccatcattttttcattagatgactccattgaagttaatgtcacttattcaacctgcacataacaaatattagatataacctactttattcatttgactagtccactacacaatcatagaaaatatttcaagcaaagtttgtatgcaatagcaaagtacataaaagtctatcttcaatagaaaagtacaatagtaacaaagcacacaaagtttgtttgcaatagcaaattacatttaaaaaagaactatgcttaagcaaaagttctcctaacttgatagttagcaaacata

SEQ ID NO: 25838 - DNA, 367 bp, Glycine max
agcaatatttattataattttaacgcagaccagacaaacacgatttcctatatatttaatattttattgctgatgcatctttatatgtacagactttgttaaaaaagaaaatgtcaaagtttagttaataaatcagattcgaaaattaaaattctcatttcacaatacgaaggagagaatgtactgtatggtcggagattttgaaagcaaaagaaatgttgtagaagatatgatgtgacagaattttcgtagaaaactgttaaatgatgtatatctgtttcaaatgtaaattgactcacagggctgatatggaactaatatgcttaatatagtttgaatttgatcgcgaatcatgataataactaat

SEQ ID NO: 25839 - DNA, 430 bp, Glycine max
  unsure at all n locations
actganactcaactaatcatcttctatcgaattgagattatatgatatttttaatggtaactttaacgtcaagtacatgaccaaatcttaaattttggtcaagaaacttaaatattgaatcacttatatcagcaactttagttatattttaattatttatatttcctctttaaaaacacaataatattattgaaacgttactttataaataacattttgtattattaggcaaaattacattaatcatatggctataaaaagtaaaaaaccaatcttgattaaaggccttctccttatcaagccattttaaccaatggatgtcgttttgatcttcctcagagcgtacttgttacattcgtggtctcgaaaaagaattaaattaaatattaaatatataacatattcgtgctatattgcactacaatcattt

SEQ ID NO: 25840 - DNA, 417 bp, Glycine max
  unsure at all n locations
agcttaatttcttgttattngaggtaagagatttgccctggattcatctaaagactactttccttancacacttatgttcaatatgttggatttgccctggagatctgccctgaattttctcctttgaaaacatatttatttggaaattcttcccaagacaccattgaaccactgatggaggctttggaggaagattatatagatggatataagataaacgaatcaaggcagattattgaacgagtattggatcttgaaaagagaatcaatagactagatacattgactgataaactaaatataacaaattttgtcattgttgaacatattattaacttataaaccacatctttaccatttggtaatatgttgtacttatttctgatacgagcataatactatgacatgaatgttca

SEQ ID NO: 25841 - DNA, 466 bp, Glycine max
  unsure at all n locations
cgagtgtccncattgaataacctttattcaaacctttcttagtttgtgataaggctaaacgaaaaattagggaacttatagaaactacatccttaattgaaggcgtaggtgacaatcatagcgaattactaaacaagattagtagtttgcttaaagtcattccagatactccccaagcttcggaaaatacttccaaaatggtaacaagaagtacctccaaattaattaatgttattaatgaagatagtgaccaaaacttagataacacaactgagataggatcagtgtcagataagaatatatatccattaaactccaaacactggataaccccctccaaattatattatcaacgtccaactgcccctgaccttctattagaagatagatgtgattacaattttaacaagtttagtgcaaataacatctatgaatggaacatagatgcacaaacggagtataacat

SEQ ID NO: 25842 - DNA, 295 bp, Glycine max
gatctacaaacacacgaaagcagcaaatgatcattgtggtcacatcttctttatatgaacctgtcagacattcgtgagtgtgcgcaaataatgcacatcatgaagtggcaaaataacttaatatctttctaggattgaggtgttgtgtgctgcttaatagtaaacttgaacttacgtggccatcgatattaaatggagcctatgttctaattttcggacatgtcgttctcttaaagtcaagggaaagagttggtgagcgaatacacactgattactcatctggttatcctgtgga

SEQ ID NO: 25843 - DNA, 337 bp, Glycine max
atctatttctcttgaacaaatacccctcagccgaatagaatccatcttaggccttcttcctacaactctcgtaaatgggagagaaatgttcatctatagcatacaagtccctaatgtcatcaaatcctataattagagctcctacagagcaataaaatgtgtgtctcttagagagggcatcaactaccacatatcgtttcccctttttgtatttgataacatatggaaattgctttaagtactctacccattttgcatgccttttgtttaacttgctttgccctctaatgtacttaagtgattgatgatcactatgaatgacaaattccttggaaac

SEQ ID NO: 25844 - DNA, 430 bp, Glycine max
  unsure at all n locations
gttgagcccttatataactggaaacaaggagttgtttcatatctggatgaaagctttagccgaactgtaaaacttggcaataacaccaggatggctgttgtgggaaaaggtgatgtgaaccttacggggcggaacgcttgatacaggctacggagttttggatgatgccacttccagtgaaggaagataagtcagggtagacgccacaaggattaccttgataagtctgagattggttcaacaaggaacctagagagaagctatcaccaacatttatgaaaatgccaaaagtcttttttattgaaaacaaaaaccaatacttatagtgtatcagaacaaaagataaaaatagacataggccttctanacagtctgngccaaaattacaataaataaaaattataactaaaaaatatatttaacttgggcc

SEQ ID NO: 25845 - DNA, 500 bp, Glycine max
  unsure at all n locations
agattaatcgatagctccgtangtcncgcnanttcagtnaganaccggacgaggncatcctntngagactacctgcaagcgtgcaatctttattgtctcttatgacgcaactgagttggtaggtaccgtatgcactccttgaacgaatatggcatcagttatggcgctaacttgctgataattagacgtccactcttcagatgaatttatggctgcagctagagacatgattccaagggctccaccactggcagcatccatatacttatctccaatatgaccgagacccttattaaaacataggagaagaagctgctccaataaatgatggtgagggcaactgggcgataattattttaatcactcccatgaatcatacagggacatccactgagtggctagacctgaaaatctttactatggaagggtctggaacaggaaaatcttgctagaatatctcttaagtcacacagctgagatgacctggtgaaaggaaaaag

SEQ ID NO: 25846 - DNA, 348 bp, Glycine max
ttccataacacaccacagtgcgctgttttcgatgaaagagctctagaggtatcaagaagagtaccttctgctcaaagacctacgctttgttatatgatagattattgagctgcacagtgattgtgagatgctgataataggtggagggaccccccttcttgcgtgacgaacaatcatactctactcttaatctcatctgtgcaagcgtttttctgtatggctggctaaacactcttgttgggaatttctaatgaacaactgatcttcttactctgatatctaattgattgtctgttctgtgttcgatgcctgtttcattgcttaatatttgcatgctcttggcctgat

SEQ ID NO: 25847 - DNA, 376 bp, Glycine max
  unsure at all n locations
cttgtgacgagtgatgaggaagttttgatgttgatttactcaaagacaaaaagatgggtaggtttgatatggtgattatcatacgccatgatggttgggtgtttggttctaaatgggtatcactgatgctatataattgtcacaaaacgttatattcgaagaacaacataatttatatatattttaggagttctaaaccgtataaatttgataataatccaccactaatcactaactttggaattttcactaatgtaattagtgaggagagacaatgttataaatgaggtatgaatattacccattctcaaaagtgtgaatactaatttatcaatatanaatcatatatatggactaaatttacattgactaaaat

SEQ ID NO: 25848 - DNA, 386 bp, Glycine max
tttatcttatttctcaattggtgacccaagagaacattttttttatctaaccacccatctattggtgagattaaaaatgtagttttcattatgagtagctctagttcccctatccctgatggtttcagaggccacttctaccacaggtactaggaaattatctcaaaggttgtctataattctgtccttcaactttattcataagaattggcttctccttggatttaaatcaaacattttttgcctttattcctaaatttccataagacgatagaatagaaaacttcagacccactgctctgggtaattcccaatctaagattatctctaaaatcgtcacaagtagattggcctaaattactcctaagctgatgtttaataaccaa

SEQ ID NO: 25849 - DNA, 385 bp, Glycine max
attagaggagaagaccttcagttgtttcatatatacctcctactttaagaaacacataagaaaagcgtggttacatgcatttgttgcagatctaagtcaaaatgagcaactattgccgatattatagcgaaagaatctttcgtagatactggagagaaagtctctctgtgatctataccttcctcttgagaacatccgctagcaacacgaattgccttgatctctaaatgctgactaatgaattctttgtggtccttaatgacccattacatgcaatggccttcgcccattaggcaactctcaagtgtccaaactttgtactcagcatggactctatcgtactcatgcatataccagaattactcttacactatggttgaaaaag

SEQ ID NO: 25850 - DNA, 407 bp, Glycine max
agcttaattttttataaattcaaatataaatctcttggattactaattattaacaaattttaacttatcaaaatagaataatttagaatctctctctttcctaaaaattagtcaattaatatcatctgtttgaagattaaccaatatcacaattaatgtcatttatagtatgttatttatcccaaaaaaataaatccctattaattgtcctttaactcatctcaattccctaactaacttatctcagactccattcttcacgttgtttcatctcctcattttctgttcataacaaaaaatctattcttctccttcccttgaatgaaacatattgtttattgatcaaactgtgtcttcgcagctcaacctttctgaatttgacatcgtctggattctgaacgcctatt

SEQ ID NO: 25851 - DNA, 450 bp, Glycine max
  unsure at all n locations
tgtnaatataagtgagatatgcaacagctataaaactacactttacttctataaatattaaaataagtagttatctcgagaaaattgagataactgatatcacataaatccttccagcacatagcacattacaagtctaattgtgaaaatttccctcttgtaagtatataagaaaaatattttagtaacataacaaattaaacttgataattngttacgaattacgtagatagaacagttattgtttttgtagttatagtggaagggttagtcagtcagaggggatttgagaggtaaataatcatgaggaagatgtaagggaagaggcattctaatttagtatcatttgagaatcgaggttctctctttgttagggaacattctttaaggggaaacctttggacgacaagtatctctcctattttatgttcttctgtaatacagatataa

SEQ ID NO: 25852 - DNA, 349 bp, Glycine max
agcttgatttgttatagcgtggaagagtcagtcttcctacttttgtttgttgaccacagagtggtacctagagatatgtcgcgggggtcaggagaccttggggacgtcaggtggggtgctatttcccaaaaccaagcatgaccaatcccgacccaacccgggcatagtcagtcagtgagaacttgtgacgtacctaaacaggtgagctcctggcagtcaaccaatataagaacaaagaccacgaagcaaggaggcttgtgtggcggctggtcatctatgaatcttgagtggtatttggaaattggcctctggtaattgattaccaacggtgtgtaatcgattacagggc

SEQ ID NO: 25853 - DNA, 472 bp, Glycine max
  unsure at all n locations
actaagcttctgatggattcagtacttgctatgcgtgttactttatattcaatttcttatangatattgaaatcaatatatatatatatatatttgcggagtgaaatacctgtcctttntctttgaaattgaattgtttgttatgcactttttcttttggctaaatattcttctgtagttggcatggcatgacattgggttcaaccattttttgctttcagaatataatattgagacatctctgattaataatgctttcattcgtaaactacaatgaaaacaaaagccttcctatattgacatgtactcaacgagatatttgaatctgtaggtgcaaagtgatgaagtaccccattgtcagttttgtattagcatcttcgtgaagcatttatggtccactgtcttatatttcttatttacaatgttttgcttttgaccttttctctgatatcactgaatcctgtttccctta

SEQ ID NO: 25854 - DNA, 553 bp, Glycine max
  unsure at all n locations
agagaccgagtttgttgcatncgttagcatttcgcaantccacggagattggagaanagtccccgngaagctntggaagggaacagagcagctattcttctgntatttctactcgcacaccancacnagaganggtgtaggtgatgattacgcgcagtagtacatcgacatcaatagcaggaggagagagatcacaacggggtcactcgatttgcgtcactcaacggactatgaattgctttgcaagataatactgcacacgacncataatagggtccatataacactattcaatcagtctaatgctggtggagtgagatgaagatatttgagcaatagaggttgaaattaagcaagggactaaatgaaaagtggagtaagaatacaatcactgagagatgatgcggattgatctgattctcagatacaatagagtgaagagacgaaggaatctgttgggattggggaccatcggatctcgttttgaggaactatcttcctacgggagtatcggacgacaccatgggatcttcggcgcctgcgccgtgtaggg

SEQ ID NO: 25855 - DNA, 365 bp, Glycine max
  unsure at all n locations
tgattngtgggttgatattaacactagtctcactttggttatagtcttttgatccaaggatactttcaaagaaaaacgtgcgattgatttttctgattattttattcacagatattttgattattttattattattattcaagatattttgatctttattactattatgcttttttggtttaaccgagattacaacgtgaatgatcagttagattttgttttaatagtgattaaacgagattacaatgcaaatgatcggtcgaaatccattttatcatttatttggtgagaaaacggctcaaataaacggttaaagcacgtttaaaacggaagaaaagaaatattgaagtgaacgaaataaagat

SEQ ID NO: 25856 - DNA, 422 bp, Glycine max
agcttcatttgttgttcatttcagtatcacttcctcttatggaagaaaggtatgcactttttgcattgtatatttgtttgatggtcgtacaactattagcattgtgcttcttcagagtcagcagaatgtttcttggtttgaccattaacttcgtcatatcagcaataagtgtcttttcagctttactcaatcgtccggcatatggatgtccaactaatgacttggccaattcatgattatgaatcccacatatcaaattcaccgttcagccttgtcctccaaccactggcttgccacgaagctggaagggacacccacatttcctagtcccagtgtctcttctaacgaattctttcttcctacacctatactcgccactcctgtcacacccaattaacacaaacgaagtccttcctctacta

SEQ ID NO: 25857 - DNA, 421 bp, Glycine max
tcccgcatccgcacctggaaggatctgattacggccttccttttgtcttatcaatacaactctgccatggctcccaaccgaactcaattgcaaaacatgagtaaacgagaacacgggtcttttaaagaatacactcagcgttggagggacctagtagcacaagtagcccctcccatggtcgagagagaaatggttactatgatggtggataccttgcctattttctactacgacaaattagtgggctacatgccctccagcttcgcagacttgctattcgccggggaaaggatcgaggtgggcttgaagagagggaagttcgattatgcctcctccacaggtaccaacgataggaggatcagagcaactggggcaaagaggaagataggagatgcctatgtcgtcacttcaacgcctgcat

SEQ ID NO: 25858 - DNA, 356 bp, Glycine max
  unsure at all n locations
gcnnggtgccttacaatatcatngcctccattggtatccgacataatctgcatgtgatatacaaatacagaatcagtaatactgaaaaagatataatatatgccaaccaacaggtggtgactccttatgatgtaaagtactcaggataaatcatgtccataaacttgtgaaagcaggcttttgcaagtaagaaatgagcagtccccttgaatatattgtccaaggaccaaatatctgagaagttaaacttacaaataatcccaaatgatataaaattattgacaaaaatgtcatatcatttacttgtcttacaaaaatgttatacatctatactggttatttaataatcaaatcac

SEQ ID NO: 25859 - DNA, 442 bp, Glycine max
ttcttttaacataacagcaggaggctctttatttctaaatttctctcccaagtatcaatattttaagattttgcattttaaatatgagctaaatatttaagttgcattttccatgttatgactctgttagtgtgattatatgaagcattttaaacttttaggctatatatgggtttattttggtaatatcgactctaaatatctcctaataatgaggatagttgatgtttacttccaacattaaaatttctgtgagcaatgtatgcacttagtttatgtcttaagggatcctctcttaatgcaagaagcacggaaacgctctgacaatgctagccttatgtatgaccaggtgcattctcaatcagaaattatttctaatatttccatgtagattcctcttgctttgatcaatatggatgctaagcatactgcctatgataat

SEQ ID NO: 25860 - DNA, 419 bp, Glycine max
agcttcttttatttaagatttttctttaaaacagtcctaagcagtgtgcctaaagtcctattgactacctcagtttgaccatcagtttgtgggtgacaagtagtagaaaacaacaatttagtaccaatcttaccccacaaggtcctccaaaagtgactaatgaattttgcatccctatcactgacaatgctcctcggtaatccatgaagccgcactatttctttgaaaaacaaatcagccacatgacaagcgtcatccactttcttgcaagggatgaagtgtgccatcttatataacctgtcaacaacaacaaacacagaatcctttccattcttggttttgggcagccccaaaacaaagtccatagatatgtcagtccaaggatattcaggaacaggcaaaggagtatacaatccatg

SEQ ID NO: 25861 - DNA, 404 bp, Glycine max
ctttaggagtttctcagaagcttctcaggattctctctttctataaatagaagcatgtgtaacacttgttgtaactttgatgaatgagagtcttgtgagacatacttcaaagttccacttctatacctcttttattccttcaatttcgtgctcccccctctctctttctctccctctttcttttcctccattgaagcatcctctccaagcttcttatccaaggctcatcttggtggtgaagctccttcttccatggcttattccttaatggatggcgcctcctctcacctattttcctttgtcttccgctgcatctccatggtggaaaatcaccattaatggaccccattgaagctcaaatatccagcctccatagaagccccacaagccagcttccatcacct

SEQ ID NO: 25862 - DNA, 594 bp, Glycine max
  unsure at all n locations
gcgcggcaacagcgcacagaggaaccggganganacctagataanatttaattataatacgaaaaaaaaaaanaagagaggganntttgatgcctcctagncanccacagnnaanngagcaccagcgccncganccacnagagncgaccggcaggcaagcaagcttagattgcacactcaaggccancncacgcgagagagggaatccgagagactccaaaacaaacaacagcagcctaaccgaaagaaaacaaaccggcgcagaaaaccggaaaaagaaacggacgaacgggaaagaaaccccaaaaaagaacgagagcacgaaccaagatagagagaacagaacgcggacgacaaaacgaagcgacccaacaagggaaaggaggaaaccgacccaacacccaacgacacagtgaccagcaccaaaaggacgccacaaacagcgcaccgcaccgcctgcacgaagaagcgagaaccccggaagaaaacagcggaaccacgcgccaaaatgacaccatgccaaaaagtggtaactagacagcgaaaacgcacccaacccaagaacgaccgcaaaaagcggacagacagggagcn

SEQ ID NO: 25863 - DNA, 530 bp, Glycine max
  unsure at all n locations
aggacgcngngtnccggtacagcttacnattgtncnnnacgcgataatatanaatactccagcgtttactcaattagactgacctgtggagcgctangatgtgatttctttatcancgcatgtngtagcctcgaattccttcatcatgacattaacccacctgctttacctgacgagtaatggaaatgatctcgttgcttaattggcctatgtcattgataactgctaattatcagtttattttggggttaaattatatagagagttgttatcttttctatcctatctcttactctttgagcaaataattggtacttcacattaaataagtttttgtgcataaaagaatgaaagttgatgaattattatgcgtattaagtatatatacatcccactagagcaaattggatatcataacaacgcgtgtctatcacgaccacagcgctttgctggagctacacgcttaacgccaataggatgattcacgacaacacggctaattacagaaagaacgcttatatatgaaatag

SEQ ID NO: 25864 - DNA, 263 bp, Glycine max
gagccccatgaattgcgttgtcgttcatgtgtccttcaccttcgaattttgagctatacgtaatgataattagtgcaattgtacattctcacgctttttcggaaccccaagagatgcggttaagtggatgtgttcttcaccttcgagtttagaactatgcgtagcgattgcttagtgccaatctcgattctcaatctttatgagagccccatgaattgcgatacggtcatgggtcctccacactaagagattggagctatgcg

SEQ ID NO: 25865 - DNA, 279 bp, Glycine max
ccgggatcttagatcacctgcagctgcaatttatttttttttaccccctctatgtcgtacatgctacaactttttctcttttgtgaaagaccaactttatattaagtcaaagattttagcttaaagcgaattaagactcctaattcttttcgatagatcaaataatcaactgaggacgtgggctgatttgcatagacatgactatcttagctttgaagtttgaatgagcctctagatgatctgattgcatatagcagcattaagacttattaatcttat

SEQ ID NO: 25866 - DNA, 449 bp, Glycine max
atagaatactaagcttcaagaataatggcctcagcatacttcttattcccatattgttattcaattattaggcctcctatttttaatggagaaggttaccactactggaaaacccgaatgcaaatttttattgaggcaatagacttaaacatttgggaagccatagaagttagaccttatgtacccaccatggtggctggaaatacaacaatagagaaacctatacaagagtggtatgaagatgaaagaagattattgcagtaccaattataggctaaaaacatcattacttctgccctaggaatggatggatattttagggtttcaaattgtaagagtgctaagaatatgtgggacactctacaagttacacatgaaggaacaactgatgtcaaacgatctaggataaatactttaactcatgagtatgaactattatgatgagaaca

SEQ ID NO: 25867 - DNA, 410 bp, Glycine max
  unsure at all n locations
ttcttgttggaaganacctcatgagcacttgtatgaagcttgaaaaatgaagaagaatggcttcctctccctcttggtgaactcgtgcaaacaaggaagaaaaagattccaaattggtttttaaagaaacatgaagatgaagtttaaggctttgtctaaaggaaacttgatttggcttaagttgacaagcttcattgacaacatgattgaccccttggcagccgaagtttaatgtgccaagctatgccttttggggttattgttgcttttgaaattttaaccaaaaatgactaaagtaggtttaaaccaaaaatggctaanatggctaaagtaggtttataccacaaatggctaaagtaggtctaaaccanaaatggaaaatttgcttttgtaaaactggtaaccctatc

SEQ ID NO: 25868 - DNA, 449 bp, Glycine max
  unsure at all n locations
attggaggggttccatcaaccgccctattttcttgattctggtggtacctgngcttttgaccttgactgggtagaacctcttgccggtttgatttgttcccatgcttactaaagtgagataaaagctagtgcaaatcaaaactccgatatctcatgggtggaatggatgaatgcatgatggaatgcatatgacacagatgcaatctaggaatgcgggggtccggggaatttgtccccttcttagatacgacgtctgggggtagcaaaatgccccaacgcacgtttttaagaaggcgacacggaccctacgttggtttgtttacagtatggatcaagacagaacccgcatgcaatgcctatgcaaaagacacaatgcgggaatgtacacagtatgacaatatntaccgaacataagcatacgggtatatgatactcatgcatggcagtgt

SEQ ID NO: 25869 - DNA, 435 bp, Glycine max
  unsure at all n locations
agcttgtctcccatctcttccaggcgagcaaggttgcttcctccagaagcaacagccttctggagggcccaagtgggcctggtttctatttgcaccccctttttactaaatgcaccccttctatttttttgtaattctttttccgtaacgttacgaaactttgcaaattttgtaatgatacttattttccttccgcaaggttacgaatccttatggattatgtatttactcttttatagctttcgaagaagttacggaaactcacggattgcgcaaaaacacctcttttcgacttccgccacattatggaatntcacggatcgcgcaagcctgcttacttttgattattgagacgtctcgggacttcatttattgtgcaacaaaggacgccaagtatctcaaagccggctaaccaaaggttgcatgtcatcaagt

SEQ ID NO: 25870 - DNA, 446 bp, Glycine max
  unsure at all n locations
ctaagcttgagacgcatgtgnactnntggatcatcaaagcattagcttgattctttgtctacaatctcccctttngtgatgatgacaatccctgaaatcaagacaagctatatacaagatgatagcacgttcacacaacccttactccccctatcttttggcatgtatgcctaactttacttaatgataaatttctaattgataattgatttcgaacccaagttctctcaagttctctccccctttggcaacatcaaaaataactaagcaacataatcaatattcaaatagagccaaacaataaacgaaaatatacattgtcataaccaaccaaatcaaagtcaagaaatataatattagtgcaagattacgataactaagcaataaaaagccaaatacacggcgataaaccaaagtactaataatacttaagctaagatgatgat

SEQ ID NO: 25871 - DNA, 383 bp, Glycine max
  unsure at all n locations
agcttcttatccttggctcatcttggtggngaagctccttcttccatggcttattccttaatggatggcgcctcctctcacctcttttcctttgtcttccgctgcatctccatggtggaaaatcaccattaaaggatcccattgaagctcaaagatcaagcctccatagaagccccacaagcaagcttccatcaagtggtaatcagtgcacaagagcttcaagtaggtgctccttaaacctccattaattttttttctttaccttctcttccattgttgtttcttcattnttctccatgtatctcctcacatgtcttgttctaaatggtgttaacatgattctttagagtttccaccgattaaacttgctatagaagctagat

SEQ ID NO: 25872 - DNA, 363 bp, Glycine max
  unsure at all n locations
ccactactagaggtaatgtttcaatcaaccttataatataattatatggattttgagtgtctcgtctatttttgttagcatttttaagttgttaacattttatgtaaggaaagccatattgtagcaaagagtaaagtatatttagcttgaaagacatntctatattatatgcttgtgatgcatgctcttagtaagattactttcatgataaatcctcctacatttgatataagaaattataaacaagagtagtgttgacctctctgatttagtgctttgactgacctttntgcatttgtccagtcaaggcaaggaggatgcaaactccaaacttaanaaccgaaggaagattcaactctcatg

SEQ ID NO: 25873 - DNA, 395 bp, Glycine max
agcttagtctctttacatattgtgaacaagacatctaaggctctggtaatcgattactaggcagtgtaatcgattaccataagacaattttgaaaaatagctgtctaacaggattatgaatttgaattatgaccctgtaatcaattgatgtttgttatcgattaccagcaacagaactcttgaaattcaaattcaaaagtcatgacccttcataatataaccgtgttatcgattaccagaaacctgtaatcgattactagtgaaataatcagaacaagctttatgaatagacacatctcttctaaccatcttgaaaaggcacaaagggcctatatgtatgtgtgtctggtttcataaagcaagagagagatattccaagagaacttcattgtcaa

SEQ ID NO: 25874 - DNA, 400 bp, Glycine max
  unsure at all n locations
accggcgaaagaatcgaagngggttttaattatatgcttatncagannancccgcccggaggaatggagagcctanggcaaatggagagaatgagaatacaggacaaacccatgttgtgattgtcgttcctacatggccaaacttcccaccaggtcaacaatatcattactcaaccaatgtcatgccttctcattacccaccaccctatcatccaagaacaccaaattaaccacaaaggccacccctaaatcattcacgaggcccgcctgccgcacatgcaataccaaacactaaccacaacaccaaccagggaatgaatgttccagcataaaaatctgtagaattcaccccaattccggtgtcatatgatgactaactcccctacctgctcgataatgc

SEQ ID NO: 25875 - DNA, 432 bp, Glycine max
  unsure at all n locations
agcttacttgattatcttttaaagctctctagattcacacctcgtggcccactcatcagctctatggctcctaagtttggtctggtaccatatctgtcaacaaattcaagtataaaaatatcaattctttaaccataacacgtcatatatcatcatgctgataaaaatatttttcaattatactagacccagcatgatgaaaataatgctcaagtcctattgagataaagttctccataaatactcagaagaaaatgataaggtgaaaaaactgaatttctcccgtaagctaaaatcaacttatcacttcagcttttagagaagccagatagaagaacttctatgaaggacagagtgcataagttaattttaacttatggaagaaagctcattccttttactttctgattntcttctcctataagtgcttat

SEQ ID NO: 25876 - DNA, 447 bp, Glycine max
aagcttacatacattatcttcaaagatcggaattcaactaatttcctccgatgcttctaactctgaaaatatctatgtttgacactaaggataaagttatatactaataatgataatatgtgtctcttttatctccaacaagttatccaaataaataattccttttgtttggaaggaagattgatagatacaaaatgttaacatataataccatgtcataagaaaaaagagatggattacaataatcaacattctttttcaagtgtttgtcttagaataatgatattcatcatattcactctctggatacaataatttttatctcatatttactctctttaatgttctctatctcttttaccacataacatattatatctataaattttgttctttattatatttatttctctctatccctatctttcatccaccattgaccctaat

SEQ ID NO: 25877 - DNA, 420 bp, Glycine max
agctttgcttattattaagatgataaaaaatttcgatgagggtggaaaagttcaaagcaagatacaatggcacattcagtgactgaggcagagtatatagcgacaagttaagccgctgaagaagttgattggatgaacagttcatctctgaacttggtgagctaccttcaataggaggaccgattccactattgtgtgacaatatggagctatcgtttaagcaaataaccaagattacaccataagaccaaacatattttatgaacgtatcacttgattagagagatcattgaacgtggggacatttagattgaaaaggtggatataaaagagaatgcaacatatccattcaccaaggcactttgcataaaagaatttatcaagcacaaggtggaagttatgatgaagtcatgagtaatt

SEQ ID NO: 25878 - DNA, 367 bp, Glycine max
  unsure at all n locations
ttttgccacccttacggacctccttagcagcgacccctccacatcgaacgatgaccctgtaagttcctctgttttttgtcctgcacttttcgatgcccttttgcgatctcgtgttaaattttttatttcgactgaaacccattttcaatntggcaaatttgagatgacccatattggaagatttatgttacagcataacccacatggcacgattttaaattgcggttatttcgtgatccttgacattgcgggaaattcgcatacatgagtacaataacctcgatagtgacgcttgaatcacggttgcggagtgacttttaaaaccttgcacatggtgatttgagaaatttggtgaaccacatgaatt

SEQ ID NO: 25879 - DNA, 366 bp, Glycine max
  unsure at all n locations
agcttgtgttctatgtctcaaaacccacattagaagtaagacttataccatattcacccgacaactcaattttgtagacattatcattgttcttgaccagtacttgaaaaggaccatctccttttggcataagtcttgtgaagggaaccgtttctttcctaaaatgcacccatacctagtcacctggttcaaatgttactttttttcttactttgtgttcatactatcgatacacttctatttttnttctctcaatttgggcattgactttctcatgcaacttcttgacatatgctgctttaaccttgccagacttatctttaaatcgagaaatgttacgtaaagaccacaaatacaaaggagtca

SEQ ID NO: 25880 - DNA, 403 bp, Glycine max
  unsure at all n locations
agcttgactgagaaatattatatgtctgagctagatttctatctgtgcaagaattgcatttatgcattgagtgtagtgtaatttgtctctgtgcaaggttcactctaagtacacatatgccaagggaggttagcacactaatagaagattaggatgaaagttactagttttagcaaaagcaatttttactatttttgacaaaactctactntatccttttatagctagttttggaaaagtgaaagaagtcatataaggcatgactaagctcatgggaagcacatcaagggttgtccaagctgccaattagtcatattaatggtcattcaaagtgcttagattaaaaagataaggattaggccttgcaattccattggtccatgcatttcacctacaataagtg

SEQ ID NO: 25881 - DNA, 460 bp, Glycine max
  unsure at all n locations
ntgcatgcgtaatctacctattagaggggncaannntatgatttatatgttctgcgnnnnnccgnnnntttctggaaatgtgcaatgaactcactcagcgacccttcaacgctcagtgaattcatctatactcattgcatacatgcatttctgatagaacttgttgagcgcacctgtcgcgctaagcgattggatctgtagaggatgaataatcatcctctggataagtacttgtggctaagcgaggctgattcgccaagcccaagtaacttagaaattttttttgtcatgatagtcgtgcgctgagctagtatccttgcgccaagcgaagttctttataacagtgactgggctaagcgacccatttcgctaagctcccataaattagtagaatttgtgaaaattgtactgtgtagtaccgctaagcgtggctcacggagagctaagcgcacatcatcgt

SEQ ID NO: 25882 - DNA, 371 bp, Glycine max
  unsure at all n locations
agtttcactgnctattctagtaatgacccactaacctagaattaagataacttaatgccattaacctagggaattaaaaaaaacttaatggctgagggtaactaaaattgtgtgaaccaaaagacacccccaacagacaacaagtcagccaccatttggtctcccaaaaggctgatgcctaggatgccaattgagcccttattacaacttgaactaaacctaactaaagcccttttagttgattaacccaaaacatatttttggtcagccaactttacaaggattggaccattatctagacaaactaaacactctaaaatcgacacaaagtggcgtcatttagtcgctcttcatttgtggcatgatacaac

SEQ ID NO: 25883 - DNA, 248 bp, Glycine max
gagatcaaaagccactccacaaacaagagcttcaagggcaatggacaccgacttaagccattcctcacaaacccttctttagcggatgtagtggtggaagagacttccttacgccaccctactcttcctctaccatgacttagggagtttttctttcttatctccttctttacttttattacatttgtccgaatctattcgatggtccaattgccttcaatctttcaattgtgccacattgaggacaa

SEQ ID NO: 25884 - DNA, 396 bp, Glycine max
  unsure at all n locations
atcttgattgagtcttataacaaggaaaacgaaacaaggctcatataggctatcanaggaattaatttaaggtaagtccatttggctagaagcttataagaacaaaattgcctcaatcattttcaaatatgcatgtgaattatgaagcatcaagaagaatcaagccacggctattgtgcaagcaatcaatggggcaaaacacaccaaatgattatggtggtggatggctcatactctcacaaaggtaaactcatcactctcaaattgagctgtcaaaactatcatgacatgtagaggagaatcaacgatctcaagtcacaaaatgtcaagaactttttattttcagaacaatcacccatttcttgaaaatatcctataattctaagaaaaacttgc

SEQ ID NO: 25885 - DNA, 210 bp, Glycine max
atatcggtctaagatgggctaagtgcatatttatgggcttgcacagacccaaaaaatttgtttagtggagacaataatctttttatcaacggctataccaacaccacaccatccatcatttatatagatagatagatagatatatacccagatattgctattgatccataataaatctttcttcatttctgttccctgatatttgacatg

SEQ ID NO: 25886 - DNA, 249 bp, Glycine max
taggcgaaaggcagtaataactgaataaaagaaaagtgatctatggatgaatgcttctacaactaactttgctcctaaaaaccatgatgatgcacacgctggacagcactgcaacctcatggtccattatctctacgccatcatggctcatcattgggccatttctcttatggctcttgcggccttctttctgatctcttacttccccttacttactctaccaagtcgggagacccgaagcatgttttt

SEQ ID NO: 25887 - DNA, 355 bp, Glycine max
  unsure at all n locations
nccgcggtttaacaccgcggggatgggaaaaaccttgcggtaaccaaactatatggcctggaagcaaatccccttttggcaagctgnggtaaagcgaaaaggcccgtacggatggccttctcaacaagtcctcaaccctgaatcgccattggcgccccgccgccactccctgcttacacctctgcgggttcaacgacttctcgcgatctctccaccctacttcgtccttcgaacatcactccacgccaccgccatctcggactcttctcctctaccgtacccctgctcacaatcccccatcctccccactccccgacgacaccccctctagccccatctccgaccatcccgatcc

SEQ ID NO: 25888 - DNA, 59 bp, Glycine max
agcaccgctgatgtctcatagggaattcacaacttcattattagaggatccgcgcatgt

SEQ ID NO: 25889 - DNA, 88 bp, Glycine max
agctcgtttgttttcttttagagaaactctagagaaagggcatgcatcctttcgtatcctatatcaccattcatcttcttagtattta

SEQ ID NO: 25890 - DNA, 151 bp, Glycine max
tactgggtacggtatgtagacaacacaccagcttcttttctgctttctgtcattggcaagcagagggtgctattcatcaatactttctttgctcagacctgcagacagctttgataaatcatgatgctaccacactttcatttatctagca

SEQ ID NO: 25891 - DNA, 186 bp, Glycine max
  unsure at all n locations
agcttggtttgttancattgcaaaaggtttagcctagagttgtgcaatttggagactaaattaaaatgcaagatggttccgagtaaattcagaattctactcccttaaataaaaactcgttttttggacaaaaaactntgtcaaattgaaaggttgagaaaatcattatggtttgtcttgctcggc

SEQ ID NO: 25892 - DNA, 186 bp, Glycine max
  unsure at all n locations
ggagacactacgctttcatgactcatcggagancatcagggcgggctgctagtggacagcgacagtacgcactaatttattcagcaccaattggtgacctaattgagtctgtcgcctcgatccacaacttccttgcgggtaatggcgggaaacagccagcaattgaagcgcaatttcctatatgag

SEQ ID NO: 25893 - DNA, 271 bp, Glycine max
tttgtttagtatcacaagtcacaacacatcactcaaatctgtgtccaaccatgatttacgggcatacatgtgctacacaattattggtccatatgatcaacgttagaatgatgaaacaatgtaaattttgtgaatggcctaactcacatcacatcgattacatcgttttctctaaagtaattcatttattctaaccatgcacaaccgcttggaattataattcaagtacgatccaaattaatgcaactagactagattctttatgaatgaa

SEQ ID NO: 25894 - DNA, 301 bp, Glycine max
  unsure at all n locations
atagaatactaagcttgtacccanagaacccatagaactacctattgtgttaaaaaatatcgctnacatacatgatgagctaatgggatggcatggttatggcacgagaaaaatacaaataaaggttctgtccttaacgtaaactatgtgaagccccctcctagtcccacttaaagaatccgaatgaagccatacacgtaggtacaaaatgaaatattaatgtacaaatgcactcgctgcgccaatctattgtcagtgtcactcacgtagccaccttttatatatactaccatcttctctt

SEQ ID NO: 25895 - DNA, 282 bp, Glycine max
agcttaaataaaatatttacaattattcttgagacagggcagccctgcgcaaccacatgatctgcggagaaacatttctatgtggatgctgcttgagagagtgagatctaccttaaatggtatcgaatgtaacataattggtgtcagctatgaaacttttaatcaacaaccaaactgttgcgcttataccttttggacctgcttgcataatcaatcgtggaattatcggtaggatggtacttcaacaataactatttcttatctaatgcttattctcatgtt

SEQ ID NO: 25896 - DNA, 315 bp, Glycine max
tgcgggctaagccgccaaagacgcactaagtctagcctccaagtagactcctagcgctaaatggttgatttgacgcgttgagtgagctagctcagttattcaaccttcttccaggcctcttgctgtgaaattctaccaaaaaaaaatacacccagaaacactataaattaactaattatagcatttactggataaaaactcatacgatgctaaattcttaatgctgaacacaatagaagctctaacagagaggcaaattagataattgctgcgcgatcaaatattcaaattacatatgcatagcaattatcactc

SEQ ID NO: 25897 - DNA, 319 bp, Glycine max
  unsure at all n locations
agcttgttgaactatcatcacatgacgcntattgcatagaataagttgctttctaagaaacttgagattttacagaaacacttggtaagtttccaactaaactgtttattggtcaaccttcatattcttctgttttgcatattacaggttgtaccatctgtggtgaggctcatgaaacaggacaatgtaatcccattgaagaaaacactcaagaaattcattttatgggaaatcaacagcgacaagggtatactcaaggaggattttcaggctgtcagtagggctcttataatcaacaaggacactggcgggtacaccc

SEQ ID NO: 25898 - DNA, 278 bp, Glycine max
  unsure at all n locations
acgcacatngttcacgtgtatganatatactttatatgcttcgaagtagaggagaccttcaaccctatagcgcaacatggcggacaaaagtcgccagctaacttgaatggtcatcattgtcaatgcggaaggtattctacgcttcactatccatgttcacacattattgcagctcgccggtacgtgagcatgaactactaccaatatatagatgttgctcacacaaatgaccacatcttaaaagcttacaccgcacaatggtggcctcttcgcaatga

SEQ ID NO: 25899 - DNA, 436 bp, Glycine max
  unsure at all n locations
tatcctaaaaaaacaggacatccttactttatatattcagtttacaaaacagaaaaaataacanaataaactgtcatatggattntagtcacagcccaacgattcactaccttgaactaacatccatataagacacaaactgcaccctctgaacacacatgatcttaaccctaacaatctacattgagcaagcttaagcagtgatcaaacttgctctttggaactggctttgtaaacatattagcaggattgtgcagagtgataatcttatgaactttgattcttctttctgaccgaatgaagtgatatctaacatctatatgcttggttctatcatgatgaacctaatccttggccaagcatatagcactaaggctgtcacagtagatgttagcatattcttgattaatttcgagatcatctatcagacctctca

SEQ ID NO: 25900 - DNA, 417 bp, Glycine max
ttaactctcttcgacgttctgtctataatgccgttttctgtctgttttcccttcaccaattaacccacattcattactgttaatctatgcacgcttcgcgtttgattaattgcctctgagcttaacttgcgttcatgcttagagaatgaagggttaattggtgtatgtgttggctaatcacgtattgacaaccctaagttgattttcacttactaaattaaaataaggttggattaagtggttaactgttagggacaaattcttcataacctaggacacgagaatgacttctgaatcagaggaaacaacacgtttctaatactattaatttcgtattccaggtcgcttgttctttaattcacaaaacaaacaaccccaccccccccccgaatattactgttactgcagtatattatg

SEQ ID NO: 25901 - DNA, 440 bp, Glycine max
tatccagaagctcttaattctttaatatgtatttctcttttaagctctaagaaattggaagaaattttgaaaaatgaaccaacaaagataatgattgaaattgcatagtaaaaaaattgagtatgagaacctgcaaggtcaggatgtgtttgggtgagcttgagccagtccatttgactgtagcctttctcaaaaggaactttggcccgaaccgttggcttcttaacggaattcttctgtgccggtgactttagagacgaaatgttagcctgagttggtactaattatgtggaggattcatttggccgactagaagctgtgctagttacagtgaaagacaaagaaccaacggtagcctccttctgattgctaaagcattatcctgagcagtattagatgcatgtgaagattcttctttaatggaaatatcagctatatct

SEQ ID NO: 25902 - DNA, 326 bp, Glycine max
actcagctgcctactgaggatgactcaagagctttgttctactcacattaagcacacgcgttctctcgttattctcttgctcttatcatcgaaaggagcactcacagcccgaaactacttgtgctgactattattgagaacgccacgtgtgattaaaccattgacccttgcccccttagatactgggctaaagtaacaggaaggtatccattccctttcaccctctttgtattttgatatttatcacagatctaacaggccatcgttcacacggagggcgctcatgacgtcttcattttgcggcttatgggggtatggttaaacgc

SEQ ID NO: 25903 - DNA, 439 bp, Glycine max
  unsure at all n locations
ctanaccaaagcatgcaatcgattaataagtagcagtaatttattaaaacaaataattttgaactataataccacaaacacataaatggtaatcgattaaatcatggggtaatcgattaaaacagaaagtttctaaaaattgataaaacacggaaacacattataatcgattaacacgaagaagtaatcgattaaaacaatgaaaaattcgacataatcaaattaaaacatgtagttttcagagataaaatcaactacacatcaccatacgaagacatttaaagaaaaataataaacacagggagcatatataacaagctgcatgtactaagcttaaccatcattcaatactagacccacctaagatacctagttcattcctaatgaagaagaacctatctctagcaagaggtttagtgaagatgtcagctagttgatg

SEQ ID NO: 25904 - DNA, 429 bp, Glycine max
taagaggaccctcggtgtggtagccgtaaacctcatatgccttattcaaaaggtgcttgaagagagggtgacaaagatacgaaattgggatcacaaatctttgagacccaactccaccagcttcttctgtctcttcttccacttgaacagcgagccaacccttcttcaccttcatcttctttcttgcctactgagagatagagcaaagcaaaggaaccgtattattatagctgctgagtcacaatggtaggtaatgtggtttctttcttttatatagaaaagatatatatatatatattaaatggggttataaatttgtaataaaaataaataaaagggataataacttgatgctgtgtgtgttgtgtacgtgattcggaatcaaaatagtggggaaggcaagggacagtgccgtcccattccgtaact

SEQ ID NO: 25905 - DNA, 236 bp, Glycine max
tagatcaggcatccgagtcaaacggtatggctttctgattatgcacgggcattgcattacaacttttaatcggcatgatatattacgggcctcgatcggacatgcgagacaaaactttagcccgacccagttcagccgagacttgcatgttaaattctgagcgcacgcgataggacacttggcttattcaaagagaccgaggaaaagatacggtcgcttgtataacgcgatgggct

SEQ ID NO: 25906 - DNA, 439 bp, Glycine max
tgctctgaatttacattgatgtttgtattgatgggtggaggttacatgccatttttgctttaagagtaacgtcccactggtaaaactaactttccaaatgtttgccttcgcaggaatggccccgaggaagcttgcctcaaagaggtccaggaaggacaaggcggccgaaggaactagttccgccccggagtacgacagtcaccgctttaggagcgttgtacaccagcagcgcttcgaagccatcaagggatggtcgtttctccgggagcgacgcgtccagctcatggacgacgagtatactgattttcaggaggaaatagggcgccggcggtgggcaccactggttactcctatggccaagtttgatccagagatagtccttgaattttatgccaatgcttggccaacagaggagggcgtgcgtgacatgagatcctgg

SEQ ID NO: 25907 - DNA, 431 bp, Glycine max
  unsure at all n locations
aaattcattatggatgcataagctaagagcattctattggcttctaatcttgcaactggagcatatgtttcttcataatctataccttcttcttgattgtatccttttgcaactaatctagccttatttctaatgattatgccatgttcatctaacttattcctaaatacccattttgttcctatgatggggtagttttcaggtttctctactagttcccacacattgtttctttcaaactgatttagttcttcttgcatagcaattatccaatgatcatctattatggcttcatttatatttttaggttcaatcatagacacaaaagccatattattgcataaatctttaagagaatgtctagttgttaccccttttgagatatcaccaataatgttgtcaaggggatgatcttttgaagctttccattn

SEQ ID NO: 25908 - DNA, 436 bp, Glycine max
tgtgattcttctcgccctgtataagaggttagctttcgtttcaattaatttatcattcacgtgatcaagatgttagaattaatgtcttatgtgagagacatgtgggactaataaataaataattaataattaaggactaaattgtaattgggttaattatgagaagtggttataaaaggggttaatatccactaacgtgaaataaagttcttttcctgacagaaaaatgttctctctcaccatagttatcacgaacggagagaggcaaaaaagaaaggtctaaggaagtgaaatcttatttatctcatctttcaaggaaatctaagtacatcggagaaaagtcttcctatgaagaaaggtacacattattatctatttgtttattgattatttgtgagaatcataggtttcaagatcttgttatttcctataatta

SEQ ID NO: 25909 - DNA, 192 bp, Glycine max
taggagagagggcgacttatatactaaattgccaccacaaacatttgtaacccaactacaacagcctccatcgcccacaaatccacatgaacagcgatcgaacacccacacagctaggaacccttcattggctactgagagatacaccagaccagaggatccggatgataacaactaccgtaacacaatggt

SEQ ID NO: 25910 - DNA, 437 bp, Glycine max
gacactatacaagactcatgctgatccagagaggaccttatatgcttttcttatgtgttgtatgaacctatctttgatactaagatgataataacagggtcttgcggtggaaaacggcgacatcacgagaggcactgggttcactgctacactgactctgcctcacacaacagctattgatttcaggcaaacttcacaaacgacatttctattgattatcaagcataatatggtgtgtttaatattgagcaagactctgacttacttcaatccttaatgtggcaatataactagtcacatgtaacattaagtcagacataggtggcttcggatatgctctcttgaagagtgcgttctgttgcggcacttctgtgcctgatgtgaaaaggtcatcagacatctgtccaaagcatgaaacgcgacacctttcagaacac

SEQ ID NO: 25911 - DNA, 426 bp, Glycine max
tttgacggactataccaagctctatgtaacttgggtctgagaaagatctatatataggcttgctaagggtagagagaggaagactagagatttggatcaagtaaagtgtgttaaggatgaagaaggcaaagtcttagtgcatgaaaaagatatcaaggaaaggtggaaggcgtatttccacaacttatttaatgatggatatggatatgactctagcagtctagacacatgagaagaggaccggaactataagtactatcgtcggattcagaaacaggaagtaaaggaagcgttgaaaagaatgagtaatggtaaggcggtggggccagacaacatacctattgaagtgtggaaaactcttggagatagaggtcttgagtggctcaccgaactctttaacgaaattatgaggtcaaaacgcatgcc

SEQ ID NO: 25912 - DNA, 357 bp, Glycine max
tgaccaatcctgacccaacccgggcatagttggtcattgttaacctgtgatgtacctaaacaggcgagctcctggcagtcaacagataaaaggaacaaagaccacaaagcaaggaggcttatggtggctggccagctgtgaactttgtgtgatatatgggttattgcctctggtaatcgattaccaagggtgggtaattgattacaaggcttaaaaatgaaggcaggaggctaagatggcctctggtaatcgattaccaaggggtgtaatcgattaccaggcttgaaaacgaggtcaggaaaccagatgagcttctggtaatcgattaccaaggggtgtaatcgattaccatgctta

SEQ ID NO: 25913 - DNA, 380 bp, Glycine max
tggatacgggtctgtgagtaatcgcttagctcacataatgatacgcaacctattcgtaatactggggttcatattagactgaaaaataagggatgacacacaaaggacagcattgacagctgctcacactgattcatttacaatgaggatgaagtatctgttttgttcgacgaaagtatttagaacttcataaaaaatgccttttgaaaataagtagcatgcacctttcaaatcaacttgaaatcagaacaagtcacacaaatgggagcttttacctcaagaaatttgaagtcaggtttaatggtacaacagatgccttcttgtgtcaataaagaacgaattacaagtgaaaacctttctgggattcgaatgggataatc

SEQ ID NO: 25914 - DNA, 438 bp, Glycine max
  unsure at all n locations
tagagctccagctaattactttgttgtcatcatcgtatattataagggtaattcaaaaaacacatctcattataagggcaaattataaagctttataagaattggaattagtacttaattatcatgtcgtcaaattaaaatggtactgaggatgttacatttattaagacccttttttgaagaacagtgtgaagaattctttttatacaaccaattggtttacaacctgaaggagttctgtttgcatgttaaatgaaaatatttacgacatcaagtcacgaagactcattccacaagtcaaagagaaataaaagaattcataaaaaggtatgtaaagatttcgatgaggaagattaagacgtacgttgaatactttaatgttctgattgacgaanaaggtatgtttattaaaaatatcgganagagtggagaatgtct

SEQ ID NO: 25915 - DNA, 435 bp, Glycine max
  unsure at all n locations
tatattgattntctcccatcttgaactgtggtatatatgtttaattagtggccattatgaaactggcaaaatttgttggtaaagaactgttccgatggatttccagcgatcagtataggttcctgttccagtgttcatctcttcctctgcaggactctaatcatattttataaaaaaggcagtttttacggaatagtggtaagaaacaacttaatccaatcaaacaattaacaaatatcaaaaaattattttaacagtaaatatcaatcaatataacaaaataaatattaaaaaaatatagttgtgcataaattttcatgaaaaaaatcaacaaaacctcttttatgttttaaataattaaagaatacatgattaaatagttaaagagatatcaccatgttcaaattatctctattctcaacatttattatgcgt

SEQ ID NO: 25916 - DNA, 357 bp, Glycine max
  unsure at all n locations
tactcaagctagagagtgaaagacaaggaattatcacaagctacttatgtatcgattgtanggaccatactaaatgcattggacaagacgtccacacacgcttaatctttcatcctttgttatgcaaaatcattgtgtgaaacctgcattaccttatcatatcctatctataagaggtgaatgattgtattcattcaaacattagttggtagcgagagcctaaaatgattgactattgaataatacatgggtgatcttagactcacaggacgcttaaaagcgtgccgtatatggacttgagattcttatagtacccatgagtagcgagtccgaatacttgttcttaatcaacgtgag

SEQ ID NO: 25917 - DNA, 433 bp, Glycine max
  unsure at all n locations
ggcggactataccttcaaccgaacacggccgtgtttctgtctatgcccggattcaaggcgggctgcagcaccggctccgcttcccaaactgtactggaggcggttgcggtggctttatcctctatggttttctggagttttaacatgacctccgagatggaagccatttgatcttttaaggccgatagatcggccttcatctgttcctgcacaccctcttcattatccattttctggatcgagtgttataggggtgccttggtgttttcttagttatgatgaaattcctaaagaaataaacaacgatgagtatgccaccaaaacatgagtatganaatggatgatcggagcactnggatccaccccaagattnttagataacgtaatgagtccagaacttctcattntataaaaagaacaaagctntcatcta

SEQ ID NO: 25918 - DNA, 433 bp, Glycine max
tgttgacacgtggagatttaggttatcttccacgctatcaatatctgtcatactgacttttgcttcacgctgacggccggaaatacccgagtggttatccgtataaactttttgcattctgtaagacgaaaagcctgataacacgcagagactaacatcgtcttctgcgaccttcgtcaatcgcggccgacaagcccgttgacacgtggagatttacgtcatcttccgcgctcacaagatctgtcatactgacttttgagtcacgctgacgggcggaaatacccgagtggttatccgtataaactttttgttgtctgtaagacgaaaagcctgatagcacgcagagactaacgtcgtcttctgcgcccttcgtcaatcgcggccgacaagcccgttgacacgtggagatttacgttatcttccgcgctcacaa

SEQ ID NO: 25919 - DNA, 433 bp, Glycine max
tcctttctatacccgcttcagcaaatgtcattttatttcccttcaccacccaatagacatgatgctcaatctccattggaagatgacatgccttaccaaaaaccaccttatagggagacatccccaaaggtgttcggtaagcggtcatgtgggctcatagagcatcctcatgtagcttgctccaatccttcctattgggttgcattaccttctacaacacttgcttgatctctttattaaaaacctttgattgcccattagttcaaggataataagctgtagcaactctatccacaacctcatacttctggagcaaggatgccaatgacctgttacagaagtggctcccctggtcactgataatggctctagacacaccaaacctactaaaaatgttagatctcacaaaatccacaacaagtttagaatcatt

SEQ ID NO: 25920 - DNA, 390 bp, Glycine max
gcttgaggtccctatgcatgaccccaagcgagtgacacgcttcaacaacctcaacaatcgtctttatcaacctcgccgcctgtctctcgctgtagtgtcccttctgcacgatcctgtcaaacaactccccaccctcacacaactccatgacgaggtgcaccgccgaggaatcctcgtacgtcccttcgatgcggacaacgtgcgcgtgctccgacaagtggtgcattatctgaatctcccgccacacgtcctcgtagtcctccttgcacagcagcttccgcttgggaattgacttgcacgcgaatttccccccggacgcgcggcgcgtgcactcgaaggtagtcccgaattgaccctgccccaacttccgccccacctcgtacacctcac

SEQ ID NO: 25921 - DNA, 425 bp, Glycine max
atcttcttccacaccaatccgattagatgatttatgtttttgctaaatgatacatgcgttttggcttcacagtctccggtagcaccaaatccaattcctgctgctagaaaatgaatccaatgtttgatgcaaccatgagctaatgaacaaatcctatgttgtcattcatgacacagattcacctaccctcaacttcggaccaagtaagagacattgaggaagagtgacgaatatcttggaaagttgggtgtgacgtatagctaaaatactgagaatattcagacaatatatcccttgatttcaactgttggagcaaatacgtatccatattctcaatttctgagtcgtctacctcattcttcccctctaaaacattcaccacctgtctcattgtgggtctggcctttggttcacggtatgcacac

SEQ ID NO: 25922 - DNA, 430 bp, Glycine max
tctaaactttatacaagaatgaagctctgttaccatttgttggacaagtggcctcagatatcttaagaagggggggttgaattaagatattacaaattatttccccaattaaaaattctatttaactttctattcaagttataaattcccttaataatgaatttcttaaatattgattcaaatagaaaaatttgaatatgaatataagacaataataaataaaggagtttaagggaagagaaagtgcaaactcagatttatactggttcggccacacccttgtgcctacgtccagtccccaagcaacccgcttgagagttccactatcttgtaaattccttttacaagttctaaacacacaaggacaatctttcctttgtgtttagaattctttcacaacaagagaccctcggtctcttaatcccttttc

SEQ ID NO: 25923 - DNA, 409 bp, Glycine max
  unsure at all n locations
tgattatgagttgattttagacgtttctttctcgtttatgcnccaaancatgaaaagaggacttgcaaagtaaatgaccggctgaaactttgtttttcactgattaaccgaggtaacaacacaaacgatcgattgaattttattttaacggtgattaaatgagattacaacacaaacaatcggttgacattcatttaaacggggattaagtgaggttacggcttaaacgatcggtcaaaactcgattaaaacatagaaaatgatcaccgatggtaaaagaatgaagatgaagacatgcgacgcaaggatagaccccggagggtgcatagaatgaattcacaacttcaaaaaatagaaactaaccggtcgaagaacgaagaacgatgaataacggacgaagaacaatcac

SEQ ID NO: 25924 - DNA, 438 bp, Glycine max
ttatttgtagtagtgattcttccctcttcccctccattactctaatcttcaaaaaacccaaacctcttccgccctcctccagtggatttgagattcactatttttaacatttcatcctgtatatgttttcattacaaaatagaggccccatccacaactgaagggtctccgcttctcctttcaagcgacagaaatttcccaataccactttgaacttctacaacctcaatatttagttgctggaaaatctaagttgaaagttaattaagaaaaatagcacacataaatatacgtttaaaataaaacaccttgagaaaaatgaaattgctgataattggaaaatctaagctgaagctaatgttgctgcgcatatttggattcaattatgcttccttttattctcttagctattatgaatcatttgtgcaatcactacaa

SEQ ID NO: 25925 - DNA, 438 bp, Glycine max
tatgctaagtaatgaagaattcatgtttatgcaaattacattcttaaatggtgaatgaaaagctcaaaacatcacacaaaggaaatgttaagcataaattaaattgagtatatgaaaatgtatatcaccataaaaagtatattctttccgtttcatattcctagtttttttttcttcttttaacaatatcatagttaagattatttctagaactaatggctaaaaagaatcttcataatctgatgttttttcattaagcttattttaaaagcattgttaacaaaatgcagaaggagttaaagagtaaaagaataaaaatttggattaaaaacaaaacagaaagtatataatacaatttagcttgtgcagtgcagtacaagtctaatacttgaaacatttaactagtggaaaactaacagagaatataagtgttgaaag

SEQ ID NO: 25926 - DNA, 383 bp, Glycine max
tccacaacatccaagcataacaacattcaaacagcttagtcttctttgtcaagcaaaatagagcaaaggcagaaaactctgctcaaacaccaaccaaaatcacagcttttctcacttaaagacccagtaacaattccttcgatccaattcgtataaccgttggatcaactccaaaattttactggaagtctatagtgcataagcctacattgtgaccgtagggatctactagaaaatatccagaactgattctgcactactctttccacaaccagcaaaaacatatcatgtatctgcacttgtgcaaaatcctgctgcacaatttcacagcataaatctgcacaaagtgcagatttcgaaattcacacttcctctcatgcaat

SEQ ID NO: 25927 - DNA, 437 bp, Glycine max
tccatcaaaacaacaccaagaaacctgcaattaaattccatcaaaacccaattaattctaacgaaattggataaaaatcataccaacaacaatatcttctaaagcgtccaatatcagcaagtttgtaagaaagttttctgcgatgtctatccatcatcaagcggaaaaatcagccaaaaatggttatttacgcctagttgagactaccttcttcataagaacttgcaagagaagaaaataagaaagtaaaatgaattaaacttttcccataagttaaaatcaattcatgcacctcaacttttggagaagttagatgagagaacttttataagagttaagtacataagtcgatccaaaaaaggttttaggggcacttcagatacgctcaacaaaactaaatgcaatagcacacaaaaacatcaacaatgaaagaatcg

SEQ ID NO: 25928 - DNA, 376 bp, Glycine max
tactcaagctttgcataccccaaggatccattaggaaattacttgttaattatagtctgagggtgggctcatgggccactttgggatagacaagacccttgccttactcaaagaaaagctttattggccccatatgaagaaagatgtccataagcagtgcactaggcgtgtggcttgtttacaagccaagtctagggtgatgtctcatgggctatacacacccttacccatcccatctgcaccttgggtagacattattatggactttgtccttgggcttcctagaacccacagaggtgtaaactctatctttgtggtggcggataggtctagcaagatggcacactctataccatgccacgaggtggatgatgct

SEQ ID NO: 25929 - DNA, 439 bp, Glycine max
tatgcacagtgcccctcattgcccaagtgtttggctttgaggtatcaaccttgtcttttgtcatgaccttgtagtaaggaagaaactatgcaggttctcaaaaatgaattttcaaggacaagaaacatttgaaggattttttttttcaattgacaaattaagtcaaatgattcctatttttgataactcacattctctctcaaaaaagataaactttcaagaatgataaaatgaggtcacatgaatgtctgtactttatttgagacacagtcaatcaaatgttttttttcttttattttgaaacttattgttttgaactttactcatcgttttacgacaccctcaccaaatgtgtagcacgagtaatttctgattgaacggtcttggaagtccaaactcaagagcgcaggtcgcttgagcaaacaaaccaatgacttgc

SEQ ID NO: 25930 - DNA, 440 bp, Glycine max
tgtaaagaacactcttaataagaatttgctgttgtttttaagttaacactattaattataagtaaatgagtacttccacaaataatattgtggaagagaagtatagcacatacctgcaagatggagaattgataagtttccttatcaagggcatacacaataaaattttcaatggatagtttttgcaatctgcaaacccaactcatgagcatatccttgtaactatatccagcaatggtaagtataactgttttagttttgtctgcagtgatagacaggagttattctaaggagaatggaagctccagggttggtggaattttcctccgaaccttcaccaagcaatctaatgatttggtctgtgatttcatacgatcaatgcaatacactgtattttcctttaaccaagatggaaaaaccttttccttcatcaagttcat

SEQ ID NO: 25931 - DNA, 423 bp, Glycine max
tgttgacataaatttgacagtatgcctttaatgttgtgtagtgatcttttgtcatgcatttgtactatgttttgatgaatgcttttccaaattcagtgtattgactatcagctacagtgcaaccatacaataaccaaaatttttactatgctatctgataaagatgattccatttttgaatatgtgcagaaattttgaaattttgatatggtttatttcactttgccttgttatcatcaaatggaattttgttgttaacttttgcttgctggacttttttgttgttaattcacctaaatgatttggcttaaaccagagaggaagcatttggacctgttgcacccagagaggaagctatcagaattactaatgacactaatgcaggtagttcatttggttcttctttatacagccttgaagaat

SEQ ID NO: 25932 - DNA, 430 bp, Glycine max
  unsure at all n locations
tggttcgaggtacttacccgttgaagatcgaagaatgatgattaacgaatgaagaacgtcgaagaacggttcaaacctttgcgagattcctcacggaaaacgttacggaaacgtttcggaagcgcctcggcttagattttcttcacggaaacaatttttccaagcaaattcgaaagagagagaagtgcctaaggggttggaccccttccttcttcatttcctcccctatttatagcaaaataggggaggtggttgccgcccagctcgcccatgcgagcagggttgcttcctccagaagcaaccgccttctggaggaatcttctggagggcccaaatgggcctgggtgctatttgcacccacatttttactaagcacacccccctctgctgttatttggtgattctttnttcgtaaagctacggaaactta

SEQ ID NO: 25933 - DNA, 426 bp, Glycine max
  unsure at all n locations
tgagcaaaaccaaaggtaccgtctttttcatattttttttggcatcaaccaaagataaggattggtatcttatgtcttttttgtggtcctttgtcatatgatcatcagtccttttctttaaagtaggctatattgaagtgaaggatttttgtccagtatagttttaagatgacttgcgtcaagaaaaaagttttaagatgactttaattttgttttagttgtagtagagaagcaaaagttacaatattacttaaatgagaggaaagaattatgcttcacttcagcaagaagactcaaagtgtagaaacacgtttggctgaaatttcaaatattgacatatatattaaggtggtcgagtactaaaagggtgcaaaaatttggaattctatgtatgcgtggtacanaaccagtacaacctacatgcta

SEQ ID NO: 25934 - DNA, 431 bp, Glycine max
  unsure at all n locations
tcacaaaagtttatatggcttgaaacaagttccgttttagtggtacaagaagtttaatgagttaatgagcaactcgggattcaaaagatgtgacatggaccattgctgctatgttaagaaatatactaatagttatgttatctttgtcgtgtatgttgatgacatgttgattgtaggatctagtatggcagaaattaacaagttgaagcagcagttggcagaaaactttgaaatgaaggatcttggtccagctaaacaaatccttggtatgagaattcttagaaacagatcagaaggaatcttgaagctgtctcaggagaaatatatacacaaatggcttgacaggttttaccttggagattctaagaccaggaatacccctttgggatctcattngatgttttcaaagaagcaatctttgcatacagatg

SEQ ID NO: 25935 - DNA, 422 bp, Glycine max
  unsure at all n locations
ntgaaaaatacctgtgcttccgtaaactttatttttttatgtgatgcaagcccagccaaatcatgctccatgtattcgaaaacaaggtataagctgcaagacatccttgatgtaacaaggccttccagttttatgacatttggatgatcaagcctacgtagaatgtgaatttcccttgccatgaagcgaacactctctggctcaagattatcaaacctgacttttttcaaagcaacaattttattttgctcaagatcacgagccctataaacattactataagttccctgtccaatctgaaaaataaggaggaaaatcttaccattcaaggaaaactaaaacaggctgaagacaatatcatcatttaattgcaatccaagacaaaaaaaaacaaaaaggatatctataaatctagaaactac

SEQ ID NO: 25936 - DNA, 435 bp, Glycine max
  unsure at all n locations
tggtctatttaatttaataggcttttaaaaaaatctatagtttaaccttctaattaaataggccagttcaggccaggctttatattgacctggttataggcccctgtaggccagtctaacctatttccacccctaacaatggtaaaattggtatattaataaaaaaattaaaacccaataaaaccaactaatttacctattttttattgattggtccatgtaattttgttacaaatgtcatatcctaatgtattaaatagatgaaaaataacataatttgaaacaagttatcgaaagagtccttattttgggaagaaaaaagtgtgtcanaactttcttactttatattccatccattgcatattatatgatgtataaaattntgacacatgtattaataaatgaaattattatcttgaaactacctttggttct

SEQ ID NO: 25937 - DNA, 479 bp, Glycine max
  unsure at all n locations
catacgcccacgcgacacggagaaacggacacgcgnaccccataaaaanannaaaagancaagtttgtgctcgtgacacccggaccnaaaacaccggcgaacacgaaaaaggcgaggacacaatggtgggccccagcgacaaacaagaganggcagggcaggaggacccacgaacaccaagcagccaggggggaccaacaaaccaaccgagacacaccacacagacagccagcaagagccgcgggcccggaaacaaaaaacagccgaaagggagcacccgagaccaccgagccgaacgcaaggaacaagacancgacccgaccgcgggccaaggcgaaaggacgcaccccggacggcacacccccgcaaggcgcaccgacaacaaaaacaaccccgancgaaaggccacagcaccaggccagaccaagccgacaacagaccgagcgaacacgaccgaccagaacgaaacgagccgagcg

SEQ ID NO: 25938 - DNA, 283 bp, Glycine max
  unsure at all n locations
ctcagctctccccctgttgcggtccccttctccgatggatgttnttttacgagccagaatgataaatgtagcataaaggttatacttcaatgtttattgttatacatcttatatatataggtatatctatattgtgtcatttggttgcacatgcgcacgtaatatgcattagtggttctatttggacaggcactcattgtcacatgagaagcgagcacacttttagcgctcagccatatatttttgcgtaggatgacaagccctataaactgtgctatatgtt

SEQ ID NO: 25939 - DNA, 430 bp, Glycine max
tagggttgtgggccacaattggccaagccaagaattatatttttgattcaagcttctaaaatgaagcacaagcttgatgaaagcctaacttttgttgaagctttatgcaactaagctaagatgggtccaaagtctaaaaagaccaaaagtaagaaacttctaaaaatttaaaactagaattaggaaagcacttattttttaaattttcaaaacaagttaaaatgattttgtaattcaattaaaaaccatttccatccatttgtatccaaacaagatttattttcaaatttaagtttaaaaacaaaaaagttagaaacttacaactaccatacacgagatctaaaaactacaaaacttattgtgattttaaaaaagagagtttaatacttatatattgaaggtaaaaaaatcttatattgttatccaaatt

SEQ ID NO: 25940 - DNA, 426 bp, Glycine max
  unsure at all n locations
ntgacaagacagtacacactgctgtcttctacaacattataaaatatggaaatctactctaaagatacatctaataatacccataattataacactccccctcaagctggagcatataaattatatgcaccaagcttggaacatataaactgaattctaggcccccttaaggatttagtcaaaatatctgctggctgatcattggaattaatgaattcagtgacaatctctttagacagtagcttctcccgaataaagtgacagtcaatctctgtgtgcttggttctctcatggaagactggatttgaagcaatatgaagagcagcctgattatcacaatacagcttcatttgcatcactttgcagaatttcaactcttcaagaatttgtttgacccacataagttcacatgtaactacagccata

SEQ ID NO: 25941 - DNA, 438 bp, Glycine max
  unsure at all n locations
tagaacaatatacttggccttcgtttaattgtcttttagtttggcggccatgatcaacaaagtactttcgacacctactatatgttgacttaaccaacgctgttattggtatgctgcgacaatctttcaacaccttattcacacattctgagaggttggttgtcatgtgaccatatcttcatccaaatgtatcgtaagccatgctccatttttcctttgaaatgctatcaatccatgttactatggctggactcaattgacgaaatttttctaagttttgatcaaacacatgcttgcaaggagtgtacgctgcgacaatctttcaacaccttattcacacattctgagaggttggttgtcatgtgaccatatcttcatccaaatgtatcgtaagccatgctccattnttcctttgaaatgctatcaatccatgttact

SEQ ID NO: 25942 - DNA, 435 bp, Glycine max
  unsure at all n locations
tagctcgtttataagggcgaggaccacagatggagttggtctctatttgncacatcaacgagagctttgtcggtgcaagatggatgcatgaatatcaagctgccatgttggacgaagaaaccaaccaagattagccaaattgggtgcaaccatgttccccgggctttgaattgaaaaattagcagatcatggagcgacctgagatttctgtgtcggatccaatgtaatcaagtagtttggaccctattgctgggcctaggctttagggtctgctactcttgttgggcatacttttctttaatgttccaacgactatctaatatacaaccctttattgatatgttccctctcgcacctttgtccatttcattcttctgcatatatattntcgntgcgattaaatgatttgacgcagatctgatgatgagtcctatg

SEQ ID NO: 25943 - DNA, 426 bp, Glycine max
  unsure at all n locations
tattgtgtaaacactctttgagtgattagaatacattttctatcaaacatccattgtttgtgaaagttaggagtgacttggtgacaaagaatacttgggtcttaatctctgggaagattaagggtagttccaagagtggcttagagagtattcgttgtagtcagaagtgacatataaaatacttggttgtaatcaaagatttgattagtggaacccttcaagttttgaaggagaactagacgtagcccaagagttggggtgaaaaagtataaaacctttgtgttttctttaccacttttatataactagttcattctacactaccgtgttcaagttttgtaatttaaacacaaagtgatttcgaatcccttggacgaatctcatcatccgttgatatctgtttcagaaagactntcaaagtttttg

SEQ ID NO: 25944 - DNA, 430 bp, Glycine max
  unsure at all n locations
ntgcctctgagatatagtcaatgagcattgtatagtttggatttgatcatatgatcagtaaaatagacttttcatcacatattgtattttttttttcaacatatcctgttataattattcttgcaatcactggatttgtctatcttattgtctaggaggtgtgcaaaagcctcttatgaaccaaactacaaaaaatcaaacttaaaataatttaataaccgaaccatttttaaaaaacaattcagctacctgaactgatttcctaaaggaagttgttgaactggatcgaaacttanatacttaatatcaaattacatattctggagattctgaacccattgcttcaaatttacaagcactaacctatcagaaacttcgaatcctgccccaaatcatctaggtgaagtcgatatctcatacccaaggttat

SEQ ID NO: 25945 - DNA, 421 bp, Glycine max
tgtagggttaaagtctcacgattgtcacatgctcatgcaactattgttagccgtggctatacgacacatcttgccaaacaaagttaggttcacgataactcgcctgtgctttttcttctatgctatatgtagcaaagtgattgatatagtaatgtttgatgagttggaaaatgaggccgcaattatattgtgccagttggagatgtattttccccctgctttctttgacatcatgattcacttgattgtgcatctggtcagagaaatcaaatgctgtggtcctgtttatctatggtggatgtacccggttgagcgatacatgaagatcttaaaagggtatacaaagaatctatatcgtccagaagcatctattgttgagaggtacattgcagaagaaagccattgaatttgttcagaatac

SEQ ID NO: 25946 - DNA, 402 bp, Glycine max
  unsure at all n locations
tgagaattagcaaaagggttctgattaatcangatttgcttttgcttgngagaaagaaggacaaccttgtaaaatgcctcatgctatagtgaacttcacagtgcaaagtcttggtgatttgcttattcaagaaggatgatgatagttcataggcctttattggtaaatctgacatgtccatctatttgcgactacatttaaatgtacacttaatattctttcatctgcatttcccttgcgttaatatgggggttggtcttttcagatgatccttttattcttactaagtcgtattataatgtcttaatcatgttatgttcaagtcacatgcctcaagtcaatctgacatcagtagtctccaaaacttaggataacatattcttaanacgtgggggtataaat

SEQ ID NO: 25947 - DNA, 421 bp, Glycine max
tggatttacttttagtagggaatctatctttcctatgatggagaaaagaagttttgttcctagcttagcccataaggttttccagaagtggctaaggaacttagcatctctatctgacacaatggtcctaggcaaaccatggaatctcacaacttccctaagaaagagttttgagatgtgggaagcatcatccaccttgtggcatggtataaagtgtgccatcttgctaaacctatccaccaccacaaagatagagtctacacctctttgggttctaggaagcccaaggacaaagtccatactaatgtctacccaaggtgcaaaggggatgggtaagggtgtgtatagcccatgaggcatcaccctagacttggcttgtaaacaagccacacacctagtgcaatgcttatggacatctttc

SEQ ID NO: 25948 - DNA, 408 bp, Glycine max
  unsure at all n locations
agcttagccgaattcagatcgaattgaagatggcttagctcatccttggttatcttagcggaccaaatcagcctcagatgcaagggttgggcgctaagcgcttgagactcacgcttaacgcatgaccaaagatgtgcttaacgcgaggcttgcgcttaacgaaagcactgtttttttctcacaaaaaatgtcctctgagttattgttcagtcctttctccacgaaattgaaacccttatgttaaacattcaaagataggctgatatacgcctatgtacaaattatatatcaagttccaaatgatctaatgcatgaaaaaaagtatagaaattaaaactgggttgcctcctangaagcactcttctaacgtcattagtacgacacttttacctcactctgagatcttat

SEQ ID NO: 25949 - DNA, 423 bp, Glycine max
  unsure at all n locations
tgaatccacttacccgcactaagagcgagggtggcgtctttcacaacattgcgaattcagagcctatttaaagcctgtcttgtgcataattagggtacaaactttaaacagatgattggcacagattctagagcacactatagggcctacttcaagaaaagagctctggaggcagcaagaggagcaacttttacagagatacctaggttttgtaagcttattattgttagggtttcttctgtaatggttggctaaacaccgtagttagggatttttaatgaacagctgatgtaaatacctaatatctaattgattatgttttctgtgttcaatgcttccttcaatgcttaatgtttgtatgcttttggtctgatcatccatttgtgtgcatagctaggtgactntaacattgngatatgtact

SEQ ID NO: 25950 - DNA, 431 bp, Glycine max
tgactcacaccaaacatggcaagttcaacacgctttcaatttatcttttcacaattaactatcacaaagcataaaccaagtaaaactacccatcatatctcccaaagccccatacccacgaaaatttaggtgagaagaagtctacccaaacctgagattttgaggtcccacacgtagagatgcgcttcacgactccaaaaatgcgttcctttcgcgatttggagcagaaatggtgaccaaaggttggagctttaatggaggcttcaatggagaggaagaagatagaagaagcaacgtgagggagagggagatagcttctgaaattttctgttgagtgatgagagagagaaaacaactttttggattaaagaggctatactatgttctattattatatcataagctatgccacatgtctacatttgagtgga

SEQ ID NO: 25951 - DNA, 294 bp, Glycine max
  unsure at all n locations
tactcaagcttgttaacttcaaattttttggggggagggagggggttattataatttattgacatanaacagagngagtaaattgactagactggaaaaattcactcccttggaattgtataaaggaaaagccttatacatttatatcgtactgggaagcagtgtcacaaatacacaggctacagatgtgatccaccatgcggacatttgcttacttgatgattgttaatcaccaattcaacaatactataaacatgtaattcacaaaacgaaccgaaaatgcttaatcacatt

SEQ ID NO: 25952 - DNA, 403 bp, Glycine max
tccgttcccgagagcatctcttatttaagcatttcttcctttgctttcttgtagcttaggaaaaatcccatttcttcttctttctttcttccaaatccatttctaaagttccaagtactttctccatcacccacaaatcatcatttttctccattgaaaacccacaccgagaggaacccttcaaccgaagcagaatttccaacttggcttgcggtttcggtagagaacgaaaaccctaatatgatctttcgttttctttcgaggtaaccatggttctatgcttgtttcttgttagtttcatcttgtctttgcatcttttctaactttgcaaccgccattgcatgtcttatgcttcatttgaaaaaccttagagaaagagactttgtaaacattatcctttcat

SEQ ID NO: 25953 - DNA, 370 bp, Glycine max
  unsure at all n locations
tttcttatctncgntacacatttaaaacgatatctttgtacgtaaagacaacaaacataacaggggagaagaatattcgactcctgcgtggctatacattagagtgttgctaggtgcacccagcacttaagcggaaataacatatatatcccttcctaatctatttaaaaattgtacacccagtagtgcccaactttcttcggcgcctattgatttccttcttacttcgaccatgcacctagcaactaccgtgaccttactgcttctttctcttcctccttctacgcaacctttgttggcaacgtgggtagaatctatttctttctcctcctcctcctgtgcgaccttgattggtggaggtgcttcacct

SEQ ID NO: 25954 - DNA, 388 bp, Glycine max
  unsure at all n locations
tccataattccttgaactctccatcctgngctttctctgatatgtcctctctaagcacactataggcactcctaatcgaatactggccactaggatctgccgcccacacccactgatcaccaatatgagactggattttgtacccctcaacttcttgtataaatgagaccgccatatctatctcactgtcaaataatggtctgtgccacttgaagtcccattcccaccctgtgtccttgaaatctcgtaccacttaaatttgtattgttagagaataaaatggtaccattccgatcaataaacatattgagtgccttagcaatcatacaaacagaatcatatgcatagaggctgtatggatttaacccaattgagccattactgatgt

SEQ ID NO: 25955 - DNA, 304 bp, Glycine max
tagcttatgggaaggttcaagcatgtgctaggcccatggtccatcaaccattgtcccgcgtctagctcaagacgttaaagaagcactactaggaggcagcctagtacctttaaattttctgctttttatttgtttttgtttgttcgtttattttcgtaagttatatgcctagtttatttgaaatcctaggaattaagaaaatatacaagcgtaacaaggggatgtctaattttttgcaaaagacaaaaaatggttagattagctcgcctaggcgaacatgtctgaaccagaggcgttaaaaacg

SEQ ID NO: 25956 - DNA, 437 bp, Glycine max
  unsure at all n locations
tcanaccacagcaacacaaaatctaggtgtccaatttctccttatttcaatggcttttctaggcttgaaaggtggaatttagaatgaggtaaatttggagcaaactctcacctcacacaagtctataacatcaatctaaacttgctcaaactggatttacacctaaatttccaccgaatcaaaatttgactcctcaacacccaattttgccctagaaatggctcttggttcactttggtcatttgtttttctctctagctcagcctaacctttctcacatgtcctaaatgacatttcaagctattattaactcactttaacctccatttaccacagaattcagacttagccttccaactctcaaagtctcactctttttccactcataacatcacactctcactntctaaccttgngttagttctaccctttgtctc

SEQ ID NO: 25957 - DNA, 387 bp, Glycine max
tagcttatgtgtttgtgtatgtgtgttcgcacaggcttcactactgcggtactgccttacctcagcaacagtgtactctctgtcatgttcaatttcaggtatgcagcccttgccattaacaatcgctttggattcatcattatgcagtgattgttgctgtgaaatttgatcagtatcaacttggacaaaggcaggagtgggtaatgttgtcttgacttcttcattcagtaactgtatttttgttgcttcttgttgatcaaaattgccaccatcctctattccttgttgcaatgttgtcttgtcagtgtcaatcactactggttcatcatttttatatgtttgttgctgtgagatttcctcagtttcacctttgacaatttcagaagt

SEQ ID NO: 25958 - DNA, 420 bp, Glycine max
  unsure at all n locations
tggctccgttcctggttatatcaaccaaactacacttctgcttgctaatttcttaagaggcatataaaatatgttttgttcttataatcgttggtttattggtcatggttgaaaggcctaaagtttcagtagatactatggcaaatgggcgcagaaagatcaacccaaatatgcctcccatattcatggtatgtcttacataatgattcttatttactaacttatgaattttcagtctatttcttggactatatgtacccaagagggctggtctcatggaaatgttgtgggaatacctgtgaaagaggaaaaataaatgcaatattactcttcctttaacaaaaaaacgatgttagccactagtttagcaatgaanagatcccaattcanaagacaataaaatatgctagtaatgcatta

SEQ ID NO: 25959 - DNA, 333 bp, Glycine max
tagcttcaactacgtgtttattgaatgttgccggttctctgtactcttgcaagagaagggtggcaaagcatagtgcgattcaagacattgagagtccttagcacctcgtggacgacgatatggctcagaaggaggatttgatgatctttgatggtgcacgaggaccttacaacatgtgacattatggatgctctgtgtgaagtcaattgcaaatccaactatggaacacgttcaagtcgtttatggcacagagaagctactaggtgagcctgctcaggcatctgaggccaatgtgcgctgcaacgcgagaagaattgcataatatgattcact

SEQ ID NO: 25960 - DNA, 412 bp, Glycine max
tgcgactctaggcactttctctaaaactagctagtttgaaatctgcgactgtagaaagaatcttcagaaacatggcacttgaacaattgtcgacttttggaaatgtattttttgaaatcagagactggtaatcgattaccattaaggtgtaatcgattacacatcaatacacgcgactcttcattttgaattctgaaatttaaaatgtgtagaaacaccagtaatcgattacaagaattgtgtattcgattacacaagttagcaatgtttaaacacaaattgtaactcttgacatttgaaatcttatcattgtacaacactggctatacattactaccttctggtaatcgatcaccatcgagtaaaactctgtggtaatgattgtgtgaaaactgtttgagctactcaatgt

SEQ ID NO: 25961 - DNA, 376 bp, Glycine max
  unsure at all n locations
tagcttgcctgtccgatgcagcagtaatgatggcccgagttatgttggggaacggttacgaacccggaatgggtttaggcaaagacaacggcggcataactagcctgataaatgccaaaggaaatcgtgggaaatatgggttaggctataagcccactcaggcagatataaagagaagcatcgcgggaaggaagagcggtagtcagagctcacagttgagacaagaaggtgaaggaagcccaccctgccacataagcaggagctgtataagcgcgggtctgggggacgaaggtcaagtggtcgcgatatacgaagatggtgttccgagtacattggatttggtacaaccatgcnctcctaatttccagctgggaaa

SEQ ID NO: 25962 - DNA, 412 bp, Glycine max
tccttccacatctgcaactcctactgcagcattcttttcagttgctccttcagtcccagctcagagtgactctcagcgctttgaagccatgcttcagagcattcatcagggacagattattttactttagagtttataggtggtggtgcctccaggatccattccttttgttgagtagtttctggagggggtagcctggcctgtggcccaaccttctcatcacagggaagatgaaggtcccacagcccaggtaccacatcatgtagaggatgagtcatttgaggccaccattccagatccattcattataaaggaggaggcatgtgagacacgagttagacaggatgttgctgccactcctgagagatctcttaagggcacttcagagcctcctgcaccagtggtggaccta

SEQ ID NO: 25963 - DNA, 371 bp, Glycine max
  unsure at all n locations
ttcttctcgatatattatgcgcctgaatcagacttccgtttcaaaagttatgaacatatgaatttctccactgtattccgtgtgacaagtgatgaccattttaatttctcgatagcattcgttgttcaatttcgagcgtctcgatatattatgcgcttgaatcggacttccgtgtgacaagttatgaccatttgaatttctcgagggcttccgtttttcaatttcaagcttcgagatatattatgcgcctgaatcatacttccgtttcaaaagctatggccatatgaatttctcgagagcaattcgtgctcaatttcgagcgtctcgatatattctgcgcgttaatcggactttcgtgtgacaagntatga

SEQ ID NO: 25964 - DNA, 418 bp, Glycine max
tctcgatatattatgcgcctgattcagagtttcgttttaaaaggtatgaccattggaatttctcgagagcttccgatgttctatttcgagcgtctcgatatattatgcacctgaatcggacttccgtgtgacatgttatgaccattttagtttctcgagagtttctgttgttcaatttcaagcttctcgatatattatgtggctgaatcggacttccgtgtgacaagttatgaccatttgaatttctcgggagctttggatgttcaatttcgagcgtctcgatatattatgcccctgaatcggactttcgtgtgacaagttatgaccatttgaattcttcgagagcattcgttggtcaatttcgagcatctccatatattatgcgcccgaatcggacttccgtgtgacatgttatgac

SEQ ID NO: 25965 - DNA, 372 bp, Glycine max
agtttgtaggattatggggtacccatcacatgtggtactaggtggcggtcgggcgatggttcacaacaagttttccacatccacaatgcgcgcataaacccaccatcccctgttgcccacctccatctgagctcacgtactcccacgtagcccatatcctcatttctctcaacactgggtccccatcaatcctcccaagcttcgacaacatccaagcaaaacaacattcaaacagcacaagctatcacagccaagcaaaacagggcaaaggcagaaaactctgctcaacacaccaaccaaaatcacaacttttctcacttaaagaccccagtaacaattccttcgatccaattcgttaaccgttggatcgac

SEQ ID NO: 25966 - DNA, 421 bp, Glycine max
tgccacccagctcgcccaggcgagcatggttgctttcttcagaagcaacaaccttctagaggaatcttctggagggcccaagtgcccctggttgctatttgcacccccatttttactaagtacaccccctgccttttttggtgattcttttttcgtaaagttacggaaacttacgaatttcgtaacgatacttgttttctttccgtaatgctacggaaccttgcagattacataatcatcccctttttgacttacggaatgttacggaacctcactaattgtgcaacgatgcttccatttgatttccggtgtgtcacggaaccttacggattatgcatcaatattttcttttgttttccggcatgtcccggaatttcacaaattgcctaatgatgggtgccaagcacctcacaaggaccaa

SEQ ID NO: 25967 - DNA, 389 bp, Glycine max
agtttgatggcttcatatgatctatctattgataatttcatatatgcatttaagtcatgtagatatgttgactgttggtgtcgtatagctattaattaacatgctttcttagtttttttttctgcatttgttcacaatgttgctaaatgcattgcttaatatcttttcctcacaaaagtagttgtctatttagtaaatttgctgaatataagaaaatgaccttgatgatttaggtggagaaaatgaggctgcttcatgttttcatcaagcaatttggaattgcctacaatgattgggaacctgtgaattcaggcatattattggagtctacttctgttgagagtttatcatctgccgatgatgtggttgctggctgctcagatggacat

SEQ ID NO: 25968 - DNA, 444 bp, Glycine max
actcagcttgtttctcaatctcccactttcttatgaagacatctctttgtatttagagacacacacacactttttcctaatcgatcactcacataaattcgacccctgtattttgtgaatttgtgcttatcttaaaattaaattggttactcatgtgagttcttgattgaatcccatttctctccccctttgacatcaacatatagccatagtgcctatcagaatctaagtatgcaaatataactaatcgttcaaacaacatttatgaaaaaccatgaaccaaatcatgaagtacgaaccatgaagcatcaatcataaatagattaactattaaatccacatagccaaataacatactcgttcgaccataccatgcaaataaagaaaatagttaattgttcatataccataatcatatagccaaaatacatgagaatagaaaac

SEQ ID NO: 25969 - DNA, 390 bp, Glycine max
  unsure at all n locations
agtttatctttgatgatgagggcatgatcctggtgcggagggggagaagcaagaagggtttcgagcaaatgggtcctgaaagccgaaacctcagcttcagaaagaatgtcatctctgtgaagagccaccaaattcagcatctgatagagagaatctcgctgccatttgaggttgtcggattgaagctgccacagcttctgctctgcggaaacgagacaccgatgtttcttgaggccgaagggtaaaatggtcttgcacagagaagatattgagtcgtgcagggtcgagtagtacgctgtgggtgccttcgaatacaccattttcctaacaaggaactcaaattttgcctacaaatatatatataaatggtgttnttgtgaagattctgga

SEQ ID NO: 25970 - DNA, 430 bp, Glycine max
tgttccttggtagtttaagcttatccttgcatcattttcttttttggaaccaccattgtaagttttatgcttcctttggaaaaccctagagaaagacactttgaaaaagttatctttttatgaaatgggtgttattttcgcgaccttcactgaatcccatgcgcattggcatgactagaatttcaaaatgatgctccttttgtagaactcgaaataccccttagccttttcatgtagtgacatgagtatttgattcagggtatcgatgacaactatatttctaaaatccattgtaatttccttcattttgacgtataaagacttgcgttggaccaacaagcgtgaacgagaaagagacttctaagtgacacaacaaggaacttggtagggagctcacaatacgtgaggggagttattataaaattatcat

SEQ ID NO: 25971 - DNA, 390 bp, Glycine max
agctattgagcaattgaaatgtgtcataacttttcacttggaggtccgattcatgcgcataatatatcgagacgctcgaaattgaacaacggaagctctcgagaaattcaaatggtcataacttttcaattgggggtcagattcaggcgcataatatatcgagaagcttgaaattgaacaacggaagctctcgtgaaattcaaatggtcataacttttaactcggaggtccaattcaggcgcataatatatcgagacgctagaaattgaacaatggaagctcttgagcaattgaaatggtcataacttttcactcagatgtccgattcaggcgcataatacatcgagacgctcgaaactgaacaatggaagctcttaagcaattcaaatg

SEQ ID NO: 25972 - DNA, 435 bp, Glycine max
tactcaagcttcatgcgagagtcaaagatcaaattgagaggaaaattattatctattctaaacaagccaacaaaggaagaaagaaggttgtcttcgaacccggagatcgggtttgggtgcacatgagaaaagaaaggtttccggaacagaggaaatcaaagcttcaaccaaggggagatggaccatttcaagtgcttgaaagaatcaataacaatgcttacaaagttgagctgcccggtgagtataatgttagttccaccttcaatgtctctgatttatctctttttgatgcagatggagaattcgatttgaggacaaatccttctcaagagggagagaatgatgaggacatgttcaagagcaagggcaaggatccacttgaaggacttggaggacctatgacaagggctagagcaaggaaagccaaggaagctc

SEQ ID NO: 25973 - DNA, 379 bp, Glycine max
agctttttataagctgaaccattttatcaataaacacaagttgagttttattcagaaaattagagtttatctcttttatcttagtgagagtgattctcctaaattcttgagtgattcaagaacaccctggctgtatcaaaggactttcacaacctttgtgtgttgtcctcgctggaaagagtgattctttccttccaatcatctccacccttgttctttcaaaccacaattccagaaaatccacctctgcccaaaattatctcgtgaccataactcccattttacacactcacattaagtgattcttgagcctaaattgaatttcaaaacgagacctttcacctcgttttggaatcacctcatttggagccctgtagct

SEQ ID NO: 25974 - DNA, 423 bp, Glycine max
  unsure at all n locations
tgagatgaggaagtgttgaagggtgaaacttcctgtanttctgttgaccacagagtggtacctggagatatgtcgcgggggtcaggagaccttggggacgtcaggtggggtgctattgcccaaaaccaagcttgaccaatcccgacccaacccgggcatagtcggtcagtgagaacctgtgatgtacctaaacaggcgagctcctggcagtcaacaaataaaaggaacaaagaccacaaagcaaggaggcttgtggtggctggccagctgtgaactttgattgatatgtgggttatggcctctggtaattgattaccaagggtaggtaatcgattacaaggcttaaaattgaagacatgaggctaagatggtctctggtaatcgattaccacggcgtgtaatcgattaccaggcttgaaaacg

SEQ ID NO: 25975 - DNA, 396 bp, Glycine max
  unsure at all n locations
atcttctaatggaagagaaagaccggncacgagcacataacatgattttaaaagaagagttagccgtttgctcaaggtccaaaagaaacttgtctcagcgtttatgcgaagcagaaaccaacatgttagctatcatcaccaagtaccaagaagaactaagtctagccacggcccacgagcatagggtgcggacgagtatgcccatgtgtacgcggaaaaggaggctagaggaagggtgatcgactcgttacaccaagaggcaaccatgtggatggaccgatttgctcttaccttgaatgggaatcaagaacttccccgattgctagccaaggccaaagcaatggcggacacctactccacccccgaggagatccacagacttctcgactattgtca

SEQ ID NO: 25976 - DNA, 429 bp, Glycine max
tgtagaatggctagacatgatacatgtcagggtttgtttttgttcaaggataaaaagggatgccccacattatttccatgacacaaaatgcaaaaaaatgatgatttggaaactttatgcaaaactggtcatgcatgcacctatgcggacactcaagtgtcaaatttttatggtcatgtgatgctagggctcaggattcatttcctctattttaatcaacccaatgtttccaaaatatgttcttttatcaatttgtgcattcatccgagtccatttcgggcgtccggggaaatttcacagcattcacccttcaggtgtagacacattttccaaaaattggttatgatcaatgaacttttttttggaaatcgtctcttttcaaaagcatgtcgttttttagctagacaacttattttctttttttctcct

SEQ ID NO: 25977 - DNA, 371 bp, Glycine max
tcatcttggtggtgaagctctttcttccatggcttattcccttgtgccaaagctagaggtttgttgaataatccccttcacctttcatttcatatttttccttgaaaaatatcctttccaaggtggaagggatgatgcaatcctaccgcccaagggtattggatagaagactccaagaggcttaggctagagctactaaagaaggccctagggttctcatgaaccttagggtagatttttgagcccatgggtcaaggttggatccactcttctttgtaaatattagaataggttttttttccttcttttgggccttgtatttttgccattctagtagtatagggttttagccttgtatttcagggcatttt

SEQ ID NO: 25978 - DNA, 429 bp, Glycine max
  unsure at all n locations
tgtgactcttggcaatttctttgaaactagtcactttaaaagttgtgacttttgaaaaaatcttcagaaacaagtcacttgaagaattgtgacttttggaaatgtatttttcgaaatcagtcactggtaatcgattaccattaaggtataattgattgcacatcaacagatgtgactcttcattttaaattttgaaaatcaaaacatttagaagctttggtaatcgattacaggtattgtgtaatcgattacacaagtttaaaatgatttaaaactgtttaaacataagttgtaactcttgaaatttgaaatctaacgttttaaaacactggcaatcgattactaccttctggtaatcgattaccagagtaaaactctttggtaatgattntgtgaaaacttcttggtgctactcaatgtttgaaaaac

SEQ ID NO: 25979 - DNA, 378 bp, Glycine max
  unsure at all n locations
ggctgtgctcatgacatcaacntaatcnacncggccgcggttctattgactactgcagctgtcatttttgagactttgcttgnaacggagctgtgggagaaattaattatgggccgggttgtggcttccgaattcctccacttgcttggacctgtgatacttggagaatatcccatttaacttttattctttagaaaattttgtcatttatttaggctgttgtctggactgcaaaattctggaacattcatgcccctatctagccgatgtcatgggaaatgaatttatattttatttcaaggccaagtttctagtggctttaaaacattggatacatgtttaatttttccgtgctaataatgggcattgataactgga

SEQ ID NO: 25980 - DNA, 432 bp, Glycine max
  unsure at all n locations
tctttaaattatttgtactggaaaaggtacgatggtttgtgtttctgcccganngtcggataatagaatgtaacacttataaaaatgtgatgtgtgtcagctcggactatatttatctcctattcattcgtaaactttaatcgggttatctttttttaactcgatttctactttaactttaagtatatttggtaacattagagtttaattaagataacactctaagcaagattaaatcaacctaatttcagacattgaatcaataagataatgatatagacaaatatcatcaatcgttttattttagatctaaaatataggcaaacattcgactttatttattaataagtatccaaatcatgtgaaattatttcagtttatgtagttgtatcgacttgagctcttaagtatgtgaatagcttaaatatgtga

SEQ ID NO: 25981 - DNA, 556 bp, Glycine max
  unsure at all n locations
aaaccggcacagaacaaccccactacgaaaacagacaccaacnacccccacnacccgcnnacggcaanatgatgcgtccatcgaacnaccgaaggccaanncnagcnncgcgccgcaggcganaccagcagcagcccgaccggcacggcangccctagcttatggannagccaaaagctaccacaacaggggcgcgcacggagcgaccangacgacacgcaaccgacncacaagtcnaggccacacccggagacagagaaaagagaagacaccccaacaccggaaaagcggaccgaccaacacgaccggagggatgcaaacacgccgcacaaggccgagccggcatcaacctggagcgacagacaccacgggacctgaaagaaagcccacccagaacaacccgagccagaggcgaggcacgaacccacagcagccaagacagacccaggcacacaactggacaacgcaaccggctgaagcccgccgaaaacagacgactgagcaaaccaacacgaaccgcacacgcagagcacgaccacacaacattacagccaag

SEQ ID NO: 25982 - DNA, 487 bp, Glycine max
  unsure at all n locations
cgaanncttgacgtcgatagaangncacacgacctaaanaacacgcaagacagcaagaagngctcaanggnagaaacaacatgtatttatggtgatancagcacgcacacaggaagcacaggacggcggngaaccaaagccaccacggaccgacgaaggcgcgagaanaccaaaccgcaaagaccacagggaccgaggaacggaacagcccacccaagggccggaacgaggcatacaaggacggaacggaacctgcacgcacacccagggagaggatgtcagacacgcgaacgatgagcgaacaagctagggctggaaggcatctagggaacatagcaagcgatgaacaatatacgagcaccgaactgaacagcagcgggacaaggcggacagactcgacaaagaacgagggcaacgatgctgaacgaggacttgaacaacgcaggacagggaatggagcacgaaccgtcaagaccctattgaacag

SEQ ID NO: 25983 - DNA, 388 bp, Glycine max
agtttgactaggcgagtttattttagccttagtttcactttagttattagtcaattcgattaagaatgagaaatgccaaagagaaaacgtccgattgattttccgctttattttactaaaaaaaagatgttttttgattattatattatttttcatctctttttgttttccaacgtggttacggcacgaccgaacggtcgaaattcattttaaccgaagtttacggatcatacaattcaaacgttcggtggaaatttattttatttttaagttaagcgagaaatgacttaagtaaaatggcttaagcacgtcaacagggggtatgaaaagtaaatgaaacgagaacagaaatacacaaaacacaatttggaccaccacgagtacatag

SEQ ID NO: 25984 - DNA, 429 bp, Glycine max
  unsure at all n locations
ggaccttaaaactagctgacacatgaaagaatggaaaagattataagatttggtagaaagaatgatgtttgtatttgaagtgtagaatacaacaagaagaattcttttacagtgggtgttcccttctcccactggaaatcttagtttctgttatttaccaaaaagatgtgttcctattagaatttccccaatttaaactacctaacctcctcactgaccctgaaaccacaaataacaaaatcactagcctcctactaattatttcatctggaatattccctccaaaccttattcctccttattaagagttggctcatgcctagtgcagtacgatgcatccaaatttatcacatattctccacaaactcacaaataatatatgacatgtgtaaagtcaactgagattaanataatagaactacaaaagca

SEQ ID NO: 25985 - DNA, 390 bp, Glycine max
  unsure at all n locations
agtctttcataggtgaaatcaggtgcagccatttcccttagagtcctctcacggggtggaggttgggtcatgttctcaaaatgctcaaaatcaaaatgttcaaaattataatgctcaaaatcaggatgctcaaaattaccaaccacaaaatgctcagtctcaccaataatagaatgctcaggatgctcaaaaggtacaaaatgatgcctaactaatctatgaaatgtgctatctatctcaggatcaaagggttgtaagtcagatggattgcctccagtgtagtgtaggtttgaactacagctatcctcaaatgatatccaaatgacttgaaattntgtgagcaacaccctanaatcatgaaaagatggcacanaaattntcaggcaaaaa

SEQ ID NO: 25986 - DNA, 424 bp, Glycine max
  unsure at all n locations
tcagctntgtccccaaggcttcatgtagacttgtctataatcgcgaagtaaacctcggatccctgtccaaaatcgtgaagtaaacctcggatccctgtcgaggttgctcttcagccatgacttcggcttcaaattctactgtttgagattccctggatgtaggtgaattagaagatgatgactcagaaaagtaagccttttcaaggattgatgctactgttttgtcgtgcaaaagctttctttttctctttgcgttgtttcttctgaaggttacttcaatttctaaatccaatggaaccaattcagctgtagaagatctacgaatgcaaacactaataggaaaagcagttaaccaattcaagaagaaaataaattctgaactaaacaaatattaacaaaaacaaaaattaataaatcanagaat

SEQ ID NO: 25987 - DNA, 248 bp, Glycine max
gattctctgctgactgaaccggggtactgcaccgagcgattctcgcacctttgacccgtgaagacgacgcacaacagctaacaaagcctgctcatagaagatcagaattatctggactttagaatcgtcctgatcatgagaaacctggcaatggaattacgagacaccctgggagcacttaaattttcatgaacgctttcaagcttccacataccttctgcaagcactaccaacgggcccattaagag

SEQ ID NO: 25988 - DNA, 476 bp, Glycine max
  unsure at all n locations
ggcaccagattgtgctctagcattgaanacngaacttagcaaacccagcggcacgggaagcgaacgcagaacatgctttagatttttcgagccacncaccaagcacgaagagaggccngaggaacaccaccagaagccacggcgagaaacaacacgaatggggacaagancccaaggggccaagaggaggaccctgagnnaacggacatgggggctaagaaaacccctcaagaggcggagaaaagtttcatgggagggaaacatgcattacctcgcgtgatctaattaacattatttcaaagcaataccccgatgtggaatagtccatgggtcatacatgagagctgaaatttaatggtcgttcataggatatatacaacatggttaactgatgttagtaacaggtcatgacattttacactcatgaagcgaattgaatgtgcataactgaatgctatgaaagaactactttatcg

SEQ ID NO: 25989 - DNA, 372 bp, Glycine max
agtcttttgtaccgtgcacgtggccgcatgaactgcaagaaagaaattatagcaccagcaaattacaagacttgccaatttctaaaagcttcaatgtagtgtttcattcttctgccttgtttaccaataacacaaattaaaatcactaagtaaccatgtgcacctgataatcagataatgcaccatatgatggattacaggaatcaccccaacgcccgtgtgggtattgatcccatcctattgtccttgatatgtagctctctggacgatttgccctatgatagttgcatatagaacgtaagaaatccttcagacagatacttcctttctatattttggaacacgacataccaattgcaaagaacataccaa

SEQ ID NO: 25990 - DNA, 404 bp, Glycine max
  unsure at all n locations
actcagctgtcggagggaatccatggccccggttaatttggtgnccatgacctccacggtgggctccttctcgggatccagcgtgcacacgaagatgtcaagccccggcagcttctcatccctcggcagcttctccgtcatgacgctccgcgacaccggccgccaccggaaggcttggctgaagaaccagagcaccgagagaagaagctccgctacggtcatcagaagccatggcgctgttggaggttccagtaacaagtgagttatgcggtagtaacacagcgacaacactgccactaagtggatcagcatgtgaagtctgctcagtgccaaccatgattgaacccgttcaacgcggtacgtgaacattggctatcttatgttctcctcgaatttctatatat

SEQ ID NO: 25991 - DNA, 390 bp, Glycine max
agtcttttcttcttatagctgacatgaaccatctttgatagatgatcgtttctgcttactaaccagttcttcataaattaaagagggccattacctctattaaagaaagtcaaaagacggaaatcatattacatgtgatactattataaagaaactaactagccgatgtattgcaatactagattaactcatttgctttttaagttcattttttttaacctgatagcctcagacacaccaggtgatgaatagttccatttcaagattttcttccaaattgaatctgcctttcaattttgaacctctttaacttatgacttatcccttctactgttataatacctcaccttacacacagaaacttgtgtagccccaacactaataaaaaag

SEQ ID NO: 25992 - DNA, 434 bp, Glycine max
  unsure at all n locations
gtgtaccgggcattactttccatgaatcctgataattatatgtgatctctgntgccacttatattttaggttgaagtatctggattgattagtcattttcaggtgttttttttctctgatgttgttatttttttttttggcacctttcttggttctcaataaaattgttctattcataaaagttccattttaattattcattgtgtttcaaatggtgagattgagatgaacgcatgtattctatggtatattttcataaaaaaaattacggaatagtttttgtcgatgttttaaaaatcagacctgtcattaaacttcctattctgctgtttatataaacttattaaccttatatgaatgtcatgtttttgatatgttatgccttcaaggcagcatgaatgttcatgtataagttgtcttggatgttcggttga

SEQ ID NO: 25993 - DNA, 386 bp, Glycine max
  unsure at all n locations
agctngcatcattaagatcccttgtattcagttattgttcgcttaagtgctcgatcgaccgtaacgattttattcttaataaaatttgacttaataaattaaaaaaaaatatttataaatgattcatgaccttaacacttaaacaatatgaaactttgtgggttactagaataaataggttatagctagagatatgcatcaatggcatattagttctctaacttttaccatttattttgtttttataaatactgattctaatgtcgaagtctctttaaatatatcggcataattcagcttatacaagttaagttaaaatagatctatccaaatatttctcccactttacactagtgtctaaaagatatatcctttntaatctccat

SEQ ID NO: 25994 - DNA, 433 bp, Glycine max
  unsure at all n locations
tgtatagtggaagaatttccatattagagtattatattctgtgtgttctcattattacatttaattactaagtacctattttaactttacaaaaaggaaaagtccagttttccaacacaaagtacccattgcttctcccgagaaagtatagagcacttgataataagataaggaaaggaagagaaaacaatatctcatgaagctcacaagtaaataaacagggatggaaggagctaatagcatacagagtgtaatcatactgagatgaagagaaaaaatgccaagcgaaaccttcttgcagtatgagctcactatacacgtaaaagaaggcaccccggccaaaatgtgactattaaacgatccanaaaattaaggagagcccttaaaatatgactcgtatggcacanagaaacatacccttacttgagagaaa

SEQ ID NO: 25995 - DNA, 383 bp, Glycine max
  unsure at all n locations
agcttatattataangattaataaaaataaaccaccttttatctactaattaaaaaagaattaaataaacatctaaatttataaatgatatttctctctagatatagattaggataaatgagagtgcttttagctgtaatgcttcaacaagagcacttangaatttttctttaccttttacctcttttatattaatatatcatttcaataattttagttctaattgcttaaattttaatatttttgcaaagaagttatcaataattaaaaataacattgtatcatagtataaattatttaacataaataaaaaatatttggttattatataatttatatatttaaaagtatgtatttattataaatctacttatataaaatag

SEQ ID NO: 25996 - DNA, 433 bp, Glycine max
  unsure at all n locations
tgcatttggaattgcgaaagccccactccatcattatgattattttctgacatctcaaacaaacaaatcaaacgtaacaagacaattatagttgctgtttgaatacctcacccactcaagtgtatcacacaattatggcttttctctaatgaaacactcttgccttttaccactctaattccccttgagttcttaggcaattcaagagattatggccacaacaaagaacaattcaccaatatgtgtaaggtaaggctagagagacaaggaaaaggttaaccaagaaaaaggctaacaatgtttttaggcacaaatgaaggaaataaaattcagaatttatgaattcaagtaacaatccttcatgcaaccaatatattaccttaaagagattntttttaaagttcttcaagcatgaaccattcagcccaatttt

SEQ ID NO: 25997 - DNA, 394 bp, Glycine max
agtcttttttgccggcaatggaggacggcgcgcgtggagaagaagacctggacgcggaaagaggactgctgcacgcgtggagctctggtcgcggaagaagaagaactcgaaggtgaagaagctttgggtcgcggaagaagaagaagaaaacgaaggaggaagaagaaagtttggctcgcggaagaaattttgaaacagaaaggctttttcatttaaaaattttaatttattaattttattataagggccaattgtgtaacttcatataattgctgggtgcacctagcaacagccttgtttttttgcttgacatgaggcccgaaaggccatactcttaaaaagaaaaagaaaatcaacgtgagatcattaactaagagaacccttttctcccgga

SEQ ID NO: 25998 - DNA, 429 bp, Glycine max
  unsure at all n locations
tcgatctcatcacaagcttccacaacagccttcattctctctaacaacttctttgcactttccaatttattgactctattggtcaaatgctccagcttctgctccatcatctggagttgcctaccatattcacattttgacttcttcctcttcatctcgtcagttgaagccatttcacttgttgtgtttggcaatgaaaaccatcaccatgttaattatgtgtgcgaaaacatgttcaacccggtaagtattattttgtgacaatttgtattcatcattatgttaaaaatattaataacattaattttaaactaagaaaagactatattgaacaaaattttaaaaattaaggactaaattntattttttaaaagataaatgactaaattgaatcanaacaatatgatagatgactaannagtataattt

SEQ ID NO: 25999 - DNA, 486 bp, Glycine max
  unsure at all n locations
aggaccgannattgatgaatcaatgactacccacaggcgaancccagcacgcgacgaggcgatacagtagagctgaacgcaagccatttcagttattaatggagngacctaagggcaagaggcattctcaaataaaccatgcatgacgtagccatctcgtgtgcactagctacctcacatccgatctgttctaataggatctctgctcaccagctccgatacttaaaagcccaaccagaacagttcattcttcccaataatggaatgcactgcatgctctaaaggcacagaatgaagctcatatattctacaagctgggccatcgatgtgacgatgaaaagacctagagtcacaacctgagccaccaatgtagcggctcggtgtactgccgatatcctctgcagcgatgcatatgaaacgagcatactgcgaacccgagccacaaccatgatgacatgctacagactttctaatgccatagacaan

SEQ ID NO: 26000 - DNA, 314 bp, Glycine max
  unsure at all n locations
ggaccgatgcacagtcgagccggacactacatttttttttaaccaccaagagaacaaagagtacgagcgcttagcgcactnggatggtcggaccactagggaagcagctcacgtgcccacacacttaggtgagaaggatcgtgctgaacattccccgggacaagccagaatgactagtatgacaacaaagacccatatgactgtgagagaacacacgtgagtgtggagaatgagaagcaaaattctcactgacaagagaacatagacagatgctggactcattcaaaaatacggataagctggaaacgcctaag

SEQ ID NO: 26001 - DNA, 334 bp, Glycine max
  unsure at all n locations
ttagttttgcaactatntgtccctggcacaatgtcgagattcaaactattcctgcactggacgagtccaaccaaccaatcctaaacaacgttatattccatcgacttttttggtcatttagagcatgcattgatgcgtgtgcattatgtgaacccattgtgaaaatcaatggaacatggctatatggaagacacagagggacactattagttacagttgcacaagatggcgctaacaacatattatcattggcatttggtatgtgcgagggtgaaataacatatgggtgacacttatctttgtcaaacttgagaacacatgagacaccctaata

SEQ ID NO: 26002 - DNA, 433 bp, Glycine max
  unsure at all n locations
tggagagattaaaattatacaatgatttagtgttctgttttggttgaatggtggagacctanatcacgcacatttcatcttcctgttgatgaatgcacgatcaccttggaagatgttgctcttcaattgagtttacacgttgatggaaaactaattactgacctaaaatattatgattgggaacaaatgtgcgcataatatatatgtgttctttccccaaagaatgcactaataggatcaacacttaaactaatatggttaagagaaaacatattagctctcctagtataacccacatcacagcaattagtaactcattgtagagcatacattgtaagactaattggtggagtgtcgatgccaaacaagtgaaggaacaaagttcagctaatgtatctacctctgttagcacattttgatcaagttggttggt

SEQ ID NO: 26003 - DNA, 389 bp, Glycine max
tagcttttcatcccacaaaagaagtcagattcgggtctatttttcagatgttaatttgtaaacagactagcatgtgactgaaacatatgcacaccccttggatacttctccataagcacttgtagaagaagaaaatctataacaatgagatacgctaagggaaaagctagttacattgagattcatcaaaagctgattttgtatcgtgcataagctaattttgattcatggagaaatgtatttcatattaccttcttattttcttctccctcctatgagtgtgtttagattagtttatcaaaacaggaccaatatctaacagtgaccagtgcagcaagcatcaatgtagatatggagaaaatcagaacatattatcttatgcctcacgt

SEQ ID NO: 26004 - DNA, 435 bp, Glycine max
  unsure at all n locations
tgtagaatggctagacatgatacatgtcagggtttgttttggttcaaggataaaagggatgccccacattatttccatgacacaaatgcaaaaatgatgatttggaaattttatgcaaaactggtcatgcatgcacctatgtggacgctcaactgtcaaatttctatggtcatgtgatactagggctcaggattcatttcctctatttttagtcaacccaatgtttccaaaatatgtccttttatcaatttgtgcattcatacgagtccatttcgggcgtctggggaaattttcacagcattcacccttcaggtgtatacacatttttttaaaaactagttatgatcaatgaattnttttttcaaagagaagatggaaatcatctcttttcaaaagcatgtcggtttttagctagacaacttattttctcttttt

SEQ ID NO: 26005 - DNA, 464 bp, Glycine max
aaaattgtgcgtcgaagatcaccggattcaagctagcacccgggatgcatacagtcgacctgcctgcatgcatgttagtttgccaggaacggaggacagagcgcgagtaaacataataccagcacgccgcgagaggacagatccactcgacgaggtctgaacgcgaagaaacaataactcctatgacacgacgctggcggtcgcggtggacgaagaacatgactgacgatgaatagcaatgcttgactggctgaagacattactaacatagtcgctcattattgcaacatatggatgcatgaacttgatcaaaaggccaatagagatgctgcatacactagctggctgctcctagcagcagacttggtacaatgcttgacatgaaggacggaaggccatactcttatactgatgacgaatgtacactgagatcagtcactactagaactcttttctaccggaag

SEQ ID NO: 26006 - DNA, 395 bp, Glycine max
tatgatattctttccattatccttccccactttattctttaaagcacctagaaatacatagctaagtatgtctacatcagtgccacttctataaacgcttcatcttttgctttatctttactaaaacgctatcagaaaaatgtcttaaaatccaggaagttcaatgcataccatttgatgtgaagagtaaatcacttaatcaaaacagtaaatgattcaaactaacgaataaggttggcgaggaggataagaaagagaaaaatgaggaaaatattgaggataggatctctcttgtcaacaaatagctaacaagctaagactatacagttctcgattaaaaaaataagtgaatacagattaggctatatatgatatatgacggacacgatctttta

SEQ ID NO: 26007 - DNA, 359 bp, Glycine max
  unsure at all n locations
gcttttcagagatagttatccaactagcgccttgattatactgtctctatgcgaagagcatatctctctccttagacattacttcataaatcccaatggtggtaatgtgtgaaaatgtgtgccacacgcggtgaccaaatttcaaaaagagccgacgtttaacgagtctatgatcatagatttactagaacagatatgagtgtatgcaagaaaaaaaaggattttgggagaggaagaagacccaacatgtgtgacagaaatagagagcagactgtcagtagcgatatatatgaactactgcgatgctagaaggcctatatgtctggctgagtactatgagcttatcatcnatcctatat

SEQ ID NO: 26008 - DNA, 423 bp, Glycine max
  unsure at all n locations
tgaatgagcatttaatgagtcgagccngaattattttcaatttctcaacttatttatacccctaattgtaactatcttgaagatatacttctagtggcctatagttgggagtgtgagtagtaaaacacaatgtgtcttggagagagaactcttgttcacttaagtcatactcgtttatggagaatagttactaatgttcaatttcacacggcaatcatctttaatgttgcaaatgtattttctatcatgattatgcccatacttagcaaaacttagtgtctgtctaaggcaaaagtatgaactgaacaatattacatattgagttgctgctatattattttggtgaagcattatcaggaagattacaaacatcctctgcttaaaagttcattagctatgagtatttattaccgtagtcttctt

SEQ ID NO: 26009 - DNA, 379 bp, Glycine max
agtttatgctgcaaacatttataatagaccccttcagcagcaaaatcaacaacaacagaataataatgatctttcaagcaacagatgcaatccaggttggaggaatcatccaaatatgagatgggcaagtaagtcatatgttcctcctccaatgcagcaataacaaagacaacaagcaactgaggcacctcctcaaccttccttagaagagttagtgaggcaaatgacaatccagaatatgcaatttcaacaagagacaagagctccattcagagtacgacaaatcaaatggggcatatggctactcagttgaaccaagctcagtcctaaaattctgacaaattgccttcacagactgtgcagaatccgaaaaatgtga

SEQ ID NO: 26010 - DNA, 415 bp, Glycine max
  unsure at all n locations
ntgagccaaaatcctgactcaccatatactttgactctggtgagaatgtcaattcttaccctcggaagcaaaaaaaaaggggagagggaaaatttccaatcaaagaggaagcaaaaaaggagagaaggaaaatttccaatcaaaggaaaaaaagagaggaaagggaattcccaatcaaagagtgggagaaagcaaaaagaaaagaaagaaaattcccaatcaaagaatgggagaaagaaaaaagagaagaagaaagggaagaaagttcccgatcaaaaaaaataatatgcagaaaggtctttggaccggacaatatctgaacaatacagaattgtcaccaaatgaataaaaagaaggaaagggaaccatgacctanaatggtcttccccctttagttgccaggcaaaatcttgtg

SEQ ID NO: 26011 - DNA, 345 bp, Glycine max
agcttgtaatcgattactagaggagaatttcataaaataattttcaagagtcacatctgttcaaatgattttttaatagccatcaaaagtctatttatatatgacttagaacacaaatttgcttagagtttttcagaacaaaaaggtcttattctctcaaaagcaaaatcatcttatcctcttagaaattccttggccaatacgcttgcaattcaataagaaattattagagcgctcaattgttcaatctatctctttcaagagatatttcttcttctcttcatcttatttcaaaaaagggattaagagaccgagggtctcttgttgtaaagcaatatgaacaca

SEQ ID NO: 26012 - DNA, 426 bp, Glycine max
  unsure at all n locations
tttcgattcattctatgtacccgttgtggttcacattgtgtttcgngcatttttattctcgttttgtttactttttataccccctgttgacgtgcttaagccattttacttaagtcatttctcgcttaacttaaaaataaaataaatttccaccgaacgtttgaattgtattatccattaacttcggttaaaatcaattccgaccgttcggtcgtgccgtaaccacgttggaaatcaaaaagaggtaaaaaataatataataatcaaaaaaatatcttttagtaaaataaagcggaaaatcaatcggacgttttctctttgggattcctcattcttaatcgaattgattaataactaaagtgaaactaaggctaanatcaactcgcctagtcaagctcgtccacaaaaaataggcttttgaagttc

SEQ ID NO: 26013 - DNA, 376 bp, Glycine max
  unsure at all n locations
agttttagccttangtaaacatgttgctcatgttgctccccttatctctcacatgtatttcggttttctgataaagaaaaatctaaccctccctttggaaggaaagttgtggtattacgaggagattttagaaaaatacttccaatcattccaaaagaaagaagataaggtgttgttcatgctagcattaattcataatattttttgcctttatgtaaggttcttactttaacaaaaaatatgagtcttcaatcaaggtcttctaatgaacatgtttctcaattgaaagaatttgtaaattgggtgttggatattggaaatgaaactattggtgagattcatgacaaagaaaatgccatngacattccatcttata

SEQ ID NO: 26014 - DNA, 414 bp, Glycine max
  unsure at all n locations
tattattcattaatactccattaatgtatttgttgattcttattncttgnatttacattatatgcttgttgtaggaacctatgattctatgtatgattatagtgtggtccttcttggagagcttgagaccttgttttccatgcttaagggacccttttcggttgtctcccttctattggtgacttgttgtggtggtaaggaacccttctccttcccctttcatcttcattttcgtgctccttcatggagtacctttgggggctcataaaagtgcttgtggttgaggttttaatgttgattcttcttgttcttagggcttacgtgtttttgtttggtgtgtgttgttgttaacgtggaggatattaagccctcatcttggacccaaagatttctccttttcactttcttattctc

SEQ ID NO: 26015 - DNA, 187 bp, Glycine max
taagaagaatcacatcgtttatgtgatagacaatttgatttattgagttcaacagctgaggggcgtcacatttattatcaagggaatcggctggagtagaaatgtgtgcactttgccaaaagtcatctaatctgactcatgtagcataatgatgaagattgcaatagccgtaagttcttaatagtgt

SEQ ID NO: 26016 - DNA, 391 bp, Glycine max
  unsure at all n locations
tggagtgctcgaattgcggttaagtggaagatcgctagttatagttcctcctctcgttcttcttcttgttctcgggattccacatcatctgactctttcattatgtgtgctagctcttcttccatagtttaagaaaattatcagaaggaattgttttttaaagagggagaagagacagcccgtgcatatatatatgcgcactttttttataatcgatcgttatgaaaggaactggggacaagacgagaagagacgatttagcttctttgacaacatacaagattgaattcgngagaaatactggattgaactatcacataatacaatataatacgagattacaaaaccaactttgagtgtaactagactaaagaaagatgagatcgatggc

SEQ ID NO: 26017 - DNA, 409 bp, Glycine max
agctcggacccgggatccttacagtcacctgccgcatgcattcagctttctatactatccaccaaacactgccgtgtttctgtctcggcctaaatttaaggaggactgcagcaccgggtatccttccctaactgtactggatgcggatgccatggctttatcctctatagctttctggagaattaacatgaccttcgagatggaatccatctgatcgtttaaggccgatagatcggccttcatcagaagctgcacgcactattacttatgcatttcactggatcgagtgtcatatccggcgcctttgtgctttcttagttatgatgaaattccagttgaaataaacaactgtgagtatgccaccaaaacatgaatatgcaaatgaatgatcagagcacttggatccacc

SEQ ID NO: 26018 - DNA, 400 bp, Glycine max
tgcttgagaagcttctatgaaggctggatctttgtttgctatgaggtccttcaatggtgattgtcaatcatggagatgcagcggaagataaaggagaagaggtgagaggaggtgtgtcatccactagggaataagccatggaaggaggagcttcaccaccaagagtgccttggataataagcttagagagggagcttcaattgacgaaaggaatgagagaaatagagggagagaagttgaactttgaagtgtgtgactcacaagactctcattcatcacagttatgacaagcgttacacatgtttctatttatagcctaagtcacaaactatatgaaagcttccttgagaagcttccatgagaagtgagagcttagctacacacaccctctctaatagct

SEQ ID NO: 26019 - DNA, 382 bp, Glycine max
  unsure at all n locations
agtttgttccacttcacgtctataatatgaatgtagcatatagatccaaagacccttacgtgctttgctgatggcttcttaccgttccaagcttcaattggggtcttgtcttttatagacttagttggacatctgttgagtatgtaaatagcagtgtagactgtttcatcccataatgtgttaagtagtcccttctccttgagcatcgatctagccatttccataactgtgcgattctttctctcggacactccattgtgttgaggagaatatgcgactgtaagttgtcactcaatgccttcatcctcacaaaatctttcaaactcgcgagaggtgtactctntgccgtgatcacttcttagtacttttatccgttttccac

SEQ ID NO: 26020 - DNA, 420 bp, Glycine max
cttggactttatgcttgagggtcacacactgctcgatcattgcctttgagtacccacatgatacgcacaggtcgcgttggggttgcaccacctcgggaaaggagactggtagattcttcctagggtcaccactgccaactggttagcgattagggatggcaacaagtccccgtatgacatcggaattggcacaaactccagaagcttcttcactagagggttcctccctggattggaacttgtgccatgattgaaatcaccggtgggacgaggccttgtaggagccgaggcttgagcaggggctctttgtgatggggcagatgacctttgctggatgggtgccgaattggaggggtttccggcataggccaaaaagcttggatggtgctaggcatattgatgagtattgtgaggtgttga

SEQ ID NO: 26021 - DNA, 393 bp, Glycine max
agcttttatttagatccactaactctttggtcacatttatctttgttggtgaatctaaagaaaaaaaaaagagatgagacggatcagatctaacattttatggttctgaattcgtgtgacagatacgatatcaagttgaatgatgtgattctccccgagagctgatgagaatcctgaaaatggccaaatacaggctaaaggcccaagtggagaaggacgaaggcccaagtggagaaggacgaaggcccaagtggagaaggacaaagcccccgagtggagaaggatgaaggcccaagtggagaaggataaaggcctagaggcagagacattatcaagactattaattgttgttgaaggcccagattaatttgaaggcccataataaatatgttc

SEQ ID NO: 26022 - DNA, 412 bp, Glycine max
caatcttgaaacaacccagtattctttgttctactcaagccactgttagctctaaataaatcaaaagatttgaagtttgtttgctcactgactaattcttaattgccttatagacggatatgaaatctaagctctagtattttctctttacatatacaaagtgttttgaaagcgtttcaaactttacaagaatatacaaaaggctttatacaaaaataatttgaatgatagcgtgtaagttcatgtcttggttccttaaagtttctagtatttataggtcttagtgtctattgtctctaaatggatagatttcttcacttgagcttgcatatgaagattgtggccattgaagcatttaatttttgtattaaatgctcatacttcttcatgttggaaaatcactcttgttagc

SEQ ID NO: 26023 - DNA, 379 bp, Glycine max
agttttagccttatgtaaacatgttgctcatgttgctccccttatctctcacatgtatttcggttttctgataaggaaaaatctaaccctccctttggaaggaaagatgtggtattacgaggagattttagaaaaatacttccaatcattccaaaagaaagaagataaggtgttgttcatgctagcattaattcataatattttttgcctttatgtaaggttcttactttaacaaaaaatatgagtcttcaatcaaggtcttctaatgaacatgtttctcaattgaaagaatctgtaaattgggtgttggatattggaaatgaaactattggtgagattcatgacaaagaacatgccattgacattccatcttatatgc

SEQ ID NO: 26024 - DNA, 305 bp, Glycine max
tattattcattagtactccatcaatgtttgttagattcttattcctcgcatttacatcatatgcttgttgtaagaacctatgattctatgtatgagtatagtgtggtccttcttggacagcttgagaccttgatttccatgcttaacggacccttttcggttgtctaccttctataggtgacttgttgtggtggtaaggaacccttctacttaccctttcatcttaattttcgtgctccctcatggagtacctttgggggctcataaacgtgcttgtggctgaggttataatgttgattcttctt

SEQ ID NO: 26025 - DNA, 379 bp, Glycine max
tagtttttgacttgagtcatcaagagaatataaatatgtgaccatggcatgagtttcaagatcatcaatcatctttgaatcatctatctttcaatcttctttcaacattcttcaatcaatcttttcaactctttctacagaattttcggattcatcttctcttcatctttcttcaagtttttgttcaatactttctctttcaagaaaagttttttgataaaaaacttgtgctattcatctttttcattctcttctcctccatgtcggccttcatctgcctttgcacctcctgaattcttttgtgtctctcttctcccttacaaaagattcagaggactaaccgcctgagaattcttttgaatcttactttccccttaag

SEQ ID NO: 26026 - DNA, 432 bp, Glycine max
  unsure at all n locations
ggctgggcctacctccatccctagaggagttgtttgaggcggaagctccacgtacggttttgaagccgagcctttctagcaatggggcctagggaccgatatgatgattggtttaggtagggcggccggcctactacgggcacctgtagggattagtgcttgagaccgcgatccacaaaagcatgggactcaccctttacttgggaatgaagaggggaaagatagcatgtcacaagagcgaggcgaggtttgtaaccctactgcgagagggacgcctcgcgagccgggcttctagagatgaggccttttggcgaagccaagtcaatttcgggccaccaaaccctgcaactgatgagaaggcctatggagtaaagggaagcgtgtacgttgtcacactccctgccttcaaaaggtgcctagaggacgggccan

SEQ ID NO: 26027 - DNA, 388 bp, Glycine max
tagcttgtaccttaactatttacaaggattccttctcaaatccccttattcagctaaatatgtaccttcaaaacttgaactttcaacccgagtgcacatacttgatctaaaagatactgtcataccctaatttcgtccggggattattatttgatgatatacaacctttgattggccgcttcaagatactatgcacccttttttgcacaatatgtgaagtcccgagacgtgccgaaaatcaaaaggaagcaggcttacgcgatctgtgaaaattccataatgtgacggaaatcgaaagcaggtgtttttcgcaatccgtgagttttcataacttcttcgaaagctaaaaaagagtaaatacataatccgtaaggattcgtaaccttgc

SEQ ID NO: 26028 - DNA, 433 bp, Glycine max
  unsure at all n locations
tctccttgataaaatgcttgtcaatctcaacatgctttgttttatcatgtaagacttgattatacttatagcaaccttattatcacaaaacaattgcatagggggaactttggtctttcaagctcttttagacatgtttcagccataagacctcacatactccttgagtcattaatataaactcagttttagcattactcctatcaactataacaccctgatatatatatatatatatatatatatatgtatatatatgtattattagtaattatgtttgatgtttgattatattcgttgtgttgttttatccttgattattttttaggaggtgagtttagttattagaagtatgttagtagttaaagcattagcttctcatagaagcctctcgagacagcttctcanagaagccatgaggaagcttctcgag

SEQ ID NO: 26029 - DNA, 231 bp, Glycine max
tatctttgagcaaatctttacgacaataactattgaatcggatgtgcgattgtgtcccatatgttatcaagacgctcggaattgaacacggatgctatgagaatgatcaaacgacgataattcttaactcagatgaacgattgagatccttcctatatcagacgctacatacttgaaatggccagctactggctaattgccccgacggtaaatgacgactgccctggccga

SEQ ID NO: 26030 - DNA, 334 bp, Glycine max
taataagaggcatgctaagtgggtagagtttttagtgcaatttccatatgtcatcaaacataaaaaggggaaagggaatgtagtggctgatgcactgtctaggagacatgctttacttgctatgcttgaaactaaactgtttggtctcgagtctttgaaagacatgtatgtgcatgatgtggactttgctgaaatttttgctgcatgtgaaaagttttctgaaaatggttactataggcataatggattcttgtttaaagcaaataaattgtgtgtgcctaagtgttccattagagagttgcttgtgagtgaatcacatgagggggggttgatg

SEQ ID NO: 26031 - DNA, 376 bp, Glycine max
  unsure at all n locations
agcttgaaatgaggaagtgtggaagggtgagacttcctacttttattcgttggccacagagtggtacctggagatatgtcgcgggggtcaggagaccttggggacgtcaggtggggtgctattgcccaaaaccaagcttgaccaatcccgacccaacccgggcatagtcagtcagtgagaacctgtgatgtacctaaacaggcgagctcctggaagtcaatcgataaaagaacaaagaccacaaagcaaggaggcttgtgtggtggctggccagctgtgaatcttgagtgatatatgggatagggcctctggtaatcgattaccgagggtgggtagtcgattacaaggcttanaagtgaagacaggaagctaagat

SEQ ID NO: 26032 - DNA, 413 bp, Glycine max
  unsure at all n locations
tcagaccacaacaacacaaaatctatgtattcaaattccctcaatttaatggattttcaaggtttgagaagtgaaattgagaatgaggtaaatttggagcaaactctcacctcacacaagtctataacatcaatttaaacttgctcaaactggatttacacctaaaattccaccgaatcaaaatttgactcctcaacacccaattttaccctagaaatggctctttgttcactttggtcatttgtttttctctcttgtacagcccaagctttctcataagtcctaaatgacatttcaagctaggattaactcactttaacctccaaatgccactaaatccagatttggccttccaactctcaaaacctcactctntntccactcataacaccatattctcactttctaaccct

SEQ ID NO: 26033 - DNA, 280 bp, Glycine max
agtttgccctagtgcataggggactgtgctaagcctaaattcttgcactgagtgcaagaagtggactttggcttagcgcaacaggctcgctaagcgtgatttgcaggttataaatacgtttttagcatgaaaaacacgatttttcactctcctcttctccaaaatgccacccaaaccctaaaacctcattttccaccacccaagaccatcggtggccgccgttgcttgccgttggacccccacaccaagagaaacactttaatcgaagcggaatcctcag

SEQ ID NO: 26034 - DNA, 424 bp, Glycine max
  unsure at all n locations
tggctaaacttttattggactnttcctctctttaattgagnngagccaaacactctttatataaaattatttttttaaataaaacgttgctgtaactttgttcattaaagttcatgggattgttaagactttttattgttgctgctactcctactattattgttcctcctcctaccgtcgttgctaattctactgctacttaacgattatgttagaaccttttttattttgaattttttacagaagtttttaaaggaattctacttaaagattatgttagaaccttttccattttgaatttttttgcagaatttttgaaggcattaaaaattcatcctttgtggtatatatgcagaacaagacccatgtatatgaatatagagttgtcatccactatcacaaaatcatgtcttcttttctaaac

SEQ ID NO: 26035 - DNA, 378 bp, Glycine max
  unsure at all n locations
agtttgaactgntaatttattcctatcctgaagtttcttgactacttttttctgttccagcaattttgtttttattcaaagcagttttattattaagtagtatatatatttgctcaccaccactggccacaaacaattagcatatctgtctacactacttgccatgccctatatctcgccgtggaaacgtggaaaaagaaaaactattttcagcattcaacttccagcaaatatatataatttcattaccagcatgtgttactgaaggagatttaagggaaaagaggttcaggttctgatcattttggaagattagctttggtttgaaagattgtgctaagattatgtccattcaagctcagtggtatccaaataata

SEQ ID NO: 26036 - DNA, 393 bp, Glycine max
  unsure at all n locations
tgaacttaggtgtttggttggaaatgacttgttntttttttntncttatactatggaaaaatgattcgacttgtttaaacacctagtaaatagcacgaaatacatttttgtgaactcaattcagtaactcgcaacatgtgaagtcaattcagtagcttttttaacgtataagagggtgagggattgtgctatgttacaacttctccgtgatgttcatcttttctaattgattttccaactcatcatgagtcacctatgaaacaataaggcattctctgtagtaatgtagttaatgaagcatcttttctaaagaatggtataagaacagtctcaatgttatgaagcaaatcctttgttgtgcttgttagtctttgatgctcgacttaacttctg

SEQ ID NO: 26037 - DNA, 225 bp, Glycine max
cccgggatcctcttagtcacctgatgctgcaacttttttattaacacaatcttcaaccatgttgaaaggtccaaaggcctacatttttgtgtgtttgacttcaaaagcaaatatagaatctttgagaacctattgccaatgctctcttaaaactctgggaatacacttgcaaatctattgagaattcattcacaagactcaatttggatcatccactctaaatga

SEQ ID NO: 26038 - DNA, 394 bp, Glycine max
tttcttagtcttgtattttaaggatgatttttggacaattggatctaattaggacaattcataattggaatggctctaaaattttaaaattttcagggaatagatagaaaaaatggcctggttttggtactaaagaactgtaattgtagtttgataagtaaaagttattaaagtgggtatatatatatatatatatatatatatatatatatatatatatatatatatatatatatatatatatatatatatatatatatagctaaaaatagaattctcttataattggataaattttatatgaattctattatatctaaaagaatgaaaattaatgaatagcaatgattgtcctacatgatttgtatagatacacatatatattatttattag

SEQ ID NO: 26039 - DNA, 273 bp, Glycine max
  unsure at all n locations
ttttcacaatatttaccaacaacatgagaatcatagtatgggttggttntgagaaaatgctcaggatttgtggtgcttgcaataatgattttaacccaggcattatgtacatgtacatcttggattccttcacttacaagatgctccaagaattgagtancaagcggagacgattcctatgcataanaaattaaatgagaaataaacatggcaatgatagtggagatgaaagctagagagaaaactagcacacctcttctcacattcttcaac

SEQ ID NO: 26040 - DNA, 356 bp, Glycine max
  unsure at all n locations
agttttttctcttgcctcctatggnggagagcttcttctagactcatcttctccttgaagtggcgtctcctctctctcttcctttctccattccgctgccattcatcttccaagaagcaaaggaatccattgatgaagaagatcctaggcctacaagctccaatggagcttgcatcacattattaccaaagcattaggaaggcatcaatttcagatattgcttggcaagctgggcattcgtaatcctcatgcaccaccttgagggggggggggtaataccgtatattccaatggtcgtattcaaggcataatcatctggatcgttctgcatgggttaactaatatgttattccctt

SEQ ID NO: 26041 - DNA, 486 bp, Glycine max
  unsure at all n locations
gggttgacctgaatactgaccctaaaattgaacttcttagacgcccattcctaatttctctacaattgtatcacctctcaatgattttgtgaagaagtatgtggcatttacctggggtgaaaagcaagaacaagcctttgctttgctcaaagaaaagcttactaaggcacttggtctagctcttcctgacttttctaaaacatttgagctagaatgtgatgcctctggaaggggaattggagctgtattgttacaaagtgggcaccctattgcttattttagtgaaaaacttcatattgccaccctcaactaccccacctatgataaagaactctatgccttaataagagccctccatacttgagaacaatacccttgtttcgaacgaatttgtcattcatagtgatcattactcacttaagtacatctgagggataaccaacattaacatgaggcttgcgaaatgggtngagacctagagagatt

SEQ ID NO: 26042 - DNA, 385 bp, Glycine max
  unsure at all n locations
atcttatttcgttgtntgctaatggagacgacgcaatagaccttacatggcatgcaaatgggagaaactgcgatggaatgctccgtcatctggctgattcctcgcagtggaagaagattgatcgtttgtatccggatatcagcaaagaggaaagaaatcttatgcttggagtagctagtgatggaatgaatccatatggcagtttaagcatgcaacacagttcatggccagttntgctagtaatttacaatttgcctccctggttgtgcataaagcgaaaatacatgatgttgtctatgatgatatcaggcccaagacaaccatgaaatgacattgatgtttatctaactccgttgattgaagacttgactaagttatgggagat

SEQ ID NO: 26043 - DNA, 394 bp, Glycine max
  unsure at all n locations
agctcagtancttttatgaaatncgaagacttcagcaagaaataattgagaattgtggtggaatcaccccaaccggaataccaatgctccaattcgatgaagaatgatggacagaggagactataaactctgttattcgcattaagttcccctttatttcgtacgaatgagtctgattgtaagtgttgctttgtggcgggttattagattnttttaaatcattccgttgtttagtgtgggttaataattgtaatttttttttattcctaagtgaagttattcgacgtcattatgatgagttgcgaaacaaaggtttaatattatttatttnttaataaacataactacttggtacctgttattcgcttgtacctaaatttgcaaatgatacatg

SEQ ID NO: 26044 - DNA, 497 bp, Glycine max
  unsure at all n locations
gggcccatgatacttgcattctggaacatagaaactgaagctttccgcangcactaagagagagaaatgagcatggtttataagaagctctctgtatccactaccattttaaattatcattgatcagaaattattgtttagaaacaattagattagccttgtttttatttaataaaaaatataactatatatatatatatatatatatatatatatatatatatatatatatatatatatatatatatacagaaagatgtgtatatgatgtgaagctgtacctaacatatgcattaattaaccctctagacggaacacagagaggaattggctggctgcttcatctttanattatatattcttaattgaccaccaaacgaagaagatgtgtatatcattctagtacaagacacacttttcgacccacctgtctgttgctattaacaaatagacacagagtgaataatgttgactttcttttgtatagctaaaaaaag

SEQ ID NO: 26045 - DNA, 520 bp, Glycine max
  unsure at all n locations
gagganntttgatgagtcnttgacnancaagggaattcagctcggaccgcgggatcctctagagtcngatcctgcanggcatgctatacctgattaatgttggaattnggcacgcagaattattgaagaaaaggtggacaccaaatggtaataaagccatcaccgagcaggaatatattatatgtaagaaaccatttggtaatacaaaactaaattaatgaaccactcataaagatacaggcattatcactagtatggaaatgcgtgtattgaaatacaatgccatacagaaaatcgagtatttgaaaccacaaaccaaataaatatgcagaaaggtgtactactacgattaacactcattttagacacttgtaaccaccaataaatgaatctgccacccaagtagtactcatccataaatgcagtccaagaccttatagacaatgataatctcacccattatgtcacaacttaagcttccatcacaacactcctattgtggtaactatatgttgtctcg

SEQ ID NO: 26046 - DNA, 385 bp, Glycine max
  unsure at all n locations
tgctttcntttcctctctttttcatgtgctatttctaccctgtcattcattaagctttgtaattgatcctcaacctcatgccttaactttgaaaaaacctccatttctgaatcaatagcagctcgctccttagtcaatgcaaggttatcttcttctctctcagctcttaacctttccaactcaagtcttgcctcctcagccattctttcaacagcactgatcttttccctctctatgaaaagctcctgctcaaaacttgcattgatatccttctctacttgagctactaaagcactatgcgcagcaacagcattttcagcaacagattctgcttcaatgcgtgcaagctcttcactaactatttcagaagcatctccagtagcta

SEQ ID NO: 26047 - DNA, 307 bp, Glycine max
atcatgcccgacaacagcatctatgacaagacctttatcatcatagctctaaaacataaaacagcattttctttctcatgtaaagaattcaagctgaaataattctcagtgggagcacaaacacaagtataaatgtctcttttaactttgagtcattcgtaaccagtcaaaaggaaaagaaacaagaaattcattgtttatgtgtggtcaagtgcgaaaaaaaattcaacattatttcataccgagacaatcattctatccatatcctcattccaccacatatgagtgtcctataatgatttaaatt

SEQ ID NO: 26048 - DNA, 390 bp, Glycine max
  unsure at all n locations
tttacttatatttgttctccttaagattgaatgttcatatttggagacatgtctttgagttgggtttgaaggccaactttagaaagaaaggggtccattttgttaagtttaactttcaccccacgctataaacttatggggggtttttattggtctcaatgggttttgttattgatacatataattcctcaaagttttaaaactattcatttccaaaaagcattatggaatcatgcactactaaaaatactattttttatgacacgggatttaagtcagtcatagaaaaccgtctttggttatatcagagtggcaaatntgtaaatattgttaacattttaaaaacaattttggaaaaccgccatggaatgcttcagaacaaagacgatc

SEQ ID NO: 26049 - DNA, 346 bp, Glycine max
  unsure at all n locations
gatttaccttgaaatggaagaatgccccaatttggttcctactaaatagagtgaacatacaatgtcatgtttcatcattatggactttgaaaaggcgtatgattcagtttcctggggctttctanataacatgttgatgaggattggaattttgtgaaagatggaggaaatggataaatggttatatgtctatcgcaattgtatccattttaattaatgggcgtcccactacggagggtgatcacctaagagaggcttaatgcanggtgatcccctaccacctttgtctttcaatataatagtggatagccttacatgtttgatgaacataaccatatctaacaac

SEQ ID NO: 26050 - DNA, 381 bp, Glycine max
  unsure at all n locations
tagcttgtggtttatgggtgagagatcaagggcatggacatggcgaaactaagtaagctccgccaattgcaccctcaatgcaaacttcacgacctaaagttgcaactccagaacaagactcacgtatacttttggtgcttacctatttaccctagtgcacagtcaccaccattgtggatcctttgtaaacggtatcacttaaaaaaaattggaatggtgtaagaagaaatttgatgaaaattaactgatttaattgtaacctaatgtaaaaattattcacaccattaactaataaaagttatctatgcgatggcttttaagataattagctataaggcttaaaatntatatatatatatatatatatatatacatataacc

SEQ ID NO: 26051 - DNA, 424 bp, Glycine max
  unsure at all n locations
tgcattanggctgctggtcttctcgctctcttctcctacgctctttagcacagacaacatgttcttccggaaggaccgcacaagtggccaacccaccacctgcgtcctacacatttcaactcatcaatatcactttatatattatgatcaattaatacgcatcatgaacatatatggtaatcatataacgaagttaaaataagttaattgattatatatagaagaacgtacgttctaggtgactttgaagtattagctgattagttatcagagacaattatataattgggggtggctgagagccatataagcttgcataaaaataaagattaattaaacacgtaaaagactttgtttctaatttatgctaatccaaggccaccctcctttatatatctttaaaatgactcattgttatattact

SEQ ID NO: 26052 - DNA, 395 bp, Glycine max
tctgctttattacagctttgatactctcccttgaggttgcaccctcaggccagtccaatctaccccttctaacatacttctcagcatgtcggctaaacatttgcatgacacaatacatacttatttatcatattttaaggatcaatcaattgagattaagttcgcatggtatgtcacttactcgactctcttcaacatgggctgtggtaatggaccaagtaccctttccatcatggcaagatgctccaaattttcgtgagtctgaaacaaagctccgccctgtaatataaattcacaaattatggaatagaatctaagagatggataaatactgtttttatacaggatttgagagagccaaacataccgtgcataactcaaccaagatacatccc

SEQ ID NO: 26053 - DNA, 392 bp, Glycine max
  unsure at all n locations
tgcnttttttagaggaatataacttaactttttattccatgaatcaaacttttcttttactaaataaaaaagttaaagagttaaatgattatatcctgatattataaaatcaatttccattaccattcagtcacaaataactatttcatgaataaaattagtgctggaacatgatacaaatacctcgctacaacattcctgcataggttctttactgcagcagtcctgcaaagtccacactgcgagatatgaaaacagtaaatcagtcaggagcctcattcctgtctgtccccactgcagcgaggtctttgtatcctgagtangtgtgcgatggcaagaaacataaatttccaataaattccagaatntaacacattctggaaactaatttg

SEQ ID NO: 26054 - DNA, 344 bp, Glycine max
ctcattttagcttgtttatggagcttctatggaggctggatctttgagcttcaatgaggtccttcaatggtgatttttcactatggagatgcagttgaaggcaatagagaatacgagaggggaggcaccatgcactaaggaataatcctaggaagaaagagcttcaccaccaagaattgccttggataagaagcttgaagaggatgctttcatggatgaaaagacagagagaatgtgggagcacgaatatgaacgaataaaagagggaaagaagtggaactttgaagtatatctcataagactttcattcatcagagttacaacaagtgttacacatgcttcta

SEQ ID NO: 26055 - DNA, 223 bp, Glycine max
cgctgggtgaagatctacacagaccacatggtgtgccatcagtttcttctattttctaaaccctttatgcaccattctaattactgattggtcttaattgacaattaattactgcggtgcattatgtgggctcatttacctcatctgatgctttcaatctaatctcacgacttaatgaaacattgagcttaatccggattttggatggggacttgaagagggc

SEQ ID NO: 26056 - DNA, 328 bp, Glycine max
  unsure at all n locations
taagcttaagaaatctctntatggacttaaacatgcaccgatgcaatggtatggtagacttagaaacttccttcttgaacaaaaatttgagagaggaaaagttgataaaacacatttcattaaaaagttctctcataacattttactcatgtaagtttatatggatgacatcatttttggttctactaatcgatctctttgtgaagattttgtacacaagatgcaggaggagtttgaaatgccaataatggggggggggattaaattactttcttggtctctatgtgaagaaaaattgaccatgaacatttttctatcaaacaaagta

SEQ ID NO: 26057 - DNA, 592 bp, Glycine max
  unsure at all n locations
tgtcctcgttattatatactctgcctaantccgtatatctactgtgtctatctcacanttcctatatccagtggtacaattgactcctataaacccttagacccgttggattttgaatcgctactattcagngcnctatagatactcagcttttaaaggacatggagtgaattcaaatgagtaattgaaatttttggtaacgaaaatggtattaatcatataatttccacttcaagaactcctccacacaaaggggaaatngtgtgagaaccgaaaaaatagaatcttctttgaggaaattanccaagaaaccaatggctataatcaaaaactatctaccctaaatattttttgggcaaatgcagtaaatacaaattttctatgttcttaataaaagtgattataaagaacactctttgaaattgacaccccctatgagatctaccaaaggtagaaaagccanatatatcacatctcatggtcttctgcttgaaatgctttgtgttaacaatggtaaagaaatactcggcaagttgatgcaaagcccatgaaagttatttctagatactcactactagcaagactatagagg

SEQ ID NO: 26058 - DNA, 397 bp, Glycine max
  unsure at all n locations
agcttgtcatcgtgagacatcaaaggctagtattttaataaatgtgggtaagaaaaattcaccaaattgatagagaaaaatctaaaatcatacatcttaggcaaataaggcatgctagcccccaacattattgcattttgattccatctttggacattcaaattgttgtttatttttcctgttatcttttcctttgccttagtctaaatttcaaacttacaattcggtatctctttcttcttttgtttctcctcatttcttaataattggatttgcatcacttaagtacaaccaaagtccctctggattcaacagttgaacttcaatttcaatctttactacttgtgataaaattangacacttgtcaatctattaacaagtttttggcactgttga

SEQ ID NO: 26059 - DNA, 324 bp, Glycine max
tctaattaggtacatatggggatcaccactcttaatcaaaaccttattgcataataataacacatgccaaaagaattaataaggatggaaattaaataaacttggttatttatagatcaaaacaaaattggcttcaagaaaatgagctctcctacaaggccagacgttagtaccttcaacatctactcaaccaagcaacctatacctacaacctccaaaaatatttaaaagttaacatattaaagaattgaaacttttcagttttcatagtgaggtctgaaaaaccaaaaatatataaagtgataggaactaacaaaaaagaat

SEQ ID NO: 26060 - DNA, 395 bp, Glycine max
agcttgtttgaggaagtgtagaagggtgaaacttcctgcttttattcgttgaccacagagtggtacctggagatatgtcgcgggggtcaggagaccttggggacgtcaggtgcggtgctattgcccaaaaccaagcttgaccaatcccgacccaacccgggcatagtcagtcagtgagaacctgtgatgtacctaaacaggcgagctcctagcagtcaacagataaaaggaacaaagaccacaaagcaaggaggcttgtgtggtggctggccagctatgaattttgattgatatatgggatatggcctctggtaatcgattaccaagggtgggtaatcgataacaaggcttaaaaatgaagataggaggctaagatggtctctggtaatcgatta

SEQ ID NO: 26061 - DNA, 312 bp, Glycine max
gaatgtgctcaaatatgtggggcaattttgggttggtttcttgcttgaataaggtgaattaagggtttgtatgggatggccctaaacctataatgcattttgaaacaatgggacatgccacattgtccccgttctcttgctattgatgcctaaatgcgcgcccaccaagtgttcggtgaaatgcctcaatagcattaacgcgtcacttttataaggaaacaacccatggggcgttttggtttgcacatattttctattttttgggacatgcattcattcccgaaaaaggctagagtgattgccccacatata

SEQ ID NO: 26062 - DNA, 334 bp, Glycine max
agcttgtttctattatgagaccatggaggagatgctgaccacctcaaaagactggatagcggattctaacgattcttctgcggcttccacataaagcatacaggatgggcagctcaccaagatgtcttcctcgcctgacacgaagaccaaatgcccctccactacgaatttcaactttaggtggagcgtaaagggcacaactcccactgagtggatccacgggcgccccaacagacagctgtaaggggggttaatatccattatttggaaagtgacttgacaggtgtgagggcctatttgtactgcgagatcgatctctccctaacctctcggc

SEQ ID NO: 26063 - DNA, 338 bp, Glycine max
  unsure at all n locations
gctgggtgcagccatgccttcccgattttcaattgggaaattggcaagtcattgaacgacctgaangtttcatggcagacacaatgtaattctttaatttctaaccctacagctgggtctaagctctaggagtttctccttgttatggcgttatgtcttttttctatctaagaatataatataagatctttccttcatctgttcttgcgccttcgcctattgtcattcatttgcatgtttatttctattgcatttaaacggtacagatccgacgacgagtcctatgaagtactaataccgaggacccacgcgtaattttgaaagaaaatgaatcacct

SEQ ID NO: 26064 - DNA, 379 bp, Glycine max
  unsure at all n locations
agcttgctcnctggagttttccgactatgctcttgtatggtggaacaagctacaaaatgagagagcatgaaatgaagagccaatggttgatacatggacggagatgaaaaagatcatgaggaagcgatatgtgccggctagttactcaagggacttgaaattcaagctccaaaaacaaacccaaggaaacaagggggttgaggagtatttcaaggaaatggatgtgctcatgattcaagcaaagattgaagaagatgaggaggtaactatggctcgatttcttaatggtttgactaatgatatccgngatattgttgagctaccggagtttgttgaaatggatgatttgcttcacaaagcaattcaagtagagcaacaa

SEQ ID NO: 26065 - DNA, 258 bp, Glycine max
tacctggatatatgtcgcgggggtcatgacaccttggggacctcaagtggggtgctattgcccaaaaccaagcttgacccatcccgacccaacccgggcataatcggtcagtgagaacctgtgatgtacctaaataagcgagctcctgacagtcaacagataaaaggaacaaagaccacatagcaaggaggcttgtggtggctggccagctgtgaaacttgattgatatgtgagatatggtctctggtaatcgaatac

SEQ ID NO: 26066 - DNA, 396 bp, Glycine max
agtttttttaattttccaaactcccttccaaaatccgatttcaggcttaaataggtggctttgttcgtgctcgtgcgcttagtgcaattctgaaccgcttagccgcattagtgaattttggcttagcgcgggcttttctcgcttagtgaatggactgcagtggtgcgcttagcgggatggcccttcactcagcgaacatgcacaactcatccttcttccagattcttcgtcgcacttagccgaggaatgttgcgctcagcggatggctcactaagccagcagattggcttagcgagagggttaaaatcaacacttcacaaactcgccgaattaacgtaaaattgagataaaatgattattaaacacacaaaatggaagtactaagtatttattacc

SEQ ID NO: 26067 - DNA, 429 bp, Glycine max
  unsure at all n locations
agcccaccatcttttcatagtagatttctggtaatgtgtctactatcattggcatttttttttccgtcattgaggtttcacttgagctgccaggtctctccacctttgggcgtattcttttgaaagattcgtgccccctttttgcacatgttttgtagttgcatcctatccgaagccattatactaacactgcctaacgaaggcaaccactaggtccttccaagaatggactcgggaaggttccaagttagtgtaccangtaacaactaccccagtaagactttcttggaaggaatgtatcagcaattcctcatcttttgcgtatgcccncatcttttgataatacatctntagatggttcttggggcaagtagtccccttgtacttgtcaaagtctaccaccttgaaacttgggtggggtgatgatat

SEQ ID NO: 26068 - DNA, 368 bp, Glycine max
  unsure at all n locations
atgtgaatatccaatcttggtctttacaatgtgtccggcacagaggagaaaataaaagtacggatgtgaggtgagaaaagaaaagaatcttgcatagaaaaaaacggtaggctgatttatgagatatatagtgaatataaaattgtgaatatatttagctganaagaaacacattaaattattattaaaaatatcattctaccttgcacctattctttaattctttgcttatataatattgttttttacacatgacgattatgtatacttgcataatctgcagagtcttacaatcagcgggttaccttggaaaacatgaataaagcttttcatttccacacctttcttcacttatgagagttgtaatg

SEQ ID NO: 26069 - DNA, 387 bp, Glycine max
  unsure at all n locations
ttatctttcattatatgangtccaagagtttggaggaagctattgtaatcattgactccatagcagccagtgattatcaaagtcaccatgacagagctccgactcaaagaaaagttataacggagatggactcttagagtgcaattctagctcaaaacaaactcttgacacaacaaattgaggccttaacaaagcaaataggccaacttcctcagcaatatcaccaaggtggaccatagaaaacacatcaagctcaccaagttcaacaaattttgagatgtgatttttgtggtggtaaccatcaaaatggtcactattcaacacccagtgatggacaacaagaaatggaggcccattatcttgtaaaccaagtcagacctcgacaaa

SEQ ID NO: 26070 - DNA, 357 bp, Glycine max
  unsure at all n locations
atatgaaaagatgcaaatttaatcatcctgcttggacgaatgagaaaactggggcaaatgaagagggtgaggatgatggaggaacccatgttgtgattgccattcttatacagtcaagtntcccaccaacccaacaatgtcattacttaaccaataacaacccttctccttacctaccacccagttatccacaaaggtcatacctaaattaaccacaaaacccacctaccacacaaccaacacgaacaccacctttagcccataccaaaacaccaaccagaaatgaattttgtagcgaaaaagcctgtagaattcaccccaattctggtgtcctatgctgacttgctccctatctac

SEQ ID NO: 26071 - DNA, 394 bp, Glycine max
  unsure at all n locations
ttagccacatatattntatttttttatcaatatacaaattttaattttattgcttttataattttaatttttgtgtgttttatcttattaaaaaatactctaagtgtattatcatagattaattgcatgttgatatagagagataaaaatttattaaatatgaatagaaaaaagacataaaataaaataataacttcaacttatttataaaataatatagaataatataaaaaaattattacaagactgtaatcttttaaaatatttaagtccctcttagttgtgggtgtgtcgtcatacctccaaactatgctcagaactggccctgtataaaataatacgactaagaaatgtgtagtgtaagtgtgtaaccaaatgcatatatgataactat

SEQ ID NO: 26072 - DNA, 355 bp, Glycine max
  unsure at all n locations
gacctataaaactcagcttcacatcagacccttcttgtgtctggactactttcatggacttgatggggcctatgccagttgaaagccttggaggaaagaggtatgcctatgttgttgtggatgatttctccagatctacctgggtcaactttatcagagagaaaacagacacctttgaagtattcaaagagttgagtctaagacttcaaaggagaaaaagactgtgtcatcaagagaattatgagtgaccatggcagagagnttgaaaacagcaagtttactgaattctgcacatctgaaggcatcactcatgagttctctacagccatcacaccacaacaaaatggcatagttg

SEQ ID NO: 26073 - DNA, 377 bp, Glycine max
tatttctttgttttagggccaactaaagcagagaagatggtagggcccaactaaatacccattacctgttgtcctctgtaaaagtgaataagattattaataaccaccgattcatgttggttctaacaatttgctaaataaaaaaaatatgttcttggctcgagttgatacttgaagatccatacttactctatacaatttcatatgcatcttattgcgcctataccaatgaagtaatgagaggcaacagacatacaactagatatttctgccaaccacatgtttaagctcgacgatgagattagaattttctccaatctacaattttcaaagatatgaccataaaattctaatctcatcctcaaacatgcatgatc

SEQ ID NO: 26074 - DNA, 383 bp, Glycine max
ttagctcatggatggaatacttacttgttggtgatgaacaaaagcgcaaaacggaatcaaaaaatgcgaataaggatgaccctagggctgcaaattcgtcaatcccgtgggtatggcttttgaaaggggggaaaagaagtttttgaatgtaaaaacgccccccctttcgtcatttttataatttggtgcaggggtggctcgcccaggcattccctgcttgtttcgcacagagaacggcaacgatcggtcggtcgtgaccccatccccgcttgcgttcatccttaagtacctgcaattaataaacaaccaggtatggccaatcttgaccgcatcattaccctaccttgattggtttctgccgttcatggtttgtctccactcca

SEQ ID NO: 26075 - DNA, 421 bp, Glycine max
ttgatggtgttgagaagattcacatgtttgtcattatcaaaaagggggttaatgtgaatgtatgtatacatgattttgatgatgtcaaatgatgaatcaaacaagactcattttgcttcaagattaatacaagattgtgtcaacaaacaaagccttgattcaagatttcttcaagatcaagccttgtctcacaatgaaaggtttcaagtcattcaaggcacatgtaatcgattaccaatacatgtaatcgattaccaatggtttgaaattgtgtaatcgattacacatcatatgtaatcgattaccagagactctgaatgttgggaattcatattttaaatgaagggtcacaactggtcaagaaaaacaactatgtaatcgattacactaattctgtaatcaatcaccagagagggatttc

SEQ ID NO: 26076 - DNA, 389 bp, Glycine max
  unsure at all n locations
agcttgcatcttgataatgttgcaatttaagcccacacagtggttgcaaaggagcaacaataaaagttaaaaagaacttagataaggtgtagatatcatagttccttgatgatgagtatatttcatgatcagactgacaattttgcattggttatattgagggtttcttatctatctaagacaaaggcattagaaaagatttccttatgatcattaatgcataaagtgtttaactcttacaacttgagaaaaggattgacatggatcacttttatcgaacaaaattgtagcactatcaagacgtaaattgaataatgttgaaagttgaagagacttgggtatttttgttcttattntgggatcatatgatgaaattaanatactaagag

SEQ ID NO: 26077 - DNA, 398 bp, Glycine max
  unsure at all n locations
tcaattggagtcttgtcttttacagacttagttggacatctgttgagtatgtaaacagcagtgtagactgcttcagcccataatgtgttaggtagtcccttctccttgagcatcgatctagccatctccataactgtgcgattctttctctcggacactccattttgttgaggagaatatgcgactgtaagttgtctctcaacgccttcatcctaacaaaatctttcaaactcgtgaaaggtgtactctttgccgcgatcacttcatagaacttttatccgttttccactttgattntcagcaagggccttgaacttttngaatactccanagacttctgattcttcttttagaaaatatacccatgtcattctagagaagtcgtcaatgaagagtat

SEQ ID NO: 26078 - DNA, 387 bp, Glycine max
  unsure at all n locations
agtttggagaggatgctngaatggaggaaaagaatgagagagagaaagagagaggggggagcacganattgaaggaagagaaagagagagaagttgaactttgagttgtgtctcacaagactctcattcatcaaagttacaacaagtgttacacatgtttctatttatagactaggtagcttccttgagaagttttctagagaaaacttccttgagaagcttctttgagaaaacttccttgagaagctagagcttagctacgcacacccctataataactaagctcacttccttgagaagcttccttgaaaagattcctaaagaagctagagcttagctacacacacctctctaatagctaagctcacccccatgacanaatacatg

SEQ ID NO: 26079 - DNA, 489 bp, Glycine max
  unsure at all n locations
gatgagccgattgaccctttgaannncnngnnccnnnnnntttgannccctagacatcagnganctatganactcagctattttatgaggagataaaccatcaaatttatgtccttcagtacaaaaattcttttgcggctttaaatgaggagaggtangagcctncataaagcgacacacaactcccaccgcatatagaatatcgggccttgtattggttagataccttanactccccacaagactcttgaagatcgtggagtctaccttctctccttcatcaaactntgataacttcaagccaccttccatangtgtgttcacgggattgcaatcaagcatattanatttcttcaacacttcttttgtgtacctttcttgtgagacaaagataccattctccgtttgcttcacttccattcccaagtaatatgacatgagtcccatatctgtcatatcanattcacgagacatggactccttgaagtn

SEQ ID NO: 26080 - DNA, 393 bp, Glycine max
agcttttgtctcttaacaagtgtttccaagagatcaaggctccggtaatcgattacactgtctggtaattgattgcaagaagacaattttgaaaaatagattttaaaaagggttttgaatttgaattttgaatcatgtaatcgattaccagcaacgacacttcagcaaacactttgaaaagacatgacccttcaaaatataactgtgttttctgtaatcgattactagtgaagaatttcatataaagctttttgaaaagacacatctcttcaaaccattttgaaaaagcacaaagggccaatatatatgtgtgtttgacttcgaaaagaaagagagagatattctaagagaacttaattgccaaatgctctctgaacaacccttggacaaaca

SEQ ID NO: 26081 - DNA, 347 bp, Glycine max
  unsure at all n locations
tgtggccgaacaagtataaatctgagtttgcattttctcttcccttaaactcctttattggttattggttattgcttattatttctatttaataaagttaatttgcattattatttaggagtacatttttaaaaggaatcttgggttattgggataaaatcaaaataaaattttttgattaggaaaagattgtgatatcttaattcaaccccccttcttaagatatctgaggccacttgtccaacagagagtcttttgcgcttagagcacaggcgcgcttagcgagagactatgtcacgctcagtgagataactcaattagcactatntttaaaaatgcacaacctg

SEQ ID NO: 26082 - DNA, 390 bp, Glycine max
agcttgctttgctatccagataattaagaactaaggaaaatgcataaaaactcatagaatttcctctaaaagtctgaacaaaataaaaaaatatgagttttatggaaaaacaacaatgaagcataaaaaaaacacaaaaaattagacaaaaaacgatgatagattaacgattagagattggcgataagcaaaaggggcttacacgatcagtatgtatatcctttgtaacctttgatggcttcacgaatctcgttcctgtggaggaaaacgatgacaaattattgaaggagatagaaggaagggaaaaaagagaggataagagacatgcacaacctcacatattgtattgcaaaaagcgggtggcttcaacattctggggaaatttcagtt

SEQ ID NO: 26083 - DNA, 438 bp, Glycine max
  unsure at all n locations
tgttcttggattttcctaagttctgaacaagcttatttacaataacttggtcttctcttaattgtctttgggcttggcgatcacgatcaacaaagtactttcggcacctactatatgttgacttgaccaacgctgttattggaatgctgcgacaatctttcaacaccttattcacacattctgataggttggttgtcatgtgaccatatcgtcgtccagatgtatcgtaagccatgctccatttttcttttgaaatgcgatcaatccatcttgctatggctggactcaattggacgaaattttctaagttttgatcaaacacatgcttgcaaggagtgtatgttgcatcaaatntgttatcatcaaaagtggtacgtagacatgaaactcaaattaaattaatgtataanataaaccttacccaatttcttgaacatc

SEQ ID NO: 26084 - DNA, 398 bp, Glycine max
  unsure at all n locations
agtttattatgattttaattgcctaaatcatttccaaatatgcatgtgaattaggaagcatcaacaagaattaagccaaggctattgtgcaagcaatcaatggggcaaaacacaccaaaagattatgatgatggatggctcanattctcacaaaggtaaacttatcactttcaaattgagctttcaaaactatcatgacatgtagaggaaaaacaaggatttcaaatcacaaaatgtcaagagacttttatttttagaacaattacccattacttgaacatatcctataattcaaagacaaacatgcaaatttaacacaacaaaactaacaaaattaagctagaacccaacaaaactaacaaaatcaaactaatttagcacaactaacataactaaca

SEQ ID NO: 26085 - DNA, 342 bp, Glycine max
  unsure at all n locations
tctattatagggggagaagtgtttggtanaaatgttcagccctcctggcaattctagatcacttgaaattagtgaaaaaaaattgtttccgtgaagaaaatccaagccgaggcgcttccgtaacgtttccgtgggtgatttcgcgaagattttcaaccgctcttcattcgttcatcgtcgntcttcggtcttcaaccggtaagatcctgaaatcgaacttttcaattcattctatgtaccctcagtggtcctcatttgtttcatgtggttttattgttatttcatttactttccgtacccccttttgacgtgctctagtcatctacttaaggtattttctcg

SEQ ID NO: 26086 - DNA, 393 bp, Glycine max
  unsure at all n locations
agtcttcatttacatcgntatatgctttctgctcaacccaatccttttcgccttttcaacactcatttccctctcggcggtggccattgtagcttacaacctttccacttcctccttactaagcttgttcgaagcctcaacatccaacgcccttttctccaacaccttcatctcgccataaagatccaaatgcaccccttgaagtttgaattgtcttcaaccaaagtagtattggcttgaaaagctgagtcaagagagcttccagccctctccaaatcgaccttcaacttgtcaatatttaagaatccttganagtgccgagcaatcacgaccgaatagaanacccataaattcacccagttggccgcatcatcatttgtgtcaacatgtggc

SEQ ID NO: 26087 - DNA, 377 bp, Glycine max
  unsure at all n locations
tctcggaaagaatgagcagcagcagactagtttctttctgagagggtgggctttttataattctttattaaagggcaaaattgtccattcataaaagttgctgggtgcaccaacaatattgttgggggcacctagcatctcccctttntctcccccagtggcccaaatgatttgaagacaaatgttaattgcttctcttataacaaaataaaaaatatttataaaaaataattatttatttatatgcctaattgtatgttatacttccaactctctcattgtttgataaattatattagcatattttaccnctaacttataaaaaacacaaatgttatctttctcattgaattggcgtgacttgttgacatagcata

SEQ ID NO: 26088 - DNA, 394 bp, Glycine max
agctaattatttatagctggaggagataaggttgaatgtttatgaattgtccaagctgtacaagcaaaaggtgaaagcttaccatgacaagaagctattgaagaagaatttccaaccaggccaggaagtcttacttttcaattcaagactcaatctatttccagtcaagttgaagtccaagtggtctggacctttcaccatcaaagaggtgaagccttatggagcagtggagttgatggatcctcaatcaaatactcctaagagaagttgggtagtgaacagtcaaaggttaaaactgtatcatggtggcagcattgaaaggttaaccaccatcttgcacttgcaagacccctatagggtgacatatgtcaagctagtgacggtaaagaagcgc

SEQ ID NO: 26089 - DNA, 396 bp, Glycine max
  unsure at all n locations
gaagtgaaggcacgctatgatggaactggggctgncacatcctggctttttccagtctgcatggagattntcaacaacaacatgggcaatgctcccaaccaaaataaagacaatgaaacgcgaagatggcgcaaacataaccgagcaagacctcttgcagataccaagaggagcctgcaccatggaaggtctcagatttatggttatatgcttcttaatttaattattaaactcttaataaatatcttaagtcacttgagccttttttcaatttaattagtatttttttattaaaacattgtcactagtatgtgattaacctatctctttgttattgatacaagattaagctattcttatctcaagttattttattaactatgctcttattggaca

SEQ ID NO: 26090 - DNA, 348 bp, Glycine max
  unsure at all n locations
gcgttaattntaaccttaggttcactctggctattagtcaactcggttaagaaagataatctcaaaggaaaacgtccgattaacctttataaattattttatataaggatattatatcaattatattattatcatgcctctctctggttctaaacgtggttacgacgtgaaagatcggncggattttactgtaacagtgattaaacgagattacaacacaaatgattggttggaattcattgtatcatctattatgtgagatatcggcttacacgatcggtcaaagctcgttagaggcagactaacagaaactgaaagtgaacgacttaaagatgaaaacttgccaaa

SEQ ID NO: 26091 - DNA, 365 bp, Glycine max
tctatttcttatccaaggctcatcttggtggtgaagctctttcttccatggcttattccctagtggatggcgcctcctctcacctcttctcctttgtcttccgctgcatctccatggtggaaaatcaccattaaaggacctcattgaagctcaaagatctagcctccatagaagctctacaagcaagcttccatcactcgaaacattgaaaatctacaggaggtagggcagaaggagctattgttatacatgctggaggaggagctgctgatgtagaagctggatgaggagctgttgatgtagcaagaacctcagctggccttgcccttagtcttctggcccccctaataataactggtggatca

SEQ ID NO: 26092 - DNA, 437 bp, Glycine max
  unsure at all n locations
aggacctataaaactcagcttcttatccaggcaatncttggggtgaagctccttcttccttggcttatttcctagaggatggtgcctcccctctcttcttctcctttgccttccgctgcatctccatggtgaaaaatcaccattgaaggacctcattgaaactcaaagatccatcctccatagaagctccacaagcaagcttccatcaagtggtaatcagagcacaagagcttcaagtaggtgctccttanacctccattaatttttttgcgttaccttctcttccattgttgtttcttcaattttttctccatgtatctcctcacatgtcttgtgctaaatggttttaacatgattctttagagtttccaccgattaaacttgctataaaagctagatttgatttctatggttcaaattcttgttcttttcttgac

SEQ ID NO: 26093 - DNA, 374 bp, Glycine max
  unsure at all n locations
tctttcttncatttgtactgncttcatgtgattcctttttctccctctacgattattatctcgcacatcccaatggtgaaagtgtgcgaaattgagtctcgaacaatgtatcaaaatttcggaaaaatccaacggttaacgaatccggaatcatagttttaccgagacagctttgagtttctgcgaaaaaagaaaaagtcacgatgcgaacaatagttctctcatctccaacatcttttcgtaattcccaacggtgagaatgctcggaattgagttgtgaaccattttcttaaatntcacgacgaaccaacgatgaatgagtccgagatcgntcattttctgaaacagatttgatggtctgcatgataaagcga

SEQ ID NO: 26094 - DNA, 410 bp, Glycine max
  unsure at all n locations
ttataagtctttaaggaacaaggggtacaataaattccaaacattntctttcaaagaccatgtatgcaaagtcaagcagctttttagatctttttaaaaggatatacttactagaaaagcaattcacacacagtaattacgaaatcttcacttggtatccacaggatggtctagagcaaaaaaacatgaaagaataatctttgaaccataaccttgacaagaaaaaccaaatatcaaagaaggacatttccatgaccagggcaagaacaaagtttcatcagtctactatgaagttctcatggtgatagctaactaaggacatttgaacagggacacatccgaggtatgattgcatcataagttagaacacgaagaatcctgcttcgtatggttctgtaagtactctgata

SEQ ID NO: 26095 - DNA, 392 bp, Glycine max
  unsure at all n locations
tgcttcaagaataatggcctcagcaaacttcttatttccagaaggaaattcaatcaatagacctctaatctttaatggagagggttaccactactggaaaacctgaatgcaaatttttattgaggcgaagccatagaaatagggccttatatacccactacagtagaaagaaccacaatagatggaagcacaacaagtggaagcacaacaatagaaaaacctagagatagatggtctaaagaggataaaagacgagtacaatataatttaaaagccaaaaacataattacatctgccctgngaatggatgaatatttcagggtttcaaattgtaagagtgctaaggaaatgtgggacactttacaagtaacacatgaacgcacaacagatgt

SEQ ID NO: 26096 - DNA, 416 bp, Glycine max
  unsure at all n locations
nntatttgngttntggttctatttgcaatagttnttgggtgatgttgttgggatgggcctgttgatggaatggaggaaagatcttccccttgacccanagttcattcctttctcctccttcacaaagttctcttttggttctataaagataatgggagctntaatttggtttaattaatgctttgattgtgtgatttatacttggaatgatgatgttttgttttttatgttggatttgatgcaaaactatttgcttttgatgtgggatgaatgggtttttgaaaaacttcaaaaatgaaagcttgngggaaatggatgaaccaatntgattgttagcataattctagctgggtgcaactnttggctcgttgtccttgagctcgaattcaatttttgaaatgttgctctaagcattt

SEQ ID NO: 26097 - DNA, 371 bp, Glycine max
tagcttgtgcctcttcacgtctgaaatatgaatgtagaatatagatccaaagacccttaggtgctttgctgatggcttcttcccattccaagcttcaattggagtcttatcttttacagacttaattggacatctgttgagtatgtaaacagcagtgtagactgcttcagcccagaatgtgttaagtagtcccttttccttgagcatcgatctagccatttccataactatgcgattctttctctcggataatccattttgttgagaagaatatgcgactgtaagttatcgctcaatgccttcatcctcacaaaatctttcaaacttgcgagaggtgtactctttgtcgcgatcacttcttagtactttta

SEQ ID NO: 26098 - DNA, 424 bp, Glycine max
  unsure at all n locations
tgatgtcattcanaagagactatgtcgacctaaatttagactgaacatgcattgtttatctaattgtattcattatgcgatataatttgttgtaagccattaaaggataattattaagtactcattgcgttaagaaaaaaattagttagtgcaaccaaaatcaattacgcatgtacgatacattgttgtcataattgacaacacttaatgatatgcatgtgtattaaagtttgagcgtgacacaacattgactgacttgacaacacattttgatgcacgacattggtttagtaggaaacataaacacgtaacatgttcacgcgtgtctattnttttgtaaaaaaaagtgaagcaatctatcgttgagaaccatgtatatatatgagacacgaaaaatgctaataaatcacacattgccatgctt

SEQ ID NO: 26099 - DNA, 417 bp, Glycine max
  unsure at all n locations
tcactcgaccgggatccttaagcacctgcggcatgcaagcttagtgacataatgtgttggcaggaattagctggaagtcacattagaccccttctcttctcacactgcaaatgcaattgacatccatatccaaattaaagcccctctactctcaatcaatctttctcttctacgactcttcccggtggaactgaaaccccgcccctagctactatagaatcgaggcccctttttctttttccacttttctcgaccttcagttttaaatttctttcttttctttcaaaatatgcattgtaataatgatctaacaaatagccaacataagatttttcatttattttgagaatgaatttaaaactttaaatcaatggaatttatggctctnttgatatttccatatttatatacgaactt

SEQ ID NO: 26100 - DNA, 431 bp, Glycine max
  unsure at all n locations
cttatgcctggatttgatcctgaaattattcaagtggctcagatggtccttataaatccccggaatattgactatcatactggagtttttgcaaccaaggtaacaacatcttgtaatttcttgatataattttaattggctactatgacatgctacacagtcctcatgtttgttgtatagatcacgcctgcaagggatggaaaacctgtcttgattgaacttattgatgcgaaaaccaaggagccgaaagacacgctggaggtaacttaatctttttcagaaagcttttagggttatatctctttgntattatcaattggaaacatttctcccatgagagaanggagaaaattattatgtgtcggtagaacttagaatatctatacnaagtatattgtattatatcttagaatgtttatactatcttaatg

SEQ ID NO: 26101 - DNA, 390 bp, Glycine max
  unsure at all n locations
tttgctcatctagatctgagtggaaattctcttcttggagaaatcccctctgaagtatggaagcttacagccttacgatatctagatctaagttataatgtggctattcatggagagatcccttatcactttaaaaatctctcacaactgcaatatctttgtcttagaggacttaatctttccggaccaatacctttccgggttgggaatcttcctatcttgcatactcttagacttgaaggcaatnttgatcttaaaattaacgatgcaaagtggctatcttctctctctttnttaacaactcttgacctgacatcattgcataatcttggctcctctcgttactggcaacaaatgatcggtgagcttataacacacttgagagagttg

SEQ ID NO: 26102 - DNA, 394 bp, Glycine max
  unsure at all n locations
tattccanacttaagagagttgatgctagttggttgttttctttcagatactattattcaatctctgttttattcaccttccaactnttccactgctcttaccatccttgatctttcttcaaataagctcacatcctcaacatttcaactggtgtcaaactttccttctcttgttatccttgacctttcctataataatatgacatcatcagtctttcaaggtggtttcaacttcagttcaaaacttcaaaatcttgatttgcaaaattgtagtcttacggatggaagatttcttatgtcatcttctttcattatgcgttcttcattntctcttgtttccctagatctctcctcaaatcttgtgaaatcatcaactatantttactgggctctt

SEQ ID NO: 26103 - DNA, 397 bp, Glycine max
atctttgttagattaactataactgctttgtgtgtatggataggtcaaagatcgagtgtcaaaagtaaggaaggcacaaaaaatgtgggcaaagtccagcttcaagcaaagacgcttatttttgcgtatacttttaaagtatataattaaacatcaagcgcttatatgcgagtaagaacacttttccatggttgtagaagtttatcatatttttttacacttcttggaaacgtttgtgatacagacttgaacttatagtcacttttttgacattttaggaaatatgcaaatctttcatagctacccactatttttagttatcctaccgtttaatccatctgctctgaagtagatgtaaattgtgatcattgcatgatgagaatgatgatagcatctt

SEQ ID NO: 26104 - DNA, 300 bp, Glycine max
cacatacatgcgccaacgaaccaaatagcacacaaaaagagtacaaggcgggctaaacgggacttacaggaaacgcattatagaccatgtgatgctcaatatcaagcaagctcccagtctccagacacgaaagtctgtgaactggaaagctagttttcaaaaactgttccaatcgatgcgcatcgatgttgtatctatagcctccgtctccgctaaaaccaatcagaaccacgttcacttccagcggaacttgaaacggaacctacacgaaccacagacacatgcattcacacatcaatt

SEQ ID NO: 26105 - DNA, 396 bp, Glycine max
  unsure at all n locations
agcttcttatccaaggcaattcttggtggtgaagctccttcttccttggcttattccctagtggatggtgcctcctctctccttttctcctttgccttccgctgcatctccatggtgtaaaatcaccattgaagaacctcattgaagctcaaagatccagcctccatagaagctccacaagcaagcttccatcacaccctttgtgcatgtccttcatgttttacatgcctcatgacacctaaacacacttagtagagaatcttgaatttgatcttggattagtgggctgaaccatagctganattcactaatcataattagtgaaatgttggctccacaaattcaagttcaaattcaagtgaaatttgaatagaaaatcaaaattccctccaattt

SEQ ID NO: 26106 - DNA, 367 bp, Glycine max
  unsure at all n locations
tcccgacccaacccgggcatagtcggtcattgagaacctgtgatttatctaaacaggcgagctcctggcagtcaacagataaaaggaacaaagaccacaaagcaaggaggcttgtggtggatggccaactgtgaatttttgtgtgatatatgggttgtggcctctggtaatcgattaccaagggtgggtaatcgattacaaggcttaaaaatgaaaacaggaggctaaaatggtctctggtaatcgattaccacggngtgtaatcgattaccaggcttgaaaacgaggtcaggaagccatgaaggcttctggtaatcgattaccaagggggtgtaatcgataccangcttagaaggggactggaaca

SEQ ID NO: 26107 - DNA, 394 bp, Glycine max
agctccacgcatgtaagtacaatctcatcaggtgcaagactatcacagatgtcttgtcttgtaataaataaatcagctagaactgaagctgcatattcttgggtttcctcatttgatgaattgaggacttgaactagagatctcaagcctttattagctgcagaacccttttcaaggagatcattctgcgaagccatagtaagaacatgacctaaaactcggattatgtgggtttttgagcttggagaatgccctatgagcaatgctaatagctgattaattgtggcagaatcagctactcggacaagctttgtgagtgccattgcagaagcttcctgtcctcttggtccaccactcttaagaagccacaaaaatgctgggatggctccagcac

SEQ ID NO: 26108 - DNA, 398 bp, Glycine max
  unsure at all n locations
tgaccggatgtatgatacatcttcttcaacctttgttattcttgactccatttcattgaagcgcatatccacttgcaattccaaagtatcaaacctctcaccaacatatgtttgaagaccatcaaacctttccaaaatcttcgaaagaagagatgaatcttctccctcatgtctttcttcaccaacatttctagcacctttctttacccaagagccatcatgctccttaatataactaaaggatgctatgactgaagcgcctataaggaatgatctcttgattggaacatagggttcagaatcaagagggatgttgaagtgttgaagganaagggtaataacatgaggataaggcanaggtgcattcaatcgcaatgccttatgcatgcgatatctaa

SEQ ID NO: 26109 - DNA, 383 bp, Glycine max
ttacttctggtgggacatcttgacttgctttccaatctgacattcaccacagattctgccttcttctattttcagattgggaatgcctctaacagcacctttgtcaatgattttcttcatgcctcttaagtgcagatgtccaaatctttgatgccatattctgacttcatcttctctggagaatagacatgtggaggagtaactggtttcttgaggtgtccataggtaacagttgtcctttgatctactgcccttcatcagaacttcactcttctcatttgtcaccaagcattctgactttgtgaagtttacattgaatccttcatcacacagctgactgatgctgatcaagtttgcagtcagtcccttcaccagcagtactt

SEQ ID NO: 26110 - DNA, 348 bp, Glycine max
  unsure at all n locations
tatgttgcaaacatttaaattatacctcctcagctgtctaaccaacaacaacagaataattatgacctttcaagcaacagatacaatccaggttggaggaatcatccaaatctgagatggacaagttctccacaacaacaacaacctgtccctccttttccagaatgttgctggtccaagcaagccatatgttcctcctccaatgcagcaacaacagcagcagtcacaacaaagacaacaaggaactgaggctcctcctcaaccttccttagaagagttagtgaggcanatgaccatccagaatatgcaatntcagcaagagacaagagcctncattcagagtctgac

SEQ ID NO: 26111 - DNA, 366 bp, Glycine max
tagcttatccttatggcttgcctccggacttcaccccccgtgccaccccggaagatttaagccaagcccctactttcgaggggcaactcccaccttatgacgactatcccgggcaagacgatgaggaaggagatacccatcttggccccctgctccacctcaaagatccgtccccccatgaactaccccaactgaacataatccgccatatcccggcctcacccacacccgtaaaagaatctgttcccttcgcggaagataagggaaagattgaggcgcttgaagagaggttacgagcagtcgagggccttggcaattacccattctcggatttagcggatttatgtctcgtgcccaacatcgtca

SEQ ID NO: 26112 - DNA, 432 bp, Glycine max
  unsure at all n locations
tcgggtgatctactactcttctagaactttggatgctgcccaagcaaattacactaccacagagaaggagctattagcgatagcttttgctcttgagaaatttcgttcatatttgcttggtactcgtgttattgtttatactgaccatgcagctctgaagtacctgttgaagaaggctgaatcaaagcctagattgatcaggtggatgctttggatccaagagtttgatttggagatccgtgatcagagcggtacacaaaacctcatggctgaccacctgagtaggattgagcgtgcgcctgaggaactcacccattcggatgatntttcagatgacccattgtacattctgtataagatctctgattccttccccactccttggtntngctatattgnngaatattggntgcttctgttttcctccctacn

SEQ ID NO: 26113 - DNA, 390 bp, Glycine max
  unsure at all n locations
ttagtttataccaaagcaactcanaatctaggtatctaaaacccctcaatttagtggattttcaaggtttgagaagtgaaaatgagaatggggtaaatttggagcaaactctcacctcacacaagtctataaccttaatctaaacttgctcaaactggttttacgcctaaaattccaccgaatcaaaatttgactcctcaacacccaatttaccctagaaatggctcttgccttcactttggtcattcatttttcccctttgcacagcccaagctttcccacagtcctaaatgacatttcaaactangattaactccctttaacctccaattaccaccaaatccagatttaactnttcaaactctcanagcatcactctnttccactcat

SEQ ID NO: 26114 - DNA, 189 bp, Glycine max
tataaaactcagcttctaccaatggacttactttgaataatccttgatagcccttttgagccttgtttccctttccttgttttgaagctcactacaagccttaaatgaaaaaccatgatatcaccatatccttaaggaattttggagctttggaattgttttgggaataagtgtggggggggggggggg

SEQ ID NO: 26115 - DNA, 370 bp, Glycine max
  unsure at all n locations
ttagctcngatcctaaatcctgactcaccataaaccttgacccatggtgagaatgtcaatccttaccctcggaagcaaaaaaatagagagagagatagaaggataattcccaatcgtaggaaaaaagagaggaaaggaaattcccaatcaaagagtgggagaaagcaaatagaaaagaaagaaaattcccaatcaaagaatgggagaaagaaaaaaagagaaaagaaggaaagaaagctcctgatcaaggatcgaaagaaaacagatgatatgtgcagagaggtctttggaccagacaatatctgaacaatacggaattgtcaccaaatgaacaaaagacagaaaaggaaaccataacctataagtggtc

SEQ ID NO: 26116 - DNA, 403 bp, Glycine max
gcttgaaatacttaatcgccataaaaaaaagctttgctgcacatactttttttgtgcaaaaggaagtactttgttgttgtaacattcaacacgccaacactgaagaatggttttttaccatgaaaaagtatgtgcatttaatgctccaacgatcacattatttatatgcaagcttaagagaagaaatatgtctatttagagacaacatatacttgattgagggagacttattaataccacaagcattgaagacataaagtatgtattgaagtgctctttattcaaattcctttctgtacaaaagctttttgtgcaagttcttgtaaaagttataaaaattctcagaacactttcattatcttgagagatataactaagtggtgaaagtatctatttgtctata

SEQ ID NO: 26117 - DNA, 387 bp, Glycine max
  unsure at all n locations
agtttacttatttgagaatgtctttgaaattgctggttttttttaccatatacccgatctgaaatttttggttaaatgtatgtctttatgaaaatttgttaaggtgataattagaaggattaagccatatatagtttaagtgcaaggttctaaggccaaagtattatttggaaacaataattgtcttcatatgaatttgttacccttcttcgggtcttcctctccttagttgccattttcatgtccaccttacactttggctgacttatatatatcatcaaaccacttaaagcacaagcacatgttctatctgacagcaactactagccacctcacataagggatttcatgcttttaggattgtntcattctagttaaaaaagaatg

SEQ ID NO: 26118 - DNA, 385 bp, Glycine max
ttcaagttaaagaacgaaatccattctaccttcttgtcaagtccaacactatctaataatttcccatctgaagagaaatgacagcaaacaactttgttgttgcttttgcatatagaaccaacttcactgaaggaaaagcctgaaatggaagcaatatagccagcaacctggtaaatggaatgataaaaatttaatgatccataagaacattagattaccttttgaagcatctgcgggcaaatttcccaacgaggcgctgttttacaaaattattcccagtttaaggctgtttggaaagtattttccagggggtgctgtttttgcacgtccccggcatgggatgcaccatttctgatggcgacttcgtgcatggcagacacgtgtc

SEQ ID NO: 26119 - DNA, 166 bp, Glycine max
  unsure at all n locations
catcataactttgatggtgaaggaactactacaactagaaagagnaaaaatgaattacttcatgaatctcanaatgtaaacatgtatgacattatctagtaaaatccatacattcctagcaagagaaactctgaagaagttcaaaatatattgccagaagcgcaat

SEQ ID NO: 26120 - DNA, 403 bp, Glycine max
  unsure at all n locations
tgtgtatgaagaagtgttcgttggagcattaaaaacttgcattaaatgcatgtcctctccatgttgagaaatcactctctttagttttattgaagcatactttagtagaaaatcatgtgtggttggttagaggagatctatcaaagcaagcacaattatgtatagcagagcgcgtcttttgagaatggttaaactaatgagcgttggaggatctcatgcttcttatgacttcaacaatccctatgaagaatgtttttaagacattgctgcataatgaatctcagacatagagtattaaatanagtcttacatgacatcttacatgccttatcanattataacatttgtctgccttccgtctaaacttcagacgtgggtacaatggtttttggctgattgcaca

SEQ ID NO: 26121 - DNA, 318 bp, Glycine max
agtttcacagtgcatatcaaccttgagtactatctctgggggctcttcatcctttttctcttcttccttcttttcctctgtggtctcttctttcctttcttcttccttgttctcctttaacagcaaagagaatattaattgaatatagcaaagatgtgactgaaaaatctccaccatgtgtagaactagagtatatatggcatgcattacttgataatgatgccaccaccatatatatcatagagcagacattatatacaaaagatcataaaagttaaaaaaatgcatgatcctagtcctatagtgtagttagttttc

SEQ ID NO: 26122 - DNA, 350 bp, Glycine max
  unsure at all n locations
tacccaaaagttagaagcatcttcccgggcatgtgttggtgttcttggagaacttccataacctggaagacctgcttttgctgaatacttatcagccttgacctaacaagcaaatgaaaaagcaaaaacaaatcacgacttgtttgattctcttctcaattttgttttaaaaaaagtatttaaaacaattcaacactattcaacaaccaaaaatagaaacatctagattctagaagatgttntctcatcttatttcatcttatttgacttaatcaattccacactccattgagtgtcttgcgccttcctccaccatctgaacaacctttttagtagcattttgaaaactg

SEQ ID NO: 26123 - DNA, 378 bp, Glycine max
atcttgtttagttccacttagcactatggattaactggtatggagtcgctcaagcttaataaatgattttgtatgtaactgtattaaatacttgaaatgacaattttgtttgttacctttagtgattctatcatgcttgagcaagattgcgtccattaaaaaatacttgtaatatcaaaccaaaaaatattaagcttgtgaaatgattttttatattggcaaatgttaattattattttttgttagtggagaattgaacccgcaacttttcgatccctctcttctccttttaccaccaaccaaccttataactcttaaaattctaaaatgtgaattgtttccattggaggataactgtgatcttcaaccacaaaaaaa

SEQ ID NO: 26124 - DNA, 419 bp, Glycine max
  unsure at all n locations
atatagccttcatcttcaagatttgttgtctcacaatggctagattctttgctttgatcttcgtctaaagtctcgagtccattggagcatttaatgcttgctntaaatgcatgtcctttcttcatgcaaagttcatgttgataggatagtgtatcttgtacttaagcagggaagtcatttatttcatcatagtagggttgcaacaacagagtttgccttttgatgagaatcaacatttntcaggctgtggacttcatttattcttcattgaactttgacacatcctatgagaatatttttgcatgaaagaatctcatacacggagtattaatgaaggtcttaaataccctacttanatgctacatcagatccgcttaagagtgcatcgtctataaactttcaacacaccattttatata

SEQ ID NO: 26125 - DNA, 336 bp, Glycine max
  unsure at all n locations
agtttgttttgtttaatccgcacgaangacacgtgctcatgcaacaattggtaaccgatgctataccagacatatttccaaacaaagtcaggttcacgataactcacctgcgctcttgcttccatgctatatgatacacagtgattgatccaataatattcgatgagtcggaaaatgatgccgcaattatactgtgccagcaggagatgtatcatccccctgttatcgttgacatcatgattcacttgaatgagcatctggtctgagaaatcaaatgttgtggtcctgattatctacggtggaagtacccggctgaacgatacatgaagatctcaa

SEQ ID NO: 26126 - DNA, 480 bp, Glycine max
  unsure at all n locations
gagcacatgatccttgcatnctggaccttgaaattgacgccttggaactccccaagacaatgagacctagcggtgttttaagatagagacatttgccagggcaggttcgtctcttctgcaaaagtttcagaacggggaaaacacacttgaagatctttataaggatttgacagacatgacattgcttcatgattactcaatacgcaaaatgatgtgatctatggagagaatgtgaaccagcacgctatgattatgatcagctcaaaatcgtcccacaatatttggctggacgggaaaacacgagatctgcgcaatccttgaatgatgagattttgaagaatcacgatttcatgggcagcctcgagatgttgcccacttcatgaggacattattacctttattctacaatagccacagtttcattggattaagcacctcacccctattaggaactcgtattgcactctacaatcgggaacg

SEQ ID NO: 26127 - DNA, 257 bp, Glycine max
  unsure at all n locations
attttcattcttttgtcctgctcatanatgatgcgtgagaaaacatgctctattttcatctcgcactccaagtaggcctccagatcattctttcctttaaatggaggaatgtggagttcaataccagcaattcggtaatgactaggaacaccatcatgccctctgactctgccttcattttgattatgaacactattttccattagatccaacctctcatggagcgcatcatcatcgtcgttgattaacctctccaa

SEQ ID NO: 26128 - DNA, 323 bp, Glycine max
tatattattggcctgaatcagacatccgaatcaatagttatggctgtttatttatgccatgtgcttccatgttcaattgtgaacatctcgatatattatgcgcctgaatcgggcatctgagtgaaaagttatgtcatatgagttagccgagagcttcgctggtcgatttcaagcgtctcgacatattattggcctgaatcggacattcgaggcaaaagttatggcgggttaaactttccatgcgcttccatggttaattttgagcatctcgatatattatgcacctgaatcggacatctgagagaaaagttatgccatatgag

SEQ ID NO: 26129 - DNA, 354 bp, Glycine max
  unsure at all n locations
tcttcttgtgtntctcaatctgngtgtgaatgaagtgcgagctcaaataactgaaataaagagggaagattaagtgctcttaaaaaatgcgactcacaaattcataacttcgatcttgaagatctcatggcgaaaagtgacttgtgaatttctcttatgttcaagaagacactcattcactcaagaaaggctcttgcacatgattgattacgttatgtctttccttgactatgtctttcatgagtttctacacattgctagcatatgcaagaatttcttatagcatactagaataggcttttttagctcacgctaaaggtacgtatctctcaagctcttattcacataggaccc

SEQ ID NO: 26130 - DNA, 377 bp, Glycine max
ttagcttttcaattcattctatgtacccgtggaggtccacatttggtttcatgtatttttattctcgtttcattcactctttataccctcttttgatgtgcttaagccattttatttaagtcatttctcccttaacctaaaaataaaatatatttccaccgatcgtttgaattgtattatccgttaactttggttgaaatgaattccgaccgatcggttgtgtcgcaaccacgttggaaaccataaaaagaggtaaataataatataataataaataatagaataaatatacctttagtaaaataaagcgaacaataattggacgttgtctctttgggatttctcattcttaatcgaattgactaataactaaagtg

SEQ ID NO: 26131 - DNA, 371 bp, Glycine max
  unsure at all n locations
tataaaaccaactnttgctatggtgcatactcttcatcttctaacctgtatatgcccattgtagctgatgaatatgacacaacatcaccactatcctgcccaataggacaaaaggaagcataaaggaagatcaaaggaaaaggagttgcaagccttaatcccaatctcaatttgtttggcataaaaagtgcaatgaaggagaataacatcacatacgataaacttattgagttaaatgaagcacaagaaaggcgtatggagtatgaaatccttgtgaacaacacactaccatgtctgagaatcaatgccaagaccacgaaaagtattgcgactgtctacgcagaaatgaagattttgaagaatatgccaat

SEQ ID NO: 26132 - DNA, 389 bp, Glycine max
  unsure at all n locations
tagtttgtgtctaagnngcaatctgctattccgatgatagtgaccacgcctgagaaaagggataccattacacgcaagagcagggacatatcattgaccatggtggtaaagctcttaattattgatgaagtccatctactcaatgatgatagaggtcctgtgatagaggctctagtttccatgaccctacggcaggtaacgcatatgtcttatttcctctgtgtttttacatgtacaaatttagttaggagattcgcttaaatttattatattctcttttggatatatgaataatcagacattggcttatgacagctaacctgatatctatcttacttgttccacatataaagcgagctttcttattgatcgattttgcgttggcactt

SEQ ID NO: 26133 - DNA, 377 bp, Glycine max
ctcacagcttcaatgttaatgtcacattatataatgtcaaaaattttatcacattattttgatcatggtatggtattgtaagtgacatccttggccagagtggatttgattgggatggcactaagcacatgatcacagttgagaatgaaaatgcttggaatgaatattgcactgtaagtattctttctctaatatgttgctatttgttattcaaaggagattggatttgactttttctgggtttccagtcgcataaatcggctataccgttgtgattcaaggtgcttcgaaattgggatgatatagtggattcgtgtgctaaagatagagcccccggtcatggagctgaaactgctatggatgctgatgaagcgatg

SEQ ID NO: 26134 - DNA, 331 bp, Glycine max
  unsure at all n locations
ttgttttgtttggagcttcaatggagaatggaggagagggaataagcaacgtgaggaagagggagggagagagctgttctgaaattgggctgagtgaagagagagagggttgctttttgggttttaaaaggctggagcttttattgacctcttttcttataattttattcaagctctgccacatgtccctatttgattggancaaaaagggcccactttctctttttgactgtgacccatactcagtcacaaaagtgagaaaaatctgacctttgaaacgctaaaatcctgcctcggtttgcgtgccatatctctggttccagtttctcgc

SEQ ID NO: 26135 - DNA, 440 bp, Glycine max
taatggtaagaaaagagttacacacacagtcatctaataagcatcatgtatatatatatatatatatatatatatatatatatatatatatatatataaaaactgtgagtataaaataaaagtgtgtgtttctatgtaagaaaaagaaaagctaagcgcggaaaggcaagtaatagagctagaataaaaagaaaaagatcgatctatggatgaatgctctcctagaacctaagcttttgcatcctagacaaaccatgaattgattgcagcccagcctcgttacaaacctagaaaagtcctttggatacagtttgtgtgttcttgactgtatggcaagagatgaacttcacagattgagatgtattttcgttctcgattcatggataagcctaaacacttgtgcttgagtgagacagtagctatgaggctttgttaataag

SEQ ID NO: 26136 - DNA, 338 bp, Glycine max
  unsure at all n locations
agctttgttaacaagaatttcatcaacgagtcaagacatgaaaaaagcctgacgagtaaatctttgtttagaagtacaaatgtgggatgagtttaccagtgttagctatgttatgactctaaataattaagttttgttagtttattgtacttttttggttcatttattgtaataaaaaatctaaattactttaaattagatcggtttgaattaaataataactaattagataataaaatataaaatccaatcaataacataagacttgaataatntttattgtctaataacgataataagatttcaacttaagatttatttaaattgctcactatatt

SEQ ID NO: 26137 - DNA, 409 bp, Glycine max
  unsure at all n locations
tgattatatcctatattatctatcctaccaagtcattactagctctaaacaaatcaaaagcatttgtgaattagtttgcacactaactaactcttaatcgtcttacagacggatataaaatctgagcacttagtcttttttctaaatgtgttcaaggcgttttgagagcctttacaaactttacaagattntgcaaagagctgtttacaaaagaatttgaatgttagcatgtacgtttgtgtcccatgtctttaaagcttctggtgagtataggcattcatcttcaagtgttcggtgtctctaagcggatataattatnctcctaaacttgcgtctgatgtgtgtagccggcggagcaacttaatgtttgcataagatgcacatcccttatcatgctagagaaccactc

SEQ ID NO: 26138 - DNA, 343 bp, Glycine max
  unsure at all n locations
agtttctggtgggacatcttgacttgctttccaatctgacattcaccacagattctgccttcttctattttcagattgggaatgcctctaacagcactttcgtcaaagattttcttcatgcctcttaagtgcagatgtccaaacctttgatgccatattctgacttcatcttctttggaggatagacatgtagaggagtagctggtttcttggggtgtccatatgtaacaattgtcctttgatctgctgcccttcattagaacttcactcttcttatttgtcaccaaacattctgactnntgtgaagttacattgaatccttcatcacacagctgactgatgc

SEQ ID NO: 26139 - DNA, 417 bp, Glycine max
  unsure at all n locations
tgtttcaattcanatgacaattacctttactttatatcntgatgagtcccgtaatataacgagacgctcgaaattgaatgttgaagctctgagccaattcagacgacaataactttttactgggatgtctgattgagtcccataacatatcgagacgctcgaaattgaatgttgaacctctgagccaattcaaacgacaataaagttttactcggatatctgattgagtcccgtaatataacgagacgctcgaaattgaatgttgaacctctgagcaaattcaaaagacaataactctntactcggatgtttgattgagtcctgtcatatatcgagacgctcgaaattgatgttgaaactctgcccanatcaaacgacaatagacttttactccgatgtctgattgagtcccgtaca

SEQ ID NO: 26140 - DNA, 395 bp, Glycine max
  unsure at all n locations
tttntatgatacgctgggttctacaggcgattcataaaagatttatgaaaagtcgccaaaccactcagcaatctattgaacaaggacgttgtgtttgtgtttaatgaaaaatgcgtggaagcatttaatgatctaaaaaccagactagtatctgctccggtgatcacagcaccaaaatgggggcaagaatttgaattgatgtgtgatgcaagtgactatgccgtangtgctgtacttggacagacaaaaggcaaaatctttcatgttatatattatgccagcaaagttttgaatgatgcacaggttaactatgccgccactgaaaaagaaatgttngcaattgtctatgcacttgaaaagttcagatcttacttggtgggatcaaaagtcaccan

SEQ ID NO: 26141 - DNA, 496 bp, Glycine max
  unsure at all n locations
cccccgaccatgaacgttgcattacggacctatgatactcagcttgtaggtgctngactgcagnttctattggcccactatcttcaaagatgcgtggagaatctgtagcacttgtgagccttgtcagagaacaggcgtctcactttcatgcagacaacaaatgcctcaacaacccatgttggtctgtgaggtggttgatgtccggggtatagactttatggggcccttccctgtctcttttggntttgcttatattctccatgatgttgattatgtttcaaaatgggtggaagccaaagccaccagaactaacgatgctaaggttgttgtggattttgttagatctaatatgttttgcaggtttggagtccctagagccatcgtcagtgatcaaggcacccatttttgtaacagatccatgtatgccttgctcaaaaagtatggggtcgtgcacaaaaattcaacaccttcccnactccaaactaatgggcaagct

SEQ ID NO: 26142 - DNA, 392 bp, Glycine max
agctttgttggacaagaacctcccttgttagttaaaggagctgacattccttccaaattggaagacgtaaatcgattgagtaaggccatggatgaattattacaggaattgaggaacaatctgctcaaggctcaagatcagataaaaagatttgtaaacaagcatagaagggagctagctagtcctacaagaaggagattggatttttttgaaactgcaaccttatagaattgtagtcaatgaatcttaaggcaagtataacataaggaaattcataatccaccagacgacgactcttcagcataatgtcttcaatcaacaacacccaattcatcttgatacctgatttcagaccatatacagcctgtagattatcatccattaccttagcg

SEQ ID NO: 26143 - DNA, 336 bp, Glycine max
  unsure at all n locations
ggaggaaaagaaagagggagagaaagagagagaggggagcacgaaattgaaggaataaaagaggcagagaagtggaactttgaagtatgtctcacaagactctcattcatcaaagttacaacaagtgttacacatgcttctatttataaactaggtagcttccttgagaagctttcttgagaaaacttccttgaaaagcttctttgagaaaacttccttgagaagctagagcttagctacacacacccctctcataactaagctcacctccttgagaagcttccttaagatgattcctanagaagctagagcttagctacacatacctctctaata

SEQ ID NO: 26144 - DNA, 388 bp, Glycine max
agcttgtttcctatggaagctcctaatatctcccacactttttggggtgggccattcttggatggccttgattttctcagggttcacttggaccccatttctaccaactacaaaacctaagaaaactatattatctacacaaaaggtacacttctctatatttgcatagagggtgtttttcctaaggactgaaagaacttgtctgagatgtcctaagtgaaaatctaggctcctactatacactaaaatatcatcaaaataaacaactacaaatctacctatgaaatcccttaagacatgatgcataagcctcataaaggtgcttggtgcattagtgagcccaaaaggcatcactagccattcatacaaaccaaacttggtcttgaaa

SEQ ID NO: 26145 - DNA, 443 bp, Glycine max
  unsure at all n locations
gcttatctcacactntctatgttaatattaattcatttgtgtctattcctcactctcagacacccccttattgtgtgtcattatggcatggccaacttgccactgtcttttcattttccccccttcttgttttgttatgttacttttcagattgtcttttctgttaatcataattttaggagtgtcagatgttactcttgtttgattggattttatagttttttttaatcattcattcagttaacgaagaaaaataaattattttagattaatttatatgcttaaatatatgtttttatcttttgttttacattcttattaatttatgaataaattaataaatttggatttgtatctgataatattttttatttataattagttgaaatntanaccaacattattatattatgataaaataaatataaagtctctgatttaat

SEQ ID NO: 26146 - DNA, 395 bp, Glycine max
agcttgctctaaaatgatttgatcaaccaagaacttagatctagatgttcccaagcttcaaaggatgacaaaaagaaatttggaaccaagactgagagttttgcacgaaaatggtaaggaaacaagaagagaatgaagattaagagtctcttatcaaagctttgagggaagaagccccaaggacaattgtatgaagcttggaagaagaagaagaagaagaaaatggactcctctccctcccttgaagaactcatgaacaacaatggagaatgaaggttccaagtttgatatttttggaggagtgaagagataaggctttaaggcttggtccaaatgaaacttggttaggcttaatgttgataagatcaaattgacaaaatgaatgaccatttgat

SEQ ID NO: 26147 - DNA, 412 bp, Glycine max
  unsure at all n locations
tgaatgagaacgtgaaggtgaacttctgtttattgtgaccatttatggtacctggagatatgtcgcgggggtcaggagaccttggggacgtcaggtggggtgctattgcccaaaaccaagcttgaccaatcccgacccaacccgggcatagtcggtcagtgagaacctgtgatgtacctaagcaggcgagctcctggcagtcaacagataaaaggaaaacaagaccacaaagcaaggaggcttgtggtggctggccagctgtgaattttgtataatatgtggattgtggcctctggtaatcgattactgagggtgggtaatcgattacaaggcttanaattgaagacaggaggctaagatggtctctgggtaatcgataccacggngtgtaatcgattaccaggctttgaaa

SEQ ID NO: 26148 - DNA, 398 bp, Glycine max
agtttactctgcaaacatttataatagacctcctcagtagcaaacccaacaacaacagaataattatgacctttcaagcaacagatacaatccaggttggagaaatcatccaaatatgagatggacaagtcctccacaacaacaacagcctgtccctcctttccagaatgttgctagtccaagcaagccatatgttcctcctccaatacagcagcagtcacaacaaagacaaaaagcaactgaggctcctcctcaaccttccttagaagagttagtgcggcaaatgaccatccagaatatgcaattttagcaagagacaaaagcctccatttagagtctgacaaatcagatggggcagatggctgctcagttaaaccaagcacaatcccaaaattctg

SEQ ID NO: 26149 - DNA, 447 bp, Glycine max
  unsure at all n locations
tatgcacggaaaatgtaattatgaaattgagatgctttaagaaacaccattttctagttaaccatgcattaagtaccatgttcaattattttgtttttaagtgaaacgggtttatgatcccaacatggttggctcgtggtgcctaacacatgaaactaagaatgtagtgtgaagtttcacgcttcccccttttttgtttttgttttgtagaggaaaacacaaggatgagcaaacatganaacaaatggtatgcaattttgcagatcaaaaagtttgttgaacacatatgcatgatgatgccatgactcatgcaaaatgtgaggctggaatatgataacggacaaatgcangatatgtccattatgatgttatgaagagatgcttatgcgatgcattgatatgaatgcatttacggacacgagagcccgganaattatctcttcttac

SEQ ID NO: 26150 - DNA, 335 bp, Glycine max
tttcttcaacttacagagagtaggtcaggcttagcgcacttccaagaattcaaaagccgtaagagattggcgcttatcgcctcctggcctgctaagcccagcttaaaaactcaagttatagaatggatctgggacttaacgtaggatagtgcacttagtgctgctacaataaaatttttcttgagaaaaagtggcacttagcgcatcatccacgctaagctcactggttaaagttcaattaccgtgaagatgtggggcttatcgcagagatgtgcgctttgctgaactattcaaccaaccaatcatgggtctatgcgcttagcgctagcaagctc

SEQ ID NO: 26151 - DNA, 349 bp, Glycine max
gcacaacaagtcttccacaatcacaatgcgcgcataaacccaccataccctgttgcccaccttcaactgagctcacggactccacgtagcccatatcctcagttctctcaacaccgggtccccatcaatcctcccaagcttccacaacatccaagcaaaacagcattcaaaccgcacaagctatcgcactcaagcaaaacagagcagaggcagaagactctgccaaaacaccaaccaaatcacagtgtttctcacttaaagacgccagtaacaatcccttcaatccaattcagtaaaccgttgaacgactccgaaattttactggaaggctctaatacatatgcctaca

SEQ ID NO: 26152 - DNA, 356 bp, Glycine max
tagttcgatttatagcgagcccgagttaaaagaaaatttcatattgaatactacttgagctctgaaccaaatcagtacttattgagactagttgagctgaacgcctataccagagtgcactcattactagccctattattaatgagattgtgtatggtgtcctaacaattaaccaaagcaggtggaccctaatgatgtttctatacaaactatatactatatgctcgtgcataaagtaagcctaggtcatgcaccatcagaaagttaccgacactagataaaccatgaaatattatcaagtgcacggaacagaacttgttgcgggaaacacttggatacggtgaaacttagggaaa

SEQ ID NO: 26153 - DNA, 239 bp, Glycine max
tacccactcccttgatgaagaagatgaacaattgtagcaaggacttggtgccataactgtagatttcattccaagtccatatacttttcctttctttgatctaactacatcgcaccacacatctaactcacttggtgaaggttttccttctgccaatgctcttttggtcatatgtttcaatgtgcgtgcaaatgccttctaacatcaccaatataagcctaataagtaagaataaaaca

SEQ ID NO: 26154 - DNA, 395 bp, Glycine max
ttagctttcatcttggacgtacccatcaggctacccctgatgaagcctcccaggccggggtcagacgaaaccaaatattgcaggtgtcatcgcagtattggtcataacacataatattgttgggccctaaaggacaagatagaagaacttatacaagctgggtacctagcccaatttgtcaaaaagctagacaactaccaagcaaaagcaagacttggaggacaccaagaggagtagcataggaaccacgaagcagatagaagaagagcggaatactgatgtagacaaagacaccagcaacaacggcataagcgacaacccccaaaagaataggaacccaccctgtaaatcagagcacactattatggagaacagtcctaccagtcccaaaaatg

SEQ ID NO: 26155 - DNA, 444 bp, Glycine max
  unsure at all n locations
tatagaaactcaagcttatttgtccttgatggtttcccatcactgcgtnctcnccaacaatttaaattaaaaaaaattaggataaaagtgttagaagttcattttgaaatttctaataagttaatctttatgatacaacatcagtttccagtaacgacagggcttctctaaataacacactattcatttattcatatttaaatatattataattcttgccctgaccttaatgagcctctaggacccaactcacctaaactgttatctaccaaaaaaatttataattcttaaactttcttaagagttctataaataagtgatgtatgagatgcaaagtaagattagaaaaaagaatttaacatnatttcttctcatcttcttgctcctnaagtatcatatctgtctttctttacccttttatanagtctaacaaaaaaaatgtat

SEQ ID NO: 26156 - DNA, 393 bp, Glycine max
tagctcgacttgcctgcaatgcttgcacctatcgaggttaccactctcaacatcagacaatacttgtccatacttgggggctccaagaactcgcggccctcttacttgtcaaggatactaccccaaacattagacaatttcccttgatactgaataacctctttcgcccataagccaactcaaaacttggggggcttatgtactatccggggtccacaaaatacatgtgtcaagctacgtggcactctgatgcacacatcaaccctctatgtcagccctggcatatgtgtacatacattaagcccttagcagtcaggttctcaaccaataggatatctttaaccacttattatttgaatatattgttgtatctttatctcatggaaagttact

SEQ ID NO: 26157 - DNA, 409 bp, Glycine max
tcacctttggccgctcttgttggatctaaacatgcttatacacaatggaccctatagactgaagaaggaacaatcaactagacctcctttggatagaggtccaatgatcctaccagcagttggcctgactgtggctttggctctgcctactatcgaggctcatcatcacagcgctagcatgtcttccccttgctatgataggccttcatgggaggggtcgtgtccaataatatatgatgtttgcttcatgcgaaccatctataaaaaatgaaaaaaaaaagtcattataataaacaattatatttaactaagacaataaaataaataaaaaaacattaaatttgtctaagagtaataaaagaatatacaacagaatgatgtcgttgtgtgtttcatcataatgcacaat

SEQ ID NO: 26158 - DNA, 395 bp, Glycine max
tttgcttctcaaggaggcgaacttagttattagaggggtgtgtgtagctaagctctagcttctcaaggaagttttctcaagaaagcttctcaaggaagctacctagtctataaatagaagcatgtgtaacacttgttgtaactttgatgaatgagagttgtgagacacaactcaaagttcaacttctctccccctttttcatcttcaattttgtgaggcatgtcaagctcccctagcttggacgactgttgtttaggcttcttctggcaagttgtcttgggtggacatgcttttgatcttgcagcaaaattagacgtgtcaggtggatgatgtccttatatatgacgattcagcccttttctgatcattggaggatgcattgaagacaaatgttt

SEQ ID NO: 26159 - DNA, 378 bp, Glycine max
tgtagggttaaagtctcattattatcacgtgctcatgcaacaattgttattcgtggctatacgagacattttgccaaacaaagtcaggttagcgataactcacctgtgctttttcttccatgctatatgtagcaaagtcattgatccagtcaagtttgatgagttggaaaatgaggccgcaattatactgtgcgagttggagatgtattttccccccgctttctttgacatcatgattcacttgattgtgcatttggtcagagaaattaaatgctgtggtcctgtttatctacggtggatgtacccggttgagcgatacatgaagatcttaaaagggtatacaaagaatctatatcgtccagaagcatctattgttga

SEQ ID NO: 26160 - DNA, 380 bp, Glycine max
agtcttgagtgagccaacatagagcgagtcaattttgtaaacacatacttgtaaccctactatcattttgtatagtggaagaatctccatattggagaattatgatcgtgtgctcccattactacctttaattactaagcgtctatcttaacttcacgaagcgggaaagtccgagttttcccaacagtggtatcagagccagatggttcgacttggtgaccggctcagacaagtaagatggcggtgatggatctcagccttggggatcccttgtatcgaaagtcttcctggcggtgagtccaagcagcgtgtctcgcagatggagcgacgatgcaagtatcgtaggtagctagagcatgtaggctctaatggctatactc

SEQ ID NO: 26161 - DNA, 325 bp, Glycine max
  unsure at all n locations
tgatttgtgagccgaatttagccttagcttcacttttgttattagtcaattgatccaaggaaacttcccaagaaaaacgtccgattgatttttttgaatattttattcaaagatattttgattattntattattatttgtcaagatattttgactattttatcattattctgcttttttttggcttaatcgagattacagcgtgaatgatcggttagattttgctttaacagcgattaaacgagattacaacgcaaatgatcggttgaaaatcattctatcatttattacgtgagaatgacttaaataaatgtctaaaacacgtc

SEQ ID NO: 26162 - DNA, 171 bp, Glycine max
taagcttcagtcagaagcttccagcatatgcacaattattaggactctatcacacttcagacatcaactctattgtcccaacgagttgatcatggaaaattggctcgatgagtagcagaccgaattgttacaagatccaaccgataatccacgctgggcatcgactgaccg

SEQ ID NO: 26163 - DNA, 475 bp, Glycine max
  unsure at all n locations
atgacccttgannnctganccctgaaatgaaacgtagcatcagngacctatgaaactcagctggttcatcttgagcaacacttactatgcactcgtttgctcgaaacagcccacctatatctctatacacgcgtactgggatgccatagctatgagcgaattcaagagaatgtgtcttgatactcagatgatcgattgagtgccgaaataggacgagactctgcgaatcaaataccgaagctctgagctaacttcaacgacgaggacctttaagtctgctgattgacatgaaacgcgaggtataatgagacactcatgtggcttgactaagctactcattatctttcataacaataccataatccatcgagctctgcttctatgccagagtatataactacaccatactgatacacgagctctcggcaatataaaccaccatcgtttttctcagtgttggataggacgcaacaag

SEQ ID NO: 26164 - DNA, 380 bp, Glycine max
agctttatctaaattgagagttgtcaagcaatcaattttaaaataaagacatttaatccttatatttttaaaaacatttaactttattttcttattttaaaatagaaacatttaatcgtttagctttgtaaaattcacaattctaacctttttatcaaatttaaaaaaagttgattaataagaaattaactttaagtgattcaaaattatattatttatttaatctacatcatagttaatattaatatcttaaatgttaccctttcagtttcacataaagatcaaattcaccaattttacatgtgagactaaatgtctttattttaaaataaaaaaaaaattaaaatgatatatttcaaaagaaaactaaatatttttat

SEQ ID NO: 26165 - DNA, 275 bp, Glycine max
tacacttgaatagcaataggggtaaaaatagtaaagccaggtggttttaaaagtacttattagatataaaaccaatagcttaagcttatttaagagtatggtctctattggctcagtttgcttacaacttttttcttccctttccaatatttccattctctcctggatctcccaatgtaaatttgttataagtcccctggtggcttttgaataaattttggtactcattggaaattttaagaggtgcccattgataatgcactggagtagaacat

SEQ ID NO: 26166 - DNA, 375 bp, Glycine max
agtcttcgtttatatatatatatacgcccccctaaacatcgaacttgcattcgaatccaaccctccgaatcattacagcgtagagtttgtctgaaaaccctcagaatcataaccatgctcattatcttcttcactcttctagagtccttctcagggtttctccttctgtttttggacacacaaccagaacaacaacgtagtcataattataaccatgcacctttatcgcacccaatcattggatgcctcgaatctttctaccataaccgccaccgtctactggataggtacaccgaacacttagccaattccccgacacagaccatcgtcgtgcgccgtctcggagcacgacgcactgaggtgacggcgaaccct

SEQ ID NO: 26167 - DNA, 352 bp, Glycine max
  unsure at all n locations
gaagagaaaatgttcagntataaattcattatttggtaaacttcattccaaatacttgccagactagaagaatggaaaaaaaaacccatagatattaaaatccgtgtctaaaagtaccatattaataaaatagtattaatatttgagacgcttaatttagattatccataaaaaagaaaagcgaaaaatattcatgaaatgccgaaatcaaaactcaattattacctgagtttctttccacaaaagcttgacattgctgttttctaactcaatggaaactaaacttccttgataaaagtctgtcggtatgcattttaaaggaaatccatgccagcatagccatctcaaatct

SEQ ID NO: 26168 - DNA, 385 bp, Glycine max
tcgctgggttctacaggcgattcataaaagatttatgaaaagtcgccaaaccactcagcaatctattgaacaaggacgttgtgtttgtgtttaatgaaaaatgcgtggaagcatttaatgatctaaaaaccagactagtatctgctccggtgatcacagcaccaaaatgggggcaagaatttgaattgatgtgtgatgcaagtgactatgccgtaggtgctgtacttggacagacaaaaagcaaaatctttcatgttatatattatgccagcaaagttttgaatgatgcacaggttaactatgccgccactgaaaaagaaatgtttgcaattgtctatgcacttgaaaagttcagatcttacttggtgggatcataagtcacctg

SEQ ID NO: 26169 - DNA, 452 bp, Glycine max
  unsure at all n locations
taaagtgctagactgcggtttctataggcccaccttcttcaaagatgcgtggagaatctgtagcacttgtgagccttgtcagagaacaggcgtctcactttcatgcagacaacaaatgcctcaacaacccatgttgttctgtgaggtgtttgatgtccggggtatagactttatggggcccttccctgtctcttttggttttgcttatattctccatgatgttgattatgtttcaaaatgggtggaagccaaagccaccagaactaacgatgctaaggttgttgtggattntgttagatctaatatgttttgcaggtttggagtccctagagccatcgtcagtgatcaaggcacccatttttgtaacagatccatgtatgccttgctcanaaagtatggagtcgtgcacaaaatttcaacacctttccacttccaaactaatgggcaggctn

SEQ ID NO: 26170 - DNA, 375 bp, Glycine max
  unsure at all n locations
agtttnattatatcgagatgctcgaaattaaacatcggaagctctcgagaaattcaattggtcataatttatcacacggatgtccgattcgggtgcataatatgtcgagacgctcgaaattgaacaacggaggctctcgagaaattcaaatggctataacctttcacacagatgttcgattcaggagcatcacatatagagacgtacgaacaacggatgcactcgagaaattcaaatggtcataacttttcacaccgagttccgattcatgcttataatatattgatacgttttgaaataaacatcggaagctcacgagaaattcaaatggtcataactcttcacacggatgtccgattatggagaatcacatat

SEQ ID NO: 26171 - DNA, 407 bp, Glycine max
  unsure at all n locations
gcttcatgagagagtcaaagatcaaatngagaggaaaaattttagctatgctaaataatccaacaaagggagaaagaacgttgtcttcgaacccggaaattgggtttgggtgcacatgacaaaaganaggtttccggaacaaaggaaatcaaagcttcaaccaaggggagatggaccatttcaagtgcttgaaagaatcaatgacaatgcttacaaagttgagctgcccggtgagtataatgttagttccaccttcaatgtctctgatttatctcttnttgatgcagatggagaatccgatttgaggacaaatccttctcaagagggagagaatgatgaggacatgaccaagagcaagggcaaggatccacttgaaggacttggaggacctattgatgangacatga

SEQ ID NO: 26172 - DNA, 396 bp, Glycine max
  unsure at all n locations
agttttgcttttctaatttagnagatccatgaaggtaccctaatgtctgaagtttatgggattaagatggtcattgaccaatccctattttatgacttaacaaaattgcctagtgaaggtgtaccttttgagggtgcactgattgatgaatggaaatttgatttctctgtgcatgatgcccgccggttggtttgcaccaaccaagcggatatgaccggaagacttctttccgtttcattggcttttgagagccgcatcttccattaccttattgctcgcatcttactccctagatcttcaaaccttgcttaagtttctgaagaagatctcattgtcatgtgggcctttcataaaggtttacaaattgattgtgcacaccttgttagatatcgcatg

SEQ ID NO: 26173 - DNA, 324 bp, Glycine max
ttttttgcatcaatcctttatatataaaaaatacccgtattagtgtggggtagtattttgatgagagaatagtcgtgtaaagcaaacaaaaattctgctcgatttaacagaacaagccaaagtggcagcgtggaggtttcgttggagcgcgtatggtccacgcgcaagtaaccagaaacataaaataaagagaagaacccgctccaactgttttaagtcgctcacttggttgctgcaatttgtatggtctgaaagagcccaatggctaccgcgaagataggactcggagttggtcccgtcccaacaaccactcaccgagtcacc

SEQ ID NO: 26174 - DNA, 351 bp, Glycine max
tagctcatcaagaatggagaaagaatgtgttgagattgatataaagtatgaaggcctcatcttgcgtcaacaaagccaacttcaacaggtatttgttacactttgtcaatgagaaaaagtgaatctgtttttgctgtgtcatacatgacaaccctaaatcattataatttttacacattttagcatttcagttttcagctgtgtatttaacgtgaaatctcattgctgcgatggatttacctatagctggttgcaaaacaacatagaccacttcctgaagacttggattactatgcaatgacaacattgtctgttgaagctcgcgaaaaactttccaaggtttgtgacgta

SEQ ID NO: 26175 - DNA, 346 bp, Glycine max
  unsure at all n locations
caaaaagaattctttacccatcattaccataaccataaccataaccatcaccatcatcgccaacttcctcacgccttgtatttccatgcttggtaattcccacacttggatactatctttctttctttttcttgggtttgctaaagtttctttggctgcctaactttaccttcttttttttttcaagaaagaaagattgacaccgctctgtaattacacacttgaagagaaatcttaccatgcttaaaaaaagttttggctatgctatgtgattntgccgattgggaggatatataaacgattggagtactatgggatgttaactcttaaatttctctaattttct

SEQ ID NO: 26176 - DNA, 387 bp, Glycine max
  unsure at all n locations
tgtttttatagagttctacactactctagagttctccaggatgttctagaaaattctacacttttctagaaagctctagaattttctagaacctctccaatttgttatttaatttgatatttatttatttatttgagatgtttctttgctatcttaagtattgttttcaattgaacttatttaacaaatacataattttaattcaattacgtctatatgatacttttttatattttatttaccataataattntaatctattaacaattatattttaataattatttttcagttgagtattcaatcaactcagcttcaagtacaaagatttatatcaacctaaacaatcctgattttgcaaagttcaagataggataaaatgaactt

SEQ ID NO: 26177 - DNA, 277 bp, Glycine max
  unsure at all n locations
taatgctttcttgaaaagctagaggggagctactcacaccccttcaatatgaaaatacaaaaaaagtccctactacaaaaactactcaaaatgccttgaaatacaaagctaaaaccctactactaaagtactcttaacttgtacccttaatttgtaaggtaccctataaacctaaaattgccaaaatataaggcccaaaagaaggaaaacctattctaatattcacaaagaanagtggacccaaccttcgtccatgggctcagaaatctacccttat

SEQ ID NO: 26178 - DNA, 392 bp, Glycine max
  unsure at all n locations
ttgctccatatatcaaatcacaaccctaactattgctgccatttatgggaggagataaacacatcactacttccatcatattttaaaacagagggaacaagtagcagtaaagcaagacaagagggtggatgaaaagcttcctactctcctagcaattatccatcgcatccattaagaatgagtcttgctaccgacagtcactttagaaatcaacaaaatatatacttgaaactacaaactacattataagattttaacgagcttaatactgcattttatatggaaccaaattgtaagagattnttgtattatataagtatcttaaatttaaacaaaattctaatataaattaaaagagaatatttaaaataataattaagagatatatgcat

SEQ ID NO: 26179 - DNA, 333 bp, Glycine max
tcgctgggtcctgaatgtaggcacgggctgatgtcgaaccaagatactactcgcgggtgcttgacttcctatttcctactctactaattcgcggtgagcactttaattatcgcttttactgttggtagcattctgaaggatcgatttttacataagtaaagagtcattaataattaattcaacccccccaccttcttaattattccgaggtcacttgatccaacatgtttgtccctgatgtacgtaggtgatcaagaaaagcactgatgtgacttcgcgtgttaaagacctgaggagtgtgaatctcaggcatgaatcgatatgtatgctctg

SEQ ID NO: 26180 - DNA, 292 bp, Glycine max
tagcttcttctttattttgctataaataggggagaagtgaagaagaaaagggttcagccccttaggcacttctctctctctcgaaatagctgaggaaaattagttccgtgaagaaaatccaagccgaagcgcttccgtaatgggtccgtaacgattccgcgagtaactacgcgaagattctagaccgggcttcaagatgcatcgatcgttcttcattttgtttcaccttcaacaggtaagtacctcgtaccgagcgtttcaattcattctatgtacccgtggtgggccacat

SEQ ID NO: 26181 - DNA, 434 bp, Glycine max
  unsure at all n locations
tttgtggctaactccgactactgaaattgaccctttccaacaactggtttagaggcgccacaatcttagcataccctntaataaatcgtctataaaagcctaccaacccgaggaagcttctcaatgcttttactgattgaggtagaggccactcctgaatagcgtataacttttctggcactggttcaactccgttgccggagacgacatgccccaggtactccagttgggactgggcaaaagtgcatttggtacgtttcaaagagaacttccctganagcaagagtttgaacgcgctntcgaggtgacccanatgatccgccatttgtttgctatataccagcacatcaccgaagatgacgatgatgaacctgcgcagaaagggttgaaagagctgattcatagttgctttgaaggtagatgggtcgttacac

SEQ ID NO: 26182 - DNA, 361 bp, Glycine max
agcttttggagtttggggaagaatgccttactaaaatatacaatgaggtgggaattttgcatcaaaatagctcccatggttgtgccagaagcatcagattccaagacaaatgggatggtgaaatctgatatcgctaagacaaatgggaattttgcatcaaaatagctcccatggttgtgcctccgccattagtgacttgagtttgtcaaaggtgacctgagaggtaggattccaaaggaactgatcctctcgcaagagcactatcaatggtgcggctacggtggcgtaacctcgaacaaacttctggtaaaaacctgtaaggcccaaaaatccttgcaactatgatggagatgatggggat

SEQ ID NO: 26183 - DNA, 429 bp, Glycine max
  unsure at all n locations
taacagatgtgttacatcgctntgcaggcacatgttacatttcaccaaaagaccacccatagaatgagttataatatttatcttcttccctcctgcagcattataaattgattctaactttgcagctaaccgatccattgtttccttcaacctaaatgaaataaacagagcaattgtaaaaaaaaatatctttcatttggttaaatactttttagagaacttatccttaggattgtgggaaatcataccaccaagcaatagccaaaagatacactggagagacatcaatcagattaaattcatttgcacaattacatcaatcagctgatagcttcctcagaaaacttatcatttcataataataacaacaaactatgaaaatactctgcataatntttacaaaatcaattcattattaaaaaaaatata

SEQ ID NO: 26184 - DNA, 374 bp, Glycine max
  unsure at all n locations
tctagctttgcacatatttattatttgcttttagcaaaacctgtatcaaacaataactcgtgtttttttaagagtggttaatctttctaaaaacacaattcaacatcccttcttgtgttatctacctccacaatcatgaagactattaaagctatcaagaaagatgaaacctcgagtctctgtgagagaatcttccattgttgcttcaacacatctcaagtgagagtgacctactcttgcaatagatcttgaactgtaatatttcatagatagaagtgagatttgtcaacttacttagtggaatacccttattangagaatcttcttctatgatgttaaacacaaaacctttgttgtaagttagcaagtggatg

SEQ ID NO: 26185 - DNA, 416 bp, Glycine max
  unsure at all n locations
tncctctaaatntaaaatatgcaacaaacattgctattaaggtacaaatggattattcatggctatcgcatcaaagatttggccacttcaacacacatgccttgaagttgttacatgagaagaacatgatgagagatcttcaaagcataaaggagaacattgaagtgtgtgaaggatgtctccttagtaagcaacaccgatttcctttctcaacaagcggagcatggagagcgaaagatctattggagctgatacatacggacgtttgtggaccaatgaggacgccatcacatgagaacaacagatacttcatactctttatcgatgacttctcttgaatgacatgggtatattttctaaaagaaaaataagaagtctttggagtattcaaaatttcagggccttgctgaaatcaa

SEQ ID NO: 26186 - DNA, 322 bp, Glycine max
agtttgcccagagaaggaatccacggaggaaatgcttaccacctcgaaaaactggaaagcggtttctaatgactcctctgcggcctccacataaggcatagaggatggccagctcaccaagatgtcttcctcgcctgatacgatgaccagatgcccttccactacgaatttcaacttttggtggagtgtagagggaacaactcccactgagtggatccacggacgccccaacagacagctgtagggggggttaatatccattatttggaaggaacttggcatgtgtgagggcctatctgtactggaaggtcgatctctccct

SEQ ID NO: 26187 - DNA, 404 bp, Glycine max
  unsure at all n locations
tcatggtgaatcanaggtgattcaaaggtgttntgttgataacaatgatgataacaaaagatgatgacaaaggtgatgacaaaaagttcaaagatcaatcaaagaacaacttaagtgaatcaaagatcaatcaaagaacaactcaagtaaatcaagaagaattcaagactcaagaagaaagtttagagtcaagaatcaagattcaaggttcaagatctcaagaatcaagattcaaggttcaagatctcaagaatcaagatcaagattcaagactcaagattcaagaatcaagagaaggctcaatcccaagataagtatgaaaagtttttctcaaaaattgaatagcacatgatttttctcaaaacatgtttaccaaagagttttaaatctatggtaatcgatta

SEQ ID NO: 26188 - DNA, 397 bp, Glycine max
  unsure at all n locations
agctttctaaaaagttatataatattattatctgaactcacatccataagaaaccagcaataaacaaccacataagaaactgatcttttaaattaaacaatgacaccatattcatttcttaagattgattgcattgaaatggcttcagtctaagcggtttagtaagtactcgacttcaacattttttgtgaggggtattaaccatttctggtacaagagagaaactactgatggatcaaccttgtatgttattcccttgacatcacgatcaaggctcacttcctgcccaaacaccatggccttctttntaaccctcttcaccaccatctcttcaacgctctcatatgttaacaatttcatcaatgctcctttgtcctgcaaaaaccaaacattaatt

SEQ ID NO: 26189 - DNA, 350 bp, Glycine max
tagaatacttgttacttttgagaagttagtggaacttggtggtttgtccagaactgaatgtaatcttaatggtagaaaccaaccaatataattccatgtatgggatatatggtcatttcttttcttctttaaactgacctaaggtttgaatttgattttggttttgaaaaatcttttcttttacaaaatctaatttcatgtctgaaagtggtttagttaaaatttggtatttggcttacaaagttcttcttcaaacaattactttgttctttcacaaaaagactttaaaattatctaaactcacaattcaacttcccttcttataatatttttcctttgcaatccatgta

SEQ ID NO: 26190 - DNA, 357 bp, Glycine max
  unsure at all n locations
atccggtttttgacagtttgaatatcagattcagggagaactgcagattggccaagagtagaagtcattcatcaagtagaagcaaggagatatcttttaataggattttctctaagcttccagtcattgattttgatattgacaaagaaagagcattgaacgtgattgacagactggatgtggtcagataatttgaaagtttgcccgatcgcctttgaaatgaatggaaaggagaaataatacatgtagacatggtagtgggtttcctttctgtgcatatgcaacgttcttgctgcaagcgttgaatgccatanttttgccgcacctttggtactttggattctcattggcttcatt

SEQ ID NO: 26191 - DNA, 418 bp, Glycine max
tttcttcatgacctcctctgggttttgttaacccccttgttttgataaccatctcttcgagttggtcagatgacgtgatttttttaatatcaaaaagctttatttataattctaacatcctaatctcctaaatctaaatgataagatcaattcctaatttttatctaaaccaattcataataattttaaatctaaataatatccttaatatttgaaacaaataacaaattgttaaaaataaaccacattatttttttttctatactaaagatatcaaacatatctcaacatcaaccccacgtctaggcagcataggcaaaggtttcaagaattattcagcggacattcttaatatgcttaatcttttatatatgaaagaaattcttcattacaaaagccatcagacatcatcaactac

SEQ ID NO: 26192 - DNA, 394 bp, Glycine max
  unsure at all n locations
agtttttctcctatttagttngagtttcttttagtatctctcgtgttgggtactgtgatagggtgtttttccacttcctttgaaaaacccttgaaaatgagatatcgtaaaagttatatttttataaaattgatgttattttcgtgaccttcactgaaccccggtcacattggcatgagcagaatttcaaaatgatgtctctttttagtagaatctgaaacaccccatagtactttatgatgtaaggtccattggagcttgtaggcctaggatcttcttcatcaatggattcctttgcttattgaaagatgaatggcagcggaatggagaaagaagagagagaggagatgccacttcaaggagaagatgagtctagatgaagctcaccaccata

SEQ ID NO: 26193 - DNA, 435 bp, Glycine max
  unsure at all n locations
atggcctcagcaaattccttatttctataaagaaattctatctacagacctccattctttaatggagagggttaccactactggaaaacccgaatgcaaatttttatcgaggcaatagatctaaatatctgggaagccataaaaataaggccttatatacccaccacagtagaaagagtttcaatagatggtagttcatcaagtgaaagcataaccatagaaaaacctagagatagatggtctgaagaggatagaanacgagtacaatacaacctanaagccaaaaacataataacatctgccctaggaatggatgaatatttcagagtttcaaattgtaagagtgctaaggaaatgtgggacactcttcgattaacacatgaaggaactacagatgttaaaagatctaggataaatgcactaactcatgagtat

SEQ ID NO: 26194 - DNA, 396 bp, Glycine max
  unsure at all n locations
agtttagttcattacataccatccatcattgattcaattaattcaaaaataatttgtttcacgggttgccaaatgaagacccatatgtgcacctagccacatatattgaaatattcaacacaattcgattggctggtgtgcctgaagatgcaattcgatcgagcttgttttcattctcattgtctggagaggctaagaggtggcttcactcgttcaaaggcaacagtcttaagacctangatgaagttgttgagaaatttttgaagaaatatttccctgagtgagaccttagaaagattccatggtctattgagaaagacactcactcatggattctcagaaccgattcaggtcaacattnttatagatgggttaaggccgcagtccaagcagctg

SEQ ID NO: 26195 - DNA, 423 bp, Glycine max
  unsure at all n locations
gtaggattatggggtacccatcacatgtggtactttgtggcggtcgggcgatggtgcacaacaagttttccacattcacaaatcgcgcataaacccaccatccccttgtgcccacctccaactgagctcacgtactcccacgtagcccatctcctcgtttctctcaacaccgggtccccatcaatcctcccaagcttccccaacatccaagtaattcaacattcaaacaacacaaactatcacagccaagaaaatagggcaaaggcagaaaactatgcccaaaacaccaaccaaaatcacagctnttctcacttaaagaccccagtacatttccttcgttccaattcgttaaccggtggatcgactcannaattttactggaagtctctagtacataagcctacattnntgaccgtgggatct

SEQ ID NO: 26196 - DNA, 688 bp, Glycine max
  unsure at all n locations
cgacgagnnnnaacggattgcccatcgaatngcccctcngagcngactcatagaggctgaggtanccacgctgcgagtacctctgagagatcccatctcagacgtcgcactctcgcagtgttcatgtcacagacttgtactnntatcncanagaacntncnnatctntgcgtagggtagaaagtccatcccctatctttcccatttgggcntntgatntcncncatangtagagactgnggcngcccaatcncntcntncacncntnnctntacntcnnctntgtggtncntntcnccngcntntgcnantacntncaccattgnaantggggagananantncnaccncantgntaganangaggaaaccnnttcactnttgantaggccctcatagnagaagtcnccacgctccttctccattatgaagagctcccacacccatagcanaagcctctctcatttcaatgccgtngtatcacgaagccacaacgaagccttctagagtaggttgcctccttaaacactccattatatttgtttgttagaccaacgtggcctcagatatcttacagaagggggnggttgaattaaagatattccaaactacttccccaattaaaaatctatttcactttttattcaagttataaattcccttaataatgaacttcttaaatattgatg

SEQ ID NO: 26197 - DNA, 420 bp, Glycine max
  unsure at all n locations
tctatcaagtggtaatcagagcacaagagcttcattttgtgcttcttaaacctccattaatttcttgctctaccttctcttccattgttgcttcttcatttttctccatgtatctcctcacatgtcttgtgctaaatgttgttaatatgattctttagagtttccaccgattaaacttgctaaagaagctaaatttgattttctatggttcaaatctcttgttcttgttcttgaaccatgaattgtgttgagtttaggttcctttgagttttgtgttgttattttttgtggctgaaaccgaaaccataaatatcttacaaaaatattaaagtagaagaaaacctcanaaatctagagtgacttgttcacctattgtagttctgtcatagaagtcatgtctagtcatgacacttgtctcat

SEQ ID NO: 26198 - DNA, 354 bp, Glycine max
tatgtttgaccaggaattatttggatgggttggatgttgagttcaagttgttcctggtgtggagatgatgggacagatggtgaaccagaagctgcagtttcttttgatgaggtagccatggaaaagcacatcgtttggaatgatttcgtaaatctcagaaaactattgggaaatgctgatgaaaacacgaatgtcaagcagatatatatttgaatgaggaatgtagagggccgtgtgaagcaacggtcgaattttccttggttcagtagtgaacgtgctattaatgctaagtgattcgtttgggcacgttcatattgctcgaattgctataattcctctatcacacaaatgccc

SEQ ID NO: 26199 - DNA, 201 bp, Glycine max
ttgtttctatccaaatggacttaccttgaattaattcctttgatagcccctttgagcctatgttcccctttctttgttttgaagctcattacaagccttaagtgaaaaaccatgataccaccttacccttaaggtattttggagctttggaattgttttgggaataagtgtgggggggggtatgtatcattggaagatatg

SEQ ID NO: 26200 - DNA, 326 bp, Glycine max
gtttaaagagagatgttgaggacgaaattgaaggaataaaagagggagagaagtggaactttgaagtatgtctcacaagagtctcattcatcaaagttacaacaagtgttacacatgcttctatttatagactacgtagcttccttgagaagctttcttgagaaaacttccttgagaagctttcttgagaaaacttccttgagaagcttctttgagaaaacttccttgagaatctagagcttagctacacacacccatctaaaaactaagctcacttccttgagaagcttccttgagaagctagagcttagctacacacacccatc

SEQ ID NO: 26201 - DNA, 329 bp, Glycine max
ttagtttctatccaaatggacttaccttgaattaattcctttgatagcccttttgagcctatgttcccctttgtttgctttgaagctcatcacaagccttatgtgaaaaaccatgatctcaccttaaccttaaggaattttggagcttcggaattgttttgggaataagtgtggggcggggggttgtaggataacatgttttgttggctatgcttcatgatgtatttttgggccataatgatgtacatcgtatatgggttaaatgttggacatgctgctgaaagatatgctagatctcaaatgctactgtgcaaaacaataacaaaatc

SEQ ID NO: 26202 - DNA, 417 bp, Glycine max
  unsure at all n locations
tgtagaatggctagacattatacatgtcanggcttgttttggttcaaggataaaagggatgccccacattatttccatgacacaaatgcaaaaatgatgatttggaaattttatgcaaaactggtcatgcatgcacctatgcggacgctcaagtgtcaaatttttatggtcatgtgatgctagggctcaagattcatttcctctattttaaatcaacccaatgtttccaaaatatgttcttttatcaatttgtgcattcctccaagtccatttcgggcgtccggggaaattttcacagcattcacccttcaggggtagacacgtttcttttcttctaaaatcggttatgatccaatgaattttttttnttttaaagaaaagttgcaaatcatctctcttcaaagcatatcggttttt

SEQ ID NO: 26203 - DNA, 360 bp, Glycine max
tttgctagcttgcagtaaaaaaattatttataatcttgatcatttaaatataattgtatattttatataatttttatttctcacaatatttaagtagtttgatgagagttgcggctagacatggcaacgagatggagcggagatagatattgtctctctagtctttgaacccaactccccaacatatactcgtacccgtttctgatacccgacggattaaaatttgttatcccatcccgtaactgttgtgtatcgagtatcctgtcttgttccgtttcaatttagatttgtaaaaaaaaatttgtaaaaaattatattaaaaatcagattaaaaaaattgattgttacacatttattttt

SEQ ID NO: 26204 - DNA, 412 bp, Glycine max
  unsure at all n locations
tgattagctgccgtagcagcaacaatatattctgcttcacatgttgacaaagcatctacactttgcttctttgagcaccaagagattggtgttgttcaaaatttgaaaacatacccagtagtgcttttcctatcatccttatcaccacaccaatctgaatcactataaccaataacttctccttctatattcttctgactgtaaggatataaaatgccaagatccaatgttcctttcacataccttagaatcctctttgctgctaggaagtgaggtgtctttggtttctccataaacctgcttatcaacccaacacaataagcaatgtcaagcctggtgttacatatgtacctcagtgagcctacaacttgcttgtacaaggtangatcaacttctttctcatccncatcta

SEQ ID NO: 26205 - DNA, 388 bp, Glycine max
ttagtttctagagaaagctacatgaagctgcctcggtaaaaacgcttcccagccttcattaaccgttggatcttctcgaaatttggtctgcaacttcaaaaaacaattttccatgatctgaccgttgggatctttgagaagttgtctggagtgtgctagaagcctcttaatgaagcttctggaggaagcctcttaatgaagcttctagagaaaactacatgaagctgcctcggtagaaacgctgcccagccttcgttaaccgttggatcttctcgaaatttggtttgcaacttcacaagacactttaccatgatttaaccgttgggatatttgagaaaatatctggagtgtgctagaagcttccgttcccgagagcatatcttattta

SEQ ID NO: 26206 - DNA, 306 bp, Glycine max
  unsure at all n locations
tgctctanatntacattgatgtttgtatttatgggtttaggttgnatgtcatttttgttttaagaatagtatcccactggtaaaactaactttccaaatgtttgccttcgcaggaaatggccccgagaaagcttgcctcaaagaggtccaggaaggacaaggcagcagaaggaactagttccgcttcggagtatgatagtcaccgctttatgagcgcggtacaccagcagcgcttcgaagccatcaaggggtggtcgtttctccgggagcgacgcgtccagctcaaggacgacgagtatactgatt

SEQ ID NO: 26207 - DNA, 380 bp, Glycine max
agtttctattctcaatttcgagtgtctcgatatattacgggactcaatcggacatccgagtaaaaacttattgtcgtttgaatttgcttagagcatatattctcaatttcgagtgtctcgatgtattacgtgactcaatcgaacatccgagtaaaatgttattgcagtttgcatttgcaacaagcttctgatttcaatttggatcgtctcgatctatgatgggactcaatcggacatccgagttaaaagttattgcggtttgcatttgctacgagcttccgctttcaactacgagcgtcttgatatattactggactcaatcgaacatcagaataaaaagttattgttgttagaatttttttcagagcctctgttttcca

SEQ ID NO: 26208 - DNA, 390 bp, Glycine max
  unsure at all n locations
tcaaccaaagggagatggaccatttcaagtgcttgttagaatcaataacaatgcttacaaagttgagctgcccggtgagtataatgttagttccaccttcaatgtctctgatttatctctttttgatgcagatggagaattcgatttgaggacaaatccttctcaagagggagagaatgatgaggacatgttcaagagcaagggcaaggatccacttgaaggacttggaggacctatgacaagggctagagcaaggaaagccaaggaagctctccaacaagtgctgtccatactatttgaatacaagcccaagtttcaaggagaanagtccaaggttgtgagttgtatcatggcccanatggaggaggactaaatgacaccactttgtct

SEQ ID NO: 26209 - DNA, 391 bp, Glycine max
  unsure at all n locations
agcttgcttctacaaaataatgagatagtgagctaaattactcacaataacaggatccttatcactagttatctctattggtgctccaagcagtctatagatttaatagagacaaacttcaacatgtttcctaactaaactacaaatgaaaaagagaccaagcttacctcgaacccaaacagtgacaatggcagtgagatctaacaaaatggcacgaaacttgaagctttcctcgtacctcaatcagcaatactgcaactaaagacgtattattattataatcatcaataaaacatgaacacccacggaaaattagcatacacgaagttgacctacgtacctcacggagaaagctntgagctntgagcacccacaagtgtttcagcaccct

SEQ ID NO: 26210 - DNA, 441 bp, Glycine max
  unsure at all n locations
ccagccgcccccaccaaagataaacaaaacaggcccggcaacgacaacaaacancaagcggaattgagctgaactcaacacaggcaanccaccgccccgggaccctaaccgccgcagcatcacctgcacagagcacaacgaggacaaaaaggggacacgaagagggggccccaacccaagacaaaagggaagagaagaaccagacggagcccaaagacgacagacccaaggaccacacccgggccaagccaaaaacaagacaagcacggcgcgacaagcccccaagaaaacagccagaaaagcaccccgaaagacaacggaaagcaaagccaccaccaccccccccaaacaagccaccccagaaaaaccccaaaaacaccgaagaaccaacgaagcaccaacccacaaggggaagccacccgaagagaacagagccactcc

SEQ ID NO: 26211 - DNA, 165 bp, Glycine max
aatgtggtcacctgataaaactatagctgggtgagatggtaggcgctcccgataacatggcatactgaccgcaacgtagcccattatgacaatggacaatactgagacactcacctaaaatgagtgagatgtcctgagtgcccactttatatgctagaaatgtgt

SEQ ID NO: 26212 - DNA, 426 bp, Glycine max
gcttgatcacagtggaaatttgttggttctaatagtaaatttatgcacttatttgtgtgtatatcccggaatattgcatgtgtacacagtttgatgatatgttatgttaccgcacagttgttaattgtcttttcctttctctgggtacatatatgcagtcttctatatttgcatagcagaatgccataccataaggacttacatttccaatgtggcgttcatattaacttttactaaggcaatatgtctatacagcatgcatattcatttcaaattaacaacatatgagcaactcgcttatagagcataatagtcacatatagaactcataccagatcctgaggccaaagtactggcctaggaataatgctttacatctatattttcaacaacaatatgcctaacaaaacataaaccaacaaatga

SEQ ID NO: 26213 - DNA, 401 bp, Glycine max
  unsure at all n locations
agctttatgatgttgtatccaagcaattttgatgatgccaaaagcccaaatgattgattcaagattgattcaagacttcaagatcaagcatcaagaatccaatccaagattcaagattgaagagaagaaatcaagacgcaacaagtcaagacttcatataggataagtattaaaagattttttcaaaaaccaaatagcatagttgtgtttaacagaagaattttctcanattttctaagataccagagtgattactctctggtaatcgattaccagtgactagtttggttttcaaaatattttcaaatggtttgcaacgttcagaaatgattttcacatagtgtaatcgattacactatattagtaatcgattaagtgaatctgaacattggaattcatat

SEQ ID NO: 26214 - DNA, 439 bp, Glycine max
  unsure at all n locations
ctcaagcttcatttactattaagttgtgaatatgcttcaagaagatttttacaaaaatttaaaatccccgatcaaagattggaggaaagaaaaaatccccgatcaaagattaaaggaaagaaaaagaagaaattccccatcaaagatccgaagaaagcaaacgaaaaagaaaattcttgatcaagattggaagaaagtaaaagaaaaaacatacagaaaggtcattggaccagacaatgtctgaataatgtacaaattgtcacgagcaagaaagacaagaaaagaaaccatgacttgagacgcttgaagcaatccccttcttggttaccaaccgaatctttgtgcccacgtctctttcgcgccatgcccaaaagaaaacataaaagganaaggtcaaaacacttagagccaaattccccaccaaacataccattccaaa

SEQ ID NO: 26215 - DNA, 402 bp, Glycine max
  unsure at all n locations
agcttgtgtaggctccatctatccatgttgnctctccctaatctcatgcatttgtattcaagtggctgtagaatgtagagagattgaaatccttaatgttcattcaaaatctttgtgacccaaaccatagtagaattctgagtctacactggaagagagggtctgggcacttcatgtttcttcttcatccgttgctcctctataacaattttttcctcctccttttgttgatgggcaggctttttggtttggacctttcccttctgctccctaaggatccttttaaccttcatagcaaggccaaaagtttccaaagccttgtctttattagcaatagccttggccagtttcttctgcctcttttgccgaatgtcatcctagttcactagaggaataagtatg

SEQ ID NO: 26216 - DNA, 446 bp, Glycine max
actcaagcttcctatgtgcaccagcaaattaaaaaggctatgtgggttgtttgactgattatttattagcaacaacttgtattctgaacttaattatatatatgttttggcaacatactatcttgtttcatactactaagtctctttcttaatttgacgcatttgaaacataaatactttgatgataagagaacaaaagttcactgcttaattgacctcatgtaaatttgatttaacaaatccatatgatcagtccctccaaatcatttgtccattagtactcattcgatcatttgagactaaatatgttgattgttgaagagtgaatgtactacttacttctgaataaatgatttttcaaacttcctttctgcataactcacaaagtagaaacttgtttttacaatcggtgcagtaaacaataagtttgaccatattttcatggg

SEQ ID NO: 26217 - DNA, 397 bp, Glycine max
ttatgcttggagaggatgcttcaatggaggaaaagaaagagggagagaaagagagagggggagcacgaaattgaaggaagaaaaaaggagagaagttgaactttgagttgtgtctcacaagactctcattcatcaaagttacaacaagtgttacacatgcttctatttatagactaggtagcttccttgagaagctttcttgagaaaacttccttgagaagcttctttgagaaaacttccttgagaagctagagcttagctacacacacccctctcataactaagctcacctccttgagaaacttccttaagaagattcctaaagaagctagagcttagctacacatacctctctaatagctaagctcacctccttgagatgagaaactagagctta

SEQ ID NO: 26218 - DNA, 290 bp, Glycine max
  unsure at all n locations
tctagccaaatggacttaccttgatttanttctttgatttcccttttgagccttgtttccctttccttgtttagaagctcactacaagccttaagtgaaaaaccatgatatttccatatccttaaggaatnttggagctttggaattgttttgggaataagtgtggggggtttttgtttcattggacaacttgttttgttggctatgcttcatgatgtattctgggccatacttgatgtacattgtatattggttaaatgttggacatgctgaatgaaatgttgtttctc

SEQ ID NO: 26219 - DNA, 398 bp, Glycine max
tctagcttgtttctgtttagagtttaatttttctagcaatctattactcgtttggtttgctgcaacccaacctatatattgaaggattaatgtgtatagtcgcgtgctttggtttgagaaaagatcatgatatctttgttgtgtgctttggttcaatataaaaatacaatgcgtatagttgtgtgcttctttgctatgctttgaagtttgcaatagaatattaccctcatctgtagaatgactatgtgtagcttcttcaacacttttcatgctatttcaattccttgcactgctaagacagagtcttcatatgcctcggatttttatctccttgccaaataaggagcctaagatgctttggtttaatactttagccttaagcatgtgatatagaaact

SEQ ID NO: 26220 - DNA, 221 bp, Glycine max
ggcaagattggacgacgggaactgtggttctccaaatatgctctatgtgcagattttgctgtagaaatgtgcatcataattctgcacaagagcataaaaatccatgtatgtgctgagtgtggaaagagtaatgtacaatgagttctggatgtgtgctagtagatcccaacagtcgacatgtacgcttatgcactatagactttcaacaaaatggtggagtc

SEQ ID NO: 26221 - DNA, 394 bp, Glycine max
  unsure at all n locations
agcttctacattcaattttgagcgtctcgtaatattacgggactcaatcagacatccgagtaaaaatttattgtcgtttggattggctcagagattcaacattcaatttcgagcgtctccatatattacgggactcattcagacatccgagtaaaaagttattgtagtttgaattagcttagagcttcaacaatcaatttcgagcgtctcgttatatcacgagactcaatcagacatccgagtaaaaagttattgttgtttgaattggctcagagcttccacattcaattttgagcgtctcaatatattacgggcctcaatcagacatccgagtaaaaagttattgtcgtttgaattggctcagagcttcancattcaatttcgagcgtctcga

SEQ ID NO: 26222 - DNA, 414 bp, Glycine max
  unsure at all n locations
ntgagcaaattcaggcgacaatatctttttactcgcatttctgattgtttcccgacatataacgagacgctcgaaattgaatgtcgaagctctgagccaattcaggcgacaatatctttttactcggatgtctgattgaggcccgtaatatatcgagacgctcgaaattgaatgttgaagctctgagccaattcaaacgacaataactttttactcggatgtctgattgaatcctgtcgtatatcgagacgctcgaaattgaatgttgaacctctgagcgaattcaaacgacaataactttgtactcagatgtctgatatgggctcgtaatatatcgagacgctcgaaattgaatgttgaagctctgagcgaattcaaacgacgataacttgttactcggatgtctgattgagt

SEQ ID NO: 26223 - DNA, 400 bp, Glycine max
  unsure at all n locations
tcaagcttatgcttttctcaagantgaaaagaccattatattatggtttcttaattaacatctcttttttatagatgattctttgataattactgtcacgtaaagataatcttattttctattttatctgctactggaggcaatacatctttagtggcttttcgaatacacgaggcaatacatttctgtgctggttttgacaaggtaaattctttcggggtaagtgaggcactgatgtgtttttacattctataggatctatctaaataaaattgtctaatgtcttaattcagccagcaaaaaagttgaatgtgaaaggtgggctcaaagatgcatgaaggagagaagaatcttatccacacacatgcacatcgaaggagaacatgttagtctcatccta

SEQ ID NO: 26224 - DNA, 426 bp, Glycine max
  unsure at all n locations
tctagccaaatggacttaccttgacttatttccttggatagtccttttgagccttgtttccctttccttgttttgaagctcactacaagccttaagtgaaaaaccatgatatcaccatatccttaaggaattttggagctttggaatcattttgggaataagtgtgggggtttttgtttcattagataacatgttttgttggccatgcttcatgatatattttgagccatacttgatgtacattgcatattggttaaatgttggacatgctgaatatgatgttgtttctcaaaggctacagagttacaaaaaaaaaatatttaaaaaaattgaaaaagaaaaagaaaagcaataaaagtgagtgaataagatcttaaatgacacaagaatgatgagactcttggntctactctctatgtttaaatt

SEQ ID NO: 26225 - DNA, 301 bp, Glycine max
ggcttcttctaacacgctccacactttgtagggtgggccattctcggatggacttgaattcctcataggccacctgagccccatttttaccacactctaaaccctgagaaaactatattatctactcaaaaggcacatttgtctatattagcatagacggtatttatgctaaggactgaaagaacttgcctgagatgtactaagtgatcatctaggctactactatacactcgaacatgatgaaagtgaaaaactacatatctacctatgaaagaccttatgacatgacgcatagccctca

SEQ ID NO: 26226 - DNA, 299 bp, Glycine max
  unsure at all n locations
ttggaactttgagcttgttttgctacttttaaaagttggatccaagcctagctctagaccctgtggcatggatgctgccggctacaacaatatgctggctatgctttgggagaatgcgatgctgacccaagccgagaccttgatcgaagaactctgctctaaatctttgagccccgatgtgcccactcataggaccttgattgaagtctacttgagaatggacaggatcgatgatgctctcangattttccacagaatggttgattctaggctcagggtggttgctacctttggtaaca

SEQ ID NO: 26227 - DNA, 369 bp, Glycine max
tttagcttaagctcctacaactgcacaaggctcttaatgtttgaagagtatccttgaggaaccttcacccgactaagacactgacaaaaacttatcttctcctttttggacaaggtatggcaagctaggggcaagtaaattttcttcccattaaaccttggatgcaactgtgatcgtatgcccatatcaactagatcttgacaggtattgaagccatgcttcatcttgccttgaatgttaaggagagtaccaatcacactatcacaaacatttgtctccacatgcataacatcaatacaatgtctaacatcgagatcagatcagttcgaaagatcaaagataatggacctattcttccatatgcaactc

SEQ ID NO: 26228 - DNA, 408 bp, Glycine max
  unsure at all n locations
tcatgatgaatcaagattgtttcaaggagttttgatattatcacagatgatgacatanagctcaaaagtcaagatcactttatactaacaaagatgatgacattcaagaatgagtttaagaatgagtcaataacacttcaaagatcaagagtaaatttgatttcaagaatcaagattcaagattcaagaataatcacgatcaagattcaagaatcaagagaatacttaatcaagataagtattaaaaattttttcaaaacattgagtagcacatgaagttttcacaaaatcattaccagagagttttactctcaggtaatcgattaccagattatagtaatcgattaccagtggttttaaaatgttaagattttcacaattcaaaatgaagagtcacatctggtgatg

SEQ ID NO: 26229 - DNA, 406 bp, Glycine max
agcttgctaacttatggaagctcctaatatctcccacactttttagggtgggccattcttggatggccttgattttctcagagtccacttgaaccccatttttaccaactataaaccctaagaaaactatattatctacacaaaaggtacatttctctatatttgcatagagggtatttttcctaaggactgaaagaacttgcctgagatgtcctaagtgatcatctaggctcctactatacactaaaatatcattaaaataaaaaactacaaatctacctatgaaatcccttaagacatgatgcataagcctcacaaaggtgcttggtgcattagtgagcccaaaaggcatcactagcaattcatacaaaccaaacttggtcttgaaagcagttatccattcatc

SEQ ID NO: 26230 - DNA, 422 bp, Glycine max
gaatggaggctctggtctcttgttgaaactgcatgttttgcatagtcttttgccttatcaagttcttcaagggaaggttccggaggagcctcaactatttgttgtttctggggctgttgctgcttctgttgttgttgttgtagctggattggtggaggaacatctggtctgcttgggccagcagcattatgaaaataaggctattgttgttgctgctgttgtgaaggactcaaccatctaaggttgggatgattcctccacccgggattgtacttgtcgttggagaggtcataattgttctgctgtggttgattctgctgctgaggttgaggaggtctattgtagatgtttgcagcataagctttaggctgttcaattgctccagattgctgcacaaaagggcaaaggtctgtatggtggtc

SEQ ID NO: 26231 - DNA, 267 bp, Glycine max
acgtgcacatgcaacaattgatagtccgggctatacgagacatcttgccaaacaaagtcaagttcgccataactcacctgtgctttttcttccatgctatatgtaacaaaggcattgatcctgtcaagcttgacgagttggaaaaagacgccgcgattatattgtgccagacggagatgtatttcccccccgctttctatgacatcatgattcacttgattgtgcatctggtcagagaaatcaaatgatgctgcctgttcatctatt

SEQ ID NO: 26232 - DNA, 407 bp, Glycine max
  unsure at all n locations
atctaatcattccaatccacaaaattatcaattgttattcaaatcattctcaaacactcatttcatacaaaataatccactgcatatcaaattcaaccagttcactgttcaaacacgctttttgtacaagcaaacaactcaaagtgccaaaatttaaagaactgaaacataaacattgaaatttaaatgactgaacataaatcataaaataactgaaataaactaaaatgttcaaaatgcacaaatttaaatgtcctgctcctgtggttgctcttgtgcatgctcattaagatccaacacctgagcaactggtgaatcctgagagataggctgctctaactcagatgctggtgcagatggtatgacatcatcangtatgggtgctgcggatggctctgggatctggt

SEQ ID NO: 26233 - DNA, 278 bp, Glycine max
agctttttgaaattgccatgtttggatgagtcagacatacccattctattttaggggctctgtaatgacgttcgtgatgcttatatgctgaaattgcctatggaaaactgctagagatgaatggtatagttaacctagggctacaaagtgagaatatggtgttgtgagtggaacaaaaggtgatgctcttacagttggaacgttcagtctgaattctgtggtaaatggaagttactatgagctaatcctacctggagatgccatttaagacatgtgag

SEQ ID NO: 26234 - DNA, 428 bp, Glycine max
  unsure at all n locations
ntctcccacgtgctatatgacatttcacgctagtattattttactttaacctccatttaccacagagttcagacttaaccttccgactgtcatagcctcactttttttttccactcataacatcacattctcactttgtaaccctagagaaggactacccttcatctctaacaggattgcatcagcgatttcagcatataaacgtcacaaacatcatcacaaaaaccctaagacagaatgggtatgttgaactcatccaagcatggcgattacaacaagctatcaacacgtttgttcacaaataattaccatgaagcagaaaactaacagaactacctatcatatctcccacaagcccatacccacgaaaatcaaaggagaaagaagtccacccaaacctgaaatttcgaagtcccactcatagacac

SEQ ID NO: 26235 - DNA, 384 bp, Glycine max
  unsure at all n locations
agctttttgaatttgccatgtttggatgagttagacatacccattctattttagggtttttgtaatgatgtttgtgatgtttatatgctgaaattgcctatggaaaactgttagagatgaagggtagagttaacctagggttagaaagtgagaatatggtgttgtgagtggaaaaaaaggtgaggctttgagagttggaaggttaagtctgaattctgtggtaaatggaggttaaaatgagttaatcctagcttgaaatgtcatttangacatgtgagaaaggttaggctgagctagagagaaaaacaaatgaccaaagtgaaccaagagccatttctagggcaaaattgggtgttgaagagtcaaattntgattcggtggaaa

SEQ ID NO: 26236 - DNA, 427 bp, Glycine max
  unsure at all n locations
ntctcccacgtcctaaatgacatttcaagctagtattatttcactttaatctccatttaccacagaattcagacttaaccttccaactctcaaagcctcactntttttttccactcataacatcacattctcactntctaaccctaggttagttctacccttcatctctaacagttttccatcagcaatttcagcatataaacatcacaaacatcatcacaaaaaccctaaaacagaatgggtatgtttaactcatccaaacatggcaatttcaacaagctttcaacacgtttcttcacaaataattaccatgaagcagaaaactaacaaaactacctatcatatctcccaaaaccccatacccacgaaaatcaaaggagaaagaaagtccacccaaacctgaaattcgaagtcccactcatagaca

SEQ ID NO: 26237 - DNA, 408 bp, Glycine max
agcttgccttgctccttgatatatttgagggactcatggtcactatgaatgacaaattccttgggataaaggtagtgttgccatgttttcaaagcccgtactaaggcatacaactccttatcataagttgaatagttaagggtaggaccacttaacttttcactaaaataagcaattggatggccttcttgcatcaacacagccccaatcccaacatttgaagcatcacactgaatttcaaaatatttttgaaagtttggcaacgcaagtatggggcattagttagcttttgcttaagaacattgaaagcttcttcttgtttctctccccatttgaaaccagcatttttcttgagcacttcattgagaggtgctgccaatgtgctaaaatccttcacaaatcgtctat

SEQ ID NO: 26238 - DNA, 417 bp, Glycine max
  unsure at all n locations
attcaaacgatgataactnnttactcggatgtctgatngagttccgcaatatatcgagacgctcgaaattgaatgttgaagctctgaccaaattcaaacgatgataactttttactcggatgtctgattgagtcccgtaatatatcgagacgctcgaaattgaatgttgaagctctcagcaaattcaaacgataataaatttttactcggatgtctgattaagtcccgtaatacatcgagacgctcgaaattgaatgttgaagctctcagcaaattcaaacgacaataatttttttagtcagatgtctgattgagacccgtaatatatcgagacgatcgaaattgaattctgaagctctgagctaattcaaacgacaataacgttntgctcggatgtctgattgagtcctgtaatct

SEQ ID NO: 26239 - DNA, 400 bp, Glycine max
tctagcttcttgctcagatccctcttgttggactatgcccaattgacacaaccctcttaggtttagactaacttaaactgagtttcgtccgtagatccctcttgtaagactagactcagctcaagcagcttacgaaagtttagcctaatttagcctaagcttcatccgcagatccctcttgtaagactaggcctagactaaacagcattattgtaacaacataattaaaaccaaaacttaatccacaaatccctcttgtaagactaagtttcgatcctgcttcaatcaagttctaaggcaatggtacatttctcaatgctaaagtcacctaactatgcacacaaatggatgatctgaccaaaagcattcaaacattaagcatggaaggaagcattgaaca

SEQ ID NO: 26240 - DNA, 357 bp, Glycine max
taaatatgagcagatgttatcaaaccttatacagaatcatttactatgaaaagtcattgcattgaagttgatgctgattcctttctttgctactaacagataagctacttattgtaaattatgttttctttaatacctttctattaatggtatttggttacaattacagacatgtacacagtgaaattccaaagatgaaaacttcctcatgttcattcattgttattctcacacgccaaaaacgaatatccatctgcgaacgatattgatcatattatatcagctgacatacctccacaggaagatgatccaaaactctataaattagtgtaaaatcacatggctcatggtccatgt

SEQ ID NO: 26241 - DNA, 367 bp, Glycine max
  unsure at all n locations
tcttgctttttcatttttntanngacaaatgctaatgcataaactaatgtagtaactcttggtcttgttttaaggcttatttaactttttaacaatttcaagctaaatctttaatgaaaaatattttacagagaaattgagcgtatagacgagttacgagatacataaagaaatattataattaccttaaggtaaaaatatttatatcatcggcatcttttggttaccatgatggaatcaattaatattacaagactatatatataaatattgctatacacgtataagtaaatgtgcttacttactacagtaaactctacttgaaacagtaatttgagagcattaattgatatcgagagcgtactta

SEQ ID NO: 26242 - DNA, 383 bp, Glycine max
  unsure at all n locations
tgtgacaggaacatgttaaggaatactgtactatnntttcaaacttcattgatctttgattatttctgttgggtatcccaaattgactaatgatatattcatatcatcaaatgatgtgagatctccaacacaccccttcattatgaggacgggatgtctcaagcatgaagtttgcagaactcaacatatgtagttggttcgataacagcctgagtggcccaatgagcggcccagtgatcccaagaataactactactactactaggataggctatgttatctagatttctgttattctaatttcaatttgatctatgtaaacatagagtattttgttctgtcttttgaatatttataaatcaagtagaagatatgatgtgata

SEQ ID NO: 26243 - DNA, 478 bp, Glycine max
  unsure at all n locations
agaattatgctgaacttcaagcactnggagattggacctgcggaccctgtgaagctctacagccggcctgcaagcttgttgcatttttcatgtgcggatgatacagacctacccgttctgttagacggatttggtatcccatgaagcactaggatgcataagcaagaagtcgtgtacgctatgaccactaaaatgaggcggttaaaatactccctcgccacaaaatgagaatatgctgactctaatgggcaacatagacatgatcctttagttggatagggtctacatacacctacttgggatggatgtgccgaatacctcatgctacctagcccctaacttgcagacatgatagacatgtgatgcatagctactgagaataacacatgatcatgccgtaccaatatgcattgctacggcaatatatgctgcatgacaggcgatcttgattctgaggaagatatgcgaaatacaatgt

SEQ ID NO: 26244 - DNA, 107 bp, Glycine max
taaccctatgtcattactaccctacacctctaaccgtatggctcgtctgaacatccttatacacatcagaagagcagtcgccaagccctaaaacagaatgcgtatga

SEQ ID NO: 26245 - DNA, 396 bp, Glycine max
  unsure at all n locations
cttgtcactgtttcgcagcnngaagcngacccaatagagtcgaatgagctcgtgccgagctgagaccacgacatgtggcgagatgacgctagagacctcgattggatactaaagggatattgagaccatagggagtaaacggagaacatgaggcggtgacgtgtacacaccttgacagattcaagattggatacttaagccagaatgaccctctgaatggcagttaaacgaggtgatacaaaactgcattgtcgactaagactacttcgtaagggtccgcgcatccatggaaaagaccctatgacccttgaacacaaatccctgtatgtcggctagattggtgtgtagcataaagagactctctgttgcacgtaatgcacaccgataatccaatgt

SEQ ID NO: 26246 - DNA, 318 bp, Glycine max
aaaaatcaaactcatgcttgcccgctactgacgcactatagatatgcacacataacggcacattccactggcaaccctaagaacactaccctccatctatagcagctttgcatctcgatttagcagataaacatcacagacatcatgcaaaaaccctagacagaatgggataacaactcatccaaacagaggaagtgcacaagctacaacacgcttcttcgcaaagaataaccacgacgcacacaacgacaatatacctagatatctgaaaaaccccatacccacgataagacccgagaaagaatccacccaaacctg

SEQ ID NO: 26247 - DNA, 397 bp, Glycine max
tcaagcttgttggttgtcctcattactagaagaattatgagtagtcagcaattgaccttgctaaaattccagtctctcatggtcgctctaagcatattgaaattaagtttcatttcctaagagattagataaccaaaggaaaaatcaagttggttcactctaagacagaaaatcagttggcagatatcttcacaaaagccttgaagatagacagatttaaggagctgagaatcatgatgaatattctagagctttaggttattgtctgttgttggaatattgcattttgaatcatgggggtgttagaaataattcataaatgtaattacgggttaatgaaattatggattggtaagtacatataaataagtactcttatattgtaagaatagagtgt

SEQ ID NO: 26248 - DNA, 409 bp, Glycine max
agccttgtgtgcctttggaagatatgttatgtgaaatatgtcctagctagtactattttatcttagatcgatcgttgtcgatcattgtaatgatgtttgattaaattaataatgtaagatcaattaagtagcaaggatgtatgttgtttagtttggaataataatatgggatgaattactactgccaactcgtgataagtggtaacccgtgccttttggaatcttttagttgagtttatgcacggaaatcaagcgtgtccgtgaaaggtgaaaggtgaaagggatcccaccttgtttctatttgtatcttggatgcaattacgatgatgccaaataaagaatcacttatatatggataccccaatatactttacatatctagtgttctacattttcttacttccataaa

SEQ ID NO: 26249 - DNA, 61 bp, Glycine max
tactggactccctgcaacgcttacaaaggtttttaacaattgcaagcgattactaccacga

SEQ ID NO: 26250 - DNA, 387 bp, Glycine max
tttagcttatgcattctttgagggaacccctaagttgtcgcatgatttcatgggcaattgcaaccccttaaggttgttgcttgttcgtcgttgcctgattcttttcttcgaggaaaatcgctaaccttatgggttatggaaatcccaaacccgtaagctttttgcctcatcgtcatcgcctagttggtttttagaagcaagagtgtcgtcctgtttgggtgtccgaggtggtggttgaaaaacgtggttgtcgcctgaagcacgtcgtcgtcggcactgttcccatggaaaggagttcctcgccgtacacctcagagtcctgaagtcgcgtgatgtgtttgtgtaacataaaggctccactggtgacatcgtggactaaggataatc

SEQ ID NO: 26251 - DNA, 409 bp, Glycine max
tgtagataacactgcggctgtaacattcaatgttgactcttttccaacctccgtcacccttgttgtccaaattcctttgatctctaagtacatcagtcaatacacgttccatttccaaattccatgtaaaataacttcttgtttcctcattattttttcctaaaacttttcttttgtccgtcattttttcattagatgactccattgaagttaatgtcacttattcaacctgcacataactagtagatatgacctactttattcatttgactagtccacttcacaatcatagaaaatatttcaagcaaagtttttatgcaatagcaaagtacgtaaaagtctatcttcaatagaaaagtacaatagaaacaaagcacacaaagtttgtcggcaataacaaattacattt

SEQ ID NO: 26252 - DNA, 407 bp, Glycine max
  unsure at all n locations
agctttgtgtaatcgattactatgatttggtaatcgattaccagtgataagttttgaataaaaattaaaagatgtaactcttccaaaggttttcaagtttttctaaaggttataactcttctaatggttttcttgaccagacatgaagagtctataaaagcaagaccttaacttgcattcataacattattgaagacattgattacaatcctttacaacctttgaatctctttgaacatcctcttgaatctcttcttcttctttctttgtcaaaagttttctggtttttccaaaccctgaaaacaaaacttgtgctattcatctttttcattcccttctccctttgccaaaaagaatttgccaaggactaaccgcctgaattctttntgtgtctctcttttcccttt

SEQ ID NO: 26253 - DNA, 439 bp, Glycine max
  unsure at all n locations
cttcatgatgatgaatcaagttgattcaagttgttntgttgttaacaaagaatangacattcagctcaaaagaatgattgcaagattgagtcaacaagttcaagattaagataaatgtcacgagaagaatcaagaagattcaagaatcaagagaagcttgatttcaagattcaagagaagaaatcaagatgacctcacatgggaagtattgaaaagatttaaaaaaaataaacatacatagcacagttttgtttttcagaagagtgtttctcacaattttctaagttaccagagtttttactctctggaaatcgacttccagtttcctgtaatcgattaccagtggaaaagtttgatttcaaaagcttttaactgaatctgaaacgttccaattggtttttaaatggtgtaatcgattacaatatattggtaatcgatt

SEQ ID NO: 26254 - DNA, 403 bp, Glycine max
agctttattagattcatcatcaattgattcattgatgtcaccatctacagcacttttctcgagcttctttaatccctcgtctacaatttgttgtattctcattctcaaaccatcacttctcatagaatttgatcttagctgcaattttaacccagggatcattgcctcattgctctccattgtagtaggattagactccaatgcagagggcacattctcatccaacgacttcacagctaatacttcctccagtaaatctacattctgcatgtatcggtcaaaagcttcattttccacttcaacattccgctccttgtattcctttatcttggcaaatctccattcatttatagctgcagcatcctgtaaacatcacaatgctattactttcaaacgaaataca

SEQ ID NO: 26255 - DNA, 438 bp, Glycine max
  unsure at all n locations
actcaagtggatgtaccctccactagaactgatccacaagacatgtattctctcttgttttcagtcaaacccaagtagatgtaccctctacttgtaccacaaatgatgtaccctccaatgtgttgagacaaagatctcaggctgttaaacctttgatactttgtgaatagggatacaaaagaattctcaggcgattaaacctttgaacgctnttgtattanggaatgggaagaatcaaaagaattctcagactgtgtcgtgttgaattctttgataagggagaagggagacacaaaagaattcaggcggttagtccttccttcttttggaaaagagagaagagagacacanaaagaattcaggcggttagtccttggcaaattctttttgcaaagggagaagagaatgaaaagatgaataacacaagctttcaagttt

SEQ ID NO: 26256 - DNA, 389 bp, Glycine max
  unsure at all n locations
agcttgtttctactcttagttcaactactaaactagacagcacaggcttggtgagcagtctcgctaagcccaattctaagaaatttaaaaacagaggcataatagcgcttagcatgacatgcatgcttagcgcccaacaaaaacacaaaaatcctaagtgtctaatacacaatactcgcttagcgcatagctgcgcttcgcgagttcaacggataactgaacagaaaagatgaacgtgcttagagagacagatgggcttatcgcgttcatctagaaatccaaaatctttaacagaaacgatgaactcgcttagcgcagcaaggctcttagtgcgttcatcgcgattntcagaaaaataagggcttctcaccccttctcatatgccccta

SEQ ID NO: 26257 - DNA, 426 bp, Glycine max
  unsure at all n locations
ttcaagataagaccaaactcccttccaaaatctgatttattgctaaatatgtgactttgtttgtgcttgcgcgcttagcgcaactctgaaccgcttaacgcgcattagtgaatttcggcttagcgcgtgcttttctcgctcagcggatggactgaagtggtgcgcttagcgggatgaaccttcgctcagcgaacatgcatagctcatccttcttccagattcttcctcgtgcttagccgaggaatgttgcgctcagcggatggcttgctatgccagtagattggcttagcgagcgtgtgaaaatcagcacttcacaaactctcctaattaacctaaaattgagagaaaatgattattaaacacacaaaatggaagtactaagcatttattacctatctttaacaaanagtaattacaacactacaa

SEQ ID NO: 26258 - DNA, 403 bp, Glycine max
agctttcttttaatgcgtcacgtctaaaaccaagttcgatggtagtgcgagcctttgatggtagtcggcgggaggtgatgggagaaatcgacatccctattcagataggcccccacacttgcaatgtggtttttcaagtgatggacataaatcccgcctatagctgccttttggggagaccctggattcacgcgctatgagtggtcccatcgacacttcaccaaaaattgaaatccgcggtgggtggactcttggtgatagtgtcaggcgaagaagatatattggtgagctgcccctcctccgtgccatatgtagaagcagcggaggaatcattggaaacaactttccaatccttcgaggtggtgagttgtgcctttgtggaaatgagtccgttcctaccttg

SEQ ID NO: 26259 - DNA, 425 bp, Glycine max
gcaacatcagaccacttccagggtgctggaactacttttttggatttgttggggcctatgcaagttgaaagccttggaggaaagaggtatgcctatgttgttgtggatgatttctccagatttacctgagtaaactttatcagagagaaatcagaaacctttgaagtattcaaagagttgagtctaagacttcaaagagagaaagactgtgtcatcaagagaatcaggagtgaccatggcagagaatttgaaaacagcaggttcactgaattctgcacatctgaaggcatcactcatgagttctctgcagccattacacctcaacagaatgggatagttgagaggaaaaacaggaccttgcaagaggctgctcgggtcatgcttcatgccaaagaacttccctataatctctgggctgaagccat

SEQ ID NO: 26260 - DNA, 407 bp, Glycine max
agcttttgtacaattaattttcagtcacaagtaataattgagttcgcatgacaccatgtgattcgagaaactaaaaattttagaaatattcgcttcaaatcacaatttatttccattaagcacagttgaataaaaacataaattatgcaagcaattacacacgcaattctaaattcgaactgtgaatttaaccagcaattctattaattatttgaattcatctttagtccttttaaaatataaaaacattttcgtttcaaatggcaaaaatttcatctaatctaataatacatctaaaaaatgaaaggaaaaaagataaagaaaaaaaactgacctcgtggagagagatctcatatcaattgaagaatatataaactaattaagcaagatctatgcaatctactaat

SEQ ID NO: 26261 - DNA, 448 bp, Glycine max
  unsure at all n locations
tactcaagcttgaccctgctctgctgcggagtgggagaatggatatgtatatcttcatgtgttactgttcctttcccgcgctgaagattctgctgaagaattacttggggtgtgaagagtgtgagcttgaggagtccattttgaagcggctggaggaggttgtcgacgtggcccggatgactccggcggatataagcgaggttttgatcaagaacagacgcaagagagagaatgcggtggaggagttgttggagactntgaagctgagagcggagatgaatgaaaaaaatggagttctgagggtgaataatggggttgaagaggaggaagagcaagagaagagggctttagacagtgagagtcctaagcatgagtcagagattgaggacaattgcaaggaggaggaggaagaagaagagaagacaagtagtatatagtgacgaatgat

SEQ ID NO: 26262 - DNA, 279 bp, Glycine max
agctttattacattcatcatcaattgagacattgatgtcaccatctactgcactcttatcaagcttgtttgatccgtcgtctacaatttgtgagattgtcattctgaaggcatcgcttctcctagaatttgatcttacctgcaagtttgacccagggatccttgcctcattgctgtacattgagaaaaagatgagactacagggcatagggcacattctcatgcgagactgaacagctaatacttgctcctgtccatccacattctgggatgaatgggc

SEQ ID NO: 26263 - DNA, 403 bp, Glycine max
  unsure at all n locations
tccatcacacctttccttaanatgtgtgctnggttcaattccataatcngaggaaaagaaattttgattggcaatactttagcagcctatcatagagatgaatgactcacgcatacttatgttgtgcatggcaaatgcaattatgggattgacatgagatgccttangaaccaccattttcctagttaaccacgttcacatgattttcaatcattttatctttctcctccttttttttaggagagatgggtgtataataccaacaaggttggtctatagccattatcatggtacccaacacatgtaactaagaatgtggcgtaaaccttcattcttcattgggactgtctttncgtctttttttctgtttntggtatttatattttttttgggccccccctta

SEQ ID NO: 26264 - DNA, 408 bp, Glycine max
catgtctgcttcttgacattattcttttggaattgttcaagttcttcttgcatggcttttacccaactttgtgtagaagcaaagcttcatgatgaatcaagattgattcaaagatgtttgatgataacaaaaatgatgacaaaggtgatgacaaagagctcaaaggtcaatcaaagaatgagttcaagatgttcaagatagaatcaagagcacttcatgattcaagaggaaatttgatttcaagaatcaagaatcaagattcaaggatcaagcttccaagaatcaagatcaagattcatgaatcaagagaagacttaatcaagattagtatgacaaggctttatcaaaaactgagtggcacatggatttttctcaaaacatgtttaccaaagagattttactctctgg

SEQ ID NO: 26265 - DNA, 391 bp, Glycine max
  unsure at all n locations
ntgacttgagttatcaagagattatatatatgtggccatgacatgtatttcaagaatcaataatctgtctttcaatcttttctcatcatcattcaatatctttcaactctttctacacaattctctgattcatttctcttcatctttctaaaagtttttgttcaacactttctcttccgagaaaagttctttgttcaaaaacttgagctattcatctttttcattctcttcttcctttgccaaaagaacgaaggactaactgcctgaattcttttgtgtctctcttctcccttacaaaagattcaaaggactaacagcctgagaattcttttgattattcccttccccttaagcaaaagatttcaaaggactaaccacctgagatatcttt

SEQ ID NO: 26266 - DNA, 394 bp, Glycine max
tttcttctttgctgaaggtggcaaacaccgcgagatggtcatgctaggccttgaaggtagccgagctgatgatatgggttaaatcgtgctccctatactaaggcgcatccacacttgcaaagtgatggataaagccatgctcatgcttaccttcttttactgcctttttgggccaccacctattctcgcgctacgtctggcctcatcaacactttacttaaacacgaaacacgcattcgctggagtcatggctataatgcaccgcgaagactacctatcggtgttccgatgactatcatcgccttatgcacaatccaaggacgccatcctggaacgaatttgcagccgaaaggctgtgagatgacctctatgcggtgactacgctgcttgctcg

SEQ ID NO: 26267 - DNA, 405 bp, Glycine max
  unsure at all n locations
ctgtgtaatcgattacactgatttggttatcgantaccattggnctgttctgaataaatcaaaagatgtaactcttccaatgggttttgactttttcaaaatggttttaaggttttctaaaaggtataactcttcaaaatgggtctcttgacccgacatgaagaagctataaaagccaggctttcgtttggatttttaatcaatctttctaagcaatctttctatcaattcatctcaatcatttctttcaatcatctttcattattttctttcatctctttcaacagntggtctgtttcatcttctcttcatctttctaaaaagttttgttcaaaactttctcttccaagaacagttcttttgtcaaagacatgtgctattcatctttttcaattcccttctcct

SEQ ID NO: 26268 - DNA, 398 bp, Glycine max
agctttgaactctagaacttaaatagtccccaagatttatattcttcaatacttgccctgaagacaattgatgttgaacaaaaattaatggagtgcaatttcatgaataaagtagtagttcaaaaaaagaaggatcatattaaaagagtaaaagaagaagagaaaaacacagaaaatggacatacttccaaaccaatatttacaaagaaccaacctccattcttacaacaccaagaaatatattgcaaacaatatatgcctttctcgttttcggtaaccaaaccaaattcttatagcaataagctcaattttaaaaatgatatattttcaagagagtaagcaaaaaaaagaaagattcatggcaagttcatatctatcaaggcataacaatctcaaca

SEQ ID NO: 26269 - DNA, 416 bp, Glycine max
  unsure at all n locations
tgngcatagcaaatgagaaaaatgagtgacaaatgtgataataaggatccatttctagggtaaattgggtgttgagaggtcaaattttgaataggtggagatttcaccttaaaaccagtttgagcaagtctaaatcaatgttatagacttgatgaagataagagttaacccctaaattacccaattttaattttcacctttcaaaccttgagaattcactaaaattgatgggttttgaatacctatattttgatttaccttggtttgatgtttgtctttgttttgaacatgatgtagacatggcttacgacttgtaggatccaatttgagtgaaattggatacaagcaagctagaattcaaaatctgctacattatgcagaanaatgttgttaaattgtgcagcacattttgccta

SEQ ID NO: 26270 - DNA, 396 bp, Glycine max
ttcttcttttagtatgcccgagacattcatccctatgagatgctgttgaagtattggcgatcagaattgccattccttggattataggggtgaaccaagctcatgcttttacaaaaaggttcatcaagtcaagttgaaatatggaagtaaccgtcttgcaaaattggggcataagatgaatcgagtcacatcactgcttcgtatactgccaaacatatttatgattattgatgtccttgatacttccagtgtcaccttgacaaagatgtcatggaccatgttgaaaatctaaattgattcaaccccatatcttgcgtaaaaattcgcaatacttcaactgtacatcattctcatgcatccatgcttttcattggatgcaatgctacgtgcattctt

SEQ ID NO: 26271 - DNA, 388 bp, Glycine max
  unsure at all n locations
ntgtgtgaaaggatatgactcttcacttttaaatntgatttccaacgttcaaacacactggtaatcgattaccaaatcattgtaatcgattacaatattttgaaatcaattggaacgttgtaaattcagttgaaagctttttgaaaaccattttgctactggtaatcgattacaataatctggtaattgattactagagagtaaagactctttggtaaaaggttttgagaaaaattcatgtgctactcagtttttgaaattgttttttaatacttatcttgattgagccttctcttgattcttgaatcttgagtcttgaatcttgatcttgattcttggaacttgaatcttgaaacttgattcttgaaatcaaatttccttttgaacc

SEQ ID NO: 26272 - DNA, 391 bp, Glycine max
tctagctttcaccagatcatataagataaatgcattcatgcaatctgcagatatatcctcccaaacgtcaaattctccgcctatatattcaacctttccatcactggcacgtggagtgaatcttcctccatggtgcaatactaaagttatattgtcattcattctacacaatcagaaaccgcaaacatggtcagatattaggaaataaaaaaacctacctcaaaaagcgcgaagacattgacattgtcaaaaaccgcgaagacacaatcaaaaaccaaaaacattgtcatctataagaacagagcatcataaacgaaaataataaacgatcataaacctccctacgaagcgcgaagactatgccacagatgaaacccctcgacatgtaaac

SEQ ID NO: 26273 - DNA, 347 bp, Glycine max
gatgcagatttgtgtgaaaccgtgtttactgtaatgttgtgtatgatcacacaacctttatttagtaatgactaaatataataatgagtaataatgactaaatcactaattactatctaatcataataacagagtaatatgtaatcttaacactccccctcaagctcgagcatatatgtcttatgaattgagcttgttacaaatgtggtcaacccaatagaaactaaaggcagttcgggttgtgtggttgccccggataaacatggctcagcggtagccaacaaaggcttgcagtgacgatagagaatcatgtaacgctcaccggagatgtgtcaagcgtcatgtgc

SEQ ID NO: 26274 - DNA, 391 bp, Glycine max
tctagctttgtatgcgaaataatcgggtggaatcatgaaaacaggagactcccatacaaccttaccttagtagttaatattgatgcgattcagttcatgctctatttggcattgaattcacatttacacaataaacacattctaattatgctatatttatattacttccaaaagctagtgggcatagttcgagtattggacaacaatagtggtagtactctaaatagtaagtagttatcagtacactatacactattgaaaagtttagtgagtcttgcgtactacctcttcattgaacttgacttattgcttgctccacctcgttatatagtccaaaaagtcaaccctaccatacaaatttttattgtagtcatgacaactttccatacac

SEQ ID NO: 26275 - DNA, 375 bp, Glycine max
ttagcttctcaaggaagttttctcagagaattttctcttataaggcctctcaagacagcttctcaaggaagtcacctagtctataaatagaagcatgtgtaacacttgttgtaactttgatgaatgagagtcttgtgtgacacaactcaaagttcaacttctctccctttttcttccttcaatttcatgctccccctctctctttctctccctatttcttttcctccattgaagcatcctctccatgcttcttgtgcaaggctcatcttggtggtgaagctccttcttccatggcttattccctagtggatgacgcctcctctcacttattctactttgtcttccgctgcatctccatggcggaaaatcaccatt

SEQ ID NO: 26276 - DNA, 379 bp, Glycine max
agctttttggtgattttcgctgcgaagaactattttttgctgcattctctctgagactttgctcatgcttcataggaccgaccaaaacttcgctctaatggatgccgagaacaaaatatatgtgggtgaacaaaaaacattgactttgtagcatgtatgcggttttgtataactgaaattgggccttctcttgcacacaaaacatatagacactcatgccattgtgctgctacaaagagcatagacgctgcatcattgtgaataccataaaaaatcagatacaggtactccatgcttccctttcgacctgactatgaattattacatagaatggcactagaatctaatgttgttaatgacggatggcggttcatggcgg

SEQ ID NO: 26277 - DNA, 437 bp, Glycine max
  unsure at all n locations
taaactcgaaccaacttgagctatcattcctcanaaatttaaaactaaacttgaacctatgtttnggctaggngnaccagctccaaaccaaggttcattgttatttgaattcataaaaaagttccattaattatatgaacacaaaatacattacaattgtaataaatagctagaattatctacgtaattcaatcagtcacattccctccacatgatcacatgttagtagcaagtgcactagtataaacaggcctctaacttttaaggttaatagcttaataagttaatctctattaagctgaaaaattttgttcaactcagcttatcaagaataatatttttgaagattttatcggtttaaaacatacagaatttgttctatagttctgtagaggattaatgacactaataagtacatttaaaggcaattagataat

SEQ ID NO: 26278 - DNA, 404 bp, Glycine max
agcttttaccttatcgtctctcacaggctttagatttgggagccaatccaatccttgtgttcggactctcagccacttatgatagccgccgatgatcccattactggtttccctaagctctctgtgctttcttcatgccgcatcccatgccttgcgaactccttggagtaccctcgcggtgtggtcacttaaaccccgagcgatgaaaggcgtgatgctttcgtctgatggcacatctctcatggggtagccaagctgtcttatggcaaggaccagattataattaatacaagcccttgttgccatctagagaacatttggacatgcttcgcatgaagataaaatgctgagtcttccttccttctagcgagggaaccaattagcagacgcccctccatgctagc

SEQ ID NO: 26279 - DNA, 297 bp, Glycine max
  unsure at all n locations
tgcctcaaggaggtccaggaaggacaaggcggccgaagtactagntcctttcctgagtatgacagacaccgctntaagagcgctgtacaccagcagcgcttcgaggccatcatgggatggtcatttctccgggagcgacgcgttcaactcaaggatgacgaggatactgatttccaagaggagataggtcgccggcggtaggcatcactggttacccccatggccaagttcgatccagaagtagtccttgagttttatgccaatgcttggccaacagaggagggcgtgcgtgacatg

SEQ ID NO: 26280 - DNA, 402 bp, Glycine max
  unsure at all n locations
agcttgcttaatttggatttcttngagcgagaagttgaccttggaagtacttgtcaatgcgactgtaccatgctctcagtgcttgatttagtccataaaaagccttctttagcttgagaactttgtcttcttctaatttcacctttaatcccaacggttgttcgatgtacacttcttccacgaggactccattcacgaaggtagacttcacgtccatttgatgaattctccactagtgttgagttgcaagagagattattactacgatggtctccaggcgagcgaccagagcaaacacctcaacataattgataattgtgaaatttgagttaatttgatagtcaattatggctaagaatgattggaatttctttactttatcgtttatttaataaaataata

SEQ ID NO: 26281 - DNA, 437 bp, Glycine max
  unsure at all n locations
tactcacgcttgtaagagcttggtcacttcctttntcaccacatctagtatgacggngtttagtcgtttctgtggctacctcactggcttagctgcatcctctaaaagtatcctatgcatgcaggtagatgggctaataccaggaatgtctgctaaagtccatccaatggccttcttgtgcttcttgagcaccggcaacaacttctcctcttgctcaacatcaagggaagcagagatgatcactggaaatttgatgcaatcctaccccgcaagggcattggatagaagactccaagtagattgggccagagatccaagggaaggccctagggttctcatgagccttaaggtagattntgagcccatgggctaagtatgagcccgcttatctttgtaattattagaataggttttttccttcgtttaggccttgtatt

SEQ ID NO: 26282 - DNA, 403 bp, Glycine max
agctttatggtttttctagcattcgacgggagtcgtcgggaggtgatgggggagatttatctcccagtccagataggaccccacacttgtcaggtcacctttcaagtgatggatataaaccccgtatacaactgcttattggaccgaccatggatccactcgataggagtagtaccctcgaggcttcaccaaaaattgaaattcatggtagaggggcttttggtcatcatttcgggagaggaggaccttcttgtaagttgtccttcctgtatgccctatgtcgaagtaacggaggaatctctggaaatgaccttccaatccttcgaggtggtaagtaatgccttcgtagaatccctcctgacgtgtcctcacatgtccaacacgacaatcatggtggctcaca

SEQ ID NO: 26283 - DNA, 418 bp, Glycine max
  unsure at all n locations
ttatttaagccgttctcttgtttaataatttataaaatgattttcaaccgatcatttgtgttgcaatctcgtttaatcactgttaaaataaaatccaaccgatcgtttgtactgtaacctcagttaaatcaaaaaactgtaaaataatgataaaataatcaaaatatctttgaaaaaataataataaaataataaaaaaatcaattagacattttactttgaaagtttcctttaaatgagttgataataaccaagtgaaactaaggctaaaatcaactcacaaaccaagctttgcccgcaaaaatcacttgaagttgttttaaggtccaacaccttanacgatcacgaagaactacataggtctgagttcctcatcgcaattgaggatacgtangagcaaagtcccgtttttgtggac

SEQ ID NO: 26284 - DNA, 406 bp, Glycine max
agctttcaacttatgagcttttacaaacaagggtgttctcgctttcaagtgtgtgctgagaaaaatcagagagacaaaaggtgtagcttagtgagagagagagagttagtaataaaatatagtagtaaataattttaaaaagttgcttttgcatgcgtgtggaataaaataaagcaagaaaaatagaaaattctgatactgttgttaggtgatatttatgcttggcggctcacgttttattccgaccttatggatatactaaattttagggaaaccataaggttgttttaatgtggtaattattcttggagattaatgtgtattatgggcttttatattatagctacaactttctataaatattaaagtgctattcgtatctccttctttacttatagcacctttt

SEQ ID NO: 26285 - DNA, 337 bp, Glycine max
gagcattttccaaaaaggagaacacgcgggagtcgccaccaacaattattcgagggaaaatgttagaaaaaccaaaagaaggtttgcgaatttcaaaaatgagggttcgagagttgtttacgcatgggaaaggtattagcaccccatgtgctcgtcacaaaggacgacagccatcaatcgagtgtgcaaaaaatgtgacttcaatattatttatttttcccttttcatatttattttttatttttttggggttgacaaaggggtcgccctggctcctacgtatcctcaggtgcgatgaagaattcagacctacgtagttctttaagtctgaatgttt

SEQ ID NO: 26286 - DNA, 392 bp, Glycine max
tcaagtgtttttaatgcatgtgaaattacaaaactacccataatacaaaaaactagtcaaagtgcccttaaatacaagggctaaaaaatcctacattactaaggtatccttcctacactatggagcactaaatacaagaccctaaaataatgaaattctaatctaatatgtacaaagataagtgggctcatacttagcccatgggcccaaaatctaccctaaggctcatgagaaccctatggccttctcttgcatctctggcacaatcttcttggagtcttctatccaatgcccttggggggataggattgcatcactaggggaaatctcaaatcaaaaagtgtcatgcttactatctatcaaagaaatcatatggtatggcatacaaatct

SEQ ID NO: 26287 - DNA, 427 bp, Glycine max
  unsure at all n locations
tcagcttttatttcctctnttctctntctttttcactcctactcttttcttcatcattattcttttcaactttatctttttcctctttttctttgtcttttcctacctctatttctctttcttggtcttttaattctttcttttcgaccattatttgttttccctcctctgactcattacatctgttacctcattcttctttttaacagtagtgtccttcaaagcaacttgctccttcaaagcaacaacatcttcatcctgagccgccacaagcttcctgcttcttgtcgcaacaactttacactcttctttgggattcttctcagtattttccccaaagcaattggatgacttctcagctaactgcttaaccaantgacccacttgaatctcaagggtttttaaggctgactcagtactcttatgg

SEQ ID NO: 26288 - DNA, 342 bp, Glycine max
  unsure at all n locations
tcagctttcttgatatgctgctatagagattggatctttgagcttcacttagggccttcactggtgatctctatccatggactggcatcagccgattactgataacaatagagaggatgcgccatctactatggaatatgccatggaatgagaaacttctccaccaccatagcgccttggatacttagcctacagacgaagcttcgctggatgactataatgagggacacagatagagtgaaagaggcatggcagattgatggaagaacaagaaatataatgaactctgacgcgtgtctcactctactcttattcaacacagncctgacatgagttacacat

SEQ ID NO: 26289 - DNA, 391 bp, Glycine max
  unsure at all n locations
tgcgaggattgatggngacccggtgttatagaaacgattatatgttctacgtgggagtacgtgagctcacttggaggtgggcaacaggggatggggggtttatgcgcgatttgtggatgtggaaaacttgttgtgcaccatcgcccgaccgccacctagtaccacatgtgatgggtaccccataatcctacaagcttgagatgaggaagtgtanaaaggtgaaacttcctgcttttattcggtgaccacaaagtggtacctggagatatgtcgcggnggtcaacagaccttggtgacgtcaggtggagtgctattgcccaaaaccaaacttgaccaatcccgacccaacctcggcatagtcagtcagtgagaatctgtgatgcacctaaac

SEQ ID NO: 26290 - DNA, 395 bp, Glycine max
  unsure at all n locations
agcttgtttntaagtttggagtatagttttatagttatagacgaaacaaaatttagagaatactttagtgtccaacccaaaaagattcagaatctgtaagacaatttttcaatttcgtgtgtttaattatggcctttaagtaagaagctcaattcatctaatagaaaaagtaagcaaattgagccatctaaaacaatgcgaatgttgcaagaagctgcccaattctaccaagttgttacacgcgtgcgaggacttactgatcagaccttgattgagtaatgtttaagcattaacaacgacaacaaaataagaattgtgatacatatcgatgttatatcacactacacgtactgtctactttccacaggagaaaagtctgcatatgagatatataa

SEQ ID NO: 26291 - DNA, 388 bp, Glycine max
  unsure at all n locations
aacatttgtcatttatcattttgcatcattcntccaagagattgcaattcatttaatatggtttagaagtgtccaaacatgctttgcatgtcttcttcatcctctatagtaaagagttcatacttattgcttttgtgtgcttttctagagccattatggagccctaaatacaaccaccaaatataatgacatcctactctagagccattctaggtttctctttgagtcctagctngcttttgtgtgcttttcattgctttaattgttgaataatccttgaaaatttgtcttgttgaaactctattggtttagctntcacttcattntttttgtctttggttattgcttgtctctnntgttccttgcttgtgagttgccatatagggaa

SEQ ID NO: 26292 - DNA, 393 bp, Glycine max
agctttatcagttttgatcaagatggatcatgaagttgggggaatctcttgctgcaccagaagagctttcaagtttaaactgaaatagttctttcttcttcctgagcttctttgctcttatgttttggccttttggatattatgattgagatatcatcaggttgctgagtttttctatggttgcaaacctttctgcgaagtgatggtaggatgaattggatcaatcacgaaaacaaaagtaaacaaaaaaatatattggactattggagtaattacaaatgctagcaacacatcctttgacacatctttttgaacactctactactggctgaaatttattgaaattcactcaaattgtggtgagtgccacttatcatataatgaatttctctc

SEQ ID NO: 26293 - DNA, 392 bp, Glycine max
tgtaggattatggggtacccatcacatgtggtactagtgtggcggtttggcgatggtgcacaacaagtttttccacatccacaatgcgcgcataaacccaccatcccctgtagcccacctccaactgagctcacgtactcccacgtagcccatatcctcgtttgtctcaacaccgggtccccatcaatcctcccaagcttccccaacatcaaagtaatacaacattcaaacagtacaaactatcacagccaagaaaacagagcagaggcagaaaactctgccataacaccaaccgaaatcacagcttttctcacttaaagaccccagtaacaattccttcggtccaattcgttaaccgttggatcgactccaaattcttactggaagactct

SEQ ID NO: 26294 - DNA, 215 bp, Glycine max
  unsure at all n locations
agcttctgacgattggangngacggcacccacttgcatttgaaacccaacgtgcagatacactggtaatagaccacgaatatattgaagtcgattacacaattcacaaagcattaggaacgctgcatatgcagataaaagcggttgaaatcaaactatacgactggtaatgagttatatgtaattgagtgtcgattaccaagatagaaatactct

SEQ ID NO: 26295 - DNA, 289 bp, Glycine max
tctaacgcagcggactcaccgaggattgtttccatggtttttccttttgagcctggaaaccctacccttgcaacgaagctcactacgcaccttaagtgaacaaccatgatatcaccctatgcttactgaataaaggagcttaggaattgtcttaggaagaaggctgtggggggcgcgtttcattgaacaactaggatagaggcgctgcttcacgatgaaaatcgggccatacctgatgacattgcatattggtaaattgcggacatgctgattgaaaaggtggacctca

SEQ ID NO: 26296 - DNA, 384 bp, Glycine max
agcttgtatggttaaagtctcacgattgtcatgtgctcatgcaacaattgttagccatggctatacgagacatcttgccaaacaaagtcaggttagcgataactcgcctgtgttttttcttccatgctatatgtagcaaagtcattgatccagtcatgtttgatgagttggaaaatgaggcggcaattatattgtgccaattggagatgtattttccccctgctttctttgacataatgattcacttgattgtgcatctggtcagagaaatcaaatgttgtggtcctgtttatctacggtggatgtacccggttgagcgatacatgaagatcttaaaagggtatatcgtccagaagcatctattgttgagaggtacattgcaga

SEQ ID NO: 26297 - DNA, 378 bp, Glycine max
  unsure at all n locations
ntgcataccccaaggatcctttaagaaattacttgtgttatagagccatgagggtgggctcatgggccactttggaatagacaagacccttgtcttactcaaagaaaagttttattggccccatatgaagaaagatgtccataagcattgcactaggtgtgtggcttgtttacaagccaagtctagggtgatgcctcatgggctatacacacccttacccatcccatctgcaccttgggtagacattagtatggactttgtccttgggcttcctagaacccaaagaggtgtagactctatctttgtggtggtggataggtttagcaagatggcacactttatatccatgccacaggtggatgatgcttcccacatctc

SEQ ID NO: 26298 - DNA, 177 bp, Glycine max
agctttgttttatcgattacatgtttcaccgacaagttttgaataaaaatcaaaagatgtaactcttccaatggttctcagattttcttaaggtcataactcttccaatggttttcttgaccagacatgaagagtctataaaagcaagaccttgactcgcatttaaaacaaccatta

SEQ ID NO: 26299 - DNA, 395 bp, Glycine max
tcaaccaagtggagatggttcatttcaagtgcttgaattattcaatgacaatgcttacaaagttgagctgcccggtgagtataatgttagttccaccttcaatgtctctgatttatctctttttgatgcagatggagaatccgatttgaggacaaatccttctcaagagggagagaatgatgaggacatgaccaagagcaagggcaaggatccagttgaaggacttggaggacctatgacaagggcaagagcaaggaaagccaaggaagctcttcaacaagtgctggccatactatttgaatacaagcccaagtttcaaggacaaaagtccaaggttgtgagttgtatcatggcccaaatggaggaggactaaatgacaccactttgtttcaatt

SEQ ID NO: 26300 - DNA, 468 bp, Glycine max
  unsure at all n locations
ntgagcttgatcctcaaggcattgcagctctggcccgggatcctctgagccgacgctgctgcatgcaagcttgcggctttcggactgttctgtccaagagatacgacggggatgtggactcgcacgactgatgacgatgggattgccagacatcttgactagcataccctagtatgccaaactaaaccgagcatgtacttcatgctgtttgcgacgaagacagtggtccacacatgcttgatacgctggatgttgaaggcggtaatttagtgagccatttggcaacgcggtttactcctgcggtattgcacacggactgacctgaaagctgctaagatcatcaagatccaaagactgcggccgggctacattctgcgttacgaactgcgggcaacgatatatcagcatgacacaatgggcatgtgtgaccagtgtatatatggttctgagcatcactgacagacatat

SEQ ID NO: 26301 - DNA, 487 bp, Glycine max
gcccccgacgccattgacccatgatgatcgcgttgctatcgtagactcaaccttgatcatatcgaccggaagattctcacccattgagggtttggcacgatttttagagtatcgtaagagagggcggcgttctgcgtcccatccgagtgagactcaagctagccgcttgcacataaatgtatgcatgactcggtatgtccaaactaccccatcatatggatctatgttgaacaagttatctatcatcaccttataagatgatgcgaccataccttgcactcccataggaacttcgatcggaacatgcattactatccgctcctgattgcttctttgaggaactctgatctgagatgattattctgcaggcggagagttggatatgaacatgtatctgccatgacaacttaattgctctgcaccttaggataggtctctatgagctgcgctctctgtatactagactagactacatagccaaatgcgg

SEQ ID NO: 26302 - DNA, 367 bp, Glycine max
agcttgtaggattatggggtacccgccatatgaggaactatgtggcgatcgggcgatggtataaatcatctctccacatccacaaatcacacatgaatccactatcctcagttgcccaccttcaactgagctcacgtactcccacgtagcccttatcctcgttactctcagcaccgggtccccatcaatccctccaagctttcacaacatccaagcaattcaaaatccaaacatcatgaactatccaaaatctagaaaacagggcagaggcaaagaactctgcccaaaacacattccaataccacaactttctctactcaaatacccagtaacattttctttgtccgcttcgtaaccgttgatcgac

SEQ ID NO: 26303 - DNA, 405 bp, Glycine max
  unsure at all n locations
cttgacgctggagctgacccatcaactgccgtaactattttccaaagngttttacaacccagcgcgaagcacaactccgacatctatcatgggtggaatggatgaatgcatgatgaaatgcatatgacacagatgcatttatgaatatgggagcccgggaaattgtccctttcttagatacagcattcgggtggcatggcgcctgacacatgcattcaagaaggcgacacggaccctacgttggtttgacaaagtgaggggatcaagacgctatccgtgcatgatgcagatgcgaaaggcacaacacggtgatgcacatagtacgacaatatccacaagttattataagcaaaggcgtacatgacatttatgactacatgcatggcagtgttcaaaatggcacac

SEQ ID NO: 26304 - DNA, 608 bp, Glycine max
  unsure at all n locations
tagcacagctcttgctaagctctatcaagtnattctgtacnctacanagngagcgcagtgttgagaactcgatcatatgttatctgagatcttatataggcacataggcactggtgatctgccttctcggagtgagacatctcacagtatatactcgttcgatgtgtgccacatatgatgacttctctattgagagtgtacaactctgatagcacgcactactgtacattacgctactactaacantgagtcnaccgaacctctatcgtacatgtcgtcatgttgtcgataaaacaatcaccgtctacctgcaacagatcaccgctcatcagtatatacgccaccagtgatngccagcncaagttagtaatgtntctgtcgttggaactggtcatctgcgtctncaactgcgtctcttangtccaacatacgacttatccaactcctattgcttgtcggtaccccagcactctagaacgtcttcctcaaagaagacacgccacctgtcgtctactcatccatatgtgttctcgccaccttcgctgatgcgccnacntatatcataccacttgtcatacggcgtcgtgcaaacttctaatgtacttccg

SEQ ID NO: 26305 - DNA, 453 bp, Glycine max
  unsure at all n locations
gccaagagccatgaccctgtgaaccttgaacgcgacaccccncatgatcagcttatcggtgcacccagtccagttatgccgcattgccaatatgaaacaccccagctcgagcggcacctagggaaaaccctcaaggattcccaacttaaacaacgcatcactgtctatcatctttagaaaaacccaaattcattcaagagatatgttgtcataactcacaatcaaatactgctcttgacaggatcagattctaacaccatcagagaatccatgctctaaactcacctatgtgacggtaactctaataagagctcaccatcgagcatgctaaacgccccttgcgcagaatactccaattacccaacaaacacatatctttttttatctataaaaatccaacaccaagacattctacacgtctacagccttgaccatgcactaaccacatgtacg

SEQ ID NO: 26306 - DNA, 398 bp, Glycine max
  unsure at all n locations
agctttaaagcttttctcagtactaaaaatcctaactatacatacaaatgggtgatcaagccacaaacatgcaaaaatgagcatagatagaagcaatgaacacataaaaataacattaaatagatagtaagataattttatatcaaaggttcagcagaactccccaatcaagaggtttagccttccattacaagtaatgagctttcaatacaaaggccagattttgagggaagaaaatggctaaggagggttgaggatgtctccttcaacctctagaaccctaatctcactcttcccacctagactctcttggtggcttcgtgtttgtcgctctagcttctcccttggctctgttnttcgactcctctcttagtttccaccaacttcagtgttttaaa

SEQ ID NO: 26307 - DNA, 347 bp, Glycine max
cacattcttggtgaagaagctctatatttatggcttattacctagtggatggtagcctccactctcctcttcttcttatgcctttcgctgcatctactggagacaaatcactatagaaggacctcattgcttctcacagatccagctctccatataagctccacatgctagcctccatccctggcgctcaagacgatttgacctgtgaagatcttcaagaatttcaactaactttagtaagtcgttatatatgatcggatacacattataatgggtaataagactagctacatactgtaactatcatatcatacactcaatttgatattactgaatcatctgattcg

SEQ ID NO: 26308 - DNA, 402 bp, Glycine max
agctttcccttatgggatggaccttctaggttttgaagaggatcaataacaatgcctataggttggacctccaagaagagtatggagtcagcaccacttttaacatttccgatttaattccttttgcaggtggagctgatattgaggcggaggaactaacagatttgaggtcaaatcctcttcaagggggaggggatgatgcaatcctccctatgaagggaccagtcactagagccatgagcaagaggctccaagaggattgggctagagctgctgaagaaggccctatggttctcatgaaccttagggtagatttcttcatgctttacatgtttcatgacacctatgcacacttagtggagaatcttggacttgatcttggattagtgggctgaaccatat

SEQ ID NO: 26309 - DNA, 346 bp, Glycine max
cttctcgatatatacgtaccagattcggacatccgagagttatgacctgaataatcgaattacaccagagcttccattgctcaatttggagagactagatgagttatgtacgcgaatctgacatccgcgtgaaaagacaggaccattgcgctttcacgagagcttgcgatgttcaagggcgagcgtctagatgagtcatgcacgcgactcgggcattcgtgggaaaagccatgaccattcaactatatcgacagctgccgttgtgcaaacgcgagcatctcgatatattatgttccccacttcagaggtccgagtgaaaagcaatgaccattctaaagatcgagag

SEQ ID NO: 26310 - DNA, 399 bp, Glycine max
tcaagctttgtaacccacctccttagaaagaattacctacatatgagacaatgcatacctattaaggatgagacataccatgatgaaactaattatttcttctctattggatctaaacatgagatatgccataaaatgttatacaacatatttaaaggtaagaaaggaatgagagtagaggagttaaagacctatagtaaaataacaataaaaaagaaagatataataaacaagttaaatgatcatgattactcacccaaacgatagtgaccttcttacatggctcactttcgcctctacctttatctatcattaatataagtgaatacaatatcttcttgttgataacatggaaaagaaaatatgacattagatttgactagtcatgttggacagtga

SEQ ID NO: 26311 - DNA, 423 bp, Glycine max
tgaaagaatgcagacaatctggggttgtctgtagagaattactttgttgctatgagattaccttctctatgctcttcctatgtttataaatgaatcaagcagcctcaagatgtcaagaagtaaatgtggttgactgagaattacataaacaggttgggcttggttgccttgtatgttgttttgagcttcctagttgggggcctaaccttcttgaacaccaaagggaacttgatcttggagttgtggaactgcttggtgctctcccttttgcaaagtttagctgggatggtggcagttttgatgatctggatgcatggagacctgactctatgacgagatgccatttcgttgtacatgtgttcaacagcgccgtttagagtagtatcgcgatattccttgtacatgttgtgataaccagttcgg

SEQ ID NO: 26312 - DNA, 397 bp, Glycine max
agctttaagtgtgttgattgaaaatatagagtgaagaagagaggtaagattatttaattcttctcatggagaagatgggggatatgaagaaaatgagggaggatggaggaatgagaggtataaggagagaagaaatcatagaagatatggaggtagacaaagagatgaagagattgaggaagtgaaggtgaagatacctacttttaaagggacttgtgatccagaagtgtatcttgagtgggagataaagtttgagcaagtctttgcttgctacaactacaatgaagaaaaaaaagatcaaattggcctccctggagtttgaggtgttggatcgagtggcctcagaataattaagaaggggggttgaactaattatccctaaacctttactaattaa

SEQ ID NO: 26313 - DNA, 410 bp, Glycine max
tcatgcttaactatgtatggcaaaacttcattactgttgttcaagacatacaagtgagcttgtaacaaatcttctacactcggagtgatcacctgcagtcctctagaactataatcacccactctgtcatcataccgagacttacgaagcccaacaggtttagccttctctaagtattctgaacaaaattcaatggcttcttctgcaatgtacctctcaacaataaatgcttctagacgatatagattctttctatacccttttaagatcttcatgtatcgctcaaccgggtacatccaccgtagataaacaggaccacaacatttgatttctctgaccaggtgcacaatcaagtgaatcatgatgtcaaagaaagcacggggaaaatacatcttcaactggcacagtat

SEQ ID NO: 26314 - DNA, 386 bp, Glycine max
  unsure at all n locations
tcagctttatggctgttgacctaatccatacattttttaatattatgctctttttattctcttttgatatactttgtgctntaacgacttgaattcaatatgattttgtttatcaattatttttggatttgtacattacttatacgaaattttataagtttctttttttagttagtatttcactaggttttaaaataattaattaatcaaagacgtctttaagcaagctnttaaatatgctcgtgggccaagccagacttttatgtaagccgagccgagtctttaaaaaaagcctatgataggtaatgagccaagctcaagccttacgtattcaactcaagctgagctcaagcttagtaaagcttggtttggcttgctcatttcac

SEQ ID NO: 26315 - DNA, 419 bp, Glycine max
  unsure at all n locations
ntacatggagctacatcagttcacacattataggtcaatgaccaaaaagaaataatcattcaagctcaaagtggtcaactaggggaaaacttatcaaaggattcacaagtcttaagaaagcctatcaaggtctcttcttttcagacaattcagaattcattcaaggatatgtatgtcaaaacagagaatagaatactgctattgaaaggatcaattctcacacaataagagaatcaaggctcagaactcacctatctgagggtaactctaagaatagttcacaatcatgcatgctaatgtcccctcccgaagaaaactccaattacccaataaacacattactttttttatcaataaaattctaaacccaagacattntcacagtactagaaccagaacaatgcaagagatcacatata

SEQ ID NO: 26316 - DNA, 392 bp, Glycine max
  unsure at all n locations
agcttggttgttgttcttacccattgaagatcgaagatcgatgaataacgaatgaagaacgtccataaacggtcgacacctttgcgaaattcctcacgaaaaacgttacggaaacgtttcggaagcgcctctgcttatattttcttcacggaaacaatttttccaagcaaattcgatagagagagaagtgcctaatgggctgaaccccttccttcttcatttcctcccctatntatagcaaaatatgggaggtggttgccgcccagctcgcccaggcgagctcagctcgcccagacgagccaggttgctttccccagaagcaacagccttctggaggaatattctggagggcccaagtgggtctgggtgctatatgcacccccatttttact

SEQ ID NO: 26317 - DNA, 155 bp, Glycine max
tagaagacattcaaatggtcataactttttccccgcatttatcatttatgaggaaggcgaggactacacgctcgatacccaacaccaagacctctccagaaaaacacattgtccgaaggattgacacggttgttctaaccatacgcaacacatat

SEQ ID NO: 26318 - DNA, 388 bp, Glycine max
tcaagctttatcttgttgaaaaggctaataaatcaatgaaggtgggtagacattgtcagactagatcatgaacaagctatgtaaggactatcagacaatacaaactcctagcctgtgaaggttcagaacccaagtctaattcatccataacaattcacacatatttgaggtgttatacctccaagctatattgcaacagacaatttaacaactattaattgctttttaccctcaaatatacaatgtatattccttatttattaagaagttcaatcatatgcgataagacataaaaaatactataatcatatcctttctgtaaggactgagagcctataaatagacatacttacgagatatcaatacaacctatataagaatgatattg

SEQ ID NO: 26319 - DNA, 431 bp, Glycine max
tgttgcccttctttattatgtaactatgtatacttgattttttcatcaatgtttttgatgtttatgttacttaattattgatgtgtgctacgtgcaaattacaaagtagtccaagttgctcaaactgaaatagttttactacaacaatagctatttaaaaagacacttttctattgatgtgtcacacatgattggatgatagtataaaaactatgaaagtaaatcaaagctaaactcgataagtttcatctgattcttgaagggatttttctaaatggctacacgtgtatagtatagttttagtcacaaaaataaatgactctttgcatttactgcacatttttacataaaattcatttaattgctatgaaatctttttaaaatggtatggtttattgtcaatgttttaaaggtgcctatggtcattattg

SEQ ID NO: 26320 - DNA, 170 bp, Glycine max
  unsure at all n locations
gtattctctccttacgcatctgtgcggcatttcacaccgcatatggagcactctcagtacaatctgctctgatgccgcataggtaaaccagccacgacacccgacaacacccgctgacgcgaaccccttgcggtcgcatacaatattactctagataaagaaggccatan

SEQ ID NO: 26321 - DNA, 388 bp, Glycine max
  unsure at all n locations
agcttgtgcactcaatatcctgatgagagtgttccatatgttctcaagactgaactaatacatttgctgcccaagattcatggtcttgcaggtgaagatcctcataagcatcttaaggagttccatattgtttgttccaccatgaagccccctgatgtccaagaagatcatatctttcttaaaggtttttcctcattctctggagggagtggcaaaagattggctctactaccttgctcccagatccattttcagttgggatgaccttaagagggtgttcttggagaaattcttccctgcatctatgaccactaccatcaganaagacatttcatgcatcangcaacttagtggagaaagcttgtatgagtactgggaaagattcaag

SEQ ID NO: 26322 - DNA, 367 bp, Glycine max
  unsure at all n locations
tagctcgcctgagcaagtttcccctgcacttaataatttataagaaaggggggagtgcagntttttcacccaaaacttatccccctcactcaagaacgcagcacccgtgggattgagggtctttctctgaccctaagccaccattttgtgctttctgcttccattgtagagtccttgatcactccatacaactaagtacattattctttggtccctaacttttcgctgatgtatttttatgctctaaattgtacatatttgcgcaatttcgtgacgcaatttgtgacaaattcatgctttgattcattgaattggggggctgtacgggatggccttatgcctatggtgtgttctgaaatgattgggc

SEQ ID NO: 26323 - DNA, 402 bp, Glycine max
agcttatgtctgttggacatggtcatgtttttacttctgttttctatgcacaatctggcattcaccccatgttgagtccaaaaccagtctgccagaatgagagttctccctttcccacaagtacctcctcccagtccaatcctgaaagtcactgctcagatcaacctcatgactgttccaatgatgctacttgtcttgatcaaaatgtaaaggataatactgattcagatcacgcaaggcatgagtctcctgctgctgatcagagtgctggtaataatttatgccatgatgctgcaaatcatgttaatagtagtgcatatggaagcatggacagtggaaatgatggacatgctacttcagctatagtatccaagaacacctcagatggtttcagtgatagtg

SEQ ID NO: 26324 - DNA, 430 bp, Glycine max
  unsure at all n locations
gaatgaattaactaggaatntaaaaaataaaataaaaatntatttccaaagnntttcgaccaatctgattggattcagctatctcactcataatccatccaatctgaagacaaagaattatcagaattacgcctgttttgtaacatattggattggtccgaattgtcagagttatacccgaacccgacccatcctcaaccctaggttataaatattaagaaccgtattaatattgatttgatttgtatgtaatgcaaatagtccatgttttcacataaaacaaaaggtaaaactcaaattatggctttcaatttaagttaagaacgtactttaattntgaaaattctaatgcacattgaaacatatacacgatataagatgcatttagatttttaaattatatgtataacatctcttttctaaaagtaaa

SEQ ID NO: 26325 - DNA, 238 bp, Glycine max
  unsure at all n locations
ccccgggaaccaaaaacgcacgcagtttcactttaaccaacaggcccaaaaggcggcgaacacagccaccccccccgagggaaggaaccggccacacaaccaccaacataccaaccggaagcacaaaggggaaaacccggggggcccaacgaaggagccaacccacacnaaangaggggcgcctcaccgcccgcccaccaaaccggaaaaccgaacggcccccgccaccatgaaacgg

SEQ ID NO: 26326 - DNA, 403 bp, Glycine max
agctttttttggaccttgttcaggcaactaactcctctttcaaaaccatgctatgtgctcgcgactggtccctttcctcccttcgcaacttgagttcattattgctaccccatagggctccgcgaaatttgttccggccatactcttccttgcgagccctcttggtctctcgttcaagggctcttgcggtaattgcattctcttcccgtaacccggcacactccttccgaacgtgtgtagcagccaacttgaacttctccttggcgagttttgcctttcctaactcgcttttgagagcttggacttcctcgtcctcttccggtgcttcaaaattctcttcgctgacgacttttaacttggcgagccaatctaaacctcgtatgcgaactttcagccattcgtg

SEQ ID NO: 26327 - DNA, 437 bp, Glycine max
tactcacgcttctacttatgtggcagggcgggcttccttcactttctattctccaacgcgagctctgaccactgttcttccttcccgcgatgcttcttttcatgtccgcctgagtgggcttatagcctaaaccatacttcccacgatttccttgggtttttatcacgctagttatgccgccattgtctttgcctaaacccatcccgggttcataaccgttccccaacataactcgggccatcattaccgccgcatcggacagacaaggttgcccaaagagggagtccacggaggaaatgctgaccacctcaaaagactggaaagcggtttctaacgattcttctgcggcttccacataaggcatggaggatgggcagcttaccaagatatcttcctcgcctgacacgatgaccaagtgcccctccactacgaatttc

SEQ ID NO: 26328 - DNA, 463 bp, Glycine max
  unsure at all n locations
aaattgaccctgaacacgcacanctcaggaaantccacngcgngacaggaganacttcaaaaacaacccgacaggtttcangctaggccccacctagaaacacggggaggataatcgcacgcaacaagcgccccaccaacacgaaagaccgccaacacccagaacgcaacgcggcaagaccacaaagaggcaaggaaaacagaacgcgcacaactagcacaagcgcgaacggcaatcgcgcacaacaaaccaaagacaaaacagcactgcaacccgcggcaccaagagcacgaaccagaccaacaacaccacgccgccacacaacagacgcaccgtacaagcgcacccgactgtgggagcacggggaagcacggaaacgcccggcagcgaccgacggccccaccccacccaacaatctcatgcgaaaggccccaaagaccaggacaggacggacggacgcccg

SEQ ID NO: 26329 - DNA, 402 bp, Glycine max
agctttaatggtttatcatgtagaagatgagttagataaaaattggagtatacccatacatctaaagtcacaagacttatacaacatgggtgaaaatgatgtgtcattttccatggatgtgagcaatttgaacatcaaaatttggaaatactatttccacatggggaaaagaatatacatttagcaaggtcttgtttttaattatcattttctttattaatttgtcattttatttactaattgtcatttatcatcattattatttatgttatttattaaattggtgtttgacttccactatgttattgtttcctaggatctttgaagatgaagaaacttttcaccaagaagactagtgcaattccacataagatcaagaatggcttttttagccaagttcta

SEQ ID NO: 26330 - DNA, 440 bp, Glycine max
  unsure at all n locations
gcttgcgcttagtggaactcattgctgaccatagtgtggttctcctcgntgttggaggaagcacccataacttcacccagcaccagctcgtagctcagttggggctcccttgttgggcgacgtcgccattgcaggtcactcggtatcacttttggaagccatgcgttgaaccccaacaccttgaggacaaggtgtatttccaagggccgtggaatgatacgagcaagctcactaaaccagatacaggggaagcaccagcaacaagggtgcaaaagggagaagagaccaagagaagggaggttaagccagcttacctggcagactacgtataaggacaaaattggaatagtgaatcagcacgaatcctgcttggtggtgtgtgcttcctcataagcagacacacatacaaaattacaaaatatgttattagtagaatattc

SEQ ID NO: 26331 - DNA, 186 bp, Glycine max
  unsure at all n locations
cctgatgcggtattttctccttacgcatctgtgcggtatttcacaccgcatatggtgcactctcagtacaatctgctctgatgccgcatagttaagccagccccgacacccgccaacacccgctgacgcgaaccccttgcggncgcatctgatataactctcctatatggatgctatacggaagtc

SEQ ID NO: 26332 - DNA, 381 bp, Glycine max
tctagcttataatattttattacgctcgaaattaaacaacggaaactctcgcgaagttcaaatagtcgtaactattcacacggatgtgcggttcgggcgcttaatatgtccagaggctcgaaattgagcaacgggagctcttgagaaactcaactgggataacttttcacacagatgcgccattgcccgcgatcacatatctagacgctcacaattgaacaacggaagctgcttgaaaagaaaatggtcataacgtttcacaccgatggccgatcaaggcataatatgtcataatctccatattccacaacatagatatctataagaaatggtctaattttcaacggatgtcgattaagcttatatatatgatacgctcga

SEQ ID NO: 26333 - DNA, 417 bp, Glycine max
  unsure at all n locations
ntaaaanttgaattaaaacgttcagaaactactgggaatttattactatatatgngtaatcgattacacagggcaaattttgaattgaaattttaatagctgtttgtaaatcagttttggccactggtaatcgattacatcctctggtaatcgattaccagagagtaaatttcttgtaaaagactttttaacttaaaattcttggccaaaccttttgctacttcaattggaattcccttcctatttaatataccctttctaagactctatagacagtcttgatcatccatcttgaatatctttaatttctttgtcttgaataaagctttgagacgcatgtgatcttttggcatcatcaaaacatcggcttgatcctttgtctacaatctccccctttttgatgatgacaatccctga

SEQ ID NO: 26334 - DNA, 376 bp, Glycine max
  unsure at all n locations
cacagaggatatgcttaccacctcaaaacattcggaaagcggtnttctatatgactccttctgcggccttccacataaagcatagaggatgggcagctcaccaagatgtcttcttcgcctgatacgatgaccatatgcccttccactacaaatttcaacttttggtggagtgttgagggaacaactcctactgagtggatccacgggcgccccaacagacagctgtaggggggttaatatccattatttggaacgtaacttggcaggtgtgagggcctatctgtactgggagatcgatctcatccctaacctctcggcgggtgccgtcgatgcacgaaccaccattgaactcagctttaagtgggatgcattgatt

SEQ ID NO: 26335 - DNA, 277 bp, Glycine max
acgtgggacctgaaagcgatcttttgattatcggaaacgggagagagttgcttaaggcgttggaccgtgaaacaacctcatcaatttgaagggagagaaccggtcaggcgttggacctttgaacgatctcttttggggaagaagcgcgaaggcgatggacctgcaacgatctctcttggatgagaaacggtcaggcagcggaccttgcacgatctcatttgggtgagaaacgatcaagcgttggaccgtgtacgaactctgctggtggctacaaaag

SEQ ID NO: 26336 - DNA, 399 bp, Glycine max
tctagcttgttcacttatcgttcgcgagtatgatatccactcgacaagggttgaagcatatgagaccttcaatcctataacgcaacgtggcagacaaaagtgggcagctaactagaatggccattattgccaatgcggaaagtatattgcgcttcactatacatgctcacacattattgcaacttgtggttacatgagcatgaactaataccaatatatagatgttgtttacacaaatgagcacatcttataagcttactccgcacaatggtggcctcttgggaatgaagcggcaattcctccttctgatgacgcatggacacttatccctaacccaactagaattcatgcgaaaggtcggccaaaaccaacaatgataaggaatgagatggattggct

SEQ ID NO: 26337 - DNA, 400 bp, Glycine max
  unsure at all n locations
tccatcanaaaatgtcttagattgcattttatgcatgcttataatggtactaaggataatattgaggttcatgagatactggttgagggtttgggatggaaagtgtatgtaactggatgtttgcatacaattcaatgcatgtaaaagcctcatgttgacgaataacaaaaattatacctttgacgtcttcattgtcaacaagttgcactactataaatatgagcatttcgtgccccactggttgtgcgtatcaaaatcaaatatctcatacttggtctagtggttgaagttggatcatttggtggatttttcttttcaagtgtgaggtcttgctttgtttgaaagaacgtatggtggnggtattgaaacgtatccccttcattntttgtattatttgatc

SEQ ID NO: 26338 - DNA, 398 bp, Glycine max
tcaagctttataagctcggagctgggagacaaaggtcaagcgttcgcgatatgcgaggatgatattccgagtactttggatttggtacgaccatgccctcctgatttccagctgggaaattggcgagtggaggaacgccccggcatttacgcaacgagcataatgtaaacctttacggttttaaaagctctatagttgggcctaggctttagagtttttccttttgttaaggctttgtgtcttttgtttttgaatttataatacaaggatctttcttcatctgttcctggtctctacccattctcattcatttgcatgtttacttctttttctgaaacggcagatccggtgacgagtcccccgaaggtacttatacctgtgacccgcctatcgacttc

SEQ ID NO: 26339 - DNA, 422 bp, Glycine max
  unsure at all n locations
tctaaactntgtacaagaatgaagctctgataccacttgttagacttgtggcctcagatatcttaagaagggggggttgaattaagatattccaaacttttctcctaattaaaaatctatcttactttttacttaagttatgaattcccttaatgacaatcttcttaaatattaattcaaatgaagcaacttgaattatgaatataaagcaataataaataaaggagattaagggaagagaaaatgcaaactcagttttatactggttcggccacacccttgtgcctacgtccagtccccaagcaacccgcttgagagttccactaacttgtaaattccttttacaagttctaaacacacaaggacaacccttcctttgtgttagagatttttaaacaagagactcacagctcttatccctt

SEQ ID NO: 26340 - DNA, 313 bp, Glycine max
  unsure at all n locations
cacaagtctctattacgccaaaaccaaaggaatttaatatggattttaaaaacaaggtcaaaggtaacattccgggtcaaatacccttatcaaaacataaagggctgaagggtgtttcggattctacaaatggaaacatcattttgaaattccgatcatgccaatgtgaccggtgtttagtgaatgccgcanaaataacctcaatgttataaaaagataacttttacaatgtctcattctctaagttttttcaaaggaagtataaaaacatcatattacagtacccaacacataagagaccctaagaggaact

SEQ ID NO: 26341 - DNA, 412 bp, Glycine max
tgtgctttgaaaattatgtgcatggaatatttttgagtttagaatgctgaactgggatcatccatttctattttctagtttagttattaattcatgaggctgcggtaaaactggtttaccttacagtttacattggaggttaaaaaaagataatgacatttatattatgggttatttaaggctcatttaaagttaagcatagggtttggttatgagcttctctctctctcccggatttagggagattcttttttcttttttcctgacagtcaacatggttctcctgtattatgactttgtctttgcgaaggtattaaaattttaaaggcaacaagtgatggtacaatacatcttattgcatttactattaatttagctatcttgaaaataataataatgatacctcctatgt

SEQ ID NO: 26342 - DNA, 393 bp, Glycine max
agctttgtccgcaaaaatcactgaaaaaccgttttaaggtccaacaccttaaacagtcctctttgcttttatcggttaacatggaccgttcaaaagcataaaaaatcaacacatcactttactgccttttgaaagaactacgtaggtctgatttcctcttcgatggaggatacgtgggagcaaaagccccgcttttgtcgacctcaaaaataaaaagagacaaaaaatttagatacatgatttcacacaactctaatctaaggctgttgtcctttgggacaaacgtgaaaggtgctaataccttcctcaagcgtaaacataactcccgaatctggaatattctttatgacagatttcctttggtttttctaacgttttccttttaataaacgg

SEQ ID NO: 26343 - DNA, 413 bp, Glycine max
  unsure at all n locations
agaaactcaagctgaggatatggggactcacacatgtttactatgtgcggncgggcgatggtgcacaacaagtattccacatccacaaagcgtgcataaacccaccatcccctgttgcccacctccaactgagctcacgtactcccacgtagcccatatctttgattctctcaacaccgggtccccatcaatcctcccaagcttccccaacatcaaagtaatacaacattcaaacaacacaagctatcacagccaagcaaaacagggcaaaggcagataactctgcccaaaacaccaaccaaaatcacagcttttcacatacaaatagcccagatacattttcttcgctcccattcggtaaccgtgagatcaactcgaaatttttactgtatgactctagtacataagcctac

SEQ ID NO: 26344 - DNA, 403 bp, Glycine max
  unsure at all n locations
agcttgctacattattaggcttacaagttaccaaatccaaggtccatttttgccttgtctttcatataagccttaatgattttgtgcttaaaaggcgcctcatgggttaaggaagaaaaacatttaaaaactactaatggcatttgaaattcattcctaaagcatgtgacttgtgttagtgtaccaaaatagtagcccttaattaaggcttagggactaaaggttttattaacctcactttcccatcctttcacatattccaatatttggaaagaaaaaaatagacccatcctttcaaatattccaatatttggacggaaaaatggggaggaattntagtcccctcattttccctcttatctcctctcaatcttaaatcaaatgaagtaaaattataaataaa

SEQ ID NO: 26345 - DNA, 430 bp, Glycine max
  unsure at all n locations
gcttcttccncaattntctataaatagggggagaagtgatgttgtcaagggtttatccccttaggcacttctctntctttcgaatttgcttagaaaaattgtttccgtgaagaaaatccaagccgaggcgcttccgtaacgtttccgtgagtgatttcgcgaaggttttcgaccgttcttcgacgttcttcattcgttcttcatcgttcttcggtcttcaacgggtaagtacctcgaaccaagcttttcgattcattctatgtacccgtggtggtccacattgtatttcgtgtattttccttctcgttttcatttactttccgtaccccttttgacgtgcttaagccattntatttaagtcatttctcgcttaacctaacaataaaataaatttccaccgatcgtttgaattgtattatccgtgaacttc

SEQ ID NO: 26346 - DNA, 531 bp, Glycine max
  unsure at all n locations
cccacccgcgcacacaacnacatagataataaaggagctaggagccgaaagcataaacaacacaaaacagagagacactgaacctganacctcgaacancaaggcgaanncnacnncgggcccggggaacccccaaaggcgacccgcacgcatgccagctgtgtaaccaaaagagccacccagaaagaccggcgcaaacacggacatagcaagatcctgcgcgaaaacgtcatccgcccacaaatccacacaacacacgaaccgagagcaaagaagggaaagccgagggcggcgaaagagtgagccaacccacattacaagcggtgcgcacactggccggagccgagaccggaaacctggaangccagctgcaataaagagacagcaacgccaaacccgagcagcagcgaaggcaaaaccaaccccagcgccacagacagtaacgaacacggccatcagacgctagcacactggaacgcaatcagcgaacgcaagcggaccaggacagccgagaaacaacgcccgcccgcg

SEQ ID NO: 26347 - DNA, 295 bp, Glycine max
  unsure at all n locations
cccccccccacgacgagagaaagaaggagaaaaaaaagatgacgacgaccgaaccaanacaccgacgagaccaaaacgagtgcattacggaaaaaaagccggaggcaccaaaagcccagccgaggccacgcggcaagagaacaccacagacccgcgcaaaaacaagccaagccacagaagaggaaaagccaagcacccgagaaggccaagacgagggggaaccggcagggggccgagcaagagagaaaagcacacccagaaccgaggaaaagaaaaaagagggaaaggcgagagc

SEQ ID NO: 26348 - DNA, 486 bp, Glycine max
  unsure at all n locations
agggcccgaggcncattgacccatgatganccattgtancnatcgaacancacnganacncaagccccnaacggacgaaagagcanagcgcttttatcgcggttttatgatgtttacgccaggcnnacgggacccgaaatgctaccacagagtaacgaacaagtgaacctgattcgacagaagataaaagcatctcaggataggcacaagagctattatgatagaaggagaaagccactagatttccaggaacgagaacatgtgtttttgaacgcctctcccgtaaccacagcctgaagagctctcaaggctaggaagttgacacccaagtatctaggcccgtatcacattctgaaaaaaacagcgcttgcaccttatcatatcgccttacctcccaggtaatcgaacttgcatcctgtggtccaagcgctcaactgacgcggacaacccagagccatccatatacttacactggacgccacacag

SEQ ID NO: 26349 - DNA, 469 bp, Glycine max
  unsure at all n locations
nagactacccgcagctttgcagctgacttgncgcaggacgcgggacgacacaaaggagcatgtgtcacgcngaccaagcacaacgacgagaggtgcccagaacattgtggatattggtacggacacactgtcccgtcactgtaattatcatgctcggtggcaaattgtgcagagatgtgagcgaatcgcaccaccgccatcttagcgcaacagagcactaaccgtataacctcttacggtgtttagaaaggctctatatattgggcgctacgctttagcagtgtattcctctctggtaaagcattgagtacttttggttttgaatatataacacaaggataatgcttcatctagtcctgggctctacccattcccatacatatgcatgtgtacttcttttactgaacgggcagatctcaagaccagttcctcgatcgaactttatcttggaacgcggtctctactgccg

SEQ ID NO: 26350 - DNA, 94 bp, Glycine max
caaatcaccacggaaagatcttggctgatggacagcactaccgacaactttatacaaaaacacttagtccaccaattgggcgctaccagaacta

SEQ ID NO: 26351 - DNA, 406 bp, Glycine max
agctttcttcaattggtaatcagagcacaagagcttcaagtaggtgctccttaaatctccattaatttttcttgctttaccttctcttccattgttgtttcttcattttttctccatgtatctcctcatatgtcttgtgctaaattttgttaacttgattctttagagtttccatcgattaaacttgctatagaagctacatttgattttctatggttcaaatttcttgttcttgttcttgaaccatgaattgtgttgagtttaagatcctttgagttttgtcttgttattttttgtggctgaaacctaaatcataaaattcttacaaaaatatcaaagtagaagaaaacctcaaaaatctagagtgacttgttcacctattgtagttttgtcatagaagtcatgt

SEQ ID NO: 26352 - DNA, 358 bp, Glycine max
tagaacaatggaagctgtcgagaaattcaatgtgtctatcttctttaacggatgttagactcggacacataatatatcgagacgctagaaattgaacgattgaactctctcgagaaattcaattggtcataacgtttcacacggatgtccgattcgggcgcattatatatcgtgacgttcgaaattgaacaatggaacctcttgagatatttaaatggtcataactgttcacacgaatgtccgattcacggacttaatatatcgagacgttcgaaattcaagaacggaagctttcgtgaaattcatatggaaataacttttcacatggatgatctagtcacgcggatcatatattgtg

SEQ ID NO: 26353 - DNA, 137 bp, Glycine max
  unsure at all n locations
ctgccgggccggagagaaaaatcatgccgacacctcatatacaatatatgtctacgtacgatattatgactattaacgcgtcacaccactcgtatagggctccattatctagcttagaagatacgctccgacctgcn

SEQ ID NO: 26354 - DNA, 124 bp, Glycine max
  unsure at all n locations
actctcagtacaatctgctctgatgccgcatagttaagccagccccgacacccgccaacacccgctgacgcgaaccccnttgcggcgcatcgnagataacttcgtataatgcgtgctctacgaa

SEQ ID NO: 26355 - DNA, 390 bp, Glycine max
agctttctaacaaaaattgtcatgcaggtggaccttcttctagtaattccgacttacagcagcctcctatccctcttccatccccacctagagcaattccaaacaaaaagatggaagaagtggaaaaggagatcttggagaccttcagaaaagtcagattccaagatatgccaaatttctaaaggagttgtgcacccacaaatggaagctcaaaggcaatgaaaggattagcatgggcagaaatgtgtcagcattgataggtaaatttgttcctcacattcctgagaaatgtaaggacccaggtactttctgtataccttgcattattgggaacaataaatttgagaatgccatgctagatctaggagcatcagttggtgtcatgcctct

SEQ ID NO: 26356 - DNA, 419 bp, Glycine max
  unsure at all n locations
tggagaggatgcttcaatggaggaatttatagaggcagtgaaagagtgagggggagcacgaaattgaaggaagaaaaatggagagaaggtgaactttgagttgtgtctcacaagactctcattcatcaaagttacaacaagtgttacacatgcttctatttatagactaagtagctgccttgaaaagctttcttgagaaaacttccttgagaagcttctttgagaaaacttccttgagaagctagagcttagctacacacacccctctaataactaagctcacctccttgagaagcttccttgagaagattcctanagaagctagagcttagctacacatacgtgtgtaatagctaagcttacctgcttgagatgagaagctagagcttagctacacacccnctatgatagctaagctc

SEQ ID NO: 26357 - DNA, 395 bp, Glycine max
  unsure at all n locations
agcttgcccagagaaggagtccacggaggaaatgcttaccacctcaaaagactggaaagaggtttctaatgactcctctgcggcttccacataaggcatagaggatgggcagctcaccaagatgtcttcctcgcctgatacgatgaccaaatgctcttccactacgaatntcaacttttggtggagtgtagagggaacaactcccactgagtggatccacgggcgccccaacagacagctataggggtggttaatatccattatttggaaagtaacttgacaggtgtgagggcctatctgtactgngagatcgatctctcccctaacctatcggcgggtgctgtcgaaggcacgaaccaccattgaactcggctntaagtgggaggcattgaatg

SEQ ID NO: 26358 - DNA, 428 bp, Glycine max
  unsure at all n locations
gacctataaaactcagcttattggacaaaggcaaactctattgnnggatatgatggagaagcagnacttcttggacctgaaatgctacaacagattaacgaacaagtgaagttgattcgagagaagataaaagcatctcaggataggcagaagagctattatgatagaaggagaaagccactagattttcaggaaggagaacatgtgtttttgaagggttctcccgtaaccagagtcggaagagctctcaaggctaggaagttgacacccaagtatctaggcccgtatcagattttgaagaagattgggcttgtagcttatcatatcgccttacctccgagtttatcgaatttgcatcctgtgtttcatgtctctcaactgaggcggtacaacccagatccatcacatatacttacagtggacgccac

SEQ ID NO: 26359 - DNA, 398 bp, Glycine max
agctttataagctctggttcgggagacaaaggtcaagcgttcgcgatatgcgaagatgatattccgagtactttggatttggtacgaccatgccctcctgatttccagctggggaattggcgagtggaggaacgccccggcatttgcgcaacaagcataatgtaaacctttacggttttaaaagctctatagttgggcctaggctttagagtttttccttttgttaaggctttgtgtcttttgtttttgaatttataatacaaggatcttgcttcatctgttcctggtctctacccattctcattcatttgcatgtttacttctttttctgaaacggcagatccgatgacgagtcccccgaaggtactaatacctgtgacccgtctatcgacttcgag

SEQ ID NO: 26360 - DNA, 371 bp, Glycine max
tatactccctttcgggtcacttagccccgaaaacattatgtattttgtgttgtattgcaaatcaccaagtagtgatcttggttgatgggagcagtacccacaacttcatacagaaacacttagtccaccaattgggcctaccaacacaaaccacaccttctctcaacgtcatggtgggtaacgggcatcacctggattgtcgccatgtctgtccagcacttgcagttcatattcaggacattgtcttcaatattgacctacatgtcctgctcctgtgtggtactcacatcgtattaagtgttcaatggttcaaatctctttggccggtgctaacggattataacgacttatccatgaagttctctcgcaac

SEQ ID NO: 26361 - DNA, 387 bp, Glycine max
  unsure at all n locations
tcaagctttgagggtgcgcagccaaccatcttttcatagtagagtaccgataatgtgtctaccatcacgattatcttctccctttttgcacatgttctgtagttgcatcctatccggaaccatatcagaatagtagtgatactgcctaacgaaggcaaccattaggtccttccaagtatggactcgggaaggttccaagttagtgtaccaggtaacagctaccccagtaagactttcttggaagaaatgtattagcaattcctcatctttgcgtatgcccttatcttccgacaatacatctttggatggttcttggggcaagtagtccccttgtacttgtcaaagtccagcaccttgaacttgngaggggtgatgatattgggtact

SEQ ID NO: 26362 - DNA, 401 bp, Glycine max
tgtacaagaaagtgtcatttatcggttcgtatctcggttgatcttgaagctggtaattaggctgatcgcatgaaaatgctgtctgttgaaaagattgctcatgcaatcccccacatacacttgaactgctagaatgatctttatcatgcagagatggttcaagctcaatttgattattgaatctttcttcaaagaaatccatgataaaaagatttttaggtgaattaaaaccttcagttgcacttattccccagtttgaccaatagtctggtgaaggatgcctgtccaataaatcctgatctctgggaaccagataatcattaatgccgttcccatagtaccaatccatgatctagtatctgcacatcacataggatcaaagaaaatgaagattaacatgt

SEQ ID NO: 26363 - DNA, 341 bp, Glycine max
aacttcaatggcttttccctttgccgcttcggcgacgatggtgtcaccttctttgacctctctccctcgcgtctcccttgatcacttgtacacctctagtgatactgactcactatgaggtgcaacttataagccactagcataaaacctcgttggctatgtgtcaaccgtcaataagaatcttattacgtcatctagggtgcagaatgctactgactctgcccaagtctttctgcacaagagttagacaatcttggaagagaatggacagtgacaccaagatgctatgaccaaggtggcaaccttggacgtggaggtcaccaaacggaaggctattgatc

SEQ ID NO: 26364 - DNA, 407 bp, Glycine max
  unsure at all n locations
ttcaccccataattcccccaaattggctntgaaccaaattttccttttatgaatgatgctctcctacaacctaagacaaggtagaaggagataaactatataggctcaaggttcaatcaaacaatcttactttcagctcanaatgggtgcaagggataaatcaatcatgcacaaggtaactttttagctaagtggctatcttcaatcaaaacatggccttcatcatctttaatttcacgcattcattacatactcagagattcatgcaaaaaccattacttaacgttagtcgttctctcacaattaaagatcacactctcaccgggttgcggctaatgcgttccttcacaattaacctgacaaaccaactaacattnttagtcatgatcctaattccatgctctttc

SEQ ID NO: 26365 - DNA, 355 bp, Glycine max
ttagcttctattttcaatatggagcggctcgacgtattacaggactcaatcggacatcccttgatcatgggattggcgactgaaattgctaccagctttcgatctcgagtaggagcaactggatgaacttccggacacaacgcgacatacgggtatgaagaccttgacggttctataagctctaagcttgggccctagatttagagcgtctccatatgttacgggactgtgtctgacgttctagaatatagaatacagggatcgagcttcatgcgagcctgggctctacccatgcagcgtcattagcaagtacacgactctttctgacacgggagatccgatgactagtcccccg

SEQ ID NO: 26366 - DNA, 325 bp, Glycine max
tataaaactcagctttagtctaatttgaattctcgaatattatccgatgttatcggacatccaagtaaaaagatattggcatttgaatttcctatgagcttccgttttcaatttggagcatctcgatatattacaggactgaaccggacatccgtgtataaagttattggcatttcaattttctcagagcttccgatctaaattttgagcatctcgatatattacgggactcaatcagacatccgagtcaaaagttattgtcgttggaatttgatacgagcttacgcattcaatatggagcgtctctcgataaattatgacactc

SEQ ID NO: 26367 - DNA, 403 bp, Glycine max
  unsure at all n locations
agctttttgtttctactattccaataatttcctagtggccttatggaatctaaaataagtcttactatgacattggtgcaatggatttttatggtcatataaaaaacataacaaagatcaagaaaggaaatccaaaaaacatgtagaaactagcttgagccgcctttggtcaaagctgtagaaaatgcagaaactatgttgctcatcccttctggtggattactagtgagcctaaactagaaaagctggcctcatatgatgtttccataatatgtcttgtaattttggcttttgttatctttagttcttgttgtgtttaatgaagaaatattatgcatgaataacttctaggatggatattntatggattgcaccaatgttaagctttttgtttctactattc

SEQ ID NO: 26368 - DNA, 435 bp, Glycine max
ctcaagcttccacgtgaagtcgccagcagcactggcgggttgggcttttacgtgtcttttgcccattaagtcaccattcgagcttgcgttttgcatgcaaaatgcatgcagcccacgtagaaaagagcaccatgccggaaattgttccaaaaggaccccatttggggaataagtctgcaaaagggaaccattttgggaaatttgcctcactacttaccaaaactagagaatgactttcgcatgggataacagctctccaactacagttcttcataattctctcttcacaatatttcacacaaacgcaccagtgctctgtgcttatttataagacatatgaataaatcaatttattttttattataaaactttatttcatttctttcttcattaattcttttattaaaatattcttatttactctaataatgaaat

SEQ ID NO: 26369 - DNA, 395 bp, Glycine max
  unsure at all n locations
agcttttatatatatttggatctcctattattttatgaaatccataattttgaaaagtttaaatatatatttggtcatgcaagttcaccattttttaattttgattccgatatatttttttattcattttagtctttgtaaatttatgttttttttttaattttagtctcctaattttatgttttttcaattttagttcctataaaaataaattcatagggactaaaaatgaataaaataagttttgggatcaaaattgtaaaagtacaaacttagaggactaaaaataaatattttttttttacaaaaataaaaattgaaaaaacataaatttacaagaataaaatacatatttaaaccattntaactaacattgtggatnttgataaataaga

SEQ ID NO: 26370 - DNA, 426 bp, Glycine max
actcagcttaacaccgaaatttagttaggctacttggtttctgtttttaaggaagatttagttgcttgtctatgaatatgttcctaataaaagccttgattgcttcatatttggtaagtttgaatatctgcgaaattagattgttagtatatgtctattaatttagttttggttcaagacacaccgagtactaatattggtttaacattcatatggttgtggtgtgtatgtatagatccaataaagaaaacacaattgaattggcaaaggcggtacaaaatcattgaaggtattgctcgaggcattctctacctccacgaggattctcgattacgaattatacatagagacctcaaagcaagtaacattctcttggacgaagagatgcatcctaagatatcagattttgggatcgcaagattggtc

SEQ ID NO: 26371 - DNA, 280 bp, Glycine max
  unsure at all n locations
agagtgacacacacctccgaattcaaaagcgagccaacaacaccacgttggatctcacacccacacacctgactaacgacacagctgcttctattcgacccaaactactacgtctacatgttatccgtcttactatatccgcgagacatantcacgcatcttacgatgcagatcatgcccctcaaaccttcattgagcgcgccttagcacgttcaagcgcaaagatatgttacacggaccgagcgtgaaaactatacacctgcgtctttgacttgccatg

SEQ ID NO: 26372 - DNA, 485 bp, Glycine max
  unsure at all n locations
agagtnnccatgacccttttgtgaacgtttgaanacttcgacacaccccngcancnncagccatacacccaggcaacgcannaaggatgatgcgcgcattagacatttttacacgcaccaagccctcgagagcttggcctatcaactgcaagctaagcagtggtcctacatactcaaagacgggctgtatcaacactaaaaccggacgagatacataaaaggaacgaacgatggagttaaacaagattaaaatgtgcagagatgagcatgtcttatgagagaaggacctcatacgcacacttagaacacagtatacgtgcccgagagggactgctaaggacacagagaatattcaaactatattcacttacttagagaacccactcacggcgagcatcagaacaaaatatattgtgacactctgcttaagaacatctacccacactgtcccaacagatgcattatctctgatatgacaccaacct

SEQ ID NO: 26373 - DNA, 507 bp, Glycine max
  unsure at all n locations
accgcccgcacaccaacacaagagaaagaaacggaaggaaggagggaanaatanaaaaaaaagagagaaatgaactggtaccctcgacccccgacaaacaacnagcnccgggaacaacaagacaccgcagcgtgcaactctcaaaaaaagccaaggaaacgcaacaccgcgacgccccaaagcgcananacccaaggcccacaacgcaagaagagcaccggccgcaccgaaccacgggcagagcgcaacaagagcacaccagccaccacgaaaaggggcacgacaccgagaggacacaagggcaagaacggagcaccccaagcaccggacaccagaagccgggcggaggacccaaccgaaaacacaacacggacacaaagcgacaccagagagacgcggcccaccaaccagacaagcgacgccgcaaaccaacgaaccaaaaaaaccccgaagcaccgaaccaaaggcgcaaaagacccgaggcaacacggaagcacacaacgagcg

SEQ ID NO: 26374 - DNA, 146 bp, Glycine max
aaatccaagccgaggcgcttccgaaacgtttccgtgaggaattccacgaaggttgcgatcgatcttcgacgttcttcattcgatcttcatcgctcttcgatctacgacgggtaagtacctcgaaccaagcttttccattcattcta

SEQ ID NO: 26375 - DNA, 395 bp, Glycine max
tcaagcttctcaaggaagatgtctcaagaaagcttgtcaaggaagttttctcaagaaagcttctcaaggaagctacctagtctataaatagaagcatgtgtaatacttgatgtaactttgatgaatgagagtcttatgagacacaactcaaagttcaacttctatccctttgttccttccttcaatttcgtgctcccccctctctctttctctccctctttctttgcctccattgaagcatcctttccaagcttcttatccgaggctcatcttggtggtgaagctccttcttccatggcttattccctagtggatggcgcctcctctcacctcttctcctttgtgttacgctgcatctacgtggtggaaaatcaccattaaaggatctcattgaa

SEQ ID NO: 26376 - DNA, 406 bp, Glycine max
tcaagaaaaagatggccttatcaaactccttattccttttggaattctatcaatagacctccaatctttaatggagagggttaccattactggaaaacccgaatgcaaatttttattgaggcaatagacctaaatatttgggaagccatagaaatagggccttatatacccaccacagtagaaagaattacaatagatggcagttcatcaagtgaaagtataactatagaaaaacctacagatagatggtctgaagaggatagaacacgagtacaatacaatttaaaagccaaaaacataataacatctgccctgcgaatggatgaatatttcatggattcaaattgtaagagtgctaacgatatgtgtgacactcttcggttaacacatgaaggaaactacaatg

SEQ ID NO: 26377 - DNA, 396 bp, Glycine max
ttaagcttattagaacaacaatgcctcaatcatttccaaatatgcatgggaattgggacgcatcaacaagaatcaagccaaggctattgtgcaagcaatcaatggggcaaaacacaccaaatgattatgatgatggatggctcaaattctcacaaaggtaaactcatcactttcaaattgagctttcaaaactatcatgacatgtagagaagaatcaaggatttcaagtcacaaaatgtcaagaacttttattttcaaaacaattacccatttcttgaacatatcctataattcaaagaaaaacatgcaaagtcgtacgtgcacacaaaattgaccgaaaatattaaactaaaaatccgacgaaactaacaacattaacaaagtaacacaactaac

SEQ ID NO: 26378 - DNA, 406 bp, Glycine max
  unsure at all n locations
taggtcatttattgagcctgngacatttgggctgactgtgtctttataggtcttatggctggtcttggtttggccagcgtttatgactatagtcggattttctggttcaagagacctttttattttattaatgtctgcggtatttaattcaagggctttttctgcttcttcccttgaatagaaacctttatagattgtgctttgaataccctcctttgcaagacaaaggtctttaaaattggtataaacacctttacgcggttctggtaacagaacaaaagctgtataaccttttccagaaggagaggcttttgtaagaaagtgaactccttggttatctgcaatgcacatattgaatagagcacagatgatgcccttttttactgaacaaacaaactgctcatta

SEQ ID NO: 26379 - DNA, 385 bp, Glycine max
taagcttgggttcctatgcctagaatcgcatatgggcactcatcttaacctctacgagctgtccctatacatatcaatcagccccacagtccaaagctcacaaaaccatgctcatatgtcattgaagcatttcaccgagcacttggtgggcgcatgtttaggcatgaatagcaagagagtgggggcaatgtggcatgccccattgcttcagaatgcgacataggcctagggccatcccatacaaacccctaactcacaccaatcaagcatgagacgaagccaaaattgccccacatatatgcgcacattcccacaatttagagcaccataagaagacaaaatacatcattggaaagatagaaagctcaatgatgagatacttact

SEQ ID NO: 26380 - DNA, 376 bp, Glycine max
  unsure at all n locations
taatagtgaatcacttattgtgaggacttgttgctatgttattaaatntaattgccattcttgttgcatatttctaaccatgcttttgattatgttgagctaaaaagttgaatgtgggcaccaccatacttagttgattgaagcacatgaacaaaaaaattgatgaatgaaggggaatgcaagaagagtgtgtatgtaacttgtctttgtgtatacttagtctttagttttaattcttcttttgtttttgagtccttactttttttaagtagttgtaactgttttagtagttttagctagtcttgcttgaggacaagcaaagttctaagtttggagtgttgataaatgtcatatttaccggattctaagttctaac

SEQ ID NO: 26381 - DNA, 402 bp, Glycine max
agcttctttgagaaaacttccttgagaagctagagcttagctacacacgcccctctaataactaagctcacctccttgagaagcttccttgagaagattcctaaagaagctagaggttagctacacacaccccctataatagctaagctcaccccatgccaaaatacatgaaaatataaaaaaagtccctactataaagactactcaaaatgccctgaaatacaaggctaaaaccctatactactagaatggccaaatacaaggcccaaaagaagaaaaaaacctattctaatatttacaaagaagaaaggacccaaccttggtccatgggctcagaaatctaccctggggttcatgagaaccccaaagccttctttagcagctctagcccaatcctcttgg

SEQ ID NO: 26382 - DNA, 390 bp, Glycine max
  unsure at all n locations
tctcccccaattntctataaatagggtgagaagtgaagtgtanaaagggtcagccccttaggcacttctctctctttcgaatttgcttggaaaaattgtttccgtgaagaaaatccaagccgaggcgcttccgaaacgtttccgtgaggaatttcgcgaaagtttcgatcgttcttcgacgttcttcattcgttcttcatcgttcttcgatcttcaacgggtaagtacctcgaaccaagcttttcgattcattctatgtacccgtggtggtccacattgtgtttcgtggtattttattctcgtttcatttactttctatacccccttttgacgtgccttaagccatttatttaagtcatttctcgcttaaactaanaataanataaattt

SEQ ID NO: 26383 - DNA, 388 bp, Glycine max
agctttatgtttttaagctaaggtgagactccaacaccgatagtccttataggcttatagccttttgtcccacaacacaattctagtttctcctcctcgttaccacttgcattgcatcacatgatcacatcattttccaatgaaaatgggcacaatactggtttgacaaatggcgaatccgagttccctcaaagtactggtacacaatttgccgctagtcattcccattcataaattcattttggacacagatgcttctcttgtcttgtctggtccctatcaaccaagactaacgaccgttcaaaaccatataagcaacaaaaaaccatcgaatataatataaaaataaacaacaaaaaaccatcgaatataatataaaaataaacaa

SEQ ID NO: 26384 - DNA, 425 bp, Glycine max
ggacctataaatctcagctttcccattacccatagtggatatcttcttaggtttgaggggttggaggcaagtggaatctgctagtgatgggcatcatgttgcgccggagattgcccacttttgtaattcaaatgctatattgaatgtcttttccgataggataaacaagcttgattgcatgaaactgtatcattaaatagttatgaatattcaacagttctgcagatgattgatgacttctgtaatttatatttgcgcataatacaatgtggttgcaattatcacccacccacccccttgtcaagtgattaactatttgcataatctagcatcccagtgctcgtcttggctcctgttttaaccatcttatggttctgagcaggaactactgatggccacacaaaagtactcagataggcggatat

SEQ ID NO: 26385 - DNA, 396 bp, Glycine max
tttgcatgcaagcttctcaaagaagccacgaggaagcttctggaggaagcctcttaatgaagcttctagagaaagctacatgaagctgtctcggtaaaaacgcggcccagcctttgttaaccgttggatcttctcgaaattcggtctgcaacttcacaagacacttgtccatgatttgaccgttgggatctttgagaagatatctggagtgtgctcgaaacttccattcccgagagcatttcttatttaagcacttcagcctttgctttcgtgtagcttaagaaaaacgtcatttcttcttctttctttcttccaaagccatttctaaagttccaagcactttctccatcacccacaaccaccattagccaccacaaaccatcactgttctccatt

SEQ ID NO: 26386 - DNA, 353 bp, Glycine max
tgagatgaggaagtgttgtatggtgaaactttctgcttttattgttgaccacagagtggtacctggagatatgtcgcgggggtcaggagaccttggggacgtcaggtggggtgctattgcccaaaaccaagcttgaccaatcccgacccaacccgggcatagtcggtcagtgagaacctgtgatgtacctaagcaggcgagctcctggcagtcaacagataaaaggaaaacaagaccacaaagcaaggaggcttgtggtggctggccagctgtgaaacttgattgatatgtgagatatggtctctggtaatcgattaccaatggtgggtaatcgattacaaggcttaaaaatg

SEQ ID NO: 26387 - DNA, 338 bp, Glycine max
tctagctttgcttctacatcctggtcttcttttggagctctaaattgagtgaatatgcccaaatctatggagcaattccggctttgattcatgctttattggttcgaatttaggggttgtaggggatggccttaagcttatggtgcattctgaagcaatggggcatgccacattgcccccactctcttgctattcatgcctaaacatgcgcccaccaagtgctcggcgaaatgcctcaatgacatatgagcatggttttgcaagcttgggattgcgggactgctctatatttatcgggacaacatgaaggatttaaaatgagtgcccgactgcaattc

SEQ ID NO: 26388 - DNA, 375 bp, Glycine max
tgtccataaaagtaaggttttgaagctagttttttcaatttctgactaagtaaaagggaccattttctaaacgcccgcacgcctatgaatatgagtcacctctcattagagtagaaatagaggaacactcactctgatctagctatgaactgcgtcagatctgatttcttcatcgcagtaggagaggcattggagcaaaagcgccgctgttgtctaccaccccgaaagatcagtaatggtccaacgccttaacgttgctcttcattcctaactaaaagatcattgaatggaccgacaccttaaatgaccttagtgttgattcgagacatatcttgcatataagataggagcgtctctaccagacactttgttccg

SEQ ID NO: 26389 - DNA, 403 bp, Glycine max
  unsure at all n locations
agctttgtctaagagtaaagctttgataccactagtttatcatgtagccttagtaactcaagaagagggcaaattgaattcatttaaagtcattttctgcccaacctttaatcccaaaggaattaaatatatccatattctacttagtaaaagggagagtgtatatattccaaaatcttgatcttgtatactttgcatacataagtaataacactaattataaaagtaacttatagtagtagtagtagtaaatcaatttcaagattaagggttataagtgagtgcaccggtgattattatactggtttggtctccacaagtaacttgagatngttcaataagaatagcaattatagagataaatctaattatgtctacacttttgacaactgtacaatgacat

SEQ ID NO: 26390 - DNA, 229 bp, Glycine max
caaatgatgacacatgccgagtagtgcactattgaagaggagattgaacgatgaacgaagtataaatgatcccaaccacctgcgcagaatgctcagtatgctcaatatgatcaggatgcacactatgcctagctaatctatgagagactctatctattcatggatctgaaggctgtatatcacatgtaatgaccctactcatgcactatatgcatcatatcatgtattt

SEQ ID NO: 26391 - DNA, 396 bp, Glycine max
agcttgtttacttattccctgcacagaaactgccagttttcatctatttggttaataatataatatcaagcaagatagtatttggttcacaaaaagacacatgatatcccctgcctgctgaaatttctattttaaatactttagccccaacttaaaatgcttgataaacttctgaaacattgttttctgcagtctgcatgagaatattctcatttctggttaatagtaatatacatcgttgattcatacgtgctaattatttctcattcaaattaaaaattctaagatcgaaagttgtatggcgtgattttcattaacgagagcataattaacccttcagagggcagacgaagcttgctctcctttctcaatagcagaggatgggctacatctcta

SEQ ID NO: 26392 - DNA, 386 bp, Glycine max
agcttctttgtcaatggacttaccttgaattaattccttctgtcacaacgtgcccttcgcgggcgatcgaaggcgacgctcatgggtgcgctttccaaaggaggaaagatgcatggagtcgccaccaacgtttatttgtggaaaacttcgggaaaaccgaaggaaaccggccaaaatgacaattctaagttcgggagtagaatttacgcttgacgaaggtattagcacctctcacgcttgactcatctgactacaacctatcttttacaattgaggaaactgcattaccttaacttgtatgtctttctattttttgaggtcgacaaaagcggtgcttttgctcctacgtactctgcatcaaagaggatatctgacctacgtacttc

SEQ ID NO: 26393 - DNA, 397 bp, Glycine max
  unsure at all n locations
agcttgctctaaatttacattggtgtttgtatttatgggaggaggttgtatgccatttttgttttaagagtagtgtcccactggtaaaactaactttccaaatgtttgccttcgcaggaaatggccccgaggaagcttgcctcaaagaggtctaggaaggacaaggcagccgaagaaactagttccgctccggagtatgacagtcaccgctttaggagcgctgtacaccagcagtgcttcgaggccatcaagggatggtcgtttctccgggagcgacgcgtccagctcagggacgacgagtatactgatttccaggaggaaatatggcgccggcggtgggcaccactggttactcccatggccaagtttgatccagaaatatccttgagttntatgc

SEQ ID NO: 26394 - DNA, 400 bp, Glycine max
tgtatatccgaggccaaactttcaactgtcagaatatgctccagtgttcctgtttgattttcgggtgtctcaataggtttctgaccttacaaggagatctggaggaaacgttatggatgtttgtatttgtgatgggcttcaattttcaacaacgacggtctcaacatatcataaaaatatatccgacaaccaagtcgaaagttatggccatccgaatttgcgtcggcatttgatatccactttcgagctcaatgatatattattgggcccaatcggacatccaagtcaacaatttcgcgtgtcagaattttcccgagtcttccttgttggtttctgggtgtctcaataggtttatggccttatgcagagatccggatgaaaggttatggccatttgtatt

SEQ ID NO: 26395 - DNA, 402 bp, Glycine max
ttcttacttcttaacaaatgatgagacatgctgagttgtgcactatgtgacaggggtagaaaggtctaaggagttagatatgaacccgagaaccaatgataacaacaaagttaaactaattaaagaaacatgcacctttcaacttgacattaaagaggaacatgttactcaacttgacaatgaactctcaatggaagataagagcaacgtacaagttatctaagcgcatgctgacatgttcgcatggtccacgaccgacataccatggatagatccggcctcccattggcatagattattcatatgtcgagatgctaaacccatagcttagaggaaaagaaagatgggagaagaaaagtgttatgcagtgcgacaaaaggtctccaaatcgatggtagccca

SEQ ID NO: 26396 - DNA, 396 bp, Glycine max
ttcttggcattggagttgctttaaatcctagactttttcgaagcatcttaatctcagcttcttgggtctcctataaaaaaggtgaaaggttggtgtgattaaatggcaatatctgcaatttacatttcatcctacatatcaaatattatcaccttggtttttgcttgcaggttactctcctccacttccttagcatgaatcttttcctcaagcttagtgtagaactggccaccaaaataacatttttttaaaactgagtttatccaaaagaaaccctcatgtaacacaaaaggcagaagcaagtaataattatttacctcttttcttctctcagctcgctcatcacacttgaaactgaatccatattttggaagtgctcccaccctgcgaggtttg

SEQ ID NO: 26397 - DNA, 393 bp, Glycine max
agcttgtcatttaccagtaggaatggaacgcaaggcatactacgctaaaaaatttctgaattttgattgagttctgtctggagagaagaggaagttgcaactgttggagctccaagagatgaggcttaatgcttatgacacgatgttgtacaagcggattgtgaaggcctatcatgacatgaagttgttgcgaaagaacttccaatcaggccagcaagtcttgctctttaattcatgactcaagctatttccaggtcatctgatgtccttatgggctagacctctcactatctaagaggtatagccctatggagcagtggaattgatggatcctcagttacatcatctaaagagaacttgggtggtgaatggtcacagattgaaactgtatca

SEQ ID NO: 26398 - DNA, 392 bp, Glycine max
tgttttattggatcttatattcaagtggtcctctagtggagatggagttttagtaagtttctctgattttatggttatgagcttgctaatgcccttctattatccagtaatgttgctgttttacaatgcatgtggcagttggttgattacatggtttttatttttcaggaacgtgcggctggtgcattggctaatttggcagctgatgacaagtgtagtacagaggttgcactatcaggaggtgtacatgctctagtgatgcttgctcgtaactgcaaatttgagggagtgcaagagcaagtagcattactttttattatttgggtaccatccagttcagttgctaaaatctttgaagctgttttatttggtagatgatacctgccaattga

SEQ ID NO: 26399 - DNA, 280 bp, Glycine max
ctgcaagcttttttctttttcaaacgactataccatatgacgcggatgtcagattgagacacgtattttatagagacacttgatatatattcccgacacatatgagcttatcctatcgactttagaatcattactatgatgatcgattgaatcacgttctatatctagacactcgtattagacttatgaagctctgtactatatcatacgacatttacttattactcatatgaacgattgatttcataaatatattgatacacgcgaaaatgatatccga

SEQ ID NO: 26400 - DNA, 358 bp, Glycine max
ttgcttgccacccagctcgcccaggcgagcaaggtggcttcctccataagcaaccgccttctggaggaatcttccgggcccaaatgggcttgtgtgctatttgcacccccatttttactaaatacaccccctaccttattttggtgattctttttttgtaaagttacggaaacttacgaatttcgtaacgatacttgttttctttgcgtaatgctacagacccttgtggattacataataattccttttttgactattggaatgttatagaacactccgaattatgcaacgatgcttccttctgattttcggtgtgtcacggaaccttacggttagcgcatcaatactttttttgatt

SEQ ID NO: 26401 - DNA, 404 bp, Glycine max
agctttttcaaattcaaacgacaataccttttgactcggatgtcggattgagtcacgtaatatctcgagacactcggaattgaataccgaagttatgagcaaattcaatcgacaataaatttttactcggatgtcggattgagtcacgtaatatatcgagacgctcgaaattgaataccgaagctctgagcaaattcaaacgacaataactttttactcggatgtccgattgagtcccgtaatatatcgagacgctcgaaattgaataccgaagctctgagcaaattgaaacgacaataaatttttacacggatgtcggattgagtcacgtaatatgtcgagacgctcgaaatagaataccgaagctctgagcaaattcaaacgacaatacctattgactcgga

SEQ ID NO: 26402 - DNA, 405 bp, Glycine max
  unsure at all n locations
agcngtaattatcatcccattacaattatatgggtaggttaatcgttaagatctaaaataatcatcgttaaattaatgaaagtgataatttatgaggaagatgaaatataaacttaatttacactttcaatgaatatatatatatatatgtatatatatatatatatgaaacgatagtaattcaagaatatgagcatatttagtgatcgtttatagcagaaaatgaattatcaggaaacaattcaatgattatatacatcactgaaggacacctcacaagatcaaagacatgtacagacaaatgaatatattgagtgacgctgtatccgcatcaatcgttagacacaacatctacgagtcattcagagaacaacggtgccttccatgcacataaatagatcagag

SEQ ID NO: 26403 - DNA, 393 bp, Glycine max
agctttatttgaggcttcctccagaagcttcattaagaggcttctagcatactccagacatcttctcatagatcccaaaggtcagatcatggacaagtgtcttgtgaagttgcagaccgaatttcgagaagatccaatggttaacgaagtctgggaagcgtttttaccgaggtagcttcatgtagctttctctagaagcttcattaggaggcttcctccagaagcttcctcgtggcttctttgagaagctttctcaagagacttctttgagaagctagatccttatctatccacactcctcttttatctaaattaacctccttaaaaataattatagatgaaaataacgcaacaaataatcaaacatcaaacataattactaataatatatag

SEQ ID NO: 26404 - DNA, 393 bp, Glycine max
agcttattgatgatgtggtccccgagtttgtttttgtcaccttttttctttagataagaagttaaaatccagcatgaggcaaatacgcttgtatgtggccatggttcagtcatagaaagcttgtgtgaaaattcatagacttcaatctaacattttaatcttttagggcacatttacgaatcaggttttttttttttcacgtgatcagaatatgataaattaattatgtatcctacttattctatcatgttataattcattttacgctacattaatacaatataataatattatcttattgttcatcttatcctattagtttcacatatttttttatcttgagggaggaaccagattaggaagcaccatgatagaataagttgtctttatatc

SEQ ID NO: 26405 - DNA, 395 bp, Glycine max
agctttttaaaacaaacaattgttgctttgatttgatttaaatgttttgtcatcttttttatccataaaaaatccacctattattgtgaagttttttaaatggagtaaaatctccttaaattcaattcaaaaaaatttcttctttgatttaatttaaatttttttttatcttttattttctataaaaaaaattccttattattatgacattttttttaaacggaataaagtgtccttaaattaaattcaaataattgctactttgatttgatttaaattttttgtcatcttttatttttcaataaaatatttctattagtacgaagatttttaaacgaaataatttaaccttacattaaattcaaataaattgttgctttgatttgatttaaatg

SEQ ID NO: 26406 - DNA, 388 bp, Glycine max
tttttctaattatttatacaagcactatattatcaagagattcattgcaatattttttatgcaactcatataaatatttggctcaaaaaatgttgacatgttgcaagaccaaattagactttcttttttaatcaaaacaagttatttcacaaaactaattactaaaaatgagtgttctacacaattatctgtttttcatggatgattcttaccatgtaggatataggaggcatcaccctaattgttaccttatgtgtttgtctgttctataacacgatgcgttatcccactacattccatctttgccaaatattctgtgttgacttaaccaatgctaaattgaataaaaatattatttttgggatctagtcattatacatgtatttaa

SEQ ID NO: 26407 - DNA, 401 bp, Glycine max
ttcttgccacccagcttgcccaggtgagctaggttgcttcctccagaagtaaccgccttctggaggaatattctggaaggcccaagtgggcctggttgctatttgaacccccatttttactaaatacacccccttgctctttttttgtgattctttttccgtaacgttatgaaattttacgaatttcgtaacgatgcttgttttctttccgtaatgttacgaatccttacggattacgtaatcatcccttttttgccttccagaatgttacagaactttatggattgcgcactaacacttccttttaatttccggcatgtcacggaacttcacgaattgcctaacgatgggtgccaagtacctcatagtggtcaaacgagggtcacatcccaacaacggat

SEQ ID NO: 26408 - DNA, 390 bp, Glycine max
ttcttataagactaaaaattacacaattgtgatatctaaaagaccaaaagtgcaataaagcttatattttaaggtttgagaaccaaattctttgatatggaagtataagaacccttaccacatttgattaaaagtataaaaaataaaaatttatttatccatttaaattaaattcaaaacaataattgttttttcaaattatacgggccttttacctaaaaattttaaaggcccttattctttcgataattcaatctaaacttcaccattttcaacaaagaaaaataaaaaggaaaagtaggttattatggaatagcatgaaaaatatacatggtataaatttcaacagcatcatgcccttgtccaagctctgatccaaactcaatcaat

SEQ ID NO: 26409 - DNA, 392 bp, Glycine max
agcttatcttaatctatcacattggatgtctgttccttttcagcattctgaactgtaggacaatcttgaccggaatcttcatatccatcctgcttacggaaaggcattctctctttaccccatttctggcccttcttcttgttggttattccattccactgaaatgtttcctgaaacactcagtttacatttacaagtcaattgaaatatcatgacaaaaataatagcatatctccaacaataccagaaagatgaatcctttgccttctccaaagttttcacaatattacagaactgacatgcaattacaactgtgcaccaaaatttgattagttaatcaatatagtaagttttacaacttcaagctattcttaagaaggtttttttttaat

SEQ ID NO: 26410 - DNA, 390 bp, Glycine max
  unsure at all n locations
ttcttgtttcaagaaagttttgctatgaaggcgggtgcttttcagaactgaaatatggatattggtgctatgaaggagtatgcaggtacgaatcttgtagcctataaatgtacaacttttactttgtgactgatcacatgttattaaataggcaaagaggatggcctacttgtagttgttagtcaaggtcgtaagtgtccatcccccccttccaccgtactcactgcagatgcttatataccctctcccattcacgacacccccctttgctaaacttgaggatggcctacctatagttgtgactgatcccatgttattagtgaccttangccactagtctaaacttgagtcaccttgccttaagtgtataaatcccgtgctccttgcccc

SEQ ID NO: 26411 - DNA, 403 bp, Glycine max
tcttgcttattacattcatcggctaagcgcgatgcgttgcggctaagctcatttccttgcggccagaattgggtttcattgagctaagcacaactcatgccatctaagcccaattccttacggccagagcagcgctaagcgatccatcaaccgctaagcacctattcctctgtaatgaagatgcactatttcagctaagccagctaagagccaggcttagcgagagttgcaggtattttgttctgcagaacttactaagtggccctatctccgcgctaagccatgttggatcaagtggcctcagaataattaagaaggggggttgaattaattatgaacttttcttgactaattaaaatttatccttcttaatattactagattcaattatgatttactacta

SEQ ID NO: 26412 - DNA, 386 bp, Glycine max
tttcttagccgacaaggcaccctttttcaaagcattactattcctgagtgcaggttcggtgattcatgccatgtcggatgagcaagatatgcggaggatgggggggcttgcctcctcgttcccttttacctatgccactcacgcttattggattggacctatatttatagtgttaattgtagagaagaaattagactaggagcaaggataagatatatccttaagagctgaaataaactgatataaagcccaaaaacaaaagaagcggtgataactaggagtagagcaaggctgcccaatccttttgcatattggacatggcaacaccattagtagagagagcttgagagcatacccctatcccaaagcaaattgaagggaaatgg

SEQ ID NO: 26413 - DNA, 407 bp, Glycine max
  unsure at all n locations
agcttgtttgtggagcttctacggaggctggatctttgagcttcaatgaggtcctttaatggtgattttccaccatggagatgcagtggaagacaaaggagaagaggtaagaggcggcgccatccactagggaataagccatggaagaaggagcttcaccaccaagatgagccttggataagaagcttggagaggatgcttcaatggaggaaaagaaagagggagagaaagagagaggtgggatcacgaaattgaaggaagaaaaagagagagaagttgaactttgagttgtgtctcacaagactctcattcatcaaagttacaacaagtgttacacatgcttctatttatagactangtagcttccttgagaagctttcttgagaaaacttccttgagaagcttct

SEQ ID NO: 26414 - DNA, 395 bp, Glycine max
agcttgtttattttattattcaggatgattgaaacttatgacttactaagtaaaggttcaaatcacgagatacctttatttgaaaccatgtgatttctgaaataatgagatttaaatatattttgaaaatggtgggggattgtgagagattttcaaagtgaaaggttgcgactcttcaccagggatcatgagatgtgactcctcatgaatagttgtgagatatgactcttcatcaagagtcgaagaacgtatctctttaaaagattaaatctcttcactaaaagacatgagatggtctatatatagaactaatctacatgctagaaaatactaaatatatcaccacccaacaatttctttatatccatatcatttcctttcttcccttgggtgta

SEQ ID NO: 26415 - DNA, 391 bp, Glycine max
agcttgagatgaggaagtgttgaagggtgaaacttcctgcttttattgttgaccacagagtggtacctggagatatgtcgcgggggtcaggagaccttggggacgtcaggtggggtgctattgcccaaaaccaagcttgaccaatcccgacccaacccgggcatagtcggtcagtgagaacctgtgatgtacctaagcaggcgagctcctggcagtcaacagataaaaggaacaaagaccacaaagcaaggaggcttgtggtggctggccagctgtgaaacttgattgatatgtgagatatggtctctggtaatcgattaccaagggtgggtaatcgattacaaggcttaaaaatgaagacaggaggctaagatggtctctggtaatcgat

SEQ ID NO: 26416 - DNA, 236 bp, Glycine max
agcttgtttggttttacatcacgcggtgtcaagagcatattcatctaggtgatggtctgcagctccctgcatctgttagctcggggaattctctgtaagacctctttctgtcatcttatgcgtaatgtagatactccattgtctactggctcggtgctggtgagagtagatagccgatgggtgccccgaatctatctcagattgacacttgttctcgcgttacaatggcttatact

SEQ ID NO: 26417 - DNA, 404 bp, Glycine max
  unsure at all n locations
tttgntttacatgaggccacacaaataatcatcataaagcagaaacctagcaagactaaccatcatatctcccaaaaccccatacccacgaaaatcaaaggagaaagaagtccacccagacctgaaggtgcgaagtcccactcgtagacacgcacttcacgacttctgaaatgccctccttttgcgacttggagcggaaatgggcaccaaaggttgaagctttgttgggcaacaatggtggatgggagaaaagaagaagaaggctgcgtgagagagagggagagcttctgaatttttttgtttcgctgagtgaggagagagaacagcttttggcgttaaataaaatggttttctctttttctattattgtatttaagcaatgccacatgtcttcatttgagtgg

SEQ ID NO: 26418 - DNA, 401 bp, Glycine max
  unsure at all n locations
ttctttttactttttttcagactttgttttccataatcgggttgagtctcctttttggggagtatcggtttgaagtcctctttaaggttgattatgtatatggatggcttattcctttgaggtcagagatttgtcatcctaaggcttgattgtgcttctttagtacctccattagtctcttttcttcctctttgtgcaatatgctactaatgatggttggtttctcatcctcaccctttaaaaagacatatttaaggtgaggaggcaatagctttaatttcatgataggcctttatttaatcaaggttcatggatcttctattttattttacaacacttcctttgaggaatctangtgctggatgcattcccctaactcttaatgctccagtgtgaggtct

SEQ ID NO: 26419 - DNA, 391 bp, Glycine max
ttcttttgatgaaaagatgtgactcttctcacttgaatttgaatttcaacgttcagatacactggtaatcgattaccaatatattgtaatcgattacaccatttaaaaaacatttggaacgttgcaaattcagttaaaagcttttgaaatcaaactttaccactggtaatcaattataggtaattggtaatcgattaccagaaagtaaatactctggtaacttagaaaaatttgggaaaacttttcttgtaaaacaaaattgtgctatgtttggtttttgaaaaatctttttcaatacttcgcttgtgaagtcttgacttgttgctttttggtttcttctcttgaatcttgaattcatcttctcttgaatcttgattcttcttgatgtctt

SEQ ID NO: 26420 - DNA, 386 bp, Glycine max
ttcttcatgtctgttcaattgctttagattgttgcacagaagggaaaaggtctgtgtggtgatcggcaaaggagcataaaccatagagtctggcgacaggtgctgattttttattcattgctagttgggttaccaggttaaccaaggcatctagtttaccttcaagcttcttagtctcacctgatgaagatgaattcatggctacttcatgcactcctctaatgacaatagcatcacttctggcactaaattgctgggagtttgaagccatattctcaattaaatttctggcttcagtaggggtcatgtctccaagggctccaccactggcaacatctatcatacttctctccatgttgcagagtccttcataaaaatattgaaga

SEQ ID NO: 26421 - DNA, 392 bp, Glycine max
agctttgcctcaaaacaaagtctttccaagacatccaaggctgtggtaatcgattaccaagcagtgtaatcgattaccagaagacaatattgaaaaaacaacttttaagaagggttttgaaatttgaatttaaaagttgtaatcgattaccattgatgtgtaatcgattaccaacaacgaaactcttgaaattcaatttgaaaagtcataacccttcaaaatataactgtgtaatcaattaccagaaacctataatcgattaccagtgaagaattttagaaaaagctttttgaaaagacacatctcttcaaaccattttgaaaaggcacgaatgcccaatatatatgtgtgtctgacttcagaaggcaagagagagatattctaagcgaact

SEQ ID NO: 26422 - DNA, 390 bp, Glycine max
tctatctttgtgcactaagcccaaaaacttctctggaatttcatcttttggagttgggtgatgcaatcctccctaggaagggaccactcactagagccatgagcaagaggctccaagaggattgggctagagctgctgaagaagaccctatggttctcatgaacctcagggtagatttctgagcccatgggccaaggctgggtccaattatctttgtacatattagactaggatgtcattatatttggtccttgtatttagggctccataatgtatgtagggtaccctagaaatatacgatttttcagcccttgtattttagggcacctacactagtttttatattaagcgtagctgtgtaatttcacatgcactaagtgaatatttgat

SEQ ID NO: 26423 - DNA, 386 bp, Glycine max
  unsure at all n locations
agcttgtaggattatggggtacccatcacatgtggtactaggtggcggtcgggcgatggtgcacaacaagttttccacatccacaatgcgcgcataaacccaccatcccctattgcccacctccaactgagctcacgtactcccacgtagcccatatcctcgtttctctcaacaccgggtccccatcaatcctcccaagcttccccaacatcaaagtaatacaacattcacacagcacaagctatcacagccaagcaaaacagggcaaaggtagaaaactctgctcaaaacaccaaccaaaatcacagcttttctcacttanagaccccaataacaattccttcgatccaattcgttaaccgttggatcgaactccaaaatttact

SEQ ID NO: 26424 - DNA, 404 bp, Glycine max
  unsure at all n locations
agctttgtccaactcanacgacaataacgtttttctcggatgtctgattgagtcccgtaacatatcgagacgctcgacattgaacgttgaagctctgagccaatacaaacgaccataacttttttctcagatgtctgattgagtcccgtaacatatcgagacgctcgaaattgaatgttgaatctctgagaaaattcaaacgacattaaatttttactcgaatgtctgattgagccccgtaacatatcgagacactcgaaattgaatgttgaacctctgtgcaaattcaaacgacaataacttttttctcggatgtctgattgagtcccgtaacatatcgagacgctcgaaattgaacgttgaagctctgagccaatacaaacgaccataactttntactcgga

SEQ ID NO: 26425 - DNA, 404 bp, Glycine max
agcttatatcaatatacttgtccttcatttaattgtctttgggcttgcgaccacgatcaacaaagtactttcggtacctgctatatgttgacttgaccaacgttgttgggtatgttgcgacaatccttcaacaccttattcacacattctgagaggttggttgtcatgtaaccatatcttcatccagatgtatcgtaagccatgctccatttttcctttgaaatgcgatcaatccatgttgctatggctggactcaattgacgaaatttttctaagttttgatcaaacacatgcttgcaaggagtgtacgctgcatcaaatttgttaccatcaaaagttgtaggtagatatgaaactaaaattaacttcatgtataaaataaaccttacccaatttcttgaaca

SEQ ID NO: 26426 - DNA, 395 bp, Glycine max
agcttgttatattgtaaagtagaatgcgtaagaataatggcgcagccactggcaagctgaaaatcaaaagaatcctagcctgacgtatatgctttcccataacaaccaacaactggtggttaaaatatctcatagccttgggaaaaaggaaactgcattaactcaccccctttaacaatttcagctaactcgtactatgatcctatccaattctcatttacaaagatcgatcatgcttatatttgtggattttatttcttcattccaatgcgcccaagcagagtaacatgccttaccacacacattctaggcgatctatatttgtaaaatataacaaaaatcattaattatatcagattgacatatgcattgttgctatacaagatagcaacagc

SEQ ID NO: 26427 - DNA, 393 bp, Glycine max
agcttttatcttcaatgcaaggaaacatacttatggctaaggacctaaattttggttttagaagtagaaaagcatgaaaattaggacttgctcatgagagtttttactcgaatttgggctgccccgtgattgatactttgcgcctaggtagcgtggaaaaagcttttcaatagaatgtagatatatgtgtgaatataggtaccatggaaaacaccttgcaacggtgtgtatatatgtgaacatagggcatgaaattctttgcaaagggtgactgaatattgaggtcgcttcctaaatgaatgtatgatagcatggaattcccttttgaatgcaagtgtggcataatgtaaatagcttgccaatatgcataagtgtgagtgaaacaataaaagt

SEQ ID NO: 26428 - DNA, 394 bp, Glycine max
  unsure at all n locations
agcttgtgcaaatcatatcactcccgcattttatctctagcatgcattgtatgtgggtctcgtcctttgtcacgggaagccggaaggtccatatcaccttcttaattgtacacatggggcactgcgcccccaaatgcgcaagtaagaagagataattttccgggctctcgtgtccgtaaaatgcattcatatcatgcatcgcataagcatctcttcataacatcataatggacatatcctgcatttgtccgttatcatattccggcctcacattttgcatgagtcatggcatcatcatgcatatgcgttcaacaaactttntgatctgcaaaattgcataccatttgttttcatgtttgctcatccttgcgttttcctctacaaaacaaaaaca

SEQ ID NO: 26429 - DNA, 403 bp, Glycine max
agtttgtggtagaaaattttcttatctagataatactttcattgctccaatcacagaaaaagaatttaagttttttaatattttaattttttaatagaatgttcagttgcaactgtaacttattgtggggattcttcaggttgaagctctagcagttcaattgactcagagggaaggggaactaatacaagagaaggcagaggtgaagaagcttgcaaattttcttaagcaggtgagttaacttcttttatgtgatggaagaatttaattagaaataggaaaaaaaaaaaagaaaggagcaaagaaatatgttgttagtttatatcttctttacatgcccgcataaagaaatttcctttaccaatgctgagagtttagattaatttataggcttctgaagatg

SEQ ID NO: 26430 - DNA, 403 bp, Glycine max
agtttgttctacaaatcaaatccagaatcagaaagaactggcgatccggtgactgatgttgcaggaaattttttgtgcatgagattatacctgaaaggaacattctggtaattaatataaactagaaaaagttgagtagaagtaaccaagagaggccagatagccagaccagaaccacccagagttgaaagcctgtgaaaacagtgacaaaaaaataagaacagaggaactaaacagtaaaattcttaaataaaggaaattataaatacttacttattcttgacaaaattgaccttgactcggggtaattctgagaacccaggccatattgtttcatttggtgtgccaagaattctgaaaatctgcaagtaaattaataaatgttaataggcctacgccactt

SEQ ID NO: 26431 - DNA, 375 bp, Glycine max
ttcttttatgcaaaaagattaaaacaatgcaagaagttgtgcccactgcaaggagtgctaatacaaattgatattcatagactacattatcttgtccaataaagtgtgtgtctatcctcctaacctcaaggctcttcgatttagagttaaggtaggaaataattaatgtaaggggatccaaaagaatttgtataattagcatttgttttgtacggagacaaacgaattttgctgctcatggcttagctaaaggagcaagttcctatgctggttcccattactttggtgattttccatcttgtattgctgatctgattctgaagggaataatataagtatgtttctctaaaaaacagaaacataacttgcaaaata

SEQ ID NO: 26432 - DNA, 389 bp, Glycine max
ttctttgtttatttcagaattattatgtagtgaggcatgtatatataaatgttgattctgtatagcgtgtatttgaaatttgattgatttatttgcacatactatgcataacactataactcctatgatagtactattttagctgcttcttgatagtgatgaaaataactatcggattttgccccaactgtgatatttcaataattattcaagtgttcctaatgagagttgtgccctaactatgccccaactgatttcttcacttccaacatagaacaaaacatcactttccttgtctgacaaacacacactatgaaggcaggtttgctgatttggctgtttctgacactggcagtcatcattaactaaacaaggactacacccatgtt

SEQ ID NO: 26433 - DNA, 394 bp, Glycine max
atcttgtaattagtgatgtaatctatttcctaatatagcattttcccatgaggttttttgttggagaggttttaatgaggcatacccgaattttacattgaataaaagtattctttttatcattattaccgactttatagatctgagtagaccaatttgtttctcagactaaatacccaatctgaggcataaataatctgaatagactgaagataactaaattaattggataaaaaaacagaccaaaaaaagattaagttgcttagctaaaaatcaagatcaaaactaaacctagagatttggctcaaattcaatagctaataaaagttggctaaaaaggtgaaagtgattgtattactgagtaattcctaattaagaattagagaatgaaaaa

SEQ ID NO: 26434 - DNA, 401 bp, Glycine max
tcttgctttttctaaaagattattgcatttgaaaacgcacatgcatatttgttgtcttgtgacagggacaggattgttttaagcaatggtcaaataccgagccaaatccaagatagagatgaattgaggtaaacggtaacgtggccacaatttgctgcgcaatgtcatttcctgcttttaggtacttatggacatgcacgagtggaagctagcctcgtgatctacaaatcgccatcccacgtccagctccggacaagtgagaagcgctactgagaggctggctagtatcctttaaattcctacttattattgttgttgtttctttaaggtgatggtcggatgcctaatttaccctagaggcttctagtaagcgaacgctgacccatagagagcgcgtacct

SEQ ID NO: 26435 - DNA, 389 bp, Glycine max
agcttatacaaaggaagtggcatcatgcaacaaatgtgaaacaatactacaagatgcttgcattacccttcacttacccttagtgcttatctcaaattggtgtggcgttgaccatcactcaaaatgactcttcattcatcctccaatttgcaggatcccggatgacaagatgcaaatgcatgcatgtttatgattaaacgttaaattcaacaattaaacaagtgttatcgtgttcaattttaattaaacgtttgctgaaccccgttgatcgagccaaatggctccggattcattgggcaagatcaagagtgtatgttcttaaggacaataagaagtaaaagacacaacacaggaggttaagatgcaaatcattaacccatttattaatg

SEQ ID NO: 26436 - DNA, 382 bp, Glycine max
  unsure at all n locations
agctttgaccgaaaggagaacaattgacagaaaggagcacagagtcacagttccaaggtaaggaccatgtgagagagcaggaccatcacaaacggaataaacacctacaatcacaagagaaaaacaaacaaaacatgagaattacactacccaacatgaaaagattataaccccattatacacaggcacttcattctacacaataatgacgatatttattttatccataagagtgacaaaaaaggtaaccccgcaatttccgataaacttaaacttaaactctatggtttgaggtagagcaactgaatatgatactactggttatctaaaccaataaaatttgattagaacagtatanactgcatgtattagaacaaaataa

SEQ ID NO: 26437 - DNA, 399 bp, Glycine max
  unsure at all n locations
agcttgtgaagctcctgttttagctttacccgattntactcaaccatttgaagttgaatgtgatgctagtggagttggcattggggctgttttgatacaaaacaaaaggcctatagcttatttctcggagaaattgggaggagccagattgaactattgcacctatgacaaagagttctatgccattgtgagagctcttgatcattggaatcattatttgcgttctaatcactttatattgcattcagatcatgagtcattgaagtatatcaatgggcagcagaagttgagtccaaggcatgctaaatgggttgaatttcttcaatcttttaatttctcttcaaaatacaaggatggtaagagtaatgtggtggctgatgcactctcaaggaggtatgc

SEQ ID NO: 26438 - DNA, 393 bp, Glycine max
agcttactttattaagttctctaaaagtgactgaggaacttggtgtctcaataaaaaacaatgcttcttggcagtccatggagatgcaccacttccttgaaaaataggtcaacaacatggcaagcatcatcaatcttcttgcaaggtataaaatgcgccctctttgaaaacctgtaatccacaacaaaaatggaatccttgtcatttcttgtatgtgggaatcctaaaacaaagcccatagacaaatctatccaaggacaatcaggaataggcaaaggagaataaagtccatgatgcttgatgttagacttagagttcttacaaacaatgaaattctcaaaatttttttttacatcatgtttcatatgaagccaaaagaaatgctcatgcagc

SEQ ID NO: 26439 - DNA, 393 bp, Glycine max
agcttttatgattcgccacaaagaataaaattctttgataaaaacctaagtgtcgcaacctacccttcgacgggagggcgacgcgagactcacgggagcgtcttccaaggaaggaaaacgcgcggagtcgccaccaatgtttatttaaggaaaacgtcggaaaaaccggaaaagacgtggtctatgaactttaagtgaaaggtttgggagttgtatttacgcacggggaaggtattaacaccccacgcgtccgtcacaaaggacggcaacctttaatcaagtgtgcgaatatgacttcaatttatgttacgttcttatgtctttttatgcctttttatattttttatctttttgtggtcgacaagggtgtttcccttgctcttacgtatccct

SEQ ID NO: 26440 - DNA, 393 bp, Glycine max
agcttgttatctcaacctatcacataatattcttgaaggggagctgaacttgactggattgataggcttgcgcacattagacttgtcaaataacagattttatggggatattgggttgaatttcccttccatttgtgccaatttagtcgttgcgaatgtctcaggtaataaattgactggtgtgattgaaaactgctttgatcaatgtctcaagttgcagtacttggatttgagcaccaacaatctgagtggaagcatatggatgaagttttcgaggctcaaagagttttctgttgcggagaaccatctaaatgggactattcctttggaagcttttcctttgaattgtagccttcaagaactagacctttcacaaaatggatttgctggtga

SEQ ID NO: 26441 - DNA, 340 bp, Glycine max
attgtttgttttcaatttcgaacgtctcggggtattacgagactctatcgcatatcggagttaaaagttattgtggctagcatttgctacgagcttctgtcctcaattacaggcgtcttgacatattatgggactcaatcgaacatctgagtaaaaatgaattgtcttttgaatttccaaccagctttcgtcctcaattacaagcgactcgatatattatggtaatagatcggatattcgagtcccaacttattgccttttgaatattctacgagcttccggtttgaagtacaaatgccacgatatattatgggactctctcagacatccaagttaaaat

SEQ ID NO: 26442 - DNA, 288 bp, Glycine max
tgcctggctaccaaaagtcatgggttctgccaggatgcaaagatctagatgccaagagagcacacatccaagactaatccacacgatcctttccataccagcagctgtctcactatcctttcctatgacctcgcttctgaccatagacaacaccacagactccatcttcctttgttttaacacacaacttattcgaagtgtgcggcgaagctacacccttttcattacaaccctatcaacttcactcccccaaatttggggtaaatatgccttgaaccatatgctctc

SEQ ID NO: 26443 - DNA, 393 bp, Glycine max
ttcttataagaacaaaattgcctcaatcatttccaaatatgcatgtgaattaggacgcatcaacaagaatcaagccaaggctattgtgcaagcaatcaatggggcaaaacacaccaaatgattatgatgatggatggctcaaattctcacaaaggtaaactcatcactttcaaattgagctttcaaaactatcatgacatgtagagaagaatcaaggatttcaagtcacaaaatgtcaagaactcttattttcaaaacaattacccatttcttgaacatatcctataattcaaagaaaaacatgcaaattcgtacgtgcacacaaaattgacccaaaatattaaactgaaaatccgacgaaactaacaacattaacaaattaacacaactaac

SEQ ID NO: 26444 - DNA, 392 bp, Glycine max
tttcttatttactctgaaagcaaggctgtgatgatggcatgggagaatccgttgatggaggctcatgctaaggcggtttgttccggtggtggccacgtactcaatattgggtttggtatggggctcgaggattcggccattcagcgatatgcacctgcttcacacaccattgttgaggctcatcctgaggtttatgaacgcatgcttcgctccggttggggccacaatgaaaatgtcaagattgattttggacgatggcaagatgttctgcctgagcttgaaacatatgatggtaattgctattcgtctaatctttatcttcataaacgtcaatgcttgattgcatcattacacatactattacaatcgattggatattcttctctgaaaaa

SEQ ID NO: 26445 - DNA, 394 bp, Glycine max
tgcttgatgaacaaaagagaagtgttgagaataaggatagtaagttggaagcagaggatgtggttctgccccagagaaagagaatttccttgagtaaaatatccgagacatctgtgtggatcactggtgaaagtgggtctatctatgagaggttttggaatggaatggaatgggtgattgtccctcatgacttgcccgtatcagcaggaagtgccatatcaatttttgtcatcaatcagacgattcttgctctatcagaagcaggaaaattgtatcaggttagaagcatctgttaagttagaagatacatgccaagcatcatactatgttaaatgttctcatcaactgtagaacttgatttttatccttatatttttctgggcatatcaactct

SEQ ID NO: 26446 - DNA, 385 bp, Glycine max
tagcttgccacccagctcgcctaggcgagccaggttgcttcctccagaaggcaccgtggtgccttctggtggaacttcctggaaggcccaagtgggcctaattgctatttgcacacccctgtttactaaatacaccccctgcctttttttgttgattctttttccgtaacgttacggaactttacgaattacgtaacgatacttgttttctttctgtaatgtcacaaaaccttacgtattacataatcatcccttctttggcttctgggatgttacgaaacttcacggattgtgcaacaatgcttccttttgactttcggcatgtcatgaaacttcacggattgtgcaacaatgcttccttttgactttcggcatgtcacagaac

SEQ ID NO: 26447 - DNA, 390 bp, Glycine max
  unsure at all n locations
taaatctatagatgatcagcttataagatatatctatatatatatatacatatgtatatatatatatatatatatagatatatatagatatatatatctatatatatatataagcaacccatgtctaattcatcatctgattagagagcgtcccagataattatatatatggagataaacgaatcttagttgatgaatcaactatgaactaaactcaatcacattcaatgcattcatctgcgccgattgattactctatgtgtgacctatagactctcgctagagtggacataatactatcttactatatcatacacactgtgtgacattcggtgatgcatcgctgcaccctatccatgagaaaaatcagttattggagtacaagctggn

SEQ ID NO: 26448 - DNA, 398 bp, Glycine max
agcttagtttaactcttctatttctaggcacattcaatcagattgcaaagaaaatttggtccctatgagatggcattctgttcaaataaatctaatcttagaatattcaagcttttatcaagaaaacaaaataatgttgagcctttgtccctaaaacattagacaagaaattgttttaaacttagtttgtaagagaactggtaatggtatatatatgaaggggcatttgtcgtggcaaaaagcaaagtgccagcagaaatcaacagcatagccactgctaaaagcatgtcgcaatttctacaatctacatattgattaaaagtgaatggcaaaaaatcagacccccaattatgcgagcaccctgtaatgccctccatttaaaacagtaattagaaact

SEQ ID NO: 26449 - DNA, 393 bp, Glycine max
ctatctgtgatttggagcggtataaggctcgtcttgttgtcaatggcaggtcttaataggtgggtatcgactatgacgagactttcagtccagtggtaaaaccagctactatttgtgtggtactaagcattgtcgtgtcaaagaattggaccattcatcaacttaatgtaaagaatgcttttctctataggcacctttctgaaaccgtctacatgcatcagcctcctggatttcgtgatcgaaatcatccggatcatgtctgtcttctaaagaaatccctatatggccttaaacaagccccaagagcatggtaccaacggtttgcatcttttctctccaccatcggatttgttaatagcaagaccgaccactctctgtttatctatactcatg

SEQ ID NO: 26450 - DNA, 394 bp, Glycine max
  unsure at all n locations
agcngtaattgttggggtcacttataatttaactcattgatttgccgagaaaactaatggaaaaacgagagtgtgtaatgatttttgtttttcgtcttgtatgaacatccttcagtaaaatgaacatttctctctatatgattaactttggattttgagtcataccgcatccaaatctagacatacatgactttctatactggtaaagcttataatttttttttatacgataagtataagttatgcaatagttttataaattctctatagaagaaaaaaatgtaaacttgagttttaatataaattcttaatcagataaatatatttatgtataaatttggtttgagttggattagattgaatttcaaaatgaaatctaaaatctgattctatc

SEQ ID NO: 26451 - DNA, 395 bp, Glycine max
agctttatggctggaaaactatataacaacaccatggttctagtttaggctctctactctttctcctttattttcgtttttggcaattccagttctgatgtttagttttatcaataaaatttcgttcttcaatctataatttcgttctctattgattaatggaaggctaagtctccagagttgttttctcttgaggatcagacacagttctctttgaggttctattattactgttaaattcttttcagtttttcctcttcactaattactctgaatttgttgctattaattcatgcatgcttagtgcttgattaattgtctctgcgcttaatttacattcatgcttaatgatcgtttatgagtaattggtgtatgtgttgcttaatcacataatg

SEQ ID NO: 26452 - DNA, 396 bp, Glycine max
  unsure at all n locations
tctttcaagatttcatcaatgatgctgataaaatggctgaagctgaagaagatgatggaaggcgtcatagaataaaagaaagggtgatgcggctgagagaagcagcttttcgcatggaagatgccatcgatgaatataacatctcctgtgaggataagcaacctgatgatcctcgatgtgcagctttactatgtgaggctgttgacttcatcaaaactcaaatccttcgccttcaaagtgcgtacaagattcaggatgttaaatcccttgttcgtgctgaaagagatggtttccaaagccattttcctttagagcaaagacaaaccagttctagaggaaatcaagatataacatggcaganactttgaagggatcctttctttattgaggaagatg

SEQ ID NO: 26453 - DNA, 399 bp, Glycine max
ttctttaaccgatcgtttaagccgttttctcacctaataaatgataaaatgaatttcaaccgatcatttacgttgtaatctcgtttaatcactgttaaaacaaaatctaaccgatcattcacgctgtaatctcggttaaacaaaaaaaaagcaaaataataataaaataaccaaatatcttgaaaaataataataaaataatcaaaatatctttgaataaaataatcaaaataatcaatcggacgcttttctttggaaatttccttggatcaattgactaataaccaaagtgaaactaaggctaaaatcaactcacaaatcaagctttgtctgcaaaaaatcactaaaaaccgttttaaggtccaacgccttaaatgatcctctttgcttttatcgatt

SEQ ID NO: 26454 - DNA, 388 bp, Glycine max
tttcttttagggccgaaagggatgagtcaagggtggaaagtatgatattagaggacaagttgaaggattgtcaaaggtcgaagaggagtttgaccgaacaactgagtaagactgaagagaatatgttgacaatcatcgaccagtataaagagaagctgaacctagctgctagccataagcaaagactagaggatgagcatgcaatggtattagctctgcaagtggaaagggaagtaagagagagagagtgatagaatcattgcatggaaaagctatgaaatggatggataggttcactctcactttgaatgggagtcaagaacttccaagactgttagctggagccaaagcaatggcgaacgtatacttatctcccaaggaagttcat

SEQ ID NO: 26455 - DNA, 389 bp, Glycine max
ttcttgagatgaggaagtgctgaagggtgaaacttcctgcttttattgttgaccacagagtggtacctggagatatgtcgcgggggtcaggagaccttggggacgtcaggtggggtgctattgcccaaaaccaagcttgaccaatcccgacccaacccgggcatagtcggtcagtgagaacctgtgatgtacctaagcaagcgagctcctggcagtcaacagataaaaggaacaaagaccacaaagcaaggaggcttgtggtggctggccagctgtgaaacttgattgatatgtgagatatgggctctggtaatcgattaccaaggtgggtaatcgattacaaggcttaaaaatgaagacaggagactaggatggtctctggtaatcga

SEQ ID NO: 26456 - DNA, 388 bp, Glycine max
agcttctttctgcatcttccttgcttcttcttacacttcatcataatccaagtaagtagtgcttcattttcatactttgaaccttaggatagacgatttcttgctttgttagcttgcattgctgtttaggttagggtttctagctttagggtttgctattttaggatttgggttgagttgtaagcccattaggggcaatgctgctaaaaagggtgaggacccctctgtttctgctggaaatcgctatgaacgcgctaagcgcgcctgctgcgcttagcctgttcatcgcatatgaaaattttttggaattccagatgatcgcgctaagcctgaccatgtcgcactaagcacgttcatccttctaatgagtttcagcaatgagtatgct

SEQ ID NO: 26457 - DNA, 392 bp, Glycine max
ttgctttgtccgcaaaaatcactgaaaaaccgttttaaggtccaacaccttaaacagtcctctttgcttttatcggttaacatggaccgttcaaaagcataaaaaatcaacacatcactttactgccttttgaaagaactacgtaggtctgatttcctcttcgatggaggatacgtgggagcaaaagccccgcttttgtcgacctcaaaaataaaaagagacaaaaaatttagatacatgatttcacacaactctaatctaaggctgttgtcctttgggacaaacgtgaaaggtgctaataccttcctcaagcgtaaacataactcccgaatctggaatattctttatgacagatttcctttgcgttttctaacagtttccttttaataaac

SEQ ID NO: 26458 - DNA, 391 bp, Glycine max
ttgctttaaaccacagcaacacaaaatctgggtgtccaaaacccctcaattcaatggcttttctaggtttgaaaggtggaatttacaatgaagcaaatttggagcaaactctgacctcacacaagtctataacatcaatctaaacttgctcaaactggatttacacctaaatttacaccgaatcataatttgactcctcaacacccaattttgccctagaaatggctcttggttcactttggtcatttgtttttctctctagctcagcctaacctttctcacatgtcctaaatgacatttcaagctagtattaactcactctaacctccatttaccacagaagttagacttagccttccaactctcaaagtctcactctttttccactcat

SEQ ID NO: 26459 - DNA, 390 bp, Glycine max
agcttattttgtatattgtatactagagtgtctcctctcatctatatagatgaaaaaataaaaacatgttagatgtattgtcttttattttttcacataacacgtgacaaccagatacttcttggtagcacgtttgatacgtcatgtaagttatcgttttcttcattgatcataaccaagttgtcgcgagagcatcctacctatagtatcacggtaagggtatgtactcccatgatgtcacccacataaataaatgaaatatgtaagtcatcaatgatgacatgtcaatgaagcgatcatgctcgatgtagtgaaccaaacatgtaatcaaaagatacgaccacgagtgtgtatgcatgttttcactcgtaggaatactacttgtttgtg

SEQ ID NO: 26460 - DNA, 384 bp, Glycine max
agcttgtctcatagaggtccaggaaggacaaggcagccgaaggaactagttccgctccggagtatgacagtcaccgctttacgagcgctgtacaccagcagcgcttcgaggccatcaatggatggtcgtttctccgggagcgacgcgtccagctcaaggacgaccagtatactgatttccaggaggaaatacggcgccggcggtgggcatcactggttactcccatggccaagtttgatccagaaatagtccttgagttttatgccaatgcttggccaacggaggagggcgtgcgtgacatgagatcctgtgtaaggggtcattggatcccgtttgatgccgacgctatcggccaactcctaggatatccgttggtgttggaag

SEQ ID NO: 26461 - DNA, 384 bp, Glycine max
agctttgttggtgtcgagaagaaatcacatgtttgtcatcatcaaaaagggggagaatgtgaatgtatgtatacatgattttgatgatgtcaaaagaagaatcaaacaaggctcattttgcttcaagattaatacaagattttttcaacaaacaaagccttgattcaatatttcttcaagatcaagccttgcctcaaaatgtatagatttcaagtcatccaaggcacatgtaatcgattaccaatacatgtaatcgattaccaaggcacatgaaagtgtgtaatcgattacacatcatatgtaatcgattaccagagactctgaacgttgggaattcaaactataactgtgtaatcgattacacaaacattgtaatcgattacc

SEQ ID NO: 26462 - DNA, 388 bp, Glycine max
agctttgtgtgtgattcacgaaagatgatggagaattggactaatgatggaatgtgctacaacatttaatatattagttggggatggatgggtgccaattcatctaaattgatcctaatccaaagatacttgcatgtgctatatgaacgaggtttcatcttatgaattgcatgcgaagcttttgccacgtacagtgtgaaataacattctgtattctgtcctcacgtatataacaaggctacatattgtgaacaccctcgaagcatttgagactaactcttatagagaaaaaaaaatggctgatacacgtggatgagatgcagtgagaccattggtgatatgtgataacaagtgtggctgcacacttacatgcactggtggattcact

SEQ ID NO: 26463 - DNA, 327 bp, Glycine max
agctttctttgttcaatttcgagcgtctggatatattatccgcatgaatcgaatttccgcgtgacaaggtttgaccatttgaatctctagagagctatcgctgtctcaatttcaagcgtgtcaatatagtatgcgcctagtttggacttttgggtgacaagttatgaccattagaatcttccgagagcattcgatgctcaattgcgagcgtttacgcgtattatgcgcactgaatcgactttcccgtgacaagtattgaccattcctattggtagagagcatctggatttctagatagaacgtctggatgtgtgatgcgccagaatc

SEQ ID NO: 26464 - DNA, 384 bp, Glycine max
ttcttgtcttctacttgaaacccttaagtgagaaactctcatccggaacagatcaattgtacaggccttcttcggaagttcagaatggtgaacaattcaactgccactggccattacaatcaagtgattatgatatgaagcctgtgtttaaggatctagttcactcatggcctgttgacggggatgatctggagaaacaacaatctgttatgtcagatatatcagtggagtgtgggattacagttgcctcagattctaaagttgtagagcctgacatttttatttttgatgaattctgggaggggtttgatgcattcaattccacttcaaatgtcacgttttgtgggctagatgatggacacaagaatcaatcagagaactcat

SEQ ID NO: 26465 - DNA, 391 bp, Glycine max
tgcttgctaacccatggaagctcctaatatctcccacactttttggggtgggccattcttggatggccttgattttctcaaggtccacttggaccccatttctaccaactacaaaacctaagaaaactatattatctacacaaaaggtacacttctctatatttgcatagagggtgtttttcctaaggactgaaagaacttgtctgagatgtcctaagtgatcatctaggctcctactatacactaaaatatcatcaaaataaacaactacaaatctacctatgaaatcccttaagacatgatgcataagcctcataaaggtgcttggtgcattagtgagcccaaaaggcatcactagccattcatacaaaccaaacttggtcttgaaagc

SEQ ID NO: 26466 - DNA, 391 bp, Glycine max
tcttcttcgaagctcgcagaagaatcaaatggtgcaccattgttcactgtaactcatgctcggagtttctcaatgcaagttaccagtaatgatgtgtcaagtgacaacactggattccaagaggaagatttccctgtcatggaccgtggcaatgatacaggaacctatgaggatgattggcaactcttataaatgcgattgctggactatgacatggattcaaagtacagggtcaaaaatttgctgcatgattctcatgggcctaattgccactgcaagtttggctgatccctgtcatggggctccccactcttcaaacattgtttattattcaagtagataagacattaaactcattatgattctttggcttacatcatttgctcatatg

SEQ ID NO: 26467 - DNA, 286 bp, Glycine max
tctttcttgtgatatttctactatatatgtgtgtgtcttcgtttatctctacctgtttaaaaatgtgataattcactcctcatgggacgtatatgtttggatcatgtgatgatcttaaaccttgagcatgcgaaagcaaatggctcggtgaaacactttaaaaaaccttgagatggaggacttcgagacaccatattttgataggatgtgacatttgaacaagagttcttatcttagttgcatgacgcatcaaacatgtcatgttacttgatttgataaacttgaa

SEQ ID NO: 26468 - DNA, 378 bp, Glycine max
tctttcttgtgaagagctgatttttagcttctcgctaagcctatctgccgacttggcgagccatccgctgagcgcaccactcttgcagctgagcgcaccactcttgcggctgagcctgaggaagaatctggaagaaggatgagctggacacacgtgctaagcgagggctcgtcccgctaagtgcaccgattgcatgcatccgttaagcgagaagacgcgcgctaagccgaaattcacttatgtgcgctacgcgagccacagttgcactaagcgtgcaagcaccaacaaggccgcctatttaagtctgaaatcagatatggagagggagtttgggcttttccttgagcttttgcatgcttagagatttttacagagaga

SEQ ID NO: 26469 - DNA, 400 bp, Glycine max
agcttctgatttcaatgtcgagcctcacgatatactacgagacaaaatcggacatccgagtaaaaagttatgaaattctgataccaggggacagatgtcgtaccggatgtcacgacatcacgcttcagaacatgcagattatatgtgtccgtatgaacagattaaacaagtaaataacacaagagaattgtttacccagttcggtgcaacctcacctacatctgggggcttccaagccagggaggaaatccactctcaatagtgttagttcaaggtctaacagcccctgtttacaaccttctcacctaaccactacccgtgcgatctctacctaagagccactcttagatatgagaacctctgctcactccctctcactcacactcccgtgtttacaatc

SEQ ID NO: 26470 - DNA, 397 bp, Glycine max
agctttttagtaaattcaaatggtcataagttttcacacgaatgttcgattcggggacataactcatctagacgcctgaaattgaacaacggaagctctcgagaaattcgaatgctcataagttttcacacggatgtccgattcggggacataatatatcgagatgctcgaaattgaacaacggaagctctcgagaaattcgaatggtcaccacatttcactcggatgcccgattcgggaacataatatatcgagacgctcgaaattgaacaacggaagctctcgagaaattcgaatggtcataagttttcactcgaatgttcgattcggtgacataactcatctagacgctcgaaattgaacaacagaagctctcgagaaattcgaatggtcatac

SEQ ID NO: 26471 - DNA, 397 bp, Glycine max
agcttctacctttcctataagtatatatgtgatctttttctaaggatttttgtccctttaaatgggatggggatattatttttaaaatatttttgtgcatttaaacatttatatattgttcgaaaaataattttgaacatttctataataacttgtataagttggtaaaatttactgtaatattttttattaatactgtaatatttattttctagaagtagaaccataactttctatggtaagttgagaaagccgccgaatctaacactatatgaatgaaaaaaaaacatttcatttcttttttctttaatattctatttacgttttaaaagaattaatagaaattttttataaaaaaaatcaatatttatcatattattaattaattcttattaac

SEQ ID NO: 26472 - DNA, 399 bp, Glycine max
agctttatatgagttttacaaagagcacagcacaaaaaatgaagaatgtaagatatatttgtttgccaaaaatagagaaagaaaaacaagaaattttaatcaagatgtattaagaatcaagaagggaaagttttgatctcaaatcaagatattcaagagagataggagagttatttttataagcttttcaatgatggacaaggataggctcgtaatatgaaaggactataaatccaagagaatgaacaaaatttggcttactgccatggaatttgaattggagaggtaaaacaaatcctcaagacaatagacaatggtaaaattgtgggtccagaataaatggtatttctattgaaatttggaagtgtataggaaaagaagggatcatttagctcacct

SEQ ID NO: 26473 - DNA, 388 bp, Glycine max
tgcttcttcttcaatgaaaccgtttaaaaaggcactcttaacatccttttgaaaaagcttaatgtttttgtgagcaacaaaggctaaaatgattcttataacttcaagtctagcaacatgaacaaaggtttcagagaaatctataactttttgttgattatatcctcaagctactaacctagctttgttgcatactacttttccttgttcatccaacttgtttctgaagattcatcttgttccaatggtgctcttagtttctggcattggaacaaatgtccagacatcatttttgttaaactgattcagtttttcttccattgagattatttagtcattatctatcaaagctttgtctataagtttaggtttgatttcaaacacatgg

SEQ ID NO: 26474 - DNA, 395 bp, Glycine max
ttctgtatgatttacatctccctctttctcaagcaaattcttcttgatatcatcaaaatcttcatgatttacattctcccccttttttgatgatgacaaccacctgtaggttatgagcaacaacaaagaaaatatctatttgcatatagtttactcccccttggttttacaatgattgcttatatgagacaattgaagatttcatatttttcatatataaaaagtagtctcataaaacaatagataatttttcttactattttatcttttatctttctctccccctttgtcaacatcaaaaacaaatcatgaatagagaggagaaagatgttaccacttgttgcaatgtatgagaatcaagtgataccaataggcattaaaacaatcattcaata

SEQ ID NO: 26475 - DNA, 394 bp, Glycine max
ttcttctatccaaatggacttaccttgaattaattcctttgatagcccttttgagccttgtttccctttccttgttttgaagctcactacaagccttaagtgaaaaaccatgatattaccatatccttaaggaattttggagctttggaattgttttgggaataagtgtggggggtttttgtttcattggacaacttgttttgttggctatgcttcatgatgtattttgggccatacttgatgtacattgtatattggtttaatgttggacatgctgaatgaaatgttgtttctcaaaggctaaaaaaaaaaaaaaatcgaaaaaaaaaaaattcggaaagaaagataaaaaaaaaaaaaagcaataaagctgagtgaataagatcttaaatgg

SEQ ID NO: 26476 - DNA, 390 bp, Glycine max
atcttgtgtaagagggcatgaccaaggtgtcagcctctagtttcttcacaacactaacatattacattcttggcatgttctacaccaaccactctctccatatggatttgcaaaatcctaattaatttcaaaggatgaaaaatagaaagggaaaagaaaaatatataaacccgaaaatgaaaaagggaaagatatataaagtagcattacattacattagtagtgctcaagtctctgcaagcaacttcagttctttccatgattgaattagccaagtgcatattgtacttttccatagcatcaacaatgatgtaagctccatgtggagcttgtaagccttggatcttcttcatcaatgaattcctttacttcttggaagatgaaagacaa

SEQ ID NO: 26477 - DNA, 393 bp, Glycine max
ttctatatccacaaacataatccaatatccagaagactttgatagggaagttagaatcctcgggaaagcaaggcacccaaatctaatagcattgaaaggatactattggactcctcaactacaacttttagtaactgagtttgcaccaaatggtagcttgcaagccaagctacatgaaaggcttccttcaagtcctcctctttcttgggctataaggttcaaaatcttgcttggaacagcaaaggggcttgctcatttgcaccactctttccgtccaccgatcatccactacaacatatagccaagtaacattttgcttgacgaaaattacaacgccaagatctcagattttgggttggctcggcttctgacaaagctggaccggcatgtgat

SEQ ID NO: 26478 - DNA, 391 bp, Glycine max
  unsure at all n locations
tagcttcataagttgttacatgttccttcaatttcgaaaagtctgttaagtgtgagtcaatttgctaaagacaactttgttttctttgagtttcatcctcatttgtgtcttgtgaaatctcaggagaccaataaaattctcctacaaggaatggttggtgatgatggcctatgttcttttcacaacctcaagcttcaaggcaatctttctctgctgatgtccacttctgcatttgttccaaatgatgagtttcctacttcagctgctactgtcaataatacttctaatattgtttcaaattctaatgttacctctttcagtagtgctaatctttgacatgctangttaggacatcctaatgagcatgtaatgaanattgttctcaaacaat

SEQ ID NO: 26479 - DNA, 386 bp, Glycine max
tagcttggacaacaaaatttgacaactaatagaattatataaataagaaataaaaatgtaggataaaatcaaatttatattctttacttatattcttcttcctatttatttatgctaaattgcattgaaagtgaaatatatacaatattataattataataagaattcagaaaatataatttggtggagtaaaactgtagagtatttaattttaaataataaatttattaatgcacaaaaaagaaaaacatgttggcttttaacaattgtgcaactctttttatgttaggtttataattgtaatttttagagcacaatcttaattatgatttataaatatttctggaatattaatattcagggtatcaaaaaagaaagatatgttc

SEQ ID NO: 26480 - DNA, 390 bp, Glycine max
tcttgtttattgcgaaggacactagtcttagctgggatggagagaagaacaccattgttgctaatgatgaatggtgggaagccaaaattcaagtgtgtattatttaactaaaagagtttctgtgcaagccagcctttcgttctttatttgagattttgctattatttctttttcttttttcttgcaatcttatgctagcttctctagactttgcttttaatcatagtatctcattattgattctctttttcgctgatgataattgcgagcggctatcaatcattttactaaattcttgctcagttgatgcagatctgttctatctcattatgtcccttcttgtccttcatttttcgcacgattataatttataaattaattgcaccattg

SEQ ID NO: 26481 - DNA, 381 bp, Glycine max
agctttgcatgtcaagctttgcacaagacctatgggaagatttgggatctagctatgatagatgtttctattgaagccattgcagccctcactcagtattacgatcagccactaagatgctttatgtttggggactttcagttagtaccaaccgtggaggagtttgaagagatcttgggatgcctgctaggaggaagaaaaccatatcttttttctgggttctatccttccatggcgagaatagccaaggtagtcaaaatctcggtgcaagaattggaccgagtaaagcaaaatataaatggcgtggtcggaataccgaggaatcacttggaggagaatgcgatagcttggcggatcgaggtgaatgggcttcgttcattg

SEQ ID NO: 26482 - DNA, 427 bp, Glycine max
  unsure at all n locations
ntagtgagggaattggatctaaaatctgttcaatgttatgaattatgagttggaggtggaactaggattttcttcacattatggtctactcatcaagaagtgtatgtaggaggtggagaattggtgcaagggttgagctggtggggtgaacatgatgatgaattggagtcttcccaacaggaagaggagtaggagttaaagagtggtatagtgatggttgtggtgatatggagggtgagcttctttgtgggtangagggtgaattggcgactttactaaaggaataggagcatgagtgggagaatgctagtggtggcggtgatggtccgagctaattntcaacaaccaactangaccgattgtatgcttgggtctcattctggtcattccaagctgattnttagaactatgggcgatagcgttgtat

SEQ ID NO: 26483 - DNA, 110 bp, Glycine max
acttgagagtacgatcgtgtcatctatacatatgagatgaagcaggggcatagccgatcactgtgggaaatcgttgtacgatacacgatgaaccacaccattgcatccac

SEQ ID NO: 26484 - DNA, 386 bp, Glycine max
agctttgagccaaaattctgactcaccatattctcttgagccaaggtgagaatgtgaatccttaccctcggaagcaaaaaaagaatacaggggaaatttccaatcaaagaataagtaatggaaaatttccaatgaaagcggaaaaacaaaagaaggaaaattccctaatcaaagagtgggagaaagcattttaagaaaggaatgaggattccccaatcaaagagtggtagatagcactatgaacagaaaggaaaattcccaatcaaagaatgggagatagcaaagcatgaccaacaataaggaaagaacgctcctgatcaaggatcgaatgaaaaacagaagaaatgtgcacagaggtctctggaccggacaatatctgaacaata

SEQ ID NO: 26485 - DNA, 443 bp, Glycine max
aactcaagctatggctgcgcagcagctctgatttcgtgagtatttatagaagatgtttcattgttatcgattacaggtattggtgagcgattacacgcccagtaagccttctggtaatcgaccacaggacgttgtaatcgattacaggctggccgatcatgtgtaatcgagtacactgtatggtaatcgattaccagagcctatcctaggctagttcctaagagaatatctatatttatactcgaatacatcctatatgactaatttttactactaatatactaaattcaatcattcaattactatatacacaagacatcatatattctatcataaaagcaagaattcgaacacgatcaaacgatacaatctacaatcaaaagataaaaagtatatcaaccaatcaatcaaccaatcaatcaaccaatcaattcctattgttc

SEQ ID NO: 26486 - DNA, 373 bp, Glycine max
agctttaatgaatgattatgctgacaaatcttgggatttgaagcgcacaagtttaagaaaattggagagagcatgttttcagataaagtggcagtcaatgtttaaatattttgtgacatgtaagattactagttatttgaatgagaaacttatgatgcaatatgtacgaagaaagatctggttcctcaaatagtaactctaaaatagtttttgttcaaaaaatattttaaaatagttattatttattttcataattcatttttttaaaatttgtttttaaagagtaataaatcttatttattaaattctaagataatgaactataagaattaaaagcaactctttttagaataaaattaagatggacaataaa

SEQ ID NO: 26487 - DNA, 428 bp, Glycine max
tgttaaatgaatgatagtaattgagaaacttttgttatagcgatatttcgtgagagacagagaggagaataacagagctgctcagaactgcgagatcaaaaaaacgcttacgattctggagagaagaaaataaaataagagatagaagaattattttttattttttacttttatataaaattactgaatgtgaggaaaattacagaattaccttaagcagaggtgggagtcacagaggcgaagagagcgaacaaagatgagagagagagagctctgttaatgttgggtctggattgtcagaactaagaagggggaatggatgggtcaagtttgagtcataggactcagctcctgtgccagagattacccctacatatcacttctttgttgttaaatttcatatcatatttatttatcttttacattat

SEQ ID NO: 26488 - DNA, 377 bp, Glycine max
agcttataagcaatctataagggcatctctctttattggcttcaacacgaagtgagcttgataatctaaagcaagaaaatgaaaaactcgtttcaagttataaagccactaattgtgttggtgtttctacatcttctaatatggatgattacaaatccttgcaagatgagtttgaaaagtttaaaaaatatcactatgaagaacatatgaagttgcaaactgagctttcctatcttgaagatctgtttagaaaatgaataaaggaaagagtaatcttaatcacttacttagtgtgcaaaagcatacaattgataagactgctttggggtataacaagcaaactgacatttctaagaaaaccaactctgtacccctta

SEQ ID NO: 26489 - DNA, 429 bp, Glycine max
ttctctctgtgttgtttcttctgaaggttgcttcaatttctttatccatttgaaccaattcacctacagaagatctacgcatgcaaacactaacaggaacaacagttaaccaattcaagaagaaaataaattctgaactaaacaaatattaacaaaaacaaaaattaataaatcaaagaataatgaattaatgccttcaaactgaactaaactctccaaatggaaaaagttccccaacaacgacaccaaaatacttgttgttcgcactctaggatactacttgtttggtggatgcgaaatataccgacaagtgcactgggtcgtcaagtaaataaataaaacggtgtgaaccgagtatcgaactcagggaacttgttcatttggtaaaggttcgctcaataagaaggcatttgcaaatagaaatcatga

SEQ ID NO: 26490 - DNA, 103 bp, Glycine max
  unsure at all n locations
atctctggggctganaaaaactatataatagcaccaatgttctagtttagggccccgccccctctctccctctcgggagactctctctttctcatcacccttt

SEQ ID NO: 26491 - DNA, 418 bp, Glycine max
tgagaagtatttaagatctgctagatttcatgactctagcgaattgtattgtctctcaaattgagcaaatccttgttggactctttctgggaatatctcagggattggtccaaagaagtcccatcattgccaaaaaccaattgggaaaattgtaaattgtattggtcttgaaatatatcagccatgaatgcttgaagcgggtattttggtgccaaaacaccttaatccaagcatcaacataatcccaataggtataacctaccggatctaatggaactgaaaatctctttcctttgttcaagtccgaaccaaagtgtcttgcgtgaagaacttttaatatttggattgcggagtgcgtgtttaatgtcaggtctttctggtccttgaaatgtttgatagatactgaatttgaatctat

SEQ ID NO: 26492 - DNA, 361 bp, Glycine max
agcttgaccaggaattatttgttgggttggatgttgaattctggttgttcctgctgcggagatgatggtacagagggtgaaccatgagctgaagcttcttttggtgaggtagccatggaaaagcatagcgtttggaatgattccgtaaatttctgagagctgctggggaatgcagaaaacgagattaacacgaaaatataagtttgaatgatgaatgtacagggacgtgtgaagcaacggtcgaatctgctttggttcagtatgtgaacgtgctattaatgttaagtgattcctttgggcacgttcagatatcagtatttgctacaattgctctagcagacaaattgcccatttgcccctc

SEQ ID NO: 26493 - DNA, 431 bp, Glycine max
  unsure at all n locations
tactcaagcttattgagtaaacactctctgagtgattataacacatctttctatctttttatctatggcnagtgaaagtcaggagtggcttagtgacaaaaagtacttgggtcttaatctcagggagagattaatggtaatgccatgagtggcctacagagtactcgttgtatccacaagtggcataaagaatacttggttgtcatcaaagaattgattaacaaaacctttcatgttttgaaggaaaactggatgtatcccaagagttgggataaatcaatataaaacctctatattttttactgcttatgtataacataaggctacataaacacaagactgcattctaacaccaaacccaacatgcacctacaccaataaatcaaaatgaagaacacaatgaatggggagatagataacacaattatatg

SEQ ID NO: 26494 - DNA, 357 bp, Glycine max
agcttgcctcaaagaggttcaggaatgaaaaggcggccgaaggaactagttccgccccggagtacgacagtcaccgctttaggagcgttgtacaccagcagcgcttctaagccatcaagggatggtcgtttctccgggagcgacgcgtccagctcatggacgacgagtatactgattttcaggaggaaatagggcgccggcggtgggcaccactggttactcctatggccaagtttgatccagaaatagtccttgaattttatgccaatgcttggccaacagaggagggcgtgcgtgacatgagatcctgggttaggggtcagtggatcccgttcgatgccgacgctatcagccagc

SEQ ID NO: 26495 - DNA, 408 bp, Glycine max
  unsure at all n locations
tgtaaattgtaatattcattagatagaaattagattttacattcatgagtgaatcccttttgaggtgaagatctacaatctgtgttgtaaaaaacatagataccttttaccgttgtaagtccaacagtggttgccaaagctgaaatccaatgttataactggtctagttctggttaggttggaagtccaatgttataactggtctagttctggacgtagcccaaggttggggtaaaccactccatactttgattttgaatagatctatcaaatgcttgcttaaacactacatgtcataccctaatttcgtccggngattattatttgttgatatacaacctttgattggccgcttcgagacacttggcgtcctttgttgcacaatgaatgaagtcccgagacgtgtca

SEQ ID NO: 26496 - DNA, 530 bp, Glycine max
  unsure at all n locations
acgcacacctcctgtcacaacaatcgccggntcttatatatacaganttcctnccaccgccgcaggccatgacccgttgaaacttggaacnctgaaancagcgagcnaaagaaagccaggcagagagcaacacacgctcttgcgaaatttgaacaatctactgagccgcacatcacggcgcgagcgcccgtctactaaacggcaaaacacgccaccatacgcgaaacgaagaccaaatactcgcaaagcgcagaatgcacgcgcaatggaactcgtaggacaaaataaccgcatgaacaggctaagccgggacaacctgcgccccacgcgggactcacagaggcaagcacagacccaaacggagctaaaggcacagctacgggcaaggcgcgagtggaaagcatgaacaaaaaagaaggacggaggagtcaagaatgcgacaaggccacaggcaccgcccagacaaccccgtgcgaaagcaccactaaccgcacgaagagacaaaccaacctgcgaacaaaccctccgcn

SEQ ID NO: 26497 - DNA, 367 bp, Glycine max
  unsure at all n locations
agctttataagagcgggtctgggagacaaaggtcaagtggtcgcaatatgcgaagatgatgttccgagtacattggatttggtacgaccatgccctcctgatttccagctgggaaattggcgagtggaggaacgctacgcaacgagcataatgtaaacctttacggttttaaaagctctatagttgggcctaggctttagagtttttccttttgtgaaggctttgtgtcttttgtttttgaatttataatacaaggatcattcttcatctgttcctacgtctctacccattctcattcatttgcatgttcacttctttttctgaaacggcagatccaatgacgagtcccncgaaagtactaatacct

SEQ ID NO: 26498 - DNA, 416 bp, Glycine max
  unsure at all n locations
tagtcccatatccaattacacatactttactcaacattgtccataattccatatggcccatatgattttaccttatgtttatttgctagaatcagtaaccctaatccttaaaagcctaaaaccctagggtgagtattagtttgcgacattgttagtctagcctctcatttcttgtcaactttgccttcaggatccatctcctccatgcttgatgtttatgcttgttgttatcgtggttgcatgttcaaaccctaaggcaagtgcgagtttgtgtcattgttggtcttgcctcttgagtctcatttccttcttcttcgtctcctccactcttttgattactttcccagtcaatctctagtatgtatgtgtgcatatatatttcattntctttgaaagatcctaatacccctatttga

SEQ ID NO: 26499 - DNA, 353 bp, Glycine max
agttttgtcacccagctcgcccaggcgagcaaggatgcttcctccaaaagcaacaaccttctggaggaatcttctggagggcccaagtgggcctggatgctatttgcacccccatttttactaaatacaccccttgccctttcttggtgattcttttgtcgtcaaggtacggaaacttatggattccacaacgatactttgattctttctgtaacgtcacagaaccttgcggattacataatcatcccctttttttacttacggaatgttacagaacctcactaattgtgcaacgatgcttacttttgatttccagtgtgtcacggaaccttacggattgtgcatcaatacct

SEQ ID NO: 26500 - DNA, 260 bp, Glycine max
agcctgaggagcgtagcatgctatggtctcacgaggatgttcttgatgtattatcaaaagatactgtgggacctgcctttatttatttattttggattagacattcatgtgtaagttgtcaacatgcatttgtttgattgactatcacaactttgaaaattagtttgctcgtgaagcactctctgcttccactcctgtttctagcaacaaatgatgagtctcaccacgagagttttagctacatcaagctatatacattc

SEQ ID NO: 26501 - DNA, 354 bp, Glycine max
agcttcatgaaaacaaaatggaacttatgagactaaaccaacatgaagaaaatgacaagaaaaagaaagtaatttcacttaaaacctcatcttctattcaagaagaaagtgaaaaagaggacttgaatgaaatagaagaagatgatgatttcagtttcttcgtaaagagattcaataagtttctaaggaacaaaggaaatcaaagaagaacaaacttcaattcaaagaaaagaggagaagattcatcttctgttccaaagtgttgtgaatgtaatcaacttggacatctgagagttgattgccctagtttcaagaatagaatggaaaaatctaacaggaaaaccttcaaagata

SEQ ID NO: 26502 - DNA, 417 bp, Glycine max
tagagcatacacattcacttgctaagcatgaacaactcgctaagccacacttcaactctagaacttcagtagattaatcggcttagcaagccaccataggctaagcgagtaccaattactcgctaagcgcatcatgcacgcttaatggatcttgtaggacaaaataacctataaatcatgctaagccgggtcaacttgcgctcttcccaaaactctcttaggtttgcacttacccaaattgggcttagtgcacatttacgggctaagcgcgagttaaaaatattaaaataaaaataatgatgagggagtcaagaaggcgagaataccaaaggtcaccaccaatgcacactaagtgggaaaagcacctactaagcgcaacaaatggttactatccaaacttgctaagcagacactctc

SEQ ID NO: 26503 - DNA, 387 bp, Glycine max
agcttacaaggtatctctatatataacacttttgagacacaagtttttacaaaccaagtgatgtgggactaagatcacacaagttttacagaccaagcgatgtgggacaaaggaactaagaccacaaactctaacaattctcccacttggggtctaagttccaaactctagcagctccttgtaagcaatgagttcatcgactctttacctagtgtagcgccttcatcttcaattatccttgaaggccaactgaggcaatgcaaagactcagtttgtcagttgtaacagctttagtcaacatatctgctggattctctgatcctaagatcttcaataaagataagtctccatcatttatcaactccctgataaaatggtatcttaatt

SEQ ID NO: 26504 - DNA, 430 bp, Glycine max
  unsure at all n locations
tgaagcaggagctgatttgagagcttgagatgagtttgtgagtgattgtgagattcttgaggtgaaggagacatcctcaccacttgtatttttgcaatcttttatctcgttcttctctttgttgtaaaggagacttcctggtatggaaagctgaattctctgttggatcttccctataggtacttgatgtaaggttgaattggaaaggcataatttccataaacgcctcaccaatttagtcgatgggagcatagacctagctntggtgaaagaattctatgcaaatttatacggttctaaggatcatccaccaaagcagtccagagtcaaaggtcatttcgtgaagattgatgctgacagtctcaacacattcttggagacacctatggtattagctgaggnggagaccttacccgcttactccagatac

SEQ ID NO: 26505 - DNA, 267 bp, Glycine max
accaacaagatggaaaggaccctgccaccactatgcacacaactcaagctgcaacaaagaaatactcatcccagacacattgacacagaattctcagtgataaagacacgctaacaccgggacaaacaaaaccagacgaaaatgaagcaaactacacaccaccgacaacaaaaacaaaccacaccattgtaaacccactctgcgaaaacaaagtcgttacaccaagagtatgccaaaaagaaagccaaaaacataacccaagcacac

SEQ ID NO: 26506 - DNA, 434 bp, Glycine max
  unsure at all n locations
gctaggattcatagacccgaattccatgagctgcacatgttccgaaacgtagtgactgagcnacattctaattctgcctgcagacacaaacgtagatctgttctcacaatgagacaccaaattgaagtaaaataaaaaaaggtaaaaaaaaaagaaaaagataaagataaatggacacacacaattctattaataattgtagacacttgtgccatatacacccatgggtggaagaaatcgtgttttcgacgtgagaaaaaaaacggaagtgaaaataaagagtgcttcaacgtgatcgatttggcaccaccgcaccgcaactccaaacacacctttacctgttccacaaaatgggaacgccaataacaacgtgcccggagcaagaacatgccttctccgtagccctaaccctaacggaaaaattaatcacccca

SEQ ID NO: 26507 - DNA, 373 bp, Glycine max
agcttttcgattcattttatgtacccgtagtggtccacattgtgtttcgtgcatttttattctcgttttgtttactttttataccccctcttgacgtgcttaagccattttacttaagtcatttctcgcttaacttaaaaataaaataaatttccaccgaacgtttgaattgtattatccgttaacttcggttaaaatgaattccgaccgttcggtcgtgccgtaaccacgttggaaatcaaaaaaagaggtaaaaaataatataataatcaaaaaaacatcttttagtaaaataaagcggaaaatcaatcggacgttgtctctttgggatttctcattcttaatcgaattgactaataactaaagtgaaact

SEQ ID NO: 26508 - DNA, 435 bp, Glycine max
  unsure at all n locations
tctagaganaactacatgaagctgcctcggtagaatttcttcccagtcttcgtttaccgttggatcttctcgaaatttggtttgcaacttcacaagacactttaccatgatttaaccgttgggatctttgggaaaatatctggagcgtgctagaagcttccgttcccgagagcatctcttatttaagcatttcagcctttgctttcttgtagcttacgaaaaatgtcatttcttcttctttctttctttcaaatccatttctaaagttccaagtactttctccatcacccacatccaccattagccaccacaaaccatcattgttctccattgaaaacccacaccgagaggaacccttcaaccgaagcagaatttccaacttggcttgcggcttcggtagagaacgaataccctaatctgatctttcgttttctt

SEQ ID NO: 26509 - DNA, 381 bp, Glycine max
agtttatagtaatcgtttacatagctctttttgatacaatgattgattcttcaggagtctttgatttaatagattaccaaatgatataatcaattacttctctcttaaaaagtgtttcagaagtgatcaagaacactttaatcgattacatcaagaaactaatcgattacattgctcttggaagttttctagcttttgggaagaacactttaatcatttgaaatgataatataatcaattaattctttgaaataattgattacattgtatatttaattgattacacgcggctataatggttttctttataaatagtcaccttgcgttctcacttctaacaactttagaagtgtgcaaaaaaaaacagtgcataatttgtat

SEQ ID NO: 26510 - DNA, 432 bp, Glycine max
  unsure at all n locations
tagctacacacacccctctaataactaagctcaccttcttgagaatcttccttaanaagattcctaaagaagctagagcttagctacacacacctctctaatagctaagctcacctccttaagatgagaagctagaactgtgctacacaccccctataatggctaagctcacccccatgacaaaatacatgaaaatacaaaaaaagtccctactacaaagactactcaaaatgcctcgaaatacaaggctaaaatcctatactactagaatggccaaaatacaaggcctaaacgaaggaaaaaacctattctaatatttacaaagataagcgggctcatacttagcccatgggctcaaaatctaccctaaggctcatgagaaccctagggccttcccttggatctctggcccaatctacttggagtcttcta

SEQ ID NO: 26511 - DNA, 386 bp, Glycine max
agcttgataatacatttttcaaaatcaaaagttattttatatcctttatcacacaattgactaatacttaatagactatgctttaaaccttctacaagtaacacattttcaatgggagtagaggaactcgtacctattttgctgactccaatgattttgcctttgttgttgtcaccatatgtaacatgtccacttttcttgggggaaatggttgtgaatttggatacatctcctgtcatatgtacggaagatgaagacgtacacacgatttatactggttcggccacaaaccgtgcctacattcagtccccaagcaacctgcgagtcttgagatgtctatcaaccttggaaaatcctttacaagccatagatccacaagggatgta

SEQ ID NO: 26512 - DNA, 404 bp, Glycine max
  unsure at all n locations
tatgtgcgactctgatgatgaatcagaagccgtttatgctcggtatatgcngtgccgcanagataatgttgagactagcacttggctagaaggaatttacaaaatgaaagaaaaatgggctagttgctatatgatagatgcttatagtataagaatgccaagtactcatcttagtgaaagtttcaatgctagtgtgaaagattatgtcagatcaagctcgcatataatgcacattttcaaacattatgagcgagctgtggatggcaagcaatacaatgaattagatgctgaatacaatagcaggaaaaaacttcatcggctaatgatagaacactcaccattattaaagcaggttacgcaactttacactccaataatgttaaattccgttcagaatgaatatg

SEQ ID NO: 26513 - DNA, 367 bp, Glycine max
  unsure at all n locations
agtttttattatacatcgtttatctagctaggctcctgcactttacttcatattgaacaattgtatataatatatattatatattttcatggctatagaactcaaatttttatttacaaaatacatttatctggcgggaagtactttgatgctgaattttaatattttatgctataaactttgtaagatgaaactctgagctaagtcaaaagatccatctgacgacggtatgttacagttacagttacagagaaaaagaagctaacaattgctgcactagtgcaataattttgttggcttgtggaaccatangtttccaaattagtaaaagaaggtcttggtttgaaagagaatgcatgagacagat

SEQ ID NO: 26514 - DNA, 328 bp, Glycine max
  unsure at all n locations
aacttgttagaagcctgagaaagattctaggaaaactcattctccaacattgcacgtgcacaccccatctaacacatatccagaattgtcgcactccaccactatcatcttccagcactagttttggttntgagtatttatgttgcggtagatggtgcgggtctcgtggcgttgagattaaagtaagagatgatgtagacaatgctatcattctcaaccaaactacatttttgtctaataataacgataaaaaaataatgacaatatgattccattgcttaataagtcaacagagtcgcaattctattgcttaccaaatgggtgaaaa

SEQ ID NO: 26515 - DNA, 342 bp, Glycine max
agttttgtcctacccttttatttgctacttacactctgtcatcctaattatttattgagtacatgtaaataatagatactgaaattccaatcaaactaaaataaaacaacttaattcgattttaaacacctgccatctaaacgcggaataatgtgttgccaagtccatcagtaacacctgccatcctaattacgctttatttggtgaataattccttcctataaccatgctctattattttccacgagtgtacagtgtcccaacttcagcttgttaggaatctgaaatctaccacaaaggagcatccattatacaaattaaattattctttttttacaattc

SEQ ID NO: 26516 - DNA, 362 bp, Glycine max
  unsure at all n locations
tatcggagcatgaagagtaattggactcttatgaagatccggccttcaaatatcttaaatcaatcaagctttatgtcataaataacaaaatatacaccttagagtcctactagagattgaccctagaagagaatagacactgcactaaactaccattatccacgccattggcagcaaggacagaaggaccaaactgaaccaaattcaacagtgagatgcctcataatataatgaaacacatatgacaaagtttaaaatacattcaattaaacacattttgagtgtataggaaacttagtgcatgattgtgggtagtgtctgttcanatcgaacatgatgatgggtggagacttgcaagcttt

SEQ ID NO: 26517 - DNA, 371 bp, Glycine max
agtttcacattttttcctctcagaagtcaaccaccactcgattcttctacgcaccgcatgatatgcgtaagtcttgtgtttggaaatcattttgttcaggtccattgaaaattcatttactcaaatattttcaattattcaataacttggcttgttcgtttaacttattattgtcatttcacttacaacaggtttatctcaaagatcattgtcccttaccgcctatggcattgttgtggtcaagcaattcatatccttaggcaaaacagtgtccaactacatacgtaggtagaatgcagtagtacttaagcctaatgacaattaaaacaacgcatgtagacctaaacaaacactgaagctgtaacatttat

SEQ ID NO: 26518 - DNA, 418 bp, Glycine max
  unsure at all n locations
tatcgagatccgtgacancctcaccactcttaccttgtttatgttttgcgactctttcttgtctttaacatgttgtattgaataccatgggtgagtttggggaactcgtgttcactgcaaggatctttgtttgtttgtcttgcaaggatttggtttgtggaacttgtgttcgctgcaaggatttggtttgtggaagtcgtggtcactgctaggtctgtttggggtgctcacattgcagtctgtttggggtgctcagtcgtgctcgcagggtctcattttgagtaaggtgattcagattgctagttgtcctttgaatgcttaatggataggtagctaggtgtctattgtaatacgtatagcaccatggcaaatgtaacaatgttctggtttttcttctattgatgtgtgttttgagctt

SEQ ID NO: 26519 - DNA, 314 bp, Glycine max
agcttgaatcggacatccgtgtgaaaagttatgaccatttgaatttctcaagagcttccgttgttcaatttcgaacctctcgacatattatgcacccgaatcggacatctgtgtgaaaagtcatgatcatttgaatttctcgagagctttcgatgtttaatttcgagcgtatcgatatattataaccctgaatcggacctcagtgtgaaaagttatgaccatttgaatgtgacgagagctttcgttgatcaatttcgagtatcactcgatgtgacgcgccttaatcggacattcgagtgtaatgttatgaccat

SEQ ID NO: 26520 - DNA, 408 bp, Glycine max
tttcgattcattctatgcacccgttgtggtccacattgtgtatcgtgcatttgtattctcattttggttactttgtataccccctgttgacgtgcttaagccattttacttaagtcatttctcgcttaacttaaaaataaaataaatttccaccgaacgtttgaattatattatccgttaacttcggttaaaatcaattccgaccgttcggccgtgccgtaaccacgttggaaatcaaaaagaggtagaaaataatataataatcaaaaaatatctttttagtaaaataaagcggaaaatcaatcggacgttctctctttgggatttctcattcttaatcgaattgattaataactaaagtgaaactaaggctaaaatcaactcgcctagtcaagctcgtccacaaaa

SEQ ID NO: 26521 - DNA, 272 bp, Glycine max
  unsure at all n locations
cgcaagtttatcctctngaattcgctacctcaggttcgtaatttcctacttatgccattttgtctatcttataaatactgtttaacttgcgctagcctgagaagatggactattcccatctagtatggcttagacaaattttaattcgacgcgtaaataagactcacgacgattacttctatgatctataattagagagttcatctatcgctgatgctatgaggatatatctatataaacaaagtggtcaaatttcacttggataactttga

SEQ ID NO: 26522 - DNA, 382 bp, Glycine max
ttgacatacattcaggatatatgagagacagcactgtgcaaaattgtcaccaaaataatagcggagcagtagaagcaggtgcaccttcagtcgagaaagatcttgcttcttcagtaaaagcagctactgaagttcctccatcctcttttcagttctatgtctggtcagatgtgggaattaatcttcatgttgatttaaatctgtcctcatcagattggattaacaggtttagaaatgaggtttgcataagtgagaatatgcatcgaaacaaatcccgaagcctttggcaggatctgagcagcttaggagagaattatatgcaaggtaaatcttgctttttatggagtaaaaaatcttggtcaattgaggatcatgatggaca

SEQ ID NO: 26523 - DNA, 292 bp, Glycine max
agatgcgtaaacctcgagaccggaaatcatatagatcaggtccattgaacacatcatgactcaagaatatgcaacactccacttactaggcttgtacgtgaacttagaaacggcagattactcacaccagggatatctcacatatcattgtcccataacacctatggcattgtggcggtcacagcacttcatatacgaatgtgatacgaggtccatctacattcggaggaagaaagcataaactcctaagcctaatgacggtttaaactacgcatgtagacccagacataca

SEQ ID NO: 26524 - DNA, 187 bp, Glycine max
aataccatgcgtgagataggggaactcgcgttcactgccaggatcgttgatagctcgtctcgcaccgatatgatacgtggaacttgtgtccgctgcgaagagttggtttgaggaactcgtggacactgctaagtctgtacgcggcgctcacattgcagactgattggggcgctcacacgtgctcgca

SEQ ID NO: 26525 - DNA, 385 bp, Glycine max
agtttattattatgtttgttctaacttatgcttgcattcttattttttaagtacttattgaaatgttatgtttggaacgattaaaaaagggaagattttggataaataatcaattttattcgaaaatgtgtaaaacacaaacaaatgtagacgaaagaaaattaacggatgaataaatttgtctcactttttttactttcaagacctaaaatttgaattttcatctttcgagaatgaatttgtcaaaactctatatattcagatacgaaaataattatttaacaaaaaaaatgatagatgaacatccaatataataatgcatacagattgcaatcaagaattgtcatcaaaactagaaacagaacgcttgaacctaaactagaat

SEQ ID NO: 26526 - DNA, 439 bp, Glycine max
  unsure at all n locations
aaactcagcttaacatacctttaatatcatcctcagtatcttcctttctangtaccataacatgagcattctctaatttatcttcatcctccaatggtctctcaagagattgcaaatgcttacgtagcaatttagcatgaatttcctttaaacaagcctgcatttggagcaatttagtaatacagtcaaagaaaccattgttcataggcatataagaatactggaaaataatatgatggagaataccttggccttataaatgtggagatgttttaaaatggcctcccagtactcaaccacctttgctgtaccagtacgcatttctgattcaatgtgaacccgtaaagcctccaactctgcatgtgtcttcccctgcaaaagcttcttcacatctggctcaacactggaatgcagacccctttcttctgcaagcagctca

SEQ ID NO: 26527 - DNA, 385 bp, Glycine max
agcttcaagaataatgtgcctcagcaaacttcttattcccagaaggaaattcaatagatatgcctcttatttttaatggagagggttaccactactggaaaacctgaatgcaaattttcattgaggcaatagacttaaacatttgggaagccatagaagttagaccttatgtacccaccttggtggctggaaatacaacaatagagaaacctagaaaagagtggtctgaagaagaaagaagattagtgcagtacaatttaaaggctaaaaatatcattacttctgccctaggaatggatgaatattttagggtgtcaaattgtaagagtgctaaggatataagggacactctacaagttacacataatggaacaactgatgtcaa

SEQ ID NO: 26528 - DNA, 429 bp, Glycine max
taagatatagaaacaatgataaacatttatatctattattgataattatttatcatttaaaatcacatacaacacatcatttatatctatgcacaatataaacattttaaaatttcaaaataagatttcacaaaaaaaaaatatcagaataggacaatgaaacaaaatctgatttggttttaggacaacgaaaagtaacaattccataagctgaaaatttaagctttaagaaaaggtctactgagagcttttacttttgtaaaagctaaaaaaaattaataagcaaacactcttaagaaataaagaaaacctttttttagaagataagatgccggaaggtcttttgggttgcatccaaacggattgtagggtgcatttgtgaaaagctctacttgttatgcagtgaataaaaagatacatcaatacaca

SEQ ID NO: 26529 - DNA, 384 bp, Glycine max
agtttatcacaccggtttttgcaaaacaatctttggtttaaagctaagcacaacggttttatcaaaaaccatcgttgagtttacaacaataccaataagaggaaacatcttatatgtggagtattaaggtttaatctaaaaaattcacatgatttattaaaaaaataacatgaatttttaagtggttaattggtcacatgacattaaatcttgatcattcatgtttgattagacagtccaaatttaatcttctaaccctcatataagatacattcctcatatatctatctatatatggggaatgttaacatagacccacttaaaaattagaaggtctatattagcatctagtatcctttcatttgaacaaaaaaatcactctta

SEQ ID NO: 26530 - DNA, 404 bp, Glycine max
  unsure at all n locations
aactcagcttaatacaataaatgggaaaggtcagtaangtcaagaatctgataactaacatacaacattgaagcgtgttacagaagccatatgcagtatttatcataatgataaacaaattggattaaaaaggtaaatatcaattggctaggcaatatcaaaccaaacttatctatttgtgaaggaaggcaagtattaaatacttggtaaaattgcaaaattgatcccccactttatctccaattacggatttggncccnctataaattaatacacaaatttggtccctcaattttataaatccctgcaaaattggacctgaaagcccaattcgtacgttgaccgcaagcctcagagattactgtgacgtgtcaatgccacgtgagactgtctcatgactacat

SEQ ID NO: 26531 - DNA, 380 bp, Glycine max
agtttcgaggtatagtttcactagcacttgctgatcacttgagtcttgagatatttcagcatgttgcaatggtgaagcttgttttgctggttatattgtttgatgttctggtacctacttgcttaaccttcagctgctgcggtgaagattgtaccaagctttacatcaagttactccgtaaaattatggcacgacttttcgggtagaattgagacttgagaatgtaatgcaatttctgtaatgatgttgataagtagggcctattagaataggagggctattacagcatgtttgcccgagtacttgtaatcataatatttagttattttctttctaaccaacatgtattaggcttttcacatccttctatatgaatttgt

SEQ ID NO: 26532 - DNA, 424 bp, Glycine max
tgtaaagcatgtatattgaatctctagctttttttgcccatttcaaacaactaacaataacagtcaatagatttgcacaaaaggagtgtgtgaaattacgttgggtctacaactggtaatttccgaacaagagttactgcttttccatcaatagtaggggccatctcctctcctttattccagtgcaagtacgtcagctttccttgaaagaagtttttccaaacaacatcacgtacctctctgtctgtaatttgacctcctttgtagttctgttcacattatacattgaataataaaaatcatttcaaaggaggggatttgtaagtgctaacaatgtgataaacagctacagataacaggaaaaccttgcactggcacagttggtgaaattaaactacaaggaaaaatattcctataaatgtca

SEQ ID NO: 26533 - DNA, 475 bp, Glycine max
  unsure at all n locations
atgctagggcnnatttgaatcctttganttgcnagcctagtacgattgagngcctcggagatcctgtagaggcgacctgcaagcatgcaagttttgaaagccattctgaacgaatgactttttgattgaagacatcccatcacacggaacggtttgtggactccgcgaaccctgtctcacgatatgacgccgatatggtatatgctgagagaattggaactcggtatttgaatacaagcgcactggggagagaccagaggcgttcttacatcgcaaaatcaaccctacagtatgttctctacaacattgagtcttaaccaagcgtcccattattaaacgctgacgcccgtctacagaagaaatctgttttgtaaactgattgctgaggctgattcctctatgttatgcgagctgtccctgagtggngtagagtgtcgtaggactaagttgcacatgcattgacaacatgaagaan

SEQ ID NO: 26534 - DNA, 476 bp, Glycine max
  unsure at all n locations
agcaactaggttgacccttgtgancccttgactctttgnacncagcgagtgccacggctctctatcctgagcagcgcaactgttgaaccagttttgctcatcttacggccagcactgtgactaacagagaaacgctctcaacactatttccaatgattgaaatggctagcttgcactctaggacgttacactccgagcccacttaaggaacgccacttatgattttgacactgaaactccgttgaatcgcaatattcatagaatgtaaggacagtgaccaaaatcgtgtgcatgaacacttaaaccaaatgaatacatttctcaaaagaaggcttgatagggacaggtaaggccgtaaaccctgactttgatagcaacatgtggaaatgcctggatcaacgcataccacactctattgcatatatcttcatacttcacattatctctccgccgaacgaaccaatgatagtaaactt

SEQ ID NO: 26535 - DNA, 449 bp, Glycine max
  unsure at all n locations
cgacccttgacgctttgatgacaacggtganancataggcacttggagctccgcccagggtatctcaaacacgacacttatgatgccattttgagangacaacgccgaactctagaaggatcttgagcacagtaggacaccgctgaatagaatgacggtagatccagatcattttgctgacaggtcaacctgtttgcgattatagtacgtctaccctccaatgtttgcacagccaatttgacttataatacactgatgaagtctctggtatgcgcatcgatctaccctctgagctttttaactccaaacaagagtattgccggcatctactaaacaagattattgatgtgatcaaacctgagactattcatgcacattccgatatggactcgtgcttcgcgattaaaatgtgatgttgccagactccggactctacacttgatctcacg

SEQ ID NO: 26536 - DNA, 380 bp, Glycine max
attttccttagagaggtttggtgctccgtgtaggaagagatggttttgagaagagagaaagaaaaaataaattcacgaggatgaataatcgaaaaagctatttatatctaaggtattcacaacctattatttactctattgatttattgctattatttaatacaaacattatattttattccctattcaataaataaataaaatattttttgtattttctcgaaccattattctaattaataatttttttatctatttaattataaaatctcattatcttttcaaatctctatttattttcgaataacaatcattgttaaatcagtttataagaaaaatgaaatgttacacatgtaaatgccaatatcaatataactatg

SEQ ID NO: 26537 - DNA, 171 bp, Glycine max
agttttgagaaaattcattcgacaataactttgtactcggatgtccgattgagtcccgaaatatatcgagacgctcgaaagtgaattccgaaaccctgagcataactgaacgagcataaccttttactcggatgtccgattgatgtccgtaatatattgaaacgctcgaat

SEQ ID NO: 26538 - DNA, 334 bp, Glycine max
tctacattcaattccgagctttgcgatatattactgtattcaattggacatccgagtcacaagttattgtagtttgaatctgctcagggctgcgggattccatttcgagcgtctcgatatattacgggactcaatcggacatcagagttaaaagttattgatgctagaatttgctcagagcttgggtattccatttccagcctctcgatatatgacgggactcaatcacacatccgactgaaaagttattgacccctcaatatgctcagaggttcggcatgccattctgagcgtctcgaggtattacaggactcaatcttacctccgagtaaaa

SEQ ID NO: 26539 - DNA, 213 bp, Glycine max
atgcccttcattctttacatgtacgtaccgtctcctggactgatttttttaaaaaaaaagcaaaacacctgtgtgataggacgattattagttattattatccaatattttaagaattttgggcgggttaaataatttatgtggattaagattaagattttattttaaataggtttaattactattttagtccttgaatatgaggagtgtatt

SEQ ID NO: 26540 - DNA, 395 bp, Glycine max
  unsure at all n locations
ttgngttatcgattacatgccttnattatcaaattctatatngntaagaacatttcagaaactactttggccatatttaagaaaattgttaatcaattaccagagagtaaataccatgtttttgaaattttaaaaaaaactttttggaaaatgtcctttggccaaaccttttgcatcatcaagtaaagaatgttgtctaagactttaaggactatcatcatttatcttgaatttctaagttcttgacttggattaaacttgaaaagtgcttatcttgtggcatcatcaaaacttcatattaagtatgcttctacacagactacctgcgtcaccgacaggccattttgaattctctgacctcgcacccaaacttcacggcttctcacaatttgatc

SEQ ID NO: 26541 - DNA, 372 bp, Glycine max
atctttcttaagaagatttctaaagaagctagagcttagctacacatacctctctaatagctaagctcacctccttgagatgagaagctagagcttagctacacaccccctataatagctaagctcacccccatgacaaaaaacatgaaaataacaaaaaaagtccttattacaaagactactcaaaatgccccgaaatacaaggttaaaaccctatacgactagaatggccaaaatacaaggcccagacgaaggaaaaacctattctaatatttacaaagataagcgggctcatacttagcccatgggctcgaaatctaccctaaggctcatgagaaccctagggccttcccttggatctctagcccaatc

SEQ ID NO: 26542 - DNA, 319 bp, Glycine max
actcaagctggaccccacggaagctgctaatatttcccacacttttggaggcgggccaatcctggatggccaagaattactcatggtccacctgtaccgcatttataccaactaccaaacctaagaaaactataatatctacacacaatgtacacttacctatatatgcacatatggcgttattcctaatgactgagagaactagactgagatagcctaagggaacatgaaggctcctactgtacactgaaatatcctctagacaacctactgcggatctagttatgagatcccataagacatgatgcataagcctcat

SEQ ID NO: 26543 - DNA, 375 bp, Glycine max
agcttgtacacaataccatattgaaagatgaaaaatctaagactcagaatggtttctgctatccttgaacccaagctcctgatatgagcctgtcgatggaataatttatgaatattgagacacggatatttgaatacagtcaaacaatgatgaaaccaaatgtgtccatacatccaagatccaacaaaacattatcatctctactacattgagttctaaaaaagtgtccaattattagagtatgttgtcagtcaactgtaaaaacagttctgtaaactaattgtaagggctgttagcttttgctaacagcacctatcctagagttagttagagttggttaggttctgttagttagttagttacaatctgttacaa

SEQ ID NO: 26544 - DNA, 421 bp, Glycine max
  unsure at all n locations
ntaaagataatggcactgttattaatataaaatgttttgagatgcgaatggatnggatggtgaagaagaaaaattaaccctaaaaaatttatgcctatctcccaaatgacgatcttgtcctctgtaacttttcaattcatccgcgctagtgaaagggtgattctgcctttgtacagtgaaatttgctgcatctctagatataattaaatgtaaaatcaataactaaatttggatgcaaaaaatcataatcataataatcatttttttatatagaattcttgaaagggaatggaatggcctcaaccgcatccttttgtaacaacttgtggaaatgccatgtgcaacgctcaccacataatattctctatcttttcctaaatagcaatctttctctgccaatctcanaaaanaaaaaaaaact

SEQ ID NO: 26545 - DNA, 354 bp, Glycine max
atcttcgacgccatctcactagcttgcgcaccgttatgaccatcgaaaactgccacaatcccgaccgcaacctccttgatcccgttcggacctgttccagcgtcgaacgcaataaattacaacgaatgcttcagacgaaacttctagaacacaaaccagggggagagagagtatggtaccggcgaagggaatgcgaacatcgaggacgcagagagcgcgatcctcttgcgagtttctgcggccttggagcatggcggtttggcaacgcgcggtggtttggggaggggaatcgtaatcggagagcttccagcgggggcattttggggattggacaccgcctgagcaccgccgctc

SEQ ID NO: 26546 - DNA, 410 bp, Glycine max
  unsure at all n locations
ntcccccanaaatgtacacttctccagcttacaatattgtgaaatgaacccctttttagattactttgcgatcaaaatcttattgctggttttagacatcacaagtatgcaacagtataaaaatggagaacaaacaatgtctttttttttttcaatccaacaacattatgtttcactgttaagcactattactggcactatcatttgactatatgtccaattcagtagctactgtttgtctttgaacccatcttcatcacatgatgtcaccatgcctcaacttctagctactgcaacatccacacgcctcttttgcccgaggtattttctgcctttatcagccattcttcttctacacccactaataatagaaaagaataaaaaatatccttacttatagcttatatata

SEQ ID NO: 26547 - DNA, 354 bp, Glycine max
agtttcacaagcaagcttccatcaccttgtttttgaaatctatactaaattgccttcaatttagtatatagaagtctccatttggaatgacgaacatgaacgtgagaggccttcgagcgacatagagaggagctaatggaaggatatccgtagatgatgggagtttattttcatttactgctttgataccgtcgttggggtcaaggaacccaactatagtgatgtatgtttgtccctattgcatgttagttttcaagaaaaattgtgtttttgactaatgggatgtggcttatttgttattgattattgaaattatgaatgatactattgttgcataagacttgtgttgtctga

SEQ ID NO: 26548 - DNA, 461 bp, Glycine max
  unsure at all n locations
gcaataccctttgatcctgancnctgaacncannaaattgcaaggtcaccccggaagccgcaattttanccacacttatgagtttggccacgccagcatggcgaagaattagccatgttccacctggaccgcctctataccaactacaaaacctaagacaactaatatatctactcaacaggtacacttccctatatatgcacagatagcgtgattcctaatgactgaatgaactagactgagagccctaagtgacatatggctacactgtcacgtaaagatcctctaaataagcaactgcgggtcctctttggaggttccatgagacatgaggcataagcctcataaaagatcatggagcatcatagaccccaacaggcagttctagccactaatacccacacaaatggggcatgaaaaccgattctcactcctcagcctctcatatcctgattgggtag

SEQ ID NO: 26549 - DNA, 381 bp, Glycine max
agcttccacaacatccaagcaaaacaacattcaaacagcacaagctatcacaaccaagcaaaacagagcaaaggcagaaaactctgctcaaacaccaaccaaaatcacagcttttctcacttaaagacccagtaacaattccttcgatccaattcgttaaccgatggatcaactccaaaattttactggaagtctatagtgcataagcctacattgtgaccgttgggatctactagcaaacatccagcactcattctgcactactctttccacaaccagcaaaaacatagcatttttctgcacttgtgcaaaatcctgctgcacaatttcacagcaaaaatctgcacaaagtgcagatttcgaaattcacacttcctctca

SEQ ID NO: 26550 - DNA, 432 bp, Glycine max
  unsure at all n locations
actcagcttctacaaaacctggataagattcattgcatgtttaagatgcttttgctntctgtgctgntagagccaaggatttgccctttttgaatcattcatgttatttaatttcttgttcatgaacctttaaggtcccaattagctcttcaatggacatggagtccaggttcttcacaactcttaaggctgtcacttgtggtctctactttcttgataaacttcttagaattttgttaatgttatcataattattaaaagttttgttaagataacataattcatttaaaatattttggaagcgtccaaacatggcttgtatatcttcaccatcttccatagtgaaaagttcatacatatgtgttaacaagctatgcttattacgtttttcctatgacaatccttcatacatcanagctaatgtgtcctaca

SEQ ID NO: 26551 - DNA, 360 bp, Glycine max
agcttcacaatattgttaatattgttactagcaacagtgcattatttcagtagagcacagcacagatcccccctttgaaagaaaccatgaaagatgcaatgcagcccatactaatctcactcaagtaaataaataaataaaatagtgaaactgataaatgattatacgatttctattgatctttacctacagtaaaataagtaaagcattgacaacaaagagaggcattaggaaatagattgagatcacaaatgcaagattactatgcacgaattatagaaccactactagaaattgattgcagagagagaatgaaaagtaaaaagaataataattttttttacagaagctgaaacgtac

SEQ ID NO: 26552 - DNA, 435 bp, Glycine max
  unsure at all n locations
actcaagcttctataccagctgaaccattntatcaataaacacattttgagttttattcagaaaattagagtttatctcttttatcttagtgagagtgattctcctaaattcttgagtgattcaagaacaccttggctgtatcaaaggactttcacaacctttgtgtgttgccctcgctggaaagagtgattctttccttcctttcatcatcacccttgttctttcaaaccacaattccagaaaatccacctctgtccagaattatctcgtggccataactcccattttacgcactcaaattaagtgattcttgagcctaaattgaatttcaaaacgagacatttcacctcgttttggaatcacctcatttggagccctgtagcttcagttattgccatttctatatttctgtccagccaccacttaacctacgt

SEQ ID NO: 26553 - DNA, 459 bp, Glycine max
cttgaacccttgaatttgataccgttagaacactcgaagacattggagatcctctacactcgacctcgctgcatgcaagctttgacatgctggttttcaaacactggtctatatgtgcctcatgcgccccttcaccgctatgatgacaccagagtgcctctcttgaacactgactaggctttttctgaattgttgatgataggcctttatgggcggagactctagtacctgtgttctattataggctatgcgtggacggatgggaagaatagaggcacactgatgtgatatagtcactcgtgaaggtgaaccctgctgttaaaatctattgatggctctgatgcgtgttagacagaaagagaactagtggagacgacccttgccattgtggaggacgttggatgacaatatgttgtttaaattgaaaccagagttggtaccatctattttgatcgagat

SEQ ID NO: 26554 - DNA, 439 bp, Glycine max
actccagctgctttgaattgcaaagcccactccatcttttgacagtgtttgacatctcaaacaaacaaatctaacgtagcaagacaattatacgagacgatcgaatacctcacccactctagggtatcacacaatcatggctttgctctacatgaaacactcttgcctttgaccactctaattccccttgagttcttaggcaagtcatgagatcatggcctctacatagaacaatatacctatatgtgtcaagtaatgctagagagacaatgaataggttaaccataaaaacggctaaccctgtttatatgcacaaatgaaggagataaaattcagaatttacgaattcaagtaacaatgcttcgtgcaaccaatatattaccttatagagactttttctaaagttcttcaatcatgaaccattcaacccattattttt

SEQ ID NO: 26555 - DNA, 361 bp, Glycine max
agcttcaacatcagactccttccagggtgctggaactacttcacatggacttgatggggcctatgcaagttgaaagccttggaggaaagaggtatgcctatgttgttgtggatgatttctccagatttacctgggtcaactttatcagagagaaatcagacacctttgaagtattcaaagagttgagtctaagacttcaaagagaaaaagactgtgtcatcaagagaattaggagtgaccatggcagagagtttgaaaacagcaagtttactgaattctgcacatctgaaggcatcactcatgagttctctgcagccattacaccacaacaaaatggcatagttgaaaggaaaaacaggac

SEQ ID NO: 26556 - DNA, 430 bp, Glycine max
  unsure at all n locations
cccctgaccctgattctgacacttcaactcgcttattacggcatgatcatacactttggcttttcgcactacagcattctttatttacgaaggattgtcaaattcttgaggattcaagatcaccttgactgactcgaatgacttgctcaaccgcagtgtgttgccctagctgcaatgagtgattctatcgttcgttccttcgcatcccttgatctaagataccacaatctccatcaatccacttctggccagaattatgtcgtgcgctgtactcccgttctccgcactcatagtatgcgattcttgatcctaaatgaaatgacaaagcgagactttcaaccgtgatttcgaatacgtcatctggagccctgtgctctggtcattgcctgtctatatcttcgcgaacacatttaatctacgtttagcatcn

SEQ ID NO: 26557 - DNA, 386 bp, Glycine max
agcttgcctcaaagaggtccaggaaagacaaggcggccgaaggaactagttccgccccggagtacgacagtcaccgctttaggagcgttgtacaccagcagcgtttcgaagccatcaagggatggtcgtttctccgagagcgacgcgtccagctcagggaggacgagtatactgatttccaggaggaaatatggcgccggcggtgggcaccactggttactcccatggccaagtttgatccagaaatagtccttgagttttacgccaatgcttggccaacagaggaaggcgtgcgtgacatgagatcctcggttaggggtcagtggatcccgttcgatgccgacgctatcagccagctcctgggatatccgatggtattggaagag

SEQ ID NO: 26558 - DNA, 431 bp, Glycine max
  unsure at all n locations
tgtctcagcgtttatgcgagacggagaccaacatgttagctatcatcgccaagtaccaagaagagttaggtctagccacggcccacgagcatagaatcgcggatgagtatgcccaagtatacgcggaaaaagaggctagaggaagggtgatcgactctttacaccaagaggcaaccatgtggatggaccggttcgctcttaccttgaacgggagtcaagaacttccccgcttgttagccaaggccaaggcaatggcagacacctactccacccccgaagagattcatgggcttctcggctattgtcagcatatgatagacttaatggcccacataattagaaatcgttaggaaacttgtatggtctctcagaccttgactagatacgacttcctttntttttgaaataaaatgagttggtcccatgtttct

SEQ ID NO: 26559 - DNA, 350 bp, Glycine max
agctttctgaagttctctggttttccaaaccttgaaaacttgtgctattcatcttttcattctcttctccctttgccaaaaagaattcgtcaaggactaaccgcctgaattctttttgtgtctctcttctcccttttccaaaagaacgaaggactaaccgcctgaattcttttgtgtctcccttctccgttgtcaaagaattcaaaatgacacagtctgagaattcttttgattcttcccattccctaatacaaaagtgttcaaaggactaatcgcttgagaattcttttgtatccccattcacaaagcatcaaaggtttaacagcctgagatctttttcttaacacatt

SEQ ID NO: 26560 - DNA, 293 bp, Glycine max
gataatgagggacatcatgaaaaagggggagaatatggatcaagcaggttttgataatgttgaaaagaatttgcttgataatgagtgtcatcatgaaaaaaagggagaatgtggatcatgcttattttaatgatgtcgaaaagagatcacttgattgtcgtcatcaaaaagggggagaatgtgaatgtatgatgattttgatgatgctaaagaagaatcaaacaaggctgctacatttgcttcaagattaatacaagattgcttcaacaaacaaagccttgattcaagatttc

SEQ ID NO: 26561 - DNA, 243 bp, Glycine max
  unsure at all n locations
ctccccatacgaaccaggttgctttctccgaaagcaacagccttttggaagaatcttcttaaggcccagacgggcctggatgctatttgcacccccatttttactaagtacaccccctacctttttttggtgattcttttttcgtanaagtacagaaacttacgaatttcctacaaaactggttttctttccgtgatgttacggaaccttgtggattacataatcatcccctttttgacttac

SEQ ID NO: 26562 - DNA, 422 bp, Glycine max
taaaggaaaagtttactgcataactgtctgaacaattatgtcgtttggaaccaagtgttgggcagcaaaaatccaagaaaataaactatatgtagcaaagataagaatggcgtgtcggatgcgttaacataatagacaaaaatatagaattaggaataaatacattagatagaaagtcaagatagaacctatagtagaaaagaaggtagaatcttgccagtattatgaaaaggaagcttgatgcaataatggtagtagatttacttagaaatgtaaaataactgactgctaccttgaagcaatatcaagtaaacttctcatagttgatccagaatcagatgcccatgcaagaatttcttgtcttcccccagatataaaagcagataaacattctgtagcattctgcttatgtcacatcaatg

SEQ ID NO: 26563 - DNA, 251 bp, Glycine max
tgattggattatattgttggagattattgttcctgtcttaaatcaaaggttattatggcgtgcttgggttgatttgtgggacatgagagggagaggctgacggtgagggtggcgccgccggagagaaatgagagagaattaatatgggaattgggaagaaagagatagagagaagacaagcctaaattaggaaaagtaagaaaaaagaaaataaataaaatataaaagaaagaaaatttgaaccattgatt

SEQ ID NO: 26564 - DNA, 425 bp, Glycine max
  unsure at all n locations
aaaggtaaatatgtntagtgactggcttatattgatttaataacaataaagaacaagactcggttgggcgtgggatcgatcgagactagctaggtcattatcatctatttgatttaaatgtatcgtaaatatgtggcacaaaaaacaaaattatacaggcaagtcttttttgtctttataaacagtggcttgttataataacatttaatatatatatatatatatatatatatatatatatatataattatatctgtatatataaaagatatttattagcaagtttcccctttaatatattataagagaatcgtaattataactagttaacatattttttaaaaatgaagtgctagtatattagcaaaattttcataaacatctactaaccttaaccatataatttaaataaatagttaaaatta

SEQ ID NO: 26565 - DNA, 334 bp, Glycine max
ttggcatgcaagtttgcagcaaatgcaatcttacaagaacttttaactgcaatatgcgattgagtcccgtcatatatcgagacgctcggaattgaaaacagaagcgctgagctaattaatacgacaactacattctacttcgaagtccgaatgaatacagttttgtatcgagaccttgatattgagaccagaagctcgtatctactgcaaaccgcactttcatttaactcagacgtccgattaagtctcgaagtatatcgagacgcttgagagtgaaacagaagctatgagcaattcaacgacgattacttttactctgatgttcgaatgaatc

SEQ ID NO: 26566 - DNA, 423 bp, Glycine max
  unsure at all n locations
ntgcccttgncctgactctgaccagaactagctcatttcatgcagcgccgtttatacttctgattggactcggagtancaagttattgtggttaggatgtgccacgaccttctggtgtgatttcgagcttctctgtctatgatgggatacattcggacatccgagtaacaagccattgtcgactgaattgctcagagcttctgtcatcaatntcagcgtctcgatatatcacgggactcgatcggatattggagccaaaagttctagtgggttgcatctgctacgagcttctgatttcagatcgagcatcagatcgagactaatcgacatactggtaaaatttcttgcgattaagtactaggagcattggctgaatacgagcgtatgatatactacagactcatcgatatcggagtcatgtat

SEQ ID NO: 26567 - DNA, 354 bp, Glycine max
agcttgagatgaggaagttttgtaaggagaaacttcctgcttttattgttgaccacagagtggaacctggaaacatgtcacgggggtcaggagaccttggggacgtcaagaggggggctattgcccgaaaccgatcttgaccaatcccgacccaacccgggcatagtctgacagcgaaaacctgtgatgcacctaatcatgcgagctcctggcacgctacagattacatgaaaacaagaccacaaagcattgaggctagtggtggctggccatctgtcaatattgcgtaatatgtgagatatagcctctggtaatcgattaccgaaggtgcgtgatcgattccagggcttaaaa

SEQ ID NO: 26568 - DNA, 407 bp, Glycine max
  unsure at all n locations
tgtgtcgcactggctactgcggaagttaaacatatttctgcagttagctgangagctcaaagactctggatgaagcatcaacttgaagactttggagtaaaccttgatcacattcctctaaaatgtgacaacacaagtgcgatcaacctacaaaaaaaccttgtcatgcattctaggactaaacacatagagataaggcattattttcttagaaatcatgtgttaaaaggtgattgttgtattgagttcattgatagtgagcatcaactagcagatattgtcactatacctcttgctagagataggttctttttcattagaaatgaactaagcatattagatgcatctagcatagaatgatattctgtttgcacagtgtgtgtgattgacattgctactcatataat

SEQ ID NO: 26569 - DNA, 357 bp, Glycine max
agcttctccatgagatattatccaataagaaacaaaactacatgaaggaaagctattcagaagttggaaaggccatcatgatttcaaggtcaaagtgtagatataagaagttgtatatgatcagaggcatgatgttagggataacttaattcaaggggtagaaattagaagctacacatgacttgaggatcatcagaagttgcactacaattggaatgtgaaaacaaacatgtctcacattccaaaaacacacaccaaccaaagatgcataaattcttagacaacattgatcctaatgttgttgttccttgaaatccttgacacagtccaagtctcaagaactcaaaggaaacaccc

SEQ ID NO: 26570 - DNA, 330 bp, Glycine max
  unsure at all n locations
ntgagggtgcgtagcccaccatcttttcatagtagattaccgataatgtgtctaccatcacgattatcgtctccctttntgcacatgttctgtagttgcatcctatccggaaccatatcagaatagtactgatactgcctaacgaaggcaaccattaggtccttccaagtatggactcgggaaggttccaagttagtgtaccaagtaacagctaccccagtaagactttcttggaagaaatgtattagcagttcctcatctttgtgtatgcccttatcttccgacaatacatctttggatggttcttggggcaagtagtccccttgtact

SEQ ID NO: 26571 - DNA, 353 bp, Glycine max
agcttattgctataattaaaatgacttttagtttttttaaactcccaaaccctttgatattaggactataaaaataaaaggctaaattacaattttggttcccttcatcctaatttgtgattttagtctcctaaattttgttaagtttactatttttttagtccaggaactttttttctactatttttagtcctttaatttttttcatccttacttaaagtcaagattggaaaaaaaaagtaaaaggattgaaagtaaagacaaaaaaaaatagctaaattgactagtaaaaaaaatttttagagctaaaaacataaatcttaaaaaatttagggactaaatagatagtaaat

SEQ ID NO: 26572 - DNA, 416 bp, Glycine max
taggtggtgcttcttcatccattggttcttcaattttctcctcaacaaattcctcaaaatgttgagaggaagtagtttcaccttctttggctataatttgctcttgcatgtcgagttctccccacggttttcttgtggttatccttcaatttatagtagtttttttttatctccgaaacaaacatgaatacatgagttcctttgaccctttatctctgataattaaattccccctctatctccataagttgaaacaatgaaaatggttagaattaaggattaatagcacaaagccaaagtgataaagaaaaaatgaaaaaaaaaataatgatcaatagtgtggtggcagaaatagtgatgtcaaaggcaatggaatcagaggggggaaaagacttgtgaaagtaattaagctctag

SEQ ID NO: 26573 - DNA, 370 bp, Glycine max
agctctataatgaactttttcttcatttctaatagcattagtaatagtaacaaacttctttttcaatatagcaggatcaaggtccaaaacaccgaggtgaaattggacttgctcgttctagtcagagaagttaagcccattaaaattggcacagatgatacatgagaattcagtgaattgggaacatgtattgcataataaaattcacatgagtgttttgattcataatacatatgtcatacatatgattcattcagataacgatcaatatatatcgaatctttcttttgggtgatacaccaacacacaacatacaaacatgatgatgctcatagaactcttaacattatttgacaattaaatatgcacc

SEQ ID NO: 26574 - DNA, 429 bp, Glycine max
ctccacaacacctataaagtagggttgccaagccaacaatcattcagtctatatggtcctgggccctaatcttataatgaactttacaagatgatcggacaatggttgaaaaagttcctatccaataccacaagcaagctccctttccatgtgtcaacccattcccttgaagtcaaacgtctatctaatacactcatggtcttaccatttggatgaaaccatgtgaattttctccccacaaatggaatatctaccatattcatatccaagataaattcattaaactctctattatgccccccatgaggatgtgtattatcactttttctttgatgcataccacatacactattaaaatctccaatagggcaccaatgatcaatgctactcccactccttctacctatgagttcctaccacattcttctt

SEQ ID NO: 26575 - DNA, 376 bp, Glycine max
  unsure at all n locations
agcttctttntgttggcagttaaggaactagtgaagcatagacaaccaaatactcttaaagaactaatatcatagggggttccatagagtttctcatagggagttttgttaccaagaaaagtagtaggtatgcagttaacaagaataccaaagtgaattaaagcataagaccaacaaatgaaaggtaaattagattgaaacaacaaggatctagtaacattaagcaagtgttgatgctttctttctacaattccattttgttgaggtgtttcaacgcaggaagtttggtgtataattccaatttcatcatagaattgtcttagaatgaattctgatccattgtctgatctaatcattttcacctttatatcaaact

SEQ ID NO: 26576 - DNA, 431 bp, Glycine max
  unsure at all n locations
ntgatctaccacctccgccgccaccatcatcttagttttctattatttttaatattactagtactttgttttctagccgtgtatttggctatattatgacacttgaacaatttagtatttctttatatgcatggaatgattgaacaattatgaattatgttatatgactatgtggtttttatatatttgatctatccatgtttcttgcttcatggttggtttatattcttcaatgaatgtcttgtgaatgattgatagtatatgaatgttttatacttgttacacactgtggctttttgttgatgccaaagggcgagagacatagggattaaatcaagaactcacataagtaattaacttaatttcaagtgaagcataaactcaaaaacaaagggggagaatggaaaatcaagtgagtgatcgactaggga

SEQ ID NO: 26577 - DNA, 381 bp, Glycine max
agcttaacaatattacatatctcaatatacgttgccaagtgtgagtatggatcttcatttggtaaaccatgaaataaattgctctatattagttgtatcaatgaaggtgggcaagttaagttttgtgcctaaacctctggccgagcaacacttgagaaatattgcggcaccgaagtacttgagtaatcttacaaggtcactcatcgaggttgctcttcatccatgacttcggcttcaaattctgctgtttgagattccctggatgtaggtgaattagaagatgttgactcaaaaaagtgagcctcttcaaggattgatgctactattctatcgtgcaaaagctctctttatctctcggtgttgtttcttcaaaaggaggct

SEQ ID NO: 26578 - DNA, 436 bp, Glycine max
  unsure at all n locations
tccatcaacatggcacctccactaggtaaagtgacttggctcctatttaacgctttattntttttaccaatttgttagtgaatgtttgcctccttgaagcacaatgttttggaaaatttgtcaggaaatgtttgtgtcttctttaccaaaattggtttgttgctctacacatgctcattggtaagttggtccctcaaatttgtcacttattgtaaaaatggtaaaaaaaaaactagatgacaatatagctgacaatgtgattctcatttatgcctaaaagaattgaacatttgctataaattgtcaaattggtccctcaatttttacatttattgtcaaaatggtaaaaagatatgcaactaaatgatgtgattctaacaccaatattgttgaatttggttcagtgtagctagcaaattatcttaaaattcaatca

SEQ ID NO: 26579 - DNA, 305 bp, Glycine max
agtttgcgcaagctattttaacccgccaacactcacttccctgtatctgatagccttcagttatcttgactctattatcttcatgatcaacaactcagatatattgggatttgagagatcaattcaattttgtgcgatcctcttactcacttgtactttctgcgtgcatgcttgagagtagcctattggcttagagatagaaacatgcatatatagctatatatctataaaagaatctttaactacttgacagaaaatatgtgtaatactgggaccctggccattggatggccaggcgttttgtg

SEQ ID NO: 26580 - DNA, 409 bp, Glycine max
  unsure at all n locations
actcagcttcttataagctgaaccattgtatcaataaacacattttagngnttttcagaatattagagngtatctcttttatcttagtgagagtgattctcctaaattcttgagtgattcaagaacaccctgactgtatcaaaggacattcacaaccgttgtgtgttgccctcgctggaaagagtgattctttccttcctttcatcttcacccttggtctttcaaaccacaattccagaaaatccacctctgcccagaattatctcgtggccataactcccattttacgcactcaaattaagtgattcttgagcctaaattgaatttcaaaacgagacctttcacctcgttttggaatcacctcatttggagccctgtagcttcagttattgccatttctatatttctg

SEQ ID NO: 26581 - DNA, 378 bp, Glycine max
agtttatgctatcatatttccctttatggaattttattaacagaggtgtgaacgccttgctcctgcccctctcctttgcgtgtgctcaccccatgaatagagcttgcacttgacctttcaccagagctctattaatatcacccttgaaagttgcatttatctcaattcatacttcatgcctcttatagccacaagcatgaggaaactacataaagcaacatcctctcaggctgcacttcttggagattctattataattgcaaacgtagttctaggtgtataaacttctctaatttctatacataatatcatacactgacgttgaatatatggatatcaatgacaagtatagctctctttcctgacacattcgatgat

SEQ ID NO: 26582 - DNA, 438 bp, Glycine max
  unsure at all n locations
ctagcatcaatgacagaccatttttaataaatgagtgatttgctcnaattcatgcttttatactatcatgtatatacccccaaaattattagagtgtggcaacaatgtctttgatagtacaaagtcaacaatatagataatatgtaaataaatatgttgtctacaaaaatcaatgctacgaagacatgtgtaaatgactcttgagaacatcacatataaatagagatattctaacatatttttatttatttatttaagtgtaaataaaggagaaaagaaataaataagataaaaatattatttttggtccgtctacacacaaaaacaaaaaaaattcccataatttattactaagaaagacatgtaggttgngattattattctttcttctattttaaaaattaaataattctgtaaaaatataaacattaaataatt

SEQ ID NO: 26583 - DNA, 372 bp, Glycine max
  unsure at all n locations
ttctctangaaccttcatggatatgacttggctaatactcttaccggtctataagtatcgggggagcctctataaaggccgtcagtaactgaacaaaccaaaatcactgatatctccgattggatcgaatgaacaagaccattaatgtcgctaggaccccgttaatggagtttatggtgagagcacgacaatgaaccaatcaaaagatactacgtgaagtagactgaagtagaaactctgctcttactcagctatttgcacggaatcattagtaagatgattgtcacctacaccacacatcttcctgagatggaacatgtgggatcttgatcaacaaatcggatagacgctacaagctaactgtgcaacaag

SEQ ID NO: 26584 - DNA, 363 bp, Glycine max
agcttgccatgaattggttcatgtgtactagtaaagaggctggcataatcctgtcataaaacacaaccataaactaaaataagcatatgtgatcagtgtcaaaataaaatgcaaccatttacaaaaccaatcaagaaaataagaatagattattacagctaaccaatcaacaagcctttcaagtagccatgcttgagattgcttgtccacataaaatatttcaattaactcccacgcagctttcaaagatgtaggctcttcacctctctatattatgtgtaatgtgttaaaaagcaagtgattaacttctcggtatcataattcccacaaagcagatctcagctcagctaaacacggtaaaac

SEQ ID NO: 26585 - DNA, 423 bp, Glycine max
  unsure at all n locations
tgcacttcttcactttcctcaaggacttcagcttctttcccacttgggcctttaagctttgggagccaagttatcccttgcctcctaaacctcaaccacttgtgatagccgctgatgacgccattgctacttcccctaagctccttatctttcctttccactgtattccatgctttatggattctctgaagtatcctcacattggcttcattgaaacctcgtgcgacgaaaggcgcgatgatctcctccaatggtgcacctctcatagggtagcctagttgtcttatggccagcatgggattataattaatacaaccccttgttcctatcaaggcgatgtttgggaatccttcacacgagcacaacactcctgcccctccttctttccatcgngggaactagctaatggacgctcctaccata

SEQ ID NO: 26586 - DNA, 370 bp, Glycine max
  unsure at all n locations
gcgattcactcgtcccgggatcttagagtcactgtatgctgcaagcttctacattcaatttcgagcgtctcgatatgttaccggacccaatgagacatcccagtaaaaagttattgtcgtttgaattggctgaaatctttaacaattaatttccagcgtctcgatatgttacggtacttcatcagacattcgagtaaaaagttattgtcgtttgaattaactcagagcttcaacattcaatntcgagcgtctcgatatattacgagcctcaatcagacatccgagtaaaaagttattgtcgtttgaactagctcagagattcaacattgaatttcgagcctctcgatatattacgagactcaatcagaca

SEQ ID NO: 26587 - DNA, 416 bp, Glycine max
  unsure at all n locations
ctcagcttgagccattcnacaacataacttttactcattgtctgattgagtcccgtaacatatcgagacgctcgagattgaatgttgaacttttgagctaattcaaacgacaataacatttttctcggatgtctggttgagtcccgtagcatatcgagacgctcgaaattgaatgttgaacctcttagctaattcaaacgacaataacttttttcacggatgtctgatagagtcccgtaacatatcgagacgctcgaaattgaatgttgaagctctgagccaattcaaacaacaataacttttttctcggatgtctgattgagtcccgtaacatattgagacgctcgaaattgaatgttgaaactctgagccaattcacacaacaataactttgtactcggatgtctgattgagtc

SEQ ID NO: 26588 - DNA, 364 bp, Glycine max
tgtcttattggaagacaattgtcatatgcaagcctgcaaattcatgacttaatgcagatccacttgctatacagttggactagtgcgagcatcgcgctaagcgcgttcatcatgagcatcacgctaagcatgttcagcatgagcatcacgctaagcgcgttcagcatgagcattacgctaagcgcattgatgcgctctaattggttagcaatcacaatccctatataagaaagaaacttgagaagtaagaggagcatttgacatctaagaatattgagaatagaagcaagtcgtccactaccgatgtaaggaaatccattttcggagctctggcttagtgatttcactccattcttctttcatt

SEQ ID NO: 26589 - DNA, 410 bp, Glycine max
tgttcaccccatgtcgaatgcgcttttttagagcttttcatagtaccactaattgttctccttatgaagatgagcatgggtttaacccactaactcctcttgacctttcgcctaatgctgctgtttataaccataaagaacgtcaagcaaaggcggactatgagaaaaagcttcatgagagagtcacagatcaaattgagaggaaaagtaacagctatgctaaacaagccaacaaagggagaaagatggttgtcttctaacccggagattgcgcacgggtgcacatgagataagaaacgtttcctgaacagaggaaatcaaagcttcaaccaaggcgagatggaccatttcaagtgctcgacagaatcaatgacaatgcttacaaaattgagctgcccggtgagtataat

SEQ ID NO: 26590 - DNA, 447 bp, Glycine max
  unsure at all n locations
tgaaaggaaattgaacctgattgatgcttgaaanctgggccttgaacccgtccggagatccttagatccacttttgcagaaatttttgaagaccatgtttacttggcgcacaggctagtggaagtagccagattggtactaatgcgatcaagccatcccgaggttgagtgaggtatgtataaactggccgaacatccctctagcaaccctatgtacatcctggaggatggtaaaagctctacaacaggcccgagagtcccgctgacttttcatttgcgatagcatcaagttcatgcaacctgattgggaatacaacgaccaggcgctagcgtggtctatgtgattaagcacctgcaggcatacagggagccactcgtgtttcagaagcaaaatgttcaatagatactccccgtaacagtatactaccgagggggctgcttacgactg

SEQ ID NO: 26591 - DNA, 480 bp, Glycine max
  unsure at all n locations
cgaccctttgcaccgctgatgacgttgacannctngagacancagacgaaacncaagacggcanaacacatccgnnacacagcttttcccgaattgnccagttggcaggagcaacaaacgagcagcccagggcgtaggaacacccaccctataaccgaaaggccgtaggacactgcgaggagtggattttgcgacatagtcagacgaccctattacttcttgaatacatcgccactgagaaacgatgactgacatgctgatgtatagaccaagactgatctgggttagctgtgcaaacccataggataacccacactccgcgtcttcgcggcacgaagcatgagagtcgaccctgcacctgaatattctacaacactccattgattacattcccatgcgctatccacaatgtgcgtgtgcatgcttaatccatgtgcgatggaacaatctaatacccggatatggagcgtgcagatactg

SEQ ID NO: 26592 - DNA, 356 bp, Glycine max
atctttgcttctacacttactactctcaaaacatagaaccacgacctcacacgagaactcaaaatacagaggaagaagggaaactcactcgtggaactcacacgatgaagaatactcccaagggattgagttttattactttttttatgaattaatatgattacaataagatactgctatttatacaaatgaaagcaatgggacccgcttaaattctaaccaccctttttatttttgaccctatacagttatttctataaactgagtattacatgtggggagatatcaattttgaagaaatatgtgttccatttaaggaaatcataatggttgcagaattcttgtaaccacccgtg

SEQ ID NO: 26593 - DNA, 406 bp, Glycine max
  unsure at all n locations
tgagtattgttgcattctactaatatatggagctgtttactgctttgcctgagaataacaattgcttgaccacaacaacgctggaggcggtaagggacaatggtctttcaaataaacttgttgtacatgaacaaaaattatatcatgcagtgaccgactcacatgaaccggggaagtcattgcataattgttatactaactatattcaatgtacctgaacaaaatgatttacagacacgtgaccaacacatatcatgcggagcccagaagaatcaggtggtggctgacttctaagaggaaaaaatatcatgctttgttgtcgggacaacgatacaaggattacgttataccgtgatgcaatcacatatcccatntcttgtatatccatccacttgtccacactaac

SEQ ID NO: 26594 - DNA, 348 bp, Glycine max
  unsure at all n locations
atctttaactcggatgtccgattcaggcgcataatatatcgagacacttgatattgaataacagaagctctcgagaaattcgaatggtcataacttttcacacggatgtccgattcgggcgcataatatgtcgagacgctcgaaattgaacaacggaagctctcgagaaatcctaatggccataacttttcactcggaggaccgattcatgcgcataatatatctagacgctcgaaattgaaaaacggaagctcccgagaaattcaaatggtcataanctttaactcagaggtccgattcatgcgcataatatatcgagacgctcgaatatgaacactcgaagctctc

SEQ ID NO: 26595 - DNA, 416 bp, Glycine max
actcagctgtagcaaatgcaactgtatacgttttactctttgttcgattgagtcacgtaatacatcgaaacgctcgaaattgaaaacagaagctctgtgcaaattcaaacgacaatacattttaactcggatgtccgattgagtcccgtaatatatcaagacactcgaaattgagaataaaagctctgaacaaattcaaacgacaataactttttactcggatgtgcgattgagtccagtaatatatctagacactcgaaattgagaatagaagagctgagcaaattcaaacgacaataactttttactcggatgtccgatggagtcccgagcgtctcgatatattatgcgcctaagttggacatccgagtgagaagtcatgacaattataattgctcgaaagcttacattgttca

SEQ ID NO: 26596 - DNA, 383 bp, Glycine max
  unsure at all n locations
agcttgaaccttctcatgccaagaaagttcttagaggactgtctaattgcaacgtgaacaaaggtcagtttgagtaaaaatggtatatcattcctctgtgacaaaggttgggtagattgtgagttgggctgtttttcccttcatggntgtattttctctgtctatctatagatgaaaaaccttgtcaaatgtgcaatgttcatcctgtgatgattctagtagattatctgtagctgattgctttaggtgccttctaatcacttggtgataattgctaatgatgctaatccttctggccccttaatattgcctttcttttacctagattttctctttgtattctgcaccagtttgtccactggttttccctgacacaaagcaag

SEQ ID NO: 26597 - DNA, 437 bp, Glycine max
  unsure at all n locations
aaactcaagcttatgttcccatctcanatcctcacacattattaacatctcctcatcttatatgattttcttaatgcatttcaataactttaaaattaagtttattataattattttacaatagagaagtataaaatattttttaattaaattattgatataatcgcatgaaccagctataactcctacaacagaacgatgaaacagtgataaaaaaggaggattaagatgatcttacttggatttaaatcattttctgttgacacgttaaaaggtaaaagaaacttgtaaattctgaaattgcaagacctacgtaagtacacatgctctagccttccacacttcagattttggccaaatgagtaagcgagatgctattggtcctgcaagaatagttatgggtccttacaaactnttaaaatttagggaaaatatca

SEQ ID NO: 26598 - DNA, 382 bp, Glycine max
agcttgctctaaatttacattgatgtttgtatttatgggaggaagctgtatgtcatttttggtttaagaatagtatcccactggtaaaactaactttccaaatgtttgccttcgcaagaaatgccccgaggaagcttgcctcaaaaaggtccaggaaagacaatgcagcagaaggaactagttccgctccggagtatgatagtcaccgctttatgagcgcggtacaccagcagcgcttcaaagccatcaaggggtggtcgtttctccgggagcgacgcgtccagctcagggacgacgagtatactgatttccaggaggaaatagggcgccggcggtgggcaccactggttactcccatggccaagtttgatccagaaatagt

SEQ ID NO: 26599 - DNA, 430 bp, Glycine max
  unsure at all n locations
tctcaaggaggtgagcttagttattagagagatgtgtgtagctaagttctagcttctcaaggaagttttctcaaagaagcttctcaaggaagttttctcaagaaagcttctcaaggaagctacctagtctataaatagaagcatgtgtaacacttgttgtaactttgatgaatgagagtcttgtgagacacgactcanagttgaacttctctccctcttttattccttcaatttcgtgctcccccctctctctttctctccctctttcttttcctccattgaagcatccttccaagcttcttatccaaggctcatcttggtggtgaagctccttcttccatggcttattccctagtggatggcgcctcctctcacctcttctcctttgtcttccgctgcatctccatgatggaaaatcaccattaaagga

SEQ ID NO: 26600 - DNA, 206 bp, Glycine max
agcttcccaatgaattgttgtaagaacgaaccatagagagaggggcgcaaagtgaagttgaaattaagttatgccgtgaagttatgagagagctttggaaaaactgatatatgtatatatatatatagatatatatatatatagatatatagatacatatgtctatctgtatagacatctctgtatctctatatgtctagctaacc

SEQ ID NO: 26601 - DNA, 435 bp, Glycine max
  unsure at all n locations
tgtaatttctctgacaaaagtgtccacatttccattataattgattatgtgctttattgcaacattcagattatttgtcattgtacccttatagaccttacctaaaattgaaatccattaataagatttccttatacatagagattcaatcaagcttggacaatttaaataaataagtggatgtcttcaattggttaggcaaggcaaagaaccaagattttaagtttttaactctaggaacacttatccaattcatgtagctcttatttcatagtaatatgtatctgtattatgcctaggcatctaggaaatttagatttaactgtcttattgtattttgtgattttgtctagactcattcatgattaggttaaataattntttgtcaccaccagctnttcaacaaggtgagaaaaaagaatctcacctgaagtt

SEQ ID NO: 26602 - DNA, 368 bp, Glycine max
agcttttaaatattattatgttttacgtaattatttttttagtcccgaaaaaaactattgttattaatccctcaatttgtggcgatttgtcaagtcaaaaatattttttaatggaatttctctaaagataattagttggctatttaaaatagtcgtaatatgtaaaagattacgataattctatatcaattatgtatttttcttctttaaaccaatagatatgtaaaaaatgattatcaaaccattcgagtcaaatattttagtggattagaatcgctaaaaatcatttttaaaaaaatttatgataatggtgatggttaaaaatcattataaatcgtgaaactataaataaattatataaagagaga

SEQ ID NO: 26603 - DNA, 430 bp, Glycine max
  unsure at all n locations
tcacaaaagtttatatgacttganacaagcaccgagtcagtnggactagaagnntaatgagtttatgagcaactcaggattcagaagatgtgacatggaccattgctgctatgttaagaaatatactaatagttatgttattcttgtcgagtatgttaatgacatgtcgattgcaggatctagtatggcaaaaattaacaagttgaagcagcagttggcagaaaactttgaaatgaaggatcttggtccagctaaacaaatccttggtatgagaattcttanaaatagataagaaggaatcttgaagccgtctcaggagatatatatacacaaattgcttgacaggttttaccttggagattctaagaccaggaatgccctttcgggatctcatttgaagtttcaaagaagcaatctatgcagacagatg

SEQ ID NO: 26604 - DNA, 386 bp, Glycine max
agctttataagagctgtgtctgggagacaaaggtcaagtggtcgcaatatgcgaagatgatgttccgagtacattggatttggtacgaccatgccctcctgatttccagctgggaaattggcgagtggaggaacgctacgcaacgagcataatgtaaacctttacggttttaaaagctctatagttgggcctaggctttagagtttttccttttgtgaaggctttgtgtcttttgtttttgaatttataatacaaggatcattcttcatctgttcctacgtctctacccattctcattcatttgcatgttcacttctttttctgaaacggcagatccaatgacgagtcccccgaaggtactaatacctgtgacccgcctatcgact

SEQ ID NO: 26605 - DNA, 424 bp, Glycine max
  unsure at all n locations
tagtcccatatccaattacacatacattactcaacttagtccataatttcatatggcccatatgattttaccttatgtttatttgttagaatcagtaaccctaatccttaaaagcctaaaaccctagggtgagtattagtttgcgacattgttagtctagcctctcatttcttgtcaactttgccttcaggatccatctcctccatgcttgatgtttatgcttgttgttatcgtggttgcatgttcaaaccctaaggcaagtgcgagtttgtgtcattgttggtcttgcctcttgagtctcatttccttcttcttcgtctcctccactcttttgattactttcccagtcaatctctagtatgtatgtgtgcatatatatttcattntctttganagatcctaatacccctatttgaagcgtatt

SEQ ID NO: 26606 - DNA, 365 bp, Glycine max
  unsure at all n locations
ttgcatgcaagtttgagatgangaagtgttgaagggtgaaacttcctgcttttattggtgaccacagagtggtacctgtagatatgtcgcgggggtcaggagaccttggggacgtcaagtggggtgctattgcccaaaaccaagctgtgaccaatcccgacccaacccgggcataatcagtcagtgagaacctgtgatgtaccaaaacatgcgagctcctggcagtcaacagatcttaggaacaaagaccacaaagcaaggatgcttgtggtggctggccagctgtgaatcttgtgtgatatgtggattatggcctctggtaatcgattaccaagggtgggtaatcgattacaaggcttaaaaat

SEQ ID NO: 26607 - DNA, 388 bp, Glycine max
  unsure at all n locations
tgggaggattgatggngacccggtgttgagagaaatgangatatgagctacgtgggagtatgtgagctcagttggaggtgggcaacaggggatggtgggtttatgcgcgcattgtggatgtggaaaacttgttgtgcaccatcgcccgaccgccacctagtaccacatgtgatgagtaccccataatcctacaagcttgagatgaggaagtgttgaagggtgaaacttcctgcttttattgttgaccacagagtggtacctggagatatgtcgcgagggtcaggagacctttgggacgtcaggtggtgtgctattgcccaaaaccaagcttgaccaatcccgacccaacccgggcatagtcggtcagtgagaacctgtgatgtaccta

SEQ ID NO: 26608 - DNA, 407 bp, Glycine max
  unsure at all n locations
ntcagcactcattgatagatgaaaatgagcgaatctaagctacttttatctggacatccacttgtatagttataggatgattatattaagcggaatatcatagtcaagttaggagttgagagaatataaatctgaatattcagaataaaagacaatataattgttgattccagaaaatgtgctgccccttttaagctgtaaagcatgcacaatttttaggtgttggagtgtcacacaacccactccaacaatgacacttccttaaaaattcaattaaaaattatttgttactgtgatggatatacttatattaagtagacacgtaagtgattggatattcaacgacccctagctagtattataaaaaaatcacatttctagtattataacataatcacatgtttaaa

SEQ ID NO: 26609 - DNA, 348 bp, Glycine max
  unsure at all n locations
agttttggagaaccaagccaatcagaatgctagacgaaatatagatgggaatagaggtaacaatggcggtaatgacggaccgaggcagaaccgggttgagggagtaaagctcaatgttcctcccttcaaaggtagaagtgatccagatgcctacctgcaatgactacactgatgcgcagaaagtcaagctagcagcagctgaattctccgactatgcccttgtttggtggcataaataccaaagagaaatgttgagagaggaacagtgagaggtagatacatggactgagatgaaaagggtgatgaganaaaggtatgtgcccactagctataacagaaccatgcgac

SEQ ID NO: 26610 - DNA, 239 bp, Glycine max
tatgacagtcaccgctttaagagcgctgtacaccattagcgcttcgaggccatcaaaggatggtcgtttcgacgggagcgacgcgttcaactcaaggacgacgagtatactgatttccaggaggagatatggcaccggcggtggacatcactggttaccctcatggccaagttcgatccagaaatatgcctttgagtttatgccaatgcttggcaacagaggaaggcgtgcgtgacatg

SEQ ID NO: 26611 - DNA, 370 bp, Glycine max
agtttaatgaactaattatttactttttaaagtgcttaatttggctaaaatgcataatgtacattgcttcactatgttcaagtaaaaaatgattccaaacgtttactgcatatttgataaaagaccattctactggaaaatcccttgaaaaaattgtctcaacatagctttggaactcccatgcataatttacactgcttcactttatcttgctttttcaaaatcagaaaaaaaaaatattttatacataatgctacccttgagtacaaagatataaatacacattattattttcacaatattggagaagataaccatgcaattgacatgttttgttcaaagctatatgcgtagtgtgaacaatgaccat

SEQ ID NO: 26612 - DNA, 421 bp, Glycine max
  unsure at all n locations
tgtactgaggttcctatcttaccttgtgttcctattagatcatgtngnnnnttcacaactttttaccctctaattaatatttctttatgatattgtggaacagatacgaactaatcatctaagtggttcttgtcattacaagcgggaattactaaaaggttgtctgaacatacgagggcatggacaggttcacttttttacttccctcattcattaataccaacccatttattttagttgagttttttcgtagattacacttcgtagcttttcatggctactttntaatacaccttatctagttataaattggaggacaaaaatattatggttaactacattcctccttccacagaagcattactctaatctcagaagctttaaaattgctatttgagacatggattggtaatatcaagca

SEQ ID NO: 26613 - DNA, 371 bp, Glycine max
  unsure at all n locations
atcttactacccacctcatgacctctgagttttctgagcatatctagaagcatgccagtgagaggagtggccaaagaatttttctttttggtcatatccttatgggcttcccttataaactcaagtgggtttgcatatttggagtcactaagctctggaattgaaacatgcaaaaaggcatattgattcccccatgcagaacgactattggtcttctcaatcatctccttaacagacttgtaaccttcaatgtttcttgtgttcagcaacaccaatgctgtggattgngtttggcttgatttcagattaatttcttgcatgtatagccgaatgccaaaaaaaattactccagctagcacatcatttatgct

SEQ ID NO: 26614 - DNA, 420 bp, Glycine max
  unsure at all n locations
tcgcccatgtagagtattggacattctctatttcatattgatgttagatatggntccatatattggaaaccgcaagagtcgaatgggaagaactcttgttgtctatcatggcggtgagaagaagaagaaatatgagagatgaaggggaattgcgatttatcttgcagaatgaagaaggaggatcgtagttgccctagaaacctaataccataaaagaatactttcccctatggatttcattcactgacttggaatatatgcaatgtaccaggtgtagtcttaggacactaggaaactactgatattggaaactcggaaactaataatataaggcatatatttcggaagctaattatatgctcaacagactaaatatatgcttacctaaaatacaataacacaatatattcacatatatct

SEQ ID NO: 26615 - DNA, 354 bp, Glycine max
atcttgtctcgcggttatggtagagaatgaagcccaatctaaccttcgcgattttatttgaggcaaccatgattttaagcttgttccttggtagtttaagcttatctttgcatcttttatgactttggaatcaccattgtatgtttttacgcttcctttggaaaaccttagagaaagagactttgtaaatgttatctttttctaaaataggtgttattttcgtgaccttcattgaaccccgatcacattggcatgatcagaattttaaaatgatgttccttttgtagaatccaaaacgcccttagccttttcatgtagtgacatgagtatttaactcggagtattgttgctaac

SEQ ID NO: 26616 - DNA, 375 bp, Glycine max
  unsure at all n locations
ntcaagaatcaagatcctgattcaagactcaagatttttgaatcaagagaagacttaatcaagataagtatgaaaaggttctttttttcaaaaactgagtagcagatggatttttctcanaaacatgtttaccaaagagcttttactctctggtaatcgattaccagattgttgtaatcaattaccagtagcaaaatgaatttgaaaaagttttcaaatgaatttacaatgttccaattgatttcaaaaagttgtaatcgattacaatgttttggtaatcgattaccagtgcctttgaatgttgaaattaaaactcaaatgtgaagagtcacatcctttcacataaaagcttcgtgtaatcgattacacttattt

SEQ ID NO: 26617 - DNA, 354 bp, Glycine max
ctttccttagatacttacccgttgcggtacgaagaccgacgaaaaacgactgcacaacgtccaggaacggtcggattccttcgcgaatacgctcacggagacgttataggaaccttacggaagcgccgtagctaggattgccatcacagaaacaagttttcgtcgcggattcttcacacagagtcgagcctaacgggctgaaccctttgacacttacttgtatccctatctatagaaaatcgtgggagaagcttgtctcccagctcgcccagccgagcaaggctgcttcctccataaccatcagccttcgggatgaatcttacggacggtccaagtggggctggccgctctatg

SEQ ID NO: 26618 - DNA, 411 bp, Glycine max
ttgtggagatacgatgtgtctctacacttttgaattttgattgcaacggtccagcacactggtgatagactaccaaatcattgcaatcgatttcaacattttgaaatcacttggaacgttgtacatttaggtgagagcgttttgaaaacaattttgctactcgtaatcgatgacgataatctggtgatcgattaccagagggtataaactctttcggaaaaggttttgagaaaaattcatgtgctactcaggctttgaaagaactatctaatacttatcttgattgagtcttctcttgactcttgaatctgagagtcttgaagattgatcttgattctaggaacctggatcttgaaacttgaatcttgattcttgatatcacatctcctttgaaccttgcagtggtcttga

SEQ ID NO: 26619 - DNA, 384 bp, Glycine max
agcttacccattcagttttagggtttttatgatgatgcttttgatgttggtgtgctgaaattgcttatggaaaactgctagggatgaagggtagagttaacctagggttagaaagtgagaatatggtgttatgagtgggaaaagagtgagttttttttagagttggaaggccaaatctggatttagtggtatttggaggttaaagtgagttaatcctagtttgaaatgtcatttaggacttatgaggaagcttgggctgtgcaagagagaaaaacaaatgaccaaagtgaacaaagagacatttctagggtaaaatttggtgttgaggagtcaaattttgattcggtggaattttaggtgtaaatccagtttgagcaagtttaa

SEQ ID NO: 26620 - DNA, 431 bp, Glycine max
tctacttatatggcagggcgggcttccttcactttcttgtctccaacgcgagctttgaccaccgctcttccttcccgcgatgcttctctttatatccgcttgagtgggtttatagcctaaaccatatttcccacgatttcctttggcatttatcaagctagttatgccaccgttgtctttgcctaaacccattccgggttcataaccgttccccaacataacacgggccatcattactgctgcatcggataggcaagcttgcccagagaaggagtccacggaggaaatgcttaccacctcaaaagactggaaagcggtttctagtgactcctctgcggcctccacataaggcatagaggatgggcagctcaccaagatgtcttcctcgcctgacacgatgaccaaatgacccttcactacgaatttcaact

SEQ ID NO: 26621 - DNA, 377 bp, Glycine max
agcttgtgaaatccttttcaagcaaagatccacaagggatgtaccctcccttgttctctttgaacaaccaagtggatgtaccctccacttgaactgatgcacatgagatgtaccctctcttgttctcagtattacaacccaagtagatgtaccctctacttgtatcacaaagaatgtaccctccaatgtgttaagacaaagaattcttaagcggttagtcccttgaatctttgtaaggggaaacaaaagatatctcaggcggttagtcctttgaaatcttttgtttaaagggaagaggaagaatcaaaagaattctcaggtggttagtcctttgaatctctcggcaagagggagaaggaagaatcaaaagagttatc

SEQ ID NO: 26622 - DNA, 432 bp, Glycine max
tgcacaacaagtaactgaatctgtttttggtactatttgaagtaactaactaactaacttccactaatatataaagttaatactcagaaggatgggatgggccttgattaggcccatctaatcttccttattaaactgattacacaaagcaaggcccaaattcgtagcccaattactcaagtgcggaggttctgacttccaagcccaatttgaccctcaaaatggaagaattggaccaagcttatttgtgacaacattgaagatattgtttcttatctttcaagggactacccactctccatttggagtcctttagtgtcctataggccctgcacaagacagatagatcaagtaagcacaaaaatttgaaaataagccacaattatcaattaagctcaatcatttgcctaagatcaaaactaaattaaagtg

SEQ ID NO: 26623 - DNA, 381 bp, Glycine max
  unsure at all n locations
atcttttaattnttttcttcttcccaattttttcttcattattttattttaccattttatttaattaaaaaaatctcttatcttttttgctgtttgaaaaaactttatatctaattttttgtaatcatgcaactaagagacatacaaattaaagttattgttatacaaataaaaaatggttgtttaagaaaaaaatttaaaaatatactttttttttaaaatagtattattaataaagtatgtgttagaaaatggttttaaataatataattctaataaagcttatttaatttaatttcaccatttttttataatataatttagcttcattatctaaacttatgttattggatactctgtaaattttggtaataaatattt

SEQ ID NO: 26624 - DNA, 434 bp, Glycine max
tcagcaacttaattaccacataagctccaatggatgtacagataatgtggacacttgaaactgataggggaaacttgaaatccaatttctgtaacaaaaaaaaaaatgttagtgtttgctatataatccatacaagtttataatatgatgaattgatgattgagtaacaaaggtgagtaagaatgaatgctaaatacacagatatggattgtgcaataagttgtaaagattgtcagatattttcttcattatagatggaacacaaacatagaagatctaaacaatctggagatcacaatcatttactccacataaaaaagaaaaaaaaaaatctacacatcaatgtcatcactcatcatgaaatgaatatttaaaaattactcccttccaaatggagttctgagaaccagggataaaacctaagataaccatca

SEQ ID NO: 26625 - DNA, 309 bp, Glycine max
agtttatgcaataacttatatttatcccttaacaagggcaaaaggtacttgattgagacttgcgatcctaagaaaacaagctcttttatttcaactcgaccttaccctttatgctatgggaatagagataagtactaggcgtaaacccctgcatttagaccacgatggtcttgtttaccctatacgatattaactgctttaaatatgggacgatgagttactaaattttgttttataagtagcactcattttgtgagtttagatatgacatgcgaagacctataggtagtagaacctgctgttctaccc

SEQ ID NO: 26626 - DNA, 431 bp, Glycine max
  unsure at all n locations
agatgtgagacagcgcggaagagncagtctaccttttatgttaggtgaccacagagnggcacctggagatatgtcgcggggatcaggagaccttggggacgttcagtggggtgctattgcccataacccaacttggctaatcccgacccaacctgagcatagtcagtcagtgagaacctatgacgtacctatacaggcgagctgctgacagtcaaccaataaaagaacaaagtccacanagcacggaggcttgtgtggcggctggccagctatgcatcttgagtggtatctagaaattagcctctggtaatcgagtaccattcgtgggtaatcgattacaaggcttcaaagatggagacatgatgttaaatggcctatggtaatcgattaccaagggtgtgtaatcgattacacagggtgacagggcactg

SEQ ID NO: 26627 - DNA, 465 bp, Glycine max
  unsure at all n locations
gagtcattgaaccctggttagatcccctagaancaccaggggcgaattagagctcggcaccgcgagactctatagaggacatgcgtgcgcgcgctcttttatttcaagagcttgagtcggagatgcgtgatcggaacatctcgcagcacctcgcggatagaaacccgaaaggattgagcgtgcggccgaagacttatctgcttgggataatacacacagatgaccgttggtacatggaggatagtagctctgaatgcgccccactccttgaggtacatagattgcgaatgcttagggagcattggtgtttccaaccttgtcctctaaagcacagactgctaaaatgaacagtgaggccaggcattacactgatgaggaccggtattggcgggagctgagcatggactatggtatgctgagacgaagccacaccatgagattgacctggcgcgcaattttggcatn

SEQ ID NO: 26628 - DNA, 429 bp, Glycine max
ctagctataactgaaacactaagtaagttgccaactcaattgtatgctagtctatctttacatggaatgaatgttaaatttgctataacttcaggcaaataggagctattctgaagaagtgccaaaggagtcatcgtgctaagcgagctcattgcacttagcacgcatcaacagctaagcccagcaccagcacgcttagcgagtaaagggaaatcacgaaagacatctgctacgcaagcacgtgcttagcgcgttatcagctcactaagcgagttgcctgtcactttccaggcttagcgcgagattggtgctaagctcaaattcacttactcgcgctaagcacgagaatggcgctaagcacgatcaagatcaggaagcccttattaagcctgatttgcacagagggagcaaggagaactattcactacc

SEQ ID NO: 26629 - DNA, 360 bp, Glycine max
tttgcatgcaagtttctttgttagacctcgatcggtcatctttccaggccgaggtcgaccagcatttttttcgatccatttcggggaataatattttcttgccgagatgggcaaaatgccattttcggccgaataaatgggaaaatgccattttctgccgaaacgaaaagtcggttgggctcgcacaaaaaaacctagccgacctacattttaaattttttatgcaacacctaaacaagataacttgctgtgccgtacaaaaaaaacattacatgacagcgagcgttttgaaaaacataattgcgcaacgtcggctgaaaaatatcagtcgtggctttttcacgaccgatgtctgctatt

SEQ ID NO: 26630 - DNA, 395 bp, Glycine max
  unsure at all n locations
ccggatggacgccgcatcgaacattttgctaaccgttgtcatgcttaacncgcgcagggattgaattgaaaactcgctatgcgacatctgtcgtgaagtatcgaccgatatttttcagccgacattgcacaattctttttagaaaagctcgctggtcgataatggtctttttacggcagagcaagtcttcttgttttggtgtcgcatacaaaagttacaatgtacttcgggtaggtttttcttgcgagttcaaccgacattatgtttccgccaaggaaacattatcccacctctgcgaaagaaatattggctaaccgacttcatgcgtatttcattcaacgagtgaatagaaaactcaatagccgacaacggtcgtgaaatagtcccgactgata

SEQ ID NO: 26631 - DNA, 340 bp, Glycine max
ttgcatgcaagttttgccagataaagagtccaccgaagaaatgcttaccacctccaaagactggagagcggcttctaatgactcctttacggctttcacataatgcataaacgatgggcagctcaccaagatgtcttcctcgcctgatacgatgaccagatgcccttccactacgaatttcaacttttggtggagtgtccagggaacaactcccactgagtggatccacgggccccccaacagaaaactgataggggggcttatatccattatttcgaaagttacttgacaggtgtgagggcctatctgtactgggagatcgatctctcctcttacctct

SEQ ID NO: 26632 - DNA, 426 bp, Glycine max
  unsure at all n locations
actcagcttattctacacctgaagagaagatttgaagntgtttacncagtttaagcttcctaacaaaaattttcatgcaggtggaccttcttctagtaatcatgacttaccgcagcctgctatccctcttctattcccacctatagcaattctcaacaaacaaatggaacaagcggaaaaggagatcttggagaccttaaaaaagtagatgtgagcatacctctactagatgccatcaagcagattccgagatatgccaagtatttaaaggagttgtgcacccacgaaaggaagctcagaggcccaacaatcagcattgataggtaaatctgttcctcacattcttgagaaatgtaacgacccacgtactttctggctaccttgcattattgcgaacagtatattagagaatgccatgctagatct

SEQ ID NO: 26633 - DNA, 371 bp, Glycine max
agtttcaatatcttccatgctgggggaaccagacctataggtagaactcaacaattaagccagccatccactataatagcaagttcaacaacagattaagcgtaaatggaatattaattcgagccacaaattgcattgtgtgaaacaagaaaaggtatgcaataagggaattgtctagaatgacattatgattaaaactatttaatggaactccattctttctagcaaccatgtgaggaccctgatattgatgccaatttagtatggttgccaaaatatataaacatttgcttgttccatttgttaggtgaacaatttcatatataatgtatattctcaattgcaagtagtaagattaggtctcaatcaat

SEQ ID NO: 26634 - DNA, 427 bp, Glycine max
  unsure at all n locations
tactccacaatgttctccanaaatgtttttggaacttggtatccctatcacttattatgctcatgcacagtccatagagtgtcaccacctccttgtaaaataagtcagcgacatggaaagcatcatcaacctttttgcaaggtataaaatgagtcatttttgaaaacttgtcaataaccacaaaaacaaaatctttgccactctttgttctaggcaatcccaaaacaaagttcatagatatgtcaatccaaggaaaattaggaacaagcaaaggatgatataaattaagtggcttcacttttgattnttcctttttacaaacaatgcattgttcatagtatttatgcacatcacgtttcatatggggataataaaatgctcatgcaatgtttcttaagtcttttgcatgccaaaatgccccatcaaa

SEQ ID NO: 26635 - DNA, 362 bp, Glycine max
  unsure at all n locations
agctttataagcgcgggtctgggagacaaaggtcaagtggtcgcgatatgcgaagatgatgttccgagtacattggatttggtacgaccatgccctcctgatttccagctgggaaattggcgagtggaggaacgccccggcatttacgcaatgagcataatgtaaacctttacggtttttaaaagctctatagttgggcctaggctttagagtttttccttttgttaaggctttgtgtcttttgtttttgaatttctaatacgaggacctttcttcatctgttcctgcgtctctacccattctcattcatttgcatgttcacttctttntttgaaacggcagatccgatgacgagtcccccg

SEQ ID NO: 26636 - DNA, 409 bp, Glycine max
tgagatgaggaagtgttgaagggtgttacttcctgtttttattgttgaccacagagtggtacctggagatatgtcgtgggggtcaggagaccttggggacgtcaggtggggtgctattgcccaaaaccaagcttgaccaatcccgacccaacccgggcatagtcggtcagtgagaacctgtgatgtacctaaacaggcgagctcctggcagtcaacagataaaaggaacaaagaccacaaagcaaggaggcttgtggtggctggccagctgtgaattttgtgtaatatgtggattatggcctctggtaatcgattaccaagggtgggtaatcgattacaaggcttaaaattgaagacaggaggctaagatggtctctggtaatcgattaccaaggggtgtaatcgatta

SEQ ID NO: 26637 - DNA, 359 bp, Glycine max
  unsure at all n locations
agcnataagagaaaaatttgttgaagatgttgaactagttaagattgagttaattcaacttgggatttgggcttggtagttggttgtttttcaaaaataaaggtttcagctggatcaggttgttgaaagcatttcaaaatgacctgagaaattgttgaagcccatgtttagctgtacgaagtttgataactcaaataggaacgttttgatttccttgctcaacaagttctagcttttgtaggtaaaggttgcagaggttcacacgcgaggacaaatttgaaaggaaaaaccccgtcaaagtgttcgaatgaagattcatgatgaatagccgggtcagattctcaaatattttagtgatg

SEQ ID NO: 26638 - DNA, 417 bp, Glycine max
  unsure at all n locations
tatgacttagggtacacatgtctcccaaactccgattttaatatgaacgagagagattaatgtatttgttgaatatacataaagcttatgacttgtaaggtacatcactaatcttaaaaattaaaaataaatatagttagacacctaaatgctattttacacctagtgaaagagaaaaaaaagaaaaaaatatcatatgtaatatataatgtgatagtaagagagataaaaaatgagagataatgcggtacatccttatcttttattaaacatgtctatatattttataataattttaaaagttcaatttttatgtattactattattattttatattatcattcaattataaattatcatttanattattntaaaataattattttaaaagtcaataaatntatcatatcataaat

SEQ ID NO: 26639 - DNA, 356 bp, Glycine max
agcttcgtcagcataaaatggaggtaagacccttaatctaggagtaactaagatgacaatgcttcacctacttttaagatttgaagaacactgtgcaagacatgacagaatctgtgggaacagatattagttcattagggaacttcaagaaattcaatggataactaactaattacaactgtattccgtaaatgacaacattgaaaaggacttgcagcaggcatggcatattttcaacttcaaaatatgaacctgactttacattactcttttaagcaagtggcttacagtagtatcatataataacttgtgcatataactcatctaagaaggatgctaatggctttcttttcaca

SEQ ID NO: 26640 - DNA, 399 bp, Glycine max
  unsure at all n locations
ntntggagtagaaacatgtgaccaactcattgtattttaaaaagaaagtcgtatctagtcaaggtctgagagaccatacaagtttcctaacgatttctaattatgtgggccattaagtctatcatatgctgacaatagccgagaagcccatgaatctcttcgggggcggagtatgtgtctgccatcgccttggccttggctaacaagcggngaagttcttgactcccgttcaaggtaagagcaaaccgatccattcacatggttgcctcttggtgtaaagagtcgatcacccttcctctagcctgtttttctgcatatacttgagcatactcgtncgcgattctatgctcgtgggtcgtggctagacctaactcttcttggtacttggcgatgatagct

SEQ ID NO: 26641 - DNA, 285 bp, Glycine max
acccagtccccctcattaagaactagctcctttcttcctctattgcccttagttaaatacacctttgcttggatctctatttgggtcttaaccctctcatgcaacttctttacaaactctgacctagattccccttctttatgtataaaagaagtgtcaagagggatgggaatgaggtctaccggtgttaagggattgaacccatagacaacctcaaaaggggattgcttggtggttctatgaacccctctattgtaggcaaattctacatgaggaagatactca

SEQ ID NO: 26642 - DNA, 268 bp, Glycine max
agcgagtggaattattatatcatgaaacgcttcagcttgtacatggctgctgtgccagttacatacagccactatactactttaaagttgttactgatgcacacctaattaaagacctatataaacatattaattaccttatctagataatgactggatctagcgattagctcaacacagatcatacatagaactccgctctgtcattcttgacgatgtgtcccttcccattattatgcccacaaacaaaatcttagttataaagaat

SEQ ID NO: 26643 - DNA, 436 bp, Glycine max
tctatggattcgccagtggtactgacgttttccttgtcacgtgggatatgccctgcaaacccaccattgctaatggcggtttgctaagagccccatgcaatttacgtaaaaaacaactccccttgtaaaatttttgaaaacgaccccatttggaaaaatattttataaaaataccccatctggggaaatttgcctatcaacgtcattggcaaagctgtttggttcccttttgagggagtgacaaattgctgcctttcattttgaatcaccataaaaaaagactttattaatagtagtaagattcttcataaggaggacttgtgaacaacaacagtgtatatatatatacttcttggaccagtttcttatatatatccctttctttcgtattgtatatattttttttctaagtcacacattataagtatttttcaat

SEQ ID NO: 26644 - DNA, 384 bp, Glycine max
agcttgaaccaaaatctgtgagagtgaccttaaactgtgagtgaatgattagctatgagtaataatctttgcatgaatctctgagaattgcatcctttgcttaccttgaatgagaattgcgtcctttgctccctgtataagctgaatgattttgtcatgaattgaaccctgaacttaaataattatctcctgatatcttgtttagattctaggagagcatatggttcaaggcaaatttactctaaatttgggggagggaagtcaattagaatgaaaagaaaaaggttaagcatcagcacacacaacaaataagttgtatattaaaaaaaaaagaataaagtatgctaatgtaacaaggtcaaaagaaaatgaaagtaaaaagct

SEQ ID NO: 26645 - DNA, 437 bp, Glycine max
tactctagctagttaagtttcttcctgtcgatcaaagaagaatatgttgtgtttgcttcaacaagtagatatcttatggtgaggctcttggagagcttgcattaactgaaggttgtcattaagtccatgtagtctttggtctctacttcatcacctgcaaagccgaggagtggaccggcgtgagggtggacagtgtcgagggagacctcaagtctctagaaagttttctaatacaggatatcaatggaacttccctggtcgatgaggacattggacacgatgaagtttgcaatgatgatggagacaaccacaaggtcattctggttcatggggttgatacccttgaagtccctatctgtgaaagtgataagagggagactctgcagcaatggtgcattgacaaaattaatgttgatgtcccgaatggcatgaagatg

SEQ ID NO: 26646 - DNA, 383 bp, Glycine max
agcttcttatccaaggctcatcttggtggtgaagctccttcttccatggcttattccttaatggatggcgcctcctctcacctcttttcctttgtcttccgctgcatctccatggtggaaaatcacaattaaaggaccccattgaagctcaaagatccagcctcgatagaagtcccacaagcaagtttccatcaagtggtatcagagcacaagagcttcaagtaggtgctccttaaacctccattaatttttttgctttaccttctcttccattgttgtttcttcattttttctccatgtatctcctcatatgtcttgtgctaaatgttgttaacatgattctttagagtttccaccgattaaacttgttatagaagctagat

SEQ ID NO: 26647 - DNA, 429 bp, Glycine max
  unsure at all n locations
tgatctagtgtaaaattaactttccctaaaagatattacaaacacttgtccagatgattaccgaatttgtaagaacaacaactaagtcatcttgaaagtactcaaacagataatagtgcactatagcttccctcagagacagaggccatgaaaccttcaccctttcttccaaaattcagtgaaaaatcagcattcaaaagtgaaaacttttggcatggtaaaggacattaaaatgttaaaaaaattaattggtgaaggaagaacaaacctcactagtgataattgttccccaatccgggccttttgcaaacattcagctgataagattttgaaagtgggaatagtagattgaggccacctaaatggaaattgaaaaaagggtgtcaggtacaattatcagacactntnttacaatgatatattgcttag

SEQ ID NO: 26648 - DNA, 377 bp, Glycine max
agctttgtaaatcgtattataaaatttgatggattttttacctgataaattaagagttcaatttctatacacttacaagtgtattagtgtaaaaagttttatctgtcaactaaaagtaatcatgattattaagacagatatttaaaaggttaaccaatttttgaattgaaatagtagcgttaaaagtgtaaatcaaggatctagagaaagacttttaacaaatcacagtttcagtgattgaatttgttatctgcaaagaatgaacggaaaaaaagacttattaataatgatctggcttcattcaagggaaaagcggtgctgatatgggtagcagaactatatatccaccggaagggtagaagtttctataaatgatt

SEQ ID NO: 26649 - DNA, 434 bp, Glycine max
  unsure at all n locations
agggagttgaaaatactcacataaactctgacatcttatctattattgtttctaaataaaacactctaatatgtcaaatgttgttttcaaattatcaggtacctacacattaggctatcgattaagtaaaagattattgatatcggaaaatttcattactatntagtacatgtgaggctaatagctagaggcacccaattttaacatatgacaaaaaaatcaaggaataaaatcaaccaattaaaagtatgtggataaaaactgcatttgatcctgataaaaaataattatatttaaaaaatttaagtctcttttaacaaattaaataattacaaaaaatgaatttttatgttataatttattaaagaaagcactaaaaatatatgtatatacgaatcattaaaggtatgcttgaataaacttatctataaata

SEQ ID NO: 26650 - DNA, 361 bp, Glycine max
agcttgctgatttttaaaaaactgaagtatgaattcagaagaggcaaaaatactgactacaaaactagaaaacaagctcagaggaatgagaccactaatatgaaaacttaacatcagagcatggcaaggatatatgcttaattttgaaaagagataaaggactattttctaaaaaagataatcatggagagaaaaatgtgaacctcacgtagtggccaaaaagatgatgctgggtttatgtgttgtgcaagaacaccatcagatatgatttcattctccatagagccaagtagaaatgcttcaggcttttgcctggaggtatcaaaacaaaatgcgacatcatatgtgaagggacttaatt

SEQ ID NO: 26651 - DNA, 413 bp, Glycine max
  unsure at all n locations
nttctttctcaatcaatctgtctactatctaacaattctaattgcaagttcacattcttgttctttctttgtctagcatgcatacttgttcaaactcatgaaaaggaacacaaactccatcacaatcatgcattcaatccaaaatcaaaccatacaccaattttcacaaaaagataaaagtgttttactgccatgtcatcaaaatcaagtcaaactgttccatatgcttcagaataagcaaaccaactatccaaaaataaaactagcagtgtatataaacataaaggaaatactgtattaaaaccataattaaaataataataaaccaaaaagaaaaaattgtcatcaggaatcaacaatgtcaacaatgtctaaactggggaatcagtgagagcaacagcttctccagatga

SEQ ID NO: 26652 - DNA, 369 bp, Glycine max
agttttggagcaaaattttaagcaaaatctaataactatcattttgattatctgttttgaaagcattatggtagaacaaaattttataagcttcttttgcaacaactcagtatcatgatggaagctcctcttgatgaatacggttgggcacattggacttggaccctcacaaatttttaggagacactgctaaactcagctttatagatgtccaccttaacctcatgtttatgtgcttttgtttgtgaatttaggtctgccaaaggaaccaaaatggggtcacctaagagccttgcatgcagctctgaaactttgccagagatctttacaatggggagaattttagtaaggatttagagggaggccttt

SEQ ID NO: 26653 - DNA, 382 bp, Glycine max
  unsure at all n locations
tctcctataagctnttgtgtaccaattgcagatacttgttctttgaatatactctaaagaaagatgtactggacttgtggtcgtgttgctgttttgttccttgcgtcatttaacaaagacaaatgttctttttttcttgagaaatgggaccggaggaaattttattaagactggaaattgtatgggctaaagccattacatcatgttcaacttggtaaaagttgattggaaaatcctccatacaacaaaaatcatgaaaagtgaaagctgatctatatcaagcataacgcagtgatcttgcagtcttccaaaacaccatgaacatagcttctatcgtctgcaacctttccaccactttagacaataattttgaaaccctttt

SEQ ID NO: 26654 - DNA, 356 bp, Glycine max
agcttgtagccattacattagaatgagcatgtgattggaagtatgactgaaaatgttagtcagtttgttagattgattgtgaaggaatgcattaatcgtatcccggtgagagtgtgatccttaaattttgagagaaatgactatcatttagtactgatttttgcgtgaatctctgaagtatggattagatgcatgaaattgaggatgatgaaggccatgtttgattgtgatagtcacttagccaaaaagctaatcatgtgcttgaatgaattatcccttgtacccaatttgaattgaatgaattattgattgattgaaccctgagcccatacagtgttatctcctgctaccttgac

SEQ ID NO: 26655 - DNA, 419 bp, Glycine max
  unsure at all n locations
tgcttgtggagcttctatggaggctgtatctttgatcnttaatgttgtccttcaatggggattgttcaccatggagatgcagcggaagacaaaggagaagaggtgagaggaggcgccatccattaaggaataagccatggaaaaaagagcttcaccaccaagatgagccttggataagaagcttggaaggatgcttcaatggaggaaaagaaagagggagagaaagagagaggggggagcacgaaattgaaggaagacaaagggagagaagctgaactttgagttgtgtctcacaagactctcattcatcaaagttaccacaagtgttacacatgcttctatttatagactagctagcttacttgagaagctttcttgagagaacttccttgagaagcttctttgagaagacttccttg

SEQ ID NO: 26656 - DNA, 345 bp, Glycine max
tccttatgcatgcaatcttctatataagctggaccattttatcaataaacacaagttgagttttattcagaaaattacagtttatctcttttatcttagtgagagtgattctcctaaattcttgagtgattcaagaacaccctggctgtattaaaggacattcacaacctttgcgtgttgccctcgctggaaagagtgattctttccttcctttcatcttcacccttgttctttcaaaccacaattccagaaaatccacctctgcccagaattatctcgtggccataactcccattttacgcactcaaattaagtgattcttgagcctagattgaatatcaaaac

SEQ ID NO: 26657 - DNA, 147 bp, Glycine max
taatatactgagacgcactaaatcgaacaacggtggcttatgacatacctgaatggccatagcattgcactctgatgctcgatccggggacatcattgatcgagacgctctcaattgagcaaccgatgctctcgacaaatgacaatg

SEQ ID NO: 26658 - DNA, 369 bp, Glycine max
agcttgcttgcaacctcttttttaaccggatgatattcatcaagaggaggaagagatgggcatgtggctataactaccacaactagagagacgacaaaaccttacttagattaaacaacacagattcataaagctggaatctggaagtctaatctgtgacagataccatcaataagtgtttgggcgagcgatctacccttgatgacgacggtatggatacatcatcggatgaaaatgcactatgagctcgtactagacacagtagctaacctcttatgcatacctggtcacacctattaggcgcgagctactggaaagccatggatgactgtgagagctagcataaagaccaccactcagatgtgggaa

SEQ ID NO: 26659 - DNA, 417 bp, Glycine max
tgcttctacaatctccccctgtttgtttatgacaattttgaaatttagagacacatacacattctttttgctagtcgatcactcacttatttatccatattctccccctttgtttttgagtttaagcttcacttgaaattaagttatttaattatatgagttcttgatttaatccctattttctctccccctttggcatcaacaaaaagccaaagtacgtcagaaatataaaacttacataaatgattataaagcataatatcaaatgtaagcacatatcactagacatatatcatcaaactaattaggattaaaactcataacaattaagagcaagtaaatataatcatgttcagatatactaatcaaataataaaagaaatactatatgttcaaatatcataaaaacatatatca

SEQ ID NO: 26660 - DNA, 361 bp, Glycine max
agtttttactatgcataatccatatttattgctgatcactgtatcacaatgataatttttttttccacttcccgtgctagacttttattatgaaaatattgttgtatatttatcaatagtgttaaaattcattatggaatgactgaaaatttagtttaattggataataataatgtttaagtattgacaaaaaaaaaatacattaaataaaatatgaatttgaaatatgcgccaaggtgtagacttgttaattgtatttcaaatgaaatcgttccaattaatttgaatggtcatcgagaatcagaatgagacatactcattattggcaataaatgttgattgacattgatgaatttgattt

SEQ ID NO: 26661 - DNA, 407 bp, Glycine max
  unsure at all n locations
nttaagagccgaagaacttaaacaacatttctagtttggattatgatcattgttcctacttattggtatgtttatgtttattttatctaggattgctagtgctgttctgatcatgaggagctactcctcctagtccgaagattattagataacttttcatttgtaccattctcctcattttaatgaaatttctcattgattttatttaaattagttctcttgcttttactgtttatttgaaaccaatcattttaatacttaatcaattgcataatactaatcatgtaattggtagattttggtagagagtgttttatgtcaaattgcatgatcaaactctttgggtaatctccaatacattagttaatctnttaattaattttcctataattgattttcttttgact

SEQ ID NO: 26662 - DNA, 331 bp, Glycine max
agctgatcatgatctacatctaccatgataagcttgatggagggtgtcgagattataactagttagttgtagacttgtttagtagtagcttggatatgagaatataaatactttgtaacacacactatacaaatcaatcataatatttttttcttctttcatcttcattctatattattctctactctgtaactgagtcctaaccaactcaacagtttaagtcaatttttaaaaaaatatataatgtttttatgtgttttattcccaaaaactcatttaaatatataatcaattgtattaacttgatctattattactatattgttataat

SEQ ID NO: 26663 - DNA, 414 bp, Glycine max
agacaagccgacttgctttactaacaatctccactttagcccaacaatggtgataataatcctaggagttgcattctatcacatcttcatatgcagggagaagaagctccatacattattgtatccacactgtaatccatagcaactccatctcgaccagtcttatattataatctccgaatgatactttattggggtatgggttaggacttaaaatagagatgtgagctctcgggttgaagacctatataacggcaccaagggaacttctagggagtctctcttcacgagaggataatcatgctacgatcagtcacacccctgccttgatgttatgactaactatcgaactcaaaaactttcttcaattcaccccttgctaagcatctgtggcattaatccatgcgagcctag

SEQ ID NO: 26664 - DNA, 336 bp, Glycine max
  unsure at all n locations
ctataaatatggggagaagtgaagtagaaaagggttcatcccctttggcacttctttctctttcgaatttgcttaagaaaattgtttccgtgaagaaaatccaagccgaggcgctttcgtaacgtttccgtaacattttcatgagtgatttcacgaaggttttcaaccgttcttcgacggtcttcattcgttcttcatcgntcttcagtctttcacgggtaagtacctcatacccagcttctcaattcattctatgtacccgttgtggtccacagttggnttcatgtatctttttctcgtttcattcactatttatacccccttttgacgtgctta

SEQ ID NO: 26665 - DNA, 413 bp, Glycine max
  unsure at all n locations
ntccattgatgacaaattntgcattgtttatgtatgtcttgtgtgtttccctttatcaatgtaacgcttcgtacttgtggtagtataaataggtcatcatgtggattagtgtggaatctttgacgatgcaggaagcaagaccttgccgatgtataggtaggaccatggtggtcttgtaaaaagtagatgacaaaaaatcatctcaggtttgatttcaacctggtcatgggtggtacgcactgtagactaagtggtgtgctcttgcatacatgtcactcactatgggtggcatgcactggagacttaatggcgagcttttccgaacatgttactcactgtgggtggcatgtactggacaattaatggcatactcatgcatacatctcactcattgtgggtggcatatactggag

SEQ ID NO: 26666 - DNA, 281 bp, Glycine max
  unsure at all n locations
acacacgacaaaaaaaaaaaacaagaaaaannnaagaggtgactgaccgaacccnaanaggacggacaaacacgagcagcattccaccaacagcaggcaaaaccacaacaaccaacacaagaaaagcgcaaacaaaaagaaccccgccgaccacaaagaaaccccgacaagaaacaacaaaaagaaaaaacacaaaaaaaacaaaacccaaaaacccaagaccaaaaacacaagaaacaaaaaaccgaaaaacaacccaacaaccaccacacaaacaaagc

SEQ ID NO: 26667 - DNA, 53 bp, Glycine max
  unsure at all n locations
aaaaacaactgagcagacaaagatacacgcgcagcatgaaantaaaannaaaa

SEQ ID NO: 26668 - DNA, 275 bp, Glycine max
  unsure at all n locations
gacccgngatactctaagtcacctgcagcaagcaatttgtnccttttgttttcaaacaaaaggcgaaagcacttgcaataaagaaaaatatactctttatctatatcctttttattcttttaagagtttgtgtccgcaaacatttttataatgtgcattattatcgtgaatggtgacgaatcattaaaacaggctgaccgatggatgacctttttaaacttcatcatcatattatcaattcacgacttttctagataatacttgaatattcaaca

SEQ ID NO: 26669 - DNA, 207 bp, Glycine max
  unsure at all n locations
aacaaacaacacagcgcnatttttaaaaaaaaacccctcccacaaggaggngaaaaaacacaggaccgacaccccaagactgacaangcatgcttgcttaccttatttaaagaataataaaaattgtttatataaacgtcagtcaatttgatcaaaccgaaaatccaatattatatgatttttgataatatgaatgttaatgaaaaa

SEQ ID NO: 26670 - DNA, 376 bp, Glycine max
  unsure at all n locations
agcttgactattttagttgatnttagccttagtttcactttagttattagtcaattcaattaagaatgagaaatcccaaagagaaaacgtccgattgatttttcgctttattttctaacacgcattttttattattatattattattttacctcttttttgatttccaacgtatttacggcacgaccgaacggtcggaattcattttaaccgaaattaacggatgatacaattcaaatgatcggtggaaatttattttatttttagattaggcgagaaatgacttaaataaatgactgaagcacgtcaaaaggggatatagaaagcgaatgataatgagaattataatacatgaaataaaatgtggaccaccacgg

SEQ ID NO: 26671 - DNA, 388 bp, Glycine max
  unsure at all n locations
gtggaactagcttagtcacttattgcaatgtagcatttctttatcttctgctatgaacctgtttcatacttgctgcaattcaattagctcataggtcaaggatgtgcacgtttctttagttgtacacatcatttagcttatttggtataataggaaccaagctaggtgtgaaagtggcccttttcagtatgagcacattgtccacaaagttatctcaaaagggatggattaagtgcaacattgatggtgcaacaaatagttgtctggggccttgagctaacaggggaatntttcgtaattctaggggtgctcttttgggttgtttctcgcactctttggatatttcaatcgcttttcatgctgaattgcaagtttcattttaactatt

SEQ ID NO: 26672 - DNA, 382 bp, Glycine max
  unsure at all n locations
agtctnnaatttgtcatttagccaaaaacaatcaatgacatatagctaataattaggagaaaatgacacaaaaatgaacaatgaaataatgtatgcattaatatcctttcaaatctatcacacggctgaggacataggtcacttactcatgcattgtgatttcaattgtaaaaactccttagctatacaatttaagaaaaccaactttcaatgaagaacgaatagaaatatatagtaagcataacaaaaggaatgagggagatttaacatagactaaaatcaataaaaataatacggtaaaaaaaggattctttcataagaaaaagaagagatatcatgatcggaataaaataaagacacctacagaacttatctaagaaat

SEQ ID NO: 26673 - DNA, 280 bp, Glycine max
aagaacctaaacgatcctaattatatgagccatcaaatctatcatgtgctgacagtgattgattagcccatgatctcctcgggggcagtacacactttggccatggcttttgctttggctaacagacgcgggaagacttgactttcattcaaggtaaggcgaacctatccatccacatagtcgcttcttgatgcaacgcatcaatcaccctccctttagcttcatttttggcacacacttgggcaaagtcctccacttacttttgtcatgggccatggac

SEQ ID NO: 26674 - DNA, 452 bp, Glycine max
  unsure at all n locations
ctganaatgancttgtgactcgagcatcgaagnnccnnagcnggacccgggatccttaagacaacngcagtttgcaagtttgtattttggnaaagcggngacacacgtgcgaacttataaaaactcggaaagacataatacagcaaggggcctagttgacacatggaaaaaacgagttgaatctgatccgaccctaacgatgctaggtctggtcagtttaaactgtcccctggccacccttacgacggatttttgaaatgcacaaggcgggaaaaatattcagtgggtaacgtgagtttccatgaatagcacattacacagctttctgatacaatactgcctctacagagatgatccaagataaaataaaagatctacatctgattctccagggtctatgaaatacaggacttcacctggactccttactgatatcataaagacggacaccg

SEQ ID NO: 26675 - DNA, 435 bp, Glycine max
  unsure at all n locations
gagctaaattgaacttgaagacttgaganacaggnaannnagncggacccgggacacataggaacaacgcagtttgcagtatagagaaacaaaaacgaaggaacgcgagaaaagagaggccaacaccccgacacgcacacnaaaaggcgagcacgaagaaacagcgaagaaggaggggaacgcccgaaggaaagacgaaagagaagaggggaagagccaacggagggaagaacaccagaaaagcatcgaacacacacgaaaaagaagacgggagaaagagcacgaggcagaaacggcgggaccatagagacgagagcggagaccagagaggaaggagcagacgggcaaaggacacggcaaccaggagaacaccggacgcgaggacaacaacaggaacaaggggggaaggagaacggacgacgaggggaaagacag

SEQ ID NO: 26676 - DNA, 182 bp, Glycine max
  unsure at all n locations
ttacgcatctgtgcggtatttcacaccgcatatggtgcactctcagtacaatctgctctgatgccgcatagttaagccagccccgacacccgccaacacccgctgacgcgaaccccttgcggncgcatcgattataacttcgcttattgtatgctataccgaaggattaccgataacctcgn

SEQ ID NO: 26677 - DNA, 364 bp, Glycine max
tttgcaagtttgttcattccgaagagaaaaaaaatagagttgtcataggataaaaatgaattctttatagttggagtaaaacgggaattgaataaattaaatgattaattattgttttttcttgtaagaattaatgtctcatgtgataggcatatgacttatgtagagaataataagtaaataattaacgattaagggctaaattgtaattgggcttaatatgagaagtatctagagctaactgctacttgatgggagtagtgattataaatgggggataatacccactaacgttaaataaggtccccttcctgactagaaagtgtgctctctcacctatagtcattacgaacggagagagaca

SEQ ID NO: 26678 - DNA, 401 bp, Glycine max
gtaaccataaaaacgaacacaaaggtcaaacttacttataaggcaagacaaacaggctgtgtgatcgtcacaaacataaaggtcgcaacttcaaaatcggacatagctacatttgtatgcatcacaacaatagaagtccacaacatcggaatcagacaaaggtgactcttttattttatcgtccaaagcgatataaaaaccaaaacggggaaaaaatcgaacaaagaagggtcttgcatgggcaaagcgccgtcagcctcagcaccgtcgttagcctgtcccaaaaatcaccacataaaattagacaaataaagggaaaaaatagataaaaatggaacctttattcttcaataccgttggtgaacatctcttccgtataggagaccgcaactttatatgta

SEQ ID NO: 26679 - DNA, 385 bp, Glycine max
  unsure at all n locations
tttcaagttttaacctttaaacaaactaactaatatataatttcaaattttaatgataaaaatctaatacaacaacaattaaactaatataggttatattgttactcatttaatatgaaaatatattagatataaaatgtttttcaaactaactaaataaaagagtggatgcatgtgtaggttaatagcctataactaaaacctttataacataacatttgtttttctcgagaaaacatctcacttgttttaaggtgttgctacgtgtaccaatcatattacttgtgcacccagcacaaaaaatttaatttcgaaaatgctcttattngctttttcttccctttaagtttcnttttttacaataacacagtcattctttcatttt

SEQ ID NO: 26680 - DNA, 371 bp, Glycine max
tcagtctattagtacagggtatgtgtgtgtgtttgttaatgttatgcgattataagtttaacagcgatcattttgattgtcatcatcattttccatagcagacctgatagaatggtataatcaagccaggattgatcatgttgatgaatgcatatcccacattgcatttgttctgcaattaatgtcgattccatgtgaataattaaacaaaaaggagaaaggaatactaaagtaaattaaatttcatagtggaaatgttcaataaaaggaacacacattttcatgcaagcaaggatatttttctacagaacaagttcaaatgagaacgttttacaaaaaaagttgatgcattttcttattgtttgatttgt

SEQ ID NO: 26681 - DNA, 369 bp, Glycine max
agtcttgtaggattatggggtacccatcacatgtggtactaggtggcggtcgggcgatggtgcacaacaagttttccacatccacaatgcgcgcataaaccccgcatcccctgttgcccacctccatctgagctcacgtactcccacgtagcccatatcctcgtttctctcaacaccgggtccccatcaatcctctcaagcttccacaacatccaagcaaaacaacattcaaacagcacaagctatcacagccaaacaaaacagggcaaaggcagaaaactctgccaaaacaccaaccaaatcacagcttttctcacttaaagaccccagtaacaattctttcgatccaattcgttaaccgttggatcg

SEQ ID NO: 26682 - DNA, 427 bp, Glycine max
  unsure at all n locations
ntgcagatttggtcttcgccagtgaatggatcaatgtgggtccgaaaaaaggcaaatttgatcatcctactangacgactgagaaaactggggcaaataaagagggtgagaaagagggagaaacccatgttgtgactgccattcctgtacggccaaatttcccaccaacccaacaatatctttactcagccaataacaaactttctccttacccaccacccagttatccacaaaggccatccctaaatctaccacaaagtctgtctaccgcacttccaatgacgaacaccacctttagcacaaaccaaaaacaccaaccaagatagtgaattttgcagcgagaaagcttgtagaattcaccccaattccagtgtcctatgctgacttgctcccatatctacttgataattcaatggtagccataacc

SEQ ID NO: 26683 - DNA, 390 bp, Glycine max
  unsure at all n locations
agctttgaaatatggtcttgaaactagaaatggggcaaaattagaaaatgcacagactgaaaattcaaatatgaagccaactgcatacttggtgagtgcaatggcaatttctattgtcatgattcaagcatgttcataaaatatatatttataggaatggagggagaaactatattgattttgactaaaagtatatatccaaaagatttaatgtcataaagcaactnttttttattaaaatcgttgagaaactaattcaaacattgngaaggaactcagtgacaatcatatcaatgaatacactgatacagttcatatctgggtcctttgaaaccatggtcacacagagtaaaattgcatcaacaacaactcgttaaataactacacaat

SEQ ID NO: 26684 - DNA, 390 bp, Glycine max
  unsure at all n locations
actaagctataagggccactctctgctgtaatgtcccttttaatgagttggttaaaggaatacttacgagttaagacggttcatattataaagtacaaataactcaataaaaaaagtaacccaacagatatatgtcatttgtataacactcatatcaccgatggctcgaaccaactagtggaagattatgtcaacttaacaagaggtcttgaattccagtcctaagtatatatgcaattgtgttaatgcagcctacaatgtgtttatctgatctcaaatcaaacataattgtctactgtgaaaaatacatgtaatctaacaaaaatacaataaaatatcggtttataaatgatagagtaaaccctcatttttaagaacttatntgacatc

SEQ ID NO: 26685 - DNA, 382 bp, Glycine max
  unsure at all n locations
agtcttaatattcttatttcttaaatggaaatctaaaatagcttaatgcaaacaaggtgaaatgtcatgaaatctgaaaacaaagcagttagaacatagccaaaagaaagaaaaaagcctagacacccccctacctcatacactnttcttcgatcatgaagaaggtgttgtggctccagttcatttactagaaagggcctggaccacagtgcacagaatttagatcaataaacattctcacccaataactgaaagaaaactatattaaataaaataacaacataacacaattgaaaaaaagcacaatgtgaagaaatgttataaccagacatgaatagaggacagtgaanagagaaatatatagagaatttcaatcaaacac

SEQ ID NO: 26686 - DNA, 448 bp, Glycine max
cctcgtgacttctttgggaagctttctcaagaggcttctttgagaaactaacactttaactactaacacccttttattaactaaattcacctccttaaaaataattacggataaaataacacaacaaatataatcaaccatcaaacataattattaataatatatatatatatatatatatatatatatatatatatatatatatatatatatatgaacgtgttacacgcttatggcgtgacgcacgcccaacgcgcgtatgaccttttttacttgttacactttcagtttttatatctgcagtcaaaattcaacaaaacatcaattctttaatatttaagcacaaataactattagataatttattttatagacaattttatcttattttctattatcaaaatacaattatttaacagtttttacacgtaaaagagaacagtatttt

SEQ ID NO: 26687 - DNA, 388 bp, Glycine max
agtcttgtggattttcaacttcataggaaatcgtgaagcgtatgataaacaacatgggaaaggaagcatcagtatatgaaaaaacgtgtgtgaacaagaataaagcttgtaccaaaaccacaacgtgagtcaaatgtaacccttgagtcactgatttcattaaaaaccaatcggttcaaaccagttaaaatacataactgatcaagttaaaggctcagtccggccttgtgatcgatcccgagctaactagttgaatcgatcgatccgagctgagtccaataacactagtcacgcttattaaaaatgctacttgtgatttcactgcattcctttgtcctaatgaaagccaatcgtgatgttccttaggatatgacatggaaaaacttgc

SEQ ID NO: 26688 - DNA, 416 bp, Glycine max
tagtgacaaaaatcctctaataccaaaatccatggtttgtgaaacattggtcggatgaagaacaacatcttatggactccccttggccattcgttgtttagggaatggatattctcggaaatttacccatggctccaatgcaaaggaaattcctgctagtggcagatgattatttcacaaaatgggtcgaggtcgaaccattagcaaacataacaacctatgccatccaaaaattcttttggaagaatatcattacacgctttagaatttcaaacacattggtaaaaaaaatggtttacaattcacagaatgaatgctcaatgagttcttaagcagcctcgaaatcaaacattgggtgacgtttgtagaacacccccaaaccaattatcaatctaaagcagccaacaagataattc

SEQ ID NO: 26689 - DNA, 365 bp, Glycine max
agtttggaaactctttggcaagatacatccagattttcccattgacccgcggaatgtgcgacttggtttatgcatagatggatttatatacaatcattatcttcaccttatttggcttggtcaatcattgttaccccatacaatcttcctccagaaatgtgtatgactaaaccttatatgtgtatcaagactaaaccttatatattcaaagttcaatgagcaatttaggaaacatggatttgaacatgatgcatctatggtgagaaattcaattctagcaaatccaccaaaccgtttagtcaaatttctacttaagagccatcaaactttaatcaggagagaaaaatatagagagagactttatt

SEQ ID NO: 26690 - DNA, 422 bp, Glycine max
tccatcagatacgactttcaaaagtcaatgaaccggttagtctccttccggtcatatccgcttgattggtgcaaaccaaccggcgggcatcatgcacagtgaaatcaaatttccaatcatcattcagtgcaccttcaaatagtacaccttcactagataattgggtcaagtcatagaatagggattgctcaatgaccttttttatcccaaaaacctcataaatcaaagtgctttcttgaattttgaggttagaataaaaggctttaactaattcagaataaacaggcaatttcaaagacatataaggaatgagatttgaattttgaaatgcctgaatgcattcaaaattctcattggagaagatatccatgtctatgaacttatggttgataatgcaacgagaggagaaagaattgtgtatc

SEQ ID NO: 26691 - DNA, 386 bp, Glycine max
  unsure at all n locations
agcttttcctttattgttctactagagattccaagtgttagagaaaagaagaagggattggagcctcaatttcactgtctttgtgtgagggtaatttctctctctatagacattatttgcaaatcccaactgtgagaatgtgaggaaataagttctgaagttgatgtcccaatttcagaacaatcgaacggttaacgagtctgggatcataattntactgggataggtttgggtgtatgcgggaaaaagagagggttatggaagataaagaagggagaatgaatttgaaagacaggaagagcatagagacacatcgtaattgtgaaaactaacctaatatgtatctatttatagctaggatacttttagcctattacttactctat

SEQ ID NO: 26692 - DNA, 439 bp, Glycine max
gtgtagaacttgagttaaggagctaagagtggttttgataaattcttctaacttattgaagttagtgaaacttagtggtttgtcaataactgaacatagtctcggtggttgagacgaactagtataaatttcttgtgtcttattttctccttttttatttaaactgacttagagtttgaatttgacctttactttagaaaaattatgtttgttttacaaagatctgaacctatcgtcaaatctatcccacaaaaatctgatatttgtttcttaagttttacttcatcaaatgatgtttttgttgtatttcaagaagatcttaacgttagtaaaaatcacaattcacctcattcttgcgatatatatatatatatatatatatatatatatatatatatatatatatatatatagtgagacatattataacatatggacg

SEQ ID NO: 26693 - DNA, 338 bp, Glycine max
  unsure at all n locations
ttgcaagcttgtttctttcctcgggantagnnaagncgatactcatcagattaattagaaactaactgcccagatttcagcttttcggtatctcttgcacacctttttattcttttcacattatcttcatcatattatatttntctttgatattacaagattcagtgctgtcaatattgattgctaagtaagctcattatccagatagcggctaacttagaggagtggctgctgggtatattaacttanaataacccatatctgactagggaacgtataactcttggagatgcctgctcgagcgtgaaaatgatctatcctgacatgaatagatgaca

SEQ ID NO: 26694 - DNA, 343 bp, Glycine max
cgaggaggcaactgcactaaaaacacaacagagtactctgtgttgaggccaattattgcaagagctgccaaatatcattcatccgaaatgaattctttaagatattaggcgtactttggcatttgagcaattgtctcaccaacaggaatattaatgtgcaaaactttcagcatttacacatatcgaacaaataaattcctatccttactctcgcctactattctcctgaagaagggaacactcacccgaggaggttccaatacctcctttctctgaactctcttcagcaaaagcttcatgctcacgtggaggagccactatctctatctgcttcacccaatca

SEQ ID NO: 26695 - DNA, 338 bp, Glycine max
  unsure at all n locations
agctttataatcatgtatggcgnagaaatcattaaccaataaaaaattattcatagttatgaatattaagacttaacaaaattattataaaaattaataaatttattatatctgcatcttatgattaaacgacatgtaaaattcaaatagttaaactgctcctaagttgattggtactttgtcaagaaatatataatttctcctgatatctgaagtgttgtaaattaattatgatatttctttttcttgtgtcttttatgatttatcaacttattcttgctttctttcttgatttttttccccgaaaataagttgaaggaattaaaccagtatctcct

SEQ ID NO: 26696 - DNA, 418 bp, Glycine max
  unsure at all n locations
ctgtttgtgtcctattctgcagctttctgcaatgttattctcanttttgctgattngttctttctaaacttttcttggtatgacttacgagttntgatctgttctggcatttagagagctacccataataaaggtgattaatttgcgatatatgatcacatgttctatcttatgtcctcttcggtaataacgtgttgcgatgatacgtacgtgccatttgattttgttatcgtatgttcatcttcgtatatacttcgtacactgtataatcccgtactatattcagtaatttaatgcggaaatatgatgaaatatggtctatcgtattgtatctgctattggtgggtatgaaaaggcaatgaacacttgcataagaaaagggcaatcgtaacgtgccagttatttatatgttatgtgt

SEQ ID NO: 26697 - DNA, 372 bp, Glycine max
  unsure at all n locations
agtcttgctctaaatttacattgatgtttgtatttatgggaggaggttgtatgccatttttgttttaagagtagtgtcccactggtaaaactaactttccaaatgtttccttcgcaggaaatggccccgaggaagcttgcctcaaagaggtccaggaaggacaaggcagccgaaggaactagttccgctccggagtatgacagtcaccgctttaggagcgctgtacaccagcagcgcttcgaggccatcaagggatggtcgtttctccgggagcgacgagtccagctcanggacgacgagtatactgatttccaggaggaaatanggcgccggcggtgggcatcactggttactcccatggccaagtttgat

SEQ ID NO: 26698 - DNA, 440 bp, Glycine max
ggccctatacccgggttcatgggaatttaaggagtgtaggtgaatctattatcatgctaggtttccgacttgcttgataatagtgaaacctcgtctagagctttctctctttataatgtgttgtcgctggtattccataccgccacaatattattatcttgagtgatgatacctctagaaaatagccgtgtgagttatgaattgttggggagtagttattagagacccctagatattgtcctataggttcccaaataggggcaaaagagcaaacacgctccgtgccattcgttctcatgcattttttggtaaatagcaccagtttatagttttgctagtgatgtttggtttctttaaggtaatacatgacctttttaatactacgttgaggcgtcatcatgcctaaaacgtagcattaaaaatggatccctacagtctcg

SEQ ID NO: 26699 - DNA, 362 bp, Glycine max
  unsure at all n locations
agtttgaccatatcccgacccaacccgggcatagtcggtcagtgagaacctgtgatgtacctaagcaggcgagctcctggcagtcaacagataaaaggaaaacaagacctaaagcaaggaggcttgtggtggctggccagctgtgaattttgtgtaatatgtgagatatggcctctggtaatcgattactaagggtgggtaatcgattacaaggcttaaaaatgaagacaggaggctaagatggtctctggtaatcgattaccacggngcgtaatcgattaccaagcttgaaaacgaggtcaggaagctaatgaagcctctggtaatcgattaccaaggggtgtaatcgattaccaggctta

SEQ ID NO: 26700 - DNA, 387 bp, Glycine max
tctcaagcaagcttccattaagtggtaatcatatcttatagattcttaagtaggtgctacttaaaccttcattaattttcagctttaccttctcctccattggtgtttcttcattattctctatgtatctcctcacatgtcttgtgctgaatgttgataacatgattttttagaatttccaccaattaaacttgctatagaagctagatctgattttcaatggttcaaatttcttgttcttgttcttgaaccatgaattgtgttgagtttatgttcctttgagttttgcattgctatttttgtggctgaagaatgaaccataaaactcttacaaaaacattaaagtagaataaaacctcaaaaatctagagtgacatgttcactgat

SEQ ID NO: 26701 - DNA, 383 bp, Glycine max
agtttgagaatggagaattgcacaaagcaatcactacgcatggctccaaagtcgaaggtttaaaacacatgaacgaaaacgcaattcatggggctccgaaaaaggggttacaatggagaattgcactaatcaatcactacgcatggctccaaactcgaaggtggaggacacatgaacgaaaacgcaattcatggggctccgaaaaaggggttgagaatggagaattgcactaagcaatcactacgcatggctccaaactcgaaggtggaggacgcatgaacgaaaactcaattcatggggctccgaaaaagggtgagaatggagaattgcactaagaaatcactacgcaaagtttcaaactcgaaggtggaggacacatgaac

SEQ ID NO: 26702 - DNA, 424 bp, Glycine max
  unsure at all n locations
tcaagaataggccaaactcccttccaaaatctgatttcaagcttaaataggtggctttgttcgtgtttgcacgcttagcgcaactctaaaccgcttagcgtgcattaatgaatttcagcttagcacatgctttcctcgctcaacggatgggctgaagcggtgcgcttcgctggatgacccttcgcatagcgcaatttcacaactcatccttcttccagattcttcctcgcgcttagtcaaggggtgtttcgctcaacggatggctcgctaagccagaagattggcttancaagagggtgaaaatcaacacttcacaaacttgcctaattaacctgaaattgagagataatgattattaaacacacaaaatggacatactaagtatttattacctatctttaacananagtaattataacactac

SEQ ID NO: 26703 - DNA, 357 bp, Glycine max
tagcttgtaggattatggggtacccatcacatgtggtactaggtggcggtcgggcgatggtgcacaacaagtttttcacatccacaatgcgcgcataaacccaccatcctctgttgcccacctccatctgagctcacgtactcccacgtagcccatatccttttttctctcaacaccgggtccccatcaatcctcccaagtttcctccaacatcaaagtaatacaacattcacacagcacaagctatcgcagccaagcaaaacagggcaaatgcagaaaactctgcccaataacaccaaccaaaatcacagcttttctcacttaaagaccgcagtaacaatttcttcgatccaattc

SEQ ID NO: 26704 - DNA, 426 bp, Glycine max
  unsure at all n locations
tgtgcaaatcaaatcactcctacatttcatctctagtatgcattntctttctttacccactcctcacgtttggttttttagggaaaaaacaccataactaaacgcgccgcaaggtatccctatcgcaccagatccaaatctagaacgatgggtgatcaagaggagacgcaggaacagatgatagccgacatgtcggctctgaaagaacaaatggcctccatgatggaggccatgttaagtatgaagcagctcataaagaagaacgcggccactgccgccgctgtcagttctgctgccgaagcagacccgactctcttggcaactacgcaccatactccctcanacatagtaggacggtgaagggacacacttgggcacgatggcagccctcacctgggatacaaccgagcggcttacccttatgga

SEQ ID NO: 26705 - DNA, 384 bp, Glycine max
  unsure at all n locations
accttcggcttgcaagtttgtaggcgtnggatcttcttcatcaatggagtcatttgcttcttgaagatcatggcagcggaatagagaaggaagaaagatgattggagaccccactctaggagatgatgagtcaagaagaagctcaccaccacaggaagccatggataagagcttgaaggaaggcgaatatgagtggagggagagggagagaatgggcacgatattttatgcctcanatgaggtctgaactttgaagtgtaattctcaaatgatcaaagttcaaaaaatgcacacacatggcctctatttatagcctaagtgtcacacataattggagagaaatttgaatttctattcaaattcactcgaatttgaaattgaatt

SEQ ID NO: 26706 - DNA, 428 bp, Glycine max
  unsure at all n locations
tgtcccccaattttctataaacagggggagaagtgttgtagaaaacggttcagccccttaggcacttctctctctttcgaatttgcttaggaaaattgtttttgtgaagaaaatccaagccgaggcgcttccgtaacgtttccgtgagtgatttcgcgaaggttttcgaccgttcttcgacgttcttcatcgttcttcagtcttcaacgggtaagtacctcaaaccaagcttttcaattcattctatgtacccgtggtggtccaaatttggtttcatgtatttttagtctcgttttcatttactttttatacccccttttgacgtgcttaagccatttatttaagtcatttctcgcttaacctaaaaataaaatanatttccaccgatcattngaattgtatcatccgttaactttggttgaaataaa

SEQ ID NO: 26707 - DNA, 392 bp, Glycine max
  unsure at all n locations
agtttaagctctcttaactgcataaggctcttaatatttgaagagtatccttgtggaaccttcacccgacgaagacactgacaaaaagttatcttctcctttttggacaaagtatgaaagctaggggcaagtaaattttcttcccatcagaccttggatgcaactgtgatcgtatccccatctcaactagatcttgacgggtattcaagccatccttcgtcttgccctanatgttaaggagcgtcccaatcacactgtcacatacatttttctcgacatgcataacattaatacaatgtctaacgtctagatcagaccagtatggaagataaaagaaaatgaacctctttcttcatatgcaagtcttacttttattcttcttttgggtcttt

SEQ ID NO: 26708 - DNA, 440 bp, Glycine max
  unsure at all n locations
tggcgttcacttcttcttgtggtacgtccaatttttattnttgtttttcttttggaataagagcttcatttatagacgaattctaatgagctagcgatattctgtgagacacttttttttcccccccttcaaaccttctctctataattcactatattggaaatcatcgatttttgtgagttttacgtcaaaatcaggcataatcattgaatgaaactcaccaaaatgagtcaattttaataaatttcgataaatcttaggaagagtgttgtcgggaaaaagtgtcctccctatcattcgtggaaatgatatgtattgttagtgtaaatactaaatagttaaatagttttatacccttaaccaattagatattatgggttaaatgactatcacttacccatccctccttatgagaatagaagtgtgggaaaatatgataa

SEQ ID NO: 26709 - DNA, 386 bp, Glycine max
  unsure at all n locations
agtttaagcttttntaactgcataaggctcttaatatttgaagagtatccttgtggaaccttcacccgacgaagacactgacaaaaagttatcttctcctttttggacaaagtatgacagctaggggcaagntaaatttcttcccatcagaccttggatgcaactgtgatcgtatccccatctcaactagatcttgacgggtattcaagccatccttcgtcttgccctaaatgttaaggagcgtcccaatcacactgtcacatacattnttctcgacatgcataacattaatacaatgtctaacgtctagatcagaccagtatggaagataaaagaaaatgaacctcttcnttcatatgcaagtcttaactttattcttcttttgg

SEQ ID NO: 26710 - DNA, 443 bp, Glycine max
  unsure at all n locations
gggcgttcacttcttcttgtggtacgtccaatntttatttttgtttttcttttggaataagagcttcatttatagacgaattctaatgagctagcgatattctgtgagacactnttttttcccccccttcaaaccttctctctataattcactatattggaaatcatcgatttttgtgagttttacgtcaaaatcaggcataatcattgaatgaaactcaccaaaatgagtaatttttaataaatttcgataaatcttaggaagagtgttgtcgggaaaaagtgtcctccctatcattcgtggaaatgatatgtatggttagtgtaaatactaaatagttaaatagttntatacccttaaccaattagatattatggtttaaatgactatcacttacccatcccttcttatgagaatagaagtgtgggaaaatatgataaaaa

SEQ ID NO: 26711 - DNA, 380 bp, Glycine max
  unsure at all n locations
agtttgatttatgattcaatncatggatctttccattaacaaccgaaatatcactaccaccaacagctctcttgatggagcttgggtatttcattaactgaccaataccaaaaccggaatttattttaacaccagagtctttagcaaagttcacccctttatcattgttcaaacatttattggtccttatgcccgaattggttgattgtcttcctgtgtggccgtaatcagaatacagtttcttgggcatgatagggctgccatcattccacaaattttcactagttnttgtctttcccccatattgattatcaaattgcagaaatggtgaaaaagataaacccttggccacatttttagtttctgatctagctctagca

SEQ ID NO: 26712 - DNA, 426 bp, Glycine max
tgaattctagatgagtgcttaaatgcatgggcatatagttatcattctatgtctagcaatgattttcttatattatcttttctttttgttctattagaagttaccctttgtcgagcgtctaacccctaaaactaatgcatgcacaccttctttaaatcttatttagaagttaccctccgtcgagcacctaacccctaaaagaatgtaaagataaatgcatgggagataaatagaaaagacaataggatagaaaaacacatgttgttgcattgataaataatgaagagtacatcatacatcgctttggcttttaggcctgccagaccctaactaggggtttaacctctcatggccattgagggctttacactggatagggtataagaactgatggaagaaaggggcaaaagaatgaaagggagaaaa

SEQ ID NO: 26713 - DNA, 384 bp, Glycine max
  unsure at all n locations
agtttaaaagttttaaccatcccaagatttgaaaaagaanaactacagcaaatggtaggtggcaatgttgtgggaaggtagaataaataaaatttttacacaagcataacataagagcaaaaatcaatcttgtaaattctatgtatgttggttgttgaagagatctagctttatgatgtggagatacgagaagtacatgtacaagctgtcaaaatgaaacatgagataaaaggtccatcctcaagataaagttattctactgaatatatggaaatgcaaaagtaatatgcaaaatgaaacaacacatttgggtgtgacatcatacagtttagacttccaatctatattngcttgttcatatggaagataacttagcttcaatgt

SEQ ID NO: 26714 - DNA, 426 bp, Glycine max
  unsure at all n locations
tgaaggtgcgtaccccaccatttttcatagtaaaacactagtaatgtgtctactattattatgatcatctctttctccgtcattgtaggtgccagttgagcgtattctttgaaagatccgtgccccctttttgcacatgttctgtagttgcatcctatccagagccatatcagaattgtactgacactgtctaacgaaggcaaccattangtccttccaagaatgaactcgggaaggttccaagttagtgtaccaggtaacagttaccccagtaagactttcttggaagaaatgtatcagcagttcttcatcttttgtgtatgcccccatcttccgacaatacaactttggatggttcttggggcaagtagtccccttatacttgtncaaagttgacgccttgaacttgggaggggtgatgatatt

SEQ ID NO: 26715 - DNA, 394 bp, Glycine max
  unsure at all n locations
agctttgtcttcaaaagttacttaaaaccgntttaaggtccaacgccttaaacagtcctctttgcttttattggttaacatggaccgttcaaaagcataaaatcaacccataacttcacactttcacaagaactatgtaggtctgatttcttcattacaattgaggatacgtacgagcaaaagctccgcttttgtcgacctccccaagagatcgttaatggtccaatgccttaacgcttctctcccttcaaaaaccaagagatcgttaatggtccaaacgcctttacgtttctctcctttcanaaccaagagattgctaatggtccaatgccttaatgttttctctcctttcaaaagaatcaaaagatcatttaatggtccaacgacttaaatg

SEQ ID NO: 26716 - DNA, 438 bp, Glycine max
  unsure at all n locations
tgtaggattatggggtacccatcacatgtggtactatgtggcggtcgggcgatggtgcacaacaagtttttccacatccacaatgcgcgcataaacccaccatcccctgttgcccacctccaactgagctcacgtactcccacgtagcccgtatcctcgtttctctcaacaccgggtccccatcaatcctcccaagcttccacaacatccaagcaaaacaacattcacacagcacaagctatcacagccaagcaaaacagagcaaaggcagaaaactctgccaaaacaccaaccaaaaatcacagcttttcccactcanagaccccagtaacaattccttcgatccaattcgttaaccgttggatcgactccaaaattttactggaagtctatagtgcataagcctacantttgaccgttgggatctactagcaaaca

SEQ ID NO: 26717 - DNA, 185 bp, Glycine max
cgtgacgccgaccgagaggacgacagggcgagtaatgggaagggagggggagggacccccgaagagaaaaaacgagcgaagccggagaacaaaaaggagagaaaggaagacaagagacaacaggggagggggaaccagagaggagggcaggaggacgaaaaagagaaacagcgcaaaaaacagcc

SEQ ID NO: 26718 - DNA, 382 bp, Glycine max
  unsure at all n locations
agtttgtattttcangacttcagaagagccaaagatttccccatcctagttctaaatttcaaatgctatgaaagcttaatttaaaatatgtgtgcactttggaccacaatggtgcaatttctgaaatggggttcaatttattataacaaatagtgatgtacataatgtttgtacacatttatatatgtgtggcataatgaattatactcgtacagcttcaggataacatggccaaatctaattatgtctctagcgttggcatttttgtctctgcttgggatgatgctggccagttagaataggatcgattactagcgcattggatgccgatcgctcgtagcacacattaactgaaacaattacaaaatgaacgttatcataa

SEQ ID NO: 26719 - DNA, 438 bp, Glycine max
  unsure at all n locations
tgtagaagcaaaaggccagctatggttttcaaggtgtattttgaaaaggcctatgactcagtctcatgggcttttttggattatatgctacaaagaatgggtttttgtcccaaatggagacactggatttctgcctgtcttaattcagcaagcatttctaaaagatgtccaggtttaattctctgatttgacgctagtcaacaaattgtttctgacaagtcatcaagctaccaagcttgtaaggattctaccgaaatcattgtgattgaaaggaaaagataatagaaagtaaatatgatgctaggataacaaatggttgtcattntgagatgattaatacactggcttagtacttcaatttattctttagaaccaataaggagactgagtatttaaagtaaaaatatagaggacttccatantttggaaacatgaatg

SEQ ID NO: 26720 - DNA, 385 bp, Glycine max
  unsure at all n locations
ggctatgcagtttattggaggaaaataataagagagagagagaaaaaaaagtggcgtgggaatgaaggaaagatagggagagaagttgaactttgaagtatgtctcacaagactctaatcatcaaagttatgacaaatgttacacattcttctatttatagcctaggtcactaactaaatgaaagtttccttgcgaagcttatgtgagaagcttccttgagaagttagagtttaactacacaccccttctatagttaagctcacctctttgagaagctttcttgagaaactccttaagaagttagagcttagctacatacacccctctaatagcntaagctaaccccttatcaaaatacatgaaaatgcttagctacacacaccc

SEQ ID NO: 26721 - DNA, 429 bp, Glycine max
tatgctgcatacatttataatagaccccctcttctttaaaaccaacaacagcagaataatgatgatctttcaagcaacagatacaatccaggttggataaatcatccaaatctgagatgggtaagtcctccacaacaacaacagcctgtccctcccttccagaatgttgctggtccaagcaagccatatgttcctcctccaatatagcagcaacaacaacaaagacaacaagcaactgaggctcctcctcaaccttccttagaagagttagtgagtcaaatgaccatccagaatatgaaatttcagtaagagacaagagcctccattcagagtctgacaaatcagataaggcagaatgctactcagttgaaccaagctcagtccaaaattcttacacattgccttcacatactgtgtagaatctgaaaa

SEQ ID NO: 26722 - DNA, 372 bp, Glycine max
  unsure at all n locations
agttttgaacaatatacttggccttcatttaactgtctttgggcttggcggccacgctcaacaaagtactttcgacacctactgtacgttgatttcaccaatgctgtttgggaatgttgcgacaatcctttaaaaccttattgatacattctgagaggttcgttgtcatgtggccatatcgacgtccttctctatcgtaagccatcgtccatttttcctttgagatgcgatcaatccatgttgctatggctggactcagttcacgaaatttttctaaattttgatcaaaaatgtgcttgcatggagtgtaggctgcataaaattagttatgaataacaattntaagtataaatgaaagaaaaataaacgtga

SEQ ID NO: 26723 - DNA, 438 bp, Glycine max
  unsure at all n locations
gattcagattaaacgtggaattagtttcaatgctttgaatataattattggagacaaggtaaagttagaaaataatgaaattatttctgctatcagttgtaggtttttagtgtcaggaaaatatattgccttgcaaatttgcgatgatgaagacgttgaaacgatgctggaaagttttaaacaacaacaagaaatgtcagttctagaattgtacatagaaaaggatgtggctggtggttcaatgtttcattctgcaaattcccttacatcatgtggaaattatgtatctaatgatgacacacaaccgccaacaaatatgagcaatttanatcttgacgaagatgatggtcatgatgattatcttgtgtctaactcatacgttgaagagtcgttagacgaagatgacagtgttgacggtatatcagatacagacaatga

SEQ ID NO: 26724 - DNA, 210 bp, Glycine max
  unsure at all n locations
agtttgagcctacngccaaaaggagacaagaanacatgaaggctcagaaccttctgtgaaaggctggaacgcaaggggatgaatggtaccagcgattgacataaaatgagaccccgagacacggttattggaattccggtagtcggggggacaaccacaagtgaacggaatccgtaagccgaggaaactgcactatctatacgagatacg

SEQ ID NO: 26725 - DNA, 401 bp, Glycine max
  unsure at all n locations
aaagatttgtgactcctgcaggcaggaantatgaaactacgctgtagaatgaggaaggcaattatcattgtggtttgatgcgcaggccacacggcgtgttcagatcgagacatactagattatgcctgtatctcacattcgaacgtcacatcgtactatgtacactcgcgtcaaaaaaaagtgttatgtacctatcagtaaatgggtggttacatatgattaagagtggaccaacaatatgatgcatctgaaatcacctacaaaacctatcacaaggaccatgcataaggtgtaagcgcactcatcgactgtaaggaattggaaaaactctccgcgaagcgaaatgtgatggggaataaccacgatgaggacatatctcgacttcatattgttccagcaaa

SEQ ID NO: 26726 - DNA, 372 bp, Glycine max
  unsure at all n locations
agtttatgaagagtagtagaaacacgtagtttatactaattcactcaacctaggctatgttcagttctccttcacaaaactgtgaagagtttcactaatcaatattgattataacaagtattctaacttgtcacttctggctttacaattatctagaccactactgcacgacccttagactccttttgaatctaaaaacactcaagtattgttttctcgctatgtcactcctagctntcacaaacaattaatttgtagaatcacaaattctatcactcagagagtgtgtttacaatgaattattctctagtacaatgaatttacttcgtaaaggataaactcaataaacattgtgtttcactcagtagtatt

SEQ ID NO: 26727 - DNA, 426 bp, Glycine max
  unsure at all n locations
tgaagaatgttngcaggaggttagtgtgtcttttttttacttcaattcatgtcactctcatttcatattntattggtgcgctttttgattgatgattagttttacttttctcttttctaatatcagatttttgcattaaataatgttttgagtgcaattaatagacacctggagagaatcatataaatgagagagaagtttatatatataataaatatctggtatgatagaaaaagggtataaaaaaataaaaagaataataatattgttttttctaatcagatacaaaaagaataataatacaactttgttagaggagtatgtgaatatatttgatgtaagaaactctcaatcaatttgtactctttntgattaattgctttctggtttgtgtatgcttacaattaagaaaagtaacttctagtt

SEQ ID NO: 26728 - DNA, 346 bp, Glycine max
ttagtttattaattaagaaaaaattattgtaatacctgatgccttgtatgagtattatatttgtactttgcaatttatagtaactttatatttatgtactataatgacctaattcatttgatattttattgaaaataatatatatatatatatatatatatatatatatataaaatcaaattattttcgttctagagtgctcaaccgtgtgttacaaagggattaagggcacattcctactaagaaaataagtgaaatctgaatatgcataccttgcattctctatattcatcactgatgaacatctaactgtctaatttaattattaggagggaatgattatggg

SEQ ID NO: 26729 - DNA, 424 bp, Glycine max
  unsure at all n locations
tatttgagaagcttccttgagaagctatagtttagttacacacccctctaatagctaagctcatgtcattgagaagtttccttgagaaacttccttgagaagcttccttgagaagctagagcttagctacacatacccctctaatagctaagctcactctcatgccaaaatacatgaaaatgcttagctacacacacccctctgatagctaagctcacctccatgccaaaatacatgaaattacaaaaaaagtccctactacaaagactactcatattgccttgaaatacaaggctaaaaccctatactactagaatgtgccaaatcaaggccaaaaagaaggagaacattctaatatntacaaagaagagtgttcccaaccttggcccatgggctcagaaatctaccctatgattcatgagaa

SEQ ID NO: 26730 - DNA, 391 bp, Glycine max
  unsure at all n locations
agtcttaaagtaccatgtttaccacccagaggtcaacctgagtattatcatttactccacctgctgcttaggttatgtgaataaaataactggtgcacaaataagccattttccagtcctattatgcctcacagaagtcaccaataccaagacttgtactagacagggaatacctccactactagaaaagctgctttctccatcgcgagaactacatcggttctggaaaatcgctttaatagaaggcgcggtggcaattttgtaaataggagaaaaaaattaagtttttacgtcatatattctaaggcagttgcaaacaaccgccttagaatattgaanaaaattaagtcaacagtggttttgacttacgactgtcgtagatatggttata

SEQ ID NO: 26731 - DNA, 446 bp, Glycine max
tctccttcttctaggtgaccaagctttactaaaactgtttctctcttgttctttgtatacaagtttatcaacctaggaaggcatattcggaatcaagttatatatcatgtattagttacatttatcaaattccctaggttaataaaactaaaacatacttacaattttagattcatttttgtccaactcctccagagctctctcaagaaactcacattcatctaacaatgagatctgggaaataataatgagtattttaggtcaacctgaataccacccagagctcataataataacagcagtcaaaccatgaataccacccagaggtcaacctgagaattaataatgagtattatcatttactccacctgctgcttatggtatgtgaataatataactggtgcagaaataagccatatctgttggacatataaattcataaattc

SEQ ID NO: 26732 - DNA, 374 bp, Glycine max
  unsure at all n locations
agtttctgagttgtttttggattgnacatttcaatacttggtaaaatgtgataatgggctttaataaatcatttgggagtgatatttaattattgtaaattattggccgagtggtctacctagagggagatcccaataattctagtgatgatttgtggaattaacttgctgtatgatgccattcaattgtgaacatgagttgataattgtgaaattgggtccagagggattgaccctgatgtaagctccattggagcttgtaggcctaagatcttcctcatcaatggattcctttgcttcttggaagatgaatggcagcggaatggagaaggaagagagagaggagatgccactttaaggagaagatgagtcta

SEQ ID NO: 26733 - DNA, 437 bp, Glycine max
  unsure at all n locations
nttaactgaatttgcaatgttccaattgttttttaattggtgtaatcgattacaatatattggtaatcgattaccagtgtatctaaacgttgaaattcaaattcaattgtgaagagtcacatcttttcataaaatgctttgtgtaatcgattacatggttttggtaatcgattgccagtgacaagttttgaataaaaatcaagagatgtaactcttccaatgcttttctcaggattttctcaaggttataactcttccagtgattttcttgaccagacatgaagagtctataaaagcaagaccttgatttgcattntaataacttcttcataactttntgaacgtctttntgaacttcttcttcttcttcttcctttgccaaaagctttctaaagtttttggtttctaaaccttgttctttcacagaaaacaaaagt

SEQ ID NO: 26734 - DNA, 322 bp, Glycine max
  unsure at all n locations
agcttgtgaatttactaatgaagggttttaggattaaaaagtcagccgacatatggctaattgaacaagagactgacaaattaggttaacgaaagtgctagatgattttccatgctaactaatataagaaatctactatttagagaagagaaaacaagattgctaacactcattactcaatataaggattttttgtgtgggaatatcctanaattgcagggttatccaaggatttggttgagcattgactatccttaaaggagaggtttaagccgtatgagcagccttccaaccattttaatccagaagcctgccaatggtc

SEQ ID NO: 26735 - DNA, 430 bp, Glycine max
tgcattaaaatatatctcccaaccaaagaaatttgcttatttaagtatccaaagagcttaacaagctcataggccaatgatagattcaaaaactataagaaagcatgccatgattaaccaaagacactagttgaatgcggtccataatcgaaaggagagaacccttctacttaaccaatttctctttaagtctatcaataatggtgagaaggtgagcacactttggctttccactgaaaatgagagcaccaagatacgtgaagggaagagtgcccatcgagaaacccaacatctcatggaaagcattaacatgacttgatgagatatcaccttggtaaaacttacatttctgaggactgattgcttggtccgaggagagttcataaaggttgagcaatcttataagtttttggacattgcgtttcatatg

SEQ ID NO: 26736 - DNA, 407 bp, Glycine max
  unsure at all n locations
tcttgtgctattctactagcactattgggaggtgggcgcatcntgtgagatgagcacatgagtaggcgcagnggacacactgtggactcgcaatgaatactctactacacctgacctcgagaggacttatatgcatatactacagaaggtacacttacatctatatcttgcatatgaagggggaaacatactaatgtgctgtatagaaccttggctgatactgcctgaatgaaacatgaaaggcttactgtacactccaatatcgctatggtaaccaacatcaaagatacctgtgaagctcccgtaaatgttgaggatattcctggaagaagcgctggccgcattaaagtgacacattgatgtgttccatgatacatcccaaatgatctgtacgtgttctcacgaan

SEQ ID NO: 26737 - DNA, 309 bp, Glycine max
tgatcgacagacaagacatagatgactcttgtgcacctatttataatgggtgccgaccagcccgatgacgcgcggagattatcatcacacctcgcgctcacaagatgagatacactgacatgggagtcacgctgacgggcgaaaatacactaactggcatactcatgaacatcactttccgcagcatggatgaagactagcttgattgcatgcacagactaccgtcgatagctgctaccttatccagtcgagcgctgactgtgagctcacatgcggctacaaaactgatgccgagcgcttacacgagat

SEQ ID NO: 26738 - DNA, 366 bp, Glycine max
  unsure at all n locations
agcttctcggctcatgctgggaacgcctctagctcaacacccgtgcagcctaaggcacccacccagagggaagctccccaagttccaactccgaacgcgactcgaccagccggtaattcaacacgacaaggaacggccctccgaggccgttgccggaattcaccccgctcccaatgacgtacgaagatcttctaccatccctcatcgccaatcatttggccgtggtaactcccggaagggtcttcgaaccccctttcccgaggtggtatgaccctaatgcaactngcaagtaccatgggggcgccccggngcattccatcgaanaatgcttggcccttaaatacaaggtccaacatctaatggatg

SEQ ID NO: 26739 - DNA, 424 bp, Glycine max
  unsure at all n locations
tgtaaattgtaatattcattagatagaaattagataacacattcatgagtgaatcccttttgaggtgaagatctacaatctgtgttgtaaaaaacatagataccttttaccgttgtaagtccaacagtggttgccaaagctgaaatccaatgttataactggtctagttctggttaggttggaagtccaatgttataactggtctagttctggacgtagcccaaggttggggtaaaccactccatactttgattttgaatagatctatcaaatgcttgcttaaacactacatgtcataccctaatttcgtccggggattattatttgttgatatacaacctttgattggccgcttcgagacactnggcgtcctttgttgcacaatgaatgaagtcccgagacgtgtcagaaatcanaaggaagc

SEQ ID NO: 26740 - DNA, 365 bp, Glycine max
agtttgccatgaatcgtgccatgtgtactagtaaagaggctggcataatcctgtcataaaacacaaccataaactaaaataagcatatgtgatcagtgtcaaaataaaaccaaccatttacaaaaccaattaagaaaataagaatagattattacagctaaccaatcaacaagcctttcaggtaaccatgcttgacattgcttgtccacataaaatatttcaattaactcccacgcagctttcaaagatgtaggctcttcacctctctatattatgtgtaatgcgttaaaaagcaaatgattaacttctcggtatcataattcccacaagcagatctcagctcagctaaacacgtgaaacaaatt

SEQ ID NO: 26741 - DNA, 439 bp, Glycine max
  unsure at all n locations
tgcacttcttcactttcctcaaggacttcagtttctttcccacttgggcctttaagctttgggagccaagttatcccttgcctcctaaacctcaaccacttgtgatagccgctgatgacgccattgctacttcccctaagctccttatctttcctttacactgtattccatgctttatggattctctgaagtatcctcacattggcttcattgaaacctcgtgcgacgaagggcgcgatgatctcctccaatggtgcacctctcatagggtagcctagttgtcttatggccagcatgggaatataattaatacaaccccttgttcctatcaaggagatgcttgggaatacttcacacgagcacaacactcctgcccctccttctttccatcggnggaactagctaatggacgctcctaccatacctgccatgagttctt

SEQ ID NO: 26742 - DNA, 345 bp, Glycine max
  unsure at all n locations
ggtttgcaagtttttgcttaactganaaacttggcaataacactagaatggctgatgagggaaaatgtatcattcgaatgcaagtgaatggatttactcacgcaatttctggtgtctttatgttcctggacttaagagtaatttattgagcatagggaaacttcaagaaaaaggcttgactattttgattcaacatgggaagtgtttggtatatcattttgcacaaggattaattatgcagacagatatgagtggaaatataatgttttctttgctggctaccatgataccaaaagcttcttcatgtttccaaattgtatcagaaaatgaatctcatctttggca

SEQ ID NO: 26743 - DNA, 402 bp, Glycine max
tatccaaataattgttcattgggtttattgattcacttgttagcggaccatctgcaaatgtctagttttgcaaacttacgcacaagatatcacaatcctcagtatgaggggtgtgcgctggaatcccacatttactagtattatggccacaataatgtgtatataactggaggcaacccatatttggggttgagtttggcccaaactcaaaattgtaaaagaaattattaatgataatgatagatagacaatctttagcttggattaaatggataagtgattgcttctgggtggaatgcggtctcatgtttgcgtgttatgcatggcacgagttatgagaatatgacgataatcgtacaaaactatgtggagagctagatatccaaatatccttattggaac

SEQ ID NO: 26744 - DNA, 379 bp, Glycine max
  unsure at all n locations
agcttaacaactttagttcattgagtttcaacaataattgctctataactcaaattgcaagccatattcataccaaataaaaatggtccaaaagccttcacaataatacatgtttaagtcttcttgaaagtactttcagaaaattttctttatcatttcagagcaaagcagcacaagtagcaagaattgtcgatgcaagataaaaatcattacaattaattttcatagtaccttatagaagtttcttccaccttccaaaaatttcatattaccattatatcattcttaatatcatgagtaaacttaattctacttatattatgtacatcacttcanatactcggaactagatntanagtgtttgttcacttattactga

SEQ ID NO: 26745 - DNA, 434 bp, Glycine max
  unsure at all n locations
ntatgttttcatatcttgtatgtcttggtttatctttcttaaaagcatatcctttgcttacattggatggctattttggggtctatggagtatgaaactaaatattctaataattttggtcaatgatagattgtcataaactttctttgttttttttttctcaggagcatgttatgaaatgtcaagaccaagcagaagttgatcgtatccaagccaatgttgaaaaaagtagaaaagcactgcagaccttgggttatgcagacttgacttttgaagatttttttgcggtaacttttctactgcaattccttatcctcgtgggatatttattaacattntaatattctcttggcaaaatggactacacgcaactaacatttgaaaaatacttttgatnngctattttggaaatagggatattgcactgtgtgcat

SEQ ID NO: 26746 - DNA, 386 bp, Glycine max
  unsure at all n locations
tcttgcaagtcttgtctgtctcgatgcagccgtaatgatggcccgagttatgttggggaacggttactaacccggaatgggtttaggcaaagacagcggcggcataactagcctgacaatgccaaaggaaatcgtgggaagtatgggttaggctataagcccactcaggcagatataaagagaagcatcgcgggaaggaagaacggtagtcaaagctcgcagttgagacaagaaggtgaaggaagcccgccctgccacataagtagaagctttataagcacgggtctgggggacgaaggtcaagtggtcgcgatatacgaagatgatgttccaagtacattggatttggtacgaccatgcnctcctgatttccagctgggaaattg

SEQ ID NO: 26747 - DNA, 413 bp, Glycine max
  unsure at all n locations
tctttagagccatttcctgcaaagacacattttcattgtttttttgcatgaaatgccaaccatcatttcatttatcttaaacacaacaaaagccaaacaaatttgaatggtgcatatttcttttcaccaaatgcaagttgtcgcaacatgcccttttgcgggcgtgcgaagcgaggctcacgggtgcgctttccaaaggaggaaagatgcgcggagtcgccaccaacgtttatttgtggaaaacgtcggaaaaaccgaaggaaaccggtcaaaatgaaaattctaagttcgggagttgtatatacgtttgaggaaggtattagcacctctcacgtttgtctcataggacaacagcctattttttagaatagtggagatngtatcaccttaactttatttatttatgttttttt

SEQ ID NO: 26748 - DNA, 386 bp, Glycine max
agtttcacattatgtggattatcctccagcacatcaacatcctgcaaactaggtatatcgtacagtcttcatcagactcttcagtcgaggagttatcctcacctcgcctcgcttatcactgcaaaccaaatacaaagaacgatcctccatcgagtcctccatcaaatatgtatcatataggtcatcattagtccctaccttaatgtaagatttaagcaaaacttgtgccttgactcaaattaagactctagccacatctagatgcatcctattagtagtatactcatttgcatacatatagtcaccataggagctacaatccgatttgaaaaaatcatcattccattcatgagtagggacattaagcaatttcacccataccaagt

SEQ ID NO: 26749 - DNA, 422 bp, Glycine max
gtgcagaagaaaatgagaaatttaacaaacattgtgttgttatgtttttcatttttaattgtaatgttagttttagggggaatgtattttaggtaaaatgtgtaatagcagcttttgatattgtaattgttgttttgctgaagaatttgtagtaggaagtagcttttgtagtgtaatagcagcttttgttgctactgtcaattgttgttttgctgaagaatttgtaataggaagtagcttttgtagtgtaatagcagcttttgttgctactgtcaattacccatttcaattaaatataatttgttggtgaaatttgttgctgaaatttgcagtgtattaaatataatttaataaaagatagagaattatgtaataagacgcagctcataatgtatgttgggatggattgtactactccaact

SEQ ID NO: 26750 - DNA, 375 bp, Glycine max
  unsure at all n locations
agttttacatatttccaactaaaatgggtctgtcttgcaataagattgtacttgtttgatgatccagatcatatgatggcaatgaagatgatcaaccaagcactgtgaggaaggggaaaataaagtctttcacttcttattgtggtggacttccatctcctgaagctgctaacaatccattagcatataaattcaggtacttcttggaatgtctttgtcaaactcaagagtaaggataccgaattatgtatttaattagacatgatttataaaacatttgaatatcttagtgtaagtttccaaaacccaatgcttttgaactctctgctntgtagtattttcatctggctaaccattcaactatagtatgtcaca

SEQ ID NO: 26751 - DNA, 432 bp, Glycine max
  unsure at all n locations
taaataggagggatagaagggaaaacattcatatctgtaagcagttgggaattgagcattgctctgcagaagaaaagggaatccctttgtgaaggggaaaccctagcccagcagagaattctctccttctatgtcattcaatattcaagaacagaagcatttttttatctttcttctatcttttcacatctctctctctaaattcatattctgtttccggatcataatagtatgttcaaattagtttaaaaaattacacaaactatagatttagacccgcatgttatgtggttgatcaacaaactatgtgtcgtcttatgccattgctnttcctagcctagttctgaggcttatgaattaatgaattccacaagctacaataataaggaaaaactcacattatgggcattcaagaaacaatttaactacata

SEQ ID NO: 26752 - DNA, 371 bp, Glycine max
agctttatcgtctcccgtattaactctcgtatctgcattaagcttaatgcaatttggctgaggagcctaccaatacataccatcagagtcatccccttctagcccatcttgtcgatcattaacaagctttgcaccatactctgggctcgttgcttgactttaaacatgatattgttgttctcaccctaccatctattatggaaaaccaacttatttatacaaaaccatatatagtcaatggttatcacaaaaataactagccaatccttctgcgtattcctacacggattgacattagtctcgatcctatcacacacaacatcactattaaaattagtaatagttctcccattcaaagctcccccacactt

SEQ ID NO: 26753 - DNA, 433 bp, Glycine max
  unsure at all n locations
ntctttacagcagtggaggttactatatctgtcatttgaatcggntgccaaccactatcggggccaaggatctgcagaacacaattttgaaacataatttcctaagcaaaatggctccatcgcacaacggaaaatgataaaactagaaggcatagtactaaaagaagtaactgtttttggagctaatgcaagccaacatctggttgtatttcacaaaaagtgcatttttgttcggtaatccattcacgtgtattttctctatttcaattaaaaaaaaattcaaatcacgattacaggtaaaattaacacttccacaaggtcagcctagttatccaacattacagattagtangtaaaagtacttttattcccacataagttcgcttgagttntaaaataacatagcacttttgaaaatgatatattttcatgt

SEQ ID NO: 26754 - DNA, 260 bp, Glycine max
ataaagcgacagagaagcattttatttaaatactacaaagacaaaaaggaggaaaaggaaaatcttgcaccgaaaaaaaaatagaaggaaaaacaaaagcaaatctcccggcgagcgaaatgttatattaagtaatgaagacctatttaagaaaaatgtaagaaataatgcggaaaaaaagatgctgaaggaataaaataaataacggaaatattacgatgattaaaaaatagagcacatatgatgaaatataccaaaaa

SEQ ID NO: 26755 - DNA, 509 bp, Glycine max
  unsure at all n locations
acagaacgccggcatacgganacaacgacggcgaaggagaaaacaggatgaatcaannannnanaagagagannattgagacctgagccctcgaaaancanannactnagaaacggggcaccagnagaaaacaaaaagangcacgcgagttatgaacatctagcatggagcaaacaacggagaaacgccggccggaaaaaccggcacacacaccacgccgaacaaaaggacgagaaacggaaaacaaaacccgaaccttttccccgcccgccccgccctcagaaagtaatagcctgcagacctaccacgccgaacacgacgcaagagagcgacaaaaaaaacgcacagaaagacccaccaacaagccaagcaaccaacacaagaagagagaagaaacgccggagagacaaagaccacaccgccaaacaaaaaacccgaccgcaccacgcgacgagagaaccaacaagacggacaagcaacaaacgagcgcaaaagagcgccagcacacg

SEQ ID NO: 26756 - DNA, 431 bp, Glycine max
  unsure at all n locations
ggaaaatgagcattgaattcgatgcttganaacncgncnngnggaancttagagggacctgcngcaagcaatctttcatttttcattttttaccngcagggggactactcgagaggattattccttatgctaaaatccggaagcttataactaggagtggagtatagagaatanctttatctgccccaccggctcctgaaaanaatgttataataggtattatttggatgtctcgattaattaattaaattgtaagtttatgatagcttacataatgaaagaggctttttgctcatataacatcttgtttaaactgtcttttctaaaagactagtatgtcttagtgtgttgagtccgatagagaattttgattctttaaaagagtgatattattaagttaggacagccttgtataaatgctctaccaactt

SEQ ID NO: 26757 - DNA, 559 bp, Glycine max
  unsure at all n locations
cgccgcgcaacacttcacccnnnaaggaacagangtggatgacaaggaagtaataatcacaaaannanaaagcgacgagtttgatgcgtncgatacactgacacactcnnagaaacncaagcgggcgcaagcgggaagcacaaaaccgagcgccgacagttaatgggttagacccgaccacacaggcccaaagaagaccggccncacaccgaccaaacacgaaaaggaggagctgacccctacgcgggcgcagaacagccggacaggctgcatcgaccatgcgagcccgaaccaagacaccaaaaaggaccactaaccccagccaaacacagaccagatgcacgaacgaccggcacgcaaatcgcacaaccgcacacagaaggacagtaccggacagaagcaaaacaacaccagccccagaggaccacgaaacaaccacattcacctgcccaagcgaacagcccgcaaaaggaggacacccgtcggccggagccaggcccacgacaacacctaccaggcaggacacagacgcaacgacaaccaacaacacgacacacct

SEQ ID NO: 26758 - DNA, 475 bp, Glycine max
  unsure at all n locations
gagaaaatganctctgangcactcgtacaacncanaacttngaaaacggggatcctgnagaaccnacctagaagcacgcaagtttttagggtttcttacanaaaccaagcaccacagaaagtgggaattgataatgtggatatccttatataataacgcatattcttttaataatgtggtggaataaatctttgtcgattgattcctccatctttatcagtaggatattattaagatccattgtgagttcttgaacattggtatattaattccagctacntataaacaatattaaaatgtgagtgatatattctaatatatgcaattatattgaccatatcaaaagagtctcgtaacagtttcaactattgtaccctctatacattatcaaaactataacattctttaatgtatttatagctagtacaatacatttaatcataaactcttatatgtgaaatatatgaagagtttg

SEQ ID NO: 26759 - DNA, 342 bp, Glycine max
  unsure at all n locations
ttcatcgcgcaaatccctcttataagactaggctanctttattatcattatcgcaacaacatatggagtaaacctaaaccccaacaatccatccctgataacaaggatattcattcttgcttctatcaagtattaaggctaaaatacatctcccaatgcttatggcacctaactatacacaccaattgtgatcagaccaatagcatgcacaaattaagcattgaaagaagcattgatcacataaagcacaactaattatacatctaagtaattacaacaaatgttccttataaataccaaacatgggaggttatctagccattacagaaataccctaacaca

SEQ ID NO: 26760 - DNA, 626 bp, Glycine max
  unsure at all n locations
ggctcgacagcacaaaactaacgagcgagcggagagtaatanaantatagnggcccgttgacagtntacacatatctnaanncnnnannnnaaagaaggagctagnaattggaagacattgggaaaacantcngcnannnancanncnannannananacaaagangnngcaannggagggaaaacannngaaaagagaagaagagacaaggtattgcnacgttatgccgacctaannaacncacagaaacagcgacgagggagaggacccggcnatagaccaaanagatacactcgcnaacgaaaaacagaagagagagacagagacagcgaacacgaaccggaggattnangacgccccgccccgccgcgggatgcagaaggatcgcgaaaaacgaggcgcgacaagggggcacacacagcggacggcgaagacaaagaggaaaaacacacgacatacgacacgcacagacgggcgaaccaacacgaccaagaaacggagagggcagcaagaacgaaaacagggcagaacacgagagagaaaacgagacggacaacaaaacacacagcaacacgagaaaacggaacgcaaaccagcgccacaacgcagacaacaaccagagccc

SEQ ID NO: 26761 - DNA, 320 bp, Glycine max
  unsure at all n locations
ttgcaatttactatanatccagagctgagcccacacccatataaaaactaagctcaccttctttgacaaatacatgaaaatacaaaaaaaaaagtccctactacaaaaactttccaaatgccctgaaatacaaggctaaaaccctatactactagaaaggccaacatacaaggtccaaaagatcgaaaaaatctattctaatatttacaaagaagagtggacccaaccttgacccatgggctcataaatctaccctaaggttcatgagaaccctatggccttttgtattagctctagaccaagcatcttggagtcttcta

SEQ ID NO: 26762 - DNA, 349 bp, Glycine max
  unsure at all n locations
taataatctatggcttgaaacaagcctcccttctatgnatctaaagtttcatgatgtcatcacttcatttgactttgaagagaacatcatggatcaatgtatataccaaaaggtcagtgagagtaagatttgctttctgtgttaaacgtggatgacattttgcttgcaactaatgataagggtttgctatatgaggtgaaacaatttctctcgaagaactttgatatgaatgatatgggagaggcatctcatgtaattggcattaagatccatagggcaagatctcgaggcattttgggtttgtctcaagagacttatattaacaaagtttcacagagatttacatgaa

SEQ ID NO: 26763 - DNA, 249 bp, Glycine max
  unsure at all n locations
ggtttgcagtttaatgtttacaacggccgcagcnaatgccttatttacagaatggaattctatcaatatacctccaatctttaatggaaagggtcaccactactggaaaatttgttccacctcctcatcgaggtaatatatataaaatatttgggaagccatataaataacggccctatatacccacaaccccttacagagtttcactatatcggagtttatccagtgaaagcttatccatagtaaaac

SEQ ID NO: 26764 - DNA, 358 bp, Glycine max
  unsure at all n locations
tgagaaatgaacttgagcatgtacatcaaggncanangannnagngccggggatactgtaaggtaactgagcttgcagttgtttttaagagaacccacgagggactagtgcgacgctcaaggtacataattttataatcaaatgtcgcattaaccccatttccgcgcccccttattgataagttatgttagttcccattctcgattttactaccggttccgaataatccaacgttaatttgtatgtaacctcactatttactacttatttagcttgagctcatagtcctaactatgaacctcaattcttgatcttcactatcaagtaaatttttcttatcttttaatcttattatatg

SEQ ID NO: 26765 - DNA, 548 bp, Glycine max
  unsure at all n locations
caccccagacacccgacgacgatggcgtgacagaactanataacatanataacanacaacaaagaggggntgttgattgccttcgaatgccngngacactatagaacactcaagcggcagaanncaannncgagcggaccagaagactacggtactcaaacagacaaccgagcaggacggggacggcgancggatcaccccacagctccacaatncaagngggagcgcacacacagacaacgggactcaaacagacaccagacgataaaagtgacgcgccgcagaatacgccaagagcaccaacaggcaagaaacaccgaannnaagcattacgggacccaaccagacaatcgagcgaaaagtcatggacgggagaactcgacgagagctgcatcattcaacaacgagccggcacggaacgaacgggaccgcaacagacacccggagtaacagtgacagcccggtgaactagccgcgagcgtccaaaaaacacgcagagcgcaccaagagcaaggcggccaaccgacatccgacgaaaacgcacagcc

SEQ ID NO: 26766 - DNA, 134 bp, Glycine max
ctctgtgctacctgagctaaggtctttaagaagcggggaaagcaaaaaccaaagcgaacatccggagaaaaaacagagaacgaacaaaacacacaagaccgcaagaaacacgcaaaaagccaggcaacaagacc

SEQ ID NO: 26767 - DNA, 369 bp, Glycine max
  unsure at all n locations
agtttttctcttcatgtganntacaggattgtgttaaggactgagtcaatcaataagataggtctttgtgtgctgtcacttctgttgaatcatggttttattccaaactcttgagttcctctgtttatctttttaatgtgagaggatatcacgtttatgtaaacaagccttataaattgtaactccttgtccacctgtaacttgttgaattgttaaatttaggattttctgtttttaaaaaaataaaatcttattgtatggtatctatttttattttgcgaattttttacttatgcattctcttgtgtttntttaaaggacggcctatgatgtaagcttatcagacgatagctggccaagtgatgcttt

SEQ ID NO: 26768 - DNA, 423 bp, Glycine max
gtcattgtcccaatacacggttaagcaaaactgtattctgtgataaggctatcttgatctaaagcgcgtaatacttttccttccaaactcaactacttatatatatatatatatatccatcttgtagcaatctcaaatctgaaccaaaccacaaacacttaatttctcatctcatcatttctaattctacctcttttctcttgcactaacaatccaagatgaataccaacaacgacaccgaaaaaaaccaatcatttccagaagcacaaggagcatcatcatcatcatcttctccacccaatgttgggactgagaattgtggaactcacataatgggcacccctgctgttccaagcagccacccatataacaaaaaagcagctttacaaagtggacaacctctaccagttcagtactaccatg

SEQ ID NO: 26769 - DNA, 351 bp, Glycine max
ttttagctttctactatttcttaaacctcaaggatcggtcatcttttttggacgacgtctaatgttatatttttcgatcaatatcggcgaataatatttttctgccgtggtgatgctcatgtcttcctggatgaataaatgggaacatgccagttttggtcgaaacaaaacttcggatgagctctcacgaaaaaacctaaccggcctaaatagtaattatatatgctacaccaaaacaagaaaacttctcactcgcgtaaaaaataccatcataggccatcgagcgtttttaacataaaaattgttaggtgcttttcatgaccgatgtcgactattgagttttttattcaa

SEQ ID NO: 26770 - DNA, 394 bp, Glycine max
actacttatgtggcagggcgggctatcttcttttttttgtctccaacgcgagctctgaccactgttcttccttcctgcggtgcttcttttcatgtccgtatgagtgggcttataacctaaaccatatttgccacgatttccttgggttcttatcaggctacttatgccgccattgactttgcctaaacccatcccgggttcataaccgatccccatcataacttgtgacatcattaccgccgcatcagacagactaggttgcctcaaaacggagtccactgatgaaacgctgaccaccttcatagactggatagcggttactaacgattcttctgcagctttcaccttaggcatggacgatgggcactataccaagatatcttcctcgcctgat

SEQ ID NO: 26771 - DNA, 385 bp, Glycine max
  unsure at all n locations
agtcttaattattntagtttttataattagngattccatgaataaagatacaacaattgattttaagaaaagggtaaaaaaaaacttttaaaggtgagtacaattgattttaagataaaacacaaaattttggaaaacaattatatttacttttcaaaaatgattctaatgtatcatctaaataaaatcatttattctacatttatttttttaaaaatatcctcaaaatataaatcgaaatttttagcattaatgctttcaagatcaatcctaccaaaagctaaagcaaacaaaccaatatgattcactttgctaatgagcacaactgcacanatatgaaaagactgaaccgaagatngaacganactggacacataaaatttgt

SEQ ID NO: 26772 - DNA, 425 bp, Glycine max
  unsure at all n locations
tgtgttatcttcattgtaaaaaanaaattattcttggttgttaaagctatgatgatatgagtggtaaaataactagtcatgtgaaaactgtagacagtagtctttcattttctgtaaccctctaaaacgactgcccgtttaattattttcttcaggaatcaaaaggtgagattccatgtaagctcttctctttattctttattggctagccaggtaagattaatatgttctacaactcatgtgggttcctttttatcatttgcaacccttacttcttcaagcaactatgttttatttgcaacctttttttatcatttgcattgctattgagcttgtgtattaactaatatgaactatgaagttatgttagcttaatcattagttttaactcaagtttgaatttgaaatatgcactngttaaatat

SEQ ID NO: 26773 - DNA, 372 bp, Glycine max
  unsure at all n locations
agttttgaattaattcagaacgaccttngcctgtttccaagcccatatgtgtccccaattcccatattgctgggcctcttccagcaaatgattgttgcaaacaattttacttttcattttccttctgcttctaattgattgtgggttttactttgattctgaataacatgtgatggccatatctttgactccttctagcccttgagtttcttctgccacgggttcaagctggggggctttgtagtgagacactctctgtcttctgtagactttggagtatttttcacgctttccattacgggattgcgctacataagtgtagccatccttattactctcttcattttccatagtaggcccgagctatcactt

SEQ ID NO: 26774 - DNA, 409 bp, Glycine max
tatatagaagtaagtcaatactttaatattttagatttattttggaaggttatcctgcccatagatagtaaggatcgagtcttgcgcaaatggtccccaaattgggaaggaccgtttaaaataattcagatctattcgaatggtgcttatgagttagaggagctaacccctcagaaacgtactttgagcataaatggtaagtatttgaaaaaatataaaccaacactgctcgaagttaaaataagcatagaataagagaaatacgggaaacatataaatggcgataacagtaaattgccacgaaagggcatgtgtcaatattacatcgaatagtagaatcgaaatacagaatttcaaataaagaaattataagttctactaatgcatgaccaaagtctcatatatgttc

SEQ ID NO: 26775 - DNA, 376 bp, Glycine max
  unsure at all n locations
agcttgaatctttgtctatgtctagaagtagttgcttcattctccatctggtttattgccctcttcatgattctcttatccctagaattgttgtanggattaaagcgcatgtccctatgatcttgatgaaatcagttggcctcatcgttaagttaccttgacatgcaacatcaaggcttgtcctgttgtgagaagacaattcaccataaaatatatgcattatgctntgttgattgaacccatgatgtgcgcaactcctgatcaactcctagaatcttttgtggaagcaatgacttccaagattattttgatgatgccaaagaatcaagagttaagcaagtttcaaagaatcaagagtcaaaaagcttcaagaatc

SEQ ID NO: 26776 - DNA, 402 bp, Glycine max
ttcacacttccatgtcgaataggcaataaaccttcgcttgatattgatcctcctaatgagactatgcagctccttcttgttttgaggtggcctcacttccaacattgctttagctttatttttatctgtcttgattcttctttgatggaaaaggaaacccaaaaagtttccagttgatactccaaaagcacatttctcaagattcatttctaagtttatgaaacctcatccttaaaagagaatcttccaaatcaccaagtgtttttcaaaattggatgacttaacaaccacatcatcaatgtaaacctccatcaatttgctaatcaattcatggaaaataacattcctagcccattgataggtagctcctaaattcttcaaaccgaatgacattaccaatca

SEQ ID NO: 26777 - DNA, 379 bp, Glycine max
  unsure at all n locations
agtttttgagttattcaaatggtcataacttttcactcggaggtccgattcaggcgcataatatatcgagacgctcgaaattgaacaatggaagctcttgagcaattcaaatggtttaactttttactcagatgtcctattcaggcaaataatatatcgagacgctcaaaattgaacaacagaagctctcgagaaattcaaatggtcataacttttaactcggaggtctgattgaggcgcattatatatcaagacgctcgaaattgaacaatggaagctcttgagcaattcaaatggtcataacttttcactcggaggtcctattaaggcgcataatatatcgagacgctcganattgagcaatggaagctcttgagca

SEQ ID NO: 26778 - DNA, 410 bp, Glycine max
tccattgttcaatttcgagggtctcgatatattatgtgttttaatgagacctccgagtgaaaagttatgaccatttgaattgctcaagagcttccattgttcaatttcgagcgtctcgatatattatgcgcctcaatcggacctccgagtcaaaagttatgaccatttgaatttctcgagagcttccgttattcaatttcgagcgtctcgatatattatgcgcctgaatcggacctccgagataaaagttatgaccatttgaattgctcaagagcttccattgctcaatatcgagcatctcgatatattatgcgcctgaatcggacctccgagtgaaaagttatgactatttgaattgcttaagagcttccattgttcaatttcgagcgtctcgatatattatgcgtttg

SEQ ID NO: 26779 - DNA, 403 bp, Glycine max
  unsure at all n locations
agtcttatcattttctctacttgaagcagnncgaactaaaacttttgtcactttccactcanntatctggccttcacanttaaccagaacttaacaccgccgacnaacaacgtcaagggaaatcttgcacctcagatacaaaggtttctttgaattagtttgcaatgtatcatacataggggcatgtgcttgctgaaaagactcttgtccaaggtcacgaatcatatcctccaagagatctcccatttctacattaaacggttcagattgggacccactctgcatgtctgtcaattcactatgtcatatccacgtcgtataattcttcttaatttcatcacacaacatagctctatcaaaatgctcattctcaactagagcaagtgttnttgtttattttctc

SEQ ID NO: 26780 - DNA, 437 bp, Glycine max
  unsure at all n locations
tccataggtggatctagagtcctaaggatttgttggtctcttaattgcctttatctttagactaagatccaacctatgaattagccacaagtagggaaatgccctctcaacataactaacccatagtacaagtaacaatctgaacggtaactcaacaacagtcaagtgagcatggagcccctcaataatagtcatcaagatgccttttagccctatgcttgcataggctcgggtatagagcccaaaagtgtgcgaggtaaaagtgacaatggagtgtgtgtggggaacatacaaacctcataatcctaaaactacccgaatntgtaaaaggaaaaaacaaaacaaaatatacaaaatgccttttatcctagagtgacatataatgtttataaaataaaaatataaccaagatatataaataaaagaactcatacaac

SEQ ID NO: 26781 - DNA, 363 bp, Glycine max
agcttcttagtctcacctgatgaattcgtgactacttcatgcactcttctaatgacaatatcatcacttctggaactaaattgctgggagtttgaagccatcttctccccaaatttctggctccagcaggggtcatgtctccaagggctccaccactggcagcatctatcatacttctctccatgttgttgagtccttcataaaaatattggagaagaagctgctctgaaatctggtggtgatggcaattggcacataatattttaaatctctcccagtattcatatacgctctctccaccgagttgtctaatacctgaaatattctatctgattgtcgcggtcctgaagcagggaaattttt

SEQ ID NO: 26782 - DNA, 431 bp, Glycine max
gtgaagagaaagaatttgaatgatgagaggcttcatatcatgaatgatgcctataaataagagaatacatgatgcctataaataagagaaaacatgatgtaatcaggctccacaactagaatcaatacaaatttaccttcatccaatttttccattatgtttacttgattttattgctttcatttactttcctacactttatattactcatttatttatttttcctttaccacactgtacataggaatatcatgcaaaaatagaaaccttaatatcacacctactggaaaatctgttggagtaaactagagactcaatcaagaaataaaatattgttcttgaatcgcatacgtggaaaataaatggtgttaaccgatatctcaacaccaacaatgttaaagaatagacttatgtgactaattacaagtcat

SEQ ID NO: 26783 - DNA, 376 bp, Glycine max
agttttatgttgatgaatcaagttgattcaagtagttttgatgatgacaaagatgatgacaaaaagcccaagagaatgatttcaagattgagtcaactagtttcaagatcaagagaagtttgatttcaagattcaagagaagatgaattcaagattcaagagaagaaatcaagaagacttcactagggaagtattgaaaagatttttcaaaaaacaaacatagcacagttttgtttttcaaaagagtttttctcaaaattttctaagttaccagagtttttactctttggtaatcgattactagtttcctgtaattgattaccaatggcaaagtttgatttcaaaagttttcaactgaatttgtaacgtttcaatt

SEQ ID NO: 26784 - DNA, 439 bp, Glycine max
  unsure at all n locations
tcaacatcagaccacttccagggtgctggaactacttcacatggacttgatggggcctatgcaagttgaaagccttggaggaaagaggtatgcctatgttgttgtggatgatttctccagatttacctgngtcaactttatcagagagaaatcagacacctttgaagtattcaaagagttgagtctaagacttcaaagagaaaaagactgtgtcatcaagagaattaggagtgaccatggcagagagtttgaaaacggcaagtttactgaattctgcacatctgaaggcatcactcatgagttctctgcagccatcacaccacaacanaatggcatagttgaaaggaaaaacaggactttgcaagaagctgccagggtcatgcttcatgccnaagaacttccctataatctctgggctgaagccatgaacacagcatgc

SEQ ID NO: 26785 - DNA, 362 bp, Glycine max
  unsure at all n locations
agcttgcttctacaagctccatctttgtgatgatgacaaccctgaaatcaggacacgcatacacattctcttatctagtcgaacactgacttaattctccatattctccccttaggaggtgagtgaaacctaggctcgaaatacatggattgaatgatatgagttcttgatttaattcctatgttctctccccctttggcatcaacagaaagccaaagttcgaatgtgatatataaaccatacatcaatgactaatcgtgctagagaatagcactctattaaacaagatctcatagtgtcataccctagattcgtccggcgatgattactngatgacatgcaataaaagaagtcccgagacg

SEQ ID NO: 26786 - DNA, 357 bp, Glycine max
tgctggtgtggctattgtggagggtgcatcgttagtttcttaatgaggtcctttaatggggattttccaccatggagatgcagcggcttacaaaggaaaaaaggtgagaggaggcgccattcagtatggaataagccatggtagaaggagcttcaccgccatgatgagccttggataagatgcttggagaggatgcttcactggaggacaataaagagggagagaaagagagatgggggagcacagatttgttagaagaaacagagagagatgttgaactttgagttgtgtctcacaagactctcattcatcatagtttctacaagtgttacgcatgcttctatctatagactatgt

SEQ ID NO: 26787 - DNA, 384 bp, Glycine max
  unsure at all n locations
ggtttgcaagcnatcttttacctcaggacctctgagttttctgagcatatctagaagcatgccagtgagaggagtggccaaagaatttttctttttggtcatatccttatgggctgcccttataaactcaagtgggtttgcatatttggagtcactaagctctggaattgaaacatgcaaaaaggcatattgattcccccatgcagaacgactattggtcttctcaatcatctccttaacagacttgtaaccttcaatgtttcttgtgttcagcaacaccaatgctgtggattgtgtttggcttgatttcagattaatttcttgcatgtatagccgaatgccaaaaaaaattactccagcaagcacatcatttatgctcttgta

SEQ ID NO: 26788 - DNA, 432 bp, Glycine max
tactcagcttcgccatgtagagattggacattctctatttcatattgatggagattggctccatatatgggaaaccgcaagagtcgaatgggaagaactcttgttgtctatcatggcggtgagaagaataagaaataagagagatgaaggggaattgcgattcatcttgccaaatgaagaaggaggatcgttattgccctagaaacctaataccataaaagaatactttcccctacggatttcattcactgacttggaatatatgcaatgtaccaggtgtaatcttatgaaactaggacactaataatattggaaactcggaaactaatattataacgcatatattccggatactaattatatgcttaacaaactatatatatgcttacctaatatacaataacaaactatattcacatatatcttatcaca

SEQ ID NO: 26789 - DNA, 386 bp, Glycine max
  unsure at all n locations
agtttgctttgtgaaaatctctatcttgcaaaaaagcttcaagttttatttaacacactattaaatcctctttctagtgtgttacatgtatcttaggggtaaaacagtataaaatcttcttgcattatcttctttcctctcgtctttactatgcactggttttgattgctaagtcatataattgttttcaaacttattaagcttgaacactcttttaaaaatgaaataacaactgagcctttttaattaaacctggaaactgaacaatctttttgaaacaaagctctaagttgataagaacctatttttagaaattgtttgaattttcattgagcttataaccattcttcattctgaactaattntataattagaagttgttttca

SEQ ID NO: 26790 - DNA, 435 bp, Glycine max
tcatcatgagaagatcttgaacttccattctcttatcttatttacaatatttttacatacattttttttctattcctctttttgtttgttacatttttttctccattcctctttttgtttcttacatttttgatagaaaacatcagtaggaatagagtttcatatgtatattacattgacaaaagactaagaaacttagtcattgtatctaagattctattaattattatttttcctcaaaattattgtaaaattaacactattttcatcatctttaatttatttatttatcccacaatttgttttcaaagattgacacatactgttgttcccatttttgaatcttgacagatattcttttcgacataaaatcgaatatttggtgcttgattgtatctagtttgaaacgggcttgccggcctctaacccctctaa

SEQ ID NO: 26791 - DNA, 353 bp, Glycine max
  unsure at all n locations
agcttataagttagttaattatgaaatgtcaaatgatgtaaaaagacatttaaatatttataatatttaaattttatttataattacttgtcatcttaaaaacacgataataattttatagttgtgtattataaaaaaatgataaaattaaatttttttaactttaaaaaatgatataataatgacaattgataagttaaatatcgtgtgtatcatggttgttaaactctcgatttaaatcgtaaaatcttacgattntacgattctactaagggttgacgagttaaatcggaagtagaatcgaaaccggagtagactcttncgattntacgtagactcggacgagtttgggt

SEQ ID NO: 26792 - DNA, 435 bp, Glycine max
  unsure at all n locations
tcacacatgcttatcaaaataagcttatgcattgactcatcctatgtcatgtatgaaattcaacttttttttaagagtggcaatgatcaaactcttaaatatttagtcatacaaattctgataccatgtcaaagacgaatacccaaatacttaatatgacatgggtacagcaatacaatacaacacagatgcaagaatacaagaatttcctaaaaatccaagatatgatacagcctactagatacattaacatgaactaaaacaaaatttcacataaatgcataatatttaatcatttatcattaatacataattatatcaggggatgattatcataatttatttaaaaaatacttctgatcataacaaaaaccataattacatnattttccgttgctcgtgtcaaaatatattctgtccctatgaacataccac

SEQ ID NO: 26793 - DNA, 546 bp, Glycine max
  unsure at all n locations
agcacacgaccgcggaacgacaaaacaatcggccagccgacgcaccgcgagacgatgngggaaaaatnaaatanaacaaagagnnaaaatgaaaccttggaaaatcgcagacatngncaaaccananggannaaaagagancggnacgcggggaaacnanagagacgacctgaacgcatgaaagttataagggacaagagagggcggaaagagcgaagaacacacaccagngaccaaccaagagaacgaaaaacgacgaagaaaagggagagacaccaaaggcccacccccgcaacaaacaaacnaaaagaaaacacaggagaccaagaaagcacggaaacacgaaaaagcgaaacccgaaccgcaccgaggagcagaacaacgagcacgccacggcgaagaagaaacacacaacaaaccgaacgaagacaagacacaacgcgaaacagaaaagaccccaaaacagagacaacgaagacaaaccgggaaaagacgagacaacccaaaaagcaacagagagaagggcaccaaaacaaccaagcaacg

SEQ ID NO: 26794 - DNA, 425 bp, Glycine max
  unsure at all n locations
gtgngatcatttcaaatatcgtaatcttcttatccttcaaccttggatgcttttaagggattttgatgagatcatttatcctactgagcaatgtgggggcttctttcctaatgctagagctaatgtctttggtagcatgattgatgtgtgtttcttgtttgatgtttactccatcagtagttttttcacttggtaaaaaaggtgtagaaataatgttatcatctcccgtatgttggataaatgcttgactagtgatacttggaagaatatgtttcctaatgcttatgtggaggttctttgcaggatgcattcaaatcataatcctctattcttgagatgtgatcgtcaagagaatagaggtgtcaaaccttttatattcgaagcaacgtgaaccactcacccacaatacaagattgtggttgcta

SEQ ID NO: 26795 - DNA, 381 bp, Glycine max
  unsure at all n locations
agcttcttaagttgaatattcaatgtagctagcttctagactctacaataaaggaacaaaaacatacatcattgaatcaggagaaagaaaatgcagtggtgtcgttgtcatagaacgaaaagcataggaaaaatgcgttaattgttttaacaacaagcttgttgatcttgttgagatgagttctgattctcatcaacttttgtaacactgcagaaaaaattaatcatcaaagaagatagaataaaaggtaatataaaatagaaaacacaaagttgaaattgataaatatttcaagtatgttagaacttagaattgaagctagttggtttataagttataactatatcaactgaattatntttttctaactgttactttctt

SEQ ID NO: 26796 - DNA, 444 bp, Glycine max
  unsure at all n locations
ntcaatgctcttaagcaaaagttaaccaatgcccccatacttgctttgccaaatttttcaaaatcttttgaaattgaatgtgatgcttcaaatgttgggattggggctgtattgttacaagaaggtcatctaattgcttattttagtcaaaaattaagtggtcctacccttaactattctacttatgataaggagttgtatgccttagtgagagcgttgaaaacatgacaacgctatctttatcctaaggagtttgtgatccatagtgaccatgagtccctaaaatacttaaaaggacaagctaagctaaacaaaaggcatgccaaatgggtgaaatttcttgagcaatttccttatgttattaaacataaaaagggaaaaggaaatattgttgcggatgccttgtcaaggagacactttntgctntctatgcttgaaacaaaa

SEQ ID NO: 26797 - DNA, 365 bp, Glycine max
agttttgagctttaatcctgactcaccataaaccttgacccagggtgagaatgtcaatccttaccctcggaagcgaaaagaatagaagggaaatttccaatcgaagaaaaggaacacggaagatttccaatcaaagagaaagcaaaaaaagaaaagaaggaaaattcccaatcaaagagtgggagaaagcaaaaagaaaagatagaaaattcccaatcaaagaatgggagaaagtaaaaaaggaagaagaagaaggatagaaagctcctgatcagggatcgaaagaaaacagaagatatgtgcagaaaggtctttggaccggacaatatctgaataatacagaattgtcaccacatgaacaaaaa

SEQ ID NO: 26798 - DNA, 423 bp, Glycine max
  unsure at all n locations
tactaaggcacctgttctagctcttcctgactnttcttaattnttgagctanaatgtgatgcctctggagtgggagttggagctgtattgttacaaggtgggcaccctattgcttattttagtgaaaaacttcatagtgccaccctcaattatcccacctatgataaagagctttatcccataataagagccctccaaacttgggaacattaccttgtttccaaggaatctgtcattcatagtgatcatcaatcactaaagtacattagagggcaaagcaagttaaacaagaggcatgcaaaatgggtagagagccatgagggtgggctcatgggccactntgggatagacaagacccttgttttactcanagaaaaagtttattggccccatatgaagaaagatgtccataagcattgcact

SEQ ID NO: 26799 - DNA, 384 bp, Glycine max
agtttgactagttggttttatttggggtgatttttgggtctggattttaagaaaggtttatgttatgttttatttttatttaattgattgtggagatcttaaatcttgggataagaaggcttatgttgtgttttgttttgttttaatcgattgtggagatcttgaatatggagaaaagatggatttatgttgtgtttttattttgttttaattgaatgtggagatcttgaatatggagaacttgaatttgagatatcattcatgtttctatctttttaacttcaattaattttgacatgttttaaactgccaaaaaattgtaatttgattttctgaatgaatactagagggtttaaaaactactgaaattgtaatttccgaatg

SEQ ID NO: 26800 - DNA, 439 bp, Glycine max
  unsure at all n locations
tgtgcctatccatttcctggtcccaaaaataccatcttttgtatggtaccatgtacctcacacaacatttgaagaagtttcgtgctcatttgataatgaatggtggtaatgatgctctctaatgtatgttttctgtaggaaccttatcaggtgttgcattggattggtttagtggtttggttgatggacccattgctcgttttgatgagattttgagtttgttcactgtcagtttgtagctaacaaagagaaaccaccaacaataaccaatctatttgacatccatcaacaggtaaccaagtcactaaagaacttcttagctcattttaactcaattgcagtacagattttagacccagatgagagaatggttgtggcatctntctacaagggtttacatgtangaccgtttgatgagtctttggttagacaaaagtca

SEQ ID NO: 26801 - DNA, 393 bp, Glycine max
  unsure at all n locations
agtctttangatttaaccattaaaactaaggtagttcctaaacaaaaatcaattgaggaagcttcgccaagtatccccattgaaaaacctttattcaaacctttcaaagttagtgaaacgctaaacaaaaaattagggaacttagaaaaactaaatccttaattgaaggcgtaggtgacaatcatagtgaattactaaacaagattggtagtttacttaaggtcattccagatactccccaagcctcagaaaatacatccaaaatggtaacaagaagtacctccaaattaattaatgttattaatgaagatagtgaccaaaactcagataacacaactgagatagaatcagtgtcagagaaaaatataaatccaattaattccaaacactgga

SEQ ID NO: 26802 - DNA, 436 bp, Glycine max
  unsure at all n locations
tctgtantttttttagcttatatgagaagggattattaattctttnttatttatataaaatttaggaattgaattacaccatacgaaagttcgcaagctgcaaataaaatttaatgaaaattaatataaagattaaaaacatattttaccaacctcgattattagttattctataattttgctgtatgaatataatattgatgaaaaacgttaaatactacattgttttgatgcaagttgctatacttctatgtaggagatgtttttaaatatgaaacgaaccaatctaatcttactttatgattagttcatatcacatttttttaatcactttttaacacacaatatgccaatagagtgatgattatttgtgatgatcagggttaattattaattaccttgacgtatatatcaatgcatatgtctaggcaatcat

SEQ ID NO: 26803 - DNA, 371 bp, Glycine max
agcttccaagatgcactgtaccttaacaagctccaagttaaaggcgaggtttatgatccttctgtgaagggcccactggtcaccctcgaggcccacaaagccctgtccaaagagcaactcgactgacgggtgaacggaactttcacatactccccgcgcgtgttcatgagcacctccttaatcatgtccggttcggttaccgccaaccgcggcgtcgaaccgaaccagtacaagaaagttttcccatacgcgcgagaccaccggacgtagaatggagccacgcgtcccatgatgtcgtggtggaacggaggaggggatgcacttgcctctgacttggcttctgcgtagagccgtcggatctctgatgtatt

SEQ ID NO: 26804 - DNA, 406 bp, Glycine max
cagtagatgaagatgaatccgtggccttctttggactcctctaaggacaatagcatcatttcttgcactgaattgttgggagttggaagtcatcttctcaatcaaattccaccactggcagtatcaatcatactcctctccatgttgctaagtccctcatagaaatattgaagaaggagttgctcagaaatctggtggtgaggatagcttgcacacaatttcttgaatctttcccagtactcatacaagctctctccactaagttgcctgatgcctgaaatgtcttttctgatggcagtggtcctagatgcagggaagaatttctccaagaacaccctcttaaggtcatcccagctgataatggacctgcgagcaaggtagtagagcccaatttttgccactccct

SEQ ID NO: 26805 - DNA, 371 bp, Glycine max
  unsure at all n locations
agtttgtgtatagcataattttaagcttcaattaaaggtttttgctaaaggaaatatacctttaacatcaaagaatgcctgttgtttatgcttgtgcctcctccataaccaagtccaacaccaagaactatcaagctgaggcatcccaaacttaaaccaaaggctatggccattttgtgagccttttttctgcctgatggcaaagcatctagggaagcaaagagattttctatcaacaatacaatcattatgcagaatgtatcanaatgcaacataaggaaagtgatgtaaggaaaaatcattcaatttcaaaaattcatgagcaattctaaaagggtcttaccctcaatatcgttcaagttcattgacat

SEQ ID NO: 26806 - DNA, 433 bp, Glycine max
  unsure at all n locations
ttcaaaattgatagtggcctgtcacttgatatttttatatgcgaatgggacatccttctttgaagattactaaattggtttcaaataatagtagtaggaataatgactatggaaataaggcatgtgatgtttgccaaagggctaagcaaactcgagatagctttcctttaagcaataataatgcagcagatgtgtttgagttagttcattgtgacatgtaggggccttataaaactccatcttcatgtggtgcttattattttttaactatagtggatgattattctcgagcaatttggattttcttgttgttagataaaagggaagcacctcgtgctttgntgaatttaattgcattagtagacaaacaatatgaaaaggagggtaatatgattcgaagtgataatggaaccgaattacatgtttgcgaact

SEQ ID NO: 26807 - DNA, 349 bp, Glycine max
agctttctaatgttttctggtttccaaaccttgaaaacaaaagtgtgctatatcttttcattctcttctccctttgccaaaaagaattcgccaaggactaatcgcctacttctttttgtgtctatcttctcccttctccaaaagaacaaaggactaaccgcctgagatatcttttgtttccccttcacaaagtttcaatggactaaccgcctgagaactttgtcttaacacattggagggtacatcctttgtggtacaagttgagggtacatctacttgggttgttatgactgagaacaaaagagggtacatctcttgtggatcaattcaagtgaagggtacatccact

SEQ ID NO: 26808 - DNA, 438 bp, Glycine max
  unsure at all n locations
tcagacaactntntgtaattgattacaatgactttgtattttattacaacagagagcttttgcctctaaagaaaattttctaacttagaaaattttcttcacactaaccatgatgatacatgatgcaaaacagatatcaaatgtactaagatgcaacaattaagttaacaaccactataaatgccactcaaaggagttgggcatgtaaaagtcaaaacttctaaaacttcaagctttagccttaggttgttccatgttgcttatgttgttcccgttatctctaatagtattttattattatgattattgaatgatacaatntgcgaagtgtgaactccaacaattatatctatgacatgtgaatnntatttctatatgtgtgtgtgtgtgtatgcatattggcattnnttatctgcacgcattgtggtttgggtctgg

SEQ ID NO: 26809 - DNA, 278 bp, Glycine max
  unsure at all n locations
agctatgccatgaaangaatgatgagcgctaggaaagaggctggcatagtcctgtcatataacacaaccatatactataatttgcttaagtgatcaggggctaattaaactcgaccatgtacaaaaccaataaagataataagaatagagtatgactgctaaccaagcgacaagcctttgaggtaggcatgctcgatattgattgtccacataaaatataacaattaactcccacgcagctatcaaagatgtaggatctttacctctctatattatgt

SEQ ID NO: 26810 - DNA, 475 bp, Glycine max
  unsure at all n locations
agaaggattgatgcctcatagacggcaggaactaagaaactcagctggacttctaactttccgaaagacgacagtttttttctgacagggacctaaaccngagggagcgaatggtatcccttgcctactgaacctaatccacttgtgataggcggagaagaccgcaagatcttacaccaagctcctgagcgtccctgtacactgtatagcatgctatagggagtcactgaagtatcgaaaaacaggcttcattgcaacgatgctgcgaggacaggcgctatgattccatgaatgagacgcctatcgtagggtagccgacctgtcatatggtcatctatgagaggataataaaaacaacctcatagtcctatcaaggggaagagctggaatcctgcagacgagcacaacggtcgagcacctgctattatcattagcggaccaggcactggacgctcttccgaacgctgcaagagcg

SEQ ID NO: 26811 - DNA, 381 bp, Glycine max
agtttgccgccacggagttttccgactatgctcttgtgtggtggaacaagctacaaaaggagagagcaagaaatgaagagccaatggttgatacatggacggagataaaaagatcatgaggaagcggtatgtgccggctagttactcaagggacttgaaattcaagctccaaaaactaacccaaggcaacaagggggttgaggagtatttcaaggaaatggatgtgctcatgattcaagcaaatattgaagaagatgaggaggtaactatggctcgatttcttaatggtttgactaatgatatccgtgatattgttgagctgcaggagtttgttgaaatggattatttgcttcacaaagcaatccaagtggagcaacaatt

SEQ ID NO: 26812 - DNA, 434 bp, Glycine max
  unsure at all n locations
tggaggtttgtacatgaccaaatctttagttatatcatctttacctaaggtagtctttgtattcgtttaaaatgcgtaaagatagatcagtaggagaacaattggacttgtttaataaattgattctagatcttgaaaatatcgatgtcaccattgatgatgaggatcaagctttgctattgttgtgctctttgcctaagagttactctcatttcaaagagactttactgtttggaagagactctgtttctcttgatgaagtgcaggctgctctgaatttaaaggaattgaatgaaagaaaggaaaagaagtcctctacaagtggtgaagggctgacagcaagaggcaagaccttcanaaaagatagtaaatttgataagaagaagcatacgccagaaaaccagaagaatggtgaagtaaatgtcttcaaaatt

SEQ ID NO: 26813 - DNA, 328 bp, Glycine max
agtttgtccccaactcgaaacccttatgtgagaaactctcatccgaaacaaatctattgtacaggccttcttcggaagttcagaatggtgaacaattcaattccactggccattacaatcaagtgattatgatatgaaggcaatgtataaggatctagttcattcacggcctgtggatggggatgatcaggagaaacaagaatctgttatgtcagatatatcagcagcgtgtgggattacaattgcctcagattctaaagttgtagagcccgatattgttatttttgatgagttctgggaggggttcttcaattccacttcagatatc

SEQ ID NO: 26814 - DNA, 389 bp, Glycine max
  unsure at all n locations
tcgtgtgaatgtccacgctctntcccttaatacttgtattactacgctcccatatttctctgtatacatatattctcaatttaatgtatgtgtcatgtgtgtatacacgctatgctctagctatctagtcaaatgtaattgtatccatgaccatatatacacattaaaaagaagataaaacatatttttttctcgtatattttcgttcaaacttaatgttaatttttgtattaaataggtgaaatgtaagagactaaatacacttgattgttttaataaagtatagagattaattagaagtacaaggattaaaaatataatttatctttatgacaaacaactgaaaatcaatatgagatttaaattaattaattatatattatttcatg

SEQ ID NO: 26815 - DNA, 371 bp, Glycine max
  unsure at all n locations
agtttgaggatagagattttccaagctatttatcttctctctcaaagaggcttactcatgcttgaggatagagacttcccaagctatttatcttctctcttagcaggcttactcaagcttgaggatagaaacttctcaagctatttatcttctctctcagagaggctctctaactttctagctttctcactccaaggagtggattcactcttgtctcttggattgactcactctatggtggttcactcaagcttgaggataaagacttcctaagctatttatcttctctctcagagaagcttactcaagcttaaggatagagacttaccaacctatntatcttctctctcanagaggctctctcatgcttg

SEQ ID NO: 26816 - DNA, 425 bp, Glycine max
actcagcttatagtgatccctttcagaagaaatgttctttattgatcactcctactgatcaagtcattttcaagaaactttgcattccttgattccacaatcctagtgttgtgggatggacaatagaacctataccctttagacctttcagcatatccaatgaaatacccagtaatattcttagggtctagtttcttctcttgtggattataaattcttacttcagacagacatccccaaatgcgtatatgtcgcaaacttggtttccaacccttgaatagctcaaaaggtgtctttgagacaatcttggttggaactcggtttaatatatacgcaaccgtcttaagagcatcaatccaaaaaaattgaggaagctttacattactccttatgcttctcaccatgtctaataagggtcgatttct

SEQ ID NO: 26817 - DNA, 374 bp, Glycine max
  unsure at all n locations
agctttgagctcaaatctctgactcaccataaaccttgacccaaggtgagaatgtcaatccttaccctcggaagcaaaaaaaagaaagaaaggaaatttccaatcaaaggaagaacgagaggagaggaaatttccaatcaaagagaaagaaaagaagaggaaaggaaattcccaatcaaagagtgggagaaagagaaaaaagagaaagaaaagtcccaaccaaagaatgggagaaaaagaaaaaagaatagaaagaaaagtcccaaccaaagaatgggagatagtaaaaaggaatgaaagaaagtcctgatcaaagaacagaagnatgtgcangaaggtctttgaccagacatatctgaacatacagattgtca

SEQ ID NO: 26818 - DNA, 441 bp, Glycine max
  unsure at all n locations
tctagccaaatggacttaccttgaattaattcctttgtttttccttttgagccttgtttccctttccttgttntgaagctcactacaagccttaagtgaaaaaccatgatatcaccgtatccttaaggaattttggagctttggaattgttttgggaataagtgtgggggggttttgtttcattggataacatgttttgttggctatgcttcatgatgtattttgggccacacttgatgtacattgtatattggttaatgttggacatgttgaatgagatgttgtttctcaaaggctacagagcaaaaaaaaaatcaaaaaacaaaaagatnagcaataaagttgagtgaataagatcttaaatggcaaaagaatgatgagactcttggntctactctntatgtttaaattntatctttagttctttttaattttttattt

SEQ ID NO: 26819 - DNA, 384 bp, Glycine max
agcttggtgattatgccaatccagaaaaaaaaaaaaaaaggcttggtgatgagccaattaaactatgcacattgcattcattaactaagggttttttttgttctttttttaaagcaactactcttgtatcagtgagctttttttcaaattacacataacattacttttttttctctcaaattacaaacatcttatatatttgaaaacattacacaaacacagtcagacccctaatatgttttactaacactccctataaaggaagtgtctataatgattaaaaaaaaaaacaaaggatgtttgtgtaattataccaaacttcaggaggaatgataagtgtatttactttcttttttaataatttttgctacgggtgaataatga

SEQ ID NO: 26820 - DNA, 294 bp, Glycine max
  unsure at all n locations
cattatcttcatcatgaatgaaagcaatgcatcattcattgtgatttaaagtcatgcaatgtccttcttgatgatgacatgactgctcatgtgagcaattttggcatagcaagacttatctcaatcatcaatgcctaccacttctaagcaaacaattacaattggaataaaggggactgttggctatgctcctccgggtatgttctaaaatctaaactggtgaatgaatcagnntttctttgaatcccctatttttttataaacactttatatttactaaatacaaagtattga

SEQ ID NO: 26821 - DNA, 377 bp, Glycine max
agtctttacagttttatattagtaatgacccactaacctagaattaaaataacttaatgccattaacctaaggaattaaaataacttaatggctgtgtgtaactgaaattgtggcaaccaaagtcaccctcaacagccaacaagtcagccaccatttggtctcccaaaatgctgatgcctacgttgtcaattgggcccttattacaacttgaactaaacctaactaaagcccttttagttgattaacccaaaacatatttttggtcagccaactttacaaggattgggccattatttaaacaaactaaacactctaaaaatgaaacatagtggtgtcatttagtcctcctccatttgggccatgatacaactcacaa

SEQ ID NO: 26822 - DNA, 441 bp, Glycine max
  unsure at all n locations
gtcgtgatattgaaatggtcataacccttcacacgtatgtttgatttatgcgcattatatatagagacgctcgaaattgatcaccggaagctctcgacaaattgactgggacataacttatcacaccgaggtccgatacatgaacatcccatatcgatacgctcgatattgaacaaccgaagctgtcgtgaaccggaaatggtcataacccttcacacggatgtacgattcatgcgcatcagatatggagatgcctgatactgaacaacggaggctctcgagacactaacattgtcataactttccactcggatgtgctattctagcacattacatatggagacgctcgaaattgaagcacggaagcgtatcgagaaattgaaatggtcataacttttcactcggatgtccgattcangcacatcatatattgagatgccc

SEQ ID NO: 26823 - DNA, 386 bp, Glycine max
  unsure at all n locations
agtttgcacttcttcactttcctcaggaattttagcctctntcccacttagactttttagctntgggagccaagttatcccttgcgttctagactttaaccacttgtgatagccgcgatgaccccattgctacttcccctaagctccttattttttcttcctactctattccatgctttatggattttctgaagtatcttcgcattagcttcactgaagccttgcgcgatgaatgacgtgatgatttcctctgatggcgcatctctcatagggtagcctaactaatatggccaacatgggattataattcatacaacacctcttccccatcaaggggaacattgggaatccctcacatgagcataacactcctgcccctccttctt

SEQ ID NO: 26824 - DNA, 432 bp, Glycine max
tggtgtgccaaaagatggtttaggaggagtgattttttcattattgagcatggaacataaatgctcttgtgagaaattacactaactgtccgaagagatgagattagatcataatgttttgccaagccatcaacatagagcacatcataaatgtgtccaacatggttagatgcaacgctatctagtactcgtgagtagctttccataatggatttctctacatcctagaaaatagaagaaacaattgtgaaggtttgagatcaaaattttcatcacaaaaaaatataaagaggcttaacacacattttggtacacttaacacatagttaagtgcacaaatcttaagacttacaataaaaagggtcatattttcaagtaccattatatatcttaagccactctatatttgtacagtgctaaaattttgatctt

SEQ ID NO: 26825 - DNA, 379 bp, Glycine max
  unsure at all n locations
agtttgtangattatggggtacccatcacatgtggtactaggtggaggtcgggagatggtgcactacaagttttccacatccacaaatcacgtataaacccaccatccctgttgcccacctccaactgagctcacgtactcccacgtagcccatatccttgttcctctcaacgtcgggtccccatcaattctcccaagcttccccaacatccaggtaattcaacatccactcatcacaaactaacaaaccaagcaaaacagggcaaagtcagaaaactctgcccaaaacccaaaccaaaatcacagctctttctcacttagagaccccagtaacatttccttcgttccaattcgttaaccgttggatcgactcgaaaat

SEQ ID NO: 26826 - DNA, 422 bp, Glycine max
tcttacaagtatattcaacctgagaacatcatagattcttggcaaacatgcaagccagctgattactggattttttttttatcagcaaaacacacacacgcacacacacacacacattaaataaaagatagaaaaataatataaggtaacaggggtaccccaatactgtatcattgcagactcctaccacccagctcacgggtatacgttatttatgcaccaaatctgcataagtatcatctaaccacttgcatattacagatcccattcgaccaatactaatacacatgtcgtgtagctgcatattacagattactatgtgctcaaatatcataacaaacaaactaactcccaagacttttgctgccccctgcaacagcatgcgaacccatgcatcaacttcgtaccctccactaatacca

SEQ ID NO: 26827 - DNA, 315 bp, Glycine max
  unsure at all n locations
agttttgaattgngtgtcgntgtcagtgacaatggcgtatgggaggccgtacctgcatatgaggtgcttccaagtgaatttttccacctcgttggtcgtaatttcaccattggtctttcttctatccacttagtaaaatagttgatggcaactagtaagtacttgacagctcctagagcctttggcagtggtcccagtatgttctttccccacctgnggaagggtaaagtggagctaagactgtgaaggttgtcaggaggagtgtgtggcacgtctgcaaactcttgacatcgtctgcatctcctagtaaagtcg

SEQ ID NO: 26828 - DNA, 421 bp, Glycine max
  unsure at all n locations
agttctctcaagaaagcttctcttggttttctcctagtctataaatagaagcttgtgtaacacttgatgtaactttgatgaatgagagtcttgtgagacacaactcanagttcaacttctctccctttttcttccttcaatttcgtgctcccccctctctctttctctccctctttcttttcctccattgaagcatcctctccaagcttcttatccaaggctcatcttggtggtgaagcttcttcttccatggcttattcccagtggatggcgccgcctcttacctcttctcctttgtcttccactgcatctccatggtggaaaatcaccattaaaggacctcattgaagctcanagatccagccctcatagaagctccacaagcaagcttccatcacatggcaatttgatagaaatataa

SEQ ID NO: 26829 - DNA, 370 bp, Glycine max
  unsure at all n locations
agtttcgtgctcttcgntaatggctgcttgtttgtttttggttccaaacgatccgtatgcattatatgatcctataacgcatacggatcatctgattcgtatgagttcacacatcagtgcttgtcatatcaacaataattatcttctcattcttagtcaattgaccaatgtacggatctccaactaatgacttggccaattcatgattgtgactcccacatattaatttcaccatccaaccttgccctccaaccactggtttcccacgaagcttgaagggacacccncatttcctactggcagtatctcttctaacaaaatctttcttcctagacctatactgaccactcctttcacaaccaattaatac

SEQ ID NO: 26830 - DNA, 411 bp, Glycine max
  unsure at all n locations
gaactgaanagcattactgngcacgatgccagnggcattcagtggatagttgttatgatattacagctgcctcaagaacactatataaccatcacattttataagggtcttcatcgtttcatgttcactcaacaccttgttggagttcacaacatatcaggagctgccatatctattcccttctctaaaatactactttctcaactttttatgcttcccttatagttgcctaaaataccttattaatcctatcttgttcaaagcagcaaaaagtggcaaccacttgttaatatttgcatataagacttanatatgtttttggttcatgtaagttagtattttttatttttggtttctataagtttagttntttaattntagttctaataagnttatattttttcaattttg

SEQ ID NO: 26831 - DNA, 185 bp, Glycine max
  unsure at all n locations
ttctccttacgcatctgtgcggtatttcacaccgcatatggtgcactctcagtacaatctgctctgatgccgcatagttaagccagccccgacacccgccaacacccgctgacgcgaaccccttgcggncgaatcgaatatcactgngtgtaatgcatgctataccaagttattaacggtcaccg

SEQ ID NO: 26832 - DNA, 375 bp, Glycine max
agttttaagtacctcagtcattatttcacgaggatgggctcgagactgtcacaagataaacaaaaagtaagtaactaccaacaagacatcaagactacaatttttctgacgccactattacaaaaacaaacagcttttagatataatgtataaacacttgttagttcttgacaacagcaatatctagcgtgcacatatccagagaggaaataaagtacataagcaacaaattcaacagcccatacttttatacaacaaatggaacaaattaaacaaggacatctaacaaatatttcctctcaaacagcaagattaccatgagtgatattcatcatacctgaagcccaagggcccatttcctttcaacagggaact

SEQ ID NO: 26833 - DNA, 410 bp, Glycine max
  unsure at all n locations
tgtgctctctatccaagacttcacccattntttcatttccatacccaagttgcccaagcaagagctttaggcctcccaaaaaaaagctccaaattttgtttagtactaatatatctcagaaaaattattgtaaaattatatttaaaaataaattttaattaaaatattataagtaactattaatctttttattaataatgtagataacaattaataaacaataattatttaccaatatcataatttttttagaaaaaaagagatttaataattaataagtaaaaaaattcaaattttttttattttataaataaataaaaaatatcattcttaaatttgttttagatctttcaatttgttgagtcgcctgatccanaacaaaatcttcaaaaatcacacacgattgtatc

SEQ ID NO: 26834 - DNA, 378 bp, Glycine max
  unsure at all n locations
agttttactggaaaagatattgacacaaaaccattctacaattccaatcttaatacgaaaaatgtaagaaaagagaacaaaaagatagagaacaaatacgatacaaccaaaaatgaaaagtccgatttatctgctataatccaaaatgtatcatttaaaaatactagtccaccaaagcaattaatgttcccaacttgacaatcgaggacaaataccatacaattaaaataaaaagtttacttatcattgtcatatgacaatgtatatatgcgtgaaattaaaactttatgtcacatgaccgcaattctttatcactagtatatgattntgtcataattagatccttatttatttcctttacgatctaattaaacaaat

SEQ ID NO: 26835 - DNA, 319 bp, Glycine max
ctgcagctatcattttccaatccctgtcaatattcttctataattgatgcacggcaaatgttcgtgacgtaattacgcgtacagactgtactacagcctttattagggattgcaaacaatgaacttagcgagtctatgaacctcacataatatcgtaatgctcaattaatattggcctacatagagtattctagactctgtggagctcggacatccttactggcatatgactgacacagacactgcattcctgtctataagaatacaaatcttgagacctggcattcagatgtacgttgcaggacggctgattcactat

SEQ ID NO: 26836 - DNA, 363 bp, Glycine max
attttgagctcactgttgctgacccacaatgctccacggaatttgtcatggccatgctcttccttgcaagccctcttggtttcttgttcaagggcttttgcggagctgcattttcttctcgtaacccgacacactctttccggatgactgtagcgaccaacttgaatttttctttggcaagtctcgcttttcctagttcggttttcagagcccggacttcttcatcttcttctggagcttcaaaattctcctcgttgataatctttaacttggcgagccaatctaaacctcgtgtacaaattttcagccattcatgatagccaccaatgatgccattacgaatgccctcaagttctttatttt

SEQ ID NO: 26837 - DNA, 230 bp, Glycine max
  unsure at all n locations
aaaagaancacnagaggcacgcataagaaagaacnacataggactgatgtcctatntgatggagggtacggaggagcaaaagccacgcttttgtcgacctcaaaaaataaaaagaaataaagtgaagggaacacaattgccacaattataataaataggctgttgtgcttcaagacaaacgtaagaggtgctaatagcttactcaagcgtaaatacaactaccgaactta

SEQ ID NO: 26838 - DNA, 361 bp, Glycine max
agtttccttgagaagtttccttgattcggtaacgccttggcttttcttttattcttattctctttctcctttcagtgttgtcgcaacttacccttcggcgagagcgagacgcggggatcatgggtgcgtcttccaagaaaggaaaatgcacggagtcgccaccaacgtttatttgaggaaaacgccggaaaaaccggaaaggtgtggtctacgaactttaagtgtgaaaggttcgggagttgtatttacgcacggggaaggtattatcaccccacgcgcccgtcacaagggacgacaacctttaatcgagtgtgcaaatatgacttcaatttggtttatttcccatttacattcttatgta

SEQ ID NO: 26839 - DNA, 382 bp, Glycine max
  unsure at all n locations
tccttaagaagattcgtaaagaagctagagcttagctacacatacctctctaatagctaagctcacctccttgagatgagaagctagagcttagctacacaccccctataatagctaagctcacccccatgacaaaaaacatgaaaataaaaaaaaagtccttattacaaagacaactcaaaatgccccgaaatacaaggctaaaaccctatactactagaatggccaaaatacaaggccttgacgaaggaaaaacctattctaatatttacaaagataagcgggctcatacttagcccatgggctcgaaatctaccctaaggctcatgagaatcctanggtctttccttggatctctagcccaatctacttgagtcttcta

SEQ ID NO: 26840 - DNA, 262 bp, Glycine max
  unsure at all n locations
agttcaaaggcataatgatgttgccatgtgtggatcagaaacaaaactcttaataaaattctaaatctttgttggcacctgaaattcgccatgaaattaaagttatataagaatcacttgctgttagacttataattattcattnntaaatttaatatttaaaagttatattaattcaaatatttattagaaaattatattataagtgtgaaatgtttactaaatttgttgatgaattaatattattggacaatatgaatta

SEQ ID NO: 26841 - DNA, 418 bp, Glycine max
tactaacccacctttctcccttacaatgcatctataatttattacttacagctcaggtcgtgaattccacgaccccagatgcacaatcacaaaagaaaataaaaacaaaaattaaatcaaataatagaaactaaataataataataataataataataataagcacctctatcacgaaaaactaatttttttttaggaaaaaaaaaaggaaatcaaaagctaatcaccaaccaatatttagaaaaggcacaaagagatcacaacaaattaaatcaaaacccagagaagtcagatacgtcacaatgctaaaataccagacagaataatctacatgtggatcgttaaattgagcggtaagttaaatctcacgagcctgaacataacacagataaagaatccttcacagaattcaatcacc

SEQ ID NO: 26842 - DNA, 335 bp, Glycine max
gcgttcaccacaccagactctctttacacttaggcataatatccaacttgaaaactcacatattgggcgatggtcccaaaaggctatcgattccccagtaggctggccaaaatcagcaaatgacttccataatgaggcatgatctgggtctaagagtaggaatccatatctatgctgtacgaaataccatatgatagatatcaatacatctcaccaaaaaaaagtcgttcatatttataagtaagcaaccacaatatctcccaaccttcattgctgcatcttacaaagagtccctttgaaagggcaatattaacctttcctcatacatctttgat

SEQ ID NO: 26843 - DNA, 360 bp, Glycine max
ggatgtgtacgattgtaacaattgttcttgaaatgcgccatactgtgttgcttttatagactctacatgtctggtcaagaacaccatattaagagttacaacctttagaaaaacttgaaaaccattggaagaggtacatctttggatgttaattcaaaacttatcactggtaatcgactaccaaatcattgttgatagtgcttatctctactgagtttataaaagattggctaaagttttgttaaaacataggcacttagactatgaatgaaagctggagttgcttgtcatgatgtgcaacgttatgtctaaaaataagatcgggctgcacaatgcacactgcattacgaaatgtcaaat

SEQ ID NO: 26844 - DNA, 215 bp, Glycine max
  unsure at all n locations
agctttgatgnatgttatattttaaatactagctgaaatatatacatgtatgcatattttatttttttggttaaccaaaagtatatgaggtttcttatttggcacacaactaatctcctaccggaggctattatgaagtaaagtagtaccttcagcagtaactccatactatacatgtatgcatcttgatttcgtataatgaatgcacatatatc

SEQ ID NO: 26845 - DNA, 435 bp, Glycine max
  unsure at all n locations
cttctatagagcaccaaccagtccaatttgccaatgactatcgcatcttttcgtcctttgtagnaaagataaaacgaaagttcgagtgtcgaattcacatgaaaattgtttgtacttaggtaaatgaatattttattaataaaagaagtggactcgaaaagctatgagaagaacagtgatttaaattgatagaaaattaaatcaaacaagagaaaaatttaaacaagaattttaattgattaattaaagagaaaatgaattcaaaagatgagaatgttgaaaagaactactctttaatgtaatgttaatgatttttctctatttataattattcgaatttatacctacatttattagtatacttactctatctttgatccccgtatgaaagaatctaatttatctattttctcttccaaatccctttgcattaag

SEQ ID NO: 26846 - DNA, 370 bp, Glycine max
agcttttgacggactataccttgctctaggaaccagggacggagaaagatctatatataggcttgctaagggtagagagaggaagactagagatttggatcaagtaaagtgtgttaaggatgaagaaggcaaagtcttagtgcatgaaaaagatatcaaggaaaggtggaaggcgtatttccacaacttatttaatgatggatatggatatgactctagcagtctagacacaagagaagaggaccggaactataagtactatcgtcggattcagaaacaggaagtaaaggaagcgttgaaaagaatgagtaatggtaaggcggtggggccagacaacatacctattgaagtgtggaaaactcttggagat

SEQ ID NO: 26847 - DNA, 435 bp, Glycine max
  unsure at all n locations
cagcttctgttgttcaatttcgagcgtctggatatattatgtctcaaattcttacatccgtgtgaaaagttatgaccattagaatttctcgagagcttccgttgttcaatttcaagagtctagatgagttatgtacgcgaatcgaacatctgtgtgaaaagttatgaccattcaaatatcttgagtgcttccgttgtgcaatttcgagcatcttgatatattatgtcccaaatttggacattcgtgtgaaaagttatgaccattcgaatttctcgagagcttccattgttgaatttcgagagtctagatgagttatgtacgcgaatcgaacatccgtgtgaaaagctatgaccattcaaatatcttgagtgcttacgttgtgcaatttcgagcgtctcgatatattatgtgccanattgcgacatccgtgtgaaa

SEQ ID NO: 26848 - DNA, 270 bp, Glycine max
tattctagcttgtatgattatggggtacccatcacatgtggtactacgtggcgggcgggcgatggtgcacaacaagtctttccacatccacaatgcgcgcataaacccaccatcccctgttgcccacctccagctgagctcacgtactcccacgtagcccatatcctcgtttctctcaacaccgggtccccatcaatcctcccaagcttccacaacatccaagcaaaacaacattcacacagcacatgctatcacaggcaagcaaaacag

SEQ ID NO: 26849 - DNA, 414 bp, Glycine max
gacgcttgagtacaactgtgcaactcttttccaattttaaactctatttgaaataatgggcaaaatattcactttgtttcttaaaagtgccaactgaggtagggtcatgggttggccttttggttcctcatgacatcttattagagtatacttactccgtctagtatttttactttgtgtattctgttatttgttgtttgtaagttgtcagtgagctgtcagttagttacagttaagctgttagtgagctgtcagttagttacagttctaactatgttagtaacaaattgggttagttaacagttagtctctctatatatagaggtgacactatccttttgtaacttgtctttctttttcttgaccaatgagaaatcagagtttatcaaactctattacggtatcacaaagcta

SEQ ID NO: 26850 - DNA, 340 bp, Glycine max
  unsure at all n locations
tcaagcttgtcgatattatatnntncaccaaaccaaactctctttacactaaagcataatatccaacttgagattcaacatattggtcattgttcaaaaatggtattctttccctaatttcttaggtgaaaatacctaagttcttccattaaatgtcaatctcttacacatttgataaaaaaacttgctttaagctaatggatgttttacctaaagataaccaataaccctcatcttattcttaactctaagagttaatgggtgttctaccataaatcaagacaaagaaagtatttntcaataacaatttcatcctaaaatcaagaatataaaagtattt

SEQ ID NO: 26851 - DNA, 416 bp, Glycine max
tatgacacaaccacctgcacctttaaaaattccacatgtccaattcagtggagaccaaggggtcatgaagtggattcaactaggactccccgtgattaccatatagctctagggttacccttttatgactactccttctatagtagtgtaagattaatagttaaatacatgtatgaaaaaaaaaataacaattaaaactaaaatattacaagattttaaaattaattataaaaacttctaaatatattttcatcaataaaataaaattaaaaatatatataaatatcatataaatatctatttttgttattccgtatttatactagataggtatttggttagggcaaccaagtacttattggatccgccctcctatagagacaaaacaattatgcttatgagtaatcataagatta

SEQ ID NO: 26852 - DNA, 250 bp, Glycine max
  unsure at all n locations
ttaagcttgttaaaggaatttataaacacctcanaagtcttaccaaacatacaaagcagaatgtaattcataggactagtttagtaattcttttggaataatattgttaacgagtagagttaaaaaaaaagtataaataactaaagggtatttgaaaaagaatatatagagattatttgaactcaaaaaataaattatgactcctaagaatatatgactccaatgaatattttcaacttataatttcaat

SEQ ID NO: 26853 - DNA, 422 bp, Glycine max
tttagctgtcactataatgactatacgactgatcatgttccaagagaaaaagcaagataaaggtgtgtgtgtgtgtgtgtaataaaacaaagcttcgtcaaaaacagtacaaacataaagcatatgcgaaatcatgcatgagtgcggactacaaaagaaaaaatagggttaggtaccttagagtcattaggccccagaagatagggaaaagtatcttttccaatcggctatcatttgtgacgagttgtacagaccattcatatacaccatagtcgtagttatcagcactgtccaagcaagtagacctagcttccctgttctgtgcccataacaaccttgttttgtctcttacaatgttaatgcctccatagtatataggctctttgcaacacagtgttctcaatccacaaccagttgttttt

SEQ ID NO: 26854 - DNA, 245 bp, Glycine max
tttagctttgtacaatgttgataacaagacaaacttcaattgcttcttgtttgtgacaactttgttttcatccaaatgattttttgcatgagatagttttaaatagaaagaaattaattttcacgagaaataacttttggaaaaatatataatgcgcaactaacctggtagaataatgtctagaaattttcccaaattattataaagcgatatcataatatttaaaaattgtcttgtgaaaatac

SEQ ID NO: 26855 - DNA, 418 bp, Glycine max
tacggttcccggttacgctatggatgttgtgctcgttctgttctctcttgttcgggaaatcttctcgtttgtgctcggcaacaacgtatactcgagaccgacggtttttcttattactctctacagaactccatagatgctaatttctttttcctttttagaaccgatagtatgatttgtcatttactttataaaaactgaaatgtcaagctagccttttgaaagtagacaatttgattgtagttggttggacaagggtcagggagggagggatttggctcctccagaaattctattgttgtaatgattgatggtgtctagttacaccgaatttgatacaatatggaacttgctttatttatcttactagtttgagttgcccttgctcccttgaatatgcgtaacaactatcaaaaac

SEQ ID NO: 26856 - DNA, 360 bp, Glycine max
  unsure at all n locations
ttgcatttaagcttttttgacagattttggttcacgatgagtcagtagaagtgtaggattgattctcggtaaatgaataccaaacttagatctagtttgcataagatgagtgtttggaggtccttgaggagatgtgggattaataattgaggaggtggcttctgaactgattgttggaacaaaagtaacagtaacagggagagattgattgtgggttcagtactaaatgactgaactagactagacgttggactagatgcttaaatatgtgttagtgtcagaatgagcagaaatagatttagactgtacaacatcangaggatntaaatgatctgaaatagaagaggtatgtgtttgagt

SEQ ID NO: 26857 - DNA, 394 bp, Glycine max
tgtgcatccaataccctgatatgatgttttcatatgtttttaaaaccggactgattcatttgcttccaaagtttcatggccttgcaggtgaagacccgcacaaacattcgaaagaatttcacattgtctgctccaccatgaaacccccagatgtccaagaggatcacatatttctgaaggcttttcctcattcattagagggagtggccaaggactggctgtattaccttgctccaaggtccatcacgagctgggatgaccttaagagagtattcttagagaaatttttccctgcttccaggaccacagccatcaagaaggatatctcatgtattagacaactcagtggagagagcctgtatgagtactgggagagatttaagaaactatgtgc

SEQ ID NO: 26858 - DNA, 80 bp, Glycine max
gcttgtaggagatcagctagacttggagcgataacatacgaagctcttgaacgctaaacagccattctgtcgtcatggag

SEQ ID NO: 26859 - DNA, 414 bp, Glycine max
  unsure at all n locations
ttntctacacacacccctttacatagatcctatgattttaacatggaattattaatgcgaggcagacatgtatatttattgttcaatgcaaccaccattccataatctgaccagtgaatgtaaactacatcaactacattagctacctttagaactgaaagtatgattagtcatcaaccttattccaacgaatttcactacctttcctttgtcttgcaagcactgtatcatagaagtttgtcttcaggatgcaagtttgccattacatgggctgatccacttcttctaatagcttcctcattcaaatctttaacttttcttccttcgagcacaataccatgttctagtcttagtccagaagctatggctttcacttccatgatgtcatcctccgagaccagtttcatatatata

SEQ ID NO: 26860 - DNA, 391 bp, Glycine max
  unsure at all n locations
agctttgtatgtgttcaagcatatagcaaatcctatctatatatctgcaaaatcattntcaggatctgataacttcttatcagacgttagttcatcattgaatttaacatggatggattcttctacaactaaagttcttgtactaaaaacttatatgctttagatgtattagataaaccaagaaaaatccctttgtccactttggaatcaaacttagcaagttgatctttagtgttcatgataaagcactcacatccaaatggatgagagtatgaaatattgggtcttcttcctctctatggatcatacggagacttttttatcaatggtctgatcaatattctattctaaacatagcaagttgtatttactacttctgctcaaagtactt

SEQ ID NO: 26861 - DNA, 429 bp, Glycine max
  unsure at all n locations
tggagatgatgcttcaatggaggaaaagaaagaaagattggggagcacgaaattgaaggaataaaagagggagagaagtggaactttgaagtgtgtctcataagactttcattcatcaaagttacaacaagtgttacacatgcttctatttatagactagatagcttccttgaaaagctttcttgagaaaacttccttgagaagcttctttgagaaaacttccttgagaagctagagcttagctacacacacccctctcataactatgctcacctccttgagaaacttctttaagaagattcctaaagaaactagagcttagctacacatacctctctaatagctaagctcacctccttgagatgagaagctagagcttagctatacacaccctataatagctaagctcacccccatgacaaanaatat

SEQ ID NO: 26862 - DNA, 388 bp, Glycine max
  unsure at all n locations
agcttatttgtaatgtatttagcttaatgttgcatgctgaaataaaagttaaacatataatcttatgattaaaacttatgaaataatgtantaaattttttaagtgcaattaaacatattacataacatgtaaaatatataaaatatttatagttgcttaattggttattgaatggtcaatgaaatgtgagttcgacccctactcacttctattttcaattattttttcctcttccgtttttgttaacaaaaacaaccttaaaaaaataaagacaaaacaaagcgttgtaaccggatcgagctagtgcctaccaaacaaataagaatcattttttcactacacagaaacattntcaataaccttattttttacaaatacccccaaact

SEQ ID NO: 26863 - DNA, 428 bp, Glycine max
tcatgagaaagtaaaagatcaaattgagaggaaaaatatttgttatgttaaacaagccaacgaagggagaaagaaagttgtcttcgaacccggagattgggtttgggtgcacatgagaaaagaaaggttttcggaacaaaggaaatcaaagcttcaaccaaggggagatggaccatttcaagtgcttgaaataatcaatgacaataattacaaagttgagctacccggtgagtataatgttagttccaccttcaatgtatctgacttatctctttttgatgcaaatggagaatccgatttgaggacaaatccttctcaagagggagagaatgatgaggacatgaccaagagcaagggcaaggatccacttgaaggacttggaggacctatgacaaggtctagagcaaggaaagcaaaggaagctcttc

SEQ ID NO: 26864 - DNA, 256 bp, Glycine max
  unsure at all n locations
agcttttatccatatcctgactcaccataaaccttgacccagggtgagaatgccaatccttaccctcggaagcaaaaaaaaggagaagagaaggaaaatttccaatcaaagaggaagcataaaaaggagagaaggaaaatttgcaatcaaagagaaagaaaagaagaggaaaggaaattcccaatcaaagagtgggagaaagaanaaagaatagaatagaaagaaaactcccaatcaaagaatgggagaaggaaaa

SEQ ID NO: 26865 - DNA, 424 bp, Glycine max
tgtgcaaatcaaatcactcctacatctcatctctagcttgcattttctttctttacccactcctcacgtttggttttttagggaaaacactataactaaacgcgccgcaagggatccctatcgcaccagatccaaatctagaacgatgggtgatcaagaggagacacaggaacagatgaaagccgacatgtcggctctgaaagaacaaatggcctccatgatggaggccatgttaggtatgaagtagctcatagagaagaacgcggccaccgccgccgctgtcagttcggctgccgaagcagacccgactcccttggcaactacgcaccatcctccctcaaacatagtaggacggggaagggacgcactgggacacgatggcaaccctcacctgggatacaaccgagcggcttacccttatgga

SEQ ID NO: 26866 - DNA, 266 bp, Glycine max
agctttctccacgttttcctccatacctagaacttcaaaccttcgattctcactcaattcttcaccaaatcacgtcccgtaaagcccaatcttcctctttttcactcctctttcacttccaccgatcaaaatccagaaaaacttcatcaaatggcagagccatcaaagaagagaaagggatcatcttccaccgtcaccgctgctgcccatcgccgtcacggcccatccggagcacccacagcacctattcctccttctttgtcatc

SEQ ID NO: 26867 - DNA, 431 bp, Glycine max
tcatgatgaatcaagattgattcaaagagttttgatgattacaaagtctatgacaaaaagctcaaaagtcatgaacacttcatgataacaaagatgatgatatcaagaatcaaagaatgagttcaagattgaatcaagtacacttcaaggatcaagaggaaagttgaattcaagaatcaagtttcaagattcaagttccaagaatcaagatcaagattcaagactcatgattcaagaatcaagagaagactcaatcaagataagtattaaaatgctttttcaaaaacttagtagcacatgaatttttctcaaaaccttttaccaaagagtttttactctctagtaatcgattaccagtagcaaaatggttttcaaaaaaatttcaaactgaatttacaacgttccaattaatttcaaaatgctgtaatcga

SEQ ID NO: 26868 - DNA, 263 bp, Glycine max
tcaagcttatgggcattgtcgaacaggtgctaggcccatgatcgatcgattatcaccccacgtttggctcaagacgtcaaatgaacgctcctatgaggtagcctagtatcactaaccctgctctgtaaaatcctataacatacttgtgcatcttcttgaactatatcctgaatctggctatgtgtatatgacaccatatgactgtaagagagaaaatataacaacgaataacacaactttgcataaagatttcttgaaaaaaa

SEQ ID NO: 26869 - DNA, 290 bp, Glycine max
  unsure at all n locations
gagcttgcaacccagctcgccgaggcgacaatgtgcgttcttttnaccgccgccttcgggaggaatcatctggagggcccacccgggcatggctgctgtgtgcacatgaaattagactagatacacgaacgccttacttctggtgattcactatagcgagaagtgacaaagcttgagcaagaaagcatcgatgacagtcttctctgcgtagagctaccggaccagtgtagatgacatattcaccctctttgtagactgacttgatcgttactgatgcatactgatagtgc

SEQ ID NO: 26870 - DNA, 461 bp, Glycine max
  unsure at all n locations
aaaaattgaacttgaaaacttcggacatctcagcactnaagctcgaacccggagagcctatctagacgaccgcgaggcatttagctttgatntacttcaacggggaatgcagccatactaggagacatccaacccaatcaccctcactaataacatactgtataaatactctaaagccctaataagcatactacatagcactggacacaaataaaatattaatcctcgcatactaggtcattgcatggtcagagatatatgacctcgacccctacacactacaattgtccaatatgatgcgcactaacggctacggagacaacgcattcatcccaacacaacaccaaacgagactggctgccggatcgacaaccgccctaccgacgcaaatactcattgtgtactaaccacacccataccatagccgccttttaacacacctccaacggggataaataccg

SEQ ID NO: 26871 - DNA, 383 bp, Glycine max
tattattatggtgagtgaatagcagagtatttatcaacttctcacgctgtttagagaggggaaggatagaaggatgaatactgactataagtaattgccttctaaggagagcacacaggtagtctgaacagctgccatgtattgtttggacactgggataagccactctcatagaccatggaatgattagcgtcaatgatgacaacaactaactacacggtatatatatatatagatacacctacattgatacagacttatctatatgtgaagctaatgatgactccgatctgaggactaaacgttatcatgagggatagaatgatgaggacatgaccgagacatgggcgacgatccacttgaaagactaggatgacctatga

SEQ ID NO: 26872 - DNA, 257 bp, Glycine max
tttagcttgttccccagctcggccaggcgagctaggttgcttcctccagaagcaaccgccttctggaggaatattctagaacgtccaagtgggcctggattctatttgcacccctatttttactaaatacacccccttgctctctttttggtaattctttttcgtaacgttacggaactttacacatttcgtaacaatgcttgcattctttccgtaatgttatgagaccttacggatgacgtaatcatccctttttt

SEQ ID NO: 26873 - DNA, 420 bp, Glycine max
tgaagggacaaccacatttcctactcacattgcctctactaacgaattctttattcctacacttgtacagaccactcctttcacacccaattaacacagatgaacttcttcctctgctaccagtatctgtgtcaaacctcatacccactgcaacaaatccattttcatgggcaactgttcaagcccactacaaaacatcatctcgagtaccagagacctacaacgcaactccgacatattaatttttatacaaaacatacgttcgaccaaatgactcatactaatgaacatgattacctgacaagtattgaaagcattcgaacaatcaaaatgtggttcattcacaccaaattcttcttcattctcataatctatatgaacttcttgtgacatcgctgtagaagcaagcttcatgatgat

SEQ ID NO: 26874 - DNA, 264 bp, Glycine max
  unsure at all n locations
tcagctttttgctttctggatgcattggctaacttggcaacccagctggccttgaatcacaaatttgtacctgtcacaagggtttgcggcttgcgctcctctgctgaccaccatacaaacctttgccattccatgcagcaacctggagcaatggagcaacctgaagctaatgctgcanatatatactatagacctctctaacctcaacatcttaatcaaccacagcagaacaattatgacctttctctcttctgagacaaccct

SEQ ID NO: 26875 - DNA, 420 bp, Glycine max
  unsure at all n locations
tctacttatgtggcagggcgggcttcctttaccttnctttctccaatgcgaactttgaccattgttcttccttcccacaatgcttcttttcatgtctgcctgagtgggcttatagcctaaaccatacttcccacgatttccttgagtatttatcaggctagttatgccgccgttgttttttcctaaacccatcccgggttcaaaaccgttccccaacataactcgggccatcattaccgctgcatcggacagacaaggttgcccaaagagggagtccacggaggaaatgctgaccacctcaaaagactggaaagcagtttctaacgattcttctgcggcttccacataaggcatggaggatgggcagcttaccaagatatcttcctcgcctgacacgatgaccaagtgcccctccactac

SEQ ID NO: 26876 - DNA, 381 bp, Glycine max
  unsure at all n locations
tctagcttttgaagaaagtgatgaggtacaagccctaaaggcagagcttgaaagagcccgagtagtcgaagagaagttcaagtccatagccatcaaagtctgaaaagagtatgatgaactaagggacgtcaatatggccaccgctgaagccttggaacgagaaaccaagaaggcccgaaaggaagaacacgtgccagcaaagttttgaggggctttataaggcagcaatagtaagctcaagctccgaagaggtgaaaggaatcatcacgggtcaaaggcatgatcttgaaggacgagctaaaggcttaccttatgtcgaanagaaatttgtcccaacagttaagcgagactgaagggaatatgtgggccgtcatcgatgag

SEQ ID NO: 26877 - DNA, 404 bp, Glycine max
  unsure at all n locations
tcacatgttacctatggtggagtatgctatcntaaaattatttgtgttgtgatgaagtgtttgaattgagctatctataatgtgatatcacattatattcgttagaaggtgaaatataataaatcacactagaagggggttgaatagcgttagtcaaaatataaaacttttttgaaagggaagatgtttataataaacaagtttataaaaccctctccagtgactaaaagtggattgtagtccaatgatgtataaaacatattttttagtgaaaaccttgtttgcagaaggtaccaatgatggactttgaaatactttaataagctaaaaaagagcaataaaaatacttcattttatactggttcactcaacccgaggtacgtcaagttctttacaaaccagta

SEQ ID NO: 26878 - DNA, 388 bp, Glycine max
tttgcatgctagctttcatcacattgtctcatgtatttttttgacccacaagagtttaacattttgctttcacattcttatcaatgtgaaacagacacaacaagttagttatctcgggaaacacaattttcactgcattcatcaatgttaaatctctagcagtaacaataactcgagagattgcatcatgtctcataaaaatacctctaaactattcaagagcctagataacattgtttatatcttctcctttcaaatagacaaatgcagctaaaaatgtcatcctaggtgtcacactaacaatgtcaaactaacgacaaataatgaaatttcatacatatagcatatacagattgacgtataataattcatacctctctctatatat

SEQ ID NO: 26879 - DNA, 415 bp, Glycine max
  unsure at all n locations
tcaagaattatggcctcattttactacctgtttcccgatggaaatnctataaatagacctcccatctttaatggagtgggttatcactactggaaaacccgcatgcaaatctttatagaggcaatagatttaaatatttgggaagccatagaacaaggaccttatgttccctctataatagctgcaagtgcaacaatagaaaaacctagagcagattggactgaggaagaaagaagattagtacaatataatttaaaggccaaaaatattattacatctgccttaggaatagatgaatactttagggtttcaaattgtaaaagtgctaaggatatgtgggatacactacaagtaacacatgaaggcacaacagatgttaaaagatctatgataaacactttaactcgtgaatatg

SEQ ID NO: 26880 - DNA, 349 bp, Glycine max
tagcttttctgtttcccatgctcatcataacaaagatccacaaactattgatcctttcatactagagaatcaacgtttcgcacaaacaatgtcattgttatgatgtaaggcacagagtgtgatttggcttgtgcaatgtgaagtatgttgagagaaaaggagagaaccagagagagaagttagagagagtttagagaaagagatctttgacgtctcgtagtattgagttatgttgcgtctcttttttgtgattacataatgtctaattatagtggctaccttcgtagtgttatcagtcacgtgacttatcataagtatttgaatcaaatatcttattctaagaggtaca

SEQ ID NO: 26881 - DNA, 408 bp, Glycine max
gtgatggtgtcgagaagtattcacatgtttgtcatcatcttaaagggggagaatgtgaatgtatgtatacatgattttgatgatgtcaaaagaaaaatcaaacaaagttgcttcaaaagataagcatggcttcaagattaatacaagattgcttcaacaaacaaagtcttgcttaaagattaactcaagatcaagccttgccttaaaacaaagtgctttcaagacattcaaggctctggtaatcgattaccaggcagtgtaatcgattaccagaagacagggttgagaaatagctgttgaaaagggttttggaattgaattttcaagatgtaatcgattaccatatgtctgtaatcgattaccagcaacgaaactcctgagattcacattcaaaagtcatgacccttc

SEQ ID NO: 26882 - DNA, 428 bp, Glycine max
tccttcaattctggaatcaattgccatttcagttgagatatagccatcataattgatttggaaagagagtcagcaactacattctcttttcctggcttgtactcaattgtgaaatcataacccgtcaacttatgtatctagttctgttgctcaagagtgtgcacaacttgattatttagtgatctgaggctcttttgatcagtcctaatggtaaatttgtgaccaagtaggtagtgtctaaatttagctatggttgtcgtaatagcaaagaattcccttgcatatgctaatttttttttgcattctcgcattcaatttttttgaaaaataagcaataggatggtgcatttggctcataatagcagctagaccaattccagaagcatccgtttctaaggtgaatgggtgtgaaaattatggtaaagcca

SEQ ID NO: 26883 - DNA, 333 bp, Glycine max
  unsure at all n locations
agcttgtccagagtttgaatccacagaggaaatgcttaccacctcaaaagactggaaagcggnttctaatgactcctctgcggcctccacataaggcatagaggatgggcagctcaccaagatgttttcctcgcctaatacgatgaccagatgcccttctactacgaatttcaacttttggtggagtgtagagggaacaactcccactgagtggatccacggacgccccaacagacagctgtaggggggcttaatgtccattatttggaaggtaacttggcatgtgtgagggcctatctgtactgggaggtcgatctctcccctaacctctcg

SEQ ID NO: 26884 - DNA, 427 bp, Glycine max
tctcccccaattttctataaatagggggagaagtgatgtgaaaaatgtgttcagccccttaggcacttctctctctttcgaatttgcttggaaaaattgtttccgtgaagaaaatttaagccgaggcgcttccgaaacgtttccgtgaggaatttcgcaaaggtttcgaccgttcttcgacgttcttaattcgttcttcattgttcttcgatcttcaatgggtaagtacctcgaactaagcttttcgattcattctatgtacccgtggtggtccacattgtttttcgtgtatttttattctcgtttcatttactttttatacccccttttgacgtgcttaagccattttatttaagtcatttctcgcttaaactaaaaataaaataaatttccaccgatcgtttgaattgtattatccgttaacttc

SEQ ID NO: 26885 - DNA, 378 bp, Glycine max
agctttttgatgattcaaaaatgattcaaaggtgttttgaagataacaatgatgacaacaaaagatgatgacaaaggtgatgaacaaaaagctcaaaagatcaaagaacaactcaagtgaatcaaagaacatctcaagagaatcaagaacaagtcaagagttcaagaatcaagaagaattcaagactcaagaagaaagcctaatatcaagaatcaagattcaagattcaagatctcaagaatcaagatcaagattcaagactcaagattcaagaatgaagaaaagactcaatcaagataagtattaaaaagttttttcaaaactttgaatagcacatgagtttttgacaaaacctttaccatacatgttttactcact

SEQ ID NO: 26886 - DNA, 428 bp, Glycine max
aggatgcttcaatggaggaaaaaagagagggagttatagagataggggggatctcgaaattgaaggaataaaagagggagagaagtggaactttgaagtatgtctcacaagactttcattcatcagttacaacaagtgttacacatgcttctatttatagactaggtagcttccttgacaagttttcttgagaaaacttccttgagaagcttctttgagaaaacttccttgagaagctagagcttagctacacacactcctctcataactaagctcacctccttgagaagcttccttaagaagattcctaaagaaattagagcttagctacacatacctctctaatagctaagctcacctccttgagatgagaagttagagcttagctatacaccccctataatagccaagctcacccccatgacaaa

SEQ ID NO: 26887 - DNA, 376 bp, Glycine max
agcttgtattgatttggtctgatgagggatcgaggcttagtaatttaggctacaacatataacacatgagaaattgattagagaaatatattgagacacacaatttcgtgctccttctctccctctccctccactcatcttctccttccttcaagctcttatccatggcttcctatggtggtgagcttcttcttgactcatcttctgcttgaagtggcatctccaatcatatttctttcttctgtattccactgccattaaactaccagaagccaaagactccattgatgaaaaagatccaggcctacaagctccacatggaagttacatcatgctggatcaagagcatcttcggctaagtgatggtcttttgctt

SEQ ID NO: 26888 - DNA, 431 bp, Glycine max
  unsure at all n locations
tgtaggattatggggcacccatcacatgtggtactatgtggcagtctttcgatggtgcacaacaagttttccacatcctcaaatcgcgcataaatccaccatcccctgtcgcccacctccaactgagctcacgtactcccacgtagcccatatcctcgtttctctcaacaccgggtccccatcaatcctcccaagcttccccaacatccaagtaaaacaacattcaaaaagcacaaactatcacagccaagaaaatagagcaaaggcagaaaactctgccaaaacaccaaccgaaatcacagcttttctcacttaaagaccccagtaacaattccttcgatccaattcgttaaccgttggatcgactccaaaattttactggaagtctctattacataagcctacattntgaccgttgggatctactagca

SEQ ID NO: 26889 - DNA, 391 bp, Glycine max
  unsure at all n locations
agcttttaacgtatattgagaaaggattttctactttaaagaaaatagtgatttgtgggatcttttagttaaggtatgtgactttttttacaaaactgatatcaaataaaaaattatataagtttttctaaaaatggtaataaaaaattaaaaactataaaatttaaaaggataaagtgattgctcattaaagaatttggtctagacagcagaatgacatgattgctcattaaagaatttggaaacagaaatatcattccttccccttagaatttttaatttatcattaaaaaataaataaagatagactcttggaataaagtaattntttcagataaaaaaattactaatgactntacaagaatttaaccaactactaatatgaaattct

SEQ ID NO: 26890 - DNA, 421 bp, Glycine max
  unsure at all n locations
tgttaaattagatagattcgatggtaacatgctgcttattaaattttctcttctcattcagtgagttttcagtgttcatctaacatttaagaaaaagtgaggggcacaatttctttaacatatacttattcctacataaatagaattagaaaatcataagggatcaccatttattatttaacgtcaaaatttgaactaacacttatgtaattaacgaaatactcaaattcataaatccaaaaaaaaatagattattatgttaaattaaaaataaatataaaagaaaacccagtgtatacaaaaaatatattggttatgatgattaaaaaatatgctgctatattctttntaacagacaaaataagatttgtaataatcacaagaaattatgataaaagcgggacagtagagagtacagcat

SEQ ID NO: 26891 - DNA, 315 bp, Glycine max
  unsure at all n locations
ggcaattcagctcggacccgagatccttttagtcgacctgaggcattctgctttgtcttgaaccaaagaaacaacacatttctatnttgtgaggatgaaaaacatactgaaaattttgcaaggataaattccaaacattttgatatttataagaacaaaaaatatattttagccttgtttttattgttaaaaaaaaaagagaaatgctactaacatactctttaacacactccttcatacacactttctcttatgtgttaaaatgtatttagctgaagaacaagttccacaaaatcttgaacctaccaagtgtga

SEQ ID NO: 26892 - DNA, 343 bp, Glycine max
  unsure at all n locations
ntgccccttgctcgtgcctttagccatcatcttacttttatgggnaattctgaaacccaccataggtatacattcttgtctccaactattgtagtctattgataacataaaacgacaaaacgtatggactttattcggctgatcactaggcagcactactccattatctatccatctgaagccgaacctatgactactaacggcatagatggaaccctatacttattgaatatattataaccctagtatgatagtctcgaacaagttatgttgatgcagcggatcgtaaatgacgaaatatggttcttgctgcaagatcttgagacgatatgatgaaccacct

SEQ ID NO: 26893 - DNA, 259 bp, Glycine max
  unsure at all n locations
tctagctnctgcttcttaccaagaagagagtgatcaggaggattcgattgaaatagatgaagatgatgatcttagtctatttgtgaaaagattcaacaaattcctaagagtcaggggaaatcaaatgagaccaaactttgaaccaaaaagacaggcaaaagattcatcctctactccaaaatggtatgaatgccaccaacctgaacatctgagggttgattgcccgatcttcaagaaaagaatggagaaatctgaaaag

SEQ ID NO: 26894 - DNA, 411 bp, Glycine max
tattaatttatataattagaataagaatattttacatatttacattaaatttacataatttgtatactttacatattaattgattgatataattatattgatttatataattagaagaaaaataatttgtatattaaaatcaatttaaaaaataatatatgaatataattaatatattaatttattgaacttaattataaattaataaaattaaaataaaatatgcaaactattttaaaaaatataaaataaaattaaaaatatttttataattgttaactattgatacataccaaataatgtttacaatattgactagacatgaaaaatattttaataaattattactttttcaataaaaggtcaattaatagtgatgaaagaataaaaattatttattctagaaaatag

SEQ ID NO: 26895 - DNA, 363 bp, Glycine max
  unsure at all n locations
agctttttgtggacatttctgcccttctatcatatttgtatttctttgtattgtggaataactttcacgtgcatgtgcctaaagtaattggttatgtctcagtgaattgaaacattcagagtaatacatatattgtccttctatatacttatatggctatttgcttccactgggatgttttgcagttttcttattttttcttggatctccttgatttggatgaggaggctggcatgatccagaagtcaactaaccaaactgatcaaaatgagaatgctgaggaacaagctaatgatgagtcaactaaccaaactcttatgccangtaaatacaatggaaatattattattattataatatttt

SEQ ID NO: 26896 - DNA, 414 bp, Glycine max
  unsure at all n locations
gcttcgagaaggatgaggtacaagccctttggcagatcttgaaagagcctgngtagtcgaagagaagttcaagtccatagccatcaaagtctgaaaagagtatgatgaactaagggatgtcaatatggccaccgatgaagccttggaatgagaaaccaagaaggcccgaaaggaagaacacgaccaaagaaaagttttgaggggctttatagggcagcaatagtgagctcaagctccgaagaggtgaaaggaatcatcacgggtcaaaggcatgatcttgaaggacgagctaaaggtttgccttangtcgaaaagaaatttgtcccaacagttaagcgagactgaagggaatatgtgggccatcatcgataagtgcaaagagaagctaaatctagcggcgactcacgagcaaag

SEQ ID NO: 26897 - DNA, 334 bp, Glycine max
agcttttgtccctgagaaactggttcccagaagacaacagggagtgaagattgctgaaaaccctagccttgcaacaagttctagggaagtagacaaggagatggacaagaaaatccgcagtatcgtgagtagcattttgaaagacgcctctgttcctgatgctggtgaagatgttccaacatcttccaccccgaatgtttctgtgccggatgttgagaaagatgttccaacatcttccgggccaaatgctgaagtactctcttcccccagcaaagagagatcaacagaggaagatgatcaagcgacaaaggagacccctgcaccaagggcacca

SEQ ID NO: 26898 - DNA, 417 bp, Glycine max
tcaacatcagaccacttccagggtgctggtactacttttctggacttgatggggcctatgcaagttgaaagccttggaggaaagaggtatgcctatgttgttgtggatgatttctccagatttacctgggtcaactttatcagagagaaatcagacacctttgaatattcaaagagttgagtctaagacttcaaagagaaaaagactgtgtcatcaagagaattaggagtgaccatggcagagagtttgaaaacagcaagtttactgaattctgcacatctgaaggcattactcatgagttctctgcagccatcacaccacaacaaaatggcatagttgaaaggaaaaataggactttgcaagaagctgctagggtcatgcttcatgccaaagaacttccctataatctctgggctg

SEQ ID NO: 26899 - DNA, 367 bp, Glycine max
  unsure at all n locations
tcaagcttgtttctacaaatcactgctttgtgcaaggtctggggagttcactctgattccttgacccatgagagattgagccccgccattgatttggcgtatgttaaaaagaattgctggaaccttgatgacccctcggtcacctttccgggagcccgcaaagctaggggcaaaggatccaaggcatcatcttcttcttctactctacctccctcttcatccattcagactccatctattcctcttgcacctacttagacaccatttccagctctctcatatgtaggacattcaaatatttcatttacaccacagatactgcactccatgctccagagcttataccggnggtagtccatcatcatgt

SEQ ID NO: 26900 - DNA, 281 bp, Glycine max
tgcctgtccgatgcagcaagagtgatggttctagttattttggggaacggatgccaacccggaatgggtttaggcatagacaacggtgacataactatcctgatatatgccaaaggaaatctgtgggaagtatggattatgctatatagcccactcatgcatatgtatagagaagcatcacgggaaggaatggcggtggtcaaagctcgcggttgagacaagatagtgaaggaagcccgccataccgcatatgttgaagctatataagcgcgggtctggga

SEQ ID NO: 26901 - DNA, 237 bp, Glycine max
cagctcgtacccgggatcctctgagtcaccttttgcatgttagcttctaatcatgtaaggcagaaaaacacacataattaaccacaacaaacccaacaaatgaacaagaattgaagtgcataacccaattggtgtagttcaattggcaacacatagttgagtttgtgggggaggacctggattccatccccacagaatacattctcggggaggggcaaagagctttaaatgtgacta

SEQ ID NO: 26902 - DNA, 413 bp, Glycine max
tgcacaagatccatcaagactcattggctaacatcaattctcaacaataccctttttactccacttcaagcatgcatacattacttctgtcacaaaagaatttaattataaagcgttgttcctctctttgtcttctaaagtactacttagatatattcatgttcaaatgatgttaatgatgtattacttcaatcagatctattatatgctaaacataagttaaagcacgcattacaaaattttcaccgaaattacaaaattttggtgtgtgtgtatatataatcaaattaatgcataacttatagaaggactaatttcaaccaaaaaaaaaaacttaacacataatttttacagtctaaatatgtcgaacctatatttttgagtctaatttggcaattaagtcggtttataat

SEQ ID NO: 26903 - DNA, 311 bp, Glycine max
  unsure at all n locations
ttatcttttagaggaagtttcaatggaggaagagaatgagagagagagagagagaaagcggcataaaaaattgaaggaagaaaaagagagaagttaaactttgaagtgtgtctcacaagtttctcatttatcaaagttatgacaagtgttacacataattctatttacagcctagtacataggaagcttccctgagaagcaaggaaggtagcttccttgngaagctatatgaagaaaacttccttgagaagctagagggaggctactcacacccttttcatagctaatctcacccccattccaaaatacat

SEQ ID NO: 26904 - DNA, 414 bp, Glycine max
  unsure at all n locations
tgcatgtgcttgtgtaccttattacgtttccggtctcttagaaaatcgatggccaaatctccaaacaagtgaatatcaatttgttcagttaaatcatatggagaaatagagaccgtcatgattcttttcgtggacgaagtgaagtctaagggttcatgttttgtatataagaaaattcttaaattagataattagctgtaagtattactcagacacggcaaatcttcacatttgatagtcgaccaagtaatttacttcaaatccagaacacttaagattaagattagaggaaaaatttatttttttactagaaagataaaaatatctcttanaattaaaagttatctattatcatagaaaaaataagatataatcatatatttctttatttacattatcttataaaggaaattg

SEQ ID NO: 26905 - DNA, 207 bp, Glycine max
  unsure at all n locations
ttcctttggcacgcattctttgaaccgggcatgcanncaatctcgtgaacgaagaaagtatagggctatcgcaaatcagaaagaacttctctgtgttgttgtgaagcaagtaactctcatttgctttttccacaagaagcctctgacagggctcagtcaataagttgcagagtctccgaatgaatatgtagatcgaacacccgtatt

SEQ ID NO: 26906 - DNA, 432 bp, Glycine max
cttctcttcatcctttgccatatggaaaatagacatttttttatcacctctaaaggttctaggagcagtaaaatacttactagttgttatcaactacttcaacaagtggattgaaacaagaccactgcgggaaattatggccaatgaggtggagaaattcacccggaaacatctcatttgtaggtacgacctaccatgcgccattgtcatggacaacaacactcaattcaaagctcagacttacaaagaattcctgacatgactacgcatcaagcaccaagtcatctctttcgaacatactcagaccaacggtcagacaagggcagctaacagagtcatcctcaggttcctgtgtactacactcaacaagtctaagtgtctatagaaagataagttcttcagtatactctgggcgtaccattgttcacccaa

SEQ ID NO: 26907 - DNA, 270 bp, Glycine max
agcttgtcatcaatgcttaaccaccatggatagaatcgaaaaagcttaatgatttttttttaatatatagtaggggttcttgaccatattgaaccccggggacaacaattgcttcaaagacagagacaaggaagaggttgctggacaacaggatcaacaaatgacctatagtagggttcttgacttagatcgaacctgaggacaacgatattaaccaacagaccacacaacaaatgaataaaaggacaagagacaatggagctgcacaac

SEQ ID NO: 26908 - DNA, 429 bp, Glycine max
taagctctttcaactgcacaaggctcttaatatttgaatagtatccttgtggaaccttcacccgacgaagacactaacaaaaacttatcttctccttcttggacaaagtatggcaggctgggggcaagtaaattttcttcccatcagaccttgtatgcaactgtgatcgtatacccatatcagctagatcttgacgggtattcaagccatccttcgtcttgccttgaatgttaaggagcgtcccaatgactctatcacagacatttttctccacatgcataacatcaatacaatgtctaacgtcaagatcacaccaatacggaagatcaaagaaaatggacctcttcttccatatgcaactttgacttttatccttcttttgggtcttcccaaatacagtattcaggtgttcaacccgctaatatacct

SEQ ID NO: 26909 - DNA, 380 bp, Glycine max
  unsure at all n locations
agcttgttaaagaacttagaataaataaagaacaagcttgttcgcacatcgttcgtgtgtatgatatccactccacaaggtttgaagtaaaggaaaccttcaaccctataacgcaacgtggcagacaaaagtgggcagttaacttgaatggtcatcattgtcaatgcggaaggtattctgcgcttcactatccatgttcacacattattgcagcttgtggttacgtgagcatgaactactaccaatatatagatgttgtttacacaaatgagcacatcttanaagcttactccgcacaatggtggcctcttgggaatggagcggttattcctccttctgatgacgcatggacacttatccctgacccaactacaattcgt

SEQ ID NO: 26910 - DNA, 420 bp, Glycine max
atttcttcttctctttcctcgatgggagaaattagtttctccttatgctcttcttgaaatctcttacttttatccatgttgatcccacctaaatcaaactcttcctctttggatagtcctaataagttagatcaaacattttcttgttagtaacttagaatccttagcaataaaacatattcaaagaacacatggtcattgctaaataggtgcatgtttagattaaaatttagtagtacttttgttcttccaaactttaattcaaatatagactatgtctatagcgataagtaagagttgagttattcgtcaatatttgaacttgacttgatcaattaaacttgtttgtttaattaaattaataaaatttaagtttaacttgagtttgattatttcaacaagtttaaatctaagttttac

SEQ ID NO: 26911 - DNA, 304 bp, Glycine max
agtgctttactcggtatggctcatttttcattaaaaggtcaaacttaagacttgatgtataggatttttctagatgttccatggttgacatggactgttatgatggatttgatattcggggggaatttcatagccaagtggcaggtggacactatagcacctaaacatttaaagacagacggtcgagaagtatgttgtaggtggtgtgagcatccattttcatatatcaaattttcagacttttctattgtggtccctcatggacaaacttaatgtataatcatatgcatcccttggttcccac

SEQ ID NO: 26912 - DNA, 429 bp, Glycine max
  unsure at all n locations
tgaagtgaaagaaaagggagcatggattagaacgtagattcagatctaagacgcaaaacagagcaaggaagtcaaaaatctcagctttcaagaggattttaggtttaggagtaatttataggttcgtagaggtggaggagacatccccaccactatgtaatatgttattttcttcttaaagtataaaaaagcaagcctacaaatcaatgaatttttttattttatttttgtacatgtcattttgttgattttttttagggattatatgtattcttgattgaaggttttttattttttaatttaatgttgtggtaaggtatttatgatatattcactttagtttagtaatgctaataaattattaatatatagtcacattaaattcaattacgataacttaaaattcgttntaaattcaatactaataag

SEQ ID NO: 26913 - DNA, 394 bp, Glycine max
agcttgtcttcatttggtattttattcacccagtcttgtggctctacacaagggtgtctgcaaccttctaaaatagtatctccttcatcctattaaaatcaaaatgacaatgttaaatgctattcgtaaaaagatccctccaaccaaaacaagggataaacagagaaggaaggtaaatgcgagaagaaaagaatgtagtaattgtgaaaacaacaaattaagtaccaatgaagtgatgtcaggccttgtgtagggagtaggacaactagaagccaaatcagcaaatctcaactatagattcctatccatgtacattctttaaaaaaaattcatggttagtggggctctactaaatgttgtcatgacaagagtatattcattagacatcaaaatg

SEQ ID NO: 26914 - DNA, 409 bp, Glycine max
gcaatttcctcgtttgggcgaggcaatgcttttcgttcacattctaagtttctatcatcatcctgtgattaagatttcaaatatatatgaatgtaagaaagtgctgtacaaatttaataacttaattaagagtaacaaatcaaacaaaaaaaaaacagtaagacaaaaatagcgcaaaactgatttgaggagcatattgaagattaaaatgctggtgtaaatggttgcttacaattttcattaatctgcatgtgatgaatattcatgttcatgacgaactcaactatattctccagttacgtacttgatacaacactgttatctttgttacaagaacattaaacttttattaacatggaatatacttttttcaaagaaatcaaagtagtttttaggtgtgtaccccaaa

SEQ ID NO: 26915 - DNA, 212 bp, Glycine max
acaatctcacccagacccacaccttcatcacctgccttatcttcctcaacagaaaatacagatctttcagactctaaaaacgagacattattcactgaaattaaaccggtttgtggaccacgcttctttggactagcaatctcacccaggactgcaccttaatcaacagcgttcaagacagaccctgaatctgcgacactactgattcccat

SEQ ID NO: 26916 - DNA, 420 bp, Glycine max
  unsure at all n locations
ntntgactcctgagtatttggaacttgctttatctctttttctttagcatcatcaaaataatcttggaagtcattgcttccacaaaatgaccaagaagtggcctatgcttctagacaactcaagactcatgagaggaattatcccactcatgacctggagttagctgttgtagtttttgcccttaagatgtggaggcattacctgtttggctccaagattgaggtgtttagtgatcataagagccttaagtacttgtttagtcagaaagagttgaacatgcgtcaaaggagatggtttgagtttcttaaagattatgattttgagcttagctgccatcccggcaaagccaatgtagtggctgatgccttgagtaggaaatctctacatatatctgccttgatgattagagagatggatct

SEQ ID NO: 26917 - DNA, 265 bp, Glycine max
tctagctttactatgcaaagaatatccaaggaaaattccttcatctgacttagcatcaaactttcctaagttttcttttccattgtttaatacaaaacacttgcaaccaaaaacatgaagatgcgagatgtttggtttcctaccattgaatagttcatatgaagttttctttaaaatgggtcttattaaagccctattcatgatatagcatgcagtattaatggcttcagcccaaaaatattttggaagaggagtatcatttaat

SEQ ID NO: 26918 - DNA, 420 bp, Glycine max
  unsure at all n locations
tgcccaagctaagattaagatttgggtttttactgnggataaaatggatactgccatcaatattgggtataatattgtgattatgcattttttatattggcatctgcgtgataattacttatcaagttgtttgaatatgcagtttctcttgtcgcttgcttagacaaggaatgaaacagattataattcatttggagattccagatattcaagcattagaaaaggttggagacaagatggctattgccaaggtaaaataaatttcagcctttaatctaggttttctttagaaagatgtagtttgcatatcgaggattctatataattacagtggacatattaacaaattggttttcttaaaatatttcaaaatcctcataagatcttcatacattagaatntagagaaagaatgaacaca

SEQ ID NO: 26919 - DNA, 297 bp, Glycine max
tctagctttttttaattcaggataaacaggcagttgtaacgacatgaaaggtatgagacctaagttctgaaatgcttgaatgcaatcaaaactttcagcagaaaagaattccatatctatgaatttatggtcgatgatggagcgagatgagaaaaggcttgagtaccgattctgctgttcctaggaagataacagtttggaagaggataatgacggtggaattggtgttgtggatgcgctggtggttccggaacgatgagctcttgaagccgaatcggatgcggatgaacccttatg

SEQ ID NO: 26920 - DNA, 371 bp, Glycine max
gcttaaaggtgcgaacccaccatatccatttataacattgtgaacgcgtctactatcattgagataatctctttctctgatggtggggacgctacttgagctgacaagtctctccatctttgggcatatgctttgaaagatccatgccctactatagcacatgttttgtaattgcatcctatccgaacgcattatactgacactgcctaactaaggcaaccactatgtccttccaataatggactcggaagggttacaagtaagggtaccaggaaacagctaccccagtaagactatcttggaaggaatgtatcagtaacttcctcatcctttgcctatgactccatcttccgataatacatctttagatg

SEQ ID NO: 26921 - DNA, 248 bp, Glycine max
ctcgacccgggatccttaagcgacctgcagcattctgcttttaaattattttctaaggtagagtgcagtgccccaactgttagcctctcgtaaagcactaataaattcttgatcactgcctataaatccttttgcaaagcatgctttcctaaaagtatcatacaccacgatatcaacggttctaatgtctatgaaagactgtggacctttatcagacgaaagcatcattctgaagaaaaacgattctg

SEQ ID NO: 26922 - DNA, 421 bp, Glycine max
agcattctgctattgaagaaataaattttatatgcaatgataaaataatgaaaacaaattcagcaaaatcatgtttggctgcaaaaagtaaaaacaaaaagaagtttaatccacatgtgttgaagcaaaggaactacataagatttataaaagatattcgcatattcaagtgtcgtttgtgatatttctacacacagatataaaggaacaattacaaatatttgttatgttccatgcttcaatatttgattagatacataatagtatcaatcggtagagtttaagcttgaactaccctcacaatacaatttcaaagaaatggaataagagaaaaacaaaacatagaacaaaatacaacgtctaaatgtaaggatatggagaaactacgataaaaaaggagtgaggaaggagaaacaaactc

SEQ ID NO: 26923 - DNA, 357 bp, Glycine max
agctttttagttttcaagtgccaattcgtcctcttctttagtccagtcttcttctggcttcaattcatcagtgggctttccttctgtgtccagcatcttgggatgttcccagcctttgatgacagctttccaggttctgctatccagtgatttgaggaaggccaccattcttgctttccagtattcatagttgcttccatcaagaattggtggtctgttcactggtcctccttctttctccatgttcatcagaatttatctccccagatctcactctgtgatttcgagtgttggctctgataccaattgaaattctgataccaggggacagatgtcgtacaggatgtcacgacatca

SEQ ID NO: 26924 - DNA, 419 bp, Glycine max
  unsure at all n locations
tcttntggaccttgaacaagcaatcaacttctctttcttaaccatgctatgtgctcgcgactggtccctttcttcccttcgcaacttgagttcattattgctaccccatagagctccgcgaaatttgttccggccatactcttccttgcgagccctcttggtctcttgttcaagggctcttgcggtaattgcattctcttcccgtaacccggcacactccttccgaacgtgtgtagcggccaacttgaacttctccttggcaagttttgcctttcctaactcgcttttgagagcttggacttctttgtcttcttccggtgcttcaaaattctcttcgctgacgacttttaacttggcgagccaatctaaacctcgtatatgaactttcagccattcgtggtacccaccaatgatgccat

SEQ ID NO: 26925 - DNA, 300 bp, Glycine max
  unsure at all n locations
gaactaacaatcctcaagatgaggggcgtgctctagaatcccacatggactactcgaatggccagactcctgtggctctagctgtggccacgccttacatacagttgagcatgtcgcgcgagctccaaatgtaaaagaggaaaaaatgatgatgacaaaacgactatcgacagcgcgaagcacatggttaactgaaagcttcggagtggaatgaggnatcatgtccgcagattatgcatggcacgaaattacacagtatgacgatactggtcctggactctgtgaaaagcttgatttcca

SEQ ID NO: 26926 - DNA, 336 bp, Glycine max
agcttatcatttattttgaactacaatgattacaagagtcacaatttagcatataatctcaagaaacaaattaattgtacatttgatgttaacaagtcatacaatcacgtaaatttcatcatcagatgaaacaactgatttgttatcaagagaacaaaaagcatgaaaaaataagtcacggacaacattcataagacaaaagttaatactcaatagcatgcaattacccatgaggcaaataataccactatgtaaagaatgaatatgtttaccttctttgcatactttgtgttcaatgtaggaatatggtaagtagtagagaaggtatcacaaaat

SEQ ID NO: 26927 - DNA, 412 bp, Glycine max
  unsure at all n locations
ntatatacaaattaaaaaattattaaatagccacaagtctagaaaaatataattacatttgattaatttatctttttattttattgatattatctcttcttttactttatagagatgtcaaaaaactaaataaattaaaagtggacaactaataataattagtgtctttttcaattgagaagggtcaaaatacactttccaataactaactatctatcaatctctatgtgtgttaattttattaatcaaatagctgaattaaaagtttttattaaataaatgaggtttataattacttcgttaaaaaatttcatctaatgtaaaatgtatttcttaaaaatataagtaaaagttgattatagaactacatatatacaaatattaaatttatttaaaatttaatatatcgatt

SEQ ID NO: 26928 - DNA, 337 bp, Glycine max
  unsure at all n locations
agcttttatccaactgtaaaacttggcaataacactagaatggctgttgtgggaaaatgtatcattcgaatgcaagtgaatggatttactcaggcaatttctggtgtctattatgttcctgaacttaagagtaatttattgagcatagggaaacttcaagaaaaaggcttgactattttgattcaacatgggaagtgtagggtatatcattntgcaaaaggattaattatgcagacagatatgagtggaaatataatgttttctttgttggctaccatgataccaaaagctttctcatgtttccaaattgtatcagaaaatgaatctcatctttggc

SEQ ID NO: 26929 - DNA, 430 bp, Glycine max
  unsure at all n locations
tatccaaataattnttcattgggtttattgggtcaccctctagcggaccatctgcaaatgtctagttttgcaaacttacgcacaagatatcacaatcctcagtatgaggggtgtgcgctggaatcccacatttactagtattatggccacaataatgtgtatataactggaggcaacccatatttggggttgagtttggcccaaactcaaaattgtaaaagaaattattaatgaaaatgatagatagacaatctttagcttggattagatggttaagtgattgcttctgggtggaatgtggtctcatgtttgcgtgttatgcagggcacgagttatgagaatatgacgataattgtacaaaactatgtggagagcttgatatccaaatatccttattggaacagaaccttgggtgctgatcacttctttg

SEQ ID NO: 26930 - DNA, 334 bp, Glycine max
agctttatttgaatcactaagtaagttgctaacttaattgcatgctgtacaatctccaccctcttctgttttgcaggttgtaggttgtgttatatgtggtggagcacatgattctagctgctgcattcccacagaagatacaacacatgaagtgaactatatgggaaaccagccaagaccaaactttaattcaggtgggtattttggatttcaacatggccagcaatataatcagcaacagggacagtggagaactcaccctagtaatcagttcaataaagaccaaggtgggccatctaacagaccacagcaacaagggcctagtctttatgat

SEQ ID NO: 26931 - DNA, 425 bp, Glycine max
  unsure at all n locations
nttactctctggtaatcgattaccagaggatgtaattgtttaccagtggccaaatacgttttataacagctataaaaatttgaattcgaaattttaaaagctgtaatcgattacacaattgtggtaatcgattaccagcagttagtaaacgttttaattcaaattttaaaagctgtaatcgattacacaatttctgtaatcgattaccagacaggaatttcagaaaaataatttcaagagtcacaacttttcaaaggctttactcatgaccaccaatggtctatatatatgtgacttaaacacgaaattgctcagagattttcagaacaacaaagtgtttatcctctcaaaaagcaatttcattttatcctcttaaagaattccttggccaattcaattgcaattcattaaggaattaattgagt

SEQ ID NO: 26932 - DNA, 281 bp, Glycine max
agctctttatgaagtacctttttcattttgcaagtaggattgtaatatcaagaagtaccaaatgattgtatgaatctattcttttgttgtgttatacacaagtccatcatactatccattttctactgaaaggcttctgcctttggatacattggtggtcataagttcttgtgatggaaacaccctctatatctatggaacaatgctatgcacatgtaaccctcttacactgcaaaatagagtgagctccattcactgggctgtcaaacatcactatggat

SEQ ID NO: 26933 - DNA, 432 bp, Glycine max
ctttgataaataacctgtcatatactgcttgagcttatcttgttagcctatccaagcttctttttcattaaggatcatgtccaccttattacaccaccttcttatggaagtgataccatggaagtagtgagtgttgggttaccatggaagatccacttagaatgagatttttggtaccatagaatctcctcctcgacaagaagtttttggtattcaatccacaccattctctacttctccaacatcagacaattagattagtgtttgagatattctagagcttccttaataccttttcttgacgaatatatgcccacagatatgtttattccagatctagagcttcttcttaaacatgataatgtgcatattccaagaatcttgcttctgccaattatcacccatgaaccattcaaaatcttcacgcgatat

SEQ ID NO: 26934 - DNA, 358 bp, Glycine max
agctttttattaatctccatcatcaataactttggtcttcgatctcaccaaaattgaatcattgagtgtgattgagattggtagtcatacaaaagcacaagtaaaatcttcattgtgaatctttacaattgcacctttgttaactgctgcaatcaacaatggcatgtaccatacatgtttcttaaaaataacttgaatttcgtatggcataattgaggcttcatgtgatttcaagatatgatgattttgtttttgggatatgacttgtgagtattaatgctgaatatgtcttaagtttagaatacttctcgagtatttaacatcttttatgtatattaaaagttgtttgctctatatt

SEQ ID NO: 26935 - DNA, 432 bp, Glycine max
tgctctaaatttacattgatgtttgtatttatgggatgttgttatatgccatttttgctttaagagtaatgtcccactggtaaaactaactttccaaatgtttgccttcgcaggaatggcctcgaggaagcttgcctcaaagaggtccaggaaggacaaggcggccgaaggaactagttccgcctcggagtacgacagtcaccgctttaggagcgttgtacaccagcagcgcttcgaagccatcaagggatggtcatttctccgggagcgacgcgtccagctcagggacgacgagtatactgatttccaggaggaaatagggcgccggcggtgggcaccactggttactcccatggccaagtttgatccagaaatagtccttgagttttatgccaatgcttagccaacagaggagggcgtgcgtgacatgag

SEQ ID NO: 26936 - DNA, 360 bp, Glycine max
agcttgttcgcagtttaaaaatacgaatcattgaaatattaaacatcttcagaaaaaaaaggttggactgataatctgtgaaataataaagagaatccattcatcatatgatattggaacttcattactgcatgttctctttctttgctatgaaatgacatccttggagtctatcttcataacatgccactagaaaatgacttgggatcaagaactgtagtggtcggcttcttggattgatgttttacagtttcataataagttttgattgacatctgatatggacatggtagatgtcacatctatgccaatgcttcatttgtaataaagtcgacacacagatgtgcaggacatttaaag

SEQ ID NO: 26937 - DNA, 422 bp, Glycine max
cctgtttagtgagaagataatcaaaacattttcttcttttaagctgagaacatcttcaaattgtgtctaaatattattacaactcataaccaatccatagtcaaaacgacaaaagcttccaaagagctcataacattttaagttcgtgctcaatatcattctagctcggaaccaatacatattcgaaacagcaaagtatttcagatcatcagaacagaaaatagttccgagtgaaccaagcttaatgaaaatcatcatgttcaaggcgggagattgcaacagaagtaacgtcagttatcaatggttctgtcggttcacctatattgaaaaataaaagttagaatataaatatttaacttgacaaatttaattcaatctttataaagaataccttcatcatcagactccatttcagtgagtaa

SEQ ID NO: 26938 - DNA, 273 bp, Glycine max
  unsure at all n locations
tgctgcttttaatggttagntattttcaaatcataatagcagctggatcgacaccttttcatgatttgaaaagtgtggaacagcatgtatggtggaagacgagtaagaatatctatctttccaaaatcttggagggcaattatgcatgtgttctggattggattcacgatcctgacatgctagtgtatcgtgttggagctccgattataagttcgacaagttttgctgcaacattcattacaaaagcagatcagatgcttaaagtaatttatg

SEQ ID NO: 26939 - DNA, 331 bp, Glycine max
ttcaataactgatatgaaaagtcggatacaatgtttaaaaagctgaaagcgattacgcaattgtggaagacgaacaccagctatatgaacaccctctgtgtcatacaatagatactgcaatcgatcacacagtagcttgtgccgattactggacatgtctctctcacccctactgactagagtcacatctcgacaaagaccatactcatgaccgccgatggcatgtgtatatgtggacataagagagatatggcgcagagatttcaaaactcattggggatatactgtcaccgagcaatagaattttatcctctatgagagatccttgatc

SEQ ID NO: 26940 - DNA, 303 bp, Glycine max
ttagcttattatctactttttcaaggattaaaacctttacatgaagcattagttttctattttaagaaaatgtcttataattaattagcatttcctttaatttttataagaaaaattatttgacaattaatccttgtttttcaagacatgaaattaagaatagtataaaagcttatagctacatgtattgtattggctcgtattggtttaattgtgattttcaaagataggagaatcatactatgtgttcttccattatatatatatatatatatatatatatatatatatatatatatatat

SEQ ID NO: 26941 - DNA, 415 bp, Glycine max
tgcagccattagaagaaaaagaacatgtgttcagaagtatgactgattttgttagtcagtttgtcagattgattgtgagggaatgcattgatcgtatccctgtgagagtatgatccttaaattttgagaaaaacgactatcatttagtactgatttttgcatgaatctctgaagtatggactgaatgcgtgaattgaggatgatgaaggccatgttttgattgtgatagctacttgccaaaaagctgaccttgtgcttgaatgatttatcccttgcacccagtttgagctgaatgaattgttgattgattgaaccttgagcctatacagtgttatctcttgctaccttgccttatgttgtatgagagcatcatccacaaaaaagctaggttcatggaaaatttgtcccatatttg

SEQ ID NO: 26942 - DNA, 344 bp, Glycine max
tcaagcttgcttctacaatctccccctttgtgatgatgacaaccctgaaatcaagaaacacatacacattctttgtcctagtcgatcactcacttaattctccatattctcccgctttgttcttgagtttaaccttcacttgaaataaagttatttaattatatgagttcttgatttaattcctattttctctccccctttggcatcaacaaagagccaaaggtcgtaagtaatataagaaccatacataaatgactaatcatacaagagaatagcaaacaattaaacaagataacataatgtcataccctaatttcgtcccgggattattacttgatgacctg

SEQ ID NO: 26943 - DNA, 349 bp, Glycine max
tgccagtggtgcttcgtatggagggggaagtggtgatcttcaatgaggtcctttaaaggtgagtttccaccatggagatgcccggacagacaaaggagaataggtggaatgaggcgccatacactagggaataagccgtggaagaaggagcttgaccaccatgaggagccttggataataagcttggagaggatgctgctatgggggagaagacagacggcgacacttagagaggggggagcacaggattgaaagacgagaacgagacagacgctgaactttgaactgtgtctcacaagactctcatgcatcaaagctacaacaagtgtcacacattcttctatttata

SEQ ID NO: 26944 - DNA, 360 bp, Glycine max
agcttttgattttgacttgataaaaccttttcttaagtagaggtgtttgatttgatcccatgtttactagaatgaaaagttttgtttgaattaatacttcgatatcctatcatggaggaaaacaggatgcattcatgaagggatgcttacgctaggcatgacacaaatgcattttacggacaagagagcccgaaagatcatcctttcttacttgcaacatttggcaacacggtgcccccatgtatgcatttaagaaggtgatacggaccttctgacttcctgcaatacagacataaatgcgtaaaagtgcatggttgatagcacaaaagaggaacataccagcatggaaatatcatcaaa

SEQ ID NO: 26945 - DNA, 422 bp, Glycine max
  unsure at all n locations
ntggtaccttgtactgtacatataagactttgattcttatttaaagtttaaaataatgatttccaatatgaaggaatttagtaccgttagttattatgattattcttagtatttttttgtttcaaaataattatcatccttcattattttatataaaaaatattgcataaataaaatagaataataattttacaaaattaaacttatatcattattaatatataaagaatataaataaaagaagtaattaatgttacattacaaattaaaatattaaaatgataattattttaagataattaagatattaaaatgataattatattaaagttgagctaaaacagttattttcattttttttctcaacataaatatgtttaacatagataattttttacttttaaggttttagagcatcctcg

SEQ ID NO: 26946 - DNA, 270 bp, Glycine max
  unsure at all n locations
tctgctttttatactganggngnnagaggagagattggttattattatcttgtctataagatgcttattctgccaagcaaacgaggattccttacacaaccttgttgaaccttctttttttaccagaagtggatttacaacactcttctatttggatggctggtgtgtacttaatgctactaattcagtttcttgaaaacaaagtggctatagagcttacacgagcagaatttgttgaagcacaagaggttggttatcattctattgata

SEQ ID NO: 26947 - DNA, 406 bp, Glycine max
tctggtgttctgctagcagctccgatatgttctgactatgaaaacgtgaataagaacatcacacccagaagttaattgaaatcctgacaccaaacatatacgtatacatataacatagcatatagcataggaacctaaaaagtcacaatcatcagtttgactataaataacagaagaagaatcaccccccattccatatacctttcaacctcaaaattgcttctcatgtttatgtatggagaatagggccttgctggtgaaggtgaggagatctgattgtacaaaccagacatcaattatacaagaataagggctgcaagttttgcacagaaagactagagacaattcaaggtagcaagagacaagtgaaagcgcgatagagatggggtctggcctctaagatcct

SEQ ID NO: 26948 - DNA, 371 bp, Glycine max
tttgcgtttttcttgtctctgaaaaaatacaaggcatcattgccttatataggcggaggacaaaacggactagaataatgacgctgtccacttccatatggatttaggtcgcacgccagcagttcaccaccttagactaacatccatattcgacacaaactgctcgctgcaatgacacaacaacttaaccccgacaataaacattgagcgagcttatgcgaagatcaaacttgctctttggaactggctatgagaacatatcagcaagattgcgcatagagctaatcttatgaacattgatgatctttatgaccgaacgaagtgatatctaacatgtatatgctaggatgtatcatgatgaacctgatcct

SEQ ID NO: 26949 - DNA, 358 bp, Glycine max
ctataaaactccgctatggctgctgctggccatgttccccctttaacacttgtagccattcatgctgagctcttaggtcacccgacatataacataatgtctacagcggaccaaactaccctactgcaaacatcaatacaggggctaaaacattcccatgctggacatgctgcggcatatggtcagcctcttgctaagagtccttcgaacattggcaagaatatctctccatctatcttgactggcaatgatacgacatgaggatatggtgcatggctgacatctaataatacaattggtttaatgagacccaataatattgacgaaatggtggatgttcacaataacaacatgctga

SEQ ID NO: 26950 - DNA, 347 bp, Glycine max
  unsure at all n locations
agcttatcaccactctccttcataccactggccacaccaccaacaacttcagcttcgtgaatctcacttgcgactcccaatttggcgtcatctcgatcctcttccccgcaccgtactctccctctaatgccaccatcctcttcttcataaagaagcgtgatggcactagaaaaccactgagcgccactacgctgaactttctcctcatcggtagggacacatcgttggtggcgctaagctggttcttctgactcttcatgaaccaccccatcgtggaagaaaagatcctcgcagagctaacgttggtgcttacttncactcatggcggcgaccgacgacactggatg

SEQ ID NO: 26951 - DNA, 431 bp, Glycine max
tcttcggagccatcgcctacaaagacacatccaactaatagttagcatgaaaattattttgcatgaaatacataaccatactattttagttatcccaagtatagcaaccaagaagtcaaccaatttttgtgtggtctttagtaattgtaggtattaccatacaactaataaagatcaccactcaatgtgtattattttgaaggaaagaatttgacattctacagcaatttatgcgcaatgtacccgccttggtgcaacaagtttaaccaaacaattaggccagttcaattcaaacaactttaagcattcatatgacttatgcaattgcatctaaagcaatgcccaaaacttcaagcttagttcatacccttggcatttaatttaacaacctaagttgatcatgcacctaaaataatggctgaacatgtgta

SEQ ID NO: 26952 - DNA, 357 bp, Glycine max
agctttatacaatgtgtcataagatacaagtatcattcaaggtaagctatttggtcaaaagagcttgtgtctatacaattcatggccttcatcatgttctgagttagacaaatcattctagaattcagagatttatgctaagatcaatattcacagttagtcgttcactcacagagtaaggtcacactcttaccggttttggttcaagcttttctttcacaatcaatctgtctactgactaacaattctaattacaagtttacattcttgttctttctttgtctaacatacacacttgctcaaactcatgataagaaacacacactgcatcacaatcatgcgttcaattcaaaataa

SEQ ID NO: 26953 - DNA, 426 bp, Glycine max
tgttaacccatggaagctcctaatatctcctacactttcggggtgttccattcttggatggcgttgattttctcagggtccacttggaccccatttctacaaactacaaaccctaagaaaactatattatctacacaaagggtacaattctctatattttcatagagggtgtttttcctaaggactgaaagaacttgcctgagatgtcctaagtgatcatctaggctcctactgtacactaaaatatcatcaaaataaacaactacaaatatacttatgaaatcccttaagacatgatgcataagcctcataaaggtgctcggtgcattagtgagcccaacaggcattactagccattcatacaaaccaaacttggtcttgaaagcggttattcactcatcaccctctttcatcctgattaggtga

SEQ ID NO: 26954 - DNA, 374 bp, Glycine max
  unsure at all n locations
agctttttttgctttttatgtggaccaaattatcaacacttagtgagtgaggttctgttgtaagtgatgaggactctgctattgatgctgaccacagtctaatgcggaggctggatcgcttggagttgaacatgcaggcgatgttcgatgctcagcaaaagtaccttgagggcttgtctaaacgttttggtaatgaaaaattatctggttattaagtatctgtatgttaaggtatacactttttttaagtgattaaaattaaaagttcactttgcttttgggtttgcttggtgttngatcaatgatcatgcatcatataccatgagacgcatcttggtgctggcacgataagggcattcacccgcttctaatct

SEQ ID NO: 26955 - DNA, 429 bp, Glycine max
  unsure at all n locations
ctaccctatatatagagggccgaatattagtataaacttattagtttatgggagtttcacaacattttgtgtttttcagtccccaatgctaaatttcaataaaatggcttacttgtagatgtgtttccaaaccaagttttatatagctgaatagcatcctacaaatggaaaactagaaaagtaaatgattaagctagaggctcttttactgctacgaatggaataatgaaaaagtaatatgaggctttttcttggattggagatgcatcgaaattttaattaccaaatgaattgtggagtttgatttgccatctgataatttacctactgatcaatgtttatctgcaacggagatatgagatatcattctcactatcattaatatgataaacatcatacaactntaggatcaaatatttgatatgatgg

SEQ ID NO: 26956 - DNA, 371 bp, Glycine max
agcttttccggaattgctggcacaataattctttttttttgcagacattgtgcaatttttttcttatttttcaccaacgccaggcaataattgttttagtacgatcaagctaattttccttgttgatttcgctcaatgataagtttaccatcgaggtcgcctttggtatttcgtgggaactcaaccgccgatgtgtttcggtcgacattggcctgcgctggtaaaagaggcaaagaaaaatatagccgactttggcagcaaaaacaaatccctcgacaaacttggatgataaacaactctagccgacatcggccaagaaagattaactgtcgctgtatcccaaaaagaatcaccggatgaagactatcgaa

SEQ ID NO: 26957 - DNA, 438 bp, Glycine max
  unsure at all n locations
aactcaagcttgcaagacgacatccaattggcagttntcacaccatgatatcaaatttatgtngatagagttggggcttcgccttagactcggtttgccatttgatgccattcaataccatgtgcaatggaaccccttaactacgaagaatgtaacaccctaatttctcaaaatgtaattataccttaattattttatttctttattttataaagaatattgatgaatttaagttcacaattatataaacttgggaaaaagtgaaccggaattttattgcgtaataaataaaacaacttcatattttcaaaaggaaagcataatgcagttttacttagaagcttacttcttcaatttaaagtggaatataagagatggaacatatctaaattacaaaatatagatatgtgtgtgtgtgcacgcataactatttcccca

SEQ ID NO: 26958 - DNA, 391 bp, Glycine max
agctttccatattttgttaaaaactctcattcaattcatgctcaattttttaacataaaccctacattttatcagatgagtttgcattaatgaaagacatgttactgcaataaatacaaacacgacctgaaatatttcaactaaccaaaaacctatcactctgaaactagcgcggatcaatagcgagcacactggagactaataaagaagagaagtactgtattgtctatcagcctaggcccacattctagcaaagtgtctaattaaaattaatatagggaaataatgaaagatgtatatattaaaaaatagtgcatgcaggtaactggtagataccagtagttcttgccatcaaacactgataaaaatgtaaatctttcatttgcatctt

SEQ ID NO: 26959 - DNA, 429 bp, Glycine max
tgctataaatatccattaagccaaatagtaagcagccttcctattgttattgagattatgaacacataaaaattcatatgtttggctaacataaaattacgagctagcttatatattaaaaacaaaaacacttgaggaagggggtctgagactctgaggttggttggcacaggcagtttaatagattttcatatagatgctgaagaaaatggagttatgcccactcatatttgtgtctttgtctaaacacagaacacgctaacaaaaaagagattaattgcaatgagccctttattatttttctagagaccgattcctcactgtggcatggcatccaaataaacagtttaagagaccttcacatcagccatgagctaacactctaaaactaaaatctcttggattacttgcaagattctaccataagca

SEQ ID NO: 26960 - DNA, 380 bp, Glycine max
  unsure at all n locations
ttaagcttgtatgtgaacgtcaaaaatntgaacgttgggtaagttttcagctataaaaaaattgcttgagaaccttgattgtttacgcttgcatttcatttctcctcactgagttctctttgtgttttttcttgagtgtgagcttgtgcattgttgtgtgcttcttgctttgtgctccttggttcaaatttggtgtgtggcttccttccttcaagtgctcttacccttaccaagtaagtgttttgaaagtaaataaaatttatatatcttgttaataaatattataagtttaagttagttagtattatcaaatattctaagttagttagtatgtaaatagtaggttagttagtattaataaaaattctaagtttaaatta

SEQ ID NO: 26961 - DNA, 422 bp, Glycine max
tagagaggaagcttcaatggaggaagaaatcgagagttttaggggggagcacgaaattgaaggagaaaaagagggagagaagttgaactttgaagtgtgtctcacaagtttcatattcatcaaagttatgacaagtgttacacatgcttctatttagagcctaggtcattaactaaatgaaagcctccttgagaagcttccttgagaaacttccttgagaagctagagtttagctacacaccccttctaatagctaagttcacctccttgaggagcttccttgagaaatttccttgagaaatttccttgagaagctagagcttagctacacacacacccctctaatagctaagctcacccccatgccaaaattcatgaaaatacaaaaaagtccctactacaaagactactcataatgccct

SEQ ID NO: 26962 - DNA, 220 bp, Glycine max
ctttaagcttttatccatttctcgaaaaatcatgcggagaaatgtttattagagccagtgcatacctaaatatcacggaagactttgatgaaattgagacgccactgggtccgacacttgcacctgcactgaccgatgggatcccatgaaaaacaattggagtgagctatgagacctttaatgaacctatccgaggaatgctcataaagcaggggctgaa

SEQ ID NO: 26963 - DNA, 342 bp, Glycine max
tgacaaacaaagctaatcgaagcaagtaatatataaaatctattattttcacaaaatcaatagtgcaaaaggcatttgaaatggtaatatcttttaatattttatattcattttcttataagttatataataataactcattttttattttgtgattgcttttatatgatatatgaaaggttggcgaaatttataaaggcatcatgcattgcattatattatttaatttgctctttactatatttaattttaacagacaaaagatccaatatctagtgaatgatcagatgctgcggaagtttggaaggccacacacacgagatctaatggaacctgtgcatt

SEQ ID NO: 26964 - DNA, 285 bp, Glycine max
cttcagctttttttgatcgtttatattttattgttgttaccttaattgatgtggatcatttatagttaagatgttggctagagagaaaatggaaaattatttgagaggatctaaatttagaggaaaaaaaatgatgatgcgatctatctgaaaaggttaacacgtgccattcagacattaataattatatgggttaattgttacaaaatataactaggactcatgttgcttatcaagcacataatatttaggataaaattaattttaaaaaaaatattttataca

SEQ ID NO: 26965 - DNA, 423 bp, Glycine max
taaaagtatcactttgtttatcaaatttatttaatgtgtatgtcaaccttcctgtaaaaacatgctccctcactccaagaatgcttggagggcgaaggccatgattcgcatggaactcctccagaagattcctcattttcattgcttcttcaagataattgtcctttcaaaatttaaaaaatatatatcagattaaattacataaattttctttccccattcattcattcactcacatacatacagttgagggcagaggaagagggatttctctacaaaaggctggtgaaccacatattaatccaaggtcaataagtatgcaacagtccaaatgacatgtaaaagtgaaattcaaggatttggaagaactgaacaagtacaacaggataaaaatctcactaatgccatgaccgcaacaggatt

SEQ ID NO: 26966 - DNA, 374 bp, Glycine max
  unsure at all n locations
ttaagcttgtatgattattgagnacccatcacatgtggtactatgtggcggtcgggcgatggtgcacaacaagttttccacatccacaaagcgcgcataaacccaccatcccctgttgcccacctccaactgagctcacgtactcccacgtagcccatatccttttttctctcaacaccgggtccccatcaatcctcccaagctttcccaacatcaaagcaaaacaacattcaaacagcacaagctatcacagccaagcaaaacagagcataggcagaatactctgccaaaacaccaaccaaatcacagcttttctcacttatagaccccagtaacaattacttcgatccaattcgttaaccgttggatcgact

SEQ ID NO: 26967 - DNA, 424 bp, Glycine max
  unsure at all n locations
tgtaggattatggggtacccatcacatgttttactagttggcggncttgcganggcgcacaacaagttttccacattcacaaatcgcgcataaacccaccatcccctgttgcccacctccaactgagctcacgtactcccacgtagcccatatcctcgtttctctcaacaccgggtctccatcaatcctcccaagcttccccaacatccaagtaattcaacatccaaatcatcacaaactaacaaaccaagcaaaacagggcaaaggcagaaaactctgcccaaaacacaactcaaaatcacagcttttcacatacaaataccccagtaacatttccttcgttccaattcgttaaccgttggatcgactctaaaattctactggaagtctctagtacatacgtctacattttgaccgttgggat

SEQ ID NO: 26968 - DNA, 381 bp, Glycine max
  unsure at all n locations
agctttgacgactttgntngagtcgagaatactttattatttatttggacaagtttgaatatgatgtagaagaaaatgaatgtgagcctttttcccctttgaaagacttgtaaaaaaatgttttaaaaatacttttaattaatatttgaatttttttcccttattagtatatatgtgaggggtagatggtgtcacattcatccaccgaataccagataaaacttcaaaaaggaaaaaagaaaattgtacaaatttatggtctatatagtcagccaattaaaatcatagtcctttgatattaaaaaaaacatgcaacaaacgttgcacacgtactcgcattatatttgttgccaaatgagtgaatgaaccaaactatttcta

SEQ ID NO: 26969 - DNA, 420 bp, Glycine max
tcaggaacttctacagaaatggtcagcactgcatgctatatatgttttttcatccagtgtaaggccaattattttttatttttatagtgaaagaagattttccttaataaataaatgagtaaatagatgatagagaataaaatattatgaaaagaaaacataaaagatgaacagaaagtgtgaaggcaagggtttgatatgaacttgtagtctgtttgatagctataatccaaataatgacaaatgagtgtgtaagatgcccaaatgaaaattcttgcttttctcttataaaccatagaatcttgaagtttaaagtgttctcaatttcaaatcaagattttgaagtttgtttttgatgaatagacattaattttggcattggtgatgggttgtatgagattattggtcttctggatataa

SEQ ID NO: 26970 - DNA, 352 bp, Glycine max
tagcttctagagaaagctacatgaagctgactcggtaaaaatgctgcgcagccttcgttaaccgttggatcttctcgaaatttggtttgcaactttgcaagacacatgtccatgatctgaccgttgggatctttgagaagatatctggagtgtgctagaagcctcttaatgaagcttctggaggaagcctcttaatgaagcttctagagaaaactacatgaagctgcctcggtaaaaacgctgcccagccttcgttaaccattagatcttctcgaaatttggtttgcaacttcaaaagacacttgtccatgatctgaccgttgggatctgtgagatgatgtcaggagtatgc

SEQ ID NO: 26971 - DNA, 399 bp, Glycine max
  unsure at all n locations
gggtcggggcagcggtcatttaccaagaaatatccgtttatggcttcaggggcatcatcaacaatattaccgccaacaattacctcaccttcaccgatgaggagatacccatcgagggtcggggacataatagggccttacatgtgtccatcaagtgtttggaccacatcgtggccaaggttcttatcgacaacgactcgtcattgaatgtcatgcctaaaagcacgttggacaaattgcctttcaacgcgtcacacttcaggccgagctccatggtggtgcgggctttcgacggcagccgccgggacgtaaggggggagattgatctcctaattcagattggacctcacatctgttagatcactntccaagtgatggatatcaacccgacctatagct

SEQ ID NO: 26972 - DNA, 242 bp, Glycine max
  unsure at all n locations
tagcctggagaggangcnccaatggacgaaaagaaagagggttcancaagaaagaacgccgatcactaaattgatggaagaactaaggactcaactcgaacatttgagttgtgtctcacaagacttgcattcatcaaaattactacatgtgaaactcatgcctctatttatacactaggtatcttacttgacaatcctttttaagacatcatacttgagaagctttctctgtaaacatcctt

SEQ ID NO: 26973 - DNA, 415 bp, Glycine max
  unsure at all n locations
tggagaggatgcttcaatgtcgaanagtatgagggagttataagagagaggggggagcacgaaattgaaggaataaaagagggagagaagtggaactttgaagtatgtctcataagactctcattcatcaaagttacaacaagtgttacacatgcttctatttatagactaggtagcttccttgagaagatttcttgagaaaacttccttgagaagcttctttgagaaaacttccttgagaagctagagcttagctacacacacccctctcataactaagctcacctccttgagaagcttccttaagaagattcctaaagaagctagagcttagctacacatacctttctaatagctaagctcacctccttgagatgagaagctagaacttagctacacacccnctataatagct

SEQ ID NO: 26974 - DNA, 314 bp, Glycine max
agcttgttgcaccattaacatattttacgtcatacaaattcaagataagttaattaaaaagatttacgcttttcttttcttcctcaagttttctcctttgttgtacagttgatcgagttcatcattcattgtatctatctcttgttgcaattttttatttttttccatggttttataagtaatttcacgtccacgcattaccatcgacttcaacactagagcacaatttacatgatcatctgccgtgtaataagatgaagttcaaacatcaaaccaataaattaaacatatgcttaatatattcaagagtggag

SEQ ID NO: 26975 - DNA, 433 bp, Glycine max
  unsure at all n locations
cttgaagaggatgctntaatggaggaaaagaaagagagaatgtgggagctcgaaattgttggaataaaagaaggaaagaagtggaactttgaagtgtatctcataagactttcattcatcaaagttacaacaagtgttacacatgcttctatttatagactaggtagcttcctttagaagctttcttaagaaaacttccttgagaagctttcttaagaaaacttccttgagaagtttttttgagaaaacttccttgagaagctagagtttagctacacacacccatctaaaaactaagctcacctccttgagaagctagagcttagctacacacacccatctaaaaactaagcttacctccttgagaagctttcttgagaagctagagcttagctacacacccctataatagctaagctcaccctcatgacaa

SEQ ID NO: 26976 - DNA, 287 bp, Glycine max
  unsure at all n locations
agcttgtcttggtttgttattnttaaatcataatagtagctggtttgatacctcttcatcatttgaaaagtttggaacagcaggtagtgtggaagaagaagtagaatatctatctttccaaaatcttggagggcaattaggcatttgttctggattttattcacgatcctgacattgtagtgtatcgtgtttgagctccaattataagttcaacaagttttgctgtaacattcattagaaaaacagatcagatgcttagagttatttatgaagctgaaatgatgatg

SEQ ID NO: 26977 - DNA, 428 bp, Glycine max
  unsure at all n locations
tgcaatgaanattaacataacaatgtatttataaagtttcgacaaattaatacaaaaatgataaataattcttaatataaaattgacatcattttggtccaagttaaatgcattttggtagttattatatgaggcaaggcttatgttttcatcttcctaacatgtaaaattaacatcattttttaacattccttttgataaaattgtatatagtcattgttgtacaaattatttgcatttatgtttcaaatttgtacttaggcatggatcgtaagattacaaatctattctttcatactcgaaacgttctttcaatagtgcaccttaaacttaaactggagtgataataattaaaaatttcattattatttgcaaactcagatctatgtctaaaattaggaaggtggtaacgtttacatatgtaagga

SEQ ID NO: 26978 - DNA, 304 bp, Glycine max
  unsure at all n locations
agctctgctggtttatatgttttaacaagcaangagcatatgtatatcatctgaatccgaattttgcactttctggtatttcaatattttgccctcaatgattaactggaaggtgcagttttgtatgacaaaatggataattagggaatatatttatgaaaattttttaacaatataattttggtggacatggaggtcattttgtgggagactttgtaaagagtatgattcatcaccatagcgcatgttgtaaagctgtgtatcacaagctacatacacccacgacatttattcatttcaagag

SEQ ID NO: 26979 - DNA, 55 bp, Glycine max
caaacaggggagagagggcacaaaagaccacgcaggggccaacacgagagcacca

SEQ ID NO: 26980 - DNA, 380 bp, Glycine max
agtactctcattttttatcaagtctgcacgattgtgatcaagatcaaaagctcgccaaaattcaggccagttacatagaagtcgaccagatcctacaggggtgttctccacaacaacttgggcgggagcaggaatgcctgcattctgcaaaccaactgcattgctgtcaggatcaactgaatttgaaaattcagatcctggagcttcatttgagtttgttgataccgcaatagctgaatccacaaaagttgaatgcccattttgaacttctcctgtagaagatccattgttcaaattttcactagtgtgaacaactgatgattgaatatttgaagcctgtccagaacctgggtccataacagttttatgatagctgtctg

SEQ ID NO: 26981 - DNA, 432 bp, Glycine max
tgagcaataattaagggggacttgattagcctcacttttagcccatttagaaagccactcctactcccctctagaaaagaaccatgaaacctaagttgcatccacctggtgcctcctaaagaaattcttttaaaattgacaagaagtccttaaatgagactcatttgttaccatcccaacctaaacaaatgtaagaatgaaaggggtaaatcttgacacccttccaagtgaagattgtcttcgcaaaagaaagtccccaccaaaaggggatgagggatcattatggacaacccccctctggattgaatgaaaaaacaaaaaatgaaacctcgttatctacaagacaaccccttcaaaacctaactacaatgagaattaaaaaataagtacaaccaagtgaggaaatgatagttgacaaaaagagatcagaag

SEQ ID NO: 26982 - DNA, 299 bp, Glycine max
tctaggcggcgaagagacttcgtccttgtgatatgacctagaggctggagccatgacagatcgatccccgtcagccttccgctgcatgttcatggtgaaagatgaccactggatgacctctttgaagcttaaagatgacccctccatataagcccacaagcaagctgcatcaactccaacctctatatgacacatctcacatcctttgggacatgcatgatccatattgtcacaacaattacttatgctcgaccatcctccacactatcatatatggaccaataagtatacatctgtga

SEQ ID NO: 26983 - DNA, 279 bp, Glycine max
agctttatgatgaatcaagattgattcaaggagttttgatgataacaaagatgatgacaaaaagctcaaaagtcaagatcacttcatgataacaaagatgatgacattcaagaatgagttcaagattgagtcaagaacacttcaaggatcgagaggaaatttgatttcaagaatcaaaaatcaagattcaagattcaagaataatcaagatcaagattcaagacttcaagattcaagaatcaagagaagacttaattcagattagtattaaaaaggttt

SEQ ID NO: 26984 - DNA, 404 bp, Glycine max
attacggacactatagaaactcagctgttacccatgtgagttcggatcgatccgtacctgaatcaaataaacattaaaaatgcagtatctaggaagtgatcctatgtcgtctaccaacgagcaatgatcaaccaaacattcataacagatagtaggaaaatagtaacgaattgggggggggggggtgaaactttcttaacaaaactttcatgagaaggtttattaacatagcttgcctgataatttgcattgatagttacaaacttgaaatgatgcagtggatcgtaacacacacatctataactaatccacctacttgcaatctatagcttacctaccacacccatgtatgactatacttacctacttgataatatttttgaaatactatatctgacttacac

SEQ ID NO: 26985 - DNA, 434 bp, Glycine max
  unsure at all n locations
cactatgatactaagcttcttaacattcacaccaagcaacataacttgtctaattatggagtttatggacatatgttttggcaaatgttaacacttgtaaacattacgatggatttggtaaaagaacaaaagggaccaaattgaataaagacattaacataagggactgaaagagtaatttcctccgttttttttattgatgtaagaattggaagtgactaatgggatataattggttgttcagaaataatcttgtgatgatgtctttctcgtcatttgttgttcaattattactattagggttatagggtgaatcctggcacaacggtaaggttctttacttgtgacctctttttaggttcanatattggaaataacctatcccacttgtatgggtaatgtttcgtacatgtaccctctccacaccccattcg

SEQ ID NO: 26986 - DNA, 299 bp, Glycine max
cttctcacttttattactaagcgcctatacgagaccattactctccgcctttggcaacatcagacagccacagatcgtggcaaccaacactagatgatatatctaaagtgtacataagtcctgatacatgactgcctgatatatgccaatcatccgtattattgaaccgaatataatgcatgcataaataagacatatgcaactatattccaagcataagagactaagtgctaattatcgacagataacgaatgctcataatatgattacgctgaaagcatagccttgtacacggctta

SEQ ID NO: 26987 - DNA, 331 bp, Glycine max
gcatccacctggcgcctactaaacaaaggggctatacacagacaagaaatgctcaaatgagactcaattgttaccatgcacgcctagacatacgttcagagtgaaaggggaacatattgacaccctagcaagtgaagagatgcattgcaaactaaagtgcgcacactagggcgatgacggaccattacggacgaccacggtctggatagagtgataacacaaactatgactgctctatgactacaagacaagccctgctaaacctaactacaatgagaatcaaaacatctgtacgaccaagcgacgaaatgatagctgacacttagagatc

SEQ ID NO: 26988 - DNA, 385 bp, Glycine max
tcaagcttttttaataagatggcctcagcaaattccttatttccagataggaattctatcaatagacctccaatctttaatggagagggttaccactactggaaaacccgaatgcaaatttttatcgaggcaatagatctaaatatctgggaagccatagaaatagggccttatatacccaccacagtagaaagagtttcaatagatggtagttcatcaagtgaaagcataaccatagaaaaacctagagataaatggtctgaagaggatagaaaacgagtacaatacaacttataagccaaaaacataataacatatgccctacgaatggatgaatatttcacggtttcaaattgtaagagtgctaaggaaatgtgggacactc

SEQ ID NO: 26989 - DNA, 420 bp, Glycine max
tgccacccagctcgcccaggcgagcaatgttgcttccttcagaagcttcttccttctggaggaaggatctggaaggcccaagtgggccagattgctattggtacccccctttttactaaatgcaccccccttctattttttggtaatgctatttccgtaacgctacgaaactttacgaatttcgtaatgatacttatgttccttctgcaaggttacgaatccttacgaattatgtatttactcttttttagctttcaaagaagatacggaaactcacggattgcgcataaacacctcttttcgatttccgccacgttatggaatttcacggatcgcgcaagcctacttccttttgatttctgacacgtctcgggacttcatttattgtgcaacaaaggacaccacgtacctcaaagcagc

SEQ ID NO: 26990 - DNA, 280 bp, Glycine max
  unsure at all n locations
agcnttccatgctgtcgtcattccaacctaaaccccttttgagctcgtactcgtgccctaacttcacgcgggctaccatcaaggcagtgctggacgagcgtggttgcactgggggagacacgacataggcgtggctttccacttccaaagcttggaaagacatctctgaggattcttcagcggcttgcatgtatggtgtataagagggacaactcacaaggatgtcttcctcaccggagactatgattagctgcccttctacaataaactttaatctttg

SEQ ID NO: 26991 - DNA, 408 bp, Glycine max
  unsure at all n locations
tgtaggattatgggttacctatcacatgtggtactatgtggcggncgggcgatggtgcacaacaagtttttccacatccacaaatcacgcataaacccaccatcccctgttgcccacctccaactgagctcacgtactcccacgtagcccatatcctcgtttctctcaacaccgggtccccatcaatcctcccaagcttccccaacatccaggtaatacaacattcaaacagcacaaactatcacagccaagataacagtgcaaaggcataaaactctgcccaaaacaccaaccaaaatcacagctttttctcacttaaagaccccagtaacatttccttcgttccaattcgttaaccgttggatcgactcgaanatnntactggacgtctctagtacataaatatac

SEQ ID NO: 26992 - DNA, 172 bp, Glycine max
agcttttttctctatacacctacattcctatacacaaaaaaaaacttttttctctatattcacacgtattgaaaaactctttctctctataccgacatggcctatataaaaatctctattccttttcaaagatttctttttccccttttcaatatacactcattggttcata

SEQ ID NO: 26993 - DNA, 412 bp, Glycine max
tttcaagagacctactctttttgactgttttcaagagttggtcttcttggttgaacactgaacacaagggaccaatgttccttgggttcattgcaagaagcaggatttgcttcttggttgatcattagacgcaaaagaccaatgtcttttgggttcattgcaagaagtgggtataatttcttgggtgttatcactggacacaagggaccaactttccttggggttcattgcaagaagtgggaataacttcttggttgaaatcactgaacacaaaggagggaagtcctttgtggttcattgcttgcaaaggattttacaaggttagtggaaatctcaagcgaattgcttgaggactggacgtatgcacgggttgtggtcgaactagtataaatccggatatgcattctctctt

SEQ ID NO: 26994 - DNA, 351 bp, Glycine max
  unsure at all n locations
tttgcattttagcttgtttgnggagcttctatggaggctggatctttgagcttcaatgaggtccttcaatggtgatttttcaccatggagatgcagcggaaggcaaacgagaagaggatatgggaggcaccatccactatggaataagccaaggaagaaggagcttcaccaccaagaattgccttggataagaagcttgaaaaggatgctttaatggaggaaaagaaagatagaaggggggagcacgatattgaaggaatataagaaggaaagaagtggaactctgaagtgtatctcataagactttcattcatcatagttacaacaagtgttacacatgcttctatttat

SEQ ID NO: 26995 - DNA, 393 bp, Glycine max
tcacacaatttatctttctcttacttgattttcgaatttccaagtatgaagtctttcctaactagatgattgagatgacgcatgtgtatgtgtgtagtcctatgatgtcacaaccaagaatcatctatcttaattatcagacaactcatctcatgagatgatgaatgctcaatgtttaacatattgatattacctattctcttgccaatatggacaacctcaccggacatagcttcactaataagacaacgattcttactgaattcaattttgaagccttagtcacatagttgactaatgctcacgaagttatgctttactccatccacatagaacattctctatctgcagtttgtactaatttccaatatttccttctcccattatctgtac

SEQ ID NO: 26996 - DNA, 155 bp, Glycine max
  unsure at all n locations
agctttttcttaagctttntctgcaaccttttctccccctttggcaacatcaaaaagccaaagaactcggaaatcaacacagttataacaatggagtagcaagatataagtatcagagtattaaatataataagccaaactcataaacaagaaat

SEQ ID NO: 26997 - DNA, 443 bp, Glycine max
ctcataaactaagcttatataagacataccagcattttattgaaccagtccatggaccactatattgggttcagacacagcatacacaccctgttccaccacataaaagggcccaaagaggaaggccaaagaaaaatagaaggagatctgtagatgaggacaatgtcacaggacataagctaaagaggaaattggctgagtttacatgtggaaggtgtgaccaaaccaatcataacattagaagctgtaaaaatattggaattcctgttaggccaaagaaatatgttgcaccatcaacttcaaatgaggatgacctcctattatctcaagatgaacaagctttgaatgaggctaaagaagctgctgcttatgttcaaaaagattcggtggagattaatttatctcagcctcatttgtcacaagatagtgacatggagttgatg

SEQ ID NO: 26998 - DNA, 263 bp, Glycine max
  unsure at all n locations
agcttgtgctgctattaaacgaaatagatntatggttcacatggtgaataatttacactaaaagcatctgcatcacaacatttagaattgggataattaccatgtacatacaaagcatgaagagatagcttgaggttgaaactgancatctagagatcatgaccattanagcaacaaaaagttagcaggggtaataggtgataatgatatagttacaagtaaaaagaatgaaatctcatgctcatatttacgtatcaatgctt

SEQ ID NO: 26999 - DNA, 429 bp, Glycine max
ttctaagtggttagtcacaacattaattgttaaatgttttagatgtttatgtgaacctaatgtcaatgcgcattttctcatgttcaaaagatcatttcttaaataaaagcaattctcaaaatattgttataatgaaatccttagtttatgttatgcagatgcaacacttagaatgttatagtttagaatgatgtgttcagaaagctatagctcacaatgttgttttcagctttcatacacaaacttgttttcatgttttatgagatttttcatactttgatgcatatgattgaaccagtttaagatagattgttatcacaaagatgacttagttcaaatatgtcatataacaaaacatttaagcatgttatgaaaatcttctcaagtatgcattctgatgtagatgaagtatatatgacaaagagtaat

SEQ ID NO: 27000 - DNA, 360 bp, Glycine max
  unsure at all n locations
agcttgtttatgttttgacttttacatgcctaactcccttgagtggcatttgtattggtttttatcttgtatgttgcatcttaatacatatgatatttgtattgcatcattcattatcatggttaatgtgaagaaaaagttcttcaagagacaaaagctcttaattttaattgattacaagtccattgtaatcaattacaacatgttgtttgaagcttgaagagttaagtcttgtatcggtttaatcgattacagttgtctcataattgattactctgttctttgagacaatgacaaatttattcangagtctctgctttaatcaattgccaagtggattaatcaattacttctctctca

SEQ ID NO: 27001 - DNA, 431 bp, Glycine max
  unsure at all n locations
cttagagaatgtttgggtgacacaaggttgacaaattatgttaaagagattagtgaatattgaacaaggtttgccatcttattttgaaatggctttccaaattacttatccctattttggaataactatcctaaaatatgaaaaatatgaaaatcatattttggaataactattatagaataagtaatttagaaacctatttcagaatatatattctagaatataattttcatattctgaattagttattctggaatagggatacatttctagaatggtcattctgtgataaagagagggttaatatatgaatttttaagcatttgggggtgtagcgcanaaaatagggtacaggaagcaattgcccattatgaacataatgatgatggatctggggatggtgcattgatatatcatattcacgcaaagac

SEQ ID NO: 27002 - DNA, 366 bp, Glycine max
agcttggtagttttttaggctttgagtcttaacttatccagctcattcaattgttgctacctgttgctacctacaagcctaagatcaaagtttagaaactatagagcccacatggctttgtgaacaagttcaacaagcaaatggaaattcttcccataaactagactaaagggagacatcacagtgggagtcttaaaggtttttttgtatgcccagagtgtgtcatccaatttcaatgaccaattctttctagatgctctcacagttttctgtaagaccttctttagttacctattagatacctcaacttaaccaattgcttgagggtgataaagagtaataaccttatgggtaacaccatattta

SEQ ID NO: 27003 - DNA, 427 bp, Glycine max
atgcagcccaatccttcctttaagtaggtacggcgctttctagtactttcttgatctccctagtctaaactccaacttttccatttgtttacggatgataaggtgatgctactttgtgtcaaacatcatagtgttgaaagacctttgagaattgagcaatacaaaagtgtgtaccttcatcactaatcaagagtctaggcaatcaaaacctaacaaaaatgtttctctttaagatattaatcatcatctttacatcattggttggactagaaatttcttccacccactttaagacatagtgcactactaccaagatatatctgttgccacgtgaggatggtaagggaccaaaaaaatcaattccctaacaatcaaacacttctacctcctgcatgttctgtaatggcatttcatgtcgtctagatat

SEQ ID NO: 27004 - DNA, 293 bp, Glycine max
ttgcatgttagcttctgatccaacccagcacggtttcgatgcccgaacctgctggatcggagtccgaagcaagaagccgatgcaactgcatgatggagttaaccgccacggcttcgttcggattcacctgcagcatccacggcttcacgtcttcaaggcgccacgccgccacgccacgaaatgcaaacctaacattcacggaccgcgccagctcagcgagcctgagcccaatttcgcggagcgtgtcgcggttgtcggacgagggaagcccaattcccgtgagcctcaacagc

SEQ ID NO: 27005 - DNA, 410 bp, Glycine max
tctccttcatggtttattccctagtggatgacgccttctctcacttcttctcctttatcttctgctgcatctccacggccgaaaatcaccattgaaggacctcattgaagatcaaatatccagcctccatagaagcttctcaatcaagattccatacaaaattaaaagcttatcaattcttcaacatccatggtaactctaaccaacaacactctaaaaaaaattaaaagataaggatcgaatacacttgaaatgtgcaattctttgatttgcaatatttcttcacaagttgatcaattcatgtttgtaaaatgagtgacttttagatcaactttaatctttagacgtattatagttctattcttctttaagactctcttgaaatgtttttcacaaattctgaacgaatc

SEQ ID NO: 27006 - DNA, 188 bp, Glycine max
  unsure at all n locations
nctttcttgcttttatactttgnacaagaatgaagctctgataccacttgttagacaagcggcctcagatatcttaagaagggggggttgaattaatatatcccacactgtttcccctaattacatatctttttcactttttactcaagttataaattctccttaatgacaatcttcttaaattttaa

SEQ ID NO: 27007 - DNA, 408 bp, Glycine max
tcaggttgctcattgactccatattgctgtagagaacttcagagatctgtaccgcgatctgcagaagaacatagaccacagactcttgcaacaggtgcagatgcagatttctgattcatggcaagctgacttactaggttgaccaaggcatcaagttttccctcaagctttttattttcaatagatgaagatgaatctgcgaccacctcatggactcttctaaggacaatagcatcatttcttgcactgaattgttgggagttggaagccatcttctcaatcaaattcctatcctcaacaggagtcatatcaccaagagctccaccactggcagcatcaatcatactcctctccatgttgctaagtccctcatataaatattgcacaaggaggttcttagaaatctag

SEQ ID NO: 27008 - DNA, 270 bp, Glycine max
  unsure at all n locations
tcaagcttttgttatcacctaaaaaccattttttaaaggtccaacgccttgaaatggtcattttcgcttttattggttaaacgtggatttttaaaaagcctaaaatcaacacatagctttgtcacctctttcaaaaaaaaaccaagagatcattaatggtccaatgccttaatattttctcccctttcaaaagaatcgaaaaatcgtttaatggtccaatgccttanatgaccttttattcaatcaaatatatcttgcaaaaaaagataa

SEQ ID NO: 27009 - DNA, 421 bp, Glycine max
tgatttcgggaacttaccggttgaagacctaagaactgattaagaacgttcaaagaacgacgaagaacggttgaaaatctttgcgaaatcacccacggaaatgtcacggaagcgttacggaagcgcctcggcttggattttcttcacggaaacaatttttctcactaattttaagtgaatctcagataccaggagggttgaaaatttttgttcttccctccttcccctatttataggaaaaggaaggagaagcttgccacccagctcgcccagatgagctaggttgcttcctccagaaggcaccacaatgatgcttgttttgcacaacaatgctctttttgacttccagaatgttgcgaaactttacggattgcgcaacaatgcttgttaaacatttcagaatgttacggaactttatgga

SEQ ID NO: 27010 - DNA, 383 bp, Glycine max
  unsure at all n locations
ttaagcttgcttgcggggcttctatggaggctggatctttgagcttcaatgaggtcctttaatggtgattttccaccatggagatgcagcggaagacaaaggagatgaggtgagatgaggcgccatccactacggaataagccatggaagaaggagcttcaccactaagataagccttggataagaagcttgaaaggatgcttcaatggaagaaaagatagagggagagaaagagagaggggggagcacgaaattgaaggaataaaagaggtatagaagtggaactttgaagtatgtctcacaagactctcattcatcaaagttacaacaagtgttacacatgcttctatttatagactangtagcttccttgagaagctttc

SEQ ID NO: 27011 - DNA, 407 bp, Glycine max
  unsure at all n locations
tattctatgggatttaccaagcacacaattatcacatttttcaagtttatctagtttatcaccacctagcatattttgtttctcaagttcatgcaatcctctttcactaacatgacctaatctcaaatgccaaagttttgttttatcaatcaatgtattactagttaccgatgcatttccaacaatcgtggaaccttcaagaataagcaagccattacttttattcttgtcacccttggcaatgattaaagatccatttgaaatcttaagaacaccatttaaaattctagttgaatatcctagatcatcacacatgtttatgaaaataagatttcttttgagttctggaatgtaccttacattnttcagtagatactctctattatcaaacatcttcaatctcacag

SEQ ID NO: 27012 - DNA, 381 bp, Glycine max
  unsure at all n locations
agctttattaattagatggcctcagcaaattccttatttccagaagggaattctatcaatagacctccaatctttaatggagagggttaccactactggaaaacccgaatgcaaatttttattgaggcaatagatctaaatatctgggaagccatagaaatagggccttatatacccaccatagtagaaagagtttcaatagatggtagttcatcaagtgaaagcataaccatagaaaaacctatagatagatggtctgaagaggatagaanacgagtacaatacaacttaaaagccaaaaacataataacatctgccctgggaatggatgaatatttcanggtatcaaatcgtaagagtgctaangagatgtgggacact

SEQ ID NO: 27013 - DNA, 422 bp, Glycine max
  unsure at all n locations
tcagaagtatgttgtggttcctggagtaatgtacttcctcggntattgtgtnnaaccgnncatggcgatgagtaattgcattacggtgcatccttttgggtactgttttgttttctgacttgggactactgggggtatcgatgatggcaggaaagacacttatggtgtgtttgcagaccttgttgatccaaaagaggtatgtcaaattatttttcctttgagttgataatcttgcttttggaagacacccgagttggaagtttaaattctgcttttgacatgtagcttcctgattatcacgatgtgatcaagcatcccatggactgtgccactatgaggaagaagttgggaaatgaatcttcttatactaccttagaacaatttgaggtatgcaaacttgtctcagttggtcacattattgg

SEQ ID NO: 27014 - DNA, 338 bp, Glycine max
  unsure at all n locations
ttgcatgttagcttaacacttccaagggacacactaggttatttactcttttaatagtacaatattacgcaaagcttaacaggacccaattcacaatgcctagaggtatagctaacttaccaaagaactattgggatttctaagcattactctagtacacacatgcgactaagatctctggatgtagcctataataggaaacacatcataggttcaaagcccaaaatctaggtgtactacaagttctcatattacatgtcatgccacaccgaactcatccaaaagctagtttgaacatgttggcctacaaggattntaaaacaatcttaagagatatc

SEQ ID NO: 27015 - DNA, 405 bp, Glycine max
  unsure at all n locations
tcatggtgaatccagggtgtttcaaagtgtgttttgatgataacaatgatgataacaaaagatgatgacaaaggtgatgacaaaaagctcaaaggtcaatcaaagaacaactcaagtgaatcaaagatcaatcaaagaacaactcaggtgaatcaagaacaattcaagagttcaagataagaatcaagaagaattcaagactcaagaagaaagtctagaatcaagaatcaagattcaaggttcaagatctcaagaatcaagatcaagattcaagactcaagattcaagaatgaagagaagactcaatcaagataagtattaaaaagttcttcaaaactttgaatagcacatgagtttttgacaaaaccctntaccanagagtntttactctctggtaatcgatta

SEQ ID NO: 27016 - DNA, 411 bp, Glycine max
  unsure at all n locations
taccttgaatgataannatattcttngttcccttntttgctgaatgatattgacaaaaatttgaaccttgaacttaaataattttctccaaataccttgtttagattccaggagagcatgtagttcaaggcaattttaccccaaatttgggggagtggaactaattgggatgcaaagaaagagataaagcatcatcacacacaacacataagttgtgtgcttaaaaaaaagaaaagtaaaagagaaaagtgtgctaatgtaaaaaggtcaaaagcatgaaagtgaaaagccagtgagcaagccaattttattaaaaagaccattgcgataagtttaagattggtgctctcttataatctaagcttttgaatcctagaaaaaccaatgaatttttgtaccaagcctcactac

SEQ ID NO: 27017 - DNA, 376 bp, Glycine max
  unsure at all n locations
tagctttcatcaagtggtaatcagagcacaagagcttcaagtaggtgctccttaaacctccattaattttttgctttaccttctcttccattgttgttttcttcattttttctccatgtatctcctcacatgtcttgtgctaaatgtttttaacatgattctttagagtttccaccaattaaacttgctatagaagctagatttgattttctatggttcaaatttcttgttcttattcttgaaccatgaattgtgttgagtttaagttcctttgagttttgtcttgttattttttgtggctgaaacctaaatcataaaattcttacaaaaatattaaagtagaagaaaacctcanaaatctagagtgacttgttca

SEQ ID NO: 27018 - DNA, 413 bp, Glycine max
  unsure at all n locations
tggcatgctcctacctttttctctcagtatcaacaaattatagcaactccatgaagcctatttcacagcaagaaagatatttgttcttagcttttagttttactagatatggcatacttcaaagggctacgtgacaactgtaattaagatgaccctaaagccaaattgattgtgttttctgttgaaagttcaaaaagattactttatctagcatacttctgcagaactaattaattacatcaacttataattaattagaaattgctgaagggttacattttatgaagttaatatgcagatgagaataattaaaacctgggaaggacatggaatggtcaaacagaatgagtatgcaacaataatagccaaacattcacatganaataaggttgctnttctgcttcacatttttc

SEQ ID NO: 27019 - DNA, 519 bp, Glycine max
  unsure at all n locations
ncctttaactagngcatgagantctggcattnngtgaaaagtcctngcgatcctatagagttgacctgacagcacgcgagctatgttcaactattccatcatagacatcgcatgcgctctctaccttcagatagcaattaccctactcgaatacttattagtagatccaaacatatatatggtcaccagatctatgagacaattgacacacatcattcgaccactcatcttaatgacacatatgtaataatcattcttgactatctcacgcaccgatcagctctatcagcatggctgtttaatacataccaccttcatcttgtttcttggtttacagcactgttcatcacattatttacatgtgcacgctgcctatcatactatccacctgccgcatgacctagcagactggatcttactgataccatcaaagagatacactgctacactcctgtgaattgcgtataaacacgatgcatgctaaagcatacatcaatctatgtgtgatgtactacgtgn

SEQ ID NO: 27020 - DNA, 444 bp, Glycine max
  unsure at all n locations
acttagagtccaagaatgttgtttatctttcccatcatagacatcgggagattctatctacatacaacttgaaaattccttacacaaagtttcattagtagaactaaatataatattatcaacatatatttgaacaattaacaactcattggttactttcttaataaacaatgtttaatcaacttggtctctagtgaaagattgctcaagtagaaaactgctcaatctatcaaaccatgaccttggttcttctttcaaaccatactttttcagtctatagacatggttaggatgctagtagtccacanaacctggtggatgatctacataaacttcttcttcaatgagaccattaaagaagatacacttcacatccacctgagtaagtctaacatccatgatacatgcacatgcaagcagcaatcttatgtgatgtagctcatg

SEQ ID NO: 27021 - DNA, 199 bp, Glycine max
atgactatggtgagaatgattgtgaatgccatgcggctactgcccttccctcttcgtgtatacaccatcttgtcaacagcgtgatcactgagcctgaactactaccttcttattacacgccgcctacacctccgatcacgtcttccctgcatactccgcacagtgtgtgtatctcgctaccgaagccccaacacctcct

SEQ ID NO: 27022 - DNA, 465 bp, Glycine max
  unsure at all n locations
tgttacagaacttanganaaatcaagaacaagcttgttctctcatcgttcgcgtgtacgatatccactcgacaaggtttgaagtagaggacaccttcaatcctataacgcaacgtggcagacaaaaatggacagttaacttgaatggccattattgtcaatgcggaaggtattctgtacttcactatccatgttcacacattattgcagcttgtggttacgtgagcatgaactactaccaatatatagatgttgtttacaccaatgaacacatcttacaagcatactccgcacagtggtggcctcttgggaatgaagcggcaattcctccttctgatgaggcatggacactaatccctgacccaactacaattcgtgcgaaaggtcggccaaaatcaacaatgatacagaataagatggattgtgtcgaaccatctgaccaccgatataaatgtaatagatgtgg

SEQ ID NO: 27023 - DNA, 462 bp, Glycine max
  unsure at all n locations
ctgcagattctanaaatgaaatcttcaaggacgagattcatttgaaggattcttcaatcgacatattaagtcaaatgactcctattctcgataactcacttttctctcaaaaggaacaaactttcagaaatgataaaatgaggccacatgaatgtctgtatatattttttatttgaaacatagtcaatcaaatgctttttctttttttgtttcgaactttactcgtcattntacgacaccttgaccaaacatgcataacgagtaatttctgattgaacagtcttggaagtcaaacctcatgagcgcatgtcgcttgagcaaacaaaccaacaacttacattcacattccattggaagtcaaataagcaaagatgtaattatgataggatgagagacagggatgtcaaatttatccatattattagcattgtaattgtgtgttacaataatggcatacactta

SEQ ID NO: 27024 - DNA, 208 bp, Glycine max
atatgaagcaaatgacccttgtagcaataataaacagatggcgtatgctatgctggaatggatagggtggagccaacactactgtaatataaactgaacgactttatccatggaaccgtttggctcacccactcaggttataaccttagaacataaggaacctcgtaatggcgtaggtacttacacgtctacgggaaagctaacgcat

SEQ ID NO: 27025 - DNA, 463 bp, Glycine max
tcgctctttgtgggagtcattatcaaaactgaagcctttcttatttgcacatgtggagcaattaaaccttggcgcaatcttgaacaaatggagtatgctatgcagttcttgatggggttgaacgaatccttctctactattagaggtcaaattttatccatggatcccttttcctcagtaactaatgttctttccttagttcaagaagaaaagcaaaaggaagttggtgcttcctcctctgctagtgaagtttcacatgcttttgccttgaagccttcttctgctgcacgcaatcatcctaccaatcgcttcaaaggatcttccaagaatcgccccttgtgtgctcattgcggtatgctggatcatactcaggatcgttgcttcaagttgcatggctatcctccaaattataagaggactagttgttcctcacaagtcaagatacattcttcatcttctgaat

SEQ ID NO: 27026 - DNA, 507 bp, Glycine max
  unsure at all n locations
aaaaccttangctaagnccgtacgnntcntgcntncgnnacnnntctagacancannttaananngnccnagnangnaggcattactttctcgactcacctcatcgcccgtagctcttcactctatacagcatcaccgtggaatcttggagcgataagtgtgatgatctgcgcatgaaatgtgagagaaattgtttgtagatatacgtttagaatgcaatgattccgttgctgtaatggatacactctggcctatccgagtagcaactatatactgcattgattgatcatggttcgtcaattataccagccttatcatgtgcaccccgatctttctctataatgcctcaatggacttatcgtgccagctatggatgatttgaatttcaaaagacatctctcttgcataattatcactacgaaagcgcgagaccctcacgtagaatattaatttgatactccactactgttgcctgcatctctgaactaaggttcgagagcatatacg

SEQ ID NO: 27027 - DNA, 199 bp, Glycine max
  unsure at all n locations
gggatcaagggctttatttgtcatgtctttgcaaaancgaagcaaatggnngaaatccatggcttgatgaaganacgggctgtatggaggccctagcctatcctagaccaactataatggangaaggcttattcctcattttaatgctaaaatgtgcccaccaaccattaaaaaatgcctaagaccatgcatggtgtga

SEQ ID NO: 27028 - DNA, 529 bp, Glycine max
  unsure at all n locations
nactttactacgacacgtagaccntctgngacacatagagccctccgctctgcatactatagagtcgaccgcgaagcgatgctatcttcgactgtgcaaagagcaaaanagatctcctgcttagatgaatgagaaaggcttgtcaattgatgataatgatgagggaggaggaacacatgttgtgactactattcttgcatggggcataatccttctatcacattatctcaaatattaaacatctgtgacatatatcactactcttactcgttagcaccacccgcgccctcatctcatcttttgtgactgctgtaaccatactcacaacacaccgcctgccagacatccgatctttgacacgctccaatactgcctccatgggcggaccgttcctctgaaaacacctattgtgtgtacgccagttccagtgttctatctcactcgctcatatatctactcactattcattggtacccaagaccgcatccaaggttgctcaacctacatttttctatgactcacatcgacg

SEQ ID NO: 27029 - DNA, 409 bp, Glycine max
  unsure at all n locations
gcagatttagttntcgccggctaaaggattgttttttncttataagaggcaaatttggatatcctgctttgatgaatgacaaagctacggcaaatgaagagaatgagaaggagggaggaacccatgttgtgactaccattcctgcatggccaaatctcccaccagctccacaatatcaatactctgccaatatcagcccttctcattacccaccacccaatcaacgacaaaggtcatccctaaatcagccacatagcccgcctgccgcacatccaataccaaacacaaaccaaaacaccaaccaaggaaggaattttccagcgaataagcctatagaattcaccccaattccggtgtcctatgctaacttgctcttatatctactcgataattcaatggtagccatgac

SEQ ID NO: 27030 - DNA, 431 bp, Glycine max
  unsure at all n locations
tgggtgatgttgcgcgtactgatgggtaccatgatgtgtttgctggggtttgacccacgcgggtgttgaagagacggcatgggcatctccttccttcctttttgcccctgttgccccgattcttttggcattcgcgttggtggaggaaatgtaatcaaactttcctcttttcaatccaacctcgattctttccccggcaaacaccagattcgcaaagctggacggcatgtaacccactagcttctcatagtagaacactggcagagtgtctaccatcatggtgatcatctctctctcaaccatgggaggagctacttgtgccgccaaatccctcaatcgctgcgcatattctttaaaggtctcaccttctttcttgaacatattctgcagttgagtacggtcangagccatatcagaattgtactgatact

SEQ ID NO: 27031 - DNA, 273 bp, Glycine max
  unsure at all n locations
gcgactatgcactacgtgtctctgtacttgtacgattgactctctactctgataaagatggctaaaccttatttgccgtaatgaacaagaagacatgtaaccacttgattctcctacatgagatgcattganaagtctgtagctggcgcctggagcatctgattgatgactcatcagagtcaataaagatgattatacagtactcgatgaggaccttaagaacttatctattcgacaaggatatgcgtgtggtcatgtggataatgtcgacaa

SEQ ID NO: 27032 - DNA, 404 bp, Glycine max
  unsure at all n locations
gtagccctcanattgtagttctacttggcgcagataattgttatgaaaaagatggcaactatgcaccacatgtggctagaatagttccaattcccagcactactctttatgatagcaactcaaacctcatcagagcataaagaaaaagaagacataaaaccaagtgtcgcacccacatggtttgcattgagaagtctgcggtaggagccagaggcattgcattgatgttcaatcaatgacaatcaggatgacactagattaagcagcaggcatcttaacatcttatctagattacaaggataagtttggcatcatgtcgaagatgccgacgacaccacatgtttagttgagttggttgaataaagcgctaaactccttggttttgtcttcaattgtgatggaaa

SEQ ID NO: 27033 - DNA, 371 bp, Glycine max
  unsure at all n locations
gcagtccgcatgcgttcttttagccactatagaggtcttaccatggtctangcatgccaaatggctttgctgataattaaggtcagacgaataccttgatatcaagagactgaggagccagtgctcacgccggatgcggatgactgcgatttacatcatacttagatgaagatcgtgagaacttgtgctcctcttttcatcctattctcaatgactattatatgtgatcataaacctgactcaatttgccccgcatggccgcttcacgagagaatctgagccttcgacactgtctgatgcctatctatgaacaatttcgatctgatagatcacgactatatccggtccatagacaattgggacgagaagac

SEQ ID NO: 27034 - DNA, 452 bp, Glycine max
gttatatcctataacttggtgcattcatatatgttcttttaattactaaatagttcaattcaatgtctaaagagccgaaatttcttaaatgaaaataagggacagccgaaaacgtacctcttaagaatttgttttgaaagtgctaacgtgggttggggatagatgcgtttaattacatccagaaataaagattgtgagaccatgtgctcctctttccagctttctctttaggactttattatgtgatagcgaactgactcagtttgtttttgttgttttgagtcacaggagaatctgtgcattcgagaatgtctgtggtagatcgataaagaatccagatcaagtaaaaaagaatatatccaaacgaaggctaaaggggacgaaattctgaatgaaatgtgggtacggatgtctatatttcctaattatagggaggatcttggttctactta

SEQ ID NO: 27035 - DNA, 470 bp, Glycine max
  unsure at all n locations
gggttttgcctgagcgtgctttcggcattcacttgactgtgtacttaagctactggtgcatgcagctttagcacatcaccgtacccgcgcttattagctgagcagaatggccgtgggcgttagccagataagacctgacgctacttatgacatccttcttggacgaagaatggctacgctgagggcaggctaaactatgatccatgcacctatggatgcgacgtgggaccatacactatatctactctcgacgtatggctccacctgtggttgtcttgaatgttattgagcgcaccgatcacactgtcgcaagcatttctctctacacgcatagcctctatacatggactctctgctagatcatactagtactggccagacacgaatgcaaagcatttgcttcatatgccactatgactattatccttgtgtcgaggcgtaccaccgacatcatttcaggagtccaaccn

SEQ ID NO: 27036 - DNA, 210 bp, Glycine max
ctcagccgcagtaatttgcttagcaaaatggctcatccggtgtagagcaagatttagagagcctggctcaacgaggacgacaagctgaccgaacaagaaatgctggaggctaggctaagcgatgatagaaggctcagagagtacgacgttgagagcattagaccgatatttgactcaacgacatcaagaggctaagcaagtgcgtgtatc

SEQ ID NO: 27037 - DNA, 255 bp, Glycine max
gcaatcctgaccctctaatgccacttgataagaaaggggcctctcctatcttagagaaagcatggttgaattgagagacattcctcatcacccaatgggagatagcactctctgtttatgaattaggaatgcatggttgatcctgatcactgaagcgacagtcctgtgcagactggtctttttgaccaagatgtatctcagcaattcagagatgtctccaggtgaacaaaatgcaggctcaccatgacctctggt

SEQ ID NO: 27038 - DNA, 409 bp, Glycine max
  unsure at all n locations
tcctgattcaccataattcttgacctatggtgagaatgtcaatccttaccctcgaaggcgaactgaagagaaaggaaaatttccaatctaagagaaagcataaagaaaagagaggaaattcccaatcaaagaatgggagatagtaaaaaaggaagaagaaaaaggaacgaaaggaatttcctgatcaaagaagcagaagaaatgtgcagaaaggtctttttgaccagacaatatctgatcaatacagaattgtcaccaaatgaacgaaaggaagggaaaccatgacctaaagtggtcttctccctttgattaccaaccaaaatcctgtgcgtcggcgactttttcaccccgcactatacaaaaacaanaaaggaaaaagccagcttaaaatctaaagccaaagacacac

SEQ ID NO: 27039 - DNA, 324 bp, Glycine max
aagactctagcgatgatgctcatacctctctaatctctaccctcgccggctggatatgaggagcttgagcttacctgcgcgatcttatgacagctacttgtcaccgatcatagactaacatagggcttcgaggttacagtaacattaggcgtccttactacaacacactactcatgatggcctataaaactatgtttatatcctatactaggggagtggccaagacacaacgtctttacctataactgacacctatactaacatttacttagatctacgggtcatgtttactccatgggctcgtgatctaccctatcgctcatg

SEQ ID NO: 27040 - DNA, 455 bp, Glycine max
  unsure at all n locations
taggctaaattagtctaaacttttgtaagctattttatttatttctattccaacaagaggaatctgaggatgaagcttagtttaagttagtctaaaccaaggagggctgtctaaattgagcctagtccaacaagagggatctgaggacaaagcttggattgattcagtctaactagggatcgaggtttagtaacttaggctacaacatagaacacaaaagcatgattgattatagaaatatctttatatacatcagttggtctgttagaaagacccaacatctttacctattactgtcaattttagttactttccttttttactatttttagcctagactaagtttaattctgttctaaatcatcaattatcaatgtttctttcaacaatgccttatttatgaatntaaccctgtctaagactagatccatgagtttgatactcggattcatcca

SEQ ID NO: 27041 - DNA, 293 bp, Glycine max
tgatacaagtacacaggacttgattcgaccacgccctactagagtccatctgggacatcgtcgagagaatgattgtcccgatttttagactgcgagaataacgccctacctgactatgatgactactacatccttaggcctaggctctacacgcaattagggaggcgctacgtgcatatcagctgcgacactgagtgctctcaggaccgtgttccatgatgatcctactttgctcaccattatcatgcgtccgtatgtgcaattctacacacttgaatcgacggatcctagga

SEQ ID NO: 27042 - DNA, 387 bp, Glycine max
tgatgatccacgtacgttggatttgtgtcgaccatgccctactgattgccacctgggaaaacgtccagtggaggaacacaccggcttctacgcctcgagcccattgaattactataccatggtgaagacactataaatgcgcctaggctctacactatcttgagaaggtgcattgcgtcttacgttatgaacaaatactacaaggatcgtgactccatctgagcctacgtctctaccaattctcatccattcgcatgaatacttctctatatctgaaacgacggatccgacgacgagtacgccgaacagactaatacctgcgacccgcctatcagcttcgcgcatgagacgactcacacggtagatgatgggaacgaggatgagaga

SEQ ID NO: 27043 - DNA, 190 bp, Glycine max
actcgtcctcctgctttatttgggggcagggtgctcgcccagcaagctcagatcgccgcagcgagcctccctgcctttccgttatggggcagacccttgcgtggtacattctctttacttgttttgacttgccgattgtaacctacctctgctataatgtgcgcctaggctacttatttgattaccggcg

SEQ ID NO: 27044 - DNA, 464 bp, Glycine max
  unsure at all n locations
tgccacccagctcgcccaggcgagcaaggttacttccttcataagctacagccttctggagggcccaagtgggcatggttgctatttgcacccccattnttactaaatacaccccctgccttttttttgtgattcttttttcgtaaagttacggaaacttatgaatttcgtaacgatactctgtttctttccgtaatgttacggaaccttgcggattacataatcatccctttttttgacttacggaatgttacggaacctcactatttgtgcaacgatgcttccttttgatttccggtgtgtcacggaaccttacggattgtgcatcaatattttcttttgatttccggcacgtcacggaatttcacatattgcctaatgatgggtgccaagcacctcanaatgaccaaacaaaagttgcattccaccaagcataggtcctcggacaaaattatggtatgaca

SEQ ID NO: 27045 - DNA, 114 bp, Glycine max
tagcatgcttagctgcggtatcgtcctttgattggctcatatatgattacatattcacattacttgattctagagaggggagatttgttggttaccttcgcgtcggtatgatac

SEQ ID NO: 27046 - DNA, 467 bp, Glycine max
  unsure at all n locations
tagtctgtgatgggaaaatcaatggtcaatattccatctcattcataagntgttatgcattaacatataatatcgattcatcgttatggattatatatgattacttatttcacatatacttaattatagagagggagagattaaatggatacctttgagtggtatgagacccttatcaaaaagagaacggtagtgcaaaatagacattaaggcacaagcactgaccggtgaaaatagagcaataggaagtgaaagttcttcagcagcttgtatagtaaaaagcatggaacaatcagacaccaagcaagtaactggaggtacaaagccagcagtggaagaatcctgaagacgagcaagaagatcgcgaaagggtacgagcatcttctctctcactganttagcaagagacactgcgtcttcagtgacatcaccatcaccatatgtggggggaagactatctggtatgg

SEQ ID NO: 27047 - DNA, 361 bp, Glycine max
gccgcatgcacgctttgttcagaggatcatgtcctcctaggcacttgtgacgcctatgagtgaccatccatggagaaggcagcctacttagagatggactcacctaggcgatgaccttggctgtaccgatctgttacacatgctacactctccgatggagggccctctgtactacaagccttggaaaatgcatgacttacctgcggaggaccttcgatctgtcagcttcttggttatgtggaacttcctcacgctaaccctgtgttcgaggcccctttgtaaaagcctttctgactggcgaccatcctcagtgatgaacatcctacgcgcgactctatgctgaccacagctagaccgtgga

SEQ ID NO: 27048 - DNA, 458 bp, Glycine max
  unsure at all n locations
tttaagatgtgctcatttgtgtaaacaacatctacatattgtatgtagttcatgttcacgtaaccacaagtaacaataatgtgtgaacatggatagtgaagtgcagaatactttccgtattgacaatagtggccattcaagttaactgcccacttttgtccaccatgttgcgttataggattgaaggtctcctctacttcaaaccttgtcgagtggatatcatagatgcagacaatgtgcgaacaagcttgttcttaatttttttgaagttcttaaccttacaacaatatacttgtcctacatttaattgtctttgggcttggcgaccatgatcaataaagtactttcgacaccgactatatgttgatttcaccaaagtcgttatgggtatgttgcgataatccttcaataccttatttacacattntgagaggttggttgtcatgtgatcatatcta

SEQ ID NO: 27049 - DNA, 526 bp, Glycine max
  unsure at all n locations
cgaggggattgatgctatcgatagatcctcctgngacgatatacgagctctcgacctcgatgatactcgtgctatcgacacagcaggcacgtcttgcttggatntcatatancaaaagcgaatctagtgatggactacttatgtgagccaaacatcaataccggctcattctaatactactacctactgtccatatagacgtacctcaaaccgcattccttagaatcttaacactttgcagcagctaattgacaaactctagacactctagtgctctgttataaaggtataatagatgaacttcgtagcggaatgaaacctataggggttctggcatagaacacatcaacatgcctattctagtattgctacgtggtgctctccacacatgttgctgaggctggaaacccctgagagggactcacatcccgcgacatctaacgtctatccgaacacctactcatggacacgtcatatctcagactggatactaggtcgattacacctagcattgactcactttacg

SEQ ID NO: 27050 - DNA, 450 bp, Glycine max
  unsure at all n locations
tgatgaagntgtgctatgttagaaaggtacattatcttaaatttcataaacaaaatctatcaagtatggattctttcttagtaaacatcagaatggctattctaataatactacataatgctcataagaaaggttcctcagactggaaaccttagaattcaaatagcttggagttgtgaagtgtaaagtttgatgaagctgtgctatgttagaaaggtatattagtttaaacttcatcaacaaaatctatcaagtatggattctttcttagcaaacatcagaatgactattctaatattactacataatgctcaccagaaaggttcctcaaactggaaacctcagaatggttctgaaagttgtcaactcatgacatctatcaagtccacctactttgtgacacctcanatttcaaactgaaaatattgtatganaacactcttaatttaa

SEQ ID NO: 27051 - DNA, 480 bp, Glycine max
  unsure at all n locations
attatgcatgtaggnaccctgagagcctagactctgagctgtgatacttagagggaccagccgcacgcatgcttgtctgttatgcggacgaagacgatcgataccagtccacaggctatatcatgactcgacgagtgcaatagatagagagagtatcacgatgaccttgagatgtatcatgctaataacatgcactctggctgcaacgctagaaccgccgcgtagtcatactcgccctccacacgattaggtactgcatcgccgaatcgccagaaacaccaggaggccgaaagagaccttcccgcaggatatgctggcctgcacatatgactgcatctcaccttatagggatcagtctgcagcactacatcaggcgatggagtccgtcctctagcagcagtcctactagaccgtacgctgaccagcagtccttccgctacgactgctccaaatacggccagccgtcacgggccgactccg

SEQ ID NO: 27052 - DNA, 361 bp, Glycine max
tgtacttgtgaggcagggcggccttcctacagctttgttgtattttatgcaaacttcgaccatcgaacatccttctcacaaggcttcctatcctgtctgcctgaatgggcttatagcctcaaaccataacttaacaccgattacacttgacgatatatgatcgctagatatgctcccgtggcattttcctaaaaccatgccgagatctaaaccgcacccccacatgactcgggccatcattaccgctgcatcagacacactgcgcggcggatagagggagatcacgcacgaaatgttgaccacactagcatgactgataagctgtctataacgatttctctgctgttcctacataatgcat

SEQ ID NO: 27053 - DNA, 122 bp, Glycine max
cgacacatatgacggtacagatccatgtgtggatgaatactgctcaaatattctaccgatattgagatgtaaaaacgagattgcaactatagatgcttttctcaatattaatacatccgctc

SEQ ID NO: 27054 - DNA, 460 bp, Glycine max
  unsure at all n locations
tgcacaaggttataccctccctctcatactntgtttgtatctaacacattctcttcaagacatagtactaacttccatacattttcacaacttgtagtgcgacaaagatgacggaagagaaccatggttggatgaatcttcatcaaatttcatttcattattgagatgtaaaaaagagatggcaactaaggatgctaattaatttatttttacattgtctctctatttgcgtatttgtaatatacttatctcttacagtttataaagaatgcaatgacttttgaacttttggttgacatttattcctactgagtgtgcaactagcaaaccaaaactgtttgaaaatattctaactgcttatgttgatatgtccaaggctcacacgctgtgcttcttagctgatactatattgtgtgaagcatcaatcatcattacgacatagaagactgcactcactatt

SEQ ID NO: 27055 - DNA, 258 bp, Glycine max
atatgatgaccacactataggcaccttgagatctgtcacgagggtcacgataccttggggacggcacgtgtgatgctgatctctaacacttacctcgtgcattaccaaacccaccatcccatactttactcatgagctcctgcgatgcacctcaacgccctagctgcttggactgaacatatgcccggttctcagaccacggcacgacgaagatggacccggcttgacgaatatgaactttaagaggactatgacgtg

SEQ ID NO: 27056 - DNA, 458 bp, Glycine max
tatccatccagacacagatgcaccatcgccacctctatatcatcaccatctctagagtccatctctgctcacatgcagagtatggaactctatatgcagcatgtggccgaccagcaagtggccaatcgtaagggtcaggcacaattgaatgagagcttttacaattacaccctgcatcagtagacccaggatcccaatccttactcatggcctactcccaagcagttcgaggccataattgcatggcctggagataggcccaattttcaggcaagggcatgacccacagggacccccgttgatgaagatgaagctcacgaagacgatgacatggtcgatgtgatggccttcttcctttgaggaggatgagccgcttgactatgatcgctgaaaactatgaactcatctgtattttagttttatcgctctcagtatctgtgtgtatctcattgtgatgg

SEQ ID NO: 27057 - DNA, 233 bp, Glycine max
tatttgtaaggctacgcatgagcaaaggactcatacaactctgacattatagtgtgcgacttatagcaaccagactttacacgagagaccttctacctatgcttggatctatagacatgcgctatataagccttggatggatgggagattacgaatatgattccgtagtcacatttgcatgaaacctgttcggagtcttcctcgcagcatgacctgctacatcgtctttccct

SEQ ID NO: 27058 - DNA, 457 bp, Glycine max
tatcttgattgaatgtagcagcaaacttgacgatatttctaatttttcatttctgcaaaggactcatccagctttgacattatagtgtttgtcttattgccattaaatcttacaggaatgtccttttccataatcaaggttttagagttatacactctatatgccttggataattgagagtatccaagtaagattccataatcacatttggagtcaaactcttcaaagttatccttggtgttcaaaatgaaacgttgacatccaaatgggtggaaataagaaatattaggcttacgttcctttcacaattaatagggagtcttctttaagattgacctaatatagactctgttatgtaaaaaacaaacagtgtgatcgaggccgtacccgaatcatataaacatgataatgcagtaactaggaagtgatcctatgtcgtttcccaacgagcagtgac

SEQ ID NO: 27059 - DNA, 145 bp, Glycine max
ttctaaactattattccttcatataccattcatttatcaattatggttctatccagaataaacatgaagctgtaatggactaaagatacatttgggccttgttagaaaatattcacatattgatgttcataagataaatttatga

SEQ ID NO: 27060 - DNA, 410 bp, Glycine max
tatcaaataaggttagtccaagtaatttctaacaatttttagccactagaaaaaaatcactacagaatatttgtaaataattaaaaaaacatattgtcacatcacgatttaataaagacatttaatgccaaggactaaaaaccaaacaaaaaaaattgagcaacaaagaccagtcaaatattaattaaggtactaaaaagaaaaaacatgaaaagttaagggactaaaaatatattttgcccttgttaagaaatattcacatatttagtttcatagataaaaattaattctaaatctaaaattattttgagataaaacttagtataacatatgttatccaacgtaaaagctatttaatgattatacagtaacaatgtacaataggttttgtcgacataacccaagcacac

SEQ ID NO: 27061 - DNA, 488 bp, Glycine max
  unsure at all n locations
ntgatctatgatggatgcttctacggcgaatcagctcgagctgggatactgtcagtcgacctgaagcgtgcatgcttttgcaatangaaagctgggaccatcatcctactatgacgactganaaaactgtagctaatcaaggtgttgaagaccatagaaaaaccttatgctagtgactagacaattgcgtggccatgtacagagctatcactatcgcatcgaccaataagtgcgaatatactccatgaaatatcttacggtgctgattaccgagcatgccattatcttggactgggataactatatgagacacacttgacgtctatcgcacgtacgatgacgaacacccattttaatggatgcctattggcgaaccagatgtgaatcttgctctagattcctgtcaatatactgagatactatctatgataatgctgcagactagggatactcactgtattgtactctagacagacatcatgtggatc

SEQ ID NO: 27062 - DNA, 461 bp, Glycine max
  unsure at all n locations
ntgcagaattggccttcgccagtgaaaggatcaatgttggtccgaaaagagcaaatttgatcatcctactaggacgactgagaaaactggggcaaataaagagggtgaggatgaaggagaaacccatgctgtgattgccattcctgtacggccaagtttcccaccaaacccaacaatgtcattactcagtcaataacaaacctcctccttacccaccacccagttatccacaaaggccatccctaaatcaaccacaaagcctgtctatcgcacttccaatgacgaacaccacctttagcacaaaccataaacaccaaccaagaagtgaattttgcagcgagaaagcctgtagaattcaccccaattccagtatcctatgctgacttgctcccatatctacttgataattcaatggtagccataaccctagccaaggttcatcaacctccacttttctgagg

SEQ ID NO: 27063 - DNA, 131 bp, Glycine max
actctatgagcaacctgcggcatgctagcttacattgtcgaatttggagcgtggcggcatctgatgcgcctgaatgtgactctcttgtgactaggatgtaccattcgagcacatactagagctgacacgtg

SEQ ID NO: 27064 - DNA, 470 bp, Glycine max
  unsure at all n locations
ttcactcggatgtccgattcangcgcataatatatcttatatgttttataattgaacaatggaagctcttgagcaattcaaatggtcataacttttcactaagatgtccgattcaggcacataatatatcgagacgttcgaaattaaacaatggaagctcttgagcaattccaatgatcataacttttctctaggatgtccgattcaggcgcataatatatcgagacgttcgaaattgaacaatgaaagatcttgagcaattcaaatggtcataacttttcactcggatgtccgattcaggcgcataatatatcgagacgttcgaaattcaacaatggaagctgtcgagaaattcaaatgatcataacttttcactaggatgtccgattcaggcacataatatatctagacgttcgaaattgaacaacggaagctcttgagcaattcacatgatcataacttttcacttg

SEQ ID NO: 27065 - DNA, 282 bp, Glycine max
caccacgaacatgcgcacgtcctcctggagtacatccaccgatgggaacttgtacacgggagcggtatatattaatcttattttgctgcttcaatctagagcgggatcctgactgaccgtaccggacatatattcggcaactatgacaacatgctagtgccttggcctattaccgttgtatgcgtatctttacttacatcggaaccaccattgtatgttgctacgggaactattgccttccctagagcagaaggatacgggacatggatgactatatgaggt

SEQ ID NO: 27066 - DNA, 436 bp, Glycine max
tactcacgcttctagattggtgtaccacgccactactgctctggttgtctttaagaagtgcattaacagcttttcgttcgtagaatatgcccccatccttcggcagtacatccaaagatgactttttggacacgtcgtccctttatatttatcaaaatctgatactttaaacttgggagggataatgatgtcaggtaccagacatagatccgccaaatccgagaacggataattgccaaggccttctaccgctctcagcctctcttcaagtagatcaatctttcccttgtcttttgcaaagggaacgagttccttatcaggtgcggaaggagacgggacgtggcggactatgtttggttggggcaactcattacgggctggttccttgaggggaagtagaggacctaaatgggcatctccttcatcatcttcttgc

SEQ ID NO: 27067 - DNA, 386 bp, Glycine max
  unsure at all n locations
acctgtgcagcaaagtcaaactgcttctacagaaactaaaagccttggagaattctatgccagctcaaccttctgaacaacaagtcaaggagctcaagaaaacccaagctgacctttgggaaaaagctactatgcatgagtctattgtgaggcaaaaatcaagatgcagatggatcaaagagggggacagcaacacagcctattttcatagagttattaatttgaggaggaggagaaatgctttgagggggatgcagataggtgacacctgngtggaaaatcctaacattatcaaggctgaaaacctgcaccattttcacaacacggtcaatgacactcactcgagctgacctaacctggatggggttgcatttaaaactctgact

SEQ ID NO: 27068 - DNA, 177 bp, Glycine max
cctatctgatgtctgttgtaagaaatgcatgatcgtatgcacagactaacgcctgcatgtgtgaccttcgacaggcttcttggacaagcccgttgacctgcggagacctacatcatctaccatactgacgcgatctgtactgctgacgctatagctgtcctaaccggcggccctact

SEQ ID NO: 27069 - DNA, 466 bp, Glycine max
cgatagcacgcaaagactaacgttctcttctgcgcctatcgttaatctcggacgacaagcaccgcgacacgcggagatatacatcatcttccgcgctcacaagatctgtcatactgacatttgagtctcgctgacgggcggaaatacccgagtggttatccgtataaacattcctttttgctgtctgtaagaagaaaagcatgattgcatgcagagactaacgtcgtcttctgcgaccttcgtcaatcgtggcggacaagcccgttgacatgcggaaattaacgtaatcttccatgctcacaagatctgtcatacagacatttgagtcatcctatcaggcggaaatacccgagtggctatccgtataaactttatttcgctgtttatagacgaaaagcctgatatgacgcataaacacacctcgtgctctgcacgcatcgttgatcagagactacaagcttggaga

SEQ ID NO: 27070 - DNA, 486 bp, Glycine max
  unsure at all n locations
nccggattgtgcatcgctgtacggcaatcagcctgacctgcgatctctcagcgatctgccggatgctgctttctacaactctcgacagtgccggcgtgcttaccgacctcctccaacttagagagactagcatattgctacgaagagagtgatgctatgcaaggtatggtagagacctagtgtgcgtcaatacttgattatagactactattcattctatgaccgcgtgcatagacctgaatatgaatgggcatcttaagatcagaggaatcttcccatcttcgattctcgccaagatcaccatattcaacggaaacgtcattggaaggactctgacaatgactaatatgtactcgcctgtaagactcgtgatattcagaccgccagtgtagcgtctcgtcgtaaggtctattatatattagcgttgtactatgattgacatgagccttatgtgatctttgtctctaaagcaacgagagtcatacg

SEQ ID NO: 27071 - DNA, 414 bp, Glycine max
tacaacgctaccataatcgtcgacgatttggcctgtataatcattgactactaccacgacagtactggtgtgcttcacgacggcaacgaacttagagagacaagcttaacggtacaaaatgagtgaggtaatgcgggctagggcacaatgcgagtatgcaagagaaaaagatgcgaatctacttcacattcaaagacggcgtgcataaaacccgtctttggataatgtagtccaacaacggcgcatggcacccgtctatgtaacgcgcagataacgccattcttaagatggacgttattgaaataagagtcttaatgagtaaaacgccaccgtctatcgagctcatcatattcggaaccaccgatgttggcaacgcgtctgacaatactattattttagaagtgtacggaccat

SEQ ID NO: 27072 - DNA, 461 bp, Glycine max
  unsure at all n locations
gactaagtgctcaccaacactagataagattccttcatgttgtttcatgtaaacctcttcttctagatcaccattcaggaacgccgttttcacatccatttgatgcagctcaagatcaaaatgagctactaatgccaaaattactcgaagagagtctttcttagatacaggggaaaaggtctctctgtaatcgattccttctctttgagtgaatcctttagcaacaagtcttgccttatgtctctcaatgttgccttctgagtctttctttgttttgaagacccatctacatccgatggcttttacaccaacaggcaactcaactagatcccaaacttggttagatgccatagaatccatctcatccctcatagcatntataccacaaattgattccttagaactcatggcttatgaaaacgtctcagtatcantttccgctccaatgttgtagtctgatg

SEQ ID NO: 27073 - DNA, 161 bp, Glycine max
atcccacatctccttgatgaaggatgcttttggaggcctgatatttatcttaggtactgctagcatggatctcttatgacgcatgatcatatttggctcatatgcttacactcaccatatacctattgatcttatgaactccatacatgttactattacta

SEQ ID NO: 27074 - DNA, 424 bp, Glycine max
  unsure at all n locations
tgagaattggattgacctgtgctaagttgccaaatatttacagagttaggcacagtattattacaatcaacagaagaaacagtatttatacaagctggagaagacacagcagagcagaactgaagattgggaaactggtacaagccatcagatccaacatctccttgaagaaggattcttttggaatcctgatatttaacaaagcaacgattagcatgaaactcaaagaaaacatgattatctttggcaaatttgcttacactaattagattcttagtgatttgaggaacaagaagcatgtttttaagaataagttggccattaggactgaaaggagaaacaaaattggaattaccaggggctgagatattcagaccttgtccgttaccaatnttgatctgatctggaccctcaaatggacaag

SEQ ID NO: 27075 - DNA, 518 bp, Glycine max
  unsure at all n locations
cgcggtttgtgcgtcgtgctcntcggacatatcagcctgagctgggatcctctataggcgcctgcaggcatgctttcttagcgcttcgatgatggagcgtactgagatctgtggagcanaanagctgcgactctccgcacgcatatggctagttaagggtgagcataacagggtgcatatggcgcattatgtcatatcagaaacgaatatgaggccgccacgattgttcaccgttactctcgcatgatgaggcgctacacgcgctcgaactccagtgtctggccgaaatagactcagtgctcntgagacgcgtgactcgtacttaggacacagactaatggatggtttatgggttgtgcatgtcgcttactcgaatgcagatcgaattgattccggattaacgctacagtggctagcttacctgtacactacagcctgagacgcaagggtcgtgcgctaagcgcttaagagtcgtggctcancgctggagcgcaatatgcgcttagcatgacgatcgt

SEQ ID NO: 27076 - DNA, 435 bp, Glycine max
gtctagctcttcattggtgtattgagagctccttttgttgctctaaattgagggagtgtgctcaaatatatggagcaattttgattcgtctcctcgctcgattagggcgaattaagggttggcatgagatggccctatgcctataatgcattttgaaacaataggacatgccacattgtccccgttctctcgctattgatgcctaaacgcgcgcccaccaagtgttcggcgaaatgcctcattgtcattagcgtgtgactttagtaaggagacagacccatggtgtattatggtttgtgcatattttctactttcatggaatatgtattcattcccgaaaaaggctagagtagttgcctcacatatatactagtcctagaaactgaaagttatgcacaaaacactaaaaaataatacgccactctgaggcgcata

SEQ ID NO: 27077 - DNA, 549 bp, Glycine max
  unsure at all n locations
ccgcgctatgatcgacgctcttcgngcctatcagcctgagctgggatcctgtatagcccctgcagctgcggcttcgattatagtgatatgtaaccgccctacagcgcagcttgagagagcctgtgtagtcagctggagaatctcagtccatgagccactcgagagacttgatataccatgcctgatggatacatcagagtgactgcacagtagtgngcacactncgtatggaaaacactactgtgatatgatgtaacctcanagaaattgctctcggacagagcaactatacagcgtaccttcagctatgaagatttgagtgggctattataatggcatctatactagaactctagcatactgacatgagacatggaatcatgactgtccataagcacgatgtctggagacgagctatgagatagacgtangcctttggcatcttcgatacatccgtctagcgacactgactgcaatatcttggccctcaatctgatagtgcacagaagatgctaagactctctggcgagatacgagcgctagctacan

SEQ ID NO: 27078 - DNA, 456 bp, Glycine max
gtaagattggaattaaaacgttcagaaactgctggtgttcgattaccatatatatgtaatcgattacacagtgcaaatcttgaattcaaattttaatagctgttgtaaatcagttttggccactggtaatcgattacatcctctggtaatcgattaccagagagtaaatctcttgaaaaagactttcttttaacttaaatttcttggtcaaaccttttgctacttcaattggaattcccttgctatttaatgtaatcttcctaagactctagagactgtcttaatcatccatcttgaatatcttttatttctttgtcttgaataaaactttgagaaacatgtaatcctttggcatcatcaaaacattcagcttgatcctttgtctacatatacatcgtccaaatatgataatatcataagtgtaaagaaactatggctgattcgtgcgctacctac

SEQ ID NO: 27079 - DNA, 498 bp, Glycine max
  unsure at all n locations
ggttgtggtttgtgcctcttgctcctaggcgaatcagcctgagctgtcgatctattgagtctacctgcaagcatgcatagcttgatacactcctatctgatcanagatgatccatagagccatatacggaccaacatgacatgcaagcctcttgacaggctatcaatacttagcgttcagctctagacctatacgagacatgttcaaggatgcgatccatgataacaactactgattacctggactttgctttcgcactgatggatcctccggcctttactctgtgtgcttctcagcccggcgtgtgcatctgctcctttgatgactctctatgcgaagaagacacgagagcagaccagatcgctcgctacacctaggatcaccatgctgagtctctcgcttatggcatgaggcactcactcgatcaacaacgcggtgacgttacgtangagtcttgattagcccaagcgagctggttgatggactgagagaatggcn

SEQ ID NO: 27080 - DNA, 460 bp, Glycine max
  unsure at all n locations
ntacgaacaaaatgaaatcaccaataatgagtagaaatgattcatacatatataaaatatcaaaagagatacataagggtacaaagattacatccaatccttttgagaagctatccaatcattgcatagagcacaagatcaacaagagaaatgatgaaggatgcgatccatgatcacaactttgcagcgcccgggcttcacttttttattctttcttccttctgtgttcttcctctggcttttctctagtcttggtatgtttctctccatcctttgcatggctttttatagaaaaagagccaagaggtgcagaccaatttgctcgatcgagctaaacacacccaggtgagtttcttgcttagtgctgaaggcactcactcgctcaagcgagttggttatctatgcctgaagaaacttgattagcccaggcgagctgattgctagcctgggtgaatggatg

SEQ ID NO: 27081 - DNA, 326 bp, Glycine max
  unsure at all n locations
gctcatgcaagcttcgcgacggcggcacccatttaggagtgtccctacattcctgttcgctgctccatgagcatgttactctattgttatatggctctctatgcatgaccgatatatctcgatggcgtgactcacacccatctatcacgacccttcttctatagcctgttcatagaatgagatcccatctactgtgtatagatttatagagtgggactccactacttatngatgcacactaaaatatttacatcagcacatattcctaggttcttatttcttagagcgccttgtntacagatttgctctattaagagatatacttc

SEQ ID NO: 27082 - DNA, 271 bp, Glycine max
gcattatagaatatatgcggcaatcgtgaaagacacataggactagacgactctaatgctgcatattccatgggaatcttataacgcacgtgtactactgatctgctgcgagaaactgtaactacattctattacctacactatcactatgctcatcaggctcaagaccgctctaactgagactgagacgcacacatgatatggatttcttgctgactcgcaagatgtgacacacgagcatcactatgactacgtatgccactattcctac

SEQ ID NO: 27083 - DNA, 450 bp, Glycine max
  unsure at all n locations
tccaagtgagaaatatacagaggagagtggttacctaaaggcactttgatgagagcaaataaggaatagatttggctatcgcgaaagaccgaaaggattatatgaaacttatgctgtattttcttagggcatcttagaaggcacatgtcctacatttttcgagtgtttttatatcaactagtccgatcttcaatagtatcctatgcttatcagcctcatgatcgttctatctgatactgtgaccaacagttgcttatgattcgatgctgacacacaacaaggcgacatgagtcttctccatgtaaacatagtctcctataaatttaagtgccatcaagcatatagcatattttacatttttacaatgctgcatataatacttattctatagtaactactgatcaatgtatatgttatagaactctntcgaaagcatacacctcacatgtg

SEQ ID NO: 27084 - DNA, 459 bp, Glycine max
  unsure at all n locations
tggcccttctcctttatgtttanaaagatagcttttcatgttaactatgaaaaggttattgaaaaaggttggagccattaatttgttggttgtcctatgtttgtcttaatatgcaagcttaaagtcataattatgaatctaaataaatctttctttggtgatattcatgataaagttaattcttgttataaacctattgaagttatccaatatgaaattagtcatgttgtattttgtgatgcttggaaggacaatgaggctaaagcccaattagatcttgatcaagctctctcttgcatgagactttttggaaggaaaaggctntgtgaaatggaattgccattgtaatacatcctattttcacatgactcangtacatcaaacatcaaaacggtttctatacttcgtaatggagactccctgttaacctctcaactagaattgaaaatagaggttcta

SEQ ID NO: 27085 - DNA, 505 bp, Glycine max
  unsure at all n locations
cgggaatgatgcgtcgctattacgcgcgatatcagctctgacctcgcgatactatagagccgacctgctagcgtgcacgcttggacttataccgctccagacatgacagtcgccgatataagaccgctctacgcctacaacactgacttgccatctgagtatggtcgttgcgacagtatcgacgcgtccgacttatgtactactaatgcacagagttgacccatgaaattggggaccgatgcttgacatcgctggatacacgcatacataacctcggtccaggactatgacttcacttgtatgccccatctccggcagcagactaaggcgtgcgcgacacttaatanatacgaggcgtgtcattggattccgtgtgatgcctgatctatgagcgccctcctaggaaatgcataggggccagaggaaggngcacatccagaacttctacatgtgagggaccgccctgactagctcgatggggagagctatctccatctgttatgta

SEQ ID NO: 27086 - DNA, 465 bp, Glycine max
  unsure at all n locations
tgcctcanagaggtccaagaaggataaggcggccgaatgtactagttccgctcctgagtatgacagtcaccgctttaggagcgctgtacaccagtagcgcttcgaggccatcaagggatggtcgtttcgacgggagcgacgcgtccaactcagggacgacgagtatactgatttccaggaggagatagggcaccggcggtggacatcactggttacccccatggccaagttcgatccagaaatagtccttgagttttatgccaatgcttggccaacagaggagggcgtgcgtgacatgaggtcctgngtaaggggtcagtggatcccgtttgatgccgacgctatcggccagctcctaggatatccgttggtgttggaagaaggccaagagtgtgagtatggccagaggaggaaccggtctgatgggttcgatgaggaggccatcgcccagctgctatgtataca

SEQ ID NO: 27087 - DNA, 267 bp, Glycine max
gtgatacgatctcagaatgtgggtataggacccaagttaccttactctccaacacacccacgcgagcccatgacgacaggcctgaacgggcctacagcacgagaaagcaggggggacaacaaaggatctagaacagacgcgaataccgaaagacgaggtgaggataagaccaagcccaaccacacaaaacgggctagggcggtgaggactacactgcacaagccttataagcgatactcacgacataccgccgccaacaggcgaccc

SEQ ID NO: 27088 - DNA, 188 bp, Glycine max
ggggccatgacatgctaattgacccaaaggagggtattgtaccgatgacgttgatcatgtacgttctatcattagtacactccaccacatagttactcccaataccaaaattatttaatgttaaccagatgacccaaccaatacatactggcaataccatgactactatgtggcatgataatagcttc

SEQ ID NO: 27089 - DNA, 431 bp, Glycine max
tgtaacatgactgcttttcttatatataatcaccaaacaaaagattgccataagtatctcccaccaaccccgaagatcaaatctcatactccctccgtttcaaaatacatgtccatttttgaaaaattgcggtaaccaaggacaggctaatttgacacaaaagttcctattttaccctagtcctttatgttctccattatatatttatttatcccacctcataattactcccaataccaaaattaattaaagttaatcaaattacaataccaatacatactggcaataccaatactactaaatggcactatttttgcttcggtattgaaaagctcaattggcatagttcggttatcatagtttgttaaaactcaattgaaataacttccctccattattaattatactctaatcttacaatgttgtggaca

SEQ ID NO: 27090 - DNA, 170 bp, Glycine max
tccatgaggatcaactctgtgtacctgaagtactatgggttgcttgctaacacgatgctcattctgaaaaactgcatgcattgggatgagccattgctcctcgcattactcattcattttttatcatgcgaccattatagcgtgaggtactctcctgtgcgcatagtcac

SEQ ID NO: 27091 - DNA, 461 bp, Glycine max
  unsure at all n locations
cttggcatcctaganaaaccaatattcattgtaaccttttctcattactagccaataaaagtccttttgattcaatttgtgcatttctgactttatgacatgagatgaagttcaaagattggacctcttgctagtcgttattgataaaaagcttaaacacttgtgcttgagtgaaacagaagctgtgagatttcggttaagcatctttccatgaatctgtctcctgtctagctntatttagttgtgttgcttgctaacatgttcttttctctgaaaaactgcatgccttgtgaaaagcaattgataaaggcatttttgtttcattttttatcatgcgactaatattttgggagttacacacctttgcacataatcactgcatgttttgtcacctttntatttnacctttgttagttagtttacacacgtgttcatactacacacaaaccttttacaacaag

SEQ ID NO: 27092 - DNA, 238 bp, Glycine max
tcacgactgatttgacagacgttgtgagacgaacaacttggatgcacttttgtccctctttgctttctctaattccgagctcacagctcggacttactcatcctcttcaggagcctctatggactcatccttgataacctctaatccaaagagccaatcgaaggcgagtgtatgaactccatggcatacacgataacgaacagcgacgccattaccaacgcctccattgtctttaact

SEQ ID NO: 27093 - DNA, 433 bp, Glycine max
cttcaaggaggtgagcttagttatgagaggggatagtgtagccacgctctagcttctcacggaagttgtctcaaacaagcttgtcaaggatgtcctctcaagagaccttctcaaggaagctacctactctataaatagaaacatgtgtaacacttgtggtaactctgatgaatgagagtcttgtgagacatacttcaaagatgcacttctctccctcttttattccttcaatttcgagctccccctttactctttctctccctctttctcttcctatattgaagcatccttctaagcgtcttatccaatgctcatcttgatggtgaagctccttcttccatggcttattccctagcggatggcgcctgctctcactacttctcctttgtcttccactgcatcttcatggaggagaatcaccattaaaggacct

SEQ ID NO: 27094 - DNA, 412 bp, Glycine max
tgtataagactatgttgcgactaggaagacgggtagtatttttcccgcctgcaatacaaggcgaggttggtctcacgattgagagattgaactaactaaatacatctatatggacataattcatcccgttaataccacaaaatcctaatgacagatagtaattagaagtctgagacgaaaggaggctcatagtgacctccatcatattgatcttattgctgcagttagaaacacaaatgaataccaaaataattactatctgatagcattaaaaagatgtatgatttcaaggcatgaacttggtaaagagtgtgcttactaatgctgaagaggacacgctttacatggaattcccatatctactcttgatttgctaattgcttacaagagcatatagacatacatggagact

SEQ ID NO: 27095 - DNA, 341 bp, Glycine max
  unsure at all n locations
tgagacctacgcgcttgtgccatatagctcttgctatgagattatagaagaacactgataccacggcatccgcgattagagagtcaccattaagaagctacaatgattgtgaccatatagatgaatcatcagaccagtactgaactacactctagcaactactctgatatatagcgacggcctaaacacattgttncacgtatgaacacaattaccccaatctgtgctgctacgactcagcactctttactggtgtaattgactattcaacaaatgtctatttcccatgcgtgcgaactcctgtacatggtagtagtccactatgccctattgcttccacc

SEQ ID NO: 27096 - DNA, 461 bp, Glycine max
  unsure at all n locations
tgtgatatcaatggaatccaagattccgttagtttcttgtcgttcaattctattcttagaaatgtgacctaagcgcttatgccataatgctcttgagtttgcattatcaattctacgcttagtaccatgtaattccgcattaaaggattcaccataggaagctacagtatcaagtaaatatagattatcataagccaagagtgaactagttctaacaatatctgaattaaaagacaacctatacacattgtttccaaatgaacacaaataacacaatttgtccaaataagaaactgaaaccaaattccgtctaaatgacgatacaacaaatgtgtatttcanatccaagcaaaaaccagtacataataataatctaaaatgccctatnagcttcacctccaccaatttaccatctccaacatatatctatatttcacaatcaattggcttccggtagctta

SEQ ID NO: 27097 - DNA, 326 bp, Glycine max
tacatagaagaccgactgaaccatgagatccacttcaaccacacgctaactttcctgatctatccagcaacagatacgaccctgcatggaggatttactttactctattatggcacactcctcaagctcatcatccacagcctgcttcgtccgtgcagcatgctgttggtcggctcataccatacatgtactgcagccttccatctgctattacacctcgccatacgaccaatatccgaggcgactactcaaccttgcctgacctaactggagctgaaaaagactatgcacatcatgccttccaacgagagacccatcctgcattc

SEQ ID NO: 27098 - DNA, 468 bp, Glycine max
gatactaagcttcccaggaagctacctagtctataaatagaagcgtgttactcttgttgtaactttgatgaatgacagtcttatgagatacacttcagagttccacttctttccctcttttattccttcaatttcgtgttcccaccttttctctttcttttcctccattaaagcatcctcttcaagcttcttatccaaggcaattcttggtggtgaagctccttcttccttggcttattccctagtggatggcgcctcccctcttctcttctcctttgccttccgctgcatctccatggtgaaaaatcaccattgaatgacctcattgaagctcatagatccatcctgcatagaagctccacacgtaagcttccatcatgcataacatggcatataattctgtcaccatatacaggtcgatgctcccatcggctaaattggtgaggcgtttatggaaattacgcctct

SEQ ID NO: 27099 - DNA, 440 bp, Glycine max
tcgagactgaagagcgtgcgagtctttatctgtgggagggagaagagaacaatccaaaatcaattgtacccttcaagtagcgaagaattctgtttgcggctgttagatgaggagaggtaggagcctccgtaaagcgacacacaacttccaccgcatatagaatatcgggccttgtattggttagataccttaaactccccacaagactcttgaagaccatggagtctaccttctctccttcatcaaactttgataacttcaagccaccttccataggtgtgttcacgggattgcaatcaagcatactaaatttcttcaacacttcttttgtgtagcttccttgtgagacaaagataccattctccatttgcttcacttccattcccaagttatatgacatgagtcccatatctatcatatcaaattcacgagacatggac

SEQ ID NO: 27100 - DNA, 467 bp, Glycine max
  unsure at all n locations
cgcctttgcttcttggccattgtgatgaagaggtaagatnatgnttcggnggggggggaaggggaaattacaagtggaagaacggtcaccagggaggtgggggcaaatgagctaactgaaaaagaatgaaatcaatgaaataaattgaccttcaattaaaaaaaaagtattatatgtaaccgtaatttctttcccataagacacttatgaagatctcccacgctgtctatatgccacattgtagaacataaagctaagaccaaccaacccatcacgttagtaattaattaagccatgactctaggcctgcaaaataaagacttttattngcaaacaatacttctaaaaataacaatactcatgacatgatacatatgctagtttattaacaaagactaagtatttttcttataaaagaaaccattctaatataatttcttcatatataaatatatactaacatatat

SEQ ID NO: 27101 - DNA, 146 bp, Glycine max
atgatgagaactgtgggcgtaatcagatggagagtgaccgcaatgcagctaagtaatgctatgcatgttatgtgctgttaactatagactgtacctacgctgcacactagtcctgactcccactaccagactgtgctggagcgaca

SEQ ID NO: 27102 - DNA, 393 bp, Glycine max
  unsure at all n locations
tcaactacaataggtcattgaatagccttgtcttttctttttctatcnctctgggagcatgggaagtattaaacaattatgagtacttgtgttttattcacatggatattggttgtacatcagctatttaattatttttttcttttgtacttttaacttttccttttcattctactgttcaatatcctttgattctgggatcaacttgggctttagcattgatcatttattacttagaaattgttgagtttttttcatggtttataagcacatatctttaatatatcatggcaccacgatgggcaagtgtgaacttacggatattcatttgcatgcaatgttcacgaattcaccgtattcttggagtgcatatatcaaaggtatatgttcatc

SEQ ID NO: 27103 - DNA, 224 bp, Glycine max
gctagctctgatcccttatgcatcaaacattccagggactcggatcatacgttgtcgcagctatgtctttgagacacgcttcactttctacgctagaaaccatagagacaggactcgatcgtttgactggcctgtctgacgatgatgacactctatcagcacttatttaactttgagatatatgactgaaatatggagcctctaaacatctaaggactattttg

SEQ ID NO: 27104 - DNA, 444 bp, Glycine max
  unsure at all n locations
catgcgaagtgggtggaattcctagagttattcccttatgttatcaaacataaaaagggaaaaggtaatattgtagccgatgctctttctcggtgtcatgcattactttctatgcttgaaacaaaattgattggtcttgaatgtttgaaaagcatgtatgaaaatgatgaaacttttggagaaatttttaaaaattgtgaaattttttcagaaaatggtttctttagacatgaaggctttcttttcaaagaaaacaaattgtgtgtgcctaaatgttctactagaaatttgcttgtttgtgaagcacatgaaggagggtttaatggtgcatttgnggtccaaaagactctagaaacattacaagaaacattttattggcctcatatgacaaaggatgtgcagaaattttgtgaacattgcattgtatgtaaaaaggcaaagtct

SEQ ID NO: 27105 - DNA, 141 bp, Glycine max
ttgacagaatgcagagactacatctctgcttctgctctcttcgacaatccccgtcgacaggctcggtgacacgcttatatattcttaactttgcaggctcacccgaactcacttactgactgttgcgtgactctgactgtc

SEQ ID NO: 27106 - DNA, 460 bp, Glycine max
  unsure at all n locations
tgtgtgcaataaacaaaaaactgattatgaattagaatctttgtctnttcgcgcgaatccgctatgcgagcctcgttgagaaaccaaacatctctctggcttgcttagcatagcggactgctaaacgagagtgtcaaaaactacttaagtgagtgtaacagcagttatactcacacttgccagatgtcggaaacttcatctctgcattcactctctccaaaaatccgcatatattgcatttgtgctttctttttgcattatcaactttgaagcaacaaccattcacaatccaagtaagttgctagattcctttactctgtttcttgtctaaaaactttaggatagaagacttcacttgttgcttcagattcttagggcgttaatggtctgttagaattagtataagattaggactatatacgctcagatactgtattgagtatgatgcacacattgcatg

SEQ ID NO: 27107 - DNA, 308 bp, Glycine max
actgaacctacataatacccctttgtctacctagtgtctcactatataacttgagaagtaagctattatagatgctacatagtgatattacttgaactggttatatatatacattatggtgccattgagatactattgtacgaaagaccactagagctcgaaaaacataatttaatagagaataacagcctgtcatcaagtatataatcctatatgcatattatgtaatcggatgcactccaactgcttaccatgacagtacggtgagatggtttctctctcttcgagtcgacgttgatcaccatggt

SEQ ID NO: 27108 - DNA, 464 bp, Glycine max
  unsure at all n locations
ntanagaaggaatagcaaagaggaggactatacagtatctctgaatttatgaaaacaattacacctcttcacgaaaaatatttactcaaccaaataattatcccctttgttctacaataattatcatcatataaaaaaatttgaaataattatcattttagattttttaatgtaatattaattaatttttttatttatattctttataatactaatgataaacaataaaattaaaaattaataaataatgataaagttaattttataaaatattattgcctctcattaattttttagttttttttttaatttatgtaaaaggaaaatctaagactactaattataatagtacggagaaatagtttcttcctcatggaatcaacattggttaccatgtttcctattgtacgtggagggttaccatgcatgtttcctttgttagcaaggatgtagtttcttataat

SEQ ID NO: 27109 - DNA, 276 bp, Glycine max
  unsure at all n locations
actgagctgcggcctacactagcaccgcacatgcttaacgctctatacttcaacacacctcacttgctcgtgacactatgctgacaactgcttgatacgatgagcctcttatgcatagccattattgagatatcactgaagaatttacgggttgaataaataaatggcaatccttgatcctccacatatatataatgaacgcntctgccattccaatggtcccgccccacacngattnncatatccgtgcactcttatgacctacaatacattagc

SEQ ID NO: 27110 - DNA, 244 bp, Glycine max
taccacagtgctgcggcatatacgagcaccgcaactgctgatcgctatttcctccacatgacctcttctgcagtttatcctttgccgacaactccttgacatgatgagatacatatgcattgccaacattgcgtcaagactgaagaatgaacgggatacaatcattcatggctgtcatggctctgacacaggtaactcattatccgtcccgacttccaacaggcgccgttatacattgattcat

SEQ ID NO: 27111 - DNA, 590 bp, Glycine max
  unsure at all n locations
ccgcaccacgactgcggccagagagcacggatangacatacacccacaacgcgaacgtgtggannnnccccccccccccgagcncatgatgcgtcgctagnacgccaccnanacaagacacaagcgcgcaacngcgnagggagngaaagagggcanacncagtctagttaaancanacacacgcangcagagacgagcgagcanacaaagcaaaaacaaccaccgacaacacncgcaacacaaagacggagccaangaaaaccgacgagggccacngaaagaacaaaggcggnnagagacaaaccacgcggaacncgacaaaaaggcccgagaaacggcaaaaaagccaccgcgacaggcacgacaacggcggaagaacaaccgacggagacacgccgaaggaacccacgccccagaagcaccggacccgagagagaagaacgacaacaaaacccaacacaaagaagaaacaancacgaacaacaccgcnacaacgaggcagacaagagnggcagccggaccacagcngcaacaacaanccnaggaccancacacaagcacacaggaggcccgagaagcacgacgaaacg

SEQ ID NO: 27112 - DNA, 347 bp, Glycine max
acacctcgttctcaatgtacctattatgagaagctgagaacatattcgatgagtggcacagtcacggtataaagctgagtcatctatgagcgaaacatgtactacgactcagatatgcttcttacatactcgctcatcagcgtactctttgtaatataatgcattacttagaggaaactccttatctaccagcctagccatgcctatctcaccgaagcctcgagatacctgtatggtcttataaacctagtcacatccaatggacccgattattaacactgtttcgaaggactgacgttggacgctgcacgaacttattgatgcttcatgggatcccacctgacaat

SEQ ID NO: 27113 - DNA, 434 bp, Glycine max
  unsure at all n locations
gagtggaaatcttgtgcagtggacacttaattttcctctcttgctagagttctagctagattcaggttctcaagccttgtccatccagttcttattggacttcaattcacaaccagaaaactctgtcttgattgagctgtactttataagcaactctctaagatgagtctgtctagactctataagcattntctagcacctcatctgctactagtaataaataatacattaataaagtgaaactctaattctaacagcagaataatgccaaaaacacctaataaacgatatatatgttttctccaattataattgcacacacaccatctaccaaaatttcaaaacactgcatggcaaagactgctgcaatgaagccagcacgagtcctcttgtcgctctttaatacaccagctggcaatcgtgctcatattctc

SEQ ID NO: 27114 - DNA, 256 bp, Glycine max
ggcgcttatgcgtacggagccagaggctgccttgcctccgacatctcacacactcgtgaactacgatgatcacacctgagctacgtccccttagctcgctatcttttatttaccctgtcttcaatgctttatggaatcattgcagcttacccatcttggctctcattgaagcctcatgcgacgaaggctcgacgacctcctacaatggagctcccttcctcgcgtctcccagagatgtaagctccacaccggtata

SEQ ID NO: 27115 - DNA, 447 bp, Glycine max
tgcacttcttcactttcctcaaggacttcagcttctttcccacttgggcctttaagctttgggagccaagttatcccttgcctcctaaacctcaaccacttgtgatagccgctgatgacgccattgctacttcccctaagctccttatctttcctttccactgtattccatgctttatggattctctgaagtatcctcacattggcttcattgaaacctcgtgcgacgaaaggcgcgatgatctcctccaatggtgcacctctcatagggtagcctagctgtcttatggccagcatgggattataattaatacaaccccttgttcctatcaaggggatgtttgggaatccttcacacgagcacaacactcctgcccctccttctttccatcgggggaactagctaatggacgctcctaccatacctgccaagagttcttcttaattc

SEQ ID NO: 27116 - DNA, 497 bp, Glycine max
  unsure at all n locations
cacccacacccaacaaaaaaaaagaagtgaaacgcanggcctcnnaannnaaagttgtgctcagacacgagaacaaacacggccggagcggaaacacggcagcagcatacgtacaattacgccgcggaagcagaagancggaanagaggcgaagcgcaacaaagccgagaacacgaggtgacaaagagaaatggatgacaaagaccagcgaaaatgagggcaagaaccaacaaccccacagaagacggacgagacgcaaagagctcaacaagcacgcccacccaagtggaacggagcgaaaccaagctaacacgcccgcaaagagacggcagcagaagagcgcaaaacaggcccagacaaacggcaacaacggcgagatgacaacgcagcccatggcgtggcacgaccaagggaacacccggcgaagacacaacgcacaaagacggaagaacgcacaaagcagcagaccaaacacgcggacagaccacggaaacccg

SEQ ID NO: 27117 - DNA, 504 bp, Glycine max
  unsure at all n locations
cggggatgtgctgtgacttcggttaaanagcacgacgctgagagacgtagagtctacctgcaagcatgcttgctttactccatgcgcccagaacgacgcatgcacctgcatgcacggctacatcaattctagttggcatccttctgtaaatatgctctgacagagagaggtcgaatgattatggaatgaaacagactaatattagttggtttcctggatcatcgtgaaagctcctcgttatacatgagatctttaggacactagaacctgcactatcttgtatattacgaaatctgagttgagagtgagctggcaaagtttcctgggaaatattctagtcgtgatatactataagatttactgcgcactcccatgtcaccactccattacataaaggccaggacacattctgtgctattgatagctgggagaggctactcaaacactttcaatcgattacctattacagaccataataacgtattgtaatagccacaacactct

SEQ ID NO: 27118 - DNA, 389 bp, Glycine max
atgaagtgaagctattcactatttatttttactatagcaccccagaaccaaatcttgaatcacatgcagtactagagcatcaaaagttggcatccccatctaactatgctctaacagaagagtctaagtctttggttcttcacaacaattttattagtccagattctcaggatgcacctgtaaagcatgaaacttttggacacaaaacctgcactatttgttatttacaaaattggttgaaaagaattcaaatgtttctggaaaagaagctaatggggaagtcattaaggatcaacagccacgcccaatttcaccactccttttactagttggcagtgctcagattctgtacctattcttctcttttgagtgtcctacaccgaactcat

SEQ ID NO: 27119 - DNA, 481 bp, Glycine max
  unsure at all n locations
cgannctatgatcctgaacntctggccttcgacctgacccgcgaatctataggccggcagcatgcatgcatgctttgagttagcacggcgctcgaggngcgtcccgagactactgtcatagcagactgtacctgaggtacgcacagctctctatataacgagacaactgctgcttgagaaccttctgtgaaacactgtcgtgagaaccttccttggaacactctctcgagaatctacgttgcctgtgtatgaacgcctgctataggatgactcctcacacttctgtgcaaggtaggctgccctgcctacgaagggatgctagagcttattgtcacacgcgatagcatatcacagctgatactatggcatatgcatgatcatggacgagggtgcctcctacaggactactcggatgacctgaatgcatgttagaacataactaagagatgggcaactacacgcctaccgaatgaacactctc

SEQ ID NO: 27120 - DNA, 318 bp, Glycine max
ggtaacctccactagtgtaagagtagtacgtacgtgaagcatgtcaagctcccctagcttggacaactgctgtttatgctacttatagcaagcaggctggggtgaacaagctttcgagcttgcatgcaaatatagagcctgcacgcggatgatgtccttaaatatgaagcactaccccttttctgatcattgtaagatgcatcgaagacaactgattccttatgactttggctacaggcgagtgcatcccacacatgttacttctgcatatgtaacactcatgggcgcggcgcgttctgaagatacaccacatgggtg

SEQ ID NO: 27121 - DNA, 514 bp, Glycine max
  unsure at all n locations
acgcgnnnnatgattgaagtcgttngcacantctgngacgatatacgagcactcgagcccgtgactnctctagagctcgacctagcatgcatagctttgcttgntgtgtattcaattgccgagcgtatacgagatacgctatggactcgaatcgcacatgctcatagcaagtgcatgctcgcttaactttgatctaggatgtgtgattaattcccggcatatatatatacgccctgaactcgataacgcatgctatgagcacattcttacgactagaactttctactgacgatgtatgattgattcacatcatgtatagtgacgatcgaaatgaaaacgtcatctgttaaaaagttataggacattgactttgttctcagattatcgattgtgtcctgaacttgccgagatgctcggatcgatacaacatctcattcaaagttatactcgataatttgtctgcgtgcttgttctgctggtgcagttcgagaactcgagatgagcagactccgcg

SEQ ID NO: 27122 - DNA, 265 bp, Glycine max
  unsure at all n locations
ggcagcaaatncagaccgcaataactgtttacttttatgttctataaagacccaggatataccgagatgctataaattgaaaacggaagctcatagcatctgcagaccacaataacatatacctaggacgttcgatgaactaccataatataacaagacgctcgatatcgaatacggaagctcctagcgaatgctacctacaaaaacttcttactcagatgtctgatagagatccatattgtatagcgacacttgaaatacacaa

SEQ ID NO: 27123 - DNA, 458 bp, Glycine max
  unsure at all n locations
cctcnatatgctatgagcctgaattcaggcattcactctgaccgtgacctctgagatacctgcgttgcatgcagtttacacaggggtcagcactaagagctcgtctatttttgtgagttaggatggagatactagaggatatcaagtggaaggctttcatcacggtatccagtttgaggttcataaggctccctacagctcatacatatatttactcgttcttcaatatttaacgggtaagatcctcctaccttgcctttcatttcatatcttgtactacaggcgtttcacgattggatcacagctctcattatcctctctaacattatctttatactcccctctttgacgtgctatgccatttagttaaacatgcctgcttaactactatcaccatgtccctctatcgatgatgtgcctacgttctttgcctaggtgctacgcactccctctgctcg

SEQ ID NO: 27124 - DNA, 474 bp, Glycine max
  unsure at all n locations
cgggcataagcttgataccctagaactcngagaactatgaaactaagcttctccccatcttctataacagggtgtgattttatttataccagggctcgcccccttatgcactcgatctcttacaagtcgcataagagggtggtctctgtgaagaaaagaccagtccaggacctctcataacgtcttcgagaatgactttacgaaaggtttatacccatctgcaacgatcatattctatctaattcaatggctgagataatcctcaaaccttgcctatccattcattctatgatcccttcgaggtcacattagctaacaagttttatttctcatattctaatactgaaatacccctttggacgagcatacacttacgtctagcgttgctcgaatacctgatatgaatatattccacgatttgcatattgccaacatgacctgtatgaatgagtccgacatcgaactcctaacacg

SEQ ID NO: 27125 - DNA, 507 bp, Glycine max
  unsure at all n locations
ccccaattgttgccctattgatnccgttcgacttntctgngacgatatcgagctctcgagctcgtggcatctctatagtggacgcagcatgcttcgccatcttgcctcttgcgttatacgtgacagttgctcgatggaggactcgaccgactcaaccggggcatagctgtatgacgtatatagagggcttctacatactcactttatgcatgagatctcggctgttgaagacgctgcgggttcactgctcgtatacttgctttagagccgccttgtgtgtggctcctttgctggaggaggacacatatggtgctgtgcacgttttcttgctcaccccagcttactcttcgtagacttctgtcccagacactcccggtcttcgaatcttagtcatatcagcggcatcaattctaacgctgacctggtctggataccctgtgcagaagccttatctgatcgagcatgggatagatcctgcctatgcatgcctgcatgttggatagtcan

SEQ ID NO: 27126 - DNA, 457 bp, Glycine max
  unsure at all n locations
ttgacatcaacaatatgagtgaaactggtccttatgtgtcatcatcgttcttcgattcagttgctcagaggatgatgcagtacgcctcaccgacgaattgctattttgcataaattcaaaggcatctacatactcccagtaaaatggatcgcgctttgttgaccttgggttcctgctcatagctttctttggagcccccttcgtgttaacctttgctggaggaggacacatcgaattctgatcagggtatgcaatttcccaaagtttagtcttcaaagtaaacttaccacaaacatcaagttcttcgaatcttttaaatattggttccattacttccttgatgctcacctcgggctcagataacccttggtctganaaacttagtcatctccagaacntnnggattgaatccagtggaatgcaaccactaacatatctgtatagctcacaagcacaa

SEQ ID NO: 27127 - DNA, 382 bp, Glycine max
  unsure at all n locations
ctgcaagcaggcacgcttccgtctattactacgctgngagcatagcatattgatatgatcgcttagatcacaaggatataattgtgagcgtcgtagtatccacagcatacgccaactactaatacttacttaaaacactcatgctccaagggcgtaggatcatatgatgatatcatattgtgcgcatcacaatggttgaactctgattcatataagttcatctccataagatacttatgtgttgcgccattgattccaaccctgagcttactagagttgaatatagtcattataattaatatcgtctggaacttatatccgactcactgactctcgttagtttcagatatgcgagaatgctgtaatattcaatctctattga

SEQ ID NO: 27128 - DNA, 462 bp, Glycine max
  unsure at all n locations
tataanaagtataataaattaaaaaaaataaaatnaatacttatattaatactatgtttgcatcaaatattcaaatgaacatttagatgtaatgataaaagggtgtgcatcttatttcaaggatcatagttctactcctaatttcttcttaaagcattcttttaagtaaggcttattaacatatgattaaataatattttagggaatttaatggtttaattcatattcaaatattttcataaccattaattaattattaatttcgacatttattttaacaaagaaattattatttttgaatattttaatttgaaaaaatattctttggaaatattattttatttacgtactcaagtttgtttgaaatatatgattaggtaatattattctatcgctattgacataatttacagaanatgttacaataaaaaagtgtgtgaggaatatatgaaatttgtttaa

SEQ ID NO: 27129 - DNA, 487 bp, Glycine max
  unsure at all n locations
gagggatgatgcctcgtgtacggctcaatcaccggacctgagatgtacaagttatcgcgaggcgagcaagcttattttgngttttgagatacaatagagactcgacttactgactcatgcttatactgtggctacagatggaatcaacaaacaccgcaggatctatagttccagcttatatccataaaataaaatgcagtgcatgcagcaccactatctgatgaagaagttatgataatacaatcaagtggtgatcgaatagtgtcataaacacacacatgcgacggattcatgtattgtgactgtggggacaggacatgctaatgatgggactttgtattagacccctaacaacttgctgatcttacgtaggcctgttgataacggggagacttatccttctccccagagcgcttttgtatttattacctatacctaacacataggctcacataatccttttaagagagatatataaaaggggccg

SEQ ID NO: 27130 - DNA, 350 bp, Glycine max
  unsure at all n locations
agacatttttcatgctgtggagacagttttangtatgtgttntngaattcaataaagacgggtcataaggactcatgcaattacaattcatcatgaaggattcaagaaattccacagaatttaaggtaccaattttcctataaaatctttgaagtgatgcacatgactattgttgcagtttttatgacaaaacacgaagcaattagctcacagtgttataaatacacacatgcagctaattcatgtattttcactgtgtgaacaggacatgcaaaggatgggattttatattagacatatttcatcatgttggtcgtattttagcttgcctgatataggggacaccttac

SEQ ID NO: 27131 - DNA, 329 bp, Glycine max
  unsure at all n locations
gacgagcacttcacgctctgctcgctgctcatgagctcagagagagacgatatgcttcgcattccgcttgtgaacatgcagtatgatagactgtgatgatggttgctcctgagctccatgtgtaatctacatagcgctctacactcatcagcctaccgtccttatattacactgacacatcangacgtagaacgagctatcactctatcgaatattagcacgtctcttacgcgcatttgaacctgctatgcgtggtacaatgacttgtatgcgctggacaccgcgctggagacctactgcacacttgcttgtatgagatagtatgctga

SEQ ID NO: 27132 - DNA, 475 bp, Glycine max
  unsure at all n locations
cacggcnntttgatgagtctgttgcatggcgnncnanttggtanagntcgctncnnntgctgatatggatcaagcagacacccctgtcgtagaccgaagaacaannanggaaagaggggaagctggggggcctnaagcgacaagacatgcttcattttattcttgtgacgatgttctaagtttggctatgacaatggttcacactgaaaatcattatggattctcattgagctataatctcatagagctaccttgtaattgtcggtgtcgacagcacccgtagcaagagcttttcaccctgaatatatcaggctaactgcccataagatcaccaaggccgacaatgctgtaggttgtacaccgactggagatatgaagacgctgagatatatttattggacttgccgctagaacgtagaaggaccttgctcgacactataacctcctatgacgacctgcgaccttttaatctacg

SEQ ID NO: 27133 - DNA, 304 bp, Glycine max
gacctcgagccccatggtgcgatcggcgcctactatatgatgacatgacgagcactgtcagtagaaggcagcgacattcggtcagcacgatagacacacatttggaaaagttggatgctctgtaaacatatcggccttcagatgaaacaagcgccgtgcgctatttcctcgatgataggcgagatatctatcctgcttaggctgtgctcacatgacgagtatgatgtcatcatggaacccacacctgctgggatcgtgagggcgctgaatcgaaattgtttccgtcagaatgtgaacatctata

SEQ ID NO: 27134 - DNA, 456 bp, Glycine max
tagaacaataaacttggccttctcttaattgtctttgttcttgtcgaccacgatcaacaaagtactttcggcacctactatatgttgacttgaccaacgctgttattggaatgctgcgacaatctttcaacaccttattcacacattctgataggttggttgtcatgtgaccatatcttcgtccagatgtatcgtaagccatgctccattttttctttgaaatgcgatcaatccatcttgctatggctggactcaattgacgaaatttttctaagttttgatcaaacacatgcttgcaaggagtgtacgctgcatcaaatttgttaccatcaaaagttgtacgtagatatgaaactcacattaacttaatgtataaaataaaccttacccaatctcttgaacatctctttatgtttcgcgttgctgaattagcgattgaaattactggctatgtgt

SEQ ID NO: 27135 - DNA, 406 bp, Glycine max
tgtcttcactacagcgccccagaacgacacatgcacttgcatgcgctgctacagcatcactagtcggcatctctatctaacacatgctgtactgaatagtcaaaggattaggaacgacacagacaaatatatgaggctctgagacataagatgcacctgtatagcatggaactacaggacgcggaacctgcactaaatgtaattacgaaactgattagaggaatggaaagactctggcgaataagcgaatggtgaagacattactgatcaacagtgacgccgctacttaacagtagatctgatatatggccaagcatacattctgtagcatattgatagcttgagaggaggctacacagcactactattctgtcgcttatctaacccagacacatagttatgtact

SEQ ID NO: 27136 - DNA, 453 bp, Glycine max
tgaaggtagaagctaattcactatatgcatgtatctctatagcaccccagagccaaatcttgaatcacatgcagtactagagcatcccaagctggcatccccatctaactatgctctaacagaagagtctaagtctttggttcttcacaacaattctattagtccagattctcatgatgcacctgtaaagcatgaaacttttggacacaaaacctgcactatttgttatttacaaaactggctgaaaagaattcaaatgtttctggaaaagaagctaacggggaagtcattactgatcaacagccacgcccaatctcaccactccttttactcaggggcagtgctcagattctgtacctattcttttcttttgagtgttctacaccgaactcattttcgctaaattatcaacaacagccaaatagttatgtactggaaaggtccacacagaga

SEQ ID NO: 27137 - DNA, 254 bp, Glycine max
agaggagctactcacgccgtgtattatagagcatcaccgtagctgcatgtgatagaaagccatcgagtgaacatactaactgccatatctaccaagccaatattaggatggacccttttgaagcttcatatgaacgataggacaaaactcactatttgttggtacgatgatggagaagcaatacttctagtaccgaaaatgctgcttcaaatgaacgaacaatagatgtagattcttgagaagataaaagcata

SEQ ID NO: 27138 - DNA, 398 bp, Glycine max
  unsure at all n locations
gtacttcgggcgtgtattatagagcaacacggtagctggatggattgtttgccattgattgagtttacttacaacaatagctaccaagccagtattggtatggctccttttgaagctttatatggacgaaagtgcaaaactcctatttgttggtacgatgatggagaagcagtacttcttggaccggaaatgctacaacagattaacgaacaagtgaagttgattcgagagaagataaaagcatctcaggataggtagaagagctattatgatagaaggaggaaaccactagattttcaggaaggagaacatgtngttttgaaggtttcttccgtaaccggngtcggaagagctctcaaggctangaagttgacacccaagtatctaggtccgtatca

SEQ ID NO: 27139 - DNA, 500 bp, Glycine max
  unsure at all n locations
agaggtatgatgcgtgttgatcatctgngtaactatcagctctgagctggtgatctcttagtcgaactgacggcatgctttcttgcccagatagcgagtctcacggaggatatgctgcacgtgtaccttactgtatagctgtgactaacgactgctctactgttctccttatgcaacatgatgggcgctcaccaagaagtgtaacacgcctgatacggatgaccttatgcaccttcactacgaatatgagatcatacctgtactgaaagccatcaactacaactgagaggttccacggtcgccccggaatagtgctgccacggggggtagcttacatgctttgcaatgaaccttgacaggtgagacggcctctctcgtctgtgagatcgatctgtacccatgactctctggggaccttgccttatgcgcaacccaccattggacactgctatgctagatatgcgatcattggttattgctctgcctctgtctcttgttcg

SEQ ID NO: 27140 - DNA, 464 bp, Glycine max
  unsure at all n locations
tcattctacacctganaaagaagatgagatagttgcattaaagagaaagcttcctaacaaaaattttcatgcaggtggaccttcttctagtaattatgacttaccgcagcctcctatccctcttctattcccacctatagcaattctaaacaaaaaaatggaagaagcggaaaaggagatcttggagaccttaaaaaagtagaggtgagcatacctctactagatgccatcaagcagattccaagatatgccaagtttttaaaggagttgtgcacccacaaaaggaagctcanaggcccaacaatcagcattgataggtaaatctgttcctcacattcttgagaaatgtaaggacccaggtactttctgtttaccttgcattattggggaacagtaaattgagaatgccatgctagatctangagcattagttagtgtcatgcctctgtccatatttaattctt

SEQ ID NO: 27141 - DNA, 253 bp, Glycine max
catcaaacattgagcttgactgatctgccgacggatcgactttagatactatattggacctgacaacagctgcaatgggcgatgctacgctactattgagagaccatgcgtgtatatggcatgggctggtgagctagatttgatagccgatatgaaacatggtgtctatggctttatacatacgtaggtaaacatatcactagcatatacaggatatactatatgtatctctcatatcccgtatgtgggattg

SEQ ID NO: 27142 - DNA, 455 bp, Glycine max
  unsure at all n locations
tnttgaaatggactatgttatcgcanatcgaatttaatgaatgtatgaagaaacattgagcatgaatgaaatggagacagaacgatctaaaatcacatttcaacattgacaactggtgcaatggccgatactttgattcaaatgatgacacatgcatgtataggcatgggttggtgatattgataagatagctgatatgaaatatgttgtgtatggcattagtaggctgtcaatcagcatagacattgcattttttttaaattaattaattatatatcatatcccataaattgtcttcatgaattttataaacatttagtctcccatttttaaagccatattaagtggaatgtggaaaaagcgtataaaatgagatagctgatacattcaaccagtttctgtatcttcctgttgattnttgactcacttacacgttacacaatatcatgttcaat

SEQ ID NO: 27143 - DNA, 216 bp, Glycine max
atcatcggactctatgtctatgtgatgatagaccactacaattttcctaacaacctctagttattgagggctgaacatctatcatatcctggcaattgcctgatagctctctgtaactccttgttggcaggctatgtgtacaaccttgctctgggcttgtctgacaatctgtgtcaacctgagctcttgataagctaaatacctatttatccccac

SEQ ID NO: 27144 - DNA, 449 bp, Glycine max
agcttcattaagaggcttcctctgaagctttttatgatgcttctagcatactccagacatcttctcaaagatcccaacagtcagatcatggacaagtgtcttgtgaagtttaagaccaaatttcgagaagatccaacggttaatgaaggctgagcagcgtttttaccgaggcagctgcatgtagctttctctagaagcttcattaagaggcttcctctagaagcttcctcgtggcttctttgagaagctttctcaacaggattctttgagaagctagatccttatctatccacacccctctattaactaaattaacttccttaaaaataattacggatgaaaataacgcaacaaataatcaaacatcaaacataattactaataatatatagatatatatatcagggtgttacaaggaactaacagatttgaggtcacatcctcttcaa

SEQ ID NO: 27145 - DNA, 229 bp, Glycine max
acgagaagctttatgaaaacgatactgctactcgtaatctattactttcttctgggaatcgattaccatagggtaataactctgagatagaagggtctgagaggctgacctgtgctactcttcacttgtacccatatttatatacttatgttggatgagcctgctatcgatttttgactctcgagcctggattgttgctcttgattctacgaacctgtgtatgagatac

SEQ ID NO: 27146 - DNA, 451 bp, Glycine max
  unsure at all n locations
tttttgtganaggatgtgactcttcactttttttatttgaatttcaacgttcaaacacactggtaatcgattaccaaatcattgtaatcgattacaacattttgaaatcaattggaacgttgtaaatttagttgaaagctttttgaaaacaattttgctactcgtaatcgattacaataatctggtaatcgattaccagagggtaaaaactctttggtaaaaggttttgagaaaaattcatgtgctactcagtttttgaaaaaactttctaatacttatcttgattgagtcttctcttgattcttgaatcttgagtcttgaatattgatcttgattctaggaacctgaatcttgaaacttgattcttgattcttgaaatcaaatttcctttgaaccttgaagtgttcttgattcaatcttgaactcattctttgattcttgaagtcatcat

SEQ ID NO: 27147 - DNA, 434 bp, Glycine max
  unsure at all n locations
cacattatcggcaggcatgcaagctttgataatggaacttatgcctgttcatcttaaattgttgcaggtactcttccttcttcagatactcttccttcttcctagcagctagtgcctcaatcatcttcttgttagctccagacattgaccttgctgcccacactgcttttgcaatcaggttactcaacataaatcttattgacatattgttctttgattttccatagattaaatgtgtaaacatagattaaattcttatccaaactttggttataagtttttggtagaagcaagctaattgagttgctcacctttttagttaggtagttgcaattctatattagtcaccacattttttgttgctaggtatgaattaccaattnttggtttctattcgtcttttgcaatatcctggaggccaagctgatngaatg

SEQ ID NO: 27148 - DNA, 455 bp, Glycine max
  unsure at all n locations
cgcgccctttgatacgtcgcattacgtgacctaagatactaagctctcttatccagacacattcttgngggangcgcgtttgtatgggaaccacgccgggaaggcgaaattgcagcacgactccgccccctcggaccccagcctggacgtagcagccagagcgacaatcctatgctcggagctgcaggctacgcctagcagccaaacggcggggcaatgaggaactcagcagaggacaaacgaatagggctattagagcctcatagaaaaatgtgaaagcgatacaaagacgcataccacaatggatgaagaggctcgccaagcacgcaatcgagtgcccacctaacagtgggacgcggatacaacgcacccccggtggccgcgctagccgaaaagcagcccggacgaatcggggtgcaggaccgacgacagcagtgaggaggaaagggaaggan

SEQ ID NO: 27149 - DNA, 88 bp, Glycine max
tgctcatggaacaatctgaaggagacgctatacgatacatcttgacccacgtattgcagttgtcgataccttgactgcagtgagtctt

SEQ ID NO: 27150 - DNA, 467 bp, Glycine max
ctcagcttctcaggaagcttctcaaggaggtgagcttagttatttgatgggtgtctgtagctaagctctagcttctcaaggaagtttctcaaggaaactacctaggctataaatagaagcacgtgtaacacttgttgaaactttgacgaatgcgagtcttgtgagacacacttcaaagatcaacttctctccctcttttcctccttcaatttcattctccccccctctctctttcttttcctccattgaagcttcctctctaagcttcttatccaaggcattctcttggtggtgaagctccttctttcatggcttattccctagtggatggtgcctcctctaacctctactcctttatcttctgctgcatttcaatggtggaaaatcaccattgaagtaccttagtgaagctcatagatccagcctccatagaagttcacaagcaagcttccatcaagtggtaatca

SEQ ID NO: 27151 - DNA, 231 bp, Glycine max
tatcagacacgcgctgaaagaaatcctcgcgatactctcacgagatgcgcatgattctaacattctccacagaagtcctgagcgggcgcatatcacgacaagaggctctgaataaatccacgcgtgctcttgtgatattacactgatatgaacctccacacggcaactttcgagcaattgaattggacaagagctttcgcacggaagttctaatcatgtctatatgagatg

SEQ ID NO: 27152 - DNA, 238 bp, Glycine max
ccatagcaatcgctggagagtttccaacgtctaatcataagcggctccagatatgatacatcctgaagaggacatatgagcgataggatatgaccataggaatcgatggagagcttccagcgtatagttacaagcgtaccctgattcgaagctccctgagagaacatacgagcgtaaggatatgaccatagctatcgctgaagagtttccgatgtcaatttatgagaggctccatata

SEQ ID NO: 27153 - DNA, 300 bp, Glycine max
gacgctagaggaatggtgatcgactctttacaccaagaggcaaccatgtggatggatcggtttgctcttaccttgaacgggagtcaagaacttccccgattgttagccaaggccaatgcgatggcagacacctactccgcccccgaagagattcatgggcttctcggctattgtcagcatatgatagacttaatggcccacataattagagatccgtaagagactagtatggtctctaacaccttgactagatacgacttcctttatgagataaaatgagttggtcccatgtttctactc

SEQ ID NO: 27154 - DNA, 429 bp, Glycine max
  unsure at all n locations
tggctcagcgcttatgcgagacggagaccaacatgctatctatcatcgccaagtaccaagaagagtcaggtctatccgcggcccacgagcataggattgcggacgaatatgcccaagtatacgcggaaaaagaggctagaggaagggtgatcgactctttacaccaagaggcaaccatgtggatggatcggtttgctcttaccttgaacgggagtcaagaacttccccgattgttagccaaggccaatgcgatggcagacacctactccgccccctgaagagattcatgggcttctcggctattgccagcatatgatagacttaatggcccacataattagaaatcgttaggaaacttgtatggtctctaagaccttgactagatacgacttcctttttgnataaaatgagttggcgcatgtttctact

SEQ ID NO: 27155 - DNA, 291 bp, Glycine max
gctgcgggtttttgcctcctatggatcggatctgctgctactagacggcgcttagtaggagagtacacggagagagctgagaagctcggggatgtgttcgtactgtagcgaccgcatgggggtatgagctcttgcttttcagactatttgattgcatgctacgaatgaatgaggttatgggagagacgtgattgactgcactttctcgaagcgtattattatctatttcctagacacagcctattacgtaaagatggagggctggcagagtattaacactatcatacgata

SEQ ID NO: 27156 - DNA, 447 bp, Glycine max
actcaagctagacaaaattatggacaattgtcttgccttcaggggttatatagctctcgggatgaaactgaactccctggtgaaaaaaaaaatcaatatgtgaagagaagagaagggagacaaagtgcaagttcaaagataataataataacaataacaacagaaaaaaggcatgaacttcagatcagcagaatcttttactgctaactatgaataaatgaggtaaaaggtttaaatttgattgtaaagcaccttcacgagtagctaagtttcctaatttttaaacacagcataaaatataaagattttgccctgtaaaagtataaacactaaaaaagataggtgacatagacaagatatagggggttgcatcaatccaggaaaagataaacatggactgatggtaaaataaattacatctactatgtaattctatttgacaaaaca

SEQ ID NO: 27157 - DNA, 498 bp, Glycine max
  unsure at all n locations
cgggatgtgcgtgatgcctctcggtcaatcagcctcagctgggatactcagagtcatgatgcatgcatgcattgcttgcagataaaggtacttcctcaaagcaagcgatagaagagggtctcgatgacacgcatatntactattctgcagtgcgaacgaactactgctgccatgaacatattgacgatgggggacatacgcgagctgagacgtgccgtctactagactagacacagattactcccaacccgtccatagtcatactcagactctaccaaagactatccttaatgactatcctgtaatctatcatcgccttccctaaatgatgcactacgccatgacactcttcttactatgacgaataccagttgtagccccatctatatcgcgacccactataggaagatcgctgctcatcagctctgtgcatgccaccgatgatggtggacgatgcttatacatgcatggnagtatatacgcgaccgaagtgctcct

SEQ ID NO: 27158 - DNA, 460 bp, Glycine max
taataaaatttagttttgatgagaaattgattattgttaatgtaaaattatttccttaaacaatctatataaaacaagtcatgtcccatttttttaactatttatagaatctatcaccacctccaaactaccataaacataaaaactagggttaccttttgtgagtagagaggtgtgtctattgtataaaacaatttaattcaaacagttcaaagttattatcagagtcaaccaaagaaaattttctatgactcttatctaaactatcatcaaatacaagaaaagatgttttacgttatgacatttttcataattaaaagattaaaagttgtcaccacatatatatagtgacaaactttggattgatcacttatcatcactaatatgcaagtcactgttgtattagtgatgaatattttagatgtcataaaaatatatattgtgatggaaatgttgtcac

SEQ ID NO: 27159 - DNA, 444 bp, Glycine max
tgttacaaccaatatttgtccgaccaagccacagttatctctaacacataagaaaatttgttggttagattgcacaatgactaacaccatattgtcttacaaacgaataagcaaattaaatgcatagtctcttttctcaagatgaataaagagttttgagagcttttctaaactctacaagaatatacacagagagatttttacacagaatgaaataatgagtgcttcaaatcatgctacatatcttcaaagcttctggtatatataggccttttttaatcaagtaattgttatatctaaacggacatatttcctctcttaagcttatgtctgaagaaaatggacgctggggcattaaatgtgtgcattatatgcatgtactgcttcatgttgagaaaccactctatgtcgctggcatgttgaacactacaacaagagatcact

SEQ ID NO: 27160 - DNA, 224 bp, Glycine max
tgcacatgtgaagcaattaaactttgtctcaatattaaacagatggcgtatgctatgctggtatggatagggtggagccaacacttttctactatttactgactgattatatccatggatccgtatggctcgttgaatcaagatatttccttagatcatgaggaagatcgaaatgaagtaggtgcttccatgtatactggagagctaacgcatgcttgagcctt

SEQ ID NO: 27161 - DNA, 341 bp, Glycine max
  unsure at all n locations
catgcactcacctataattctattcttcgtaacccttaaagccttgttccactccttgatggagctcactacagcgcaataatgattctccatgatatcaccttatccttacagaagtcttgagctactaaattgtatttagaatgggtgtgagggggaatatgatacactgactgacggaggataatgactattcttcaagaagtatgcctctccatgctctatgttcagagtgatgcggctcttgctactacatgcatgttgaaaagatctatccaggagaatagttgactangtcggctcaattgatggctattcctgagcaggatacttattccgaa

SEQ ID NO: 27162 - DNA, 452 bp, Glycine max
tgagtgatattgtcacagaatacacttgttgttctttctccatttcatccaccccacttgaattctagtcgcgcattagttaaaaaggtgtatatttttacagcattgaggagaaataataatcaagggaataatcattctattttcaaaataataattgttacagctgtcatgaattactagtagttagttagagggggtaagaaaataaataggaaagactgacagagggaggagaataataaatgtaagaagagttggcctctcaaagagctaagttaggattgatgcagctcttgctacttcatgtattttgataaagaactatccaaggaagaaaagtttgacttaagtgagctcaaattggatggactaatcactagagcaaggagtaaaagatttcaagaagagtttgtcaagagactaaattctctcatggagggaaaagaaga

SEQ ID NO: 27163 - DNA, 442 bp, Glycine max
  unsure at all n locations
ntgtccgcanaaatcactgagaaccgtatagatgtcctgcgccttacacgagcatctttggttttatcggttaacacggaccattcaaaagcataaaaatcaacacatcactttactgccttcgcgagaactacgtaggtctgatttcctcttcgatggaggatacgtacgagcaaaagccccgcttttgtcgacctcgtgagacggttagaggtccaacgccttagcttttctcacatagtacaatggatcattttaaggtccaaacgccttaaatgaccgccttccaagtganaagaatcacttgattcgcccctttcgaaagaactgcgtatgtctgatttccttatcacaattgatgaatacgtatgagcaatggaaacacccttgtcgaccacaaaatgatcaattatacataacaggcctaaactgacatattata

SEQ ID NO: 27164 - DNA, 270 bp, Glycine max
tctaatggatggagcctactcactccatacattctctgattcacgctgtactcacacgctggattcatatcatacaaagaactgatacatgattcaatcattcaactgcataaacaacctatatgcacacctctctaactatactaatcgtaatatgcatgactgacatctacttcaactgattacctgatctctacttcgtacgactgcttctcctctccttacaaggactactctaaccatcctactcatgctgtcgctgactttcat

SEQ ID NO: 27165 - DNA, 422 bp, Glycine max
  unsure at all n locations
tcttatccaaggctcatcttggtggtgaagctccttctaccatggctcattccctagtggatggcgcctcctttcacctcttctcctttgtcttccgctgcatctccatggtggaaaatcaccattaaaggacctcattgaagctcaaagatccagcctccatagaagccccacaagcaagcttccatcaacacgtcctagccatcagaggcttgcaccccctcgccttcaaaggattacatgtcctcgccttcagaggactgcatgtcctcaccttcagaggactacacgtcctcaccttcagagggctacacaccctcaccttcagagggctctatgcccttgccttcagaggactgcacgtcctanactntagaggactacacgtcctcaccttcagaggactacacgtcctcaccttc

SEQ ID NO: 27166 - DNA, 258 bp, Glycine max
gcatgcttctaccttctgcgctttcgagatcacttgcaattacagacacaacttgacaacgatgagactttctcgcgccgaggcctatccctagcggaggagtcatgccaaccttagatggttgacgattactctctaccggtctctgccgctgttccttctgtcttagccgtacatctagcttctaccggaggctcctccgcatccttctcttgaataacttgtgtggaccatgactgtgcctcacatgctgtccct

SEQ ID NO: 27167 - DNA, 467 bp, Glycine max
  unsure at all n locations
tctgccctattntcctataaatagggggagaagtgaatttgtttaaatgttcagctctcctggtaattcgagatcacttgaaattagtgaaaaaaattgtttccgtgaagaaaatccaagccgaggcatttccataacgtttccgtagcgtttccgtgggtaatttcacgaagattttcaaccgttctttgacgttcttcgttcgttcttcgtcgttcttcggtcttcaaccggtaagttcccgaaatcgaacttttcaattcattctatgtaccattagtggtcctcatttgttatccatggcctcctatggtggtgagcttcttctagactcatcttctccttgaagtggcgtctcctctctctcttccttctccattccgctgccattcatcttccaagaagcaaaggaatccattgatgaagaagatcctaggcctacaagctccaatggagcttacaacacg

SEQ ID NO: 27168 - DNA, 482 bp, Glycine max
  unsure at all n locations
gggatgtgcctgttaacgtgcatatcacacgacctgggatccttagagtcacctgcngcgcgcttgcttgtctttcgattcctgcaggaggcatctaaggatgacgctgagcttaggttgggctagacctgcgacggctgatcagaacgaactagactatcctatggagcaggggaccaagctcgcataggatgacactggctactgactcgaggtgnatttaactcacgctacaacatacatcacgagcgtttgattgatcttacatctatctgtatgcacatcatctctgctattagagggacccaacgccattaccgacggctgtgagttgtacttacttgcataaccactgggtgagactaactgagtataccatgaggtagtcatcactatctctgtgatcttccagagccgaggctgaatagaccctgccttgactactcgcgtgagaactctgctcagattcattcattataatn

SEQ ID NO: 27169 - DNA, 451 bp, Glycine max
taggctaaattagtctaaactgtcgtaagctatgtattctatgtctattccaacaagagggatctaaggatgaagcttagtttaagttagtctaaacctaggagggctgcttaaaatgagtctagcccaacaagagggatcaggggacgaagcttggattgattcagtctaactagggatcgaggtttagtaacttaggctacaacatagaacacaaaagtatgattgattagagaaatatctttatatacatcagctcgtttattagaatgacccaacatttctacctactgctgtcaattctacttactagcatttttactggttttagcctagacttagtttaatcatgttctaaatcatcaattatcaatgtttctttcaacaatgccttatctctgaatctaaccctgtcttgtactagttccctgagttcaatactcggattcat

SEQ ID NO: 27170 - DNA, 514 bp, Glycine max
  unsure at all n locations
ggggntgttgagtcgctcgtacgcgcnaatacanctcggacctcgagatgctatagagacgaccggctggcatgcactgctagcttcgtcacacgaacagagtgtgaactgcagagttgagatcacgactctcatctagtaggaggattagcggctntctgagaatttatagtgactagaggaggatgaaacatgatgactgctatgattgtctatactagctcttagacccttatatatgttagcaccagtgcaccttataagcgtaggatcttcatcctctgtggactacattctattgtagtactgaatagtgcctacttatctgtatcaatgaagatgatagaggacgatgccactgtcagatgatatcatgagctctataataagcatgctaccgtatgangcactcgttaatatctgctgtgangagcgatatctttgaatggtgtggttgatactatcatgatggatttatgctcgtctagagctttgaattctcaggacacatatg

SEQ ID NO: 27171 - DNA, 457 bp, Glycine max
tgaagtgaagagagagacaagggttagaatagactattatctggcagaagaaccaaggtgaatagcagagtactgaagcaaaaaccttagcttttaggaggattataggtttaggagtaatttctacgttcctagaggtggatgagacatccccactactttgtaatctggtattctctctgacacccttctctttcttgtgaaaggtgctcccttgtaatggaggggtaaaatcctttgctgggaaattctattgagtacttgatgtaaatacttatcatatctattcgatgatgttttcatgtgtttgttgtttctatctgtgcttaattatcgcatgcttttggcttgatcacccatttgtatgtgctgttaggagctttaactctggaaaatgtattgcatccttagatctggatagaacagggctaggctatcgcataatctggacacagag

SEQ ID NO: 27172 - DNA, 437 bp, Glycine max
ataaagctacgcgctgggttaaatttttgtttgttctctacacaacgagctgttgatgtagacgtcccattaaccttggataatatcttgcctagctcctataatgactagcggcgcctctggctctatattgatccacgcgctctatgctaatgctggttatcactctggaccgagaaaatgcgggtaagtcttactacgagtcactggacccttacactctatgttaggatgcagagattcctcacatgtaatctatcttgtcgaagtgaatgcattgatgggagtaggccctgtaccatccttttgcttgttgaacaacttgcgacaaagcatggggagaatgacacatatattctatatcgtatgtaccagccatgtttctcccacttcatgatacctaagcttctacactacgcactgctctatagagcagg

SEQ ID NO: 27173 - DNA, 177 bp, Glycine max
actcagcgtctgattcaccagatgcaccatcgcagtttgttttagtctccgtctctagagggcatctctgctcactgctgagtctgagcactatatgtgcagcaagtgaacgaccatcacgtggcctatcataagggtctggcacaatttactgagagcttttacagaacactttgc

SEQ ID NO: 27174 - DNA, 172 bp, Glycine max
accagatgtgcgtgcgggatcatgtatcacctattctcagagtaatatacttctgacgctactgtatacccgacaagtggcagagcgtgatccagatgacatgacctctatcctgacatgagccttatggtataggtctcatagtctgcatggttgctggtgcactctatat

SEQ ID NO: 27175 - DNA, 465 bp, Glycine max
  unsure at all n locations
tagtaaagctaagcactaacaatctcccnctttgtcatattttgtctaaaacatacttagacacttcctgagcaggtacgagcagttatgcaagtgggatcagcaacttccattatcagagtaatcaagcacagcggaatctgtagtctagacaagttgcaagtcgtttccaggatgtcaagacatctcacatgacatctgctttctgcttctgctccccctgtctccatgcttactgcaacatcttctatcagctactagtcttctccaggatgtcaagacgtctcctgtgacatcagctatctgctccccctgtctccatgctcttactgcagcatcttctaatancttccatcagtcatcatcagcagcagcagtctccccctcanaatcgtatacatacaactccncctcanaatcatgaatcatgcatacatcgtatcctactgccatacatcatacata

SEQ ID NO: 27176 - DNA, 495 bp, Glycine max
  unsure at all n locations
agggatgtgaatcgtgacgtcaggacatatcancctcgagctgnnnnactctgagccgacctgcgagccgcttgcttagaatcttaatgagagtgtaacgaggagagcatggaaacacttgttctttctgctgcatacctcatggctttcattcaaaggacgttcaccatggagtaagtagtctctgcgggccngattaccatatcnggtgttagtcgctcacgcagtatcatgacttggtttgagatattgatcccctgaatgtacaaccctccaagtgatatcatacccgctctgatgtgacggagcactggctctcaattactactgtgcatgaccgtggatatttacctatctaggtgaagagtcaaatacaatctgaacagctttgtgcatcgattcactgatatgtcatagatacacttgatngcattgaacacatcacgatatgggactctgcgaacggtagccgacatgtcatcattgtctactgtn

SEQ ID NO: 27177 - DNA, 506 bp, Glycine max
  unsure at all n locations
ccccccggcagaggggatggaccaacagggcccccccagggttgtgcctgagcggaacaaaaccgcgcaacaaacggaacagaccagttcttgccgagaacaaggagacgagagagaatgaaacagaacccaagccactaggaagaacataggttacgagcaaactcgacgaccacagaggtggaacacacaggccaacgactaccacatcggggcaagccactgccaccagccaaacgcnggcgaaacgcgctccaacggaatggacgaggaaccaaccgagttcggaaagccaaaagagtccacagatgcaaaggccaacgataaccagtgggcgtgagacgcgagagcccgatgcaaatgtcaagacgcacattatgcccgacaaaaggcttgacgaccaatcgcacggcctgagtgaacgactacctccgagaatgtagagcaaaccaagagacggagcgctccnggcggngttaaccttaacaaagggcaccaaggcggcg

SEQ ID NO: 27178 - DNA, 245 bp, Glycine max
  unsure at all n locations
atcgtgctatcaggactcctggctttcttacataactgccgttgccgaggctactagctgatctcatatcactcactcgactagcatctgtcttttccctcctactagatccatatagaagaagcaggcctgcactgcactatatgcatcgtgctcaatcgccattgtgagattacatgcctttgcaaccaccacctggttacgagacaatcatatctgtgctgtgagagcgngactatgagccc

SEQ ID NO: 27179 - DNA, 456 bp, Glycine max
  unsure at all n locations
tgaaacctcctcatcatcttcatctatcatggactcttttattttccttctaaaagggttggcacccccctaatcatgtgaagttcctttggccgaagaagggtttcactgcaattttcttcacatgtaatcctgtaggcccagtagaactaaataatattttaagcttggcaggtctagtatgtgttatatacataataataataatatataataaaaacttgcatgttacccattatatgtagctctgtgaattgcgattgtgtgtttctatatcagtgtagccatcttgttgttacttaaatattattactcttatngaaaactgtgacatanntaaaatnngatgaagctctcttctaaattgtagttaagaggttaaaaaatanaannggtggtggatacatgaatgaatttgtttcgccattattgtgtccctttttatgcttatccttt

SEQ ID NO: 27180 - DNA, 245 bp, Glycine max
accaccgtgaatgaataatagatggataccacccgagactgagagtgtactgatatactgtgcgatgtcagagttactacacgtgtgacaagtgcgtttatctctagaatcattaactggcgtgacatactatctggatatgactctcttgagatgcaaacttgagaagactgccatgcaagcctaaatcatatctacacacagctcctctattagctgagctgacgaccttaagaatcttgctt

SEQ ID NO: 27181 - DNA, 448 bp, Glycine max
  unsure at all n locations
tggaaagatgcatcaatggaggataagaatgatggagatanagagagaggagggagcacaaaattgaaggaataaaagagggagagaagtggaactttgaagtgtgtctcataagactttcattcatcaaagttacaacaagtgttacacatgcatctatttatagactaggtagcttccttgagaaactttcttgagaaaacttccttgagaagcttctttgagaaaacttccttgagaagctagagcttagctacacacactcctctcctaactaagctcacgtccttaagaatcttccttaagaagattcctaaagaagctagaacttagctacacacacctctctaatagctaagcttaactccttgagatgagaagttagagcttagctacacaccccctataatagctaagctcacncccatgaacaaatacatgaatatac

SEQ ID NO: 27182 - DNA, 301 bp, Glycine max
atggtggatcttgccggcgcctgaaccatgcgttaggtgagagctgatagatactctacatgccggagggatggccatacctgccaagtatcattccactagacggatatcgagccaacctacctgtatagctacgtgcgctcttgcattctctcacattgatcttacatgaaatttcttacagttctcctatcagcactcagtgtttgtctgctatcatataaggatgtggcacaatggaccttactgaacctccttgctttccttgtttgtagatgtccagcaaatatgcgactatact

SEQ ID NO: 27183 - DNA, 455 bp, Glycine max
  unsure at all n locations
agaacatgatgcccaaaagcacgtcggttatattaccttntaatgcttcccatctaaggccaagttccatggtggaccgtgccttcgacggcacccgccgggaggtgaggggggagatcgacctcccagtacagatagggcctcacacctgccaggttacattccaagtgatggatatcaagccgacctacaactatcttttggggcgtccatggatccactcagtgggataatacagccaattacgctctgctttccttcatggacgggttctttggctacaatcagataaagatggcgccagaggatatggaaaagaccaccttcgtcaccctgtgggggatgttctgctataaagtgatgtcgtttgggctcaagaacgccggggcaacctatcagcgggctatgatggctgagntccacgacatgatgcaccgagaaatcgaagtctatgt

SEQ ID NO: 27184 - DNA, 209 bp, Glycine max
gacatgtcataatgactagcttattaacatggcatagttcgatatcttatgagtcgacatgggaaaactgcgaatcgatgaacgagcatgaccattgtacatcctgtttattagtaaagatacattataacactcattccatatgacaggttagatggggatcacagcattgggactgatacagagcaagtgcatgggatgtaatgtat

SEQ ID NO: 27185 - DNA, 419 bp, Glycine max
  unsure at all n locations
ntntatgtcctgttcattntctagctnttcttttctattgctaaatgtcaattgaaatgctttctaacatggaattgatcattatcataggagtcaagttgggaaaattgtgaatagaggaacaataattggcaaagtagaacctgtttatttctagagtttctttcaaacacttaattaaaattccgtgtttgatggaattcatcagagtgggaatgaagtgaggaaatgttagggatgtaaagtcatttacaagcctccacatgatagattaagcttttgggaaaattggtgcttgacatggtattagagtgtttccatcttatatggcctcatcctggtactattccactgctaagtccccttaaaatcttgaacttctctcacatggtatcacaacctatataatcaagtggcgt

SEQ ID NO: 27186 - DNA, 328 bp, Glycine max
agctttgtagtttaatctttccttgaagtagctacggtcttttctagtatccttctgatctccctatttgaaactctaactcatccatttgtttgtggatgatagggtggtgctactttgtgtcgaatatcgtagtgttggaggacctttgaaagtcttggcactctaaacctagcaaagatgcttctctttaaggacttaatcattatttttgcatcattagttgcactagcaattgcttccagccacttgttcgcttccggcaagtgcaccagatcgcacaagtagtataaaacgggaagaattgagtatcgaactcttgggtaac

SEQ ID NO: 27187 - DNA, 388 bp, Glycine max
  unsure at all n locations
tgagggggaagatgtttgggtgaagataacttcaccctcctcccttttaatcattttcgtgcagagggtgctcgcccacgcgagctaactttgcattaattatttttttttttaaaaaaaacttctttgcaaacttaactatcctacgggtttgcgcttgtgttttttaactcctaagtttgtgaacaaactaagcccattcaactatgacttttagacaaatagatgaatataaacaagtacaaacttaaaaggtacttgactgnctcctagtagcgcttctttaacgacttgaggtgcatgcggaacgatgatctgttgatcatgggcctacacctgctcgacttagccctaagccaaaattgacataccgctttaaatatgacta

SEQ ID NO: 27188 - DNA, 404 bp, Glycine max
agtttcttattcaatgctcatcttggtggggaagctccttcttccatggcttattccttaatggatggcgcctcctctcacctcttttcctttgacttccgctgcatctccatggtggaaaatcaccattaaaggatcccattgaagctcacagatcaagccttcatagaagccccacaagcaagctttcatcaagtggtaatcagtgcacaagagcttcaagtaggtgctccttaaacctccattaattgtttttctttaccttctcttccatagttgtttcttcatttttctccatgtatctcctcacatgtcttgtcctagatgtcgttaacatgattctttagatgttccaccggataaacttgctatagaagctagatttgattttctatggctcaaat

SEQ ID NO: 27189 - DNA, 346 bp, Glycine max
atgcagaggcttttcaagaaagaaaacaagaaattgcaaccactactagaggtaatgtttcaatcaaccttataatataattatatggattttgagtgtctcgtctattgttgttagcatttctaagttgttaacattttatgtaaggaaagccatattgtagcaaagagtaaagtatatttagcttgaaagaaatttctatattatatgcttgtgatgcatgctcttagtaagattactttcatgataaatcctcctacattcgatataagaaattatagacaagagtagttttgacctctctgacttagtgctttgactgacctctttgcatttgtccactcaa

SEQ ID NO: 27190 - DNA, 230 bp, Glycine max
caacatggaaagattgacagtaatgactagatcaaagagcaagaaagtcccacacaatctgcgactcacgagggaagcaaagccagcaattcggggaacaaccacacaagagagcaccggggagagggtgcccaatacctcccaaaacggaaaatagcacacccaaaaggggtacacacgataacctaggagcggtaacaaaacaaacggcaacaaaggccactaaggga

SEQ ID NO: 27191 - DNA, 432 bp, Glycine max
  unsure at all n locations
tcaagcttgtcaaggagacgaggtgaatagcagaaggaaattttttatatatcattttacgncanccaaatgaaaggtctgtgggtagaaaggattgaggttgaggctgctcccacgtatgatatctaaaatggactatcataacatattcctgtgtcagagctacttatgtaaaggattattttacaaaactcaaatggtaaaaacaacattcagggggcaaatagacaaagctgatacaactggtatccacaaatagaagaatccacacaacagtacacagagacgcagagagagaaaaaggaaccagctattatctattgattactgaaaatagtgtctcagcactctcctctacaatgagtttcctcataaaatacctctgcaatatctactgcaccactatttataataattaactcctagctccct

SEQ ID NO: 27192 - DNA, 494 bp, Glycine max
  unsure at all n locations
ccgcgcctgaattgagactttagaaccttgagacctctagnanactcaagctggcnccaaaggagtactcaccagaaccatttaagcattccctcgtgtagcncacaggcaaacacatgggagtggaaagttcaatggaagagacacctttttgaccacgaagttgagatggcagcagcctttatggcagacattgctgagtttcaaaatcaacctgcaagcagggaccttctgctttgggggcctgatcctgtggaacctactcccaaaggcagcatataactgctagaaggacggggacagccatgttactgaagatagtgactgcaagacaatctggaaactctaaattccacctacagcaagtgcttttttttggagaatattcaagaaccgaatccctcccaagttaacttatggacgacacatgtggagctgccttcctataattgcccgctgtgtgatgaagatgaggaaacatatagtcatgtccc

SEQ ID NO: 27193 - DNA, 395 bp, Glycine max
tcaagcttctagctgctcaattgctccaggttgctgcatggataggcaaaggtctgtatggtggtcagcagaggagcacaaaccacaaacccttgtgacaagtacagatttctgaatcaaggccagctgggttaccaagttgaccaatgcatccagtttgccttcaagcttcttagtttcagatgatgcaaatgggtttgtagctacctcatgcactcctctaatgactatggcatcatttctggcactaaactgctgggagttggaggccatcttctcaattaaatttctggcttcagcaagagtcatgtctccaaggcttcaccactggcagcatctatatacttctctccatattactgaatccttcataaaaatattggagaagaagctgt

SEQ ID NO: 27194 - DNA, 435 bp, Glycine max
  unsure at all n locations
ntaagagcaattcctttctttnncttattattctcattatgttgatncaancncattagttccatttcatgttcctgtaactttccaaataaagtagcaagagacatgttagatagatctcatgattcaataatggttgttaccttgggttgtcattccctacttaagcatctcaaaactttattgataagatcttcatttgaaaatatttttcctaaagatgcaagatgattaattatgtgtgtgaatctcttttgcatgtcctgtttgctttcatttggattcattctaaataattcatattcatgagttaatgtatttatcctagatctttttacatttgttgtaccttcatgtgttacttgtcgggtatcccacatatcttgtacacttttacaatgtgataccctaaagtgcttattcattcctaaaaca

SEQ ID NO: 27195 - DNA, 399 bp, Glycine max
  unsure at all n locations
agtttaaggaggagtatggttagtaacacataattttacatattttgattggtgggaggggttcgaattggtctctatattaacagttctgtattttcttgtaggaattgagccctggacttttactcagaagttaggagatgctgttttcattccagctggttgtcctcaccaagtcagaaatctgaaggtaaagtgaacatacctggtgaatttgtttcatatttattgtaggcacaatatattgttttcttagaagtgtaggcataatagtatctttggctactacctgaaattaagcctatgtccttcattagcaaagcaagcctttgtagaaagtgaaaactgttgattcatctanaagtttcagttcacttgtgtattntttaacacatttga

SEQ ID NO: 27196 - DNA, 442 bp, Glycine max
ttggaagaaaaaaattatgctgagaaggaatctaactagtggtttctcattggtgattacttctacaaaaagctcactaaatgggagcctcatgtcacaacctacctcatgacgggacgacaacagcaaaatagataagccaaagtgttcgtctcctagggagaaaacgcgtggagtcgccaccaatgtttattcgaggaaaatgttagaaaaacgaaaaagaggtctgcaaatttcgaaaagaagggttcatgagttttttacgcatgaggaaggtattagcacccacgcacccgtcacaagggacggcagcctttaatcaagtgtgcacaacgtgacttcaaaattatttatttttcccttttatatttctttatttttttgggctcgacaagggggtgcccttgctcctacatatcctcaggtgcgaggaggaattcag

SEQ ID NO: 27197 - DNA, 357 bp, Glycine max
atcttgctaaagaacttaggaacaatcaagaacaagcttcttcgcacatcgattgcgtgtatgatatccactcgacatggtttgaagtacaggagaccttcaatcctataatgctacatggcggacaaaagtgggcagttaacttgaatggccattattgtcaatgcggaaggtattctgcgcttcactatccatgttcacacattattgcaacttgtggatatgtgagcatgaactactaccaatatatagatgttgttacacgaatgagcacatcttaaaagcatactacgcacaatggtggcctcttgcgaatgaagcgacaattcctccttctgatgaggcatggacactaat

SEQ ID NO: 27198 - DNA, 429 bp, Glycine max
  unsure at all n locations
tgcactgcccanagaggacaactcttcataatacgtttgaaccaccattgatgtcccttatgatgtcgttcagtatctcaaaaaagcctacgatgatttggaagaacccttgacctgttttctcaaatcttccaaagttgattggcatttctatgacccatatatgttacagttaccaaaaaggttcaaagagaaaaccaaatggtgtggaatagtaagccccggttgggcaccatagttgaaggtattgagccacaaggcagttggtggggttttgactcactctggttggacctctgtggtggaggttgtttagaatgaaaaacctctagttttgttaatgtttcttgcagaccacggattgaactccagggtgttggaagtgaagaagatggggtattcaattcctaaggatgaacaagatggatc

SEQ ID NO: 27199 - DNA, 84 bp, Glycine max
agcttgtgatgcttaaggaagaaactttatatagctgctcgtgcctccaaatagaatattcatactaaaaatagcaagggcgag

SEQ ID NO: 27200 - DNA, 400 bp, Glycine max
  unsure at all n locations
agcttgtttgcacgaatttaatttaataacttactttttacaaattattttaagtatcttgtgaaaataagttacttaaaataaattatatgttataagttttttttcaatttcattgttcactaatctatttgaaacttcattttcttcttttacttaattttaaaaaaaaattattatttcaacattcttacaaacactttgaattaatcttttatgtcatttgatatttatcacttaacttatcaattaatcttactaaatacttttaattaaataagttagtttataaacttctagctattcaactcctaagttatagcttataataggggtgttcgtgagccagttccggaccagttttgaccaaatttangatctaacctaatcacaattgatc

SEQ ID NO: 27201 - DNA, 428 bp, Glycine max
ctcaagcttatgacctttgtcacttgagagccaaagaaaaaccattcaatttgtgtgatataaataaatcttgcgatattcaatcatcactatcataattttgcacgaatgtaacacaatttggtggcattctaaaactgttgagactatctagcaatttcacccaagattatgacattttagtataatatataatgtcacacctatctagcaatttcacccatactgttgaaacttttctatactcccattccttcttttttagtggatagttaaacttttctttatcccatcacatataattccttctctcttattgaaggttgtccacacattggtatacttagtcatcttttctttcattctacataccttctttatgataggctataagatcttgctagtctttctttttttctgctcttatc

SEQ ID NO: 27202 - DNA, 380 bp, Glycine max
agcttcagactgctcaattgctcctttttgctgcatggaatggcaaaggtctgtatggtggtcaacatatgatcacaaaccacatacccttgcgacaggtacagatttctgattcaaggccaactgggttaccaagttgaccaacgcatccagtttgccttcaagcttcttaatttcagatgatgcagatgggtttgtagctacctcatgcactcctctaatgattatggcatcatttctggcgctaaactgctgggagttggaggccatcttcttaattaaatttctggcttcagcaggagtcatgtcttcaaaggcttcaccactggcagcatctatcatacttctctccatattactgagtcctttattaaaatatt

SEQ ID NO: 27203 - DNA, 441 bp, Glycine max
  unsure at all n locations
tgaaggtgcgtaccccaccattntttcatagcaaattattgattatgtgtttactatcatagctatcatttctttctccgtcattgagggaaccacttgggctgccaaatccctccacctttgggcgtattctttgaaagatccatgccccctcttgcatatgctctgtagttgcatcctatccggagccatatcagaattgtactaatactgcctaacgaagtcaaccattacgtccttccaagaatggactcgggaaggttccaagttaatgtaccaggtaacagctaccccagtaagactttcttggaagaaatgtatcaccagttcctcatcttttgtgtatgcccacatcttccgacaatacatctttagatggttcttggggcaagtagctcccttgtacttatcaaagtctggcaccttgaacttgtgatgggt

SEQ ID NO: 27204 - DNA, 378 bp, Glycine max
agcttctagcttttcaattgctccaggttgcctgcatggaaaggctaaggtctgtatggtggtcaccataggagcacaaaccacaaacccttgtgacaggtacagatttctgattcaaggccagctgggttaccaagttgaccaatgcatccacgttgccttcaagctttttaatttcagatgatgcacatgggtttgtagcttcctcatgcactcctctaatgactatggcatcatttctggcactaaactgctgggagtaggaggccatcttctaattatatttctggctcagcacgagtcatgtctccaatggctccaccactggcagcatctatcatacttctctccatattactgagtccttcataaaaatat

SEQ ID NO: 27205 - DNA, 443 bp, Glycine max
  unsure at all n locations
ntaagagcaattcctttctttntcttatcattctccttatgtatattcaatctcattagttccatttcatgttcctgtaactttccaaataaagtagcaagagacatgttagatagatctcatgattcaataatggttgttaccttgggttgtcattccctacttaagcatctcaaaactttattgataagatcttcatttgaaaatatttttcctaaagatgcaagatgattaattatgtgtgtgaatctcttttgcatgtcctgtttgctttcattaggattcattctaaataattcatattcatgagttaatgtatttatcctagatctttctacatttgttgtaccttcatgtgctacttgtcgggtatcccacatatcttttacacttttacaatttgataccctacagtgcttattcattcctaaaacagatgtaat

SEQ ID NO: 27206 - DNA, 406 bp, Glycine max
agcttcaacattcaacttcgagcttctcgttatattataggactcaattagacatccgagtaaaaagttattgtcgtttgaatttgctcagagcttcaacattcaatttcgagcgtctccatatattacgggactcaatcagacatccgagtaaaacgttattgttgtttgaatttgctcaaagcttcaacattcaatttcgagcgtctagatatattacaggactcaatcaaacatccgagtaaaatgttactgtcgtttaaatttgcttagctctccagctttaaatttcgagcgtctcgatatatgacgggactatatcagacatccgagtaaaaagttattgtcatttgaatttgcttagagattcaacattcatcttcgagtgtctcgttatattacggga

SEQ ID NO: 27207 - DNA, 451 bp, Glycine max
  unsure at all n locations
ctcaagctntgagcaaattcaaacaacaataactttntactcagatgtctttttgcgttccgtaatatatcgagacgctcgaaattgaatgttgaagctctgagccaattcacacgacaataactttttactcggatgattgattgagtcccgtaatataacaagacgctcaaaattgaatgttgaagctatgagccaattcaaatgacaataactttttactcggatgtctgattgagtcccgaaatatatcgagacgctcgaaattgaatgttgaacctctgagccaattcaaacgacaataactttttactcggatgtctgattgagtcccgtaatatatcgagacgctcgaaattgaatgttgaagctttaggcaaattcaaacgacaataactntttactcggatgtctgattgagtcccgtaatatatcaagacgctcgaaattg

SEQ ID NO: 27208 - DNA, 401 bp, Glycine max
  unsure at all n locations
agctttgtgtgtgcatttatttgaactgtgtaaaatgtaaataaaggttgtctattttgcattctttacactgcattctaagcacccacgggtttgagtaaaaaaggggccctatacccgggttcatgggaatttaaggagtggaggtgaatctatcatcatgctangtctccgacttgcttgataatagtgaaacctcgtctagagctttctctctttataatgtgttgtcgctggtattccataccgccacaatattattatcttgagtgatgatacctctagaaaacagccgtgtgagtcatgaattgttggggagtagttattagagacccctagatattatcctaggttcccacataggggcaaagagcagacacgctccgtgccattcgttctca

SEQ ID NO: 27209 - DNA, 419 bp, Glycine max
tcgaagaggtgaaaggaataatcacgggtttaggcttgatcttgaaggacgagctaaaggcttgccttaagtcgaaaagaaatttgtcccaacagttaagcgagactgaagggaatatgtgggccatcatcgatgagtgcaaagagaagctaaatctagcagcgactcacgagcaaaggctagaggatgagtacgccaagatatcagtagaaagggaagcaagggaaagggtaattgattcattgcaccaagaggcaacaatgtggatggaccaatttgctcttactttgaacaagagtcaagaacttccccgattgctagccaaggccaaagcaatggcggacaccaactccgcccccgaggagatccacggacttctcagctattgtcagcatatgatagacttaatggaccatatg

SEQ ID NO: 27210 - DNA, 236 bp, Glycine max
tcatacttgacaaaaagactttattgtacccttcgattgactgtacaaactcaagtaaaccttgtgacacttgtcatattgcataacataagtggctaccttttcctgatagcctgatcgaccactcttaaagatctgatttgctgcacatggatatatgaagtccctatgctcatacttcattacttggtcataaatattttcgtactattgacgatgacaaatgcatatataca

SEQ ID NO: 27211 - DNA, 339 bp, Glycine max
tgggtcaaaagcatactcccgttgaccccgagccagagctcatgattaccatgaactctatgcagttataggtagagcaatgaaataataagatatatcaaataagattcctctatcaatgtctataatggacaaatatgattcctaatgggcacgactggcaatatttcttttttggactccgacttattatattttttaatcacattattcaagttcccacacctctaacatttgattacatggtagaatcagcgaactaattgcacaataatgaggtatactgttgctaatattaagctcatttgcttcttctccaaagttaaaatatatcgcata

SEQ ID NO: 27212 - DNA, 337 bp, Glycine max
agcttctactacttgaggtgtcttgcaatttagactaccttggaatacttctagttctgctcggcttatagaaatcaaaacggacactatttcaggcttgtaattgatgtgcattatgttccttcacttgtctatttcaagtgagcccctaataaggattggtgattccaagctagggtgaatttctaggtttatgatgcttaaataagtgtgttctatttgattctgtatgtgttatatgtctagctagacttgggtaacgcaaggtttgtatcaaggatccttgatcgtacttctattactattactctatactgaagagacaacaaagaagtaa

SEQ ID NO: 27213 - DNA, 426 bp, Glycine max
tgttgtgagatcgtcggttggtcggccacttccacattgttgtgagagggagatttgttgggctcccttcctatgtggagtaaagacctcatttgtctcacttatttaagtggagaagggtcagattagagagacatacacagagagtgactcatttgagaaggaaacagttagaaatcattgagagagaaatgagagggagaacattgtgattttcgcatacccactagagaacatttttcagattgcaacttcagattcgtccatcgttggatcagattgatttatggacagcaggttctacgcacatgatacttcaaattatccggttggatcgtgaaaacgatatcaagagagagagagataagtgtctcatattctctactctatattatgggatcttatcttatctctattgtaccaatt

SEQ ID NO: 27214 - DNA, 399 bp, Glycine max
  unsure at all n locations
agctttaacaattcaaactttttttgaagtatgaatatggggcacctcaagatgggatgagaccaatattcctctaccactattctacaatcatcatgttctaaccacaagctcatgaaccaaaaatgggaagcaagagatttttgccactgcaacaaattaagcagaagagggtgatgatctgattataccttgttagagaagaacaagctatagaatctcaataggatagggattccttattacatatggttctatctaatctcatgttaatatgggctctacctctacgcccatttgaccaaatgttaccctttgtaggcaaatgagtgagcaggtagtgatcagaccaagcccataactcattacatgaagctngcaacgacagttctccccctc

SEQ ID NO: 27215 - DNA, 436 bp, Glycine max
  unsure at all n locations
tagctgctgcgctaagcttaatctgcagattaaatattttgtgtcttcaagctaagcgccagtctactgcgcttagcgcatgagtaaaatttcataaggcgcactaagctcagcctgctgcggtaagcatccaatcaaaaattcagttttatttttatgtttttgtggaaataacctgtgttaatctcttgtgttttgtcttatattttacagatggcatctaagaaaaggaaggctccttctacacctacccaggccagatatgacagatccaggttcacatctcaaaaagcttgggagaggtatacagacattgtggggcctagaaaactactaccgaagaggaatatgatattttatgacactgagttcgacgagttcaaggaggaactcgacagaaggcactgngatgaggagttgatttattntaatgata

SEQ ID NO: 27216 - DNA, 377 bp, Glycine max
agcttctagccaaatggacttaccttgaattaatccctttgatagcccttttgagccttgtttccctttccttgttttgaagctcactacaagccttaagtgaaaaaccatgatattaccatatccttaaggaattttggagctttggaattgttttgggaataagtgtggggggtttttgtttcattggacaacttgttttgttggctatgcttcatgatgcattttgggccatacttgatgtacattgtatattggttaaatgttggacatgctgaatgaaatgttgtttctcaaagtctaaaaaaaaaaaaaaacaaaaatattcgaaaaaaaattcggacagacaaaaagaaaacaaaaagcaataaagttga

SEQ ID NO: 27217 - DNA, 373 bp, Glycine max
  unsure at all n locations
atggaggaagagaatgagagagagagaaagaaagtggcgtgggaatgaaggaaagagagggagagaagtttaactttgaagtgtgtctcacaggactctaactcatcaaagttatcacaagtattacacatgcttctatttatagcctaagcagcttccttgagaagctagtgttacacccttccaatagctaagctcaccctcatgccaaaatacatcaaggaagaaagcttgcatgagaggcttccttggggaggaagtgttacacccctccaatagcaaagctcaccccatgggaacacacacccctccaatagctaagctcaccgccctccacaatacaaaanaaaagaccctactacaaagactactc

SEQ ID NO: 27218 - DNA, 289 bp, Glycine max
agctttatctccacggcatagaatgattgcacttcatgctttcacatcatctctgatttctcctttgagcttaaagaatcagacatcttttcttctcctttaagagcttctgcacagccatgttgaatcaagatttcttccatcttgattctccataacccgaagtcattttccccctgaagacttctctatatcatactgttggtgttcccatctttcttgatcttgatccttttttttccccacagactgcaccacttgttggttctttgtaaaagttctgcaactc

SEQ ID NO: 27219 - DNA, 319 bp, Glycine max
gccaggtggacacacttttgtttacaggtgaagcgacgtttgacagaaagatgttgatttgacaattctgccctatttgaccattggaaacacattgaagcatgtgtttcatttttctttgttgcagtgagtgcacacaagcacgctactcttgcatatgtgtacccgtagagtggacacatactgagacgcgggtgcggattagtggggtgattgggtgcaacttcaagcatcatttcactctgcactaccgaaagttggcctccttaattaatgacgttgattttatacaccttgattctacttcttttctgacttc

SEQ ID NO: 27220 - DNA, 401 bp, Glycine max
agcttatttgtgataaaattgaagtttattttcttatctttccagggactactcacacactccattttaagttctatagtgttctataggccctgcacaaggcagataggtcaagtaagcacaaaaatccgaaaataagccataattatcaattaaactcaatcatttgcctaagatcaaaactaagttaaagtgagaaaataagggtcaaagaggttccaattgagctaagaagaatagaaaaatactaaactacaaatgctcaatcatcataacacaagtaataggggtctaattagaagtcgtacaatgctgtgaaacaccccgactatgggttgtactagcagcctggctagcttgagtgacctatggtagtcgtcctccatgttggtctcgtcgat

SEQ ID NO: 27221 - DNA, 446 bp, Glycine max
tcttggataggattcttgatgctcgatcttgatgtcttgtatcaatttcttgggcttttggcatcatcaaaattgcctggttcatcatcatgaagcttgcttctacaatctctcccttttttatgatgacaaacctaaaatcaagaaacacatacagactctatcttctaatcgatcactcacttaattccccccctttgttttttgagtttaaacttcacttgaagttaagttatttaattatatgagttcttgattcagtcccaatgttttctccccctttggcatcaacaaaaagccaaagtgcgtatagagacattaaatcatacacaaactcataatcatccaagcattgtaatccatacaacaagcaaggaggacaataattcatacataaactaagccaggaagataataattcatccattaactataatacaatgtca

SEQ ID NO: 27222 - DNA, 404 bp, Glycine max
  unsure at all n locations
agcttgctcgtaccatgaacgttgcactgctaggcacactaatatgaagccttttgcatgagatggacaaaccttctaggttttgtcctataaatatctacaagtgaatggtattcttaatgttactcactccatagatgattcatatatgtagcaaagaattttgaacgctattcaggtcctccatgatggcttcaagccaaggctaggggctgactagtcttctttatggttttcagattgggtagcacatggtcctctttgccatcagtttcttatgtccatatgaatgactcacacttaaaggtgattgatcgatctgtgtcccanacccaatggagtatgggacttgaacgaacttaatgttcctcttcccatagatatataagattatatcaagagcc

SEQ ID NO: 27223 - DNA, 444 bp, Glycine max
tatagctctagcagccaggttgtaaagatgatatctcttcctcttgcattaattgtcactcaagatgctagccagtggatccctcctgagattggtcaagttgatgtcagttgtgatgcttcagttccttaattggggagtctcacaacttatggtggggtgcttcatgattatacatgaaattttctgtgtggactcaaatccaatattggagattcatctgtgctgaatgtacaattgttgactattctaatgaatcttgcctatgaaattctatttccttttaggaatggatcatggaatagtgggaaaagaactattacattacttctattgtaggggctaataatgggagctctatcatggtgatgtcaaaaggtttgttttataaaagtgaactacttttggaatctgatctttattgctgagatattacttttatac

SEQ ID NO: 27224 - DNA, 343 bp, Glycine max
  unsure at all n locations
agcttatccgtttaacaattgcaggtcatggagcaacaaacttcctcagccagtatggttctcaatcaatgtgccattcctttgtttggctnctgcaatgatttctcaaaatccttcggcaccgatttgtcttatctggtggtngatccactgcacgcccagaaagaggcgaaggtgccgccgtagaactggttcatgacgtgcagcagcgcgtggggctcgcgtgttcaaatgctggtgcgggataatggtcaacttcacaggatgagggagcgggtcataaatgctgaagagcccgaaaagatttgagtgagtgttatattcgtgcttttacttgacttag

SEQ ID NO: 27225 - DNA, 442 bp, Glycine max
  unsure at all n locations
tgccttccctcataattaanatcataaatttcaatcttcatctttacacctttaaacctcactgacccatgacctaagcctcatcgacctgtgctctaatgtattccttcactcaaatcttgcaaaaaaccataaaattcttaaaccttcaagcgccctcataaatcccttcatgacacaaatttgatggatactaaatgatttaccaattgataacaattgataagaacctgagacattgtgtttcaatgtatgccttttgtgcacccacataaaccccaagtgtcttatcagttggtatatagcttttcaccatgcctcaggctctcagctacaagtgaacagcatggttggtgatgcctggcattatattatntgcttaggaccagtcaaagtgctagtgcatgaccaacttgcatatatgttggggctgtggagtgtg

SEQ ID NO: 27226 - DNA, 328 bp, Glycine max
agtttgacattttattagaagaggccatcttgcatttcaacatctttgtaatgtttgaatcggcgtaatagaacctaagatttagataataacccgacttatgcaaagggtggtaaagttggctatcccatctgtgatgaatgatggcaaaagatattcttatacttctctttattatcattgaaagctctatgaatggtctccttggccctatccattgcctgataaatgaaactcattgtatgttcattttttttcgtgatccaccaacctcattacccttacaagaggccccatagtctttaaagtgaaggccacatcaaactgg

SEQ ID NO: 27227 - DNA, 442 bp, Glycine max
  unsure at all n locations
tctaatagtatatcaaaagagagaaatgttagcaactttctcttttaacactttnttgaacacactttctagtttctactatgaaatttattgaaaatcacaaaatttttgcaggtcttacttctcatttaatgattctctctcctgattttatggtttccaatagatttcaaccaatagtgaagtgttacaaagattaacctaacctttcttgctttctcagcatacatcaagaagaggattatgtacacaagctgaaaggctgctccaatagaattaacagttgtcaccaagagattatcaggtgatataaggagtgtgccataccacaagcagatcatgcagttcaagagagaataaatatatggcaacccggagaacatatctgttgacccatttcggatgattctcctaaatgtcggtctacaaatcaaaacagaac

SEQ ID NO: 27228 - DNA, 248 bp, Glycine max
agcttgtgattataaaggcaaattttcactgtgattttttctctctgtttcttcttctggccatgaaacttctctttgtcacttgttgaatgagccccacttaaaaagtttgaattttgaggagaattatctttctgggtgtttttcacgagagcaagatcttgaagttcttggggtttatgtggaatcctctgtcttgggttatggacgctgctgctataatggcaattgcacttgcccttggaggg

SEQ ID NO: 27229 - DNA, 436 bp, Glycine max
  unsure at all n locations
cttgcctgaagcatatcgcaaaaatgggagaaaattacatatatttttgcaaccatttaaggagaaattaaacaatgcacatatatatacctgatgacatgtgtattgaactcagcggtaactttcatggggttcggcttgtaagcttgttttgcggcttctcttgcttcttttaatcgcctatgccagacatgatcgaagtgacctatgttagcgttaagggtagggaatatagcaagacaaattacgtaaaagaatagcaaactgaacttgctagtttccatgactattgtttctttctcttgaagatctttaatcgtgtgcgccttatgttgtttattgtgtgcttttcaacctatatatntatttattttggcattttaagttctcctcccgtactttgcgctagacccacatataaatggcactacgatac

SEQ ID NO: 27230 - DNA, 398 bp, Glycine max
agttttataaagtccttctgattctatttatacattttttttactttatggcatgagatgaagtacatagattggagcttttgcaaatttttattaatgaatagcttaaacactgtggattaagctactttccttgatatttgtattatgcctaactacatctaattgtacacgctacattatattcttctctttggataactgcatgccttgtataagacaagtgaagagggcatttttgtttcattctcttatgatgcaatcattaactttctgtgcatacaccttttgtacatagtcacagcatgttattgtcacttgaggaccagtgaactgttctttatttgcttaatgacacgcataactgtacattcggtggagttgcgatcgataaatac

SEQ ID NO: 27231 - DNA, 365 bp, Glycine max
aactcccgctcggcattaattgctccaaagctgtttaaatgatacgtgtcgcaggcggcaccagaggagcatataccacagagtcttgctacaggtacatatttttgattcatggctagttaggataccaggttaaccaaggcgtctagtttaacttcaagcttcttaaactcagatgatgcagatgagtttgtggctacctcatgcactcctctaatgactatagcctcatttatggcgctaaactgttgggagtccgaagccatcatctcatatatattcctggcttcagcatgggtcatgtctccacggctccaccctgtcagatctatcatacttctttcatgtactgagccttgtaaaat

SEQ ID NO: 27232 - DNA, 398 bp, Glycine max
  unsure at all n locations
agcttgttacaactagtattctttgtcctatcacaaattagaagatttgttggtttgattttgcacaatgactaacacactattgttttacaaatgaataaccaatttctacaattagtttttttctttcaagataaaaaagtgttttgagagcttttctaaactttacaagaatttaagcatagtgctttttacagaaaaaatttgaacaattagcgcttcaaaaactatatcatgtgctcaaagcttgatatttataggcctccttgaatcaagtaattgtgttctctaaaaggacatatttcctctcttaagcttacatctaaagaatgtgactattgnggcattaaatgcacacatttcttgaagctgagaaaccattcttcattgctagcgtg

SEQ ID NO: 27233 - DNA, 443 bp, Glycine max
  unsure at all n locations
tgtaggattatggngtatccatcacatgtggtactatgtggcggtcgggcgatggtgcacaacaagttttccacatccacaaatcgcgcataaatccaccatcccctgttgcccacctccaactgagttcacgtactcccacatcctcgtttctctcaacatcgggtccccaaaaatcctcccaagcttccccaacatccaggtaattcaacatccaaatcatcacaaactaacaaaccaagcaaaacagggcaaaggctgaaaactctgtccaaaactcaaaccaaaattatagctttttctcacttaaagaccccagtaacatttccttcgttccaattcgctaaccgttggatcgactcgaannatttactggaagtctctagtacataagcctacattntgaccgttgggatctgctagcaaacatccaaaactcattc

SEQ ID NO: 27234 - DNA, 498 bp, Glycine max
  unsure at all n locations
cccgcgattacnactangacttacgaacncngagacactacannaaactcccgctggcctcactacttggcggacaacgcgcaaatctcatttatacctctacagncggaccacaacaaagatcccttgcactgctcttttcacatcttcggtcgaacgagtcatatacatcggctacgatagcgatcaatctgactgttcttgcgggtctagaaacgcgacaaaagcgtcgatcagcctctaggaccacccacccatccacatttggacagagaactcctccgaagatcaaaagtgctacgatgcctatgaacggggcccatttacctctacctatcaagatacgtgcttgtgtctacaaacaatttctctcgtactccatccagcccattctatactggctttctgtggcctaactcctctcgcaatatttggactatcctacatactctacctaacaaggcgataaaccctgataagagggatggcttcatcccg

SEQ ID NO: 27235 - DNA, 575 bp, Glycine max
  unsure at all n locations
gggcagcgctagtcaccgccngacgtangantacgaaaacagaggcgaacacctcaaccccccncccccccccccccccccgcgagcatggcatcgatgacatgggagacncngagacaccacanaaacccaagccganagcggagcaagccgaaccgcaagcaatttgcggattaactttatccacaagcaacgcgcagagcaacgggatccgcaacaaacgcacggatcaagtagacccaaaaaccacacgtggagcaacgagaaccacacccaacaagcggagcaacaggggcaactacagaacaaccgccgagcaccatcgtcaaccaccagacacaggagagcagaggcggaccaagcacaacgaggagggcgcacaacgaacgctccaaacaaacccaggggcacgcaagcctcggcacgcaaggagaagggcgcaccgagcaacccccaccgcaaacaaagcaggaagaccgcgcgcgaacccaaccgggcgagaacaaagataagcgaccccgaagcaaaagcgaaaatagacaagacgcccgcgacggcaccacacacagcacacc

SEQ ID NO: 27236 - DNA, 180 bp, Glycine max
ccgggaactcacagaaacctgcagctgcaatcttaccatttggactcctcataggtgttgcatgagaatacatgctctattatgatcttccactccaagtaagcccccggaacattctttcctttacaaggaagaaagctgaaggtaataccatcaattcgggattgtctaggaacacca

SEQ ID NO: 27237 - DNA, 463 bp, Glycine max
  unsure at all n locations
acactatggaaaactcccgcttgccttgccccttgatatattngagggacttatggatactatgaatgacaaattccttgggataaaggtattgttgccatgttttcaaagcccgtactaaggcatacaactccttatcataagttgaatagttaagggtaggaccacttaacttttcactaaaataagcaattggatggccttcttgcatcaacacagccccaatcccaacatttgaagcatcacactcaatttcaaaagatttttgaaagtttggcaacgcaagtatgggggcattagttagcttttgcttaagaacattgaaagcttcttcttgtttctctccccatttgaaaccaacatttttcttgagcacttcattgagaggtgctgccaatgtgctaaaatccttcacaaatcgtctataaaaacttgctaagccatgaaaactcctcacctcggg

SEQ ID NO: 27238 - DNA, 379 bp, Glycine max
agcttgtcttcaacaaataaatcataatcaaatttgtgatcttcaaagcccaactccagcttctttctccccatatccactatgcagctcgcagttagcatgaatggccttcccaatattacaggaatgtcattatcttcacagatatccattaccacagagtctgcctgttttactctgaccagcacatcttcaattactccatatggtctggaaatggagcggtcaacaagttgtaaagtcatcctagtgagcatgatctcctactctcccaaccttttgcacatggagagtggcatatagctaatactggctcccatgtcaataagagcctttccacagtgacttcttcaattgaataaggaatggttacactccc

SEQ ID NO: 27239 - DNA, 537 bp, Glycine max
  unsure at all n locations
ccgcgtacaccctgcctcggcaacgtcggtcggtacgttccccccccccccccgcggctgaatgagactgcaacnctgcancagngacctataaaactcagctctcaagatccacccccatataagcttgtcaagctagctgccatcactgcggccctatcctattcgagaagacattcctttacttgattcacatgcacagaggacgcacgctaaggcaaatttgatgaaatctcgacaacatttcgcattggtctccaagtacacgacatgacagcgcggacacgaattcaccacgatcaacgaagcacccgtagaacaaagcttcatgcactaaaccgagatttaatcagataaacacaacctacttaacctataagcaagaattatgaataccaataggccttcccatactgcccaacagacaattcgagattcaatacgatgagtaacctacactatccatattcatcggcggactaccagctcaacagacgacgtatggttcgctcataatgcaaccaattctaatacacg

SEQ ID NO: 27240 - DNA, 378 bp, Glycine max
agttctggtgggacatcttgacttgctttccaatctgacattcaccacagattctgccttcttctattttcagattgggaatgcctctaacagcacctttgtcaatgattttcttcatgcctcttaagtgcagatgtccaaatctttgatgccatattttgacttcatcttctttggagaatagacatgtggaggagtaactggtttcttgaggtgtccataggtaacagttgtcctttgacctgctgcccttcattagaacttcactcttctcatttgtcaccaagcattctgactttgtgaagtttacattatatccttcatcacacagctgactgatgctgatcaagtctgcagtcagtccttcacagcagtact

SEQ ID NO: 27241 - DNA, 425 bp, Glycine max
  unsure at all n locations
gttcaagacgagcggagcttttttcttatcattattagctcncaccccataattcctccaaatgagggcaaatttgctctgaaccaaaatttccttttatgaatgaagctcttctacaacctaagacaaggttgaaggagataaacgtacaggctcaaggttcaatcaaacaatcatactttcagctcaaaatgggtacaagggataaatcaatcatgcacaaagtaagctttttaggtaagtggctatcttcaatcaaaacatggccttcatcgtcttcaatttcaatcattctttccatgcttagagattcatgcaaaaaccattacttaatgttagtcattctctcacaattaaagatcacactctcaccgggttgcagcaaatgtgttccttcacaatcaacctgacaaaccaactaacat

SEQ ID NO: 27242 - DNA, 398 bp, Glycine max
agcttcttcattaatatatatatatgagaataaaatatgaaggaaaaaagcttcttcagacaactaaaattaacttatgcattaggtaaaatcagctttttttgcaaaaagatgattgtaacttatgtcaagttaatcgcagcttatgggagaaaatttatttcatcttttttctttttattttcttctcttattagtgcttatggagaaacttattctaacatggtcttaatcaatgacattacgtttgattggaagacaatattagatgtacatgatctgattaaaactgggcagttaatacgatggatggtaattgccatcagtatcctctctctctctcttatatatttgtgcgtgtgagtgttttctagtctggatcttgagacgcgtctact

SEQ ID NO: 27243 - DNA, 442 bp, Glycine max
  unsure at all n locations
tcatattcttgaattgacttgaccacatcttcattgttatagttttcaatcttaaatggctgatacatacatgtgtgtctcattttcactcactttgatcgcgcttcttaacaaggtggttcatatgtatattttacgctttgcagataaattttcaatttcggctaaagcttccttcaatgcaataatgaggatgaggtggataataaacaaaaaatgcaacagtaaaaggagaacaaggggtatatgcattgatttaaacaccttttgtaacttattcattaacttanagtgagtattttcagtttgtatgttgctacacgaatgataggaaaagttaagcatttagaaaatttattcatgttcctataaagacacatagctaattgagatctacaatttattttggggatacatttctttatacatagcaagatacagc

SEQ ID NO: 27244 - DNA, 403 bp, Glycine max
agcttattattattcagtgaaggatgcgtcaaatcccaagattcttgaagtgtccccacctctccgtttctttgatcaacttgaggcctttacctctatataaaccactcttaatgctcatttcctttcatctaaagcttttagttttctatatcactctcaactctgcttcttttcaatcagttacattttctttggtattccaatggccactgttgaagtaactctactaaaatacttgctactctactctaactcacatggttgctcagttcagaacccgcaaataaattcccttatgttaattctaatttggaatcaatttcttttattttcagcttgatctcaaccatatccttgcttcgtttattttttaatcattttttatcatcatacccttgct

SEQ ID NO: 27245 - DNA, 437 bp, Glycine max
  unsure at all n locations
ttgaagtactacgaagcagcaaatgaagaggacctcttctaatctcatgctncatcaaattagtctcagcttcaaatttggatacatgtgtgcaaacagagccattgcacaagctatgagagacgaagacataattcatataattgacttccatattgatgaaggaagccagtggctcacttagattcaggattttgtagctaggtctagggggccactccacatccggattacggctattggtgattcaacatcatctgatgcaatgcagatggtgggaaataagttatcaaaacttgctgaggaatttaaggtgctctntgaatttgatgttgtagctatctttgcttgtgatgttcagctacaaaaccttcgagttcaatctcgggtggctctggctgtgatatttgcattcatgctacatcagatgccggatg

SEQ ID NO: 27246 - DNA, 401 bp, Glycine max
agcttcttcataaacgtgacatttttgcacaatacacaatgtccggtacaccacaaccaaatggtgtatcagaaaggcacaatagaactttaatggatatgattaggagtatgttaatcaattagactatatccgtatctttgtggatgtatgccttgaaaactgtcatgtatttgttgaataaggttcctagtaaggcagttccaaagacatcttttgaactgtggacaaataggacacctagtataaggcacttgcatgtttggggttgtcaggcacaaataaagatctataatccgcacgaaagaaaattggatgcaagaacaatcagtggatatttcattggttatcaagaaaagtcaaaggagtatatgttttattgtcctaaccatagtatgaga

SEQ ID NO: 27247 - DNA, 443 bp, Glycine max
  unsure at all n locations
tctcccccaattntctataaatagggggagaagtgatgtgatttatggttttgtcccttaggcacttctctctctttcgaatttgcttagaaaaattgtttccgtgaagaaaatccaagccgaggcgcttccaaaactttttcgtaacgtttccgtgaggaatttcgcgaaggtttcgaccgttcttcgacgttcttcattcgttcttcatcgttcttcgatcttcaacgggtaagtacctcgaaccaagcttttcgattcattctatgtacctttggtggtccacattgtgtttcgtgtatttttattctcgtttcagttactctttatacccccttttgacgtgcttaagtcatttctcgcttaacctaaaaataaaataaatttccaccgatcgtttgaattgtattatccgctaacttccggtaaaatgaattccgacc

SEQ ID NO: 27248 - DNA, 406 bp, Glycine max
  unsure at all n locations
agcttgcttgtggagcttctatggagactggatctttgagcttcaatgaggtcctccaatggtgattttccaccatggagatgcagtggaaggcaaaggagaagaggagaggggagacaccatccactagggaataagccatggaagaaggagcttcaccaccaagaatgtgccttgaatcttcgagcttcacaacagttatccagttcaaaagaacaatgaatgtgctatgactactatgttagtaaaaagaatcaataaatcaaagaaagcaaaaataaagcaatgctgcaaaactgaactaaactctactaacagcttagttccncggcaacgacgccataaatactntgttggatttcccctgtggttactttatgttccactntttcttcgttcaaatata

SEQ ID NO: 27249 - DNA, 407 bp, Glycine max
agcttacatactctgtatgaaacatgataatcaattacctcgttctataaacgattaccacgtttctggaaatgcatgtcacgaatgatttgaaaaaattaatccattaccccatttgttaatcaattgaatttgtctttcatattaaaatctatatataccctctcttgatcattctcattagcgaatctaatttagatcgtatctttcgaaaatactttctgagagtcatctaagggaaccactctgcatttcagcgagagattcatgatgatcacgattcattcattcttcatcatgatctgagcaaggaaataaaggcttgaagatattgcgatatgcacatttaggtgtattctgaaataacaacaaccacactacaatgcgggttgaatagtgtgataatt

SEQ ID NO: 27250 - DNA, 450 bp, Glycine max
  unsure at all n locations
cgcttagcatcagaccacttccagggtactggaactacttcacatggacttgatggggcctatgcaagttgaaagccttggaggaaagaggtatgcctatgttgttgcggatgatttctccagatttacctgggtcaactttatcagagagaaatcagacacctttgaagtattcaaagagttgagtctaagacttcaaagagaaaaagactgtgtcatcaagagaattaggagtgatcatggcagagagtttgaaaacagcaggtttactgaattctgcacatctgaaggcatcactcatgagttctctgcagccattacaccacaacaaaatggcatagttgaaaggaaaaacacgaccttgcaagaggctgctanggtcatgcttcatgccaaagaacttccctataatctctgggctgaagccatgaacacagcatgctacatcca

SEQ ID NO: 27251 - DNA, 398 bp, Glycine max
agcttatgcacggaaaatgtaattatgaaattgagatgcccgaagaaacaccatttcctagttaaccatgcattaggtaccatgttcaattattttgtttttaagtgaaacgggtttatgatcccaacatggttggctcctaacacatgaaactaagaatgtagtgtgaagtttcacgcttcccccttctttgtttttgttttgtagaggaaaacgcaaggatgagcaaacatgaaaacaaatggtatgcaattttgcagatcaaaaagtttgttgaacgcatatgcatgatgatgccatgactcatgcaaaatgtgaggctggaatatgataacggacaaatgcacgatatgtccattatgatgttatgaagagatgcttatgcgatgcatgatatg

SEQ ID NO: 27252 - DNA, 430 bp, Glycine max
  unsure at all n locations
tcctcggagccatntcctgcgaaggcaaattattggtaagttntaccagngggacactactcttaaaacaaaaatggcatacaacctcttctcataaatacaaacatcaatgtaaatttagagcaagcttatgcgcatatttccttacgaacgttcacttgcacaagacattctttttaactaagaaaaatgcacccatatacaatcaaggcagcttcgtcacctagattatttacctgtacttccaaggtgtatttgttacttacatcacacacatctccttggctaaatttacatacatgcatactcaaagcattttggggtaccaaaaattgcacatgtgcacatcttggtatttctaatacctatacatacacaaacttcatgatgaatcttgactatctacacaataaggtgctacatntcatgc

SEQ ID NO: 27253 - DNA, 397 bp, Glycine max
agctttatagtaactcacaacttcttaatcttttgagttggaagatcttttcttgaaagtgagttatgtcttttgagtagaagaagaccaacatctcaatccagcaaggtttttgtggaaagattggtcaggttgtatttctgctacttggttttttcatgtgtatgttcttttacacggtcttgtgtttatgtgtgaattgcttaccgcatgctagaataggattttatagtttaggctaagagtagcgttttcttaggcttatattcatagagggttctagtgttggatgccttagtctctttttccaggctgggaattgtagattgatcgtgattgcttgtaagaattcttgatgcacagtggaaatctaatttatgttatggattacataact

SEQ ID NO: 27254 - DNA, 440 bp, Glycine max
  unsure at all n locations
tatcctctatcgctntgtatataatnngactgttgntacattcttgggaaaataaactttcaatatgtggtttaaaagatacagacaatgttacaatgcaattaatctggtgattgagttggttatgacactttctttttaaccttaattgaagtttgatagtgttactaagaaagtctgctgaaaaattgtttttcacatttactgatctctgtagcatgacattgagtcatttttatatttgcagacaattaccatctctagtacgggttcaatcaccaagggatagacgtcatcaatttcccgacattgatcactactccaacaggtattccactactaggggtcaacatatttcttgattgaagtgaatataccaaacactagctattacagttacctttaggatatggctnttaaattaagttgttggttactta

SEQ ID NO: 27255 - DNA, 328 bp, Glycine max
ttgcttatattcgttgaacacagagtggcgcctggagatatgtcgcatgggtcacgagaccttggggacgtcatgcggggtgctattgcccaaaaccaagcttgaacaatcccgacccaaccagggcatagtcagtcagtgagaacctgtgttgtacctaaacatgcgagctgctggcagtcaacagataaaacgaacaaagaccacaaagcaagaaagcttgcgtggtggctgggcaactgtgaatcttgtgtgacatatgggttatggcctctggtaatacactaccatcggcgggtaatcgattacaaggcttaaaaatgaagac

SEQ ID NO: 27256 - DNA, 430 bp, Glycine max
  unsure at all n locations
tgtctcagcgtttatgcgagacggagaccaacatgctagctatcatcgccaagtaccaagaagagttaggtctagccatggcccacgagcatagaatcgcggatgagtatgctcaagtatacgcggaaaaagaggctagaggaagggtgatcgactctttacaccaagaggcaaccatgtggatggatcggtttgctcttaccttaaacgggagtcaagaacttccccgcttgttagccaaggccaaggcgatggcagacacctactccgcccccgaagagattcatgggcttctcggctattgtcagcatatgatagacttaatggcccacataattagaaatcgttaggaaacttgtatggtctctcagaccttgactagatacgactttctttntgaaataaaatgacttggtcccatgtttctact

SEQ ID NO: 27257 - DNA, 384 bp, Glycine max
atctttatattaaaggttagtctcataattggtctaaataactaaaaattacacaaatatctcaaaatcccattgaagattcaaagaccctatttatggtcgccattaacggttaaaactaatggtccactataaaaccatatctttaaatggtcctcgaataatccatcaatttattattcaaataaattagtaacgcctcctattaaagactcacatttattgttcaaataaattatcatgtctttaacgcattgtttgacaatcccaaactaaaagagtagattacaataatatcccctaagatttcttgaaatacacatagtactcctaagttttacacctacactagacctcgatccttgttgaagaacatatttgaca

SEQ ID NO: 27258 - DNA, 446 bp, Glycine max
  unsure at all n locations
ctcaagcttggacaacaagacgtgttttaaggaaacttatccattttttattttgctngatcaaagagttgatttttcagaaaatagtaacactcttaaacagccatcatagtcacagacaactgtaaagatattaagttgtcaacattgctattttcataaacagaataacagatttacatatttgtggcttaaaatgtggaaagttctgttttcaagacgcccaaaacctccctccttttacaaataggcaaatagcatgattggatgaccctcaatttcaaagatttcatttctaactggatggagattggcttcaaattgaatatgaatatttacaaaataatgctatagttttgatgcagtcaaagaccaaaatcacaaacatagtcatagattgataatntaaaatacacattggttaattatgtgaagacactaaaagt

SEQ ID NO: 27259 - DNA, 395 bp, Glycine max
agcttctaaactttattttagaatgaagctctgataccacttgttagacaagtggcctcagatatcttaagaaggggggggttgaattaagatatcccaaattactttccacaattaaaaatttatttcactttcttttcaagttatagattcccttaacaatgaacttcttaaatattaattcaaataaaacaatttgaatatgaatgtaaagcaataataaacaaaggaggttaagggaagagaaagtgcaaactcagatttatattggttcggccacacccttgtgcctacgtccagtccccaagcaatccgcttgagagttctactatcttgtaaattccttttacaagttctaaacacacaaggacaatccttcctttgtgtttagaatt

SEQ ID NO: 27260 - DNA, 437 bp, Glycine max
  unsure at all n locations
ttgttcactgcagacccaaatagcagctttataagttatcttttttcannatcagcaaagataaattatatatatataacctgcaagtaccaaaggtactgattacagagtgagtcaccataaaaatggttcctcagtcagacatcataagtctgattgggaaccaaaatatgggaagcaaagtatacatatattgatccctactccctaatgaaacccctactgctgcagaaaatgatgtctcaagttactagaccatcgactaaaatgtaatgtaaagtccttattcaaattatggagccaagtccacattaagaaagtcgcgtattctaattaccgagattgaaggtcttctaataatatccctaatcatataacaatatctaattgttagatgtaagcacattactacttatacactttaaatntatgaagct

SEQ ID NO: 27261 - DNA, 356 bp, Glycine max
agcttataatatatcgaggcgctcgaaattgaacaacggaagctcttgagaaattcaaatggtcataacttttaactcggatgtccaattcatgcgcatcacatatagagacgctaaaaaatgaacaacggaagctctccagaagttaaaatggtattaagttttcacactgaggtccgattcaggcttataatatatcggggcgctcgacattgaacaacggaagctcttgagagattcaaatagtcataacgtttaactctgatgtacgattcatgcgcattacatatatagacgctaaaaaatgatcaacagaagctcttaagaaatataaatggtcacaagttttgacactg

SEQ ID NO: 27262 - DNA, 427 bp, Glycine max
  unsure at all n locations
agagtgatgttgcgcgtgctgatgggtatcatgagttgtttgctgggttttgacccacgcaggtgttgaagagacggcatgggcatctccctccttcctttttgcccctgttgccccgattcttttggcattcgcgtttgtgaaggaaacgtaatcaaactttcctcttttcaatccaacctcgattctttccccggcaaacaccagatccgcaaagctggacggcatgtaacctactagcttctcatagtagaacactggcagagtgtccaccatcatggtgatcatctctctctcaaccatgggaggagctacttgtgccgccaaatccttccatcgctgtgcatattctttaaaggtttcaccctcttttttgaacatattctgcagntgagtaccgtcaggagccatatcagaattgtactga

SEQ ID NO: 27263 - DNA, 375 bp, Glycine max
  unsure at all n locations
agtttattaattnttgtaattaggtttttagtttgaagttattttaataatgcttaattatttacaagcctttgttcatgggtggacagaccttacaaataattacccgattcccttctagttttatgaagttagaatgaaattttaatctgtagtttaagtttaagtttaagttagtagataaataaaactgggtaattttgaatatattctatagataaattaaaatacatgtgaagaaaaatttaaataaataatttttttttctacaactaacaaataaataattaaataaaatatggactaacaaattatttataatacaaacaaatattgaaaaaattatttacacaatatatatacaataataataat

SEQ ID NO: 27264 - DNA, 430 bp, Glycine max
  unsure at all n locations
tatcctanatggcactccttgtatcacctaattccttactcaattacttttaaagtcctgctgaatgagtacaaagtgacttgtagcagtttggtgagtaacctagcattgtatataatcagtataaaaatacctctgtctatcaaattttaaaatcatatacatatctaagatgaacttaatgttaatttcaggatgtatcgagtaccatgtactcatttatgaaaggtgtgggattcacccatgtgaatttggaagggattacgaaatgtaggattgtttataatcataggagaaagtttgcaaaaattggctattgatggaggacttttgcacaatcacaaaanttggaagcttcccagatgtaacatctaactntgttttattttggatttgtttgtaattgaagtacattatattatactaatat

SEQ ID NO: 27265 - DNA, 278 bp, Glycine max
agtttatcatttgcttaacaatgttatctccattgtattcgagctcaattgcatattctctctttgatatatctgaacatttcattcattcaaattactgcttggaaagttaggagtggcttactgatcaaagaatacttatgtgttcttgatcctacgggaagattaaaggtgtgtcacatgtaacgacccactgtccgtacatgaaactatgaactactctcaagcggaagactttatcttaattcattgaaacacactcctcttaatgacattat

SEQ ID NO: 27266 - DNA, 393 bp, Glycine max
  unsure at all n locations
gcttcacaagcacacatggtgtatcatatcgaggatgatgttaatatgggnttttgtgccgncgnccacatgatgcccagagatttgtatgatatgagagaagttggagaagacattacgttcgaaagtgagtcgtaccatgagcaagatttaaggaatctatttgcaaatgacataataaacaataaccttggcgagggatgatgtagatgatgcgcatatgttggaattactagacattaatttatttcatgaactgatatatttggtaagatacaatttcattgacatctgggtttataaatatatattatttggtgtattgccaaatttatatttagtattgatacatgttcgctatggtttgctgctactgtattaaattctaatttc

SEQ ID NO: 27267 - DNA, 555 bp, Glycine max
  unsure at all n locations
atgaccacaccagcgaacatcatctagacaagagctcgcagatacacagaaaaaaannnnananannaaagcganaagttgaagcctgagaacctcgaagagccancnagctcagnaccgcgggaagcactagagncgaccagcacgcaagcaaacttctagatttggaccaanacatccatcggcacaacaaaaaggaagaagacccggcccccgacatctcccggcgacaccccgatgcacagacaggcaaaccacgcaagaaaaacggtgactgtgaaaaacagcacctacaaaacaaacaggcgcagactcccactgcaccaccttgtaggggagacacaacccgagatgacagacgctgccggagtcgcatacaaagaggcggaacgaccaacaaaaggggcgcaggccaaacaacaggtccacagcacccagcaacgacgagaagcccccccaacacttacagcgacacgacacgacccaccagcgccaaacgcaggaaaaacggaacacctagagcgccaagacgcgcgagcgtacaccaacacaccc

SEQ ID NO: 27268 - DNA, 445 bp, Glycine max
ctcaagcttacgcgcatacttccttacgaacgttctcttgcacatgatcattctattatctaagaaaaatgcacccatacacaatcaaggcagcttcgttacctagattatttacacgtacttccaaggtgtatttgttacttacatcacacacatctccttggctaaatttacatacatgcatactcaaagcattttggggtaccaaaaattgcacatgtgcacatcttggtatttctaatacctatacatacgcaaacttcatgatgaatcttgactatcttcacaaaaaggagctacatttcatgctcttttttcaagctgttgctacttaaagccgcatgcatattcaagcatattctcctttgctgactaaaatcgtattcaaattacaaggtatatatgtatttgtaatatgtttcttcaataacatgcacatatttat

SEQ ID NO: 27269 - DNA, 307 bp, Glycine max
ccatcccaagagctttggctgaggccacattgacgtctctcagctcggtgctctcttactggaccttgatggtcgccgtcttgaacttttccgtgatcgcttgtgcccaaacaacttccgccattaaggcatgcacctcctcactctattcatggagtttagtctcttactcacttgaggtcattatcttcgggagccaaactaactctcgcgtgcaagccttctaccacttgggatatgcgtcgatactcccattgctgcttccccaagctctatatgctatctttgtaccgtacaccatgctttc

SEQ ID NO: 27270 - DNA, 242 bp, Glycine max
acccacggaaataaatgcttgcgcaaaacaaacaaaaaaaggaaatcataacaccaccgcgaaccgcaacgaaaagagcacatataaaccagcgaaagaaaaaaagacaaataatcgcgggccaagcccacacaaagaagaaacaaacgaccagcgagagcaaaccatgaaaatccctcaaacgtgaacgaacgcaacattcaccaaacatagaaccaacggccaccaagaacagctaacac

SEQ ID NO: 27271 - DNA, 515 bp, Glycine max
  unsure at all n locations
cccgaccaagaacgcgaaagaaaaaccgcttacacccccccccccagagatgttcgagctcgaancaggacacaaaaaccagcggaaaacgaaggggccgaggacacgttttctttaaaaaataccccaagagaacgagaagtaatggtctaagcaatacatcgaacttgagccactacacagagacacgatcgcataaagaaatagcgacgctatacataacacgagaagccgcaatgaagatttaaacgacatgccaagttacatacaaaatcccgcgatgatcaacccctatctacgacagaactagcgtacatagacaaaggataaaaaacaaccataggcgaagaagcactcacaaatgcagaaaaatatcaaaccgaggatcatcacatgccgacaacacagcgacaacacaaagccaataaaaaacacaacaggcaaacagcacacccagcaagaaaacgcaaagacaaaacgcacaacaaaaacgacacgcaacaacacacaacacg

SEQ ID NO: 27272 - DNA, 337 bp, Glycine max
  unsure at all n locations
tgcttgtanatgaggaagtgtataatggtgaaacttcctgcttttattcgttgaccacagagtggtacctggagatatgtcgcgggggtcaagagaccttggggacgtcatgtggagtgttattgcccaaaaccaaacttgaccaatcccgaccctgcccaggcataatcagtcagtgagaacctgtgatgtacctaagcatgcgagctcctgacagtcaacagataaaaggaacaaagaccactaagcaaggaggcttgtgtggtggctggccaactgtgaatcttgtgtgatatatgggttatggcctctggtgatcgattaaccaaggtgggta

SEQ ID NO: 27273 - DNA, 431 bp, Glycine max
ttagggttgaaaaactatataacaacaccttggttttattttaggccctctctcttctctctcccctattttcgttttctagttttagactttttctttgagacattttttttttcattttgcaactccagtagcaataaaatttcgttcttcaatttataagttcgttatctattgattaatggaaggctaagtccctagcgttgctttcttttgaggatcaagtgcagttctcttcgaggttatattattactgttaaattctgttcagtttttcctcttcactaattactctaaatctgctgctattaattcatgcatgcttagtgcttgattaatcgtctctgcacttaatttatgttcatgcttactgatcgtttatgagtaatcggtgaatgtgctgcttaatcacatactgaatgccttatgtt

SEQ ID NO: 27274 - DNA, 168 bp, Glycine max
atcttcatcagatgttgtatttctagaccgctacctcttatggaagaatggaatgtacactttgcatagtatattagattaatgagcatatagctattgacattgcgacccttcacagctatcagaatgtctcctggcaccaccatggacttcgccatatcagcaata

SEQ ID NO: 27275 - DNA, 376 bp, Glycine max
  unsure at all n locations
gaaaccataaaaaccaaagtagtttctaattttacatttantgaagaagctgcgccaagcatccccatagaaaaacctttattcaaaccttacaaagttagtgagaaggctaaacgaaaaattatggaacttagaaaaactaaatccttaattgaaggcgcaggtgacaaccatagtgaattactaaacaagattggcagtttacttaaagtcattccaaatacttcccaagcctcggaaaatactttcaaaatggtaacaagaagtacctccaaatcaattaattttattaatgaagatagtgaccataactcagataacacaactgatataggatcagtgtcagaaagtatataaatccaattaatgccaaaca

SEQ ID NO: 27276 - DNA, 317 bp, Glycine max
agtttgtaggattatgttgtacccatcacatgtggtactaggtggcggtcggatgatggtgcacaaaaagttttccacatacacaaatcgcgcttatacccaccatcccctgttgcccacctccaactgagctcacgtactcccacgtagcccatatactgatttctctcaacaccgggtccccatcaatcctaccaagcttccccaacatccaagtaattcaacattcaaacagcacacactatcacagccaataaaacagggcataggcttaaaactctgcccaaagcaccaaccaaaatcacagctattctcac

SEQ ID NO: 27277 - DNA, 368 bp, Glycine max
caacaagagggatctaaggatgaagcttgtcacaccctgatatatatatctatatatttttagtaattatgtttgatgtttcattatttgctgcattatttttatccgtaattattttcaaggaggttaatttagttaatagaggagtgtgggtagataaggatctagcttctcaaagaagcctcttgagaaagcttctcaaacaagccaggaggaagcttcttgatgaagcctcttattgaagcttcttgaggaagctacatgatctgcctcggttaaaacactacgcacccttcgttaaccgttggagcttctagaatttgcgctgcagcttcaaacacactttccatgatctgaccgttgggatc

SEQ ID NO: 27278 - DNA, 236 bp, Glycine max
gtttctagtgagaatatcgacatttttgcacctgcactcagtgagaatcaacaaccccgatctcattatgcacttgtctctcagccgatgagagaaacacatgtaagtccgtaagaccacactttggttggattcggggtctatccaagatataacactgaagggatgaaattttctaacattcctgtgctgaatgctctcggaatatctcaatgttgcccgttataacaaccctt

SEQ ID NO: 27279 - DNA, 355 bp, Glycine max
gtgtaatcgattacacacatacttacaactttcacatttagagagccgcagaaaacattctcaacagccacatctttttattcggttcttgaatggccatcaaaggcatatatatatgtgacttgagacacgaatttgataagagattttcaaaacaaaaaggtcttatcctcttatatagcaaaatacctttatcctcttacatattccttggccaaaactcttttgattcaataaggaattatctgagtgctcacatcgctcaatctatctctttatacagagatttcttcttctcttcttcattctgaaaagggattatagagaccgatggtctcttgttgtgaaaggattc

SEQ ID NO: 27280 - DNA, 378 bp, Glycine max
agcttgtggattttaaggattgagggctgttttggtttgtgtttaagtttgagtttgtgtttgaggtttgtgttttggaagacaaactcgaagaaaaagttttgggtttacgtgtatgtttctcttcatagagtttggccaacgaaattgttctgaggagtcatgtaggtgattgtgcaatgacatcccttctgatatcaggttttaatcctcccacatagcaatccaatagagcttcttgtgtaattccttgtactcgattagctaaagccgtgaactgcacgtaatatgactgaactgaaccaatttgagcgagtttaaacaactgagatctaggacattcataccgtgatgggcccaattctgtctctaatgctc

SEQ ID NO: 27281 - DNA, 430 bp, Glycine max
  unsure at all n locations
tgtcatcgtgagacatcagaggctagtattntaatttatgtgggtaggaaaaattcaccaaattgatagagaaaaatctaaaatcatacatcttaggcaaataaggcatgctagcccccaacattattgcattttgattccatctttggacattgtgattttgaaaattagaaaacccaaagtttattagggcatttcatcaaacatacaactcccaactgatctggcaaaagaaatagtgagtagaaaatggaacttgcagacaaaaaacaaataaaagaaagatgattttctctttatcattcgcagaaaagaaaaattgaggaaacacactgcaaacaaatgtttagatttccttatgtgacattatactaactagtgaaaatttagcagttaatttaaagttaatagagatgcagaatgtaaataa

SEQ ID NO: 27282 - DNA, 403 bp, Glycine max
agcttgaaggtgcgtaccccaccatttttcatagtaaaacactggtaatgtgtctactattattgtgatcatctctttccccatcattggaggtgccacttgagctgctaggtctctccatctttgggtgtattctttgaaagatttgtgccacttgagctgccaggtctctccatctttgggcatattctttgaaagattcgtgcccctttttgcacatgttctgtagttgcatcctatccagaaccatatcaaaattgtgccgatactgcctaacgaaggcaaccattaagtccttccaagaatggactcgggaaggctccaagttagtgtaccaggtaacagctaccccagtaagactttcttggaagatatgtatcagtagttactcatcttttgtgta

SEQ ID NO: 27283 - DNA, 432 bp, Glycine max
  unsure at all n locations
tttgcttcctccagaaggttcctgatgggcccagtgtttagttctcccccctaaatngatcagttcacccccattttgtgtttttttggctgatctccttcccaaatgttgtgaaactttacggattacgcggcgatgagtgttaagcatctcaatttggtcaaccaaagttcatatgttgacaagcaatgtccccagacgaaattagggtatgacaagggattctcaaacctccccttcatgggaacgaggcgttgtatcaattatagtcccgtccttgccataagacaacttggctagcccgtgagaggagcaccgtcagaagaaagtatcacacctttcatcgcgcagggtttcatcgaccccaatgcaaggatatttcaaaaagtgcagacagcatggagtacggtgcaaagaaaagataaggagctt

SEQ ID NO: 27284 - DNA, 404 bp, Glycine max
  unsure at all n locations
agcttatattttaaactntaactataaaacagtttttaagtaaaagacaaaaaggtaaaataaaatacaagtcaacactagcgatttttggtgctgcacgcaagacaagtcatgaccacatggtggaaagttgaacactcaaactgccatattaagtcacgcactgtcattttggttgaaaaatcagaacttttttctctttacgtaccgccctggaatcagtacgtacagctgtaaacatagacgtgtcaattctcaatattcaacagtcaacaaacatattgatgctaactgtttatgcatgtcgtcccatgaaatattcatcaactctnttatgctttatttcagtcaaaaaatactaatattcttggatttatattatatttatcttaattcttataatt

SEQ ID NO: 27285 - DNA, 442 bp, Glycine max
  unsure at all n locations
nttgttccttttataaaaagagaagtnctgaaacttatcacgttgtctataaaggccttgaggtggatccaagtgctctgatcattcattagcatattcatgttttggtgtcatactcaccactgtttgtttttttagggaactcaccataactaaaaaagcgcaaaggcacccctataacactcgatccagaagtaagatggataacgaagaaggagtgcaagaacaaatgaaggctgacctatcggccttaaaagatcaaatggcttctatcacggaggccatgctaaaacttcaaaaaactatagaagataatgctacggcggccgcttccaatacagctagggaagcggaaccggtgctatagcccgcaataaacttgggccaagacagaaacgcgacgggttttaatcggaggtatagtcctcaagcctacccttat

SEQ ID NO: 27286 - DNA, 353 bp, Glycine max
agtttgtcctttattatgctatatatagggggagaagtgacacaaaaaagggctcagcctctaacgcacttctctctttctcgaaattgctgatgaaaattattttcgtgaagaaaatcctagccgaggcgcttccgtaacgtttctgctacgtttccatgagtaattacgcgaagattctcgaccgctcttcaagattcatcgttcgctctgcgttttcttcagtcttcaacgggtaagtacctcacaccaagcttttcaattctttctatgtacccgtggtggtccacattttcgctcatgtatttatattctcattgtcatttactgtttataccctcttttgacgtgct

SEQ ID NO: 27287 - DNA, 429 bp, Glycine max
  unsure at all n locations
gatcataaattcaaaaacatagggttagtatttgataattgaacgcnctatatggcatatattctatcttgtatcttgatttcaggaattaaattgtcatcataaagaagggggagattatagaagcaaagacattttgatgttttgatgatgccaaaggatcatgcgcttctcaagtttaattcaagacaagaatccaagaaattcaagatatatgatcaagataatctctagagatttaggaagggaattccaatttgaaacaacaagaggtttggccaatgaatttaagctaaaatgtatttacaagagattaactctctggtaattgattaccagcggccaaaatacttcctgaaatacttctaaaatgtctttagatgtttttgaaacatgtaatcgattaccagcagttgaaaatatttataa

SEQ ID NO: 27288 - DNA, 394 bp, Glycine max
  unsure at all n locations
agcttcaactctttgtgcccatttctgctccaaatcgcgaaaggagggcattttcggagtcgtgaagcgcgtctctacgtgtgggacttcgaaatttcaggtttgggtggacttctttctctcttgattttcgtgggtatggggttttgggagatatgatgggtagttttgctagttttctgcttcatgatagttatttgtgaagaaatttgttgaaagcatgttgaacttgccatgnttggatgagttaagcttacccattcagttttagggttcttatgatgatgcttgtgatgtttatgtgctgaaattgcttatgcaaaactgttagagatgaatggtagagttaacctacggttagatagtgagaatgtggtgttatgagtggaaaaag

SEQ ID NO: 27289 - DNA, 440 bp, Glycine max
  unsure at all n locations
ntagcatggcctccgtgatagaagccatttgatctttaaaggttgataggtcggccttcatctgttcttgcactccctcttcattatccatttttctggatcgagtgttataggggtgcctctgcactttcttagttattgtgagttccctaaagaaacaaacaatggtgagtatgccaccaaaacatgaatatgctaatgaatgatcggagcacttggatccacctcaagatttttagatgacgtgatgagtttcagaacttctcgttttataaaaaggaacaaagcttttatctagccaagatcatacaaaagtgttacaacagaacctaacagtttctaattatatgggccatcaaatctatcatgtgttgacagtagttgattagctcatgaatttccttaggggctgtacacacttcagcgatggcctttgcttt

SEQ ID NO: 27290 - DNA, 400 bp, Glycine max
  unsure at all n locations
cactacncaagcnngcagctgaggtatcctatagctttggacagccatattcatatttcntatccccacggcgcaacggcatctctgtgaacagaggcgtccgnctcttacaaattattgaatcataatttttttttctaacttcacccttcattcatatttatgagtgagagaagactaataaaatcataatactatttttaatattttaaggaagggtaattcagtcaaaggaacttgtttcgcttataatcgaggctatctaacgacattctcatttcttgtgcaataacctttcaatgtcgataatgaacggaaataaaatccttgatgattgaagatattctgtctattcgataatgcattccgggtgtgtgcttttgtccatgccccatgaaat

SEQ ID NO: 27291 - DNA, 436 bp, Glycine max
  unsure at all n locations
tgtgattaatacggngaacacgcctaagtttaatgttcttttggcaaagtgggagagtctgataggttgagtctaattgccatcaagaggatagtctttgattatttttttgagtggtttgccagagtaagtgataaccaaggagtttcttgatgctctaggagagaggtatcaagtatatgataatgttgaatctggaagtctaatgaagcagttaatggacatgagatatgataatgttgggggtgtaagggaattcattatgaagatggttaacatccggaccaagcttaaatcccacaaaattgactttaataagaaattcattgttgaacatgccttanattgcctatttgctgatttcacacaaattaaaattgcctataacactattggccaaaaatggactatgaatgaccttattaccaaatgtgtc

SEQ ID NO: 27292 - DNA, 305 bp, Glycine max
cttgcaagttgtaatatagagatatatacactgagggacttatttacacctttacttatgaagaatactgtaccgcagttacttactcagagtacttcctactccttatgttagcgagctcatcaaagaatgaataatcaaactaatcactacatttctttcacgaattcttggatgcctctcctaacatatcgatcaattagatatcaaattataccgcgaatactttcatatatatgtaaaacctaacaaaattagacacagcaaatgcgagaatatataaacatacagataccacatataaa

SEQ ID NO: 27293 - DNA, 442 bp, Glycine max
  unsure at all n locations
aactcaactgtggctgggcatttcttggatggaacttagagatgcctatttaagagagacggaaaaggacgngaaattgngggaagacaatatgaagcaatatggtggaaaatattattcgaaatcatgcattgctaattgtggcatatggtatcatgatcaattgtgcaaagacatgaagcgtaaccccagaagaaagaaaggcctttttgcggagttgtttgaaccatatggccacgctgattacatggatcttactcgcaaatgaaaattttaatgcaattaaatttcttttaagattctttggttagtgtatctctttcataacgagaatttgaccgtgtctttaaatcctgatggggtgtaaattaaaaaaaaatgtatttctttaattttatctatttattgtaataaatatattaaatttaagagataacattat

SEQ ID NO: 27294 - DNA, 187 bp, Glycine max
  unsure at all n locations
agtttaacaaanacatggaaagccatcacagtagcgaagcaggacgcttgtcccataaattagcacgcaaactacggcgagctgagtgttgaccctatacatatcaacaattcattcaagcgaaacaaacaaagcaatctaatgatccatccataggactaaatgtaaccatacatacatatgacaa

SEQ ID NO: 27295 - DNA, 376 bp, Glycine max
  unsure at all n locations
agtttgtcaatgaaaatttcatagttcatttggatattaaatcaaacacataacttgcaactcgcgaatcagtccaaaacgaataaaaaaacacaatatcattcaaacaatatgtacaaagacctgtataacattatccagataaaacattaaaagaacaaatgagtagaaatcttttctgcatagccaaagaaaatctcaatacattnggacatttaactaaacacttagctatcaacccgcagagtagtacataataaaatcaaataaatatttagctaccataacccatcaataaagccacaccaaaatcaatggaacaacagaaactaataaaatcatatgagtgaagcattaaaagataaagaaatagatg

SEQ ID NO: 27296 - DNA, 433 bp, Glycine max
  unsure at all n locations
ttgaagaganagcacccagttatgatctttttgtgttctttgaaaaagcctatgacactgtatcctggtccttcttggattatatgctatctaagttaggtttctgtactaaatggagacaatggattgctgcctgtctccaatcagcatccttttccatcttagttaatggtagccctactaaagaatttgtccctactcgtggtttgagacaaggggaccccttagcgccattgcttttcaatatagtgggggagggtctcactggtttgatgagagaggccattctgaaaaatctctatcgcagctaccatgtggggaatcataaggagcctattaatatccttcaatatgctgatgatactgtttctattgcggaagcttcttgggagaatgtccttgccatgaaggcaatgcttaaaggttttgagat

SEQ ID NO: 27297 - DNA, 379 bp, Glycine max
agtttctatataagctgaaccattttatcaataaacacaagttgagttttattcagaaaattagagtgtatctcttttatcttagtgagagtgattctcctaaattcttgagtgattcaagaacaccctggctgtatcaaaggactgtcacaacctttgtgtgttgccctcgctggaaagagtgattctttccttcctatcatctccacccttgttctttcagaccacaattccagataatccacctctgcccaaaattatctcgtgaccataactcccatttcacacactcaaattatgtgattcttgagcctaaattgaatttcataacgagacctttcacctcgttttggatcacctcatttggagccctgtagct

SEQ ID NO: 27298 - DNA, 382 bp, Glycine max
cttctggcttcaattcttcagtgggctttccttctgtgtccagcatcttgggatgttcccagcctttgatgacagctttccaggttctgctatccagtgatttgaggaaggccaccattcttgctttccaatattcatagttgcttccatcgagaattggtggtctgttcactggtccgccttctttctccatgttcatcagaatttatctccctagatctcactctgtgatttcgagtgttggctctgataccaattgaaattctgataccaggggacagatgtcgtacaggatgtcacgacatcacgcttcagaacatgcagattatatgtgtccgtatgaacagattacacaagtaaataacacaagagaattgttacc

SEQ ID NO: 27299 - DNA, 362 bp, Glycine max
  unsure at all n locations
agaaaaagagggaggagaattgaactntgaagagtgccccacaagactcatattcatcacagttatgacaagtgttacacatgcttctatttagagcctaggtcattaactaaatgaaagcctccttgagaagcttccttgagaaacttccttgagaagctagaggttaactacacaccccttctaatagctaagatcacctccttgaggagcttccttgagaaatttccttgagaaatttcctggagaagctagagcttaactcacacacacccctctaatagctaagctcacccccatgccaaaattcatgaaaatacataaaagggcctactacatagactactataatgccctgaaaa

SEQ ID NO: 27300 - DNA, 405 bp, Glycine max
  unsure at all n locations
agcttgtgcaaatcaaatcactcctacatctcatctctagcatgcattttctttctttacccactcctcacgtttggttttttagggaaaacaccataactaaacgcgccgcaagggatccctatcgcaccagatccaaatctagaacgatgggtgatcaagaggagacacaggaacagatgaaagccgacatgtcggctctgaaagaacaaatggcctccatgatggaggccatgttaggtatgaagcagctcatggagaagaacgcggccactgccgccgctgtcagttcggctgccgaagcagacccgactctcttggcaactacgcaccatcctcccccanacatagtaggacggngaagggacgcactgnggcacgatggcagccctcacctgngataca

SEQ ID NO: 27301 - DNA, 437 bp, Glycine max
  unsure at all n locations
ntgaagagtgttgtttttcaccttctcgctaagccaatatgctggcttagtgagcttctgctatgcgcaacactcatgggctaagcgtgaggaagactctggaagaagatgagctatacaggttcactaagcgcactgcttcatctcactaagcgcaccgcttcagttcatccgctaagcgagaatggcacgtgcaagccaaaattcactattgtgtgctaagcggtccataattgcgctaagcgcacgagcacgaacaaggccacctatttaagcctgaaatcagattttagaagggagtttggactgggattcagagctttgcatgtctagagtttctagagagagaaaggtccaagttccagagagttttgagagattttgctgtgtgaagatctgcagagaccagagcttgaagcangagccgatttgagagc

SEQ ID NO: 27302 - DNA, 448 bp, Glycine max
  unsure at all n locations
ctcaagctnggagaatggctagacatgatacatgtcacggnnattttcggttttgagataaaaagggatgccccacattatttccatgacacaaaatgcaaaaaaatgatgatttggaaactttatgcaaaactggtcatgcatgcacctatgcggacactcaagtgtcaaatttttatggtcatgtgatgctagggctcaagattcatttcctctattttaatcaacccaatgtttccaaaatatgttcttttatcaatttgtgcattcatccgagtccatttcgggcgtccggtgaaatttcacagcattcacccttcatgtgtagacacattttccaaaaattggttatgatcaatgaactctgttttggacatcgtctcttatcaatagcatgttcgtttttagctatacaacttattttcttattttctgcttctttattttt

SEQ ID NO: 27303 - DNA, 296 bp, Glycine max
  unsure at all n locations
agcttgctaatgatacttangaaatatcaagaacaagcttcttcgcacatcgtttgcgtgtatgatatccactcgacaaggtttgaagtagaggagaccttcaatcctataatgcaacatggcggacaaaagtgggcagttaacttgaatggccattattgtcaatgcggaaggtattctgcgcttcactatccatgttcacacattattgcaacttgnggntatgtgagcatgaactactaccaatatatatatgtctgttacacgaatgagcacatcttataagcatactcccc

SEQ ID NO: 27304 - DNA, 448 bp, Glycine max
tcaagcttgcactgcccaaagtggacaaccttccagaaaacgttgaagctttcattgttgtcccttatgatggcgttcagtatctcaaaaaagcctacgatgatttggaagaacccttgacctgttttctcaaatcttccaaagttgattggcatttctatgacccatatatgttacagttaccaaaaaggttcaaagagaaaaccaaatggtgtggaatagtaagccccggttgggcaccatagttgaaggtattgagccacaaggcagttggtggggttttgactcactctggttggacctctgtggtggaggttgtttagaatgaaaaacctctagttttgttaatgtttcttgcagaccacggattgaactcgagggtgttggaagtgaagaagatggggtattcaattcctaaggatgaacaagatggatcattcacgagtga

SEQ ID NO: 27305 - DNA, 404 bp, Glycine max
agcttgcctattatacaaggacacaacaagagacatgaatcttataaatataaatatagatacacatgcacggtaaaaaatttaaattataataagaggtgacaagatcattatacaatatataaaattaacataaaaacataaatgtttaattaaagaaaaaattaatatttaataaattactatcattattagttattgctgttttcatttgtgtttaattatttgtattacttattttctattcaaactaaacctgttcataaggcaataaaaattctaaagggtcagtcacagttttctgcaatctctgtctcttacgtatttgaaagtgtgtatatatatatatgagataaacttccacccgttttttatgtcttaaaaactcgtgccttattaaaaga

SEQ ID NO: 27306 - DNA, 444 bp, Glycine max
tgaaggagaactagatgcattggttaacttggtaacctagcatgccttgtatcagaaatttgtacctgtcgcaagagtctgtggtttgtgctcctctgcagaccaccatacagacctttgcccttccatgtagcaacctggagcaaatgagcagcccgaagcttatgttgcaaacatttacaatagacctcctcaacctcagcagcaaaatcaaccacaacagaacaattatgacctcttcagcaacagatacaaccctggatggaggaatcaccctaatctcagatggtctagccctcagcaacaacaacagcagcctgctccttccttcaaaaatgttgttggcccaagcataccatacatttctccaccaatccaacaacagcaacagccctagaaacagccaacagttgaggctcctccacaaccttccctcgaagaact

SEQ ID NO: 27307 - DNA, 377 bp, Glycine max
agcttctgtttttatcatttgccacttttataatttttccagttttcccagttaatttttgatgcattttctggttgcttggtttacaggcagttgtcctttgtcaagttgaaaaggctaaggaagacatgctgaatcaattatatagctctgtcaggttcagaaatttgtttatgccttttattcttattctcttgcattaaatttcttccttgcatttcagtctcattcttgaagattttaaaggaacataaagaaattataaaatatctttaaattctctttgcattccctcagaattatctggaatgtgactgataattctggtaacattttgccgcacagcttcaggcctgcaatgtatcatggaactgaat

SEQ ID NO: 27308 - DNA, 435 bp, Glycine max
  unsure at all n locations
catgccaaagatccctggacaaatcacagcttttcacatacntttattaagaacttttctcatagcactcttaaattttggtttgatgaaaataaaaaccctgaaatatagtaacccaaagtttgattttctaaattgaaactaaaaatcctgacaaaaagcttttattaggcagaaattagtttgataatcatcaatgaagttgctaagtttgcttttacactgtattaatctgagtaacacttaaactttgggtctccaatctatagaataaaaaatccacagcctatcaagtcttgacctctgagtttacccattaataggaagtatcataatcagtcttgacaaatgcaattatctcctttcacattatcacacgacttgcaaagtcattgagcaaccaaatgataaatgcaacatatgaatttctaaatt

SEQ ID NO: 27309 - DNA, 467 bp, Glycine max
acgaagtgaagctgatacatcgaaagtcatacaactcggaaagcgggcgaactgttaagtctaccattcgacctagcagctgacatttttatggaaagcccaagattggggcctcagactgtgacccactgcttatcactaattactggcatgaactattccgattaactggaacataaatgcgcataagatctgagtactatctgcaatccaatggtcatacacaatgtcttaatcgagtcgattgagcaatatcttcgtgcatttgctcacaacaagctatcttcttggggagactctctcattgggtatggatgaggcctacatacctttaagcgcttagctatagagcctctccttataaaatacttacgtgacaaaagctcttactattcccaatacgtacggatcctaccacatgtgtactgcaaccactcaatgttggatgccgtattgccatctaaact

SEQ ID NO: 27310 - DNA, 396 bp, Glycine max
agcttgtgtaaaaaatccacttagtgataaatgggaagccatgctgatagagggcaaaacttattttgtccaaaactttgaagctgagatgaactcatgccattatagggcaacaaatcatcggtagaagctatcttttatcaaaacaatcattgtgaaggaaacaaatattgtagatatacctaaggatgtttataggttcaccgagtatgagctaattacaaacaaggctgtttcatctaattaccttataggtaattatgtgtacatatgcaatcaagtaagattttgttgatttttatgaaataagaatctctaactaatatttattttcttatttcattaaacaatttaaaaatgcagatatcattggtgtgacactttctattccaatat

SEQ ID NO: 27311 - DNA, 443 bp, Glycine max
  unsure at all n locations
actcagcttgtgtgttgatcattttgggagaagatttcatttttgattcttacacaanacgntntctcttctcttgtttaggcctctaattttgttggcgggaggcataaacaagttttgattttgcccctgtctgtaactctatccttgatggaagtcattattattggagaactacttatagacattgtttctgcctcccacataatttcatacatggcttaagccaattctccttccactatgcattctcctggactatggacagatccacacctatcataagtatggtagaaaggtgtggagttaggaacttggaatacggattgcgcattcattaaagtctcaatctgcttagataaagcttgaatatgttgtccaagtccagaagtagctacttcatcctccacctggctaagtgtcctcttcatgattctcttatc

SEQ ID NO: 27312 - DNA, 395 bp, Glycine max
  unsure at all n locations
agttttgaacaatatacttgtccttcatttaactgtttttgggcttggcggccacgctcaacaaagtattttcgacacctactgtacattgatttgaccaacgttgttatgggaatgttgtgacaatccttcaaaaccttattgatacattctgagaggttggttgtcatgtggccatatcgacgtccttctctatcataagccatcatccatttttctttttaaatgcgatcaatccatgttgctatggatggactcagttcacaaaattcttctagattttgatcaaaaatgtgcttgcaaggagtgtaggttgcataaaattagttatgaataaaaattttaagtatatatcacagttaaataaatgtgaccatganatatgaaatcttaca

SEQ ID NO: 27313 - DNA, 437 bp, Glycine max
ttcttcaactccacaatgttacaaataatatttgaatttaaatgctaaaactaaacatggtctagtagagtcaccacggccagactcgacacctacactaactgcctgggccatggttagatgaccacgaccgtactcgatgcctgacactgaattcttgggttgtggtcaaatgactatagcctttgtactgacaggcaatttgacttaataatttaaaagaaaacatgtgacaaactgtaaataaatggataccaatcatggattgccactaagatagagcttgcttaacatcacgagcctgacatgtgatggttaagttgcccaaaggttgaagaggtgcacaatgtcttgcacttgttggaatccttcataatacaccatgactctatgtgcattcattgtgaaagtggcttagcatcctctcctttgacaat

SEQ ID NO: 27314 - DNA, 385 bp, Glycine max
agttttgcataccccattgatccattaggaaattacttatgaaagagagccatgagggtgggctcatgggccactttgggatagacaagacccttgtcttactcaaagaaaagttttattggccccatatgaagaaagatgtccataagcattgcactatgtgtgtggcttgtttacaagccaagtctagggtgatgcctcatgggctatacacacctttacccatcccatctgcaccttgtgtagacattagtatggactctgtccttgggcttcctagatcccaaagaggtgtagactctatctttgtggtggtggataggttctgcatgatggcacactctatactatgccataccgtggatgatgcttccacatctcaaac

SEQ ID NO: 27315 - DNA, 439 bp, Glycine max
agaaactcaagctggagatgaggaagtatactagggggaaacttcctgttattattttttgaccacagagtggtacctgcagatatgtcgcgggggtcacgagaccttggggacgtcaggtggggtgctattgcccaaaaccaagcttgaccaatcccgacccaacccgggcatagtcggtcagtgagaacctgtgatgtacctaagcaggcgagctcctggcagtcaacagataaaaggaacaaagaccacaaagcaagggggcttgtggtggctggccagctgtgaaacttgattgatatgtgagatatggcctctggtaatcgattaccaagggtgggtaatcgattactaggcttataaatgaagacaggaggctaagatggtctctggtaatcgattaccaaaggggtgtaatcaattaccaggcttgaaaaca

SEQ ID NO: 27316 - DNA, 228 bp, Glycine max
agcttgtaatatgtctagtcaactatatgttcagtttctggtggcctgtggaagatgattgggttttttactgcattgtataatgaatgatcgaggccgtacccgaatcatataaacattaaaaatacagtatttaggaagtgatcctatgtcgtctcccaacgagcaatggtcaaccaaatgttcataacagatagtaataaaacagtaacgaattggggggggggg

SEQ ID NO: 27317 - DNA, 434 bp, Glycine max
  unsure at all n locations
ctcaagcttaaatttcactaagnaattcaattataggatgttccttacccaccttacaagaaacctagaacttcctttcccgaagattgtggattctcatttcaatttcaatgttctaagttaaaattttctcgaacaatataaaatatttttttaaacgttaattatttacatatgattgaagtatgaagaaatttgtccattggaaaaatttagactttatttggcatatttagctgaaaattaactaaaaattcacagtttaaatttagtgaattaaactatatataaatgattagtaaaaataacttatctactacatataaaattatgtctataaaaaaaactacatataaaatatgtaaaaatgacatatttatgtatgtgtgagtatataatatttacttaatttatatatcaatatattattatta

SEQ ID NO: 27318 - DNA, 347 bp, Glycine max
agcttgccacccagctcgcccaggcgagcaaggttgcttcctccagaagcaacagccttctggagggcccaagtgggcctggttgctatttgcacccacatttttactaaacacaccccctgcccactttttttggagattcttttttcgtaaagttacggaaacttacgaatttcgtaacgatacttggtttctttgcgtaatgttacggaaccttgcggattacataatcatcccttttttgacttacggaatgttactgaacctcactatttgtgcaacgatgcttccttttgatttccggtgtgacacggaaccttacggattgtgcatcaatattatccttt

SEQ ID NO: 27319 - DNA, 426 bp, Glycine max
  unsure at all n locations
tctccccaatttctataattggggttaagtgttgtgaanaagggtttagccccttaggcacttctctctctttcgaatttgcttggaaaaattgtttccgtgaagaaaatccaagccgaggcgcttccgaaacgtttccataacgtttccataaggaatttcgcgaaggtttcgaccattcttcgacgttcttcattcgttcttcatcgttcttcgatcttcaacgggtaagtacctcgaactaagcttttcgattcattctatgcacccgtggtggtccacattgtgcttcgtatatttttattctcgtttcatttactttttataccccccttttgacgtgcttaagccattntatttaagtcatttctcgcttaacctanaaataaaataaatttccaccgatcgtttgaattgtattatccg

SEQ ID NO: 27320 - DNA, 388 bp, Glycine max
agctttgaagatatggtcttcaccgacgaaaggatcaaagtgggtctaaaaagaggcaaatctgatcatcatgctttgataaatgccaaaaaaaaaactagggcaaatgaagagggtgagaatgagggagaagcccatgctgtgacttccattcctatatatccaagtttcccaccaacccaacaatgtcattactcagccaataacaaaccttctccttacccaccgcccagttatccacaaaggcaatccctatatcaaccacaaagtttgtctaccgcacttccaatgacgaacaccacctttagcacataccataaacaccaaccaagaaatgagatttgcaacgagacaaccttagaattcaccccaattccagtgtcctatg

SEQ ID NO: 27321 - DNA, 424 bp, Glycine max
  unsure at all n locations
tgcctcanagaggaccaggaatgacaagttggccgttggaactagctccgccccggagtatgacagtcaccgctttaagagcgttgtacaccagcagcgcttcgaagccatcaagggatggtcgtttctccgggagcgacgcgtccagctcagggacgacgagtatactgattttcaggaggaaatagggcgccggcggtgggcaccactggttactcctatggccaagtttgatccacaaatagtccttgaattttatgccaatgcttggccaacagaggagggcgtgcgtgacatgagatcctgcgttaggggtcagaggatcccgttcgatgccgacgctatcagccagctcctgcgatatccgatggtgttggaagagggccaggaatgcgagtatggccagaggaggaaccggtctgat

SEQ ID NO: 27322 - DNA, 400 bp, Glycine max
  unsure at all n locations
agcttcacatgtagctacatcatgtggtatcaagagcatcttcatctaggtgatgttcttttgcttcctctattttttgttcggtcaattcactttaattccttgttattcatcttattcttcgtatatatcctccattgtcttctggtttggtgctgtttagagtagattcaaaaaaataaaccgattaaatcttagatttacacttgttcttgcatttttatggttcaaatnttataaatctactcttgaatcatgtntttgtgttgattttaagttctatcatttttcagtcataatattcttgtgctgaacctttacatctaaattctattccaaaatattgattacaaaaaaaacacacaaatctaagtgtaaatcacttaatctatgttgtctt

SEQ ID NO: 27323 - DNA, 437 bp, Glycine max
  unsure at all n locations
ntccacaaagagatataggagggacgccgcggctgattggaccagtgccgttcccgagtttgacagccatcgttgcaggagtgctgagcaccagcagcgtttcgaggccatcaaaggatggtcgttccaccgagagatacgcgtccagcttaggaacgatgagtacgcagattttcaggaagagatagctcgccggcgttggacgtcgctggtcactcccagggctaagtttgacccgaatatagttctagagttttacgttaatgcttggcccacggaggaggacgtgcgagacatgcggtcaagggtaaggggccaatggattccttttgatgcagacgtcctcagccagttcctgggtgacccactagtgttagagaagggccaggagtgcgagtttagtcagagaaggaaccaggccgatgaatntgacgagg

SEQ ID NO: 27324 - DNA, 399 bp, Glycine max
agcttcttagtttcagatgatgcagatgagcttgtagctacctcatgcactcctctaatgaccatggcatcatttatggcgctaaattgctgggagttggaagccatcttctcaatcaagtttctggcttcagcaggagtcatgtctccacgggctccactactagcagcatctatcatacttctctccatattactgagtccttcataaaaatattggagaagaagctgctccgaaatctgatggtgagggcaattggcacatagctttttaaatctctcccagtattcatataggctttctccactgagttgactaatacctgagatatccttcctgatggtcgtagacctagaagcacggaaatatttctctaagaatactctcttaaggtcatcc

SEQ ID NO: 27325 - DNA, 442 bp, Glycine max
ttcggtcatctcttcttttgaccgtctcactactaattcaactaattctgtttggaaggttgacatacttcaagtttatgcttgacaattttctccacgctccttgatcaagtcttgtcatataaacaaaatcttaaagcaaaccattaatagttaactttagataactttgaatttattttttaaaagtttgttgtcaataaaactttagcttcatgaggagttttgtgtcaacaatggcttttgatggcagcaacatgaaatcatcttttgctgatgtggttcattataattttatcatatcttagcgacagagactaaaaatgaaaatgcactatattatagggactaaaatcatatttaaggtcataaattaagttttagtctttgtggctaacatagtaacattagagaatattttttggtggtgtaaaccactaca

SEQ ID NO: 27326 - DNA, 408 bp, Glycine max
agtttattatatgctttatctgctgcagagaccattgacaaattcttgcaggtaacagtgaagagaaggataatgggcaatagactgtagttgtaaaatgattggatataattctattgatggccaccctgcaaccacaaagtcaatttttttgtaaaaaaaaagtagtgtatgcctttgtacattgtcttatagtaatagctgcagatggagttaagtgccttgacatatctgttacaactaaatattcatgttaaatgcatgttatgtacattcctcctaaaaggagtcttggaggagggtgttatttgcaagaaaaattccaaattcattgcaagactgccaatgttaatttcaaaattatcaagacaggaaatgaaacatgtttcacattgatatgccttacat

SEQ ID NO: 27327 - DNA, 444 bp, Glycine max
  unsure at all n locations
ntgcaaatctaagcagcactacgcaaaattgcgagtttgaagtacaattgcgagctgatccagcttatttggcatattacaattccaatgtcaacctaaaccctagactttctcccccgcttacgtcctgagaaaatcgccatctaggacgacatattggcagttttagaaataattggagaatgtcttctgcagatgatagcggtaaaagttctgtacatttgactcaaaggactctttccacacacaaggaggagtctgaagatgattcagcccaacagccatatgacgatgaattagttaaggcaagtggaatatggcgtagacctgatgcaacttcattggcatctcagcacaaaaatatggttgatttaattcacgtgattatattgacattaacttctcaattntgtgaaatacattcagttntctgcatataaaata

SEQ ID NO: 27328 - DNA, 386 bp, Glycine max
agcttttgcatatttagagatttctagagagagaaaggtccaagttccagagagttttaagagcttttgctgtgagaaaactggcagagaattgagcgagaagaggaagccatcctgagagcatgagatgagtctgtgagtgattgtgaggttctagaggtggagcagacatccccactacttgtatttcttcaatccttcatttttctcttctctttgttggaaaggaagcttcccagatatggagagctaaatcctctgttggttcttccttgtacgtacatgatgtaaatattgtatatctatttaatgatgatttatgtgttctctgtgctatcagtacgtcatttcagtgtgtttttgccttgatcacataaatgcatgct

SEQ ID NO: 27329 - DNA, 371 bp, Glycine max
tatttgacatgaagaaaaattcacaatgttcaaataaagttactccaaatatactttagtttttcataaaaaaatatactttagttttatgaactatttaaaagtagtactatcctctgttcaatctgacctaaaaatcctaaaagaattggtaggctcacaggctcacatcgattgcgtcggtgtacattattaatgcacaaaatctttatgactatggcaatgtgttatagaacatcacacccaacttatcagatctacagatgtaattatttttattgacttatccatctgtgtaaaattctaatcttttgatggattttttttctaaataaaagactacgggtgtttttttaatatgtggggtcaga

SEQ ID NO: 27330 - DNA, 399 bp, Glycine max
  unsure at all n locations
agctttagtaaatattaactcagaaaaagcaatcactaaacgtcaaatattctagtatacatagcaaaaatggtagggctggcatagtgaatagaaatagaatccttggtttataactatatttagctcaaaagtcaaagcaggcagttctcaggcaattaccgttgagttttggtgcatattgtgaaaagtaccatacatgagcaagaatttacattgttgcaaagataaggattggactcccataacattaattaaataaactagacataaactgtggaacattaatgtaagtacatacctcgtgaatataccaactgtatatactctntccttcatgacctccaacatatccatatgaagctgtcagtatttcatcttcactgtaatctccaatga

SEQ ID NO: 27331 - DNA, 400 bp, Glycine max
agttttgcggatttggtcttttccagtgaaaggatcgatgtgggtctgaaaaaaggcaaatttagtcatcctgcttggacgaatgagaaaattggggcaaatgaagagggtgaggatgaagtaaaagcccatgctgtgactgccattccaatacagccaagtttcccaccaacccaacaatgtcattactcagccaataacaaaccttctccttacccaccgcccaattatccacaaaggccatccctaaaatcaaccacaaagcctacctaccgcacttccaatgacaaacaccacctttagcgtaaaccaaaacaccaaccaagatatgaattttgcagcgagaaagcccgtagaattcaccccaattccagtgtcctatgctgacttgctcctatat

SEQ ID NO: 27332 - DNA, 438 bp, Glycine max
  unsure at all n locations
tctcagccaacttgcttcctcactagcagttgctagtgctatcatctcatattccatagtggactgagctaagatagtctgcttctttgacttccaagaaacagccccaccagctatgctaaatatatagccgctggttgctttggaatcatctgaaagggtgttccaatctgcatcgttgtatccttcaagtataacaagaaaccttttataatgtaatccaaggtttatggttcttttaaggtacctcattaccctttcaatagcgtgccagtgctccatactangtctactggtaaacctgcataataatcccacaacataggctatgtcgggtctagtacaatcagtggcatacctaaggctgccaatgatacttgcatactcagtttgtcgtatacattcaccagtgttcttaaaccaatttacacttggatc

SEQ ID NO: 27333 - DNA, 397 bp, Glycine max
agctttcaagtttgtagccattagaagagaatgagcatgtgattggaagtatgactgaaaatgttagtcaatttgtcagattgattatgaaggaatgcattaactgtatcccagtgagagtgtgatccttatattttgagagaaatgactatcatttagtaccgatttttgcatgaatctctgaagtatggactgaatgcatgaaattgaggatgatgaaggccatgtctgattgtgatagccacttatccaaaaagctgaccacgtgcttgaattatttatcctttacacccagtttgagctgaatgaattattgattgattgaacgatgagcctacagctgtatctcctgctaccttgacttaagtcgtacgagagcatcatccacatgaagtgc

SEQ ID NO: 27334 - DNA, 432 bp, Glycine max
  unsure at all n locations
ntgcagatttggtcttcgccagggaaaggtttaagtgggtccgaaaagaggcaaatttgatcatcctactaggacgactgagaaaactggggcaaatgaagagggtgagaaagagggagaaacccatgctgtgactgccattcctatacgaccaagtttcccaccaacccaacaatgtcattactgagccaagaacaaacctcctccttacccaccacccagttatccacataggccatccctaaatcaaccacaaagcctgtctaccgcacttccaatgacgaagaccacctttagcacaaaccaaaaacaccaaccaagatatgaattttgcagcgagaaagcctgtacaattcaccccaattccagtgtcctatgctgacttgctcccatatctactcgataaatcaatggtagccataaccccaacca

SEQ ID NO: 27335 - DNA, 387 bp, Glycine max
agtcttagtttacttacaaatacaagccgttagcagattccactagaatttttatctaccagacacaactttcttgtttgttctgtcagccagtcctacagctgagcacaagccagagtcaaacttgcagcaacctccaaaacagctactaagcctacctcaattctcaacctcatttcttacacgtctatgacaataaccaccgaaaatgtaaaatcaagcatgctcacactgccagggtaaaattatactaatatgtactatgttactactgtaatactagataattactatgctgtaatggaggctctgctaggcctttttccttccatggcatctttcttcttctgacagtttgtgcagaggaatggactacatgctggagag

SEQ ID NO: 27336 - DNA, 437 bp, Glycine max
  unsure at all n locations
ttgacctanatttgaacaaaaggaaatcgttaagttatttattgtcaagantagatggtgatgataaagatgaagaagaagcggaaaggttattattaatgtacgttccggtgagggaaatcaaagtaaagggtccaaaaacaacgaaagtagaagtgtcaggaagagtttggcagagagtggcttccaagatagacccagatgcacattgcactgtgatgctaacttgacaatggcgcgcaaattggaccacggcctcaataacatcagaatttttcgggacttgaatgaagatgggtttcaaggcaagatcgctatcttggttaataacgaggggtatttttggcttgttcttggatccaaggggcctaccacaacctttgtttgaggatggtggcatttggtgagaggaagatccaatataattatgaacagtg

SEQ ID NO: 27337 - DNA, 339 bp, Glycine max
agtttgaatcggacctcagtgtgaaaagttatgaccatttgaatttctcgagagcttccgtggttcaattccgagcatctcgacatattatgtgcccgaatctgaccttcgtgtgaaaagttatgaccatttgaatttctcgagagcttccgatgtgtaatttcgagcgactcaatatattgtaagcctgaatcggagctcagtgtgaaaagttatgaccatctgtattgctcgaatgcttccttggttcattttcgagcatctcgacatattatgtgcccgaatttgaccttcgtgtgaacagctatgaccatttgaattctcgagagcttccgttgt

SEQ ID NO: 27338 - DNA, 423 bp, Glycine max
  unsure at all n locations
ntacagcagattnntagaatgtttcactttcctagattgtaaaaaacttaatgccattaacctagggaattaaaacaaactaaatggctgagtgtaactgaaattgttggcaaccaaaagtcacccccaacagccaacaagtcagccaccatttggtctcccaaaaggctgatgcctaagttgccaattgggcccttattacaacttgaactaaagcccttttagttgattaacccaaaacatatttttggtcagccaactttacaaggattgggccattatttagacaaactaaacactctaaaattgaaataaagtggtgtcatttagtcctccatttgggccatgatacaactcacaaccttggacttttctccttgaaacttgggcttgtattcaaatagtatggacagcacttgttga

SEQ ID NO: 27339 - DNA, 372 bp, Glycine max
  unsure at all n locations
agcttataaacccaaacttttaaagcttcaatgcaaggaaacatgcttatggctatgaatccaaaatttggttntaggattagaaaagcatgaaaatagggactnttttgtaaggatttgagctgccccatgattggcactctgcacctaagtaacgtgggagatgctttntcaatggtgtgtagatatatgtgaatatatggcatanaaatatgttgccaagtgtatgaatatatggcataagaataccttgtacagtgaatgaatagtaaataatgcatttcaaaatatgtatatttgtggataagcagtataagatgtctttcaaaaaatgacccgtgccaaaattgcacgagaatgtttccaaatgaa

SEQ ID NO: 27340 - DNA, 431 bp, Glycine max
  unsure at all n locations
tctacttatatggcagggcgggtctccttcactntcttgnctccaacgcgagctctgaccactgttcttccttcccgtgatgcctcttttcatgtccgcctgagtgggcttatagcctaaaccatacttcccacgatttccttgggtttttatcaggctagttatgccgccattgtctttgcctaaacccatcccgggttcataaccgttccccaacataactcgggccatcattaccgctgcatcggacagacaaggttgcccaaagagggagtccacggaggaaatgctgaccacctcaaaagactggaaagcggtttctaacgattcttctgcggcttccacataaggcatggaggatgggcagcttaccaagatatcttcctcgcctgacacgatgaccaagtgcccctccactacgaatttcagct

SEQ ID NO: 27341 - DNA, 383 bp, Glycine max
  unsure at all n locations
agcttataggaaatattccaagtacaacatacgatgttgctataaatacttgacatcataatcttgattgagattattataaattattattaggatacttctaacaatattttcttatgtatctgttccttgtctccagacacagcagatgcttgatcaactctctgatttgcatagaaaggtaacactctgtttatgcttttttctgtcatccttaaatatatattacttactcataggctggccaactactctgtttttgatggacacacaggaagagatgctactggaaactaacaatatcctgagaaacaaggtaccaaaagaatacattttcacatgtcatcanagtctatactatgatgcactgataaaatacatgt

SEQ ID NO: 27342 - DNA, 431 bp, Glycine max
  unsure at all n locations
tagactatatggggcccttctttaaaagttaaaaattaaaacaaaagctctaataaaaataaggaacgatgaaaaaaattaacgtcaatcgccatttttaaaaataacaaaaaattacatacaacacatgggaaatatatagtagaatttattaattaatggcagtatttaaataaatccaagtcattggtgtgacatcacatagattcaataatgccaaacaaaggtatagtagtaactacaacgaaccttacctcttcttcatttaatttctcgaccttggtcacacacatatacttactatataatgtcatcacatcactccctcactctcaccaattagtagtaaactctcttcattctatatggatcaagaaacaacaacgacaagcgccatattaggaacactntttccttttcatccagaaaca

SEQ ID NO: 27343 - DNA, 386 bp, Glycine max
tatttcgccctatagtgagtcgtatgacaattcactggccgtcgttttacaacgtcgtgactgggaaaaccctggcgttacccaacttaatcgcctggcaccacttccccttttcgccacctggcgtattaccaaaaaggcccgcaccaatcgcccttccaccagtggcccaccctgattggcaaatggcgcttgatgcggtatttcctcctaacgcttctgtgccgatttcacaccgattatgtgcactctcagtccatctgctctgatgccgattatttaagccagcccgacacccgccacaccggtgacccaacccttgcggcgattgatatacctcgataattatgtatccaagtatatcataactcgacttcatgttatcc

SEQ ID NO: 27344 - DNA, 200 bp, Glycine max
aacaagcatcaaacaggccactaaacagcaaagcgagagagactagactgcctcataggagcactcccataacatacacagccggacgccaggtgacgaacaagcgaacatgggcccagcacctgtgcgcacctaccccaaagagcgaacaaagaaagtggcagcatgcaaaagtgaaacaagactacacgacgcaagca

SEQ ID NO: 27345 - DNA, 392 bp, Glycine max
tcgagatgaggaacagtagaagggtgaaacttcctgcttttattgttgctattgagcggtacctgcagatatgtcgcgggggtcatgagaccttggtgacgtcaggtggggtgctattgcccaaaaccaagcttgaccaatcccgacccaacccgggcatagtcggtcagtgagaacctgtgatgtacctaagcaggcgagctcctgacagtcaacagattataggaataaagactcacaaagcaaggaggcttgtggtggctggccagctgtgaattatgtgtgatatgtggattatggcctctggtaatcgattaccaagggtgggtaattgattacaaggctttaaaaataagacaggacgttgagatggtctctggtaattgattacc

SEQ ID NO: 27346 - DNA, 354 bp, Glycine max
  unsure at all n locations
agctnattgatttaaataaagcctagaaaaataggaataattaaggaaatcaaagctaattaatgaaagctaattgaggaaagaatgactaattgaggaaattagagctaattaaggaaaacaaattaattgaggaaagaatggttatttgatgaaaatatggctaattaaggaaaaaagattaattaacgaaaacaagttaattaaggaaagaagaataattgagaaaaaacatgattaattaaggaactaaagacagacttagtgcaagaagcccactaatctgcacctataaaagaagaagagataagaacgaaaagaccaaaaatttctaccgaatacaattcttatata

SEQ ID NO: 27347 - DNA, 93 bp, Glycine max
  unsure at all n locations
cacttgatgccatctatncagaacttctcanagcagccgatccggttacttctatatttctcaaccagaagtctgaacttgtggcattcttag

SEQ ID NO: 27348 - DNA, 102 bp, Glycine max
agccagtgaattctatccggtgacagtgatagtgtggcgataacggcggacatacagcaatgagtgttgaatccgtttccgaatacaataacgaactgcata

SEQ ID NO: 27349 - DNA, 488 bp, Glycine max
  unsure at all n locations
natgtttatggtttttatacnttgatnnacncacactatatagtactcaancctgagtgcctgcannatcaaccatataggtacggcgtgccctggtattgataaaaaggatgccccacaggaggaccattacacaagatgcaaacgacgatntgcataattaatgccaaacgggctatgcatgcacctatgcggacacctaagacgtaaaattatatggtcatttgatgctaaggctcaggattcatttcctttatatcagtcgacccaacgttatcaaatatagctcttcatcaatacgagcattatccgagtccattttgggcgtccggcgaaatctttacagcattcacccttcatgtgtgatcacatttcttaaaactagtcatgatcgtgaacactccaaacataactggaagcatctcttttaataccaggttgtttctactcgacacttagtttgctgtggtccacatactattgataac

SEQ ID NO: 27350 - DNA, 401 bp, Glycine max
agtctttgcttagaaaaatgcagaaaccaaaaaatacccctggttttcatacagccgttgtccatcgaggtactgaacaaaaccatcaatgagatatggaccaacataagaagccaaagtgtttaacaatacaagaaaagctgtgataagaatctccttccatgctgaaattattaacgatttcaccaacttcagtgtggtgacactattaattccaccacaatcagcctcaactttctctctgaaagttggaaaagcaccaattacactatctctgctgtctagttgaggaacatcctcaaggtccagggtcttcttattaccaacggctataagaggacccacccaagagaaggtaagaatgctcaaaattccagcatatgagaaaggcgtaactgagt

SEQ ID NO: 27351 - DNA, 398 bp, Glycine max
  unsure at all n locations
gcctcanctatcatattaatagttcatacttttatttctggagaactgagatcctaagcgctatgtgaatatatgctgattgatgatacccttcactcggaaagagatcttataacaggaagctagttgaccaattaacttttcactatattgctgtatctgagtcatgtattccttgcgaatgtaactggtaatcatctggtaatctttttaatagagaatttatattggtacataattatatatatatataaaataaaataacgagatgagatggctaaagtgatgggtaaaactataaaaaaaaatgttatataaatctgttgataaaaatataacttttaactatatatcaatccctttttacttcattctcttatgtattcttcctttgcaca

SEQ ID NO: 27352 - DNA, 379 bp, Glycine max
agtatgtatgatttacattctccccctttctcaagcaaattcttaattcttcttgacatcatcaaaatcttcatgatttacattctccccctttttgatgatgacaaccacctgtaggttatgagcatcaacaaagaaaaaatatctatttgcatatagtttactcccccttggttttgcaatgattgcttatatgaaacagttgaagatttcatatttttcatatataaacctattgtctcataaaaaatagataatttttcttactattttatctgttatctgtctctccccctttgtcaacatcaaaaacaaatcatgaatagagaggagatagacgttaccacttgttgcaatgtatgagaatcaagtgatacct

SEQ ID NO: 27353 - DNA, 423 bp, Glycine max
  unsure at all n locations
atgatatatgtgagggactcaggatcactagtaattataaattccttgcgataaaggcagtgtggccttgttatcaaagcccgtacttaggcatacaactcctaatcataagttgaatatgtaaaggtatgaccacttagctgttcactaatataagcaattggatggccttcttgcatcaacacagcctcaatcccaacatttgaagcatcacactcaatttcaaaagatttttgaaagtttggcaacgctagtatggaggcattagttagcttttgcttaagaacattgtaagctgctacttgtttctctccccatatgaaaccaacattttccttgagcacttcattgagaggtgctgncaatgtgcttaaatcctcacaaatcgctataaaacttgcttaccatgtgtcgaactacctt

SEQ ID NO: 27354 - DNA, 368 bp, Glycine max
agcattaatatgaatgacgctcttttccagtacactgaactacttacatttccctaatgagctcattcaatgaaatggaagcgttataccaatgccaaagttatcttgtttggttcaatttcccttctttttgatggtgaagaaaacatcagggggaagaggggttgaatcaatttaccaccaacaactttggcaaatattttgggtagaaatgagttagcccataatttaaaccatataccacaagaccgcatcagacaacattgacacagttattctaacgcacatttgagcaatagagggtaaacttcatcatgaggaattaccactatttcaatgtactattgtaccttatgatcatagagtct

SEQ ID NO: 27355 - DNA, 404 bp, Glycine max
  unsure at all n locations
agcnttgnttgactatgggaagttaaaataaatgtatgttacaatgttgtattaatttttataaaaatatacttttttattttttttttttaatttttaaaataatagaaaatattactcatctccacatgtaattaatttgtgttatgtgtgtcgcatgagaacatgcacttgtttattaatatggaaatatgaagacattaattatgttcgacttatactataaaaactaattacatattttcctaaaaaatatatatatactacacaaaacatttttcttacatataatttttgtcatatttttttcttttattttcaacattaaatacacaaaacatatatgcaagtaatattttctagcgttattcatgcttccacgtacgtttatatcattacatagt

SEQ ID NO: 27356 - DNA, 75 bp, Glycine max
  unsure at all n locations
catctagcagagggatgtttacctctactctgctaaatgttnccaagatctccttctctacctcttccttttttt

SEQ ID NO: 27357 - DNA, 318 bp, Glycine max
acgaggccaaaagctatcggtcgtcttagcctacaagcattccatgtccatgaagatggtgacaatatgtatgaacgatggatcgaccgatctaagaattttctccataaatcttaccttatcaagccgtgtacccatctctctagctgactggagattgctcagactctccagaaatagtgagagaagaactctctttatctcatatgcagggctgcgcactccactgttaaagggtgaagatgcaccttctcgacttgtgttgtgccacaggtcgacatagcattcagaacagcgcgtgtctaatctacgcagact

SEQ ID NO: 27358 - DNA, 294 bp, Glycine max
ttttcatgttcacttggcttccatgtcatcaccgggagtatatagaactgtaagagcacctctatattagccttgatcaagtataaccacatcattctatagtgctcatctacaaatgatgtgaagtacttgtttccacccagagatggtaccgtttaaggaccacactcatcataatgcataaaaccaaatacgctgcaagctatgatcagcaaatgggacttacaggaattttttggctgctagccgatgagacacacattacacaccttccttggtacttctagtcttggc

SEQ ID NO: 27359 - DNA, 396 bp, Glycine max
  unsure at all n locations
agctttatgatgaatcaagattgattcaaggagtttcgatgataacaaagatgatgacaaaaaagctcaaaagtcataacaaagatgatgacattcaagaatgagttcaagattgagtcaagaacacttcaagaggaaatttgatttcaagaatcaagtttcaagattcaagaatcaagaaaagactcaatcaagataagaattaaaaatatttttttcaaaaactgagtagcacatgaatttttctcaaaaccttttaccaaagagtttttactctctggtaatcgattaccagattattgtaatcgattaccagtagcaaaatggttttcaaaaagctttcaactgaatntacaacgttccaattgatttcaaaatgttgtaatcgattacaat

SEQ ID NO: 27360 - DNA, 387 bp, Glycine max
  unsure at all n locations
agcttgtttacacttcctcctccttaagcatcatgtcggtgtgatctccccgatcctcagtggcctacacggatgtactaactcgaatctccaaatgaggacatcacctctctcattaaacctcacaggggtcacttcaaattcttgaccatcgtgagacacttcaaactactccagttgtcggcaagacataaattcccaaagaatgtagtagtaccgacagtgatctatctactggctccatgtgcactatagtgtgacacatgtacaccgacatgtctgtctctcaacacagccacactctttctatctacctactacgccaagctcacaaagagcacggctccctcaacatctcctgaccctganagttgttggttgtaccag

SEQ ID NO: 27361 - DNA, 385 bp, Glycine max
  unsure at all n locations
tcgattacacacatactgtaatcgattaccagaggagaatttcatanaatattctcaacagtcacatcgtttcgtttgggttcttgattgaccatcaaaggcctatatatatgtgacttgagacacaattttttaaagagttttcaaaacaacaagtgttaatctctcaaaaagcaaaatcgtttatcctcttaagaattccttgccaattcaatgcaattcataaggaatcattgagtgctcagattgtaaactatctcttcaagagagatcattcttcttctcntctgatcactaaggataagaaccgaggtctttgtgtaaaaattctacacanagaagattgtcttgggttaaactgtaaagaattacaagatagtgaact

SEQ ID NO: 27362 - DNA, 380 bp, Glycine max
  unsure at all n locations
agcttttgttgctcattgactccagattgctgcatagaaggacaaagatctgaatggtgatctatagaagaacatagaccacagactcttgcaacaggtgtagatttctgattcatggcaagctgagttactaggttgaccaaggcatcaagttttctttcaagctttttattttcagtagatgaagatgaatccatggccacctcatggactcctctaagaacaataatatcatttcttgcattgaattgttgggagtnggaagccatcttctcaatcaaattcctagcctcagcaggggtcatatcaccaagagctccaccactggcagcatcaatcatactcctctncatgttgctaagtccctcatagaaatattg

SEQ ID NO: 27363 - DNA, 431 bp, Glycine max
tgtggaataattaatctctttgagagtacttttctttggatctgtttatttgattggacctaacacaaaagagtgcgcataaaatgtaaaattcactaaaaaaatagctaaaaaataatttgacaaaattatctatatatgtacatgtgtgtttgacgacatagtaacttatttgggttacagttgagtaccattattgaaggatacaaaactcttttggcttcaaacaaatcgaagagatttgctcaagatttaggtgtatagtgactattactattgtcttataaactaatacacaatttaaactaataatttctagagatatacaaagtgtcttgaaagcatgaattgtgacttatagaaagttatgaagtgttagaatgcttgattgcgcatgaattctctaaagatatacacacttaaagtaattg

SEQ ID NO: 27364 - DNA, 282 bp, Glycine max
  unsure at all n locations
agcntttatagggagatgatgatgatgatggtgttgagtgaatggtatangaggagggttttggtacaccgggattcccctaatgggtcttagaaagccaaggtcttggcttaggctttggtgctgaggctggaacagtggctgctgctgctggtggaagtagtggtttttctgaaagggtagttggaaggggttggtggtggtggtggtggcattagtgggggtggcaccgttttggaagtggtgatgatgaatgaggttagaggtggtggtgttggagtg

SEQ ID NO: 27365 - DNA, 382 bp, Glycine max
  unsure at all n locations
catccttgaaaggaaaaaaaatacatggaaactcatgaaggaagcagttgtgtcataaagtcacatcacagtttaatactcctcaacttcagatatagctcccgtaagaatttcaaagtcacacccagagctatagcttgaaaaggtgtcaatgagaatgtggcaaaaaaaatgtatgattcattccttaaaagcaatagcttggtgaacagtgaatggtaactaccaaaaaaaatgtaagattcattccttacaagcagtataagaatcaagggaattggaatgaccctccaatttggctgctgccagagggaggatcaatagcaacccanaggagtgagatagtaattgaaattagccccgaccaaacatacacaatagt

SEQ ID NO: 27366 - DNA, 403 bp, Glycine max
agctttttgtttagcctaaagaacaagccaaacaaaaaattagaaaaatcaagacaaaaattcatcttataacttttttaattatgggatttacatataaaaaaaatgtttttcaattgttaaaacttgatttgatcttaccatggttatgtctccattacgtactacaccatattttcttatatcaaaaaggttagcttgaactttgacatatgaagctagcaatagtagcaaagctaatgtggtcatactccatgaaaaactcatttttatcttcccttcttatctatgcctttcttccacttcttttaaaaaatgggtgatttgtagaatgttatggcataaagctatttatattgtacttgcagctttcttaaggcaactgatagagcatacaaacaaa

SEQ ID NO: 27367 - DNA, 362 bp, Glycine max
catatacgctatcacattgcacattactcttgtctttttccaacaataattcaaccaattgttcatccttcaatactgcaattctttgcatggtacatattgatgaattaattagaataatggtggaaaacgaatcttttgacattatattactactttcttcaagtaacaactggtctctatctgccagcttcaccttctcttttgcaatgtcaccattttcagatacatttgatttcattttattggtagagacaatggataggaatgaatgtagcccgggttcctcaacaggctggttattctcagaaagaacattattagactggaaatccttgtcgttcgcaatcgccatgtcatca

SEQ ID NO: 27368 - DNA, 404 bp, Glycine max
  unsure at all n locations
agttttgagccaaaatcctgactcaccataaaccttgacccagggtgagaatgtcaatccttaccctcggaagcaaaaaggaatagaagggaaatttccaatcaaagaaaaagagaaggaaaatttccaatgaaagcaaaaaagaaaagaaggaaaattccccaatcaaagagtgggagaaagcaaaaagaaaagaaaggaaattcccaatcaaagaatgggagaaagtaaaaaagggaaggaaagaaagttcttgaaggaaaaacagaaggaatatgcagagaggtctttggaccggacaatatctgaacaatacagaattgtcaccaaatgaacgagaaaagaaggaaagggaaccacgacctacaatagtcttctcccttngattaccaaccaaaatcccg

SEQ ID NO: 27369 - DNA, 456 bp, Glycine max
  unsure at all n locations
gcttctagagaaagctcatgaagctgtctcggtaaaaatgctaccctacctttcgtcaaccgatggatattctcgaaatttggtctgtaacttcacaagataattttccatgatcagaccgttgggatctttgagaaaatgtctggagtgtgctagaagcttccgttcccgagagcattccttatttaagcacttcagcctttgctttcatgtagcttangaaaaatgtcatttcttcttctttctttcttccaaatccatttctaaagtcccaatcactttctccatcacccatagccaccattagccatcacaaaccatcgttgttctccattgaaaccccacactaagaggaacccttcaaccgaagcggaatcttccaacttggcttgcggtttcgatagagaatgaaaccctaatctgacctttcattntctttcaacgtaaccatgattc

SEQ ID NO: 27370 - DNA, 398 bp, Glycine max
atttttgttctataactattggtcttcatatgtgcaccaagcttcaattggaactcatcttacttatcaatttctttcacatctaactgggagatgcaaggtacaaccccttattgatgtcgtacatatatcttcatctatatcagtgcatggaaagatatctacggcttctattataaacattgacttctgaatacacgcactgattgttggtactggcaagtgggaaatcctgagttttgaactcattattaggcatatcattctgttcagcagtagctatttaattctctttcatatttcattgactaacacactgctcggatactagatgcatgacttgcatctaaaaacactcatgatgtctattacccatgtgaatgcagaatctatatgaa

SEQ ID NO: 27371 - DNA, 455 bp, Glycine max
  unsure at all n locations
ctggagtcatgtaatccatgctttcacaaacaaaattactcactcttacttatgattaggattgcgagaacacacacattgattacatcgtaagaaaaataatgacaaacacaagaatttaacgtggtccgacacctcttgcctatgtctacggaactgtctcaacagatttcactatcataaaaatgattacaagaatgtaaccaacttcaaatagtatatcactcaacaaatccgagtattttacttaatggttacaagaaatgataacactctcatacaaagacaattttctctcaacaaagagattttgtttcacaatttctcttcttacacacaccctcgtttctccattaaatnttttctctatttataatgaagatggtcaccaactataataaataagttttcttagaagttgaaataaaaacaactgtcaatgcatctattcaact

SEQ ID NO: 27372 - DNA, 402 bp, Glycine max
agtctatacagattagaagtgatgaaaacagttgttgtacgtacttgtaaagaaatcaaatgtagcagtggtataataattacatatgcacggttgcggttgttgttccaactcaaaatgaagcacaaagcatttgcatcctcctctgagctttaaatcttggaatttccctattgagcctcaattactagccattaggtgatgttgaaatagtgagtttttttttttggtgtgattaatgaaacagtgagatgagggccaacagaacgtagcaaacgatggaaagaagatcaaggagatggctttaaaattaaattaagaatggcgagcactattgttatcctttcaactccaagtctagccatatcatcagtgatgatctctttcttgggcaccctatga

SEQ ID NO: 27373 - DNA, 237 bp, Glycine max
  unsure at all n locations
ttgaagctnttaaatgaagagagagcttcagattttcctactttttatagacccaagttnttctagaaaaaatcatctgtgaaagtaataaagtattttttacctccattggaagaaagatntattggaccacatatatctaaatgaatcaattccaaaacacattttgctctccatgactttccattanggaactgagaatgatgttgtntgctaacaacacattcttcacaaacg

SEQ ID NO: 27374 - DNA, 403 bp, Glycine max
agctttatttccaaaatcacatctacaggaccaaggtccttcatatcaaaattattagactagaaaaacttcacatcatttatggaatgtatattactaccaaatatcaatatgttatccacatacaaacataaaatggcacatccattatcatcaaattgtttcactacacacatttatcactattattaatttgaaaataatacgaaagaataacttgatcaaacttttcatgtcattgctttggagcttgttttaagtcatataaagatttaacaaccaagaatctataagtagtactaagcaaagaatatccaacaaaaacataattaacagtttatggtccaatttttgcttttcttattaatagggaatgttaaccttgctagacacccccacactt

SEQ ID NO: 27375 - DNA, 454 bp, Glycine max
  unsure at all n locations
gcttaaatctagttttaattataaattactacaagaaaattatgttatatattattttactgcaaactaagaaataaaaaaattactttaaagtaaaaatctacttctaattaaagattacttaaaaaaaattatcatataaattattttactggaaactacaaaataaactataaatctaatttaattataaaattaataaaaactatacattcaaactgctataaataattacttacataaaattataacaaaaatgtattatcaattacaattattttgattgttatataatttttttcatatttaccaacttttttcaggactcaattnttttttatttaaataaatatcatgacatattccttttcttttatacacacaaacaagggatataaaatataaaattcatttaattaaaaaattattaacaactataaattcaaactggtct

SEQ ID NO: 27376 - DNA, 397 bp, Glycine max
  unsure at all n locations
gtcttatgaattctttcaaattaataagagaattgtatgttatcacatctggttcacatcctgcatctttcatttcctcaaacacagtgactgctccagttaacatccctacctttccatacccataaatgagaggattataggtgacaatgtctggcctaagacccagagctttcatttcttcaaataaactcctggcagtttctatgcccccttctctggccagacagcctatcactatattatacgtaaaaactgagggcgaaaggccagccacaaccatgtccttgaaaaggcttaatgccaattcccctttgcttgattttgaaagcctgtgaagaagatcattacaagacctcacttttggcagaaccatgaactngttcttcttccaaaa

SEQ ID NO: 27377 - DNA, 440 bp, Glycine max
  unsure at all n locations
tgagagtttaaatccgttgaaatcctattctcggcgacttcatttgattaatncaancgctcaattgttgcacgtgtctgcatcgatctttttccttgtacgctctaaaggcattctatctttatgactattcttttgtatacatgcgtctatgttccttgcatgttagcattaattttttcatcctctgtgtcgcttaacatctaattcatcgccgacatggactcacccatgctattgcattccaaagttacgtaacatgctaaaacattttatnttcatcttggctaacacaactgtcctttgcagttggggaaagtatatttgaaaatttcatagcatatcttccaattctaagacaaaatgtaaagaaaaataaaatgatatagtttcatagaaaagttcttttagctctcctatcagaatcaaatatacactct

SEQ ID NO: 27378 - DNA, 399 bp, Glycine max
agcttcttatccaaggttcatcttggtggtgaagctccttcttccatggcttattccctagtggatggcgcctcctctcacctcttctcctttgtcttccattgcatctccatggtggaaaatcaccattaaaggacctcattgaagctcaaagatccaacctccatagaagccccacaagcaggcttccatcatcatacaacaaaatgcaatgtcatgtataaaaacaaagcatcataaatcaaaataataaaagaccataaaatagagtaacaatgaatccatgctatatcaaaacccttcaacatataaaagcccaaaaatacaagagaatataaatcgttcttcatcaaaccttaatcaacacatcagaatgatttatatgaatgaagagcgaaa

SEQ ID NO: 27379 - DNA, 289 bp, Glycine max
actatatagccatttccatcaaacggttttcttcaccttccaaagagcatcaattcccacttacacacaaagggaaattaaagtaacaatggccctccaaaggcatcacctctcgttactttttatcatgttttcttttgtggctggccatagcaccgtgctatttgatgatggtagtacgtccaaggactttatcaaacaaaaaagtacagatgttttgagcttaaagaaatttgtcaagttgggtgacattacttcttcgcttaaaacggttaacgtcaatgattat

SEQ ID NO: 27380 - DNA, 397 bp, Glycine max
  unsure at all n locations
tgcttcatataatcctgagctggagtgagccatggatcccaagtcccctgtgccgtagtgacggctactacataatcatcgtcaatatctgcctttgctgcgcctgaaactccttcctcagcagcctccactggtgtgtcctgagcctctgcctctgcctttggggtatccttagcctccccagcctctggagtgtcttcagcggcctgtgtttgtggctcctgngccacaagagcctcacccccccaaaaggaaggctggactccagaccaagctacctgtgccaagaagtcctccatgctcatgatcagccgctgctgagataaattctgcatactctgcatgaccaggaaaaggtcgtgatgaatgctntgtagcatgggcacgatagcagcac

SEQ ID NO: 27381 - DNA, 447 bp, Glycine max
  unsure at all n locations
ctaagcttaatatgtctctaattaatttcctcaatagttaattatttataataaagaacatgaggactaaataataacggtaaactatgtttgcaatccttttactttaagtaaagtattagtttccttactttgatcaatttggtcttggaattttagaaaaaagaaaattgtttttgtccctcgttaaagttcaagaatcaagtttcgccaaaagtttagggactatntaagaggttagtttagataatgaaattttggaaagattgatgtgtggtaacacgtaattcggaaaaattaatttgacatacaatttttgtaatctataaataaattgtccgtagtgtggtgtttcgcttgttgttcataatcattttcaactaatatttgctatggacttaatattcacgactttgaaatantttagtaactgagtatcatttatag

SEQ ID NO: 27382 - DNA, 405 bp, Glycine max
  unsure at all n locations
agctttatgtttaatcaagattgattcaaggagtttcgatgataacaaagatgatgacaaaaaagctcaaaagtcataacaaagatgatgacattcaagaatgagttcaagattgagtcaagaacacttcaagaggaaatgtgatttcaagaatcaagtttcaagattcaagaatcaagaaaagactcaatcaagataagaattaaaaatatttttttcagaaactgagtagcacatgaatttttctcaaaaccttttaccaaagagtttttactctctggtaatcgattaccagattattgtaatcgattaccagtagcaaaatggttttcaaaaagctntcaactgaatttacaacgttccaattgatttcaaaatgttgtaatcgattacaatgatttggta

SEQ ID NO: 27383 - DNA, 120 bp, Glycine max
ctagttcactacttctagtagttcaagatatgcttctagaggatttctgttgccaaaaagttactctcaggccaagaagatactatgtccgatgggtatggagtattataagattcatgc

SEQ ID NO: 27384 - DNA, 394 bp, Glycine max
  unsure at all n locations
agcttgtangtatatagagatgaatgaagggagagagagagaagagcatgaaattttgtgctctaaaagagctctgaaatctgaagttaatattcaaatgatcaaagttgaaaaaaaatgcacacacatgacctctatttatagcctaagtgtcacacaaaattggagggaaatttgaatttcaattcaaatttcactttaatttgaaattgaatttgtggagccaaactttggagccaaaatttcactaattatgattagtgaattttagttatggttcagcctactaatccaagatcaattccaagattctccacttagtgtgcttacgtgtaatgaggcatgtaaagcatgaacgacatgcacatagtgtgactatatgatgtggcaatgg

SEQ ID NO: 27385 - DNA, 451 bp, Glycine max
  unsure at all n locations
tcttctgctcaacagtatatagccgttcatggctcctttccattctattaccctccaatgccttatgtgccaaatgctggaatccaagccaccattgctccttcagctccttctcaagccaacatagctactgctagttcagcaccttcaaacagatggaatccggattctagtgcatcccaccatgtcaccaatgtttctcaaaatatacagcaattaacaccttttgaagggtcagaccagataacacttggtaatggacagctccttgacattaactccacaggtctaacttcatttcaatctcctttaaaccctacgtttcctctaattcttagcaatttgctatatgttccttcaattactaaaattcttattagtgtgagttagttttgtaaggataatctagttaattntgaatttcatcctaccttctgttaggtgaaatcat

SEQ ID NO: 27386 - DNA, 393 bp, Glycine max
agctttgtatattgggtgaagcacgctaagatgtcggtgtgttgctatgacgaatggctccatcgccgcatgagtatttaacctatgaagaaatcaaaagtaattaatatacacttgagagagagggattagagattgaatttatctatatatgttgatatatagcaatgaaaatgaaaatgaaaatttataccaatggctcatgagttgatggtagcaagagtcatttacgatgacataagctttggctagtagccaaattgtgctctcaacaccttccttagcaggtaagacgacttgactgacggcagctgacagatccccagcagaatgtggcaaacttaattcgatggccactggctttaaagttccatcttctctcaataaaaggat

SEQ ID NO: 27387 - DNA, 453 bp, Glycine max
  unsure at all n locations
ttcaccaaagggttatcggaattgacggttacttcccgccaattactgngacacgctcaacaccatgaacaaaattgaaaagggggaaaaaataaacccaaaatcaaaatcgaagagagagagagagagagagagagagagagagagagaggtgaaagcgatagacgtaagagtgaaggaaggtaatggaagagagagataagagagagaggggttttgattgaaggtggaattgaaactgcagagaaagaaaagggtattaatttgttcttctaaaaaaaaaaaagttgcctttttaggaattaagattttctgcaactccttacccactgggccactatacattagaattgtacgggacgaacttcttatgctaagaaagtgacccttttgccctccgatttccctttttntccctcttttgcgtgctctatcttgtcagcaatatctttc

SEQ ID NO: 27388 - DNA, 384 bp, Glycine max
  unsure at all n locations
agcttgtgcttatcaaatcactcctacatttcatctctagcatgcattttctttctttaccccctcctcacatttggttttttagggaaaaacaccataactaaacgcgccgcaaggtatccctatcgcaccagatccaaatctagaacgatgggtgatcaagaggagacgcaggaacagaggaaagccgacatgtcggctctgaaagaacaaatggcctccatgatggaggccatgttaagtatgaagcagctcatagagaagaacgcggccaccgccgtcgctgtcagttcggctgccgaagcagacccgactctcttggcaactgcgcaccatcctccctcaaacacagtaggacggngaagggacacactgnggcacgat

SEQ ID NO: 27389 - DNA, 344 bp, Glycine max
ttatgggggtcatgacactagttttttctctggaaggaacacaggcccaacttcaaaattcacaagcacaaatactttcatttgcttcccgaatctgataccgtgcttttcgatgcctgaccaggacatatatgcaaaggatcccaggctagaaaagcctctaaaatctaatatagctacatatgagacatagaagcatatattatttagaaacatatcccttgtggaatctcctcttcttatagatgatcaccagaaagggaatgaactcaaatactattccaatttggagagaatagaaagagatttatgaaggcaatgatttataattgttattttgttta

SEQ ID NO: 27390 - DNA, 399 bp, Glycine max
agttttctaatggtatgcctaccccttcacctaataatatttgcaaactgaaacgctctttatatggattaaaacaggcaccaagagtatggtttgaaaagtttcgctcgacactacttgtttttgaattcactcaaagtcaggatgatacctctcttttcctacacaggactcctaaaggcatcatggagcttcttgtttatgtggatgacattgtggtcactggctcagatcaagatgctgtttctagaacaaaaaatcacctgcattcaacctttcagatgaaagacttaggccatctcacttatttcttgggtttagaggcgcattataatcaccaaggcatttctctatgtcaacacaagcatattcaaaactgggtccactagctggactccc

SEQ ID NO: 27391 - DNA, 440 bp, Glycine max
  unsure at all n locations
tcctgcgaatgcaaacatttggaaagtnatttttaccaagaaatgctactcttaacacgaaaatggcatacaacctcctccaataaacacgaacatcaatgtaaatttagagcaaactcatgcacatacttccttacgaacattcactcgcacaagatattcttctaactaagaaaaatgcacccacgcacaatcaaggcaccttcgttacctagatcacttatatgtacttccaaggtgtatttgctacctacatcacatgcatttccttcgctaaatttacatacatgcatactcaaagcactntggctaccaaaaattgcatacgtgcacattctggtatttctaatacctatacatacacaaacttcgngatgaatcttggctacctacacaataatgtgctacatttcatgccttattcaagtgtttctgctact

SEQ ID NO: 27392 - DNA, 382 bp, Glycine max
agcttgtttttgggcaatagcaccccacctgacgtccccaaggtctcctgacccccacgacatatctccaggtaccactctgtggtcaacaataaaagcaggaagtttcacccttcaacacttcctcatctcaagcttgtaagattatggggtacctatcacatgtggtactaggtggcggtcgggcgatggtgcacaacaagttttccacatccacaatgcgcgcataaacccaccatcccctgttgcccacctccaactgagctcacgtactcccacgtagcccatatcctcgtttatctcaagaccgggtccccatcaatcctcccaagcttccacaacatccaagcgaaacaacattcaaacagcacaagctatcaca

SEQ ID NO: 27393 - DNA, 441 bp, Glycine max
  unsure at all n locations
agacttgtgtaatcaattacgaataacctggtaattgattatttctagagttntatgcactgaatatgtttctaactttagaaacaatcttcctacctctacatgatgatacatgatgtacatatggatagataaagactaagatgcaacaatcaatacaaatgtcactcaaagagttaggcttgtaaaaagacaaaactcttcaaacttcaaagcttaatcttcatgtttctccccatatctttaacatatttcggtcccgctgtagcaatgaatgcattcttctaataaacaagccatgaatatgacaccaaaagtgtggccgctgaaatgacatgaatgagataaacaagtaatactaaaaatatattctattttctccacttagatcagatcctgtnttggattgaaaatgtaagcacacatttggatctcctcaat
